United States Patent Application Publication US 2025/0333448 A1 - sequence listing, part 2

SEQ ID NO: 23819 - protein, 10 aa, Artificial Sequence
  Description of Artificial Sequence: Synthetic peptide
  Seed: THIMIWHSNL
TRIMIWHSNM

SEQ ID NO: 23820 - protein, 10 aa, Artificial Sequence
  Description of Artificial Sequence: Synthetic peptide
  Seed: THIMIWHSNL
THIMIWHSNI

SEQ ID NO: 23821 - protein, 10 aa, Artificial Sequence
  Description of Artificial Sequence: Synthetic peptide
  Seed: THIMIWHSNL
THIMIWHSNM

SEQ ID NO: 23822 - protein, 10 aa, Artificial Sequence
  Description of Artificial Sequence: Synthetic peptide
  Seed: THIMIWHSNL
THIMIWHSNV

SEQ ID NO: 23823 - protein, 10 aa, Artificial Sequence
  Description of Artificial Sequence: Synthetic peptide
  Seed: THLMIWHSNL
TALMIWHSNA

SEQ ID NO: 23824 - protein, 10 aa, Artificial Sequence
  Description of Artificial Sequence: Synthetic peptide
  Seed: THLMIWHSNL
TELMIWHSNI

SEQ ID NO: 23825 - protein, 10 aa, Artificial Sequence
  Description of Artificial Sequence: Synthetic peptide
  Seed: THLMIWHSNL
TELMIWHSNV

SEQ ID NO: 23826 - protein, 10 aa, Artificial Sequence
  Description of Artificial Sequence: Synthetic peptide
  Seed: TGMDPRMCSL
TTMDPRMCSI

SEQ ID NO: 23827 - protein, 10 aa, Artificial Sequence
  Description of Artificial Sequence: Synthetic peptide
  Seed: THLMIWHSNL
TPLMIWHSNL

SEQ ID NO: 23828 - protein, 10 aa, Artificial Sequence
  Description of Artificial Sequence: Synthetic peptide
  Seed: THLMIWHSNL
TMLMIWHSNM

SEQ ID NO: 23829 - protein, 10 aa, Artificial Sequence
  Description of Artificial Sequence: Synthetic peptide
  Seed: THLMIWHSNL
TMLMIWHSNV

SEQ ID NO: 23830 - protein, 10 aa, Artificial Sequence
  Description of Artificial Sequence: Synthetic peptide
  Seed: THLMIWHSNL
TFLMIWHSNA

SEQ ID NO: 23831 - protein, 10 aa, Artificial Sequence
  Description of Artificial Sequence: Synthetic peptide
  Seed: THLMIWHSNL
TFLMIWHSNI

SEQ ID NO: 23832 - protein, 10 aa, Artificial Sequence
  Description of Artificial Sequence: Synthetic peptide
  Seed: THLMIWHSNL
TFLMIWHSNL

SEQ ID NO: 23833 - protein, 10 aa, Artificial Sequence
  Description of Artificial Sequence: Synthetic peptide
  Seed: THLMIWHSNL
TFLMIWHSNM

SEQ ID NO: 23834 - protein, 10 aa, Artificial Sequence
  Description of Artificial Sequence: Synthetic peptide
  Seed: THLMIWHSNL
TFLMIWHSNV

SEQ ID NO: 23835 - protein, 10 aa, Artificial Sequence
  Description of Artificial Sequence: Synthetic peptide
  Seed: THLMIWHSNL
TPLMIWHSNA

SEQ ID NO: 23836 - protein, 10 aa, Artificial Sequence
  Description of Artificial Sequence: Synthetic peptide
  Seed: THLMIWHSNL
TPLMIWHSNI

SEQ ID NO: 23837 - protein, 10 aa, Artificial Sequence
  Description of Artificial Sequence: Synthetic peptide
  Seed: THLMIWHSNL
TPLMIWHSNV

SEQ ID NO: 23838 - protein, 10 aa, Artificial Sequence
  Description of Artificial Sequence: Synthetic peptide
  Seed: THLMIWHSNL
TGLMIWHSNA

SEQ ID NO: 23839 - protein, 10 aa, Artificial Sequence
  Description of Artificial Sequence: Synthetic peptide
  Seed: THLMIWHSNL
TSLMIWHSNA

SEQ ID NO: 23840 - protein, 10 aa, Artificial Sequence
  Description of Artificial Sequence: Synthetic peptide
  Seed: THLMIWHSNL
TSLMIWHSNI

SEQ ID NO: 23841 - protein, 10 aa, Artificial Sequence
  Description of Artificial Sequence: Synthetic peptide
  Seed: THLMIWHSNL
TSLMIWHSNL

SEQ ID NO: 23842 - protein, 10 aa, Artificial Sequence
  Description of Artificial Sequence: Synthetic peptide
  Seed: THLMIWHSNL
TSLMIWHSNV

SEQ ID NO: 23843 - protein, 10 aa, Artificial Sequence
  Description of Artificial Sequence: Synthetic peptide
  Seed: THLMIWHSNL
TTLMIWHSNA

SEQ ID NO: 23844 - protein, 10 aa, Artificial Sequence
  Description of Artificial Sequence: Synthetic peptide
  Seed: THLMIWHSNL
TTLMIWHSNI

SEQ ID NO: 23845 - protein, 10 aa, Artificial Sequence
  Description of Artificial Sequence: Synthetic peptide
  Seed: THLMIWHSNL
TTLMIWHSNL

SEQ ID NO: 23846 - protein, 10 aa, Artificial Sequence
  Description of Artificial Sequence: Synthetic peptide
  Seed: THLMIWHSNL
TTLMIWHSNV

SEQ ID NO: 23847 - protein, 10 aa, Artificial Sequence
  Description of Artificial Sequence: Synthetic peptide
  Seed: THLMIWHSNL
TWLMIWHSNA

SEQ ID NO: 23848 - protein, 10 aa, Artificial Sequence
  Description of Artificial Sequence: Synthetic peptide
  Seed: THLMIWHSNL
TMLMIWHSNL

SEQ ID NO: 23849 - protein, 10 aa, Artificial Sequence
  Description of Artificial Sequence: Synthetic peptide
  Seed: THLMIWHSNL
TMLMIWHSNI

SEQ ID NO: 23850 - protein, 10 aa, Artificial Sequence
  Description of Artificial Sequence: Synthetic peptide
  Seed: THLMIWHSNL
TMLMIWHSNA

SEQ ID NO: 23851 - protein, 10 aa, Artificial Sequence
  Description of Artificial Sequence: Synthetic peptide
  Seed: THLMIWHSNL
TKLMIWHSNV

SEQ ID NO: 23852 - protein, 10 aa, Artificial Sequence
  Description of Artificial Sequence: Synthetic peptide
  Seed: THLMIWHSNL
TGLMIWHSNI

SEQ ID NO: 23853 - protein, 10 aa, Artificial Sequence
  Description of Artificial Sequence: Synthetic peptide
  Seed: THLMIWHSNL
TGLMIWHSNL

SEQ ID NO: 23854 - protein, 10 aa, Artificial Sequence
  Description of Artificial Sequence: Synthetic peptide
  Seed: THLMIWHSNL
TGLMIWHSNV

SEQ ID NO: 23855 - protein, 10 aa, Artificial Sequence
  Description of Artificial Sequence: Synthetic peptide
  Seed: THLMIWHSNL
THLMIWHSNA

SEQ ID NO: 23856 - protein, 10 aa, Artificial Sequence
  Description of Artificial Sequence: Synthetic peptide
  Seed: THLMIWHSNL
THLMIWHSNI

SEQ ID NO: 23857 - protein, 10 aa, Artificial Sequence
  Description of Artificial Sequence: Synthetic peptide
  Seed: THLMIWHSNL
THLMIWHSNM

SEQ ID NO: 23858 - protein, 10 aa, Artificial Sequence
  Description of Artificial Sequence: Synthetic peptide
  Seed: THLMIWHSNL
THLMIWHSNV

SEQ ID NO: 23859 - protein, 10 aa, Artificial Sequence
  Description of Artificial Sequence: Synthetic peptide
  Seed: THLMIWHSNL
TILMIWHSNA

SEQ ID NO: 23860 - protein, 10 aa, Artificial Sequence
  Description of Artificial Sequence: Synthetic peptide
  Seed: THLMIWHSNL
TILMIWHSNI

SEQ ID NO: 23861 - protein, 10 aa, Artificial Sequence
  Description of Artificial Sequence: Synthetic peptide
  Seed: THLMIWHSNL
TILMIWHSNL

SEQ ID NO: 23862 - protein, 10 aa, Artificial Sequence
  Description of Artificial Sequence: Synthetic peptide
  Seed: THLMIWHSNL
TILMIWHSNV

SEQ ID NO: 23863 - protein, 10 aa, Artificial Sequence
  Description of Artificial Sequence: Synthetic peptide
  Seed: THLMIWHSNL
TLLMIWHSNA

SEQ ID NO: 23864 - protein, 10 aa, Artificial Sequence
  Description of Artificial Sequence: Synthetic peptide
  Seed: THLMIWHSNL
TLLMIWHSNI

SEQ ID NO: 23865 - protein, 10 aa, Artificial Sequence
  Description of Artificial Sequence: Synthetic peptide
  Seed: THLMIWHSNL
TLLMIWHSNL

SEQ ID NO: 23866 - protein, 10 aa, Artificial Sequence
  Description of Artificial Sequence: Synthetic peptide
  Seed: THLMIWHSNL
TLLMIWHSNM

SEQ ID NO: 23867 - protein, 10 aa, Artificial Sequence
  Description of Artificial Sequence: Synthetic peptide
  Seed: THLMIWHSNL
TLLMIWHSNV

SEQ ID NO: 23868 - protein, 10 aa, Artificial Sequence
  Description of Artificial Sequence: Synthetic peptide
  Seed: THLMIWHSNL
TKLMIWHSNA

SEQ ID NO: 23869 - protein, 10 aa, Artificial Sequence
  Description of Artificial Sequence: Synthetic peptide
  Seed: THLMIWHSNL
TKLMIWHSNI

SEQ ID NO: 23870 - protein, 10 aa, Artificial Sequence
  Description of Artificial Sequence: Synthetic peptide
  Seed: THLMIWHSNL
TKLMIWHSNL

SEQ ID NO: 23871 - protein, 10 aa, Artificial Sequence
  Description of Artificial Sequence: Synthetic peptide
  Seed: TGMDPRMCSL
TTMDPRMCSL

SEQ ID NO: 23872 - protein, 10 aa, Artificial Sequence
  Description of Artificial Sequence: Synthetic peptide
  Seed: TGMDPRMCSL
TSMDPRMCSV

SEQ ID NO: 23873 - protein, 11 aa, Artificial Sequence
  Description of Artificial Sequence: Synthetic peptide
  Seed: SVQPTFSVQRN
SMQPTFSVQRV

SEQ ID NO: 23874 - protein, 10 aa, Artificial Sequence
  Description of Artificial Sequence: Synthetic peptide
  Seed: TGMDPRMCSL
TNMDPRMCSL

SEQ ID NO: 23875 - protein, 10 aa, Artificial Sequence
  Description of Artificial Sequence: Synthetic peptide
  Seed: TGMDPRMCSL
TAMDPRMCSI

SEQ ID NO: 23876 - protein, 10 aa, Artificial Sequence
  Description of Artificial Sequence: Synthetic peptide
  Seed: TGMDPRMCSL
TAMDPRMCSL

SEQ ID NO: 23877 - protein, 10 aa, Artificial Sequence
  Description of Artificial Sequence: Synthetic peptide
  Seed: TGMDPRMCSL
TAMDPRMCSM

SEQ ID NO: 23878 - protein, 10 aa, Artificial Sequence
  Description of Artificial Sequence: Synthetic peptide
  Seed: TGMDPRMCSL
TAMDPRMCSV

SEQ ID NO: 23879 - protein, 10 aa, Artificial Sequence
  Description of Artificial Sequence: Synthetic peptide
  Seed: TGMDPRMCSL
TRMDPRMCSI

SEQ ID NO: 23880 - protein, 10 aa, Artificial Sequence
  Description of Artificial Sequence: Synthetic peptide
  Seed: TGMDPRMCSL
TRMDPRMCSL

SEQ ID NO: 23881 - protein, 10 aa, Artificial Sequence
  Description of Artificial Sequence: Synthetic peptide
  Seed: TGMDPRMCSL
TRMDPRMCSM

SEQ ID NO: 23882 - protein, 10 aa, Artificial Sequence
  Description of Artificial Sequence: Synthetic peptide
  Seed: TGMDPRMCSL
TRMDPRMCSV

SEQ ID NO: 23883 - protein, 10 aa, Artificial Sequence
  Description of Artificial Sequence: Synthetic peptide
  Seed: TGMDPRMCSL
TNMDPRMCSI

SEQ ID NO: 23884 - protein, 10 aa, Artificial Sequence
  Description of Artificial Sequence: Synthetic peptide
  Seed: TGMDPRMCSL
TNMDPRMCSV

SEQ ID NO: 23885 - protein, 10 aa, Artificial Sequence
  Description of Artificial Sequence: Synthetic peptide
  Seed: TGMDPRMCSL
TQMDPRMCSV

SEQ ID NO: 23886 - protein, 10 aa, Artificial Sequence
  Description of Artificial Sequence: Synthetic peptide
  Seed: TGMDPRMCSL
TDMDPRMCSI

SEQ ID NO: 23887 - protein, 10 aa, Artificial Sequence
  Description of Artificial Sequence: Synthetic peptide
  Seed: TGMDPRMCSL
TDMDPRMCSL

SEQ ID NO: 23888 - protein, 10 aa, Artificial Sequence
  Description of Artificial Sequence: Synthetic peptide
  Seed: TGMDPRMCSL
TDMDPRMCSV

SEQ ID NO: 23889 - protein, 10 aa, Artificial Sequence
  Description of Artificial Sequence: Synthetic peptide
  Seed: TGMDPRMCSL
TCMDPRMCSI

SEQ ID NO: 23890 - protein, 10 aa, Artificial Sequence
  Description of Artificial Sequence: Synthetic peptide
  Seed: TGMDPRMCSL
TCMDPRMCSL

SEQ ID NO: 23891 - protein, 10 aa, Artificial Sequence
  Description of Artificial Sequence: Synthetic peptide
  Seed: TGMDPRMCSL
TCMDPRMCSV

SEQ ID NO: 23892 - protein, 10 aa, Artificial Sequence
  Description of Artificial Sequence: Synthetic peptide
  Seed: TGMDPRMCSL
TQMDPRMCSA

SEQ ID NO: 23893 - protein, 10 aa, Artificial Sequence
  Description of Artificial Sequence: Synthetic peptide
  Seed: TGMDPRMCSL
TQMDPRMCSI

SEQ ID NO: 23894 - protein, 10 aa, Artificial Sequence
  Description of Artificial Sequence: Synthetic peptide
  Seed: TGMDPRMCSL
TQMDPRMCSL

SEQ ID NO: 23895 - protein, 10 aa, Artificial Sequence
  Description of Artificial Sequence: Synthetic peptide
  Seed: TFSVQRNLPF
TVSVQRNLPY

SEQ ID NO: 23896 - protein, 10 aa, Artificial Sequence
  Description of Artificial Sequence: Synthetic peptide
  Seed: TFSVQRNLPF
TVSVQRNLPW

SEQ ID NO: 23897 - protein, 10 aa, Artificial Sequence
  Description of Artificial Sequence: Synthetic peptide
  Seed: TFSVQRNLPF
TVSVQRNLPF

SEQ ID NO: 23898 - protein, 10 aa, Artificial Sequence
  Description of Artificial Sequence: Synthetic peptide
  Seed: TFSVQRNLPF
TYSVQRNLPY

SEQ ID NO: 23899 - protein, 10 aa, Artificial Sequence
  Description of Artificial Sequence: Synthetic peptide
  Seed: TFSVQRNLPF
TPSVQRNLPF

SEQ ID NO: 23900 - protein, 10 aa, Artificial Sequence
  Description of Artificial Sequence: Synthetic peptide
  Seed: TFSVQRNLPF
TPSVQRNLPW

SEQ ID NO: 23901 - protein, 10 aa, Artificial Sequence
  Description of Artificial Sequence: Synthetic peptide
  Seed: TFSVQRNLPF
TPSVQRNLPY

SEQ ID NO: 23902 - protein, 10 aa, Artificial Sequence
  Description of Artificial Sequence: Synthetic peptide
  Seed: TFSVQRNLPF
TSSVQRNLPM

SEQ ID NO: 23903 - protein, 10 aa, Artificial Sequence
  Description of Artificial Sequence: Synthetic peptide
  Seed: TFSVQRNLPF
TSSVQRNLPF

SEQ ID NO: 23904 - protein, 10 aa, Artificial Sequence
  Description of Artificial Sequence: Synthetic peptide
  Seed: TFSVQRNLPF
TSSVQRNLPW

SEQ ID NO: 23905 - protein, 10 aa, Artificial Sequence
  Description of Artificial Sequence: Synthetic peptide
  Seed: TFSVQRNLPF
TSSVQRNLPY

SEQ ID NO: 23906 - protein, 10 aa, Artificial Sequence
  Description of Artificial Sequence: Synthetic peptide
  Seed: TFSVQRNLPF
TTSVQRNLPM

SEQ ID NO: 23907 - protein, 10 aa, Artificial Sequence
  Description of Artificial Sequence: Synthetic peptide
  Seed: TFSVQRNLPF
TTSVQRNLPF

SEQ ID NO: 23908 - protein, 10 aa, Artificial Sequence
  Description of Artificial Sequence: Synthetic peptide
  Seed: TFSVQRNLPF
TTSVQRNLPW

SEQ ID NO: 23909 - protein, 10 aa, Artificial Sequence
  Description of Artificial Sequence: Synthetic peptide
  Seed: TFSVQRNLPF
TTSVQRNLPY

SEQ ID NO: 23910 - protein, 10 aa, Artificial Sequence
  Description of Artificial Sequence: Synthetic peptide
  Seed: TFSVQRNLPF
TWSVQRNLPF

SEQ ID NO: 23911 - protein, 10 aa, Artificial Sequence
  Description of Artificial Sequence: Synthetic peptide
  Seed: TFSVQRNLPF
TWSVQRNLPW

SEQ ID NO: 23912 - protein, 10 aa, Artificial Sequence
  Description of Artificial Sequence: Synthetic peptide
  Seed: TFSVQRNLPF
TWSVQRNLPY

SEQ ID NO: 23913 - protein, 10 aa, Artificial Sequence
  Description of Artificial Sequence: Synthetic peptide
  Seed: TFSVQRNLPF
TYSVQRNLPI

SEQ ID NO: 23914 - protein, 10 aa, Artificial Sequence
  Description of Artificial Sequence: Synthetic peptide
  Seed: TFSVQRNLPF
TYSVQRNLPL

SEQ ID NO: 23915 - protein, 10 aa, Artificial Sequence
  Description of Artificial Sequence: Synthetic peptide
  Seed: TFSVQRNLPF
TYSVQRNLPM

SEQ ID NO: 23916 - protein, 10 aa, Artificial Sequence
  Description of Artificial Sequence: Synthetic peptide
  Seed: TFSVQRNLPF
TYSVQRNLPF

SEQ ID NO: 23917 - protein, 10 aa, Artificial Sequence
  Description of Artificial Sequence: Synthetic peptide
  Seed: TFSVQRNLPF
TYSVQRNLPW

SEQ ID NO: 23918 - protein, 10 aa, Artificial Sequence
  Description of Artificial Sequence: Synthetic peptide
  Seed: TGMDPRMCSL
TQMDPRMCSM

SEQ ID NO: 23919 - protein, 10 aa, Artificial Sequence
  Description of Artificial Sequence: Synthetic peptide
  Seed: TGMDPRMCSL
TEMDPRMCSI

SEQ ID NO: 23920 - protein, 10 aa, Artificial Sequence
  Description of Artificial Sequence: Synthetic peptide
  Seed: TGMDPRMCSL
TSMDPRMCSL

SEQ ID NO: 23921 - protein, 10 aa, Artificial Sequence
  Description of Artificial Sequence: Synthetic peptide
  Seed: TGMDPRMCSL
TFMDPRMCSA

SEQ ID NO: 23922 - protein, 10 aa, Artificial Sequence
  Description of Artificial Sequence: Synthetic peptide
  Seed: TGMDPRMCSL
TMMDPRMCSA

SEQ ID NO: 23923 - protein, 10 aa, Artificial Sequence
  Description of Artificial Sequence: Synthetic peptide
  Seed: TGMDPRMCSL
TMMDPRMCSC

SEQ ID NO: 23924 - protein, 10 aa, Artificial Sequence
  Description of Artificial Sequence: Synthetic peptide
  Seed: TGMDPRMCSL
TMMDPRMCSI

SEQ ID NO: 23925 - protein, 10 aa, Artificial Sequence
  Description of Artificial Sequence: Synthetic peptide
  Seed: TGMDPRMCSL
TMMDPRMCSM

SEQ ID NO: 23926 - protein, 10 aa, Artificial Sequence
  Description of Artificial Sequence: Synthetic peptide
  Seed: TGMDPRMCSL
TMMDPRMCSF

SEQ ID NO: 23927 - protein, 10 aa, Artificial Sequence
  Description of Artificial Sequence: Synthetic peptide
  Seed: TGMDPRMCSL
TMMDPRMCSS

SEQ ID NO: 23928 - protein, 10 aa, Artificial Sequence
  Description of Artificial Sequence: Synthetic peptide
  Seed: TGMDPRMCSL
TMMDPRMCST

SEQ ID NO: 23929 - protein, 10 aa, Artificial Sequence
  Description of Artificial Sequence: Synthetic peptide
  Seed: TGMDPRMCSL
TMMDPRMCSV

SEQ ID NO: 23930 - protein, 10 aa, Artificial Sequence
  Description of Artificial Sequence: Synthetic peptide
  Seed: TGMDPRMCSL
TFMDPRMCSI

SEQ ID NO: 23931 - protein, 10 aa, Artificial Sequence
  Description of Artificial Sequence: Synthetic peptide
  Seed: TGMDPRMCSL
TEMDPRMCSL

SEQ ID NO: 23932 - protein, 10 aa, Artificial Sequence
  Description of Artificial Sequence: Synthetic peptide
  Seed: TGMDPRMCSL
TFMDPRMCSL

SEQ ID NO: 23933 - protein, 10 aa, Artificial Sequence
  Description of Artificial Sequence: Synthetic peptide
  Seed: TGMDPRMCSL
TFMDPRMCSM

SEQ ID NO: 23934 - protein, 10 aa, Artificial Sequence
  Description of Artificial Sequence: Synthetic peptide
  Seed: TGMDPRMCSL
TFMDPRMCSV

SEQ ID NO: 23935 - protein, 10 aa, Artificial Sequence
  Description of Artificial Sequence: Synthetic peptide
  Seed: TGMDPRMCSL
TPMDPRMCSI

SEQ ID NO: 23936 - protein, 10 aa, Artificial Sequence
  Description of Artificial Sequence: Synthetic peptide
  Seed: TGMDPRMCSL
TPMDPRMCSL

SEQ ID NO: 23937 - protein, 10 aa, Artificial Sequence
  Description of Artificial Sequence: Synthetic peptide
  Seed: TGMDPRMCSL
TPMDPRMCSM

SEQ ID NO: 23938 - protein, 10 aa, Artificial Sequence
  Description of Artificial Sequence: Synthetic peptide
  Seed: TGMDPRMCSL
TPMDPRMCSF

SEQ ID NO: 23939 - protein, 10 aa, Artificial Sequence
  Description of Artificial Sequence: Synthetic peptide
  Seed: TGMDPRMCSL
TPMDPRMCSV

SEQ ID NO: 23940 - protein, 10 aa, Artificial Sequence
  Description of Artificial Sequence: Synthetic peptide
  Seed: TGMDPRMCSL
TSMDPRMCSI

SEQ ID NO: 23941 - protein, 10 aa, Artificial Sequence
  Description of Artificial Sequence: Synthetic peptide
  Seed: TGMDPRMCSL
TKMDPRMCSV

SEQ ID NO: 23942 - protein, 10 aa, Artificial Sequence
  Description of Artificial Sequence: Synthetic peptide
  Seed: TGMDPRMCSL
TKMDPRMCSL

SEQ ID NO: 23943 - protein, 10 aa, Artificial Sequence
  Description of Artificial Sequence: Synthetic peptide
  Seed: TGMDPRMCSL
TKMDPRMCSI

SEQ ID NO: 23944 - protein, 10 aa, Artificial Sequence
  Description of Artificial Sequence: Synthetic peptide
  Seed: TGMDPRMCSL
TLMDPRMCSV

SEQ ID NO: 23945 - protein, 10 aa, Artificial Sequence
  Description of Artificial Sequence: Synthetic peptide
  Seed: TGMDPRMCSL
TEMDPRMCSV

SEQ ID NO: 23946 - protein, 10 aa, Artificial Sequence
  Description of Artificial Sequence: Synthetic peptide
  Seed: TGMDPRMCSL
TGMDPRMCSI

SEQ ID NO: 23947 - protein, 10 aa, Artificial Sequence
  Description of Artificial Sequence: Synthetic peptide
  Seed: TGMDPRMCSL
TGMDPRMCSV

SEQ ID NO: 23948 - protein, 10 aa, Artificial Sequence
  Description of Artificial Sequence: Synthetic peptide
  Seed: TGMDPRMCSL
THMDPRMCSI

SEQ ID NO: 23949 - protein, 10 aa, Artificial Sequence
  Description of Artificial Sequence: Synthetic peptide
  Seed: TGMDPRMCSL
THMDPRMCSL

SEQ ID NO: 23950 - protein, 10 aa, Artificial Sequence
  Description of Artificial Sequence: Synthetic peptide
  Seed: TGMDPRMCSL
THMDPRMCSV

SEQ ID NO: 23951 - protein, 10 aa, Artificial Sequence
  Description of Artificial Sequence: Synthetic peptide
  Seed: TGMDPRMCSL
TIMDPRMCSA

SEQ ID NO: 23952 - protein, 10 aa, Artificial Sequence
  Description of Artificial Sequence: Synthetic peptide
  Seed: TGMDPRMCSL
TIMDPRMCSI

SEQ ID NO: 23953 - protein, 10 aa, Artificial Sequence
  Description of Artificial Sequence: Synthetic peptide
  Seed: TGMDPRMCSL
TIMDPRMCSL

SEQ ID NO: 23954 - protein, 10 aa, Artificial Sequence
  Description of Artificial Sequence: Synthetic peptide
  Seed: TGMDPRMCSL
TIMDPRMCSM

SEQ ID NO: 23955 - protein, 10 aa, Artificial Sequence
  Description of Artificial Sequence: Synthetic peptide
  Seed: TGMDPRMCSL
TIMDPRMCSV

SEQ ID NO: 23956 - protein, 10 aa, Artificial Sequence
  Description of Artificial Sequence: Synthetic peptide
  Seed: TGMDPRMCSL
TLMDPRMCSA

SEQ ID NO: 23957 - protein, 10 aa, Artificial Sequence
  Description of Artificial Sequence: Synthetic peptide
  Seed: TGMDPRMCSL
TLMDPRMCSC

SEQ ID NO: 23958 - protein, 10 aa, Artificial Sequence
  Description of Artificial Sequence: Synthetic peptide
  Seed: TGMDPRMCSL
TLMDPRMCSI

SEQ ID NO: 23959 - protein, 10 aa, Artificial Sequence
  Description of Artificial Sequence: Synthetic peptide
  Seed: TGMDPRMCSL
TLMDPRMCSL

SEQ ID NO: 23960 - protein, 10 aa, Artificial Sequence
  Description of Artificial Sequence: Synthetic peptide
  Seed: TGMDPRMCSL
TLMDPRMCSM

SEQ ID NO: 23961 - protein, 10 aa, Artificial Sequence
  Description of Artificial Sequence: Synthetic peptide
  Seed: TGMDPRMCSL
TLMDPRMCSF

SEQ ID NO: 23962 - protein, 10 aa, Artificial Sequence
  Description of Artificial Sequence: Synthetic peptide
  Seed: TGMDPRMCSL
TLMDPRMCSS

SEQ ID NO: 23963 - protein, 10 aa, Artificial Sequence
  Description of Artificial Sequence: Synthetic peptide
  Seed: TGMDPRMCSL
TLMDPRMCST

SEQ ID NO: 23964 - protein, 10 aa, Artificial Sequence
  Description of Artificial Sequence: Synthetic peptide
  Seed: THLMIWHSNL
TWLMIWHSNI

SEQ ID NO: 23965 - protein, 10 aa, Artificial Sequence
  Description of Artificial Sequence: Synthetic peptide
  Seed: THLMIWHSNL
TWLMIWHSNL

SEQ ID NO: 23966 - protein, 10 aa, Artificial Sequence
  Description of Artificial Sequence: Synthetic peptide
  Seed: THLMIWHSNL
TWLMIWHSNV

SEQ ID NO: 23967 - protein, 10 aa, Artificial Sequence
  Description of Artificial Sequence: Synthetic peptide
  Seed: TIERMVLSAF
TCERMVLSAF

SEQ ID NO: 23968 - protein, 10 aa, Artificial Sequence
  Description of Artificial Sequence: Synthetic peptide
  Seed: TIERMVLSAF
TDERMVLSAL

SEQ ID NO: 23969 - protein, 10 aa, Artificial Sequence
  Description of Artificial Sequence: Synthetic peptide
  Seed: TIERMVLSAF
TDERMVLSAM

SEQ ID NO: 23970 - protein, 10 aa, Artificial Sequence
  Description of Artificial Sequence: Synthetic peptide
  Seed: TIERMVLSAF
TDERMVLSAF

SEQ ID NO: 23971 - protein, 10 aa, Artificial Sequence
  Description of Artificial Sequence: Synthetic peptide
  Seed: TIERMVLSAF
TDERMVLSAY

SEQ ID NO: 23972 - protein, 10 aa, Artificial Sequence
  Description of Artificial Sequence: Synthetic peptide
  Seed: TIERMVLSAF
TDERMVLSAV

SEQ ID NO: 23973 - protein, 10 aa, Artificial Sequence
  Description of Artificial Sequence: Synthetic peptide
  Seed: TIERMVLSAF
TCERMVLSAA

SEQ ID NO: 23974 - protein, 10 aa, Artificial Sequence
  Description of Artificial Sequence: Synthetic peptide
  Seed: TIERMVLSAF
TCERMVLSAI

SEQ ID NO: 23975 - protein, 10 aa, Artificial Sequence
  Description of Artificial Sequence: Synthetic peptide
  Seed: TIERMVLSAF
TCERMVLSAL

SEQ ID NO: 23976 - protein, 10 aa, Artificial Sequence
  Description of Artificial Sequence: Synthetic peptide
  Seed: TIERMVLSAF
TCERMVLSAM

SEQ ID NO: 23977 - protein, 10 aa, Artificial Sequence
  Description of Artificial Sequence: Synthetic peptide
  Seed: TIERMVLSAF
TCERMVLSAY

SEQ ID NO: 23978 - protein, 10 aa, Artificial Sequence
  Description of Artificial Sequence: Synthetic peptide
  Seed: TIERMVLSAF
TEERMVLSAI

SEQ ID NO: 23979 - protein, 10 aa, Artificial Sequence
  Description of Artificial Sequence: Synthetic peptide
  Seed: TIERMVLSAF
TCERMVLSAV

SEQ ID NO: 23980 - protein, 10 aa, Artificial Sequence
  Description of Artificial Sequence: Synthetic peptide
  Seed: TIERMVLSAF
TQERMVLSAA

SEQ ID NO: 23981 - protein, 10 aa, Artificial Sequence
  Description of Artificial Sequence: Synthetic peptide
  Seed: TIERMVLSAF
TQERMVLSAI

SEQ ID NO: 23982 - protein, 10 aa, Artificial Sequence
  Description of Artificial Sequence: Synthetic peptide
  Seed: TIERMVLSAF
TQERMVLSAL

SEQ ID NO: 23983 - protein, 10 aa, Artificial Sequence
  Description of Artificial Sequence: Synthetic peptide
  Seed: TIERMVLSAF
TQERMVLSAM

SEQ ID NO: 23984 - protein, 10 aa, Artificial Sequence
  Description of Artificial Sequence: Synthetic peptide
  Seed: TIERMVLSAF
TQERMVLSAF

SEQ ID NO: 23985 - protein, 10 aa, Artificial Sequence
  Description of Artificial Sequence: Synthetic peptide
  Seed: TIERMVLSAF
TQERMVLSAW

SEQ ID NO: 23986 - protein, 10 aa, Artificial Sequence
  Description of Artificial Sequence: Synthetic peptide
  Seed: TIERMVLSAF
TQERMVLSAY

SEQ ID NO: 23987 - protein, 10 aa, Artificial Sequence
  Description of Artificial Sequence: Synthetic peptide
  Seed: TIERMVLSAF
TQERMVLSAV

SEQ ID NO: 23988 - protein, 10 aa, Artificial Sequence
  Description of Artificial Sequence: Synthetic peptide
  Seed: TIERMVLSAF
TDERMVLSAI

SEQ ID NO: 23989 - protein, 10 aa, Artificial Sequence
  Description of Artificial Sequence: Synthetic peptide
  Seed: TIERMVLSAF
TDERMVLSAA

SEQ ID NO: 23990 - protein, 10 aa, Artificial Sequence
  Description of Artificial Sequence: Synthetic peptide
  Seed: TIERMVLSAF
TNERMVLSAV

SEQ ID NO: 23991 - protein, 10 aa, Artificial Sequence
  Description of Artificial Sequence: Synthetic peptide
  Seed: TIERMVLSAF
TNERMVLSAY

SEQ ID NO: 23992 - protein, 10 aa, Artificial Sequence
  Description of Artificial Sequence: Synthetic peptide
  Seed: TIERMVLSAF
TAERMVLSAA

SEQ ID NO: 23993 - protein, 10 aa, Artificial Sequence
  Description of Artificial Sequence: Synthetic peptide
  Seed: TIERMVLSAF
TAERMVLSAI

SEQ ID NO: 23994 - protein, 10 aa, Artificial Sequence
  Description of Artificial Sequence: Synthetic peptide
  Seed: TIERMVLSAF
TAERMVLSAL

SEQ ID NO: 23995 - protein, 10 aa, Artificial Sequence
  Description of Artificial Sequence: Synthetic peptide
  Seed: TIERMVLSAF
TAERMVLSAM

SEQ ID NO: 23996 - protein, 10 aa, Artificial Sequence
  Description of Artificial Sequence: Synthetic peptide
  Seed: TIERMVLSAF
TAERMVLSAF

SEQ ID NO: 23997 - protein, 10 aa, Artificial Sequence
  Description of Artificial Sequence: Synthetic peptide
  Seed: TIERMVLSAF
TAERMVLSAY

SEQ ID NO: 23998 - protein, 10 aa, Artificial Sequence
  Description of Artificial Sequence: Synthetic peptide
  Seed: TIERMVLSAF
TAERMVLSAV

SEQ ID NO: 23999 - protein, 10 aa, Artificial Sequence
  Description of Artificial Sequence: Synthetic peptide
  Seed: TIERMVLSAF
TRERMVLSAA

SEQ ID NO: 24000 - protein, 10 aa, Artificial Sequence
  Description of Artificial Sequence: Synthetic peptide
  Seed: TIERMVLSAF
TRERMVLSAI

SEQ ID NO: 24001 - protein, 10 aa, Artificial Sequence
  Description of Artificial Sequence: Synthetic peptide
  Seed: TIERMVLSAF
TRERMVLSAL

SEQ ID NO: 24002 - protein, 10 aa, Artificial Sequence
  Description of Artificial Sequence: Synthetic peptide
  Seed: TIERMVLSAF
TRERMVLSAM

SEQ ID NO: 24003 - protein, 10 aa, Artificial Sequence
  Description of Artificial Sequence: Synthetic peptide
  Seed: TIERMVLSAF
TRERMVLSAF

SEQ ID NO: 24004 - protein, 10 aa, Artificial Sequence
  Description of Artificial Sequence: Synthetic peptide
  Seed: TIERMVLSAF
TRERMVLSAY

SEQ ID NO: 24005 - protein, 10 aa, Artificial Sequence
  Description of Artificial Sequence: Synthetic peptide
  Seed: TIERMVLSAF
TRERMVLSAV

SEQ ID NO: 24006 - protein, 10 aa, Artificial Sequence
  Description of Artificial Sequence: Synthetic peptide
  Seed: TIERMVLSAF
TNERMVLSAA

SEQ ID NO: 24007 - protein, 10 aa, Artificial Sequence
  Description of Artificial Sequence: Synthetic peptide
  Seed: TIERMVLSAF
TNERMVLSAI

SEQ ID NO: 24008 - protein, 10 aa, Artificial Sequence
  Description of Artificial Sequence: Synthetic peptide
  Seed: TIERMVLSAF
TNERMVLSAL

SEQ ID NO: 24009 - protein, 10 aa, Artificial Sequence
  Description of Artificial Sequence: Synthetic peptide
  Seed: TIERMVLSAF
TNERMVLSAM

SEQ ID NO: 24010 - protein, 10 aa, Artificial Sequence
  Description of Artificial Sequence: Synthetic peptide
  Seed: TIERMVLSAF
TNERMVLSAF

SEQ ID NO: 24011 - protein, 10 aa, Artificial Sequence
  Description of Artificial Sequence: Synthetic peptide
  Seed: TIERMVLSAF
TEERMVLSAA

SEQ ID NO: 24012 - protein, 10 aa, Artificial Sequence
  Description of Artificial Sequence: Synthetic peptide
  Seed: TIERMVLSAF
TEERMVLSAL

SEQ ID NO: 24013 - protein, 10 aa, Artificial Sequence
  Description of Artificial Sequence: Synthetic peptide
  Seed: THLMIWHSNL
TYLMIWHSNA

SEQ ID NO: 24014 - protein, 10 aa, Artificial Sequence
  Description of Artificial Sequence: Synthetic peptide
  Seed: TIERMVLSAF
TKERMVLSAI

SEQ ID NO: 24015 - protein, 10 aa, Artificial Sequence
  Description of Artificial Sequence: Synthetic peptide
  Seed: TIERMVLSAF
TLERMVLSAA

SEQ ID NO: 24016 - protein, 10 aa, Artificial Sequence
  Description of Artificial Sequence: Synthetic peptide
  Seed: TIERMVLSAF
TLERMVLSAI

SEQ ID NO: 24017 - protein, 10 aa, Artificial Sequence
  Description of Artificial Sequence: Synthetic peptide
  Seed: TIERMVLSAF
TLERMVLSAL

SEQ ID NO: 24018 - protein, 10 aa, Artificial Sequence
  Description of Artificial Sequence: Synthetic peptide
  Seed: TIERMVLSAF
TLERMVLSAM

SEQ ID NO: 24019 - protein, 10 aa, Artificial Sequence
  Description of Artificial Sequence: Synthetic peptide
  Seed: TIERMVLSAF
TLERMVLSAF

SEQ ID NO: 24020 - protein, 10 aa, Artificial Sequence
  Description of Artificial Sequence: Synthetic peptide
  Seed: TIERMVLSAF
TLERMVLSAW

SEQ ID NO: 24021 - protein, 10 aa, Artificial Sequence
  Description of Artificial Sequence: Synthetic peptide
  Seed: TIERMVLSAF
TLERMVLSAY

SEQ ID NO: 24022 - protein, 10 aa, Artificial Sequence
  Description of Artificial Sequence: Synthetic peptide
  Seed: TIERMVLSAF
TLERMVLSAV

SEQ ID NO: 24023 - protein, 10 aa, Artificial Sequence
  Description of Artificial Sequence: Synthetic peptide
  Seed: TIERMVLSAF
TKERMVLSAA

SEQ ID NO: 24024 - protein, 10 aa, Artificial Sequence
  Description of Artificial Sequence: Synthetic peptide
  Seed: TIERMVLSAF
TKERMVLSAL

SEQ ID NO: 24025 - protein, 10 aa, Artificial Sequence
  Description of Artificial Sequence: Synthetic peptide
  Seed: TIERMVLSAF
TEERMVLSAM

SEQ ID NO: 24026 - protein, 10 aa, Artificial Sequence
  Description of Artificial Sequence: Synthetic peptide
  Seed: TIERMVLSAF
TKERMVLSAM

SEQ ID NO: 24027 - protein, 10 aa, Artificial Sequence
  Description of Artificial Sequence: Synthetic peptide
  Seed: TIERMVLSAF
TKERMVLSAF

SEQ ID NO: 24028 - protein, 10 aa, Artificial Sequence
  Description of Artificial Sequence: Synthetic peptide
  Seed: TIERMVLSAF
TKERMVLSAY

SEQ ID NO: 24029 - protein, 10 aa, Artificial Sequence
  Description of Artificial Sequence: Synthetic peptide
  Seed: TIERMVLSAF
TKERMVLSAV

SEQ ID NO: 24030 - protein, 10 aa, Artificial Sequence
  Description of Artificial Sequence: Synthetic peptide
  Seed: TIERMVLSAF
TMERMVLSAA

SEQ ID NO: 24031 - protein, 10 aa, Artificial Sequence
  Description of Artificial Sequence: Synthetic peptide
  Seed: TIERMVLSAF
TMERMVLSAI

SEQ ID NO: 24032 - protein, 10 aa, Artificial Sequence
  Description of Artificial Sequence: Synthetic peptide
  Seed: TIERMVLSAF
TMERMVLSAL

SEQ ID NO: 24033 - protein, 10 aa, Artificial Sequence
  Description of Artificial Sequence: Synthetic peptide
  Seed: TIERMVLSAF
TMERMVLSAM

SEQ ID NO: 24034 - protein, 10 aa, Artificial Sequence
  Description of Artificial Sequence: Synthetic peptide
  Seed: TIERMVLSAF
TIERMVLSAV

SEQ ID NO: 24035 - protein, 10 aa, Artificial Sequence
  Description of Artificial Sequence: Synthetic peptide
  Seed: TIERMVLSAF
TIERMVLSAY

SEQ ID NO: 24036 - protein, 10 aa, Artificial Sequence
  Description of Artificial Sequence: Synthetic peptide
  Seed: TIERMVLSAF
TIERMVLSAM

SEQ ID NO: 24037 - protein, 10 aa, Artificial Sequence
  Description of Artificial Sequence: Synthetic peptide
  Seed: TIERMVLSAF
TIERMVLSAL

SEQ ID NO: 24038 - protein, 10 aa, Artificial Sequence
  Description of Artificial Sequence: Synthetic peptide
  Seed: TIERMVLSAF
TEERMVLSAF

SEQ ID NO: 24039 - protein, 10 aa, Artificial Sequence
  Description of Artificial Sequence: Synthetic peptide
  Seed: TIERMVLSAF
TEERMVLSAY

SEQ ID NO: 24040 - protein, 10 aa, Artificial Sequence
  Description of Artificial Sequence: Synthetic peptide
  Seed: TIERMVLSAF
TEERMVLSAV

SEQ ID NO: 24041 - protein, 10 aa, Artificial Sequence
  Description of Artificial Sequence: Synthetic peptide
  Seed: TIERMVLSAF
TGERMVLSAA

SEQ ID NO: 24042 - protein, 10 aa, Artificial Sequence
  Description of Artificial Sequence: Synthetic peptide
  Seed: TIERMVLSAF
TGERMVLSAI

SEQ ID NO: 24043 - protein, 10 aa, Artificial Sequence
  Description of Artificial Sequence: Synthetic peptide
  Seed: TIERMVLSAF
TGERMVLSAL

SEQ ID NO: 24044 - protein, 10 aa, Artificial Sequence
  Description of Artificial Sequence: Synthetic peptide
  Seed: TIERMVLSAF
TGERMVLSAM

SEQ ID NO: 24045 - protein, 10 aa, Artificial Sequence
  Description of Artificial Sequence: Synthetic peptide
  Seed: TIERMVLSAF
TGERMVLSAF

SEQ ID NO: 24046 - protein, 10 aa, Artificial Sequence
  Description of Artificial Sequence: Synthetic peptide
  Seed: TIERMVLSAF
TGERMVLSAY

SEQ ID NO: 24047 - protein, 10 aa, Artificial Sequence
  Description of Artificial Sequence: Synthetic peptide
  Seed: TIERMVLSAF
TGERMVLSAV

SEQ ID NO: 24048 - protein, 10 aa, Artificial Sequence
  Description of Artificial Sequence: Synthetic peptide
  Seed: TIERMVLSAF
THERMVLSAA

SEQ ID NO: 24049 - protein, 10 aa, Artificial Sequence
  Description of Artificial Sequence: Synthetic peptide
  Seed: TIERMVLSAF
THERMVLSAI

SEQ ID NO: 24050 - protein, 10 aa, Artificial Sequence
  Description of Artificial Sequence: Synthetic peptide
  Seed: TIERMVLSAF
THERMVLSAL

SEQ ID NO: 24051 - protein, 10 aa, Artificial Sequence
  Description of Artificial Sequence: Synthetic peptide
  Seed: TIERMVLSAF
THERMVLSAM

SEQ ID NO: 24052 - protein, 10 aa, Artificial Sequence
  Description of Artificial Sequence: Synthetic peptide
  Seed: TIERMVLSAF
THERMVLSAF

SEQ ID NO: 24053 - protein, 10 aa, Artificial Sequence
  Description of Artificial Sequence: Synthetic peptide
  Seed: TIERMVLSAF
THERMVLSAY

SEQ ID NO: 24054 - protein, 10 aa, Artificial Sequence
  Description of Artificial Sequence: Synthetic peptide
  Seed: TIERMVLSAF
THERMVLSAV

SEQ ID NO: 24055 - protein, 10 aa, Artificial Sequence
  Description of Artificial Sequence: Synthetic peptide
  Seed: TIERMVLSAF
TIERMVLSAA

SEQ ID NO: 24056 - protein, 10 aa, Artificial Sequence
  Description of Artificial Sequence: Synthetic peptide
  Seed: TIERMVLSAF
TIERMVLSAI

SEQ ID NO: 24057 - protein, 10 aa, Artificial Sequence
  Description of Artificial Sequence: Synthetic peptide
  Seed: THMMIWHSNL
TVMMIWHSNV

SEQ ID NO: 24058 - protein, 10 aa, Artificial Sequence
  Description of Artificial Sequence: Synthetic peptide
  Seed: THMMIWHSNL
TVMMIWHSNL

SEQ ID NO: 24059 - protein, 10 aa, Artificial Sequence
  Description of Artificial Sequence: Synthetic peptide
  Seed: THMMIWHSNL
TVMMIWHSNI

SEQ ID NO: 24060 - protein, 10 aa, Artificial Sequence
  Description of Artificial Sequence: Synthetic peptide
  Seed: THMMIWHSNL
TEMMIWHSNA

SEQ ID NO: 24061 - protein, 10 aa, Artificial Sequence
  Description of Artificial Sequence: Synthetic peptide
  Seed: THMMIWHSNL
TDMMIWHSNV

SEQ ID NO: 24062 - protein, 10 aa, Artificial Sequence
  Description of Artificial Sequence: Synthetic peptide
  Seed: THMMIWHSNL
TCMMIWHSNA

SEQ ID NO: 24063 - protein, 10 aa, Artificial Sequence
  Description of Artificial Sequence: Synthetic peptide
  Seed: THMMIWHSNL
TCMMIWHSNI

SEQ ID NO: 24064 - protein, 10 aa, Artificial Sequence
  Description of Artificial Sequence: Synthetic peptide
  Seed: THMMIWHSNL
TCMMIWHSNL

SEQ ID NO: 24065 - protein, 10 aa, Artificial Sequence
  Description of Artificial Sequence: Synthetic peptide
  Seed: THMMIWHSNL
TCMMIWHSNV

SEQ ID NO: 24066 - protein, 10 aa, Artificial Sequence
  Description of Artificial Sequence: Synthetic peptide
  Seed: THMMIWHSNL
TQMMIWHSNA

SEQ ID NO: 24067 - protein, 10 aa, Artificial Sequence
  Description of Artificial Sequence: Synthetic peptide
  Seed: THMMIWHSNL
TQMMIWHSNI

SEQ ID NO: 24068 - protein, 10 aa, Artificial Sequence
  Description of Artificial Sequence: Synthetic peptide
  Seed: THMMIWHSNL
TQMMIWHSNL

SEQ ID NO: 24069 - protein, 10 aa, Artificial Sequence
  Description of Artificial Sequence: Synthetic peptide
  Seed: THMMIWHSNL
TQMMIWHSNV

SEQ ID NO: 24070 - protein, 10 aa, Artificial Sequence
  Description of Artificial Sequence: Synthetic peptide
  Seed: THMMIWHSNL
TEMMIWHSNI

SEQ ID NO: 24071 - protein, 10 aa, Artificial Sequence
  Description of Artificial Sequence: Synthetic peptide
  Seed: THMMIWHSNL
TVMMIWHSNA

SEQ ID NO: 24072 - protein, 10 aa, Artificial Sequence
  Description of Artificial Sequence: Synthetic peptide
  Seed: THMMIWHSNL
TEMMIWHSNL

SEQ ID NO: 24073 - protein, 10 aa, Artificial Sequence
  Description of Artificial Sequence: Synthetic peptide
  Seed: THMMIWHSNL
TEMMIWHSNV

SEQ ID NO: 24074 - protein, 10 aa, Artificial Sequence
  Description of Artificial Sequence: Synthetic peptide
  Seed: THMMIWHSNL
TGMMIWHSNA

SEQ ID NO: 24075 - protein, 10 aa, Artificial Sequence
  Description of Artificial Sequence: Synthetic peptide
  Seed: THMMIWHSNL
TGMMIWHSNI

SEQ ID NO: 24076 - protein, 10 aa, Artificial Sequence
  Description of Artificial Sequence: Synthetic peptide
  Seed: THMMIWHSNL
TGMMIWHSNL

SEQ ID NO: 24077 - protein, 10 aa, Artificial Sequence
  Description of Artificial Sequence: Synthetic peptide
  Seed: THMMIWHSNL
TGMMIWHSNV

SEQ ID NO: 24078 - protein, 10 aa, Artificial Sequence
  Description of Artificial Sequence: Synthetic peptide
  Seed: THMMIWHSNL
THMMIWHSNA

SEQ ID NO: 24079 - protein, 10 aa, Artificial Sequence
  Description of Artificial Sequence: Synthetic peptide
  Seed: THMMIWHSNL
THMMIWHSNI

SEQ ID NO: 24080 - protein, 10 aa, Artificial Sequence
  Description of Artificial Sequence: Synthetic peptide
  Seed: THMMIWHSNL
THMMIWHSNM

SEQ ID NO: 24081 - protein, 10 aa, Artificial Sequence
  Description of Artificial Sequence: Synthetic peptide
  Seed: THMMIWHSNL
TDMMIWHSNL

SEQ ID NO: 24082 - protein, 10 aa, Artificial Sequence
  Description of Artificial Sequence: Synthetic peptide
  Seed: THMMIWHSNL
TDMMIWHSNI

SEQ ID NO: 24083 - protein, 10 aa, Artificial Sequence
  Description of Artificial Sequence: Synthetic peptide
  Seed: THMMIWHSNL
TDMMIWHSNA

SEQ ID NO: 24084 - protein, 10 aa, Artificial Sequence
  Description of Artificial Sequence: Synthetic peptide
  Seed: THMMIWHSNL
TNMMIWHSNV

SEQ ID NO: 24085 - protein, 10 aa, Artificial Sequence
  Description of Artificial Sequence: Synthetic peptide
  Seed: THLMIWHSNL
TYLMIWHSNI

SEQ ID NO: 24086 - protein, 10 aa, Artificial Sequence
  Description of Artificial Sequence: Synthetic peptide
  Seed: THLMIWHSNL
TYLMIWHSNL

SEQ ID NO: 24087 - protein, 10 aa, Artificial Sequence
  Description of Artificial Sequence: Synthetic peptide
  Seed: THLMIWHSNL
TYLMIWHSNV

SEQ ID NO: 24088 - protein, 10 aa, Artificial Sequence
  Description of Artificial Sequence: Synthetic peptide
  Seed: THLMIWHSNL
TVLMIWHSNA

SEQ ID NO: 24089 - protein, 10 aa, Artificial Sequence
  Description of Artificial Sequence: Synthetic peptide
  Seed: THLMIWHSNL
TVLMIWHSNI

SEQ ID NO: 24090 - protein, 10 aa, Artificial Sequence
  Description of Artificial Sequence: Synthetic peptide
  Seed: THLMIWHSNL
TVLMIWHSNL

SEQ ID NO: 24091 - protein, 10 aa, Artificial Sequence
  Description of Artificial Sequence: Synthetic peptide
  Seed: THLMIWHSNL
TVLMIWHSNV

SEQ ID NO: 24092 - protein, 10 aa, Artificial Sequence
  Description of Artificial Sequence: Synthetic peptide
  Seed: THMMIWHSNL
TAMMIWHSNA

SEQ ID NO: 24093 - protein, 10 aa, Artificial Sequence
  Description of Artificial Sequence: Synthetic peptide
  Seed: THMMIWHSNL
TAMMIWHSNI

SEQ ID NO: 24094 - protein, 10 aa, Artificial Sequence
  Description of Artificial Sequence: Synthetic peptide
  Seed: THMMIWHSNL
TAMMIWHSNL

SEQ ID NO: 24095 - protein, 10 aa, Artificial Sequence
  Description of Artificial Sequence: Synthetic peptide
  Seed: THMMIWHSNL
TAMMIWHSNV

SEQ ID NO: 24096 - protein, 10 aa, Artificial Sequence
  Description of Artificial Sequence: Synthetic peptide
  Seed: THMMIWHSNL
TRMMIWHSNA

SEQ ID NO: 24097 - protein, 10 aa, Artificial Sequence
  Description of Artificial Sequence: Synthetic peptide
  Seed: THMMIWHSNL
TRMMIWHSNI

SEQ ID NO: 24098 - protein, 10 aa, Artificial Sequence
  Description of Artificial Sequence: Synthetic peptide
  Seed: THMMIWHSNL
TRMMIWHSNL

SEQ ID NO: 24099 - protein, 10 aa, Artificial Sequence
  Description of Artificial Sequence: Synthetic peptide
  Seed: THMMIWHSNL
TRMMIWHSNM

SEQ ID NO: 24100 - protein, 10 aa, Artificial Sequence
  Description of Artificial Sequence: Synthetic peptide
  Seed: THMMIWHSNL
TRMMIWHSNV

SEQ ID NO: 24101 - protein, 10 aa, Artificial Sequence
  Description of Artificial Sequence: Synthetic peptide
  Seed: THMMIWHSNL
TNMMIWHSNA

SEQ ID NO: 24102 - protein, 10 aa, Artificial Sequence
  Description of Artificial Sequence: Synthetic peptide
  Seed: THMMIWHSNL
TNMMIWHSNI

SEQ ID NO: 24103 - protein, 10 aa, Artificial Sequence
  Description of Artificial Sequence: Synthetic peptide
  Seed: THMMIWHSNL
TNMMIWHSNL

SEQ ID NO: 24104 - protein, 10 aa, Artificial Sequence
  Description of Artificial Sequence: Synthetic peptide
  Seed: THMMIWHSNL
THMMIWHSNF

SEQ ID NO: 24105 - protein, 10 aa, Artificial Sequence
  Description of Artificial Sequence: Synthetic peptide
  Seed: THMMIWHSNL
THMMIWHSNV

SEQ ID NO: 24106 - protein, 10 aa, Artificial Sequence
  Description of Artificial Sequence: Synthetic peptide
  Seed: THMMIWHSNL
TIMMIWHSNA

SEQ ID NO: 24107 - protein, 10 aa, Artificial Sequence
  Description of Artificial Sequence: Synthetic peptide
  Seed: THMMIWHSNL
TFMMIWHSNV

SEQ ID NO: 24108 - protein, 10 aa, Artificial Sequence
  Description of Artificial Sequence: Synthetic peptide
  Seed: THMMIWHSNL
TPMMIWHSNI

SEQ ID NO: 24109 - protein, 10 aa, Artificial Sequence
  Description of Artificial Sequence: Synthetic peptide
  Seed: THMMIWHSNL
TPMMIWHSNL

SEQ ID NO: 24110 - protein, 10 aa, Artificial Sequence
  Description of Artificial Sequence: Synthetic peptide
  Seed: THMMIWHSNL
TPMMIWHSNV

SEQ ID NO: 24111 - protein, 10 aa, Artificial Sequence
  Description of Artificial Sequence: Synthetic peptide
  Seed: THMMIWHSNL
TSMMIWHSNA

SEQ ID NO: 24112 - protein, 10 aa, Artificial Sequence
  Description of Artificial Sequence: Synthetic peptide
  Seed: THMMIWHSNL
TSMMIWHSNI

SEQ ID NO: 24113 - protein, 10 aa, Artificial Sequence
  Description of Artificial Sequence: Synthetic peptide
  Seed: THMMIWHSNL
TSMMIWHSNL

SEQ ID NO: 24114 - protein, 10 aa, Artificial Sequence
  Description of Artificial Sequence: Synthetic peptide
  Seed: THMMIWHSNL
TSMMIWHSNV

SEQ ID NO: 24115 - protein, 10 aa, Artificial Sequence
  Description of Artificial Sequence: Synthetic peptide
  Seed: THMMIWHSNL
TTMMIWHSNA

SEQ ID NO: 24116 - protein, 10 aa, Artificial Sequence
  Description of Artificial Sequence: Synthetic peptide
  Seed: THMMIWHSNL
TTMMIWHSNI

SEQ ID NO: 24117 - protein, 10 aa, Artificial Sequence
  Description of Artificial Sequence: Synthetic peptide
  Seed: THMMIWHSNL
TTMMIWHSNL

SEQ ID NO: 24118 - protein, 10 aa, Artificial Sequence
  Description of Artificial Sequence: Synthetic peptide
  Seed: THMMIWHSNL
TTMMIWHSNV

SEQ ID NO: 24119 - protein, 10 aa, Artificial Sequence
  Description of Artificial Sequence: Synthetic peptide
  Seed: THMMIWHSNL
TWMMIWHSNA

SEQ ID NO: 24120 - protein, 10 aa, Artificial Sequence
  Description of Artificial Sequence: Synthetic peptide
  Seed: THMMIWHSNL
TWMMIWHSNI

SEQ ID NO: 24121 - protein, 10 aa, Artificial Sequence
  Description of Artificial Sequence: Synthetic peptide
  Seed: THMMIWHSNL
TWMMIWHSNL

SEQ ID NO: 24122 - protein, 10 aa, Artificial Sequence
  Description of Artificial Sequence: Synthetic peptide
  Seed: THMMIWHSNL
TWMMIWHSNV

SEQ ID NO: 24123 - protein, 10 aa, Artificial Sequence
  Description of Artificial Sequence: Synthetic peptide
  Seed: THMMIWHSNL
TYMMIWHSNA

SEQ ID NO: 24124 - protein, 10 aa, Artificial Sequence
  Description of Artificial Sequence: Synthetic peptide
  Seed: THMMIWHSNL
TYMMIWHSNI

SEQ ID NO: 24125 - protein, 10 aa, Artificial Sequence
  Description of Artificial Sequence: Synthetic peptide
  Seed: THMMIWHSNL
TYMMIWHSNL

SEQ ID NO: 24126 - protein, 10 aa, Artificial Sequence
  Description of Artificial Sequence: Synthetic peptide
  Seed: THMMIWHSNL
TYMMIWHSNV

SEQ ID NO: 24127 - protein, 10 aa, Artificial Sequence
  Description of Artificial Sequence: Synthetic peptide
  Seed: THMMIWHSNL
TPMMIWHSNA

SEQ ID NO: 24128 - protein, 10 aa, Artificial Sequence
  Description of Artificial Sequence: Synthetic peptide
  Seed: THMMIWHSNL
TFMMIWHSNL

SEQ ID NO: 24129 - protein, 10 aa, Artificial Sequence
  Description of Artificial Sequence: Synthetic peptide
  Seed: THMMIWHSNL
TIMMIWHSNI

SEQ ID NO: 24130 - protein, 10 aa, Artificial Sequence
  Description of Artificial Sequence: Synthetic peptide
  Seed: THMMIWHSNL
TFMMIWHSNI

SEQ ID NO: 24131 - protein, 10 aa, Artificial Sequence
  Description of Artificial Sequence: Synthetic peptide
  Seed: THMMIWHSNL
TIMMIWHSNL

SEQ ID NO: 24132 - protein, 10 aa, Artificial Sequence
  Description of Artificial Sequence: Synthetic peptide
  Seed: THMMIWHSNL
TIMMIWHSNV

SEQ ID NO: 24133 - protein, 10 aa, Artificial Sequence
  Description of Artificial Sequence: Synthetic peptide
  Seed: THMMIWHSNL
TLMMIWHSNA

SEQ ID NO: 24134 - protein, 10 aa, Artificial Sequence
  Description of Artificial Sequence: Synthetic peptide
  Seed: THMMIWHSNL
TLMMIWHSNI

SEQ ID NO: 24135 - protein, 10 aa, Artificial Sequence
  Description of Artificial Sequence: Synthetic peptide
  Seed: THMMIWHSNL
TLMMIWHSNL

SEQ ID NO: 24136 - protein, 10 aa, Artificial Sequence
  Description of Artificial Sequence: Synthetic peptide
  Seed: THMMIWHSNL
TLMMIWHSNM

SEQ ID NO: 24137 - protein, 10 aa, Artificial Sequence
  Description of Artificial Sequence: Synthetic peptide
  Seed: THMMIWHSNL
TLMMIWHSNT

SEQ ID NO: 24138 - protein, 10 aa, Artificial Sequence
  Description of Artificial Sequence: Synthetic peptide
  Seed: THMMIWHSNL
TLMMIWHSNV

SEQ ID NO: 24139 - protein, 10 aa, Artificial Sequence
  Description of Artificial Sequence: Synthetic peptide
  Seed: THMMIWHSNL
TKMMIWHSNA

SEQ ID NO: 24140 - protein, 10 aa, Artificial Sequence
  Description of Artificial Sequence: Synthetic peptide
  Seed: THMMIWHSNL
TKMMIWHSNI

SEQ ID NO: 24141 - protein, 10 aa, Artificial Sequence
  Description of Artificial Sequence: Synthetic peptide
  Seed: THMMIWHSNL
TKMMIWHSNL

SEQ ID NO: 24142 - protein, 10 aa, Artificial Sequence
  Description of Artificial Sequence: Synthetic peptide
  Seed: THMMIWHSNL
TKMMIWHSNV

SEQ ID NO: 24143 - protein, 10 aa, Artificial Sequence
  Description of Artificial Sequence: Synthetic peptide
  Seed: THMMIWHSNL
TMMMIWHSNA

SEQ ID NO: 24144 - protein, 10 aa, Artificial Sequence
  Description of Artificial Sequence: Synthetic peptide
  Seed: THMMIWHSNL
TMMMIWHSNI

SEQ ID NO: 24145 - protein, 10 aa, Artificial Sequence
  Description of Artificial Sequence: Synthetic peptide
  Seed: THMMIWHSNL
TMMMIWHSNL

SEQ ID NO: 24146 - protein, 10 aa, Artificial Sequence
  Description of Artificial Sequence: Synthetic peptide
  Seed: THMMIWHSNL
TMMMIWHSNM

SEQ ID NO: 24147 - protein, 10 aa, Artificial Sequence
  Description of Artificial Sequence: Synthetic peptide
  Seed: THMMIWHSNL
TMMMIWHSNT

SEQ ID NO: 24148 - protein, 10 aa, Artificial Sequence
  Description of Artificial Sequence: Synthetic peptide
  Seed: THMMIWHSNL
TMMMIWHSNV

SEQ ID NO: 24149 - protein, 10 aa, Artificial Sequence
  Description of Artificial Sequence: Synthetic peptide
  Seed: THMMIWHSNL
TFMMIWHSNA

SEQ ID NO: 24150 - protein, 10 aa, Artificial Sequence
  Description of Artificial Sequence: Synthetic peptide
  Seed: TFSVQRNLPF
TFSVQRNLPY

SEQ ID NO: 24151 - protein, 10 aa, Artificial Sequence
  Description of Artificial Sequence: Synthetic peptide
  Seed: TFSVQRNLPF
TFSVQRNLPW

SEQ ID NO: 24152 - protein, 10 aa, Artificial Sequence
  Description of Artificial Sequence: Synthetic peptide
  Seed: TFSVQRNLPF
TFSVQRNLPM

SEQ ID NO: 24153 - protein, 10 aa, Artificial Sequence
  Description of Artificial Sequence: Synthetic peptide
  Seed: SVQRNLPFEK
STQRNLPFEK

SEQ ID NO: 24154 - protein, 10 aa, Artificial Sequence
  Description of Artificial Sequence: Synthetic peptide
  Seed: SVQRNLPFEK
SSQRNLPFER

SEQ ID NO: 24155 - protein, 10 aa, Artificial Sequence
  Description of Artificial Sequence: Synthetic peptide
  Seed: SVQRNLPFEK
SSQRNLPFEI

SEQ ID NO: 24156 - protein, 10 aa, Artificial Sequence
  Description of Artificial Sequence: Synthetic peptide
  Seed: SVQRNLPFEK
SSQRNLPFEL

SEQ ID NO: 24157 - protein, 10 aa, Artificial Sequence
  Description of Artificial Sequence: Synthetic peptide
  Seed: SVQRNLPFEK
SSQRNLPFEK

SEQ ID NO: 24158 - protein, 10 aa, Artificial Sequence
  Description of Artificial Sequence: Synthetic peptide
  Seed: SVQRNLPFEK
SSQRNLPFEV

SEQ ID NO: 24159 - protein, 10 aa, Artificial Sequence
  Description of Artificial Sequence: Synthetic peptide
  Seed: SVQRNLPFEK
STQRNLPFEA

SEQ ID NO: 24160 - protein, 10 aa, Artificial Sequence
  Description of Artificial Sequence: Synthetic peptide
  Seed: SVQRNLPFEK
STQRNLPFER

SEQ ID NO: 24161 - protein, 10 aa, Artificial Sequence
  Description of Artificial Sequence: Synthetic peptide
  Seed: SVQRNLPFEK
STQRNLPFEI

SEQ ID NO: 24162 - protein, 10 aa, Artificial Sequence
  Description of Artificial Sequence: Synthetic peptide
  Seed: SVQRNLPFEK
STQRNLPFEL

SEQ ID NO: 24163 - protein, 10 aa, Artificial Sequence
  Description of Artificial Sequence: Synthetic peptide
  Seed: SVQRNLPFEK
STQRNLPFEM

SEQ ID NO: 24164 - protein, 10 aa, Artificial Sequence
  Description of Artificial Sequence: Synthetic peptide
  Seed: SVQRNLPFEK
STQRNLPFES

SEQ ID NO: 24165 - protein, 10 aa, Artificial Sequence
  Description of Artificial Sequence: Synthetic peptide
  Seed: SVQRNLPFEK
STQRNLPFEY

SEQ ID NO: 24166 - protein, 10 aa, Artificial Sequence
  Description of Artificial Sequence: Synthetic peptide
  Seed: SVQRNLPFEK
STQRNLPFEV

SEQ ID NO: 24167 - protein, 10 aa, Artificial Sequence
  Description of Artificial Sequence: Synthetic peptide
  Seed: SVQRNLPFEK
SWQRNLPFER

SEQ ID NO: 24168 - protein, 10 aa, Artificial Sequence
  Description of Artificial Sequence: Synthetic peptide
  Seed: SVQRNLPFEK
SWQRNLPFEK

SEQ ID NO: 24169 - protein, 10 aa, Artificial Sequence
  Description of Artificial Sequence: Synthetic peptide
  Seed: SVQRNLPFEK
SYQRNLPFEA

SEQ ID NO: 24170 - protein, 10 aa, Artificial Sequence
  Description of Artificial Sequence: Synthetic peptide
  Seed: SVQRNLPFEK
SYQRNLPFER

SEQ ID NO: 24171 - protein, 10 aa, Artificial Sequence
  Description of Artificial Sequence: Synthetic peptide
  Seed: SVQRNLPFEK
SYQRNLPFEK

SEQ ID NO: 24172 - protein, 10 aa, Artificial Sequence
  Description of Artificial Sequence: Synthetic peptide
  Seed: SVQRNLPFEK
SYQRNLPFEV

SEQ ID NO: 24173 - protein, 10 aa, Artificial Sequence
  Description of Artificial Sequence: Synthetic peptide
  Seed: SVQRNLPFEK
SSQRNLPFEA

SEQ ID NO: 24174 - protein, 10 aa, Artificial Sequence
  Description of Artificial Sequence: Synthetic peptide
  Seed: SVQRNLPFEK
SPQRNLPFEK

SEQ ID NO: 24175 - protein, 10 aa, Artificial Sequence
  Description of Artificial Sequence: Synthetic peptide
  Seed: SVQRNLPFEK
SPQRNLPFER

SEQ ID NO: 24176 - protein, 10 aa, Artificial Sequence
  Description of Artificial Sequence: Synthetic peptide
  Seed: SVQRNLPFEK
SFQRNLPFEK

SEQ ID NO: 24177 - protein, 10 aa, Artificial Sequence
  Description of Artificial Sequence: Synthetic peptide
  Seed: SVQRNLPFEK
SEQRNLPFEK

SEQ ID NO: 24178 - protein, 10 aa, Artificial Sequence
  Description of Artificial Sequence: Synthetic peptide
  Seed: SVQRNLPFEK
SGQRNLPFER

SEQ ID NO: 24179 - protein, 10 aa, Artificial Sequence
  Description of Artificial Sequence: Synthetic peptide
  Seed: SVQRNLPFEK
SGQRNLPFEK

SEQ ID NO: 24180 - protein, 10 aa, Artificial Sequence
  Description of Artificial Sequence: Synthetic peptide
  Seed: SVQRNLPFEK
SHQRNLPFER

SEQ ID NO: 24181 - protein, 10 aa, Artificial Sequence
  Description of Artificial Sequence: Synthetic peptide
  Seed: SVQRNLPFEK
SHQRNLPFEK

SEQ ID NO: 24182 - protein, 10 aa, Artificial Sequence
  Description of Artificial Sequence: Synthetic peptide
  Seed: SVQRNLPFEK
SIQRNLPFEA

SEQ ID NO: 24183 - protein, 10 aa, Artificial Sequence
  Description of Artificial Sequence: Synthetic peptide
  Seed: SVQRNLPFEK
SIQRNLPFER

SEQ ID NO: 24184 - protein, 10 aa, Artificial Sequence
  Description of Artificial Sequence: Synthetic peptide
  Seed: SVQRNLPFEK
SIQRNLPFEK

SEQ ID NO: 24185 - protein, 10 aa, Artificial Sequence
  Description of Artificial Sequence: Synthetic peptide
  Seed: SVQRNLPFEK
SIQRNLPFEY

SEQ ID NO: 24186 - protein, 10 aa, Artificial Sequence
  Description of Artificial Sequence: Synthetic peptide
  Seed: SVQRNLPFEK
SLQRNLPFER

SEQ ID NO: 24187 - protein, 10 aa, Artificial Sequence
  Description of Artificial Sequence: Synthetic peptide
  Seed: SVQRNLPFEK
SLQRNLPFEK

SEQ ID NO: 24188 - protein, 10 aa, Artificial Sequence
  Description of Artificial Sequence: Synthetic peptide
  Seed: SVQRNLPFEK
SKQRNLPFER

SEQ ID NO: 24189 - protein, 10 aa, Artificial Sequence
  Description of Artificial Sequence: Synthetic peptide
  Seed: SVQRNLPFEK
SKQRNLPFEK

SEQ ID NO: 24190 - protein, 10 aa, Artificial Sequence
  Description of Artificial Sequence: Synthetic peptide
  Seed: SVQRNLPFEK
SMQRNLPFEA

SEQ ID NO: 24191 - protein, 10 aa, Artificial Sequence
  Description of Artificial Sequence: Synthetic peptide
  Seed: SVQRNLPFEK
SMQRNLPFER

SEQ ID NO: 24192 - protein, 10 aa, Artificial Sequence
  Description of Artificial Sequence: Synthetic peptide
  Seed: SVQRNLPFEK
SMQRNLPFEK

SEQ ID NO: 24193 - protein, 10 aa, Artificial Sequence
  Description of Artificial Sequence: Synthetic peptide
  Seed: SVQRNLPFEK
SMQRNLPFEY

SEQ ID NO: 24194 - protein, 10 aa, Artificial Sequence
  Description of Artificial Sequence: Synthetic peptide
  Seed: SVQRNLPFEK
SFQRNLPFEA

SEQ ID NO: 24195 - protein, 10 aa, Artificial Sequence
  Description of Artificial Sequence: Synthetic peptide
  Seed: SVQRNLPFEK
SFQRNLPFER

SEQ ID NO: 24196 - protein, 10 aa, Artificial Sequence
  Description of Artificial Sequence: Synthetic peptide
  Seed: SVQRNLPFEK
SVQRNLPFEA

SEQ ID NO: 24197 - protein, 10 aa, Artificial Sequence
  Description of Artificial Sequence: Synthetic peptide
  Seed: SVQRNLPFEK
SVQRNLPFEI

SEQ ID NO: 24198 - protein, 10 aa, Artificial Sequence
  Description of Artificial Sequence: Synthetic peptide
  Seed: SVQRNLPFEK
SVQRNLPFEL

SEQ ID NO: 24199 - protein, 10 aa, Artificial Sequence
  Description of Artificial Sequence: Synthetic peptide
  Seed: SVQRNLPFEK
SVQRNLPFEY

SEQ ID NO: 24200 - protein, 10 aa, Artificial Sequence
  Description of Artificial Sequence: Synthetic peptide
  Seed: SVQRNLPFEK
SVQRNLPFEV

SEQ ID NO: 24201 - protein, 10 aa, Artificial Sequence
  Description of Artificial Sequence: Synthetic peptide
  Seed: SVQRNLPFER
SAQRNLPFEA

SEQ ID NO: 24202 - protein, 10 aa, Artificial Sequence
  Description of Artificial Sequence: Synthetic peptide
  Seed: SVQRNLPFER
SAQRNLPFER

SEQ ID NO: 24203 - protein, 10 aa, Artificial Sequence
  Description of Artificial Sequence: Synthetic peptide
  Seed: SVQRNLPFER
SAQRNLPFEK

SEQ ID NO: 24204 - protein, 10 aa, Artificial Sequence
  Description of Artificial Sequence: Synthetic peptide
  Seed: SVQRNLPFER
SRQRNLPFER

SEQ ID NO: 24205 - protein, 10 aa, Artificial Sequence
  Description of Artificial Sequence: Synthetic peptide
  Seed: SVQRNLPFER
SRQRNLPFEK

SEQ ID NO: 24206 - protein, 10 aa, Artificial Sequence
  Description of Artificial Sequence: Synthetic peptide
  Seed: SVQRNLPFER
SNQRNLPFER

SEQ ID NO: 24207 - protein, 10 aa, Artificial Sequence
  Description of Artificial Sequence: Synthetic peptide
  Seed: SVQRNLPFER
SNQRNLPFEK

SEQ ID NO: 24208 - protein, 10 aa, Artificial Sequence
  Description of Artificial Sequence: Synthetic peptide
  Seed: SVQRNLPFER
SDQRNLPFER

SEQ ID NO: 24209 - protein, 10 aa, Artificial Sequence
  Description of Artificial Sequence: Synthetic peptide
  Seed: SVQRNLPFER
SDQRNLPFEK

SEQ ID NO: 24210 - protein, 10 aa, Artificial Sequence
  Description of Artificial Sequence: Synthetic peptide
  Seed: SVQRNLPFER
SCQRNLPFER

SEQ ID NO: 24211 - protein, 10 aa, Artificial Sequence
  Description of Artificial Sequence: Synthetic peptide
  Seed: SVQRNLPFER
SCQRNLPFEK

SEQ ID NO: 24212 - protein, 10 aa, Artificial Sequence
  Description of Artificial Sequence: Synthetic peptide
  Seed: SVQRNLPFER
SQQRNLPFER

SEQ ID NO: 24213 - protein, 10 aa, Artificial Sequence
  Description of Artificial Sequence: Synthetic peptide
  Seed: SVQRNLPFER
SQQRNLPFEK

SEQ ID NO: 24214 - protein, 10 aa, Artificial Sequence
  Description of Artificial Sequence: Synthetic peptide
  Seed: SVQRNLPFER
SEQRNLPFER

SEQ ID NO: 24215 - protein, 11 aa, Artificial Sequence
  Description of Artificial Sequence: Synthetic peptide
  Seed: SVQPTFSVQRN
SVQPTFSVQRE

SEQ ID NO: 24216 - protein, 11 aa, Artificial Sequence
  Description of Artificial Sequence: Synthetic peptide
  Seed: SVQPTFSVQRN
SWQPTFSVQRR

SEQ ID NO: 24217 - protein, 11 aa, Artificial Sequence
  Description of Artificial Sequence: Synthetic peptide
  Seed: SVQPTFSVQRN
SWQPTFSVQRK

SEQ ID NO: 24218 - protein, 11 aa, Artificial Sequence
  Description of Artificial Sequence: Synthetic peptide
  Seed: SVQPTFSVQRN
SYQPTFSVQRR

SEQ ID NO: 24219 - protein, 11 aa, Artificial Sequence
  Description of Artificial Sequence: Synthetic peptide
  Seed: SVQPTFSVQRN
SYQPTFSVQRK

SEQ ID NO: 24220 - protein, 11 aa, Artificial Sequence
  Description of Artificial Sequence: Synthetic peptide
  Seed: SVQPTFSVQRN
SVQPTFSVQRA

SEQ ID NO: 24221 - protein, 11 aa, Artificial Sequence
  Description of Artificial Sequence: Synthetic peptide
  Seed: SVQPTFSVQRN
SVQPTFSVQRR

SEQ ID NO: 24222 - protein, 11 aa, Artificial Sequence
  Description of Artificial Sequence: Synthetic peptide
  Seed: SVQPTFSVQRN
SVQPTFSVQRD

SEQ ID NO: 24223 - protein, 11 aa, Artificial Sequence
  Description of Artificial Sequence: Synthetic peptide
  Seed: SVQPTFSVQRN
SVQPTFSVQRC

SEQ ID NO: 24224 - protein, 11 aa, Artificial Sequence
  Description of Artificial Sequence: Synthetic peptide
  Seed: SVQPTFSVQRN
SVQPTFSVQRQ

SEQ ID NO: 24225 - protein, 11 aa, Artificial Sequence
  Description of Artificial Sequence: Synthetic peptide
  Seed: SVQPTFSVQRN
SVQPTFSVQRG

SEQ ID NO: 24226 - protein, 11 aa, Artificial Sequence
  Description of Artificial Sequence: Synthetic peptide
  Seed: SVQPTFSVQRN
SVQPTFSVQRH

SEQ ID NO: 24227 - protein, 11 aa, Artificial Sequence
  Description of Artificial Sequence: Synthetic peptide
  Seed: SVQPTFSVQRN
SVQPTFSVQRI

SEQ ID NO: 24228 - protein, 11 aa, Artificial Sequence
  Description of Artificial Sequence: Synthetic peptide
  Seed: SVQPTFSVQRN
SVQPTFSVQRL

SEQ ID NO: 24229 - protein, 11 aa, Artificial Sequence
  Description of Artificial Sequence: Synthetic peptide
  Seed: SVQPTFSVQRN
SVQPTFSVQRM

SEQ ID NO: 24230 - protein, 11 aa, Artificial Sequence
  Description of Artificial Sequence: Synthetic peptide
  Seed: SVQPTFSVQRN
SVQPTFSVQRF

SEQ ID NO: 24231 - protein, 11 aa, Artificial Sequence
  Description of Artificial Sequence: Synthetic peptide
  Seed: SVQPTFSVQRN
SVQPTFSVQRP

SEQ ID NO: 24232 - protein, 11 aa, Artificial Sequence
  Description of Artificial Sequence: Synthetic peptide
  Seed: SVQPTFSVQRN
SVQPTFSVQRS

SEQ ID NO: 24233 - protein, 11 aa, Artificial Sequence
  Description of Artificial Sequence: Synthetic peptide
  Seed: SVQPTFSVQRN
SVQPTFSVQRT

SEQ ID NO: 24234 - protein, 11 aa, Artificial Sequence
  Description of Artificial Sequence: Synthetic peptide
  Seed: SVQPTFSVQRN
STQPTFSVQRK

SEQ ID NO: 24235 - protein, 11 aa, Artificial Sequence
  Description of Artificial Sequence: Synthetic peptide
  Seed: SVQPTFSVQRN
STQPTFSVQRR

SEQ ID NO: 24236 - protein, 11 aa, Artificial Sequence
  Description of Artificial Sequence: Synthetic peptide
  Seed: SVQPTFSVQRN
SSQPTFSVQRR

SEQ ID NO: 24237 - protein, 11 aa, Artificial Sequence
  Description of Artificial Sequence: Synthetic peptide
  Seed: SVQPTFSVQRN
SFQPTFSVQRV

SEQ ID NO: 24238 - protein, 11 aa, Artificial Sequence
  Description of Artificial Sequence: Synthetic peptide
  Seed: SVQPTFSVQRN
SFQPTFSVQRA

SEQ ID NO: 24239 - protein, 11 aa, Artificial Sequence
  Description of Artificial Sequence: Synthetic peptide
  Seed: SVQPTFSVQRN
SFQPTFSVQRR

SEQ ID NO: 24240 - protein, 11 aa, Artificial Sequence
  Description of Artificial Sequence: Synthetic peptide
  Seed: SVQPTFSVQRN
SFQPTFSVQRN

SEQ ID NO: 24241 - protein, 11 aa, Artificial Sequence
  Description of Artificial Sequence: Synthetic peptide
  Seed: SVQPTFSVQRN
SFQPTFSVQRD

SEQ ID NO: 24242 - protein, 11 aa, Artificial Sequence
  Description of Artificial Sequence: Synthetic peptide
  Seed: SVQPTFSVQRN
SFQPTFSVQRC

SEQ ID NO: 24243 - protein, 11 aa, Artificial Sequence
  Description of Artificial Sequence: Synthetic peptide
  Seed: SVQPTFSVQRN
SFQPTFSVQRQ

SEQ ID NO: 24244 - protein, 11 aa, Artificial Sequence
  Description of Artificial Sequence: Synthetic peptide
  Seed: SVQPTFSVQRN
SFQPTFSVQRE

SEQ ID NO: 24245 - protein, 11 aa, Artificial Sequence
  Description of Artificial Sequence: Synthetic peptide
  Seed: SVQPTFSVQRN
SFQPTFSVQRG

SEQ ID NO: 24246 - protein, 11 aa, Artificial Sequence
  Description of Artificial Sequence: Synthetic peptide
  Seed: SVQPTFSVQRN
SFQPTFSVQRH

SEQ ID NO: 24247 - protein, 11 aa, Artificial Sequence
  Description of Artificial Sequence: Synthetic peptide
  Seed: SVQPTFSVQRN
SFQPTFSVQRI

SEQ ID NO: 24248 - protein, 11 aa, Artificial Sequence
  Description of Artificial Sequence: Synthetic peptide
  Seed: SVQPTFSVQRN
SFQPTFSVQRL

SEQ ID NO: 24249 - protein, 11 aa, Artificial Sequence
  Description of Artificial Sequence: Synthetic peptide
  Seed: SVQPTFSVQRN
SFQPTFSVQRK

SEQ ID NO: 24250 - protein, 11 aa, Artificial Sequence
  Description of Artificial Sequence: Synthetic peptide
  Seed: SVQPTFSVQRN
SFQPTFSVQRM

SEQ ID NO: 24251 - protein, 11 aa, Artificial Sequence
  Description of Artificial Sequence: Synthetic peptide
  Seed: SVQPTFSVQRN
SFQPTFSVQRF

SEQ ID NO: 24252 - protein, 11 aa, Artificial Sequence
  Description of Artificial Sequence: Synthetic peptide
  Seed: SVQPTFSVQRN
SFQPTFSVQRP

SEQ ID NO: 24253 - protein, 11 aa, Artificial Sequence
  Description of Artificial Sequence: Synthetic peptide
  Seed: SVQPTFSVQRN
SFQPTFSVQRS

SEQ ID NO: 24254 - protein, 11 aa, Artificial Sequence
  Description of Artificial Sequence: Synthetic peptide
  Seed: SVQPTFSVQRN
SFQPTFSVQRT

SEQ ID NO: 24255 - protein, 11 aa, Artificial Sequence
  Description of Artificial Sequence: Synthetic peptide
  Seed: SVQPTFSVQRN
SFQPTFSVQRW

SEQ ID NO: 24256 - protein, 11 aa, Artificial Sequence
  Description of Artificial Sequence: Synthetic peptide
  Seed: SVQPTFSVQRN
SFQPTFSVQRY

SEQ ID NO: 24257 - protein, 11 aa, Artificial Sequence
  Description of Artificial Sequence: Synthetic peptide
  Seed: SVQPTFSVQRN
SVQPTFSVQRW

SEQ ID NO: 24258 - protein, 11 aa, Artificial Sequence
  Description of Artificial Sequence: Synthetic peptide
  Seed: SVQPTFSVQRN
SVQPTFSVQRY

SEQ ID NO: 24259 - protein, 11 aa, Artificial Sequence
  Description of Artificial Sequence: Synthetic peptide
  Seed: SVQPTFSVQRN
SVQPTFSVQRV

SEQ ID NO: 24260 - protein, 10 aa, Artificial Sequence
  Description of Artificial Sequence: Synthetic peptide
  Seed: SVQRNLPFDK
SPQRNLPFDR

SEQ ID NO: 24261 - protein, 10 aa, Artificial Sequence
  Description of Artificial Sequence: Synthetic peptide
  Seed: SVQRNLPFDK
SSQRNLPFDK

SEQ ID NO: 24262 - protein, 10 aa, Artificial Sequence
  Description of Artificial Sequence: Synthetic peptide
  Seed: SVQRNLPFDK
STQRNLPFDR

SEQ ID NO: 24263 - protein, 10 aa, Artificial Sequence
  Description of Artificial Sequence: Synthetic peptide
  Seed: SVQRNLPFDK
STQRNLPFDK

SEQ ID NO: 24264 - protein, 10 aa, Artificial Sequence
  Description of Artificial Sequence: Synthetic peptide
  Seed: SVQRNLPFDK
STQRNLPFDY

SEQ ID NO: 24265 - protein, 10 aa, Artificial Sequence
  Description of Artificial Sequence: Synthetic peptide
  Seed: SVQRNLPFDK
SWQRNLPFDR

SEQ ID NO: 24266 - protein, 10 aa, Artificial Sequence
  Description of Artificial Sequence: Synthetic peptide
  Seed: SVQRNLPFDK
SWQRNLPFDK

SEQ ID NO: 24267 - protein, 10 aa, Artificial Sequence
  Description of Artificial Sequence: Synthetic peptide
  Seed: SVQRNLPFDK
SYQRNLPFDR

SEQ ID NO: 24268 - protein, 10 aa, Artificial Sequence
  Description of Artificial Sequence: Synthetic peptide
  Seed: SVQRNLPFDK
SYQRNLPFDK

SEQ ID NO: 24269 - protein, 10 aa, Artificial Sequence
  Description of Artificial Sequence: Synthetic peptide
  Seed: SVQRNLPFDK
SSQRNLPFDR

SEQ ID NO: 24270 - protein, 10 aa, Artificial Sequence
  Description of Artificial Sequence: Synthetic peptide
  Seed: SVQRNLPFDK
SFQRNLPFDK

SEQ ID NO: 24271 - protein, 10 aa, Artificial Sequence
  Description of Artificial Sequence: Synthetic peptide
  Seed: SVQRNLPFDK
SAQRNLPFDR

SEQ ID NO: 24272 - protein, 10 aa, Artificial Sequence
  Description of Artificial Sequence: Synthetic peptide
  Seed: SVQRNLPFDK
SFQRNLPFDR

SEQ ID NO: 24273 - protein, 10 aa, Artificial Sequence
  Description of Artificial Sequence: Synthetic peptide
  Seed: SVQRNLPFDK
SAQRNLPFDK

SEQ ID NO: 24274 - protein, 10 aa, Artificial Sequence
  Description of Artificial Sequence: Synthetic peptide
  Seed: SVQRNLPFDK
SRQRNLPFDR

SEQ ID NO: 24275 - protein, 10 aa, Artificial Sequence
  Description of Artificial Sequence: Synthetic peptide
  Seed: SVQRNLPFDK
SNQRNLPFDR

SEQ ID NO: 24276 - protein, 10 aa, Artificial Sequence
  Description of Artificial Sequence: Synthetic peptide
  Seed: SVQRNLPFDK
SNQRNLPFDK

SEQ ID NO: 24277 - protein, 10 aa, Artificial Sequence
  Description of Artificial Sequence: Synthetic peptide
  Seed: SVQRNLPFDK
SDQRNLPFDR

SEQ ID NO: 24278 - protein, 10 aa, Artificial Sequence
  Description of Artificial Sequence: Synthetic peptide
  Seed: SVQRNLPFDK
SCQRNLPFDR

SEQ ID NO: 24279 - protein, 10 aa, Artificial Sequence
  Description of Artificial Sequence: Synthetic peptide
  Seed: SVQRNLPFDK
SQQRNLPFDR

SEQ ID NO: 24280 - protein, 10 aa, Artificial Sequence
  Description of Artificial Sequence: Synthetic peptide
  Seed: SVQRNLPFDK
SQQRNLPFDK

SEQ ID NO: 24281 - protein, 10 aa, Artificial Sequence
  Description of Artificial Sequence: Synthetic peptide
  Seed: SVQRNLPFDK
SEQRNLPFDR

SEQ ID NO: 24282 - protein, 10 aa, Artificial Sequence
  Description of Artificial Sequence: Synthetic peptide
  Seed: SVQRNLPFDK
SGQRNLPFDR

SEQ ID NO: 24283 - protein, 10 aa, Artificial Sequence
  Description of Artificial Sequence: Synthetic peptide
  Seed: SVQRNLPFDK
SGQRNLPFDK

SEQ ID NO: 24284 - protein, 10 aa, Artificial Sequence
  Description of Artificial Sequence: Synthetic peptide
  Seed: SVQRNLPFDK
SHQRNLPFDR

SEQ ID NO: 24285 - protein, 10 aa, Artificial Sequence
  Description of Artificial Sequence: Synthetic peptide
  Seed: SVQRNLPFDK
SIQRNLPFDR

SEQ ID NO: 24286 - protein, 10 aa, Artificial Sequence
  Description of Artificial Sequence: Synthetic peptide
  Seed: SVQRNLPFDK
SIQRNLPFDK

SEQ ID NO: 24287 - protein, 10 aa, Artificial Sequence
  Description of Artificial Sequence: Synthetic peptide
  Seed: SVQRNLPFDK
SLQRNLPFDR

SEQ ID NO: 24288 - protein, 10 aa, Artificial Sequence
  Description of Artificial Sequence: Synthetic peptide
  Seed: SVQRNLPFDK
SLQRNLPFDK

SEQ ID NO: 24289 - protein, 10 aa, Artificial Sequence
  Description of Artificial Sequence: Synthetic peptide
  Seed: SVQRNLPFDK
SKQRNLPFDR

SEQ ID NO: 24290 - protein, 10 aa, Artificial Sequence
  Description of Artificial Sequence: Synthetic peptide
  Seed: SVQRNLPFDK
SMQRNLPFDR

SEQ ID NO: 24291 - protein, 10 aa, Artificial Sequence
  Description of Artificial Sequence: Synthetic peptide
  Seed: SVQRNLPFDK
SMQRNLPFDK

SEQ ID NO: 24292 - protein, 10 aa, Artificial Sequence
  Description of Artificial Sequence: Synthetic peptide
  Seed: TFSVQRNLPF
TFSVQRNLPL

SEQ ID NO: 24293 - protein, 10 aa, Artificial Sequence
  Description of Artificial Sequence: Synthetic peptide
  Seed: TFSVQRNLPF
TASVQRNLPF

SEQ ID NO: 24294 - protein, 10 aa, Artificial Sequence
  Description of Artificial Sequence: Synthetic peptide
  Seed: TEIRASVGKM
TEIRASVGKI

SEQ ID NO: 24295 - protein, 10 aa, Artificial Sequence
  Description of Artificial Sequence: Synthetic peptide
  Seed: TEIRASVGKM
TEIRASVGKL

SEQ ID NO: 24296 - protein, 10 aa, Artificial Sequence
  Description of Artificial Sequence: Synthetic peptide
  Seed: TEIRASVGKM
TEIRASVGKF

SEQ ID NO: 24297 - protein, 10 aa, Artificial Sequence
  Description of Artificial Sequence: Synthetic peptide
  Seed: TEIRASVGKM
TEIRASVGKV

SEQ ID NO: 24298 - protein, 10 aa, Artificial Sequence
  Description of Artificial Sequence: Synthetic peptide
  Seed: TEIRASVGRM
TEIRASVGRI

SEQ ID NO: 24299 - protein, 10 aa, Artificial Sequence
  Description of Artificial Sequence: Synthetic peptide
  Seed: TEIRASVGRM
TEIRASVGRL

SEQ ID NO: 24300 - protein, 10 aa, Artificial Sequence
  Description of Artificial Sequence: Synthetic peptide
  Seed: TEIRASVGRM
TEIRASVGRF

SEQ ID NO: 24301 - protein, 10 aa, Artificial Sequence
  Description of Artificial Sequence: Synthetic peptide
  Seed: TEIRASVGRM
TEIRASVGRV

SEQ ID NO: 24302 - protein, 10 aa, Artificial Sequence
  Description of Artificial Sequence: Synthetic peptide
  Seed: TFSVQRNLPF
TASVQRNLPL

SEQ ID NO: 24303 - protein, 10 aa, Artificial Sequence
  Description of Artificial Sequence: Synthetic peptide
  Seed: TAGLTHLMIW
TPGLTHLMIW

SEQ ID NO: 24304 - protein, 10 aa, Artificial Sequence
  Description of Artificial Sequence: Synthetic peptide
  Seed: TAGLTHLMIW
TSGLTHLMIL

SEQ ID NO: 24305 - protein, 10 aa, Artificial Sequence
  Description of Artificial Sequence: Synthetic peptide
  Seed: TAGLTHLMIW
TSGLTHLMIM

SEQ ID NO: 24306 - protein, 10 aa, Artificial Sequence
  Description of Artificial Sequence: Synthetic peptide
  Seed: TAGLTHLMIW
TSGLTHLMIF

SEQ ID NO: 24307 - protein, 10 aa, Artificial Sequence
  Description of Artificial Sequence: Synthetic peptide
  Seed: TAGLTHLMIW
TSGLTHLMIW

SEQ ID NO: 24308 - protein, 10 aa, Artificial Sequence
  Description of Artificial Sequence: Synthetic peptide
  Seed: TAGLTHLMIW
TSGLTHLMIY

SEQ ID NO: 24309 - protein, 10 aa, Artificial Sequence
  Description of Artificial Sequence: Synthetic peptide
  Seed: TAGLTHLMIW
TTGLTHLMIL

SEQ ID NO: 24310 - protein, 10 aa, Artificial Sequence
  Description of Artificial Sequence: Synthetic peptide
  Seed: TAGLTHLMIW
TTGLTHLMIM

SEQ ID NO: 24311 - protein, 10 aa, Artificial Sequence
  Description of Artificial Sequence: Synthetic peptide
  Seed: TAGLTHLMIW
TTGLTHLMIF

SEQ ID NO: 24312 - protein, 10 aa, Artificial Sequence
  Description of Artificial Sequence: Synthetic peptide
  Seed: TAGLTHLMIW
TTGLTHLMIW

SEQ ID NO: 24313 - protein, 10 aa, Artificial Sequence
  Description of Artificial Sequence: Synthetic peptide
  Seed: TAGLTHLMIW
TTGLTHLMIY

SEQ ID NO: 24314 - protein, 10 aa, Artificial Sequence
  Description of Artificial Sequence: Synthetic peptide
  Seed: TAGLTHLMIW
TWGLTHLMIW

SEQ ID NO: 24315 - protein, 10 aa, Artificial Sequence
  Description of Artificial Sequence: Synthetic peptide
  Seed: TAGLTHLMIW
TYGLTHLMIW

SEQ ID NO: 24316 - protein, 10 aa, Artificial Sequence
  Description of Artificial Sequence: Synthetic peptide
  Seed: TAGLTHLMIW
TVGLTHLMIW

SEQ ID NO: 24317 - protein, 10 aa, Artificial Sequence
  Description of Artificial Sequence: Synthetic peptide
  Seed: TFSVQRNLPF
TASVQRNLPM

SEQ ID NO: 24318 - protein, 10 aa, Artificial Sequence
  Description of Artificial Sequence: Synthetic peptide
  Seed: TFSVQRNLPF
TASVQRNLPW

SEQ ID NO: 24319 - protein, 10 aa, Artificial Sequence
  Description of Artificial Sequence: Synthetic peptide
  Seed: TFSVQRNLPF
TLSVQRNLPW

SEQ ID NO: 24320 - protein, 10 aa, Artificial Sequence
  Description of Artificial Sequence: Synthetic peptide
  Seed: TFSVQRNLPF
TGSVQRNLPY

SEQ ID NO: 24321 - protein, 10 aa, Artificial Sequence
  Description of Artificial Sequence: Synthetic peptide
  Seed: TFSVQRNLPF
THSVQRNLPF

SEQ ID NO: 24322 - protein, 10 aa, Artificial Sequence
  Description of Artificial Sequence: Synthetic peptide
  Seed: TFSVQRNLPF
THSVQRNLPW

SEQ ID NO: 24323 - protein, 10 aa, Artificial Sequence
  Description of Artificial Sequence: Synthetic peptide
  Seed: TFSVQRNLPF
THSVQRNLPY

SEQ ID NO: 24324 - protein, 10 aa, Artificial Sequence
  Description of Artificial Sequence: Synthetic peptide
  Seed: TFSVQRNLPF
TISVQRNLPF

SEQ ID NO: 24325 - protein, 10 aa, Artificial Sequence
  Description of Artificial Sequence: Synthetic peptide
  Seed: TFSVQRNLPF
TISVQRNLPW

SEQ ID NO: 24326 - protein, 10 aa, Artificial Sequence
  Description of Artificial Sequence: Synthetic peptide
  Seed: TFSVQRNLPF
TISVQRNLPY

SEQ ID NO: 24327 - protein, 10 aa, Artificial Sequence
  Description of Artificial Sequence: Synthetic peptide
  Seed: TFSVQRNLPF
TLSVQRNLPM

SEQ ID NO: 24328 - protein, 10 aa, Artificial Sequence
  Description of Artificial Sequence: Synthetic peptide
  Seed: TFSVQRNLPF
TLSVQRNLPF

SEQ ID NO: 24329 - protein, 10 aa, Artificial Sequence
  Description of Artificial Sequence: Synthetic peptide
  Seed: TFSVQRNLPF
TLSVQRNLPY

SEQ ID NO: 24330 - protein, 10 aa, Artificial Sequence
  Description of Artificial Sequence: Synthetic peptide
  Seed: TFSVQRNLPF
TASVQRNLPY

SEQ ID NO: 24331 - protein, 10 aa, Artificial Sequence
  Description of Artificial Sequence: Synthetic peptide
  Seed: TFSVQRNLPF
TKSVQRNLPM

SEQ ID NO: 24332 - protein, 10 aa, Artificial Sequence
  Description of Artificial Sequence: Synthetic peptide
  Seed: TFSVQRNLPF
TKSVQRNLPF

SEQ ID NO: 24333 - protein, 10 aa, Artificial Sequence
  Description of Artificial Sequence: Synthetic peptide
  Seed: TFSVQRNLPF
TKSVQRNLPW

SEQ ID NO: 24334 - protein, 10 aa, Artificial Sequence
  Description of Artificial Sequence: Synthetic peptide
  Seed: TFSVQRNLPF
TKSVQRNLPY

SEQ ID NO: 24335 - protein, 10 aa, Artificial Sequence
  Description of Artificial Sequence: Synthetic peptide
  Seed: TFSVQRNLPF
TMSVQRNLPL

SEQ ID NO: 24336 - protein, 10 aa, Artificial Sequence
  Description of Artificial Sequence: Synthetic peptide
  Seed: TFSVQRNLPF
TMSVQRNLPM

SEQ ID NO: 24337 - protein, 10 aa, Artificial Sequence
  Description of Artificial Sequence: Synthetic peptide
  Seed: TFSVQRNLPF
TMSVQRNLPF

SEQ ID NO: 24338 - protein, 10 aa, Artificial Sequence
  Description of Artificial Sequence: Synthetic peptide
  Seed: TFSVQRNLPF
TMSVQRNLPW

SEQ ID NO: 24339 - protein, 10 aa, Artificial Sequence
  Description of Artificial Sequence: Synthetic peptide
  Seed: TFSVQRNLPF
TMSVQRNLPY

SEQ ID NO: 24340 - protein, 10 aa, Artificial Sequence
  Description of Artificial Sequence: Synthetic peptide
  Seed: TFSVQRNLPF
TGSVQRNLPW

SEQ ID NO: 24341 - protein, 10 aa, Artificial Sequence
  Description of Artificial Sequence: Synthetic peptide
  Seed: TFSVQRNLPF
TGSVQRNLPF

SEQ ID NO: 24342 - protein, 10 aa, Artificial Sequence
  Description of Artificial Sequence: Synthetic peptide
  Seed: TFSVQRNLPF
TESVQRNLPY

SEQ ID NO: 24343 - protein, 10 aa, Artificial Sequence
  Description of Artificial Sequence: Synthetic peptide
  Seed: TFSVQRNLPF
TESVQRNLPW

SEQ ID NO: 24344 - protein, 10 aa, Artificial Sequence
  Description of Artificial Sequence: Synthetic peptide
  Seed: TFSVQRNLPF
TRSVQRNLPM

SEQ ID NO: 24345 - protein, 10 aa, Artificial Sequence
  Description of Artificial Sequence: Synthetic peptide
  Seed: TFSVQRNLPF
TRSVQRNLPF

SEQ ID NO: 24346 - protein, 10 aa, Artificial Sequence
  Description of Artificial Sequence: Synthetic peptide
  Seed: TFSVQRNLPF
TRSVQRNLPW

SEQ ID NO: 24347 - protein, 10 aa, Artificial Sequence
  Description of Artificial Sequence: Synthetic peptide
  Seed: TFSVQRNLPF
TRSVQRNLPY

SEQ ID NO: 24348 - protein, 10 aa, Artificial Sequence
  Description of Artificial Sequence: Synthetic peptide
  Seed: TFSVQRNLPF
TNSVQRNLPF

SEQ ID NO: 24349 - protein, 10 aa, Artificial Sequence
  Description of Artificial Sequence: Synthetic peptide
  Seed: TFSVQRNLPF
TNSVQRNLPW

SEQ ID NO: 24350 - protein, 10 aa, Artificial Sequence
  Description of Artificial Sequence: Synthetic peptide
  Seed: TFSVQRNLPF
TNSVQRNLPY

SEQ ID NO: 24351 - protein, 10 aa, Artificial Sequence
  Description of Artificial Sequence: Synthetic peptide
  Seed: TFSVQRNLPF
TDSVQRNLPF

SEQ ID NO: 24352 - protein, 10 aa, Artificial Sequence
  Description of Artificial Sequence: Synthetic peptide
  Seed: TFSVQRNLPF
TDSVQRNLPW

SEQ ID NO: 24353 - protein, 10 aa, Artificial Sequence
  Description of Artificial Sequence: Synthetic peptide
  Seed: TFSVQRNLPF
TDSVQRNLPY

SEQ ID NO: 24354 - protein, 10 aa, Artificial Sequence
  Description of Artificial Sequence: Synthetic peptide
  Seed: TFSVQRNLPF
TCSVQRNLPF

SEQ ID NO: 24355 - protein, 10 aa, Artificial Sequence
  Description of Artificial Sequence: Synthetic peptide
  Seed: TFSVQRNLPF
TCSVQRNLPW

SEQ ID NO: 24356 - protein, 10 aa, Artificial Sequence
  Description of Artificial Sequence: Synthetic peptide
  Seed: TFSVQRNLPF
TCSVQRNLPY

SEQ ID NO: 24357 - protein, 10 aa, Artificial Sequence
  Description of Artificial Sequence: Synthetic peptide
  Seed: TFSVQRNLPF
TQSVQRNLPL

SEQ ID NO: 24358 - protein, 10 aa, Artificial Sequence
  Description of Artificial Sequence: Synthetic peptide
  Seed: TFSVQRNLPF
TQSVQRNLPM

SEQ ID NO: 24359 - protein, 10 aa, Artificial Sequence
  Description of Artificial Sequence: Synthetic peptide
  Seed: TFSVQRNLPF
TQSVQRNLPF

SEQ ID NO: 24360 - protein, 10 aa, Artificial Sequence
  Description of Artificial Sequence: Synthetic peptide
  Seed: TFSVQRNLPF
TQSVQRNLPW

SEQ ID NO: 24361 - protein, 10 aa, Artificial Sequence
  Description of Artificial Sequence: Synthetic peptide
  Seed: TFSVQRNLPF
TQSVQRNLPY

SEQ ID NO: 24362 - protein, 10 aa, Artificial Sequence
  Description of Artificial Sequence: Synthetic peptide
  Seed: TFSVQRNLPF
TESVQRNLPF

SEQ ID NO: 24363 - protein, 10 aa, Artificial Sequence
  Description of Artificial Sequence: Synthetic peptide
  Seed: TAGLTHLMIW
TFGLTHLMIW

SEQ ID NO: 24364 - protein, 10 aa, Artificial Sequence
  Description of Artificial Sequence: Synthetic peptide
  Seed: TAGLTHLMIW
TMGLTHLMIW

SEQ ID NO: 24365 - protein, 10 aa, Artificial Sequence
  Description of Artificial Sequence: Synthetic peptide
  Seed: TAGLTHLMIW
TKGLTHLMIW

SEQ ID NO: 24366 - protein, 11 aa, Artificial Sequence
  Description of Artificial Sequence: Synthetic peptide
  Seed: SYFFGDNAEEY
STFFGDNAEEF

SEQ ID NO: 24367 - protein, 11 aa, Artificial Sequence
  Description of Artificial Sequence: Synthetic peptide
  Seed: SYFFGDNAEEY
SIFFGDNAEEF

SEQ ID NO: 24368 - protein, 11 aa, Artificial Sequence
  Description of Artificial Sequence: Synthetic peptide
  Seed: SYFFGDNAEEY
SKFFGDNAEEF

SEQ ID NO: 24369 - protein, 11 aa, Artificial Sequence
  Description of Artificial Sequence: Synthetic peptide
  Seed: SYFFGDNAEEY
SMFFGDNAEEF

SEQ ID NO: 24370 - protein, 11 aa, Artificial Sequence
  Description of Artificial Sequence: Synthetic peptide
  Seed: SYFFGDNAEEY
SFFFGDNAEEL

SEQ ID NO: 24371 - protein, 11 aa, Artificial Sequence
  Description of Artificial Sequence: Synthetic peptide
  Seed: SYFFGDNAEEY
SFFFGDNAEEM

SEQ ID NO: 24372 - protein, 11 aa, Artificial Sequence
  Description of Artificial Sequence: Synthetic peptide
  Seed: SYFFGDNAEEY
SFFFGDNAEEF

SEQ ID NO: 24373 - protein, 11 aa, Artificial Sequence
  Description of Artificial Sequence: Synthetic peptide
  Seed: SYFFGDNAEEY
SFFFGDNAEEW

SEQ ID NO: 24374 - protein, 11 aa, Artificial Sequence
  Description of Artificial Sequence: Synthetic peptide
  Seed: SYFFGDNAEEY
SFFFGDNAEEY

SEQ ID NO: 24375 - protein, 11 aa, Artificial Sequence
  Description of Artificial Sequence: Synthetic peptide
  Seed: SYFFGDNAEEY
SSFFGDNAEEF

SEQ ID NO: 24376 - protein, 11 aa, Artificial Sequence
  Description of Artificial Sequence: Synthetic peptide
  Seed: SYFFGDNAEEY
SWFFGDNAEEI

SEQ ID NO: 24377 - protein, 10 aa, Artificial Sequence
  Description of Artificial Sequence: Synthetic peptide
  Seed: TAGLTHLMIW
TLGLTHLMIW

SEQ ID NO: 24378 - protein, 11 aa, Artificial Sequence
  Description of Artificial Sequence: Synthetic peptide
  Seed: SYFFGDNAEEY
SWFFGDNAEEL

SEQ ID NO: 24379 - protein, 11 aa, Artificial Sequence
  Description of Artificial Sequence: Synthetic peptide
  Seed: SYFFGDNAEEY
SWFFGDNAEEM

SEQ ID NO: 24380 - protein, 11 aa, Artificial Sequence
  Description of Artificial Sequence: Synthetic peptide
  Seed: SYFFGDNAEEY
SWFFGDNAEEF

SEQ ID NO: 24381 - protein, 11 aa, Artificial Sequence
  Description of Artificial Sequence: Synthetic peptide
  Seed: SYFFGDNAEEY
SWFFGDNAEEW

SEQ ID NO: 24382 - protein, 11 aa, Artificial Sequence
  Description of Artificial Sequence: Synthetic peptide
  Seed: SYFFGDNAEEY
SYFFGDNAEEI

SEQ ID NO: 24383 - protein, 11 aa, Artificial Sequence
  Description of Artificial Sequence: Synthetic peptide
  Seed: SYFFGDNAEEY
SYFFGDNAEEL

SEQ ID NO: 24384 - protein, 11 aa, Artificial Sequence
  Description of Artificial Sequence: Synthetic peptide
  Seed: SYFFGDNAEEY
SYFFGDNAEEM

SEQ ID NO: 24385 - protein, 11 aa, Artificial Sequence
  Description of Artificial Sequence: Synthetic peptide
  Seed: SYFFGDNAEEY
SYFFGDNAEEW

SEQ ID NO: 24386 - protein, 11 aa, Artificial Sequence
  Description of Artificial Sequence: Synthetic peptide
  Seed: SYFFGDNAEEY
SHFFGDNAEEF

SEQ ID NO: 24387 - protein, 11 aa, Artificial Sequence
  Description of Artificial Sequence: Synthetic peptide
  Seed: SYFFGDNAEEY
SRFFGDNAEEF

SEQ ID NO: 24388 - protein, 11 aa, Artificial Sequence
  Description of Artificial Sequence: Synthetic peptide
  Seed: SYEQMETGGER
STEQMETGGER

SEQ ID NO: 24389 - protein, 11 aa, Artificial Sequence
  Description of Artificial Sequence: Synthetic peptide
  Seed: SYEQMETGGER
SFEQMETGGER

SEQ ID NO: 24390 - protein, 11 aa, Artificial Sequence
  Description of Artificial Sequence: Synthetic peptide
  Seed: SYEQMETGGER
SMEQMETGGER

SEQ ID NO: 24391 - protein, 11 aa, Artificial Sequence
  Description of Artificial Sequence: Synthetic peptide
  Seed: SYFFGDNAEEY
SYFFGDNAEEV

SEQ ID NO: 24392 - protein, 11 aa, Artificial Sequence
  Description of Artificial Sequence: Synthetic peptide
  Seed: SYFFGDNAEEY
SVFFGDNAEEF

SEQ ID NO: 24393 - protein, 8 aa, Artificial Sequence
  Description of Artificial Sequence: Synthetic peptide
  Seed: TAAQRAMM
TAAQRAML

SEQ ID NO: 24394 - protein, 10 aa, Artificial Sequence
  Description of Artificial Sequence: Synthetic peptide
  Seed: TAGLTHIMIW
TSGLTHIMIW

SEQ ID NO: 24395 - protein, 10 aa, Artificial Sequence
  Description of Artificial Sequence: Synthetic peptide
  Seed: TAGLTHIMIW
TTGLTHIMIL

SEQ ID NO: 24396 - protein, 10 aa, Artificial Sequence
  Description of Artificial Sequence: Synthetic peptide
  Seed: TAGLTHIMIW
TTGLTHIMIM

SEQ ID NO: 24397 - protein, 10 aa, Artificial Sequence
  Description of Artificial Sequence: Synthetic peptide
  Seed: TAGLTHIMIW
TTGLTHIMIF

SEQ ID NO: 24398 - protein, 10 aa, Artificial Sequence
  Description of Artificial Sequence: Synthetic peptide
  Seed: TAGLTHIMIW
TTGLTHIMIW

SEQ ID NO: 24399 - protein, 10 aa, Artificial Sequence
  Description of Artificial Sequence: Synthetic peptide
  Seed: TAGLTHIMIW
TTGLTHIMIY

SEQ ID NO: 24400 - protein, 10 aa, Artificial Sequence
  Description of Artificial Sequence: Synthetic peptide
  Seed: TAGLTHIMIW
TWGLTHIMIW

SEQ ID NO: 24401 - protein, 10 aa, Artificial Sequence
  Description of Artificial Sequence: Synthetic peptide
  Seed: TAGLTHIMIW
TYGLTHIMIW

SEQ ID NO: 24402 - protein, 10 aa, Artificial Sequence
  Description of Artificial Sequence: Synthetic peptide
  Seed: TAGLTHIMIW
TVGLTHIMIW

SEQ ID NO: 24403 - protein, 10 aa, Artificial Sequence
  Description of Artificial Sequence: Synthetic peptide
  Seed: TAGLTHLMIW
TAGLTHLMIF

SEQ ID NO: 24404 - protein, 10 aa, Artificial Sequence
  Description of Artificial Sequence: Synthetic peptide
  Seed: TAGLTHLMIW
TAGLTHLMIY

SEQ ID NO: 24405 - protein, 10 aa, Artificial Sequence
  Description of Artificial Sequence: Synthetic peptide
  Seed: TAGLTHLMIW
TRGLTHLMIW

SEQ ID NO: 24406 - protein, 10 aa, Artificial Sequence
  Description of Artificial Sequence: Synthetic peptide
  Seed: TAGLTHLMIW
TNGLTHLMIW

SEQ ID NO: 24407 - protein, 10 aa, Artificial Sequence
  Description of Artificial Sequence: Synthetic peptide
  Seed: TAGLTHLMIW
TDGLTHLMIW

SEQ ID NO: 24408 - protein, 10 aa, Artificial Sequence
  Description of Artificial Sequence: Synthetic peptide
  Seed: TAGLTHLMIW
TCGLTHLMIW

SEQ ID NO: 24409 - protein, 10 aa, Artificial Sequence
  Description of Artificial Sequence: Synthetic peptide
  Seed: TAGLTHLMIW
TQGLTHLMIW

SEQ ID NO: 24410 - protein, 10 aa, Artificial Sequence
  Description of Artificial Sequence: Synthetic peptide
  Seed: TAGLTHLMIW
TEGLTHLMIW

SEQ ID NO: 24411 - protein, 10 aa, Artificial Sequence
  Description of Artificial Sequence: Synthetic peptide
  Seed: TAGLTHLMIW
TGGLTHLMIW

SEQ ID NO: 24412 - protein, 10 aa, Artificial Sequence
  Description of Artificial Sequence: Synthetic peptide
  Seed: TAGLTHLMIW
THGLTHLMIW

SEQ ID NO: 24413 - protein, 10 aa, Artificial Sequence
  Description of Artificial Sequence: Synthetic peptide
  Seed: TAGLTHLMIW
TIGLTHLMIW

SEQ ID NO: 24414 - protein, 10 aa, Artificial Sequence
  Description of Artificial Sequence: Synthetic peptide
  Seed: TAGLTHIMIW
TSGLTHIMIY

SEQ ID NO: 24415 - protein, 10 aa, Artificial Sequence
  Description of Artificial Sequence: Synthetic peptide
  Seed: TAGLTHIMIW
TSGLTHIMIF

SEQ ID NO: 24416 - protein, 8 aa, Artificial Sequence
  Description of Artificial Sequence: Synthetic peptide
  Seed: TAAQRAMM
TAAQRAMF

SEQ ID NO: 24417 - protein, 10 aa, Artificial Sequence
  Description of Artificial Sequence: Synthetic peptide
  Seed: TAGLTHIMIW
TSGLTHIMIM

SEQ ID NO: 24418 - protein, 8 aa, Artificial Sequence
  Description of Artificial Sequence: Synthetic peptide
  Seed: TAAQRAMM
TAAQRAMY

SEQ ID NO: 24419 - protein, 8 aa, Artificial Sequence
  Description of Artificial Sequence: Synthetic peptide
  Seed: TAAQRAMM
TSAQRAMM

SEQ ID NO: 24420 - protein, 10 aa, Artificial Sequence
  Description of Artificial Sequence: Synthetic peptide
  Seed: TAGLTHIMIW
TAGLTHIMIF

SEQ ID NO: 24421 - protein, 10 aa, Artificial Sequence
  Description of Artificial Sequence: Synthetic peptide
  Seed: TAGLTHIMIW
TAGLTHIMIY

SEQ ID NO: 24422 - protein, 10 aa, Artificial Sequence
  Description of Artificial Sequence: Synthetic peptide
  Seed: TAGLTHIMIW
TRGLTHIMIW

SEQ ID NO: 24423 - protein, 10 aa, Artificial Sequence
  Description of Artificial Sequence: Synthetic peptide
  Seed: TAGLTHIMIW
TNGLTHIMIW

SEQ ID NO: 24424 - protein, 10 aa, Artificial Sequence
  Description of Artificial Sequence: Synthetic peptide
  Seed: TAGLTHIMIW
TDGLTHIMIW

SEQ ID NO: 24425 - protein, 10 aa, Artificial Sequence
  Description of Artificial Sequence: Synthetic peptide
  Seed: TAGLTHIMIW
TCGLTHIMIW

SEQ ID NO: 24426 - protein, 10 aa, Artificial Sequence
  Description of Artificial Sequence: Synthetic peptide
  Seed: TAGLTHIMIW
TQGLTHIMIW

SEQ ID NO: 24427 - protein, 10 aa, Artificial Sequence
  Description of Artificial Sequence: Synthetic peptide
  Seed: TAGLTHIMIW
TEGLTHIMIW

SEQ ID NO: 24428 - protein, 10 aa, Artificial Sequence
  Description of Artificial Sequence: Synthetic peptide
  Seed: TAGLTHIMIW
TGGLTHIMIW

SEQ ID NO: 24429 - protein, 10 aa, Artificial Sequence
  Description of Artificial Sequence: Synthetic peptide
  Seed: TAGLTHIMIW
THGLTHIMIW

SEQ ID NO: 24430 - protein, 10 aa, Artificial Sequence
  Description of Artificial Sequence: Synthetic peptide
  Seed: TAGLTHIMIW
TIGLTHIMIW

SEQ ID NO: 24431 - protein, 10 aa, Artificial Sequence
  Description of Artificial Sequence: Synthetic peptide
  Seed: TAGLTHIMIW
TLGLTHIMIW

SEQ ID NO: 24432 - protein, 10 aa, Artificial Sequence
  Description of Artificial Sequence: Synthetic peptide
  Seed: TAGLTHIMIW
TKGLTHIMIW

SEQ ID NO: 24433 - protein, 10 aa, Artificial Sequence
  Description of Artificial Sequence: Synthetic peptide
  Seed: TAGLTHIMIW
TMGLTHIMIW

SEQ ID NO: 24434 - protein, 10 aa, Artificial Sequence
  Description of Artificial Sequence: Synthetic peptide
  Seed: TAGLTHIMIW
TFGLTHIMIW

SEQ ID NO: 24435 - protein, 10 aa, Artificial Sequence
  Description of Artificial Sequence: Synthetic peptide
  Seed: TAGLTHIMIW
TPGLTHIMIW

SEQ ID NO: 24436 - protein, 10 aa, Artificial Sequence
  Description of Artificial Sequence: Synthetic peptide
  Seed: TAGLTHIMIW
TSGLTHIMIL

SEQ ID NO: 24437 - protein, 10 aa, Artificial Sequence
  Description of Artificial Sequence: Synthetic peptide
  Seed: SSTLELRSRY
SYTLELRSRF

SEQ ID NO: 24438 - protein, 10 aa, Artificial Sequence
  Description of Artificial Sequence: Synthetic peptide
  Seed: SSTLELRSRY
SWTLELRSRW

SEQ ID NO: 24439 - protein, 9 aa, Artificial Sequence
  Description of Artificial Sequence: Synthetic peptide
  Seed: SFRGRGVFE
SIRGRGVFS

SEQ ID NO: 24440 - protein, 11 aa, Artificial Sequence
  Description of Artificial Sequence: Synthetic peptide
  Seed: SLMQGSTLPRR
SIMQGSTLPRL

SEQ ID NO: 24441 - protein, 11 aa, Artificial Sequence
  Description of Artificial Sequence: Synthetic peptide
  Seed: SLMQGSTLPRR
SIMQGSTLPRR

SEQ ID NO: 24442 - protein, 11 aa, Artificial Sequence
  Description of Artificial Sequence: Synthetic peptide
  Seed: SLMQGSTLPRR
SIMQGSTLPRN

SEQ ID NO: 24443 - protein, 11 aa, Artificial Sequence
  Description of Artificial Sequence: Synthetic peptide
  Seed: SLMQGSTLPRR
SIMQGSTLPRD

SEQ ID NO: 24444 - protein, 11 aa, Artificial Sequence
  Description of Artificial Sequence: Synthetic peptide
  Seed: SLMQGSTLPRR
SIMQGSTLPRC

SEQ ID NO: 24445 - protein, 11 aa, Artificial Sequence
  Description of Artificial Sequence: Synthetic peptide
  Seed: SLMQGSTLPRR
SIMQGSTLPRQ

SEQ ID NO: 24446 - protein, 11 aa, Artificial Sequence
  Description of Artificial Sequence: Synthetic peptide
  Seed: SLMQGSTLPRR
SIMQGSTLPRE

SEQ ID NO: 24447 - protein, 11 aa, Artificial Sequence
  Description of Artificial Sequence: Synthetic peptide
  Seed: SLMQGSTLPRR
SIMQGSTLPRG

SEQ ID NO: 24448 - protein, 11 aa, Artificial Sequence
  Description of Artificial Sequence: Synthetic peptide
  Seed: SLMQGSTLPRR
SIMQGSTLPRH

SEQ ID NO: 24449 - protein, 11 aa, Artificial Sequence
  Description of Artificial Sequence: Synthetic peptide
  Seed: SLMQGSTLPRR
SIMQGSTLPRI

SEQ ID NO: 24450 - protein, 11 aa, Artificial Sequence
  Description of Artificial Sequence: Synthetic peptide
  Seed: SLMQGSTLPRR
SIMQGSTLPRK

SEQ ID NO: 24451 - protein, 11 aa, Artificial Sequence
  Description of Artificial Sequence: Synthetic peptide
  Seed: SLMQGSTLPRR
SLMQGSTLPRD

SEQ ID NO: 24452 - protein, 11 aa, Artificial Sequence
  Description of Artificial Sequence: Synthetic peptide
  Seed: SLMQGSTLPRR
SIMQGSTLPRM

SEQ ID NO: 24453 - protein, 11 aa, Artificial Sequence
  Description of Artificial Sequence: Synthetic peptide
  Seed: SLMQGSTLPRR
SIMQGSTLPRF

SEQ ID NO: 24454 - protein, 11 aa, Artificial Sequence
  Description of Artificial Sequence: Synthetic peptide
  Seed: SLMQGSTLPRR
SIMQGSTLPRP

SEQ ID NO: 24455 - protein, 11 aa, Artificial Sequence
  Description of Artificial Sequence: Synthetic peptide
  Seed: SLMQGSTLPRR
SIMQGSTLPRS

SEQ ID NO: 24456 - protein, 11 aa, Artificial Sequence
  Description of Artificial Sequence: Synthetic peptide
  Seed: SLMQGSTLPRR
SIMQGSTLPRT

SEQ ID NO: 24457 - protein, 11 aa, Artificial Sequence
  Description of Artificial Sequence: Synthetic peptide
  Seed: SLMQGSTLPRR
SIMQGSTLPRW

SEQ ID NO: 24458 - protein, 11 aa, Artificial Sequence
  Description of Artificial Sequence: Synthetic peptide
  Seed: SLMQGSTLPRR
SIMQGSTLPRY

SEQ ID NO: 24459 - protein, 11 aa, Artificial Sequence
  Description of Artificial Sequence: Synthetic peptide
  Seed: SLMQGSTLPRR
SIMQGSTLPRV

SEQ ID NO: 24460 - protein, 11 aa, Artificial Sequence
  Description of Artificial Sequence: Synthetic peptide
  Seed: SLMQGSTLPRR
SLMQGSTLPRA

SEQ ID NO: 24461 - protein, 11 aa, Artificial Sequence
  Description of Artificial Sequence: Synthetic peptide
  Seed: SLMQGSTLPRR
SIMQGSTLPRA

SEQ ID NO: 24462 - protein, 11 aa, Artificial Sequence
  Description of Artificial Sequence: Synthetic peptide
  Seed: SLMQGSTLPRR
SHMQGSTLPRK

SEQ ID NO: 24463 - protein, 11 aa, Artificial Sequence
  Description of Artificial Sequence: Synthetic peptide
  Seed: SLMQGSTLPRR
SHMQGSTLPRR

SEQ ID NO: 24464 - protein, 11 aa, Artificial Sequence
  Description of Artificial Sequence: Synthetic peptide
  Seed: SLMQGSTLPRR
SGMQGSTLPRK

SEQ ID NO: 24465 - protein, 11 aa, Artificial Sequence
  Description of Artificial Sequence: Synthetic peptide
  Seed: SLMQGSTLPRR
SQMQGSTLPRD

SEQ ID NO: 24466 - protein, 11 aa, Artificial Sequence
  Description of Artificial Sequence: Synthetic peptide
  Seed: SLMQGSTLPRR
SQMQGSTLPRC

SEQ ID NO: 24467 - protein, 11 aa, Artificial Sequence
  Description of Artificial Sequence: Synthetic peptide
  Seed: SLMQGSTLPRR
SQMQGSTLPRQ

SEQ ID NO: 24468 - protein, 11 aa, Artificial Sequence
  Description of Artificial Sequence: Synthetic peptide
  Seed: SLMQGSTLPRR
SQMQGSTLPRE

SEQ ID NO: 24469 - protein, 11 aa, Artificial Sequence
  Description of Artificial Sequence: Synthetic peptide
  Seed: SLMQGSTLPRR
SQMQGSTLPRG

SEQ ID NO: 24470 - protein, 11 aa, Artificial Sequence
  Description of Artificial Sequence: Synthetic peptide
  Seed: SLMQGSTLPRR
SQMQGSTLPRH

SEQ ID NO: 24471 - protein, 11 aa, Artificial Sequence
  Description of Artificial Sequence: Synthetic peptide
  Seed: SLMQGSTLPRR
SQMQGSTLPRI

SEQ ID NO: 24472 - protein, 11 aa, Artificial Sequence
  Description of Artificial Sequence: Synthetic peptide
  Seed: SLMQGSTLPRR
SQMQGSTLPRL

SEQ ID NO: 24473 - protein, 11 aa, Artificial Sequence
  Description of Artificial Sequence: Synthetic peptide
  Seed: SLMQGSTLPRR
SQMQGSTLPRK

SEQ ID NO: 24474 - protein, 11 aa, Artificial Sequence
  Description of Artificial Sequence: Synthetic peptide
  Seed: SLMQGSTLPRR
SQMQGSTLPRM

SEQ ID NO: 24475 - protein, 11 aa, Artificial Sequence
  Description of Artificial Sequence: Synthetic peptide
  Seed: SLMQGSTLPRR
SQMQGSTLPRF

SEQ ID NO: 24476 - protein, 11 aa, Artificial Sequence
  Description of Artificial Sequence: Synthetic peptide
  Seed: SLMQGSTLPRR
SQMQGSTLPRP

SEQ ID NO: 24477 - protein, 11 aa, Artificial Sequence
  Description of Artificial Sequence: Synthetic peptide
  Seed: SLMQGSTLPRR
SQMQGSTLPRS

SEQ ID NO: 24478 - protein, 11 aa, Artificial Sequence
  Description of Artificial Sequence: Synthetic peptide
  Seed: SLMQGSTLPRR
SQMQGSTLPRT

SEQ ID NO: 24479 - protein, 11 aa, Artificial Sequence
  Description of Artificial Sequence: Synthetic peptide
  Seed: SLMQGSTLPRR
SQMQGSTLPRW

SEQ ID NO: 24480 - protein, 11 aa, Artificial Sequence
  Description of Artificial Sequence: Synthetic peptide
  Seed: SLMQGSTLPRR
SQMQGSTLPRY

SEQ ID NO: 24481 - protein, 11 aa, Artificial Sequence
  Description of Artificial Sequence: Synthetic peptide
  Seed: SLMQGSTLPRR
SQMQGSTLPRV

SEQ ID NO: 24482 - protein, 11 aa, Artificial Sequence
  Description of Artificial Sequence: Synthetic peptide
  Seed: SLMQGSTLPRR
SEMQGSTLPRR

SEQ ID NO: 24483 - protein, 11 aa, Artificial Sequence
  Description of Artificial Sequence: Synthetic peptide
  Seed: SLMQGSTLPRR
SGMQGSTLPRR

SEQ ID NO: 24484 - protein, 11 aa, Artificial Sequence
  Description of Artificial Sequence: Synthetic peptide
  Seed: SLMQGSTLPRR
SLMQGSTLPRN

SEQ ID NO: 24485 - protein, 11 aa, Artificial Sequence
  Description of Artificial Sequence: Synthetic peptide
  Seed: SLMQGSTLPRR
SLMQGSTLPRC

SEQ ID NO: 24486 - protein, 11 aa, Artificial Sequence
  Description of Artificial Sequence: Synthetic peptide
  Seed: SLMQGSTLPRR
SQMQGSTLPRR

SEQ ID NO: 24487 - protein, 11 aa, Artificial Sequence
  Description of Artificial Sequence: Synthetic peptide
  Seed: SLMQGSTLPRR
SMMQGSTLPRT

SEQ ID NO: 24488 - protein, 11 aa, Artificial Sequence
  Description of Artificial Sequence: Synthetic peptide
  Seed: SLMQGSTLPRR
SMMQGSTLPRG

SEQ ID NO: 24489 - protein, 11 aa, Artificial Sequence
  Description of Artificial Sequence: Synthetic peptide
  Seed: SLMQGSTLPRR
SMMQGSTLPRH

SEQ ID NO: 24490 - protein, 11 aa, Artificial Sequence
  Description of Artificial Sequence: Synthetic peptide
  Seed: SLMQGSTLPRR
SMMQGSTLPRI

SEQ ID NO: 24491 - protein, 11 aa, Artificial Sequence
  Description of Artificial Sequence: Synthetic peptide
  Seed: SLMQGSTLPRR
SMMQGSTLPRL

SEQ ID NO: 24492 - protein, 11 aa, Artificial Sequence
  Description of Artificial Sequence: Synthetic peptide
  Seed: SLMQGSTLPRR
SMMQGSTLPRK

SEQ ID NO: 24493 - protein, 11 aa, Artificial Sequence
  Description of Artificial Sequence: Synthetic peptide
  Seed: SLMQGSTLPRR
SMMQGSTLPRM

SEQ ID NO: 24494 - protein, 11 aa, Artificial Sequence
  Description of Artificial Sequence: Synthetic peptide
  Seed: SLMQGSTLPRR
SMMQGSTLPRF

SEQ ID NO: 24495 - protein, 11 aa, Artificial Sequence
  Description of Artificial Sequence: Synthetic peptide
  Seed: SLMQGSTLPRR
SMMQGSTLPRP

SEQ ID NO: 24496 - protein, 11 aa, Artificial Sequence
  Description of Artificial Sequence: Synthetic peptide
  Seed: SLMQGSTLPRR
SMMQGSTLPRS

SEQ ID NO: 24497 - protein, 11 aa, Artificial Sequence
  Description of Artificial Sequence: Synthetic peptide
  Seed: SLMQGSTLPRR
SMMQGSTLPRW

SEQ ID NO: 24498 - protein, 11 aa, Artificial Sequence
  Description of Artificial Sequence: Synthetic peptide
  Seed: SLMQGSTLPRR
SLMQGSTLPRQ

SEQ ID NO: 24499 - protein, 11 aa, Artificial Sequence
  Description of Artificial Sequence: Synthetic peptide
  Seed: SLMQGSTLPRR
SMMQGSTLPRY

SEQ ID NO: 24500 - protein, 11 aa, Artificial Sequence
  Description of Artificial Sequence: Synthetic peptide
  Seed: SLMQGSTLPRR
SMMQGSTLPRV

SEQ ID NO: 24501 - protein, 11 aa, Artificial Sequence
  Description of Artificial Sequence: Synthetic peptide
  Seed: SLMQGSTLPRR
SFMQGSTLPRA

SEQ ID NO: 24502 - protein, 11 aa, Artificial Sequence
  Description of Artificial Sequence: Synthetic peptide
  Seed: SLMQGSTLPRR
SFMQGSTLPRR

SEQ ID NO: 24503 - protein, 11 aa, Artificial Sequence
  Description of Artificial Sequence: Synthetic peptide
  Seed: SLMQGSTLPRR
SFMQGSTLPRN

SEQ ID NO: 24504 - protein, 11 aa, Artificial Sequence
  Description of Artificial Sequence: Synthetic peptide
  Seed: SLMQGSTLPRR
SFMQGSTLPRD

SEQ ID NO: 24505 - protein, 11 aa, Artificial Sequence
  Description of Artificial Sequence: Synthetic peptide
  Seed: SLMQGSTLPRR
SFMQGSTLPRC

SEQ ID NO: 24506 - protein, 11 aa, Artificial Sequence
  Description of Artificial Sequence: Synthetic peptide
  Seed: SLMQGSTLPRR
SFMQGSTLPRQ

SEQ ID NO: 24507 - protein, 11 aa, Artificial Sequence
  Description of Artificial Sequence: Synthetic peptide
  Seed: SLMQGSTLPRR
SFMQGSTLPRE

SEQ ID NO: 24508 - protein, 11 aa, Artificial Sequence
  Description of Artificial Sequence: Synthetic peptide
  Seed: SLMQGSTLPRR
SMMQGSTLPRE

SEQ ID NO: 24509 - protein, 11 aa, Artificial Sequence
  Description of Artificial Sequence: Synthetic peptide
  Seed: SLMQGSTLPRR
SMMQGSTLPRQ

SEQ ID NO: 24510 - protein, 11 aa, Artificial Sequence
  Description of Artificial Sequence: Synthetic peptide
  Seed: SLMQGSTLPRR
SMMQGSTLPRC

SEQ ID NO: 24511 - protein, 11 aa, Artificial Sequence
  Description of Artificial Sequence: Synthetic peptide
  Seed: SLMQGSTLPRR
SMMQGSTLPRD

SEQ ID NO: 24512 - protein, 11 aa, Artificial Sequence
  Description of Artificial Sequence: Synthetic peptide
  Seed: SLMQGSTLPRR
SLMQGSTLPRE

SEQ ID NO: 24513 - protein, 11 aa, Artificial Sequence
  Description of Artificial Sequence: Synthetic peptide
  Seed: SLMQGSTLPRR
SLMQGSTLPRG

SEQ ID NO: 24514 - protein, 11 aa, Artificial Sequence
  Description of Artificial Sequence: Synthetic peptide
  Seed: SLMQGSTLPRR
SLMQGSTLPRH

SEQ ID NO: 24515 - protein, 11 aa, Artificial Sequence
  Description of Artificial Sequence: Synthetic peptide
  Seed: SLMQGSTLPRR
SLMQGSTLPRI

SEQ ID NO: 24516 - protein, 11 aa, Artificial Sequence
  Description of Artificial Sequence: Synthetic peptide
  Seed: SLMQGSTLPRR
SLMQGSTLPRL

SEQ ID NO: 24517 - protein, 11 aa, Artificial Sequence
  Description of Artificial Sequence: Synthetic peptide
  Seed: SLMQGSTLPRR
SLMQGSTLPRK

SEQ ID NO: 24518 - protein, 11 aa, Artificial Sequence
  Description of Artificial Sequence: Synthetic peptide
  Seed: SLMQGSTLPRR
SLMQGSTLPRM

SEQ ID NO: 24519 - protein, 11 aa, Artificial Sequence
  Description of Artificial Sequence: Synthetic peptide
  Seed: SLMQGSTLPRR
SLMQGSTLPRF

SEQ ID NO: 24520 - protein, 11 aa, Artificial Sequence
  Description of Artificial Sequence: Synthetic peptide
  Seed: SLMQGSTLPRR
SLMQGSTLPRP

SEQ ID NO: 24521 - protein, 11 aa, Artificial Sequence
  Description of Artificial Sequence: Synthetic peptide
  Seed: SLMQGSTLPRR
SLMQGSTLPRS

SEQ ID NO: 24522 - protein, 11 aa, Artificial Sequence
  Description of Artificial Sequence: Synthetic peptide
  Seed: SLMQGSTLPRR
SLMQGSTLPRT

SEQ ID NO: 24523 - protein, 11 aa, Artificial Sequence
  Description of Artificial Sequence: Synthetic peptide
  Seed: SLMQGSTLPRR
SLMQGSTLPRW

SEQ ID NO: 24524 - protein, 11 aa, Artificial Sequence
  Description of Artificial Sequence: Synthetic peptide
  Seed: SLMQGSTLPRR
SLMQGSTLPRY

SEQ ID NO: 24525 - protein, 11 aa, Artificial Sequence
  Description of Artificial Sequence: Synthetic peptide
  Seed: SLMQGSTLPRR
SLMQGSTLPRV

SEQ ID NO: 24526 - protein, 11 aa, Artificial Sequence
  Description of Artificial Sequence: Synthetic peptide
  Seed: SLMQGSTLPRR
SKMQGSTLPRR

SEQ ID NO: 24527 - protein, 11 aa, Artificial Sequence
  Description of Artificial Sequence: Synthetic peptide
  Seed: SLMQGSTLPRR
SKMQGSTLPRK

SEQ ID NO: 24528 - protein, 11 aa, Artificial Sequence
  Description of Artificial Sequence: Synthetic peptide
  Seed: SLMQGSTLPRR
SMMQGSTLPRA

SEQ ID NO: 24529 - protein, 11 aa, Artificial Sequence
  Description of Artificial Sequence: Synthetic peptide
  Seed: SLMQGSTLPRR
SMMQGSTLPRR

SEQ ID NO: 24530 - protein, 11 aa, Artificial Sequence
  Description of Artificial Sequence: Synthetic peptide
  Seed: SLMQGSTLPRR
SMMQGSTLPRN

SEQ ID NO: 24531 - protein, 11 aa, Artificial Sequence
  Description of Artificial Sequence: Synthetic peptide
  Seed: SLMQGSTLPRR
SQMQGSTLPRN

SEQ ID NO: 24532 - protein, 11 aa, Artificial Sequence
  Description of Artificial Sequence: Synthetic peptide
  Seed: SLMQGSTLPRR
SQMQGSTLPRA

SEQ ID NO: 24533 - protein, 9 aa, Artificial Sequence
  Description of Artificial Sequence: Synthetic peptide
  Seed: SLTIERMVL
SYTIERMVA

SEQ ID NO: 24534 - protein, 10 aa, Artificial Sequence
  Description of Artificial Sequence: Synthetic peptide
  Seed: SLMQGSTLPR
SLMQGSTLPK

SEQ ID NO: 24535 - protein, 10 aa, Artificial Sequence
  Description of Artificial Sequence: Synthetic peptide
  Seed: SLMQGSTLPR
SGMQGSTLPK

SEQ ID NO: 24536 - protein, 10 aa, Artificial Sequence
  Description of Artificial Sequence: Synthetic peptide
  Seed: SLMQGSTLPR
SGMQGSTLPY

SEQ ID NO: 24537 - protein, 10 aa, Artificial Sequence
  Description of Artificial Sequence: Synthetic peptide
  Seed: SLMQGSTLPR
SHMQGSTLPR

SEQ ID NO: 24538 - protein, 10 aa, Artificial Sequence
  Description of Artificial Sequence: Synthetic peptide
  Seed: SLMQGSTLPR
SHMQGSTLPK

SEQ ID NO: 24539 - protein, 10 aa, Artificial Sequence
  Description of Artificial Sequence: Synthetic peptide
  Seed: SLMQGSTLPR
SHMQGSTLPY

SEQ ID NO: 24540 - protein, 10 aa, Artificial Sequence
  Description of Artificial Sequence: Synthetic peptide
  Seed: SLMQGSTLPR
SIMQGSTLPR

SEQ ID NO: 24541 - protein, 10 aa, Artificial Sequence
  Description of Artificial Sequence: Synthetic peptide
  Seed: SLMQGSTLPR
SIMQGSTLPY

SEQ ID NO: 24542 - protein, 10 aa, Artificial Sequence
  Description of Artificial Sequence: Synthetic peptide
  Seed: SLMQGSTLPR
SLMQGSTLPH

SEQ ID NO: 24543 - protein, 10 aa, Artificial Sequence
  Description of Artificial Sequence: Synthetic peptide
  Seed: SLMQGSTLPR
SLMQGSTLPY

SEQ ID NO: 24544 - protein, 10 aa, Artificial Sequence
  Description of Artificial Sequence: Synthetic peptide
  Seed: SLMQGSTLPR
SPMQGSTLPR

SEQ ID NO: 24545 - protein, 10 aa, Artificial Sequence
  Description of Artificial Sequence: Synthetic peptide
  Seed: SLMQGSTLPR
SKMQGSTLPR

SEQ ID NO: 24546 - protein, 10 aa, Artificial Sequence
  Description of Artificial Sequence: Synthetic peptide
  Seed: SLMQGSTLPR
SKMQGSTLPK

SEQ ID NO: 24547 - protein, 10 aa, Artificial Sequence
  Description of Artificial Sequence: Synthetic peptide
  Seed: SLMQGSTLPR
SKMQGSTLPY

SEQ ID NO: 24548 - protein, 10 aa, Artificial Sequence
  Description of Artificial Sequence: Synthetic peptide
  Seed: SLMQGSTLPR
SMMQGSTLPR

SEQ ID NO: 24549 - protein, 10 aa, Artificial Sequence
  Description of Artificial Sequence: Synthetic peptide
  Seed: SLMQGSTLPR
SMMQGSTLPH

SEQ ID NO: 24550 - protein, 10 aa, Artificial Sequence
  Description of Artificial Sequence: Synthetic peptide
  Seed: SLMQGSTLPR
SMMQGSTLPY

SEQ ID NO: 24551 - protein, 10 aa, Artificial Sequence
  Description of Artificial Sequence: Synthetic peptide
  Seed: SLMQGSTLPR
SFMQGSTLPK

SEQ ID NO: 24552 - protein, 10 aa, Artificial Sequence
  Description of Artificial Sequence: Synthetic peptide
  Seed: SLMQGSTLPR
SGMQGSTLPR

SEQ ID NO: 24553 - protein, 10 aa, Artificial Sequence
  Description of Artificial Sequence: Synthetic peptide
  Seed: SLMQGSTLPR
SEMQGSTLPY

SEQ ID NO: 24554 - protein, 10 aa, Artificial Sequence
  Description of Artificial Sequence: Synthetic peptide
  Seed: SLMQGSTLPR
SEMQGSTLPK

SEQ ID NO: 24555 - protein, 10 aa, Artificial Sequence
  Description of Artificial Sequence: Synthetic peptide
  Seed: SLMQGSTLPR
SEMQGSTLPR

SEQ ID NO: 24556 - protein, 10 aa, Artificial Sequence
  Description of Artificial Sequence: Synthetic peptide
  Seed: SLIRPNENPA
SVIRPNENPV

SEQ ID NO: 24557 - protein, 10 aa, Artificial Sequence
  Description of Artificial Sequence: Synthetic peptide
  Seed: SLMQGSTLPR
SAMQGSTLPR

SEQ ID NO: 24558 - protein, 10 aa, Artificial Sequence
  Description of Artificial Sequence: Synthetic peptide
  Seed: SLMQGSTLPR
SAMQGSTLPK

SEQ ID NO: 24559 - protein, 10 aa, Artificial Sequence
  Description of Artificial Sequence: Synthetic peptide
  Seed: SLMQGSTLPR
SAMQGSTLPY

SEQ ID NO: 24560 - protein, 10 aa, Artificial Sequence
  Description of Artificial Sequence: Synthetic peptide
  Seed: SLMQGSTLPR
SRMQGSTLPR

SEQ ID NO: 24561 - protein, 10 aa, Artificial Sequence
  Description of Artificial Sequence: Synthetic peptide
  Seed: SLMQGSTLPR
SRMQGSTLPK

SEQ ID NO: 24562 - protein, 10 aa, Artificial Sequence
  Description of Artificial Sequence: Synthetic peptide
  Seed: SLMQGSTLPR
SRMQGSTLPY

SEQ ID NO: 24563 - protein, 10 aa, Artificial Sequence
  Description of Artificial Sequence: Synthetic peptide
  Seed: SLMQGSTLPR
SNMQGSTLPR

SEQ ID NO: 24564 - protein, 10 aa, Artificial Sequence
  Description of Artificial Sequence: Synthetic peptide
  Seed: SLMQGSTLPR
SNMQGSTLPK

SEQ ID NO: 24565 - protein, 10 aa, Artificial Sequence
  Description of Artificial Sequence: Synthetic peptide
  Seed: SLMQGSTLPR
SNMQGSTLPY

SEQ ID NO: 24566 - protein, 10 aa, Artificial Sequence
  Description of Artificial Sequence: Synthetic peptide
  Seed: SLMQGSTLPR
SDMQGSTLPR

SEQ ID NO: 24567 - protein, 10 aa, Artificial Sequence
  Description of Artificial Sequence: Synthetic peptide
  Seed: SLMQGSTLPR
SDMQGSTLPK

SEQ ID NO: 24568 - protein, 10 aa, Artificial Sequence
  Description of Artificial Sequence: Synthetic peptide
  Seed: SLMQGSTLPR
SDMQGSTLPY

SEQ ID NO: 24569 - protein, 10 aa, Artificial Sequence
  Description of Artificial Sequence: Synthetic peptide
  Seed: SLMQGSTLPR
SCMQGSTLPR

SEQ ID NO: 24570 - protein, 10 aa, Artificial Sequence
  Description of Artificial Sequence: Synthetic peptide
  Seed: SLMQGSTLPR
SCMQGSTLPK

SEQ ID NO: 24571 - protein, 10 aa, Artificial Sequence
  Description of Artificial Sequence: Synthetic peptide
  Seed: SLMQGSTLPR
SCMQGSTLPY

SEQ ID NO: 24572 - protein, 10 aa, Artificial Sequence
  Description of Artificial Sequence: Synthetic peptide
  Seed: SLMQGSTLPR
SQMQGSTLPR

SEQ ID NO: 24573 - protein, 10 aa, Artificial Sequence
  Description of Artificial Sequence: Synthetic peptide
  Seed: SLMQGSTLPR
SQMQGSTLPK

SEQ ID NO: 24574 - protein, 10 aa, Artificial Sequence
  Description of Artificial Sequence: Synthetic peptide
  Seed: SLMQGSTLPR
SQMQGSTLPY

SEQ ID NO: 24575 - protein, 10 aa, Artificial Sequence
  Description of Artificial Sequence: Synthetic peptide
  Seed: SLMQGSTLPR
SFMQGSTLPY

SEQ ID NO: 24576 - protein, 10 aa, Artificial Sequence
  Description of Artificial Sequence: Synthetic peptide
  Seed: SLMQGSTLPR
SPMQGSTLPK

SEQ ID NO: 24577 - protein, 11 aa, Artificial Sequence
  Description of Artificial Sequence: Synthetic peptide
  Seed: SLMQGSTLPRR
SCMQGSTLPRR

SEQ ID NO: 24578 - protein, 11 aa, Artificial Sequence
  Description of Artificial Sequence: Synthetic peptide
  Seed: SLMQGSTLPRR
SAMQGSTLPRP

SEQ ID NO: 24579 - protein, 11 aa, Artificial Sequence
  Description of Artificial Sequence: Synthetic peptide
  Seed: SLMQGSTLPRR
SAMQGSTLPRQ

SEQ ID NO: 24580 - protein, 11 aa, Artificial Sequence
  Description of Artificial Sequence: Synthetic peptide
  Seed: SLMQGSTLPRR
SAMQGSTLPRE

SEQ ID NO: 24581 - protein, 11 aa, Artificial Sequence
  Description of Artificial Sequence: Synthetic peptide
  Seed: SLMQGSTLPRR
SAMQGSTLPRG

SEQ ID NO: 24582 - protein, 11 aa, Artificial Sequence
  Description of Artificial Sequence: Synthetic peptide
  Seed: SLMQGSTLPRR
SAMQGSTLPRH

SEQ ID NO: 24583 - protein, 11 aa, Artificial Sequence
  Description of Artificial Sequence: Synthetic peptide
  Seed: SLMQGSTLPRR
SAMQGSTLPRI

SEQ ID NO: 24584 - protein, 11 aa, Artificial Sequence
  Description of Artificial Sequence: Synthetic peptide
  Seed: SLMQGSTLPRR
SAMQGSTLPRL

SEQ ID NO: 24585 - protein, 11 aa, Artificial Sequence
  Description of Artificial Sequence: Synthetic peptide
  Seed: SLMQGSTLPRR
SAMQGSTLPRK

SEQ ID NO: 24586 - protein, 11 aa, Artificial Sequence
  Description of Artificial Sequence: Synthetic peptide
  Seed: SLMQGSTLPRR
SAMQGSTLPRM

SEQ ID NO: 24587 - protein, 11 aa, Artificial Sequence
  Description of Artificial Sequence: Synthetic peptide
  Seed: SLMQGSTLPRR
SAMQGSTLPRF

SEQ ID NO: 24588 - protein, 11 aa, Artificial Sequence
  Description of Artificial Sequence: Synthetic peptide
  Seed: SLMQGSTLPRR
SAMQGSTLPRS

SEQ ID NO: 24589 - protein, 10 aa, Artificial Sequence
  Description of Artificial Sequence: Synthetic peptide
  Seed: SLMQGSTLPR
SPMQGSTLPY

SEQ ID NO: 24590 - protein, 11 aa, Artificial Sequence
  Description of Artificial Sequence: Synthetic peptide
  Seed: SLMQGSTLPRR
SAMQGSTLPRT

SEQ ID NO: 24591 - protein, 11 aa, Artificial Sequence
  Description of Artificial Sequence: Synthetic peptide
  Seed: SLMQGSTLPRR
SAMQGSTLPRW

SEQ ID NO: 24592 - protein, 11 aa, Artificial Sequence
  Description of Artificial Sequence: Synthetic peptide
  Seed: SLMQGSTLPRR
SAMQGSTLPRY

SEQ ID NO: 24593 - protein, 11 aa, Artificial Sequence
  Description of Artificial Sequence: Synthetic peptide
  Seed: SLMQGSTLPRR
SAMQGSTLPRV

SEQ ID NO: 24594 - protein, 11 aa, Artificial Sequence
  Description of Artificial Sequence: Synthetic peptide
  Seed: SLMQGSTLPRR
SRMQGSTLPRR

SEQ ID NO: 24595 - protein, 11 aa, Artificial Sequence
  Description of Artificial Sequence: Synthetic peptide
  Seed: SLMQGSTLPRR
SRMQGSTLPRK

SEQ ID NO: 24596 - protein, 11 aa, Artificial Sequence
  Description of Artificial Sequence: Synthetic peptide
  Seed: SLMQGSTLPRR
SNMQGSTLPRR

SEQ ID NO: 24597 - protein, 11 aa, Artificial Sequence
  Description of Artificial Sequence: Synthetic peptide
  Seed: SLMQGSTLPRR
SNMQGSTLPRK

SEQ ID NO: 24598 - protein, 11 aa, Artificial Sequence
  Description of Artificial Sequence: Synthetic peptide
  Seed: SLMQGSTLPRR
SDMQGSTLPRR

SEQ ID NO: 24599 - protein, 11 aa, Artificial Sequence
  Description of Artificial Sequence: Synthetic peptide
  Seed: SLMQGSTLPRR
SAMQGSTLPRC

SEQ ID NO: 24600 - protein, 11 aa, Artificial Sequence
  Description of Artificial Sequence: Synthetic peptide
  Seed: SLMQGSTLPRR
SAMQGSTLPRD

SEQ ID NO: 24601 - protein, 11 aa, Artificial Sequence
  Description of Artificial Sequence: Synthetic peptide
  Seed: SLMQGSTLPRR
SAMQGSTLPRN

SEQ ID NO: 24602 - protein, 11 aa, Artificial Sequence
  Description of Artificial Sequence: Synthetic peptide
  Seed: SLMQGSTLPRR
SAMQGSTLPRR

SEQ ID NO: 24603 - protein, 10 aa, Artificial Sequence
  Description of Artificial Sequence: Synthetic peptide
  Seed: SLMQGSTLPR
SSMQGSTLPH

SEQ ID NO: 24604 - protein, 10 aa, Artificial Sequence
  Description of Artificial Sequence: Synthetic peptide
  Seed: SLMQGSTLPR
SSMQGSTLPK

SEQ ID NO: 24605 - protein, 10 aa, Artificial Sequence
  Description of Artificial Sequence: Synthetic peptide
  Seed: SLMQGSTLPR
SSMQGSTLPY

SEQ ID NO: 24606 - protein, 10 aa, Artificial Sequence
  Description of Artificial Sequence: Synthetic peptide
  Seed: SLMQGSTLPR
STMQGSTLPR

SEQ ID NO: 24607 - protein, 10 aa, Artificial Sequence
  Description of Artificial Sequence: Synthetic peptide
  Seed: SLMQGSTLPR
STMQGSTLPH

SEQ ID NO: 24608 - protein, 10 aa, Artificial Sequence
  Description of Artificial Sequence: Synthetic peptide
  Seed: SLMQGSTLPR
STMQGSTLPY

SEQ ID NO: 24609 - protein, 10 aa, Artificial Sequence
  Description of Artificial Sequence: Synthetic peptide
  Seed: SLMQGSTLPR
SWMQGSTLPR

SEQ ID NO: 24610 - protein, 10 aa, Artificial Sequence
  Description of Artificial Sequence: Synthetic peptide
  Seed: SLMQGSTLPR
SWMQGSTLPK

SEQ ID NO: 24611 - protein, 10 aa, Artificial Sequence
  Description of Artificial Sequence: Synthetic peptide
  Seed: SLMQGSTLPR
SWMQGSTLPY

SEQ ID NO: 24612 - protein, 10 aa, Artificial Sequence
  Description of Artificial Sequence: Synthetic peptide
  Seed: SLMQGSTLPR
SYMQGSTLPR

SEQ ID NO: 24613 - protein, 10 aa, Artificial Sequence
  Description of Artificial Sequence: Synthetic peptide
  Seed: SLMQGSTLPR
SYMQGSTLPY

SEQ ID NO: 24614 - protein, 10 aa, Artificial Sequence
  Description of Artificial Sequence: Synthetic peptide
  Seed: SLMQGSTLPR
SVMQGSTLPH

SEQ ID NO: 24615 - protein, 10 aa, Artificial Sequence
  Description of Artificial Sequence: Synthetic peptide
  Seed: SLMQGSTLPR
SVMQGSTLPY

SEQ ID NO: 24616 - protein, 11 aa, Artificial Sequence
  Description of Artificial Sequence: Synthetic peptide
  Seed: SLMQGSTLPRR
SAMQGSTLPRA

SEQ ID NO: 24617 - protein, 11 aa, Artificial Sequence
  Description of Artificial Sequence: Synthetic peptide
  Seed: SLMQGSTLPRR
SFMQGSTLPRG

SEQ ID NO: 24618 - protein, 11 aa, Artificial Sequence
  Description of Artificial Sequence: Synthetic peptide
  Seed: SLMQGSTLPRR
SFMQGSTLPRH

SEQ ID NO: 24619 - protein, 11 aa, Artificial Sequence
  Description of Artificial Sequence: Synthetic peptide
  Seed: SLMQGSTLPRR
SFMQGSTLPRI

SEQ ID NO: 24620 - protein, 9 aa, Artificial Sequence
  Description of Artificial Sequence: Synthetic peptide
  Seed: SLTIERMVL
SQTIERMVI

SEQ ID NO: 24621 - protein, 9 aa, Artificial Sequence
  Description of Artificial Sequence: Synthetic peptide
  Seed: SLTIERMVL
SATIERMVV

SEQ ID NO: 24622 - protein, 9 aa, Artificial Sequence
  Description of Artificial Sequence: Synthetic peptide
  Seed: SLTIERMVL
SRTIERMVM

SEQ ID NO: 24623 - protein, 9 aa, Artificial Sequence
  Description of Artificial Sequence: Synthetic peptide
  Seed: SLTIERMVL
SRTIERMVF

SEQ ID NO: 24624 - protein, 9 aa, Artificial Sequence
  Description of Artificial Sequence: Synthetic peptide
  Seed: SLTIERMVL
SRTIERMVY

SEQ ID NO: 24625 - protein, 9 aa, Artificial Sequence
  Description of Artificial Sequence: Synthetic peptide
  Seed: SLTIERMVL
SNTIERMVF

SEQ ID NO: 24626 - protein, 9 aa, Artificial Sequence
  Description of Artificial Sequence: Synthetic peptide
  Seed: SLTIERMVL
SNTIERMVY

SEQ ID NO: 24627 - protein, 9 aa, Artificial Sequence
  Description of Artificial Sequence: Synthetic peptide
  Seed: SLTIERMVL
SCTIERMVY

SEQ ID NO: 24628 - protein, 9 aa, Artificial Sequence
  Description of Artificial Sequence: Synthetic peptide
  Seed: SLTIERMVL
SQTIERMVA

SEQ ID NO: 24629 - protein, 9 aa, Artificial Sequence
  Description of Artificial Sequence: Synthetic peptide
  Seed: SLTIERMVL
SQTIERMVH

SEQ ID NO: 24630 - protein, 9 aa, Artificial Sequence
  Description of Artificial Sequence: Synthetic peptide
  Seed: SLTIERMVL
SQTIERMVL

SEQ ID NO: 24631 - protein, 9 aa, Artificial Sequence
  Description of Artificial Sequence: Synthetic peptide
  Seed: SLTIERMVL
SGTIERMVF

SEQ ID NO: 24632 - protein, 9 aa, Artificial Sequence
  Description of Artificial Sequence: Synthetic peptide
  Seed: SLTIERMVL
SQTIERMVM

SEQ ID NO: 24633 - protein, 9 aa, Artificial Sequence
  Description of Artificial Sequence: Synthetic peptide
  Seed: SLTIERMVL
SQTIERMVF

SEQ ID NO: 24634 - protein, 9 aa, Artificial Sequence
  Description of Artificial Sequence: Synthetic peptide
  Seed: SLTIERMVL
SQTIERMVW

SEQ ID NO: 24635 - protein, 9 aa, Artificial Sequence
  Description of Artificial Sequence: Synthetic peptide
  Seed: SLTIERMVL
SQTIERMVY

SEQ ID NO: 24636 - protein, 9 aa, Artificial Sequence
  Description of Artificial Sequence: Synthetic peptide
  Seed: SLTIERMVL
SQTIERMVV

SEQ ID NO: 24637 - protein, 9 aa, Artificial Sequence
  Description of Artificial Sequence: Synthetic peptide
  Seed: SLTIERMVL
SETIERMVM

SEQ ID NO: 24638 - protein, 9 aa, Artificial Sequence
  Description of Artificial Sequence: Synthetic peptide
  Seed: SLTIERMVL
SETIERMVF

SEQ ID NO: 24639 - protein, 9 aa, Artificial Sequence
  Description of Artificial Sequence: Synthetic peptide
  Seed: SLTIERMVL
SETIERMVY

SEQ ID NO: 24640 - protein, 9 aa, Artificial Sequence
  Description of Artificial Sequence: Synthetic peptide
  Seed: SLTIERMVL
SGTIERMVL

SEQ ID NO: 24641 - protein, 9 aa, Artificial Sequence
  Description of Artificial Sequence: Synthetic peptide
  Seed: SLTIERMVL
SATIERMVY

SEQ ID NO: 24642 - protein, 9 aa, Artificial Sequence
  Description of Artificial Sequence: Synthetic peptide
  Seed: SLTIERMVL
SATIERMVW

SEQ ID NO: 24643 - protein, 9 aa, Artificial Sequence
  Description of Artificial Sequence: Synthetic peptide
  Seed: SLTIERMVL
SATIERMVF

SEQ ID NO: 24644 - protein, 9 aa, Artificial Sequence
  Description of Artificial Sequence: Synthetic peptide
  Seed: SLTIERMVL
SATIERMVM

SEQ ID NO: 24645 - protein, 11 aa, Artificial Sequence
  Description of Artificial Sequence: Synthetic peptide
  Seed: SLMQGSTLPRR
SVMQGSTLPRD

SEQ ID NO: 24646 - protein, 11 aa, Artificial Sequence
  Description of Artificial Sequence: Synthetic peptide
  Seed: SLMQGSTLPRR
SVMQGSTLPRC

SEQ ID NO: 24647 - protein, 11 aa, Artificial Sequence
  Description of Artificial Sequence: Synthetic peptide
  Seed: SLMQGSTLPRR
SVMQGSTLPRQ

SEQ ID NO: 24648 - protein, 11 aa, Artificial Sequence
  Description of Artificial Sequence: Synthetic peptide
  Seed: SLMQGSTLPRR
SVMQGSTLPRE

SEQ ID NO: 24649 - protein, 11 aa, Artificial Sequence
  Description of Artificial Sequence: Synthetic peptide
  Seed: SLMQGSTLPRR
SVMQGSTLPRG

SEQ ID NO: 24650 - protein, 11 aa, Artificial Sequence
  Description of Artificial Sequence: Synthetic peptide
  Seed: SLMQGSTLPRR
SVMQGSTLPRH

SEQ ID NO: 24651 - protein, 11 aa, Artificial Sequence
  Description of Artificial Sequence: Synthetic peptide
  Seed: SLMQGSTLPRR
SVMQGSTLPRI

SEQ ID NO: 24652 - protein, 11 aa, Artificial Sequence
  Description of Artificial Sequence: Synthetic peptide
  Seed: SLMQGSTLPRR
SVMQGSTLPRL

SEQ ID NO: 24653 - protein, 11 aa, Artificial Sequence
  Description of Artificial Sequence: Synthetic peptide
  Seed: SLMQGSTLPRR
SVMQGSTLPRK

SEQ ID NO: 24654 - protein, 11 aa, Artificial Sequence
  Description of Artificial Sequence: Synthetic peptide
  Seed: SLMQGSTLPRR
SVMQGSTLPRM

SEQ ID NO: 24655 - protein, 11 aa, Artificial Sequence
  Description of Artificial Sequence: Synthetic peptide
  Seed: SLMQGSTLPRR
SVMQGSTLPRF

SEQ ID NO: 24656 - protein, 11 aa, Artificial Sequence
  Description of Artificial Sequence: Synthetic peptide
  Seed: SLMQGSTLPRR
SVMQGSTLPRP

SEQ ID NO: 24657 - protein, 11 aa, Artificial Sequence
  Description of Artificial Sequence: Synthetic peptide
  Seed: SLMQGSTLPRR
SVMQGSTLPRS

SEQ ID NO: 24658 - protein, 11 aa, Artificial Sequence
  Description of Artificial Sequence: Synthetic peptide
  Seed: SLMQGSTLPRR
SVMQGSTLPRT

SEQ ID NO: 24659 - protein, 11 aa, Artificial Sequence
  Description of Artificial Sequence: Synthetic peptide
  Seed: SLMQGSTLPRR
SVMQGSTLPRW

SEQ ID NO: 24660 - protein, 11 aa, Artificial Sequence
  Description of Artificial Sequence: Synthetic peptide
  Seed: SLMQGSTLPRR
SVMQGSTLPRY

SEQ ID NO: 24661 - protein, 11 aa, Artificial Sequence
  Description of Artificial Sequence: Synthetic peptide
  Seed: SLMQGSTLPRR
SVMQGSTLPRV

SEQ ID NO: 24662 - protein, 9 aa, Artificial Sequence
  Description of Artificial Sequence: Synthetic peptide
  Seed: SLTIERMVL
SATIERMVI

SEQ ID NO: 24663 - protein, 9 aa, Artificial Sequence
  Description of Artificial Sequence: Synthetic peptide
  Seed: SLTIERMVL
SATIERMVL

SEQ ID NO: 24664 - protein, 9 aa, Artificial Sequence
  Description of Artificial Sequence: Synthetic peptide
  Seed: SLTIERMVL
SGTIERMVM

SEQ ID NO: 24665 - protein, 9 aa, Artificial Sequence
  Description of Artificial Sequence: Synthetic peptide
  Seed: SLTIERMVL
SGTIERMVY

SEQ ID NO: 24666 - protein, 11 aa, Artificial Sequence
  Description of Artificial Sequence: Synthetic peptide
  Seed: SLMQGSTLPRR
SFMQGSTLPRL

SEQ ID NO: 24667 - protein, 9 aa, Artificial Sequence
  Description of Artificial Sequence: Synthetic peptide
  Seed: SLTIERMVL
SSTIERMVV

SEQ ID NO: 24668 - protein, 9 aa, Artificial Sequence
  Description of Artificial Sequence: Synthetic peptide
  Seed: SLTIERMVL
SFTIERMVM

SEQ ID NO: 24669 - protein, 9 aa, Artificial Sequence
  Description of Artificial Sequence: Synthetic peptide
  Seed: SLTIERMVL
SFTIERMVF

SEQ ID NO: 24670 - protein, 9 aa, Artificial Sequence
  Description of Artificial Sequence: Synthetic peptide
  Seed: SLTIERMVL
SFTIERMVY

SEQ ID NO: 24671 - protein, 9 aa, Artificial Sequence
  Description of Artificial Sequence: Synthetic peptide
  Seed: SLTIERMVL
SFTIERMVV

SEQ ID NO: 24672 - protein, 9 aa, Artificial Sequence
  Description of Artificial Sequence: Synthetic peptide
  Seed: SLTIERMVL
SSTIERMVI

SEQ ID NO: 24673 - protein, 9 aa, Artificial Sequence
  Description of Artificial Sequence: Synthetic peptide
  Seed: SLTIERMVL
SSTIERMVL

SEQ ID NO: 24674 - protein, 9 aa, Artificial Sequence
  Description of Artificial Sequence: Synthetic peptide
  Seed: SLTIERMVL
SSTIERMVM

SEQ ID NO: 24675 - protein, 9 aa, Artificial Sequence
  Description of Artificial Sequence: Synthetic peptide
  Seed: SLTIERMVL
SSTIERMVF

SEQ ID NO: 24676 - protein, 9 aa, Artificial Sequence
  Description of Artificial Sequence: Synthetic peptide
  Seed: SLTIERMVL
SSTIERMVY

SEQ ID NO: 24677 - protein, 9 aa, Artificial Sequence
  Description of Artificial Sequence: Synthetic peptide
  Seed: SLTIERMVL
STTIERMVI

SEQ ID NO: 24678 - protein, 9 aa, Artificial Sequence
  Description of Artificial Sequence: Synthetic peptide
  Seed: SLTIERMVL
SHTIERMVM

SEQ ID NO: 24679 - protein, 9 aa, Artificial Sequence
  Description of Artificial Sequence: Synthetic peptide
  Seed: SLTIERMVL
STTIERMVL

SEQ ID NO: 24680 - protein, 9 aa, Artificial Sequence
  Description of Artificial Sequence: Synthetic peptide
  Seed: SLTIERMVL
STTIERMVM

SEQ ID NO: 24681 - protein, 9 aa, Artificial Sequence
  Description of Artificial Sequence: Synthetic peptide
  Seed: SLTIERMVL
STTIERMVF

SEQ ID NO: 24682 - protein, 9 aa, Artificial Sequence
  Description of Artificial Sequence: Synthetic peptide
  Seed: SLTIERMVL
STTIERMVY

SEQ ID NO: 24683 - protein, 9 aa, Artificial Sequence
  Description of Artificial Sequence: Synthetic peptide
  Seed: SLTIERMVL
STTIERMVV

SEQ ID NO: 24684 - protein, 9 aa, Artificial Sequence
  Description of Artificial Sequence: Synthetic peptide
  Seed: SLTIERMVL
SWTIERMVI

SEQ ID NO: 24685 - protein, 9 aa, Artificial Sequence
  Description of Artificial Sequence: Synthetic peptide
  Seed: SLTIERMVL
SWTIERMVL

SEQ ID NO: 24686 - protein, 9 aa, Artificial Sequence
  Description of Artificial Sequence: Synthetic peptide
  Seed: SLTIERMVL
SWTIERMVM

SEQ ID NO: 24687 - protein, 9 aa, Artificial Sequence
  Description of Artificial Sequence: Synthetic peptide
  Seed: SLTIERMVL
SWTIERMVF

SEQ ID NO: 24688 - protein, 9 aa, Artificial Sequence
  Description of Artificial Sequence: Synthetic peptide
  Seed: SLTIERMVL
SFTIERMVL

SEQ ID NO: 24689 - protein, 9 aa, Artificial Sequence
  Description of Artificial Sequence: Synthetic peptide
  Seed: SLTIERMVL
SFTIERMVI

SEQ ID NO: 24690 - protein, 9 aa, Artificial Sequence
  Description of Artificial Sequence: Synthetic peptide
  Seed: SLTIERMVL
SMTIERMVV

SEQ ID NO: 24691 - protein, 9 aa, Artificial Sequence
  Description of Artificial Sequence: Synthetic peptide
  Seed: SLTIERMVL
SMTIERMVY

SEQ ID NO: 24692 - protein, 9 aa, Artificial Sequence
  Description of Artificial Sequence: Synthetic peptide
  Seed: SLTIERMVL
SHTIERMVF

SEQ ID NO: 24693 - protein, 9 aa, Artificial Sequence
  Description of Artificial Sequence: Synthetic peptide
  Seed: SLTIERMVL
SHTIERMVY

SEQ ID NO: 24694 - protein, 9 aa, Artificial Sequence
  Description of Artificial Sequence: Synthetic peptide
  Seed: SLTIERMVL
SITIERMVM

SEQ ID NO: 24695 - protein, 9 aa, Artificial Sequence
  Description of Artificial Sequence: Synthetic peptide
  Seed: SLTIERMVL
SITIERMVF

SEQ ID NO: 24696 - protein, 9 aa, Artificial Sequence
  Description of Artificial Sequence: Synthetic peptide
  Seed: SLTIERMVL
SITIERMVY

SEQ ID NO: 24697 - protein, 9 aa, Artificial Sequence
  Description of Artificial Sequence: Synthetic peptide
  Seed: SLTIERMVL
SLTIERMVM

SEQ ID NO: 24698 - protein, 9 aa, Artificial Sequence
  Description of Artificial Sequence: Synthetic peptide
  Seed: SLTIERMVL
SLTIERMVF

SEQ ID NO: 24699 - protein, 9 aa, Artificial Sequence
  Description of Artificial Sequence: Synthetic peptide
  Seed: SLTIERMVL
SLTIERMVY

SEQ ID NO: 24700 - protein, 9 aa, Artificial Sequence
  Description of Artificial Sequence: Synthetic peptide
  Seed: SLTIERMVL
SLTIERMVV

SEQ ID NO: 24701 - protein, 9 aa, Artificial Sequence
  Description of Artificial Sequence: Synthetic peptide
  Seed: SLTIERMVL
SKTIERMVI

SEQ ID NO: 24702 - protein, 9 aa, Artificial Sequence
  Description of Artificial Sequence: Synthetic peptide
  Seed: SLTIERMVL
SKTIERMVL

SEQ ID NO: 24703 - protein, 9 aa, Artificial Sequence
  Description of Artificial Sequence: Synthetic peptide
  Seed: SLTIERMVL
SKTIERMVM

SEQ ID NO: 24704 - protein, 9 aa, Artificial Sequence
  Description of Artificial Sequence: Synthetic peptide
  Seed: SLTIERMVL
SKTIERMVF

SEQ ID NO: 24705 - protein, 9 aa, Artificial Sequence
  Description of Artificial Sequence: Synthetic peptide
  Seed: SLTIERMVL
SKTIERMVY

SEQ ID NO: 24706 - protein, 9 aa, Artificial Sequence
  Description of Artificial Sequence: Synthetic peptide
  Seed: SLTIERMVL
SMTIERMVI

SEQ ID NO: 24707 - protein, 9 aa, Artificial Sequence
  Description of Artificial Sequence: Synthetic peptide
  Seed: SLTIERMVL
SMTIERMVM

SEQ ID NO: 24708 - protein, 9 aa, Artificial Sequence
  Description of Artificial Sequence: Synthetic peptide
  Seed: SLTIERMVL
SMTIERMVF

SEQ ID NO: 24709 - protein, 9 aa, Artificial Sequence
  Description of Artificial Sequence: Synthetic peptide
  Seed: SLTIERMVL
SMTIERMVW

SEQ ID NO: 24710 - protein, 11 aa, Artificial Sequence
  Description of Artificial Sequence: Synthetic peptide
  Seed: SLMQGSTLPRR
SVMQGSTLPRN

SEQ ID NO: 24711 - protein, 11 aa, Artificial Sequence
  Description of Artificial Sequence: Synthetic peptide
  Seed: SLMQGSTLPRR
SVMQGSTLPRR

SEQ ID NO: 24712 - protein, 11 aa, Artificial Sequence
  Description of Artificial Sequence: Synthetic peptide
  Seed: SLMQGSTLPRR
SVMQGSTLPRA

SEQ ID NO: 24713 - protein, 11 aa, Artificial Sequence
  Description of Artificial Sequence: Synthetic peptide
  Seed: SLMQGSTLPRR
STMQGSTLPRN

SEQ ID NO: 24714 - protein, 11 aa, Artificial Sequence
  Description of Artificial Sequence: Synthetic peptide
  Seed: SLMQGSTLPRR
SSMQGSTLPRF

SEQ ID NO: 24715 - protein, 11 aa, Artificial Sequence
  Description of Artificial Sequence: Synthetic peptide
  Seed: SLMQGSTLPRR
SSMQGSTLPRP

SEQ ID NO: 24716 - protein, 11 aa, Artificial Sequence
  Description of Artificial Sequence: Synthetic peptide
  Seed: SLMQGSTLPRR
SSMQGSTLPRS

SEQ ID NO: 24717 - protein, 11 aa, Artificial Sequence
  Description of Artificial Sequence: Synthetic peptide
  Seed: SLMQGSTLPRR
SSMQGSTLPRT

SEQ ID NO: 24718 - protein, 11 aa, Artificial Sequence
  Description of Artificial Sequence: Synthetic peptide
  Seed: SLMQGSTLPRR
SSMQGSTLPRW

SEQ ID NO: 24719 - protein, 11 aa, Artificial Sequence
  Description of Artificial Sequence: Synthetic peptide
  Seed: SLMQGSTLPRR
SSMQGSTLPRY

SEQ ID NO: 24720 - protein, 11 aa, Artificial Sequence
  Description of Artificial Sequence: Synthetic peptide
  Seed: SLMQGSTLPRR
SSMQGSTLPRV

SEQ ID NO: 24721 - protein, 11 aa, Artificial Sequence
  Description of Artificial Sequence: Synthetic peptide
  Seed: SLMQGSTLPRR
STMQGSTLPRA

SEQ ID NO: 24722 - protein, 11 aa, Artificial Sequence
  Description of Artificial Sequence: Synthetic peptide
  Seed: SLMQGSTLPRR
STMQGSTLPRR

SEQ ID NO: 24723 - protein, 11 aa, Artificial Sequence
  Description of Artificial Sequence: Synthetic peptide
  Seed: SLMQGSTLPRR
STMQGSTLPRD

SEQ ID NO: 24724 - protein, 11 aa, Artificial Sequence
  Description of Artificial Sequence: Synthetic peptide
  Seed: SLMQGSTLPRR
SYMQGSTLPRV

SEQ ID NO: 24725 - protein, 11 aa, Artificial Sequence
  Description of Artificial Sequence: Synthetic peptide
  Seed: SLMQGSTLPRR
STMQGSTLPRC

SEQ ID NO: 24726 - protein, 11 aa, Artificial Sequence
  Description of Artificial Sequence: Synthetic peptide
  Seed: SLMQGSTLPRR
STMQGSTLPRQ

SEQ ID NO: 24727 - protein, 11 aa, Artificial Sequence
  Description of Artificial Sequence: Synthetic peptide
  Seed: SLMQGSTLPRR
STMQGSTLPRE

SEQ ID NO: 24728 - protein, 11 aa, Artificial Sequence
  Description of Artificial Sequence: Synthetic peptide
  Seed: SLMQGSTLPRR
STMQGSTLPRG

SEQ ID NO: 24729 - protein, 11 aa, Artificial Sequence
  Description of Artificial Sequence: Synthetic peptide
  Seed: SLMQGSTLPRR
STMQGSTLPRH

SEQ ID NO: 24730 - protein, 11 aa, Artificial Sequence
  Description of Artificial Sequence: Synthetic peptide
  Seed: SLMQGSTLPRR
STMQGSTLPRI

SEQ ID NO: 24731 - protein, 11 aa, Artificial Sequence
  Description of Artificial Sequence: Synthetic peptide
  Seed: SLMQGSTLPRR
STMQGSTLPRL

SEQ ID NO: 24732 - protein, 11 aa, Artificial Sequence
  Description of Artificial Sequence: Synthetic peptide
  Seed: SLMQGSTLPRR
STMQGSTLPRK

SEQ ID NO: 24733 - protein, 11 aa, Artificial Sequence
  Description of Artificial Sequence: Synthetic peptide
  Seed: SLMQGSTLPRR
STMQGSTLPRM

SEQ ID NO: 24734 - protein, 11 aa, Artificial Sequence
  Description of Artificial Sequence: Synthetic peptide
  Seed: SLMQGSTLPRR
SSMQGSTLPRM

SEQ ID NO: 24735 - protein, 11 aa, Artificial Sequence
  Description of Artificial Sequence: Synthetic peptide
  Seed: SLMQGSTLPRR
SSMQGSTLPRK

SEQ ID NO: 24736 - protein, 11 aa, Artificial Sequence
  Description of Artificial Sequence: Synthetic peptide
  Seed: SLMQGSTLPRR
SSMQGSTLPRL

SEQ ID NO: 24737 - protein, 11 aa, Artificial Sequence
  Description of Artificial Sequence: Synthetic peptide
  Seed: SLMQGSTLPRR
SSMQGSTLPRI

SEQ ID NO: 24738 - protein, 11 aa, Artificial Sequence
  Description of Artificial Sequence: Synthetic peptide
  Seed: SLMQGSTLPRR
SFMQGSTLPRK

SEQ ID NO: 24739 - protein, 11 aa, Artificial Sequence
  Description of Artificial Sequence: Synthetic peptide
  Seed: SLMQGSTLPRR
SFMQGSTLPRM

SEQ ID NO: 24740 - protein, 11 aa, Artificial Sequence
  Description of Artificial Sequence: Synthetic peptide
  Seed: SLMQGSTLPRR
SFMQGSTLPRF

SEQ ID NO: 24741 - protein, 11 aa, Artificial Sequence
  Description of Artificial Sequence: Synthetic peptide
  Seed: SLMQGSTLPRR
SFMQGSTLPRP

SEQ ID NO: 24742 - protein, 11 aa, Artificial Sequence
  Description of Artificial Sequence: Synthetic peptide
  Seed: SLMQGSTLPRR
SFMQGSTLPRS

SEQ ID NO: 24743 - protein, 11 aa, Artificial Sequence
  Description of Artificial Sequence: Synthetic peptide
  Seed: SLMQGSTLPRR
SFMQGSTLPRT

SEQ ID NO: 24744 - protein, 11 aa, Artificial Sequence
  Description of Artificial Sequence: Synthetic peptide
  Seed: SLMQGSTLPRR
SFMQGSTLPRW

SEQ ID NO: 24745 - protein, 11 aa, Artificial Sequence
  Description of Artificial Sequence: Synthetic peptide
  Seed: SLMQGSTLPRR
SFMQGSTLPRY

SEQ ID NO: 24746 - protein, 11 aa, Artificial Sequence
  Description of Artificial Sequence: Synthetic peptide
  Seed: SLMQGSTLPRR
SFMQGSTLPRV

SEQ ID NO: 24747 - protein, 11 aa, Artificial Sequence
  Description of Artificial Sequence: Synthetic peptide
  Seed: SLMQGSTLPRR
SPMQGSTLPRR

SEQ ID NO: 24748 - protein, 11 aa, Artificial Sequence
  Description of Artificial Sequence: Synthetic peptide
  Seed: SLMQGSTLPRR
SSMQGSTLPRA

SEQ ID NO: 24749 - protein, 11 aa, Artificial Sequence
  Description of Artificial Sequence: Synthetic peptide
  Seed: SLMQGSTLPRR
SSMQGSTLPRR

SEQ ID NO: 24750 - protein, 11 aa, Artificial Sequence
  Description of Artificial Sequence: Synthetic peptide
  Seed: SLMQGSTLPRR
SSMQGSTLPRN

SEQ ID NO: 24751 - protein, 11 aa, Artificial Sequence
  Description of Artificial Sequence: Synthetic peptide
  Seed: SLMQGSTLPRR
SSMQGSTLPRD

SEQ ID NO: 24752 - protein, 11 aa, Artificial Sequence
  Description of Artificial Sequence: Synthetic peptide
  Seed: SLMQGSTLPRR
SSMQGSTLPRC

SEQ ID NO: 24753 - protein, 11 aa, Artificial Sequence
  Description of Artificial Sequence: Synthetic peptide
  Seed: SLMQGSTLPRR
SSMQGSTLPRQ

SEQ ID NO: 24754 - protein, 11 aa, Artificial Sequence
  Description of Artificial Sequence: Synthetic peptide
  Seed: SLMQGSTLPRR
SSMQGSTLPRE

SEQ ID NO: 24755 - protein, 11 aa, Artificial Sequence
  Description of Artificial Sequence: Synthetic peptide
  Seed: SLMQGSTLPRR
SSMQGSTLPRG

SEQ ID NO: 24756 - protein, 11 aa, Artificial Sequence
  Description of Artificial Sequence: Synthetic peptide
  Seed: SLMQGSTLPRR
SSMQGSTLPRH

SEQ ID NO: 24757 - protein, 11 aa, Artificial Sequence
  Description of Artificial Sequence: Synthetic peptide
  Seed: SLMQGSTLPRR
STMQGSTLPRF

SEQ ID NO: 24758 - protein, 11 aa, Artificial Sequence
  Description of Artificial Sequence: Synthetic peptide
  Seed: SLMQGSTLPRR
STMQGSTLPRP

SEQ ID NO: 24759 - protein, 11 aa, Artificial Sequence
  Description of Artificial Sequence: Synthetic peptide
  Seed: SLMQGSTLPRR
STMQGSTLPRS

SEQ ID NO: 24760 - protein, 11 aa, Artificial Sequence
  Description of Artificial Sequence: Synthetic peptide
  Seed: SLMQGSTLPRR
SWMQGSTLPRY

SEQ ID NO: 24761 - protein, 11 aa, Artificial Sequence
  Description of Artificial Sequence: Synthetic peptide
  Seed: SLMQGSTLPRR
SYMQGSTLPRA

SEQ ID NO: 24762 - protein, 11 aa, Artificial Sequence
  Description of Artificial Sequence: Synthetic peptide
  Seed: SLMQGSTLPRR
SYMQGSTLPRR

SEQ ID NO: 24763 - protein, 11 aa, Artificial Sequence
  Description of Artificial Sequence: Synthetic peptide
  Seed: SLMQGSTLPRR
SYMQGSTLPRN

SEQ ID NO: 24764 - protein, 11 aa, Artificial Sequence
  Description of Artificial Sequence: Synthetic peptide
  Seed: SLMQGSTLPRR
SYMQGSTLPRD

SEQ ID NO: 24765 - protein, 11 aa, Artificial Sequence
  Description of Artificial Sequence: Synthetic peptide
  Seed: SLMQGSTLPRR
SYMQGSTLPRC

SEQ ID NO: 24766 - protein, 11 aa, Artificial Sequence
  Description of Artificial Sequence: Synthetic peptide
  Seed: SLMQGSTLPRR
SYMQGSTLPRQ

SEQ ID NO: 24767 - protein, 11 aa, Artificial Sequence
  Description of Artificial Sequence: Synthetic peptide
  Seed: SLMQGSTLPRR
SYMQGSTLPRE

SEQ ID NO: 24768 - protein, 11 aa, Artificial Sequence
  Description of Artificial Sequence: Synthetic peptide
  Seed: SLMQGSTLPRR
SYMQGSTLPRG

SEQ ID NO: 24769 - protein, 11 aa, Artificial Sequence
  Description of Artificial Sequence: Synthetic peptide
  Seed: SLMQGSTLPRR
SYMQGSTLPRH

SEQ ID NO: 24770 - protein, 11 aa, Artificial Sequence
  Description of Artificial Sequence: Synthetic peptide
  Seed: SLMQGSTLPRR
SYMQGSTLPRI

SEQ ID NO: 24771 - protein, 11 aa, Artificial Sequence
  Description of Artificial Sequence: Synthetic peptide
  Seed: SLMQGSTLPRR
SYMQGSTLPRL

SEQ ID NO: 24772 - protein, 11 aa, Artificial Sequence
  Description of Artificial Sequence: Synthetic peptide
  Seed: SLMQGSTLPRR
SYMQGSTLPRK

SEQ ID NO: 24773 - protein, 11 aa, Artificial Sequence
  Description of Artificial Sequence: Synthetic peptide
  Seed: SLMQGSTLPRR
SYMQGSTLPRM

SEQ ID NO: 24774 - protein, 11 aa, Artificial Sequence
  Description of Artificial Sequence: Synthetic peptide
  Seed: SLMQGSTLPRR
SYMQGSTLPRF

SEQ ID NO: 24775 - protein, 11 aa, Artificial Sequence
  Description of Artificial Sequence: Synthetic peptide
  Seed: SLMQGSTLPRR
SYMQGSTLPRP

SEQ ID NO: 24776 - protein, 11 aa, Artificial Sequence
  Description of Artificial Sequence: Synthetic peptide
  Seed: SLMQGSTLPRR
SYMQGSTLPRS

SEQ ID NO: 24777 - protein, 11 aa, Artificial Sequence
  Description of Artificial Sequence: Synthetic peptide
  Seed: SLMQGSTLPRR
SYMQGSTLPRT

SEQ ID NO: 24778 - protein, 11 aa, Artificial Sequence
  Description of Artificial Sequence: Synthetic peptide
  Seed: SLMQGSTLPRR
SYMQGSTLPRW

SEQ ID NO: 24779 - protein, 11 aa, Artificial Sequence
  Description of Artificial Sequence: Synthetic peptide
  Seed: SLMQGSTLPRR
SYMQGSTLPRY

SEQ ID NO: 24780 - protein, 11 aa, Artificial Sequence
  Description of Artificial Sequence: Synthetic peptide
  Seed: SLMQGSTLPRR
SWMQGSTLPRV

SEQ ID NO: 24781 - protein, 11 aa, Artificial Sequence
  Description of Artificial Sequence: Synthetic peptide
  Seed: SLMQGSTLPRR
SWMQGSTLPRW

SEQ ID NO: 24782 - protein, 11 aa, Artificial Sequence
  Description of Artificial Sequence: Synthetic peptide
  Seed: SLMQGSTLPRR
STMQGSTLPRT

SEQ ID NO: 24783 - protein, 11 aa, Artificial Sequence
  Description of Artificial Sequence: Synthetic peptide
  Seed: SLMQGSTLPRR
SWMQGSTLPRT

SEQ ID NO: 24784 - protein, 11 aa, Artificial Sequence
  Description of Artificial Sequence: Synthetic peptide
  Seed: SLMQGSTLPRR
STMQGSTLPRW

SEQ ID NO: 24785 - protein, 11 aa, Artificial Sequence
  Description of Artificial Sequence: Synthetic peptide
  Seed: SLMQGSTLPRR
STMQGSTLPRY

SEQ ID NO: 24786 - protein, 11 aa, Artificial Sequence
  Description of Artificial Sequence: Synthetic peptide
  Seed: SLMQGSTLPRR
STMQGSTLPRV

SEQ ID NO: 24787 - protein, 11 aa, Artificial Sequence
  Description of Artificial Sequence: Synthetic peptide
  Seed: SLMQGSTLPRR
SWMQGSTLPRA

SEQ ID NO: 24788 - protein, 11 aa, Artificial Sequence
  Description of Artificial Sequence: Synthetic peptide
  Seed: SLMQGSTLPRR
SWMQGSTLPRR

SEQ ID NO: 24789 - protein, 11 aa, Artificial Sequence
  Description of Artificial Sequence: Synthetic peptide
  Seed: SLMQGSTLPRR
SWMQGSTLPRN

SEQ ID NO: 24790 - protein, 11 aa, Artificial Sequence
  Description of Artificial Sequence: Synthetic peptide
  Seed: SLMQGSTLPRR
SWMQGSTLPRD

SEQ ID NO: 24791 - protein, 11 aa, Artificial Sequence
  Description of Artificial Sequence: Synthetic peptide
  Seed: SLMQGSTLPRR
SWMQGSTLPRC

SEQ ID NO: 24792 - protein, 11 aa, Artificial Sequence
  Description of Artificial Sequence: Synthetic peptide
  Seed: SLMQGSTLPRR
SWMQGSTLPRQ

SEQ ID NO: 24793 - protein, 11 aa, Artificial Sequence
  Description of Artificial Sequence: Synthetic peptide
  Seed: SLMQGSTLPRR
SWMQGSTLPRE

SEQ ID NO: 24794 - protein, 11 aa, Artificial Sequence
  Description of Artificial Sequence: Synthetic peptide
  Seed: SLMQGSTLPRR
SWMQGSTLPRG

SEQ ID NO: 24795 - protein, 11 aa, Artificial Sequence
  Description of Artificial Sequence: Synthetic peptide
  Seed: SLMQGSTLPRR
SWMQGSTLPRH

SEQ ID NO: 24796 - protein, 11 aa, Artificial Sequence
  Description of Artificial Sequence: Synthetic peptide
  Seed: SLMQGSTLPRR
SWMQGSTLPRI

SEQ ID NO: 24797 - protein, 11 aa, Artificial Sequence
  Description of Artificial Sequence: Synthetic peptide
  Seed: SLMQGSTLPRR
SWMQGSTLPRL

SEQ ID NO: 24798 - protein, 11 aa, Artificial Sequence
  Description of Artificial Sequence: Synthetic peptide
  Seed: SLMQGSTLPRR
SWMQGSTLPRK

SEQ ID NO: 24799 - protein, 11 aa, Artificial Sequence
  Description of Artificial Sequence: Synthetic peptide
  Seed: SLMQGSTLPRR
SWMQGSTLPRM

SEQ ID NO: 24800 - protein, 11 aa, Artificial Sequence
  Description of Artificial Sequence: Synthetic peptide
  Seed: SLMQGSTLPRR
SWMQGSTLPRF

SEQ ID NO: 24801 - protein, 11 aa, Artificial Sequence
  Description of Artificial Sequence: Synthetic peptide
  Seed: SLMQGSTLPRR
SWMQGSTLPRP

SEQ ID NO: 24802 - protein, 11 aa, Artificial Sequence
  Description of Artificial Sequence: Synthetic peptide
  Seed: SLMQGSTLPRR
SWMQGSTLPRS

SEQ ID NO: 24803 - protein, 10 aa, Artificial Sequence
  Description of Artificial Sequence: Synthetic peptide
  Seed: SLIRPNENPA
SMIRPNENPV

SEQ ID NO: 24804 - protein, 10 aa, Artificial Sequence
  Description of Artificial Sequence: Synthetic peptide
  Seed: SLIRPNENPA
SMIRPNENPM

SEQ ID NO: 24805 - protein, 10 aa, Artificial Sequence
  Description of Artificial Sequence: Synthetic peptide
  Seed: SLIRPNENPA
SMIRPNENPL

SEQ ID NO: 24806 - protein, 9 aa, Artificial Sequence
  Description of Artificial Sequence: Synthetic peptide
  Seed: SFRGRGVFE
SVRGRGVFA

SEQ ID NO: 24807 - protein, 9 aa, Artificial Sequence
  Description of Artificial Sequence: Synthetic peptide
  Seed: SFRGRGVFE
SYRGRGVFL

SEQ ID NO: 24808 - protein, 9 aa, Artificial Sequence
  Description of Artificial Sequence: Synthetic peptide
  Seed: SFRGRGVFE
SYRGRGVFK

SEQ ID NO: 24809 - protein, 9 aa, Artificial Sequence
  Description of Artificial Sequence: Synthetic peptide
  Seed: SFRGRGVFE
SYRGRGVFM

SEQ ID NO: 24810 - protein, 9 aa, Artificial Sequence
  Description of Artificial Sequence: Synthetic peptide
  Seed: SFRGRGVFE
SYRGRGVFF

SEQ ID NO: 24811 - protein, 9 aa, Artificial Sequence
  Description of Artificial Sequence: Synthetic peptide
  Seed: SFRGRGVFE
SYRGRGVFP

SEQ ID NO: 24812 - protein, 9 aa, Artificial Sequence
  Description of Artificial Sequence: Synthetic peptide
  Seed: SFRGRGVFE
SYRGRGVFS

SEQ ID NO: 24813 - protein, 9 aa, Artificial Sequence
  Description of Artificial Sequence: Synthetic peptide
  Seed: SFRGRGVFE
SYRGRGVFT

SEQ ID NO: 24814 - protein, 9 aa, Artificial Sequence
  Description of Artificial Sequence: Synthetic peptide
  Seed: SFRGRGVFE
SYRGRGVFY

SEQ ID NO: 24815 - protein, 9 aa, Artificial Sequence
  Description of Artificial Sequence: Synthetic peptide
  Seed: SFRGRGVFE
SYRGRGVFV

SEQ ID NO: 24816 - protein, 9 aa, Artificial Sequence
  Description of Artificial Sequence: Synthetic peptide
  Seed: SFRGRGVFE
SVRGRGVFR

SEQ ID NO: 24817 - protein, 9 aa, Artificial Sequence
  Description of Artificial Sequence: Synthetic peptide
  Seed: SFRGRGVFE
SVRGRGVFF

SEQ ID NO: 24818 - protein, 9 aa, Artificial Sequence
  Description of Artificial Sequence: Synthetic peptide
  Seed: SFRGRGVFE
SVRGRGVFN

SEQ ID NO: 24819 - protein, 9 aa, Artificial Sequence
  Description of Artificial Sequence: Synthetic peptide
  Seed: SFRGRGVFE
SVRGRGVFC

SEQ ID NO: 24820 - protein, 9 aa, Artificial Sequence
  Description of Artificial Sequence: Synthetic peptide
  Seed: SFRGRGVFE
SVRGRGVFQ

SEQ ID NO: 24821 - protein, 9 aa, Artificial Sequence
  Description of Artificial Sequence: Synthetic peptide
  Seed: SFRGRGVFE
SVRGRGVFE

SEQ ID NO: 24822 - protein, 9 aa, Artificial Sequence
  Description of Artificial Sequence: Synthetic peptide
  Seed: SFRGRGVFE
SVRGRGVFG

SEQ ID NO: 24823 - protein, 9 aa, Artificial Sequence
  Description of Artificial Sequence: Synthetic peptide
  Seed: SFRGRGVFE
SVRGRGVFH

SEQ ID NO: 24824 - protein, 9 aa, Artificial Sequence
  Description of Artificial Sequence: Synthetic peptide
  Seed: SFRGRGVFE
SVRGRGVFI

SEQ ID NO: 24825 - protein, 9 aa, Artificial Sequence
  Description of Artificial Sequence: Synthetic peptide
  Seed: SFRGRGVFE
SVRGRGVFL

SEQ ID NO: 24826 - protein, 9 aa, Artificial Sequence
  Description of Artificial Sequence: Synthetic peptide
  Seed: SFRGRGVFE
SVRGRGVFK

SEQ ID NO: 24827 - protein, 9 aa, Artificial Sequence
  Description of Artificial Sequence: Synthetic peptide
  Seed: SFRGRGVFE
SYRGRGVFI

SEQ ID NO: 24828 - protein, 9 aa, Artificial Sequence
  Description of Artificial Sequence: Synthetic peptide
  Seed: SFRGRGVFE
SYRGRGVFH

SEQ ID NO: 24829 - protein, 9 aa, Artificial Sequence
  Description of Artificial Sequence: Synthetic peptide
  Seed: SFRGRGVFE
SYRGRGVFG

SEQ ID NO: 24830 - protein, 9 aa, Artificial Sequence
  Description of Artificial Sequence: Synthetic peptide
  Seed: SFRGRGVFE
SYRGRGVFE

SEQ ID NO: 24831 - protein, 9 aa, Artificial Sequence
  Description of Artificial Sequence: Synthetic peptide
  Seed: SFRGRGVFE
STRGRGVFV

SEQ ID NO: 24832 - protein, 9 aa, Artificial Sequence
  Description of Artificial Sequence: Synthetic peptide
  Seed: SFRGRGVFE
SWRGRGVFA

SEQ ID NO: 24833 - protein, 9 aa, Artificial Sequence
  Description of Artificial Sequence: Synthetic peptide
  Seed: SFRGRGVFE
SWRGRGVFR

SEQ ID NO: 24834 - protein, 9 aa, Artificial Sequence
  Description of Artificial Sequence: Synthetic peptide
  Seed: SFRGRGVFE
SWRGRGVFG

SEQ ID NO: 24835 - protein, 9 aa, Artificial Sequence
  Description of Artificial Sequence: Synthetic peptide
  Seed: SFRGRGVFE
SWRGRGVFI

SEQ ID NO: 24836 - protein, 9 aa, Artificial Sequence
  Description of Artificial Sequence: Synthetic peptide
  Seed: SFRGRGVFE
SWRGRGVFL

SEQ ID NO: 24837 - protein, 9 aa, Artificial Sequence
  Description of Artificial Sequence: Synthetic peptide
  Seed: SFRGRGVFE
SWRGRGVFK

SEQ ID NO: 24838 - protein, 9 aa, Artificial Sequence
  Description of Artificial Sequence: Synthetic peptide
  Seed: SFRGRGVFE
SWRGRGVFM

SEQ ID NO: 24839 - protein, 9 aa, Artificial Sequence
  Description of Artificial Sequence: Synthetic peptide
  Seed: SFRGRGVFE
SWRGRGVFF

SEQ ID NO: 24840 - protein, 9 aa, Artificial Sequence
  Description of Artificial Sequence: Synthetic peptide
  Seed: SFRGRGVFE
SWRGRGVFP

SEQ ID NO: 24841 - protein, 9 aa, Artificial Sequence
  Description of Artificial Sequence: Synthetic peptide
  Seed: SFRGRGVFE
SWRGRGVFS

SEQ ID NO: 24842 - protein, 9 aa, Artificial Sequence
  Description of Artificial Sequence: Synthetic peptide
  Seed: SFRGRGVFE
SWRGRGVFT

SEQ ID NO: 24843 - protein, 9 aa, Artificial Sequence
  Description of Artificial Sequence: Synthetic peptide
  Seed: SFRGRGVFE
SWRGRGVFY

SEQ ID NO: 24844 - protein, 9 aa, Artificial Sequence
  Description of Artificial Sequence: Synthetic peptide
  Seed: SFRGRGVFE
SWRGRGVFV

SEQ ID NO: 24845 - protein, 9 aa, Artificial Sequence
  Description of Artificial Sequence: Synthetic peptide
  Seed: SFRGRGVFE
SYRGRGVFA

SEQ ID NO: 24846 - protein, 9 aa, Artificial Sequence
  Description of Artificial Sequence: Synthetic peptide
  Seed: SFRGRGVFE
SYRGRGVFR

SEQ ID NO: 24847 - protein, 9 aa, Artificial Sequence
  Description of Artificial Sequence: Synthetic peptide
  Seed: SFRGRGVFE
SYRGRGVFN

SEQ ID NO: 24848 - protein, 9 aa, Artificial Sequence
  Description of Artificial Sequence: Synthetic peptide
  Seed: SFRGRGVFE
SYRGRGVFC

SEQ ID NO: 24849 - protein, 9 aa, Artificial Sequence
  Description of Artificial Sequence: Synthetic peptide
  Seed: SFRGRGVFE
SYRGRGVFQ

SEQ ID NO: 24850 - protein, 9 aa, Artificial Sequence
  Description of Artificial Sequence: Synthetic peptide
  Seed: SFRGRGVFE
SVRGRGVFM

SEQ ID NO: 24851 - protein, 9 aa, Artificial Sequence
  Description of Artificial Sequence: Synthetic peptide
  Seed: SFRGRGVFE
SVRGRGVFP

SEQ ID NO: 24852 - protein, 10 aa, Artificial Sequence
  Description of Artificial Sequence: Synthetic peptide
  Seed: SFRGRGVFEL
SGRGRGVFEA

SEQ ID NO: 24853 - protein, 10 aa, Artificial Sequence
  Description of Artificial Sequence: Synthetic peptide
  Seed: SFRGRGVFEL
SCRGRGVFEF

SEQ ID NO: 24854 - protein, 10 aa, Artificial Sequence
  Description of Artificial Sequence: Synthetic peptide
  Seed: SFRGRGVFEL
SNRGRGVFEF

SEQ ID NO: 24855 - protein, 10 aa, Artificial Sequence
  Description of Artificial Sequence: Synthetic peptide
  Seed: SFRGRGVFEL
SDRGRGVFEI

SEQ ID NO: 24856 - protein, 10 aa, Artificial Sequence
  Description of Artificial Sequence: Synthetic peptide
  Seed: SFRGRGVFEL
SDRGRGVFEL

SEQ ID NO: 24857 - protein, 10 aa, Artificial Sequence
  Description of Artificial Sequence: Synthetic peptide
  Seed: SFRGRGVFEL
SDRGRGVFEM

SEQ ID NO: 24858 - protein, 10 aa, Artificial Sequence
  Description of Artificial Sequence: Synthetic peptide
  Seed: SFRGRGVFEL
SDRGRGVFEF

SEQ ID NO: 24859 - protein, 10 aa, Artificial Sequence
  Description of Artificial Sequence: Synthetic peptide
  Seed: SFRGRGVFEL
SCRGRGVFEI

SEQ ID NO: 24860 - protein, 10 aa, Artificial Sequence
  Description of Artificial Sequence: Synthetic peptide
  Seed: SFRGRGVFEL
SCRGRGVFEL

SEQ ID NO: 24861 - protein, 10 aa, Artificial Sequence
  Description of Artificial Sequence: Synthetic peptide
  Seed: SFRGRGVFEL
SCRGRGVFEK

SEQ ID NO: 24862 - protein, 10 aa, Artificial Sequence
  Description of Artificial Sequence: Synthetic peptide
  Seed: SFRGRGVFEL
SCRGRGVFEM

SEQ ID NO: 24863 - protein, 10 aa, Artificial Sequence
  Description of Artificial Sequence: Synthetic peptide
  Seed: SFRGRGVFEL
SQRGRGVFEA

SEQ ID NO: 24864 - protein, 9 aa, Artificial Sequence
  Description of Artificial Sequence: Synthetic peptide
  Seed: SFRGRGVFE
SVRGRGVFS

SEQ ID NO: 24865 - protein, 10 aa, Artificial Sequence
  Description of Artificial Sequence: Synthetic peptide
  Seed: SFRGRGVFEL
SQRGRGVFEI

SEQ ID NO: 24866 - protein, 10 aa, Artificial Sequence
  Description of Artificial Sequence: Synthetic peptide
  Seed: SFRGRGVFEL
SQRGRGVFEL

SEQ ID NO: 24867 - protein, 10 aa, Artificial Sequence
  Description of Artificial Sequence: Synthetic peptide
  Seed: SFRGRGVFEL
SQRGRGVFEK

SEQ ID NO: 24868 - protein, 10 aa, Artificial Sequence
  Description of Artificial Sequence: Synthetic peptide
  Seed: SFRGRGVFEL
SQRGRGVFEM

SEQ ID NO: 24869 - protein, 10 aa, Artificial Sequence
  Description of Artificial Sequence: Synthetic peptide
  Seed: SFRGRGVFEL
SQRGRGVFEF

SEQ ID NO: 24870 - protein, 10 aa, Artificial Sequence
  Description of Artificial Sequence: Synthetic peptide
  Seed: SFRGRGVFEL
SQRGRGVFEV

SEQ ID NO: 24871 - protein, 10 aa, Artificial Sequence
  Description of Artificial Sequence: Synthetic peptide
  Seed: SFRGRGVFEL
SERGRGVFEI

SEQ ID NO: 24872 - protein, 10 aa, Artificial Sequence
  Description of Artificial Sequence: Synthetic peptide
  Seed: SFRGRGVFEL
SERGRGVFEL

SEQ ID NO: 24873 - protein, 10 aa, Artificial Sequence
  Description of Artificial Sequence: Synthetic peptide
  Seed: SFRGRGVFEL
SERGRGVFEM

SEQ ID NO: 24874 - protein, 10 aa, Artificial Sequence
  Description of Artificial Sequence: Synthetic peptide
  Seed: SFRGRGVFEL
SNRGRGVFEM

SEQ ID NO: 24875 - protein, 10 aa, Artificial Sequence
  Description of Artificial Sequence: Synthetic peptide
  Seed: SFRGRGVFEL
SNRGRGVFEK

SEQ ID NO: 24876 - protein, 10 aa, Artificial Sequence
  Description of Artificial Sequence: Synthetic peptide
  Seed: SFRGRGVFEL
SNRGRGVFEL

SEQ ID NO: 24877 - protein, 10 aa, Artificial Sequence
  Description of Artificial Sequence: Synthetic peptide
  Seed: SFRGRGVFEL
SNRGRGVFEI

SEQ ID NO: 24878 - protein, 9 aa, Artificial Sequence
  Description of Artificial Sequence: Synthetic peptide
  Seed: SFRGRGVFE
SVRGRGVFT

SEQ ID NO: 24879 - protein, 9 aa, Artificial Sequence
  Description of Artificial Sequence: Synthetic peptide
  Seed: SFRGRGVFE
SVRGRGVFW

SEQ ID NO: 24880 - protein, 9 aa, Artificial Sequence
  Description of Artificial Sequence: Synthetic peptide
  Seed: SFRGRGVFE
SVRGRGVFY

SEQ ID NO: 24881 - protein, 9 aa, Artificial Sequence
  Description of Artificial Sequence: Synthetic peptide
  Seed: SFRGRGVFE
SVRGRGVFV

SEQ ID NO: 24882 - protein, 10 aa, Artificial Sequence
  Description of Artificial Sequence: Synthetic peptide
  Seed: SFRGRGVFEL
SARGRGVFEA

SEQ ID NO: 24883 - protein, 10 aa, Artificial Sequence
  Description of Artificial Sequence: Synthetic peptide
  Seed: SFRGRGVFEL
SARGRGVFEI

SEQ ID NO: 24884 - protein, 10 aa, Artificial Sequence
  Description of Artificial Sequence: Synthetic peptide
  Seed: SFRGRGVFEL
SARGRGVFEL

SEQ ID NO: 24885 - protein, 10 aa, Artificial Sequence
  Description of Artificial Sequence: Synthetic peptide
  Seed: SFRGRGVFEL
SARGRGVFEK

SEQ ID NO: 24886 - protein, 10 aa, Artificial Sequence
  Description of Artificial Sequence: Synthetic peptide
  Seed: SFRGRGVFEL
SARGRGVFEM

SEQ ID NO: 24887 - protein, 10 aa, Artificial Sequence
  Description of Artificial Sequence: Synthetic peptide
  Seed: SFRGRGVFEL
SARGRGVFEF

SEQ ID NO: 24888 - protein, 10 aa, Artificial Sequence
  Description of Artificial Sequence: Synthetic peptide
  Seed: SFRGRGVFEL
SARGRGVFES

SEQ ID NO: 24889 - protein, 10 aa, Artificial Sequence
  Description of Artificial Sequence: Synthetic peptide
  Seed: SFRGRGVFEL
SARGRGVFEY

SEQ ID NO: 24890 - protein, 10 aa, Artificial Sequence
  Description of Artificial Sequence: Synthetic peptide
  Seed: SFRGRGVFEL
SARGRGVFEV

SEQ ID NO: 24891 - protein, 10 aa, Artificial Sequence
  Description of Artificial Sequence: Synthetic peptide
  Seed: SFRGRGVFEL
SRRGRGVFEI

SEQ ID NO: 24892 - protein, 10 aa, Artificial Sequence
  Description of Artificial Sequence: Synthetic peptide
  Seed: SFRGRGVFEL
SRRGRGVFEL

SEQ ID NO: 24893 - protein, 10 aa, Artificial Sequence
  Description of Artificial Sequence: Synthetic peptide
  Seed: SFRGRGVFEL
SRRGRGVFEM

SEQ ID NO: 24894 - protein, 10 aa, Artificial Sequence
  Description of Artificial Sequence: Synthetic peptide
  Seed: SFRGRGVFEL
SRRGRGVFEF

SEQ ID NO: 24895 - protein, 10 aa, Artificial Sequence
  Description of Artificial Sequence: Synthetic peptide
  Seed: SFRGRGVFEL
SRRGRGVFEV

SEQ ID NO: 24896 - protein, 10 aa, Artificial Sequence
  Description of Artificial Sequence: Synthetic peptide
  Seed: SFRGRGVFEL
SNRGRGVFEA

SEQ ID NO: 24897 - protein, 9 aa, Artificial Sequence
  Description of Artificial Sequence: Synthetic peptide
  Seed: SFRGRGVFE
STRGRGVFY

SEQ ID NO: 24898 - protein, 9 aa, Artificial Sequence
  Description of Artificial Sequence: Synthetic peptide
  Seed: SFRGRGVFE
STRGRGVFW

SEQ ID NO: 24899 - protein, 9 aa, Artificial Sequence
  Description of Artificial Sequence: Synthetic peptide
  Seed: SFRGRGVFE
STRGRGVFT

SEQ ID NO: 24900 - protein, 9 aa, Artificial Sequence
  Description of Artificial Sequence: Synthetic peptide
  Seed: SFRGRGVFE
SMRGRGVFP

SEQ ID NO: 24901 - protein, 9 aa, Artificial Sequence
  Description of Artificial Sequence: Synthetic peptide
  Seed: SFRGRGVFE
SMRGRGVFQ

SEQ ID NO: 24902 - protein, 9 aa, Artificial Sequence
  Description of Artificial Sequence: Synthetic peptide
  Seed: SFRGRGVFE
SMRGRGVFE

SEQ ID NO: 24903 - protein, 9 aa, Artificial Sequence
  Description of Artificial Sequence: Synthetic peptide
  Seed: SFRGRGVFE
SMRGRGVFG

SEQ ID NO: 24904 - protein, 9 aa, Artificial Sequence
  Description of Artificial Sequence: Synthetic peptide
  Seed: SFRGRGVFE
SMRGRGVFH

SEQ ID NO: 24905 - protein, 9 aa, Artificial Sequence
  Description of Artificial Sequence: Synthetic peptide
  Seed: SFRGRGVFE
SMRGRGVFI

SEQ ID NO: 24906 - protein, 9 aa, Artificial Sequence
  Description of Artificial Sequence: Synthetic peptide
  Seed: SFRGRGVFE
SMRGRGVFL

SEQ ID NO: 24907 - protein, 9 aa, Artificial Sequence
  Description of Artificial Sequence: Synthetic peptide
  Seed: SFRGRGVFE
SMRGRGVFK

SEQ ID NO: 24908 - protein, 9 aa, Artificial Sequence
  Description of Artificial Sequence: Synthetic peptide
  Seed: SFRGRGVFE
SMRGRGVFM

SEQ ID NO: 24909 - protein, 9 aa, Artificial Sequence
  Description of Artificial Sequence: Synthetic peptide
  Seed: SFRGRGVFE
SMRGRGVFF

SEQ ID NO: 24910 - protein, 9 aa, Artificial Sequence
  Description of Artificial Sequence: Synthetic peptide
  Seed: SFRGRGVFE
SMRGRGVFS

SEQ ID NO: 24911 - protein, 9 aa, Artificial Sequence
  Description of Artificial Sequence: Synthetic peptide
  Seed: SFRGRGVFE
STRGRGVFS

SEQ ID NO: 24912 - protein, 9 aa, Artificial Sequence
  Description of Artificial Sequence: Synthetic peptide
  Seed: SFRGRGVFE
SMRGRGVFT

SEQ ID NO: 24913 - protein, 9 aa, Artificial Sequence
  Description of Artificial Sequence: Synthetic peptide
  Seed: SFRGRGVFE
SMRGRGVFW

SEQ ID NO: 24914 - protein, 9 aa, Artificial Sequence
  Description of Artificial Sequence: Synthetic peptide
  Seed: SFRGRGVFE
SMRGRGVFY

SEQ ID NO: 24915 - protein, 9 aa, Artificial Sequence
  Description of Artificial Sequence: Synthetic peptide
  Seed: SFRGRGVFE
SMRGRGVFV

SEQ ID NO: 24916 - protein, 9 aa, Artificial Sequence
  Description of Artificial Sequence: Synthetic peptide
  Seed: SFRGRGVFE
SFRGRGVFA

SEQ ID NO: 24917 - protein, 9 aa, Artificial Sequence
  Description of Artificial Sequence: Synthetic peptide
  Seed: SFRGRGVFE
SFRGRGVFR

SEQ ID NO: 24918 - protein, 9 aa, Artificial Sequence
  Description of Artificial Sequence: Synthetic peptide
  Seed: SFRGRGVFE
SFRGRGVFN

SEQ ID NO: 24919 - protein, 9 aa, Artificial Sequence
  Description of Artificial Sequence: Synthetic peptide
  Seed: SFRGRGVFE
SFRGRGVFC

SEQ ID NO: 24920 - protein, 9 aa, Artificial Sequence
  Description of Artificial Sequence: Synthetic peptide
  Seed: SFRGRGVFE
SFRGRGVFQ

SEQ ID NO: 24921 - protein, 9 aa, Artificial Sequence
  Description of Artificial Sequence: Synthetic peptide
  Seed: SFRGRGVFE
SMRGRGVFC

SEQ ID NO: 24922 - protein, 9 aa, Artificial Sequence
  Description of Artificial Sequence: Synthetic peptide
  Seed: SFRGRGVFE
SMRGRGVFN

SEQ ID NO: 24923 - protein, 9 aa, Artificial Sequence
  Description of Artificial Sequence: Synthetic peptide
  Seed: SFRGRGVFE
SMRGRGVFR

SEQ ID NO: 24924 - protein, 9 aa, Artificial Sequence
  Description of Artificial Sequence: Synthetic peptide
  Seed: SFRGRGVFE
SMRGRGVFA

SEQ ID NO: 24925 - protein, 9 aa, Artificial Sequence
  Description of Artificial Sequence: Synthetic peptide
  Seed: SFRGRGVFE
SIRGRGVFT

SEQ ID NO: 24926 - protein, 9 aa, Artificial Sequence
  Description of Artificial Sequence: Synthetic peptide
  Seed: SFRGRGVFE
SIRGRGVFY

SEQ ID NO: 24927 - protein, 9 aa, Artificial Sequence
  Description of Artificial Sequence: Synthetic peptide
  Seed: SFRGRGVFE
SIRGRGVFV

SEQ ID NO: 24928 - protein, 9 aa, Artificial Sequence
  Description of Artificial Sequence: Synthetic peptide
  Seed: SFRGRGVFE
SLRGRGVFA

SEQ ID NO: 24929 - protein, 9 aa, Artificial Sequence
  Description of Artificial Sequence: Synthetic peptide
  Seed: SFRGRGVFE
SLRGRGVFR

SEQ ID NO: 24930 - protein, 9 aa, Artificial Sequence
  Description of Artificial Sequence: Synthetic peptide
  Seed: SFRGRGVFE
SLRGRGVFN

SEQ ID NO: 24931 - protein, 9 aa, Artificial Sequence
  Description of Artificial Sequence: Synthetic peptide
  Seed: SFRGRGVFE
SLRGRGVFQ

SEQ ID NO: 24932 - protein, 9 aa, Artificial Sequence
  Description of Artificial Sequence: Synthetic peptide
  Seed: SFRGRGVFE
SLRGRGVFG

SEQ ID NO: 24933 - protein, 9 aa, Artificial Sequence
  Description of Artificial Sequence: Synthetic peptide
  Seed: SFRGRGVFE
SLRGRGVFI

SEQ ID NO: 24934 - protein, 9 aa, Artificial Sequence
  Description of Artificial Sequence: Synthetic peptide
  Seed: SFRGRGVFE
SLRGRGVFL

SEQ ID NO: 24935 - protein, 9 aa, Artificial Sequence
  Description of Artificial Sequence: Synthetic peptide
  Seed: SFRGRGVFE
SLRGRGVFK

SEQ ID NO: 24936 - protein, 9 aa, Artificial Sequence
  Description of Artificial Sequence: Synthetic peptide
  Seed: SFRGRGVFE
SLRGRGVFM

SEQ ID NO: 24937 - protein, 9 aa, Artificial Sequence
  Description of Artificial Sequence: Synthetic peptide
  Seed: SFRGRGVFE
SLRGRGVFF

SEQ ID NO: 24938 - protein, 9 aa, Artificial Sequence
  Description of Artificial Sequence: Synthetic peptide
  Seed: SFRGRGVFE
SLRGRGVFP

SEQ ID NO: 24939 - protein, 9 aa, Artificial Sequence
  Description of Artificial Sequence: Synthetic peptide
  Seed: SFRGRGVFE
SLRGRGVFS

SEQ ID NO: 24940 - protein, 9 aa, Artificial Sequence
  Description of Artificial Sequence: Synthetic peptide
  Seed: SFRGRGVFE
SLRGRGVFT

SEQ ID NO: 24941 - protein, 9 aa, Artificial Sequence
  Description of Artificial Sequence: Synthetic peptide
  Seed: SFRGRGVFE
SLRGRGVFY

SEQ ID NO: 24942 - protein, 9 aa, Artificial Sequence
  Description of Artificial Sequence: Synthetic peptide
  Seed: SFRGRGVFE
SLRGRGVFV

SEQ ID NO: 24943 - protein, 9 aa, Artificial Sequence
  Description of Artificial Sequence: Synthetic peptide
  Seed: SFRGRGVFE
SKRGRGVFK

SEQ ID NO: 24944 - protein, 9 aa, Artificial Sequence
  Description of Artificial Sequence: Synthetic peptide
  Seed: SFRGRGVFE
SFRGRGVFG

SEQ ID NO: 24945 - protein, 9 aa, Artificial Sequence
  Description of Artificial Sequence: Synthetic peptide
  Seed: SFRGRGVFE
SFRGRGVFH

SEQ ID NO: 24946 - protein, 9 aa, Artificial Sequence
  Description of Artificial Sequence: Synthetic peptide
  Seed: SFRGRGVFE
SFRGRGVFI

SEQ ID NO: 24947 - protein, 9 aa, Artificial Sequence
  Description of Artificial Sequence: Synthetic peptide
  Seed: SFRGRGVFE
SSRGRGVFP

SEQ ID NO: 24948 - protein, 9 aa, Artificial Sequence
  Description of Artificial Sequence: Synthetic peptide
  Seed: SFRGRGVFE
SSRGRGVFT

SEQ ID NO: 24949 - protein, 9 aa, Artificial Sequence
  Description of Artificial Sequence: Synthetic peptide
  Seed: SFRGRGVFE
SSRGRGVFW

SEQ ID NO: 24950 - protein, 9 aa, Artificial Sequence
  Description of Artificial Sequence: Synthetic peptide
  Seed: SFRGRGVFE
SSRGRGVFY

SEQ ID NO: 24951 - protein, 9 aa, Artificial Sequence
  Description of Artificial Sequence: Synthetic peptide
  Seed: SFRGRGVFE
SSRGRGVFV

SEQ ID NO: 24952 - protein, 9 aa, Artificial Sequence
  Description of Artificial Sequence: Synthetic peptide
  Seed: SFRGRGVFE
STRGRGVFA

SEQ ID NO: 24953 - protein, 9 aa, Artificial Sequence
  Description of Artificial Sequence: Synthetic peptide
  Seed: SFRGRGVFE
STRGRGVFR

SEQ ID NO: 24954 - protein, 9 aa, Artificial Sequence
  Description of Artificial Sequence: Synthetic peptide
  Seed: SFRGRGVFE
STRGRGVFN

SEQ ID NO: 24955 - protein, 9 aa, Artificial Sequence
  Description of Artificial Sequence: Synthetic peptide
  Seed: SFRGRGVFE
STRGRGVFD

SEQ ID NO: 24956 - protein, 9 aa, Artificial Sequence
  Description of Artificial Sequence: Synthetic peptide
  Seed: SFRGRGVFE
STRGRGVFC

SEQ ID NO: 24957 - protein, 9 aa, Artificial Sequence
  Description of Artificial Sequence: Synthetic peptide
  Seed: SFRGRGVFE
STRGRGVFQ

SEQ ID NO: 24958 - protein, 9 aa, Artificial Sequence
  Description of Artificial Sequence: Synthetic peptide
  Seed: SFRGRGVFE
STRGRGVFE

SEQ ID NO: 24959 - protein, 9 aa, Artificial Sequence
  Description of Artificial Sequence: Synthetic peptide
  Seed: SFRGRGVFE
STRGRGVFG

SEQ ID NO: 24960 - protein, 9 aa, Artificial Sequence
  Description of Artificial Sequence: Synthetic peptide
  Seed: SFRGRGVFE
STRGRGVFH

SEQ ID NO: 24961 - protein, 9 aa, Artificial Sequence
  Description of Artificial Sequence: Synthetic peptide
  Seed: SFRGRGVFE
STRGRGVFI

SEQ ID NO: 24962 - protein, 9 aa, Artificial Sequence
  Description of Artificial Sequence: Synthetic peptide
  Seed: SFRGRGVFE
STRGRGVFL

SEQ ID NO: 24963 - protein, 9 aa, Artificial Sequence
  Description of Artificial Sequence: Synthetic peptide
  Seed: SFRGRGVFE
STRGRGVFK

SEQ ID NO: 24964 - protein, 9 aa, Artificial Sequence
  Description of Artificial Sequence: Synthetic peptide
  Seed: SFRGRGVFE
STRGRGVFM

SEQ ID NO: 24965 - protein, 9 aa, Artificial Sequence
  Description of Artificial Sequence: Synthetic peptide
  Seed: SFRGRGVFE
STRGRGVFF

SEQ ID NO: 24966 - protein, 9 aa, Artificial Sequence
  Description of Artificial Sequence: Synthetic peptide
  Seed: SFRGRGVFE
STRGRGVFP

SEQ ID NO: 24967 - protein, 9 aa, Artificial Sequence
  Description of Artificial Sequence: Synthetic peptide
  Seed: SFRGRGVFE
SSRGRGVFS

SEQ ID NO: 24968 - protein, 9 aa, Artificial Sequence
  Description of Artificial Sequence: Synthetic peptide
  Seed: SFRGRGVFE
SSRGRGVFF

SEQ ID NO: 24969 - protein, 9 aa, Artificial Sequence
  Description of Artificial Sequence: Synthetic peptide
  Seed: SFRGRGVFE
SFRGRGVFL

SEQ ID NO: 24970 - protein, 9 aa, Artificial Sequence
  Description of Artificial Sequence: Synthetic peptide
  Seed: SFRGRGVFE
SSRGRGVFM

SEQ ID NO: 24971 - protein, 9 aa, Artificial Sequence
  Description of Artificial Sequence: Synthetic peptide
  Seed: SFRGRGVFE
SFRGRGVFK

SEQ ID NO: 24972 - protein, 9 aa, Artificial Sequence
  Description of Artificial Sequence: Synthetic peptide
  Seed: SFRGRGVFE
SFRGRGVFM

SEQ ID NO: 24973 - protein, 9 aa, Artificial Sequence
  Description of Artificial Sequence: Synthetic peptide
  Seed: SFRGRGVFE
SFRGRGVFF

SEQ ID NO: 24974 - protein, 9 aa, Artificial Sequence
  Description of Artificial Sequence: Synthetic peptide
  Seed: SFRGRGVFE
SFRGRGVFP

SEQ ID NO: 24975 - protein, 9 aa, Artificial Sequence
  Description of Artificial Sequence: Synthetic peptide
  Seed: SFRGRGVFE
SFRGRGVFS

SEQ ID NO: 24976 - protein, 9 aa, Artificial Sequence
  Description of Artificial Sequence: Synthetic peptide
  Seed: SFRGRGVFE
SFRGRGVFT

SEQ ID NO: 24977 - protein, 9 aa, Artificial Sequence
  Description of Artificial Sequence: Synthetic peptide
  Seed: SFRGRGVFE
SFRGRGVFY

SEQ ID NO: 24978 - protein, 9 aa, Artificial Sequence
  Description of Artificial Sequence: Synthetic peptide
  Seed: SFRGRGVFE
SFRGRGVFV

SEQ ID NO: 24979 - protein, 9 aa, Artificial Sequence
  Description of Artificial Sequence: Synthetic peptide
  Seed: SFRGRGVFE
SSRGRGVFA

SEQ ID NO: 24980 - protein, 9 aa, Artificial Sequence
  Description of Artificial Sequence: Synthetic peptide
  Seed: SFRGRGVFE
SSRGRGVFR

SEQ ID NO: 24981 - protein, 9 aa, Artificial Sequence
  Description of Artificial Sequence: Synthetic peptide
  Seed: SFRGRGVFE
SSRGRGVFN

SEQ ID NO: 24982 - protein, 9 aa, Artificial Sequence
  Description of Artificial Sequence: Synthetic peptide
  Seed: SFRGRGVFE
SSRGRGVFC

SEQ ID NO: 24983 - protein, 9 aa, Artificial Sequence
  Description of Artificial Sequence: Synthetic peptide
  Seed: SFRGRGVFE
SSRGRGVFQ

SEQ ID NO: 24984 - protein, 9 aa, Artificial Sequence
  Description of Artificial Sequence: Synthetic peptide
  Seed: SFRGRGVFE
SSRGRGVFE

SEQ ID NO: 24985 - protein, 9 aa, Artificial Sequence
  Description of Artificial Sequence: Synthetic peptide
  Seed: SFRGRGVFE
SSRGRGVFG

SEQ ID NO: 24986 - protein, 9 aa, Artificial Sequence
  Description of Artificial Sequence: Synthetic peptide
  Seed: SFRGRGVFE
SSRGRGVFH

SEQ ID NO: 24987 - protein, 9 aa, Artificial Sequence
  Description of Artificial Sequence: Synthetic peptide
  Seed: SFRGRGVFE
SSRGRGVFI

SEQ ID NO: 24988 - protein, 9 aa, Artificial Sequence
  Description of Artificial Sequence: Synthetic peptide
  Seed: SFRGRGVFE
SSRGRGVFL

SEQ ID NO: 24989 - protein, 9 aa, Artificial Sequence
  Description of Artificial Sequence: Synthetic peptide
  Seed: SFRGRGVFE
SSRGRGVFK

SEQ ID NO: 24990 - protein, 10 aa, Artificial Sequence
  Description of Artificial Sequence: Synthetic peptide
  Seed: SFRGRGVFEL
SERGRGVFEF

SEQ ID NO: 24991 - protein, 10 aa, Artificial Sequence
  Description of Artificial Sequence: Synthetic peptide
  Seed: SFRGRGVFEL
SGRGRGVFEI

SEQ ID NO: 24992 - protein, 10 aa, Artificial Sequence
  Description of Artificial Sequence: Synthetic peptide
  Seed: SLIRPNENPA
SMIRPNENPI

SEQ ID NO: 24993 - protein, 10 aa, Artificial Sequence
  Description of Artificial Sequence: Synthetic peptide
  Seed: SGYDFEREGY
SFYDFEREGY

SEQ ID NO: 24994 - protein, 10 aa, Artificial Sequence
  Description of Artificial Sequence: Synthetic peptide
  Seed: SFRGRGVFEL
SVRGRGVFET

SEQ ID NO: 24995 - protein, 10 aa, Artificial Sequence
  Description of Artificial Sequence: Synthetic peptide
  Seed: SFRGRGVFEL
SVRGRGVFEY

SEQ ID NO: 24996 - protein, 10 aa, Artificial Sequence
  Description of Artificial Sequence: Synthetic peptide
  Seed: SFRGRGVFEL
SVRGRGVFEV

SEQ ID NO: 24997 - protein, 10 aa, Artificial Sequence
  Description of Artificial Sequence: Synthetic peptide
  Seed: SGYDFEREGY
SAYDFEREGY

SEQ ID NO: 24998 - protein, 10 aa, Artificial Sequence
  Description of Artificial Sequence: Synthetic peptide
  Seed: SGYDFEREGY
SNYDFEREGY

SEQ ID NO: 24999 - protein, 10 aa, Artificial Sequence
  Description of Artificial Sequence: Synthetic peptide
  Seed: SGYDFEREGY
SQYDFEREGY

SEQ ID NO: 25000 - protein, 10 aa, Artificial Sequence
  Description of Artificial Sequence: Synthetic peptide
  Seed: SGYDFEREGY
SIYDFEREGY

SEQ ID NO: 25001 - protein, 10 aa, Artificial Sequence
  Description of Artificial Sequence: Synthetic peptide
  Seed: SGYDFEREGY
SLYDFEREGY

SEQ ID NO: 25002 - protein, 10 aa, Artificial Sequence
  Description of Artificial Sequence: Synthetic peptide
  Seed: SGYDFEREGY
SMYDFEREGY

SEQ ID NO: 25003 - protein, 10 aa, Artificial Sequence
  Description of Artificial Sequence: Synthetic peptide
  Seed: SGYDFEREGY
SSYDFEREGY

SEQ ID NO: 25004 - protein, 10 aa, Artificial Sequence
  Description of Artificial Sequence: Synthetic peptide
  Seed: SGYDFEREGY
STYDFEREGY

SEQ ID NO: 25005 - protein, 10 aa, Artificial Sequence
  Description of Artificial Sequence: Synthetic peptide
  Seed: SGYDFEREGY
SWYDFEREGY

SEQ ID NO: 25006 - protein, 10 aa, Artificial Sequence
  Description of Artificial Sequence: Synthetic peptide
  Seed: SGYDFEREGY
SYYDFEREGY

SEQ ID NO: 25007 - protein, 10 aa, Artificial Sequence
  Description of Artificial Sequence: Synthetic peptide
  Seed: SGYDFEREGY
SVYDFEREGY

SEQ ID NO: 25008 - protein, 10 aa, Artificial Sequence
  Description of Artificial Sequence: Synthetic peptide
  Seed: SFRGRGVFEL
SVRGRGVFES

SEQ ID NO: 25009 - protein, 10 aa, Artificial Sequence
  Description of Artificial Sequence: Synthetic peptide
  Seed: SFRGRGVFEL
SVRGRGVFEP

SEQ ID NO: 25010 - protein, 10 aa, Artificial Sequence
  Description of Artificial Sequence: Synthetic peptide
  Seed: SFRGRGVFEL
SVRGRGVFEF

SEQ ID NO: 25011 - protein, 10 aa, Artificial Sequence
  Description of Artificial Sequence: Synthetic peptide
  Seed: SFRGRGVFEL
SVRGRGVFEM

SEQ ID NO: 25012 - protein, 10 aa, Artificial Sequence
  Description of Artificial Sequence: Synthetic peptide
  Seed: SFRGRGVFEL
SWRGRGVFEV

SEQ ID NO: 25013 - protein, 10 aa, Artificial Sequence
  Description of Artificial Sequence: Synthetic peptide
  Seed: SFRGRGVFEL
SYRGRGVFEA

SEQ ID NO: 25014 - protein, 10 aa, Artificial Sequence
  Description of Artificial Sequence: Synthetic peptide
  Seed: SFRGRGVFEL
SYRGRGVFER

SEQ ID NO: 25015 - protein, 10 aa, Artificial Sequence
  Description of Artificial Sequence: Synthetic peptide
  Seed: SFRGRGVFEL
SYRGRGVFEG

SEQ ID NO: 25016 - protein, 10 aa, Artificial Sequence
  Description of Artificial Sequence: Synthetic peptide
  Seed: SFRGRGVFEL
SYRGRGVFEI

SEQ ID NO: 25017 - protein, 10 aa, Artificial Sequence
  Description of Artificial Sequence: Synthetic peptide
  Seed: SFRGRGVFEL
SYRGRGVFEL

SEQ ID NO: 25018 - protein, 10 aa, Artificial Sequence
  Description of Artificial Sequence: Synthetic peptide
  Seed: SFRGRGVFEL
SYRGRGVFEK

SEQ ID NO: 25019 - protein, 10 aa, Artificial Sequence
  Description of Artificial Sequence: Synthetic peptide
  Seed: SFRGRGVFEL
SYRGRGVFEM

SEQ ID NO: 25020 - protein, 10 aa, Artificial Sequence
  Description of Artificial Sequence: Synthetic peptide
  Seed: SFRGRGVFEL
SYRGRGVFEF

SEQ ID NO: 25021 - protein, 10 aa, Artificial Sequence
  Description of Artificial Sequence: Synthetic peptide
  Seed: SFRGRGVFEL
SYRGRGVFES

SEQ ID NO: 25022 - protein, 10 aa, Artificial Sequence
  Description of Artificial Sequence: Synthetic peptide
  Seed: SFRGRGVFEL
SYRGRGVFET

SEQ ID NO: 25023 - protein, 10 aa, Artificial Sequence
  Description of Artificial Sequence: Synthetic peptide
  Seed: SFRGRGVFEL
SYRGRGVFEW

SEQ ID NO: 25024 - protein, 10 aa, Artificial Sequence
  Description of Artificial Sequence: Synthetic peptide
  Seed: SFRGRGVFEL
SYRGRGVFEY

SEQ ID NO: 25025 - protein, 10 aa, Artificial Sequence
  Description of Artificial Sequence: Synthetic peptide
  Seed: SFRGRGVFEL
SYRGRGVFEV

SEQ ID NO: 25026 - protein, 10 aa, Artificial Sequence
  Description of Artificial Sequence: Synthetic peptide
  Seed: SFRGRGVFEL
SVRGRGVFEA

SEQ ID NO: 25027 - protein, 10 aa, Artificial Sequence
  Description of Artificial Sequence: Synthetic peptide
  Seed: SFRGRGVFEL
SVRGRGVFEG

SEQ ID NO: 25028 - protein, 10 aa, Artificial Sequence
  Description of Artificial Sequence: Synthetic peptide
  Seed: SFRGRGVFEL
SVRGRGVFEI

SEQ ID NO: 25029 - protein, 10 aa, Artificial Sequence
  Description of Artificial Sequence: Synthetic peptide
  Seed: SFRGRGVFEL
SVRGRGVFEL

SEQ ID NO: 25030 - protein, 10 aa, Artificial Sequence
  Description of Artificial Sequence: Synthetic peptide
  Seed: SFRGRGVFEL
SVRGRGVFEK

SEQ ID NO: 25031 - protein, 10 aa, Artificial Sequence
  Description of Artificial Sequence: Synthetic peptide
  Seed: SFRGRGVFEL
SGRGRGVFEL

SEQ ID NO: 25032 - protein, 10 aa, Artificial Sequence
  Description of Artificial Sequence: Synthetic peptide
  Seed: SLIRPNENPA
SQIRPNENPI

SEQ ID NO: 25033 - protein, 10 aa, Artificial Sequence
  Description of Artificial Sequence: Synthetic peptide
  Seed: SLIRPNENPA
SQIRPNENPL

SEQ ID NO: 25034 - protein, 10 aa, Artificial Sequence
  Description of Artificial Sequence: Synthetic peptide
  Seed: SLIRPNENPA
SQIRPNENPV

SEQ ID NO: 25035 - protein, 10 aa, Artificial Sequence
  Description of Artificial Sequence: Synthetic peptide
  Seed: SLIRPNENPA
SIIRPNENPV

SEQ ID NO: 25036 - protein, 10 aa, Artificial Sequence
  Description of Artificial Sequence: Synthetic peptide
  Seed: SLIRPNENPA
SLIRPNENPI

SEQ ID NO: 25037 - protein, 10 aa, Artificial Sequence
  Description of Artificial Sequence: Synthetic peptide
  Seed: SLIRPNENPA
SLIRPNENPL

SEQ ID NO: 25038 - protein, 10 aa, Artificial Sequence
  Description of Artificial Sequence: Synthetic peptide
  Seed: SLIRPNENPA
SLIRPNENPM

SEQ ID NO: 25039 - protein, 10 aa, Artificial Sequence
  Description of Artificial Sequence: Synthetic peptide
  Seed: SLIRPNENPA
SMIRPNENPA

SEQ ID NO: 25040 - protein, 10 aa, Artificial Sequence
  Description of Artificial Sequence: Synthetic peptide
  Seed: SFRGRGVFEL
SWRGRGVFEW

SEQ ID NO: 25041 - protein, 10 aa, Artificial Sequence
  Description of Artificial Sequence: Synthetic peptide
  Seed: SFRGRGVFEL
SWRGRGVFEF

SEQ ID NO: 25042 - protein, 10 aa, Artificial Sequence
  Description of Artificial Sequence: Synthetic peptide
  Seed: SFRGRGVFEL
SWRGRGVFEM

SEQ ID NO: 25043 - protein, 10 aa, Artificial Sequence
  Description of Artificial Sequence: Synthetic peptide
  Seed: SFRGRGVFEL
SMRGRGVFEG

SEQ ID NO: 25044 - protein, 10 aa, Artificial Sequence
  Description of Artificial Sequence: Synthetic peptide
  Seed: SFRGRGVFEL
SLRGRGVFEF

SEQ ID NO: 25045 - protein, 10 aa, Artificial Sequence
  Description of Artificial Sequence: Synthetic peptide
  Seed: SFRGRGVFEL
SLRGRGVFEV

SEQ ID NO: 25046 - protein, 10 aa, Artificial Sequence
  Description of Artificial Sequence: Synthetic peptide
  Seed: SFRGRGVFEL
SKRGRGVFEI

SEQ ID NO: 25047 - protein, 10 aa, Artificial Sequence
  Description of Artificial Sequence: Synthetic peptide
  Seed: SFRGRGVFEL
SKRGRGVFEL

SEQ ID NO: 25048 - protein, 10 aa, Artificial Sequence
  Description of Artificial Sequence: Synthetic peptide
  Seed: SFRGRGVFEL
SKRGRGVFEK

SEQ ID NO: 25049 - protein, 10 aa, Artificial Sequence
  Description of Artificial Sequence: Synthetic peptide
  Seed: SFRGRGVFEL
SKRGRGVFEM

SEQ ID NO: 25050 - protein, 10 aa, Artificial Sequence
  Description of Artificial Sequence: Synthetic peptide
  Seed: SFRGRGVFEL
SKRGRGVFEF

SEQ ID NO: 25051 - protein, 10 aa, Artificial Sequence
  Description of Artificial Sequence: Synthetic peptide
  Seed: SFRGRGVFEL
SMRGRGVFEA

SEQ ID NO: 25052 - protein, 10 aa, Artificial Sequence
  Description of Artificial Sequence: Synthetic peptide
  Seed: SFRGRGVFEL
SMRGRGVFER

SEQ ID NO: 25053 - protein, 10 aa, Artificial Sequence
  Description of Artificial Sequence: Synthetic peptide
  Seed: SFRGRGVFEL
SMRGRGVFEI

SEQ ID NO: 25054 - protein, 10 aa, Artificial Sequence
  Description of Artificial Sequence: Synthetic peptide
  Seed: SFRGRGVFEL
SWRGRGVFEK

SEQ ID NO: 25055 - protein, 10 aa, Artificial Sequence
  Description of Artificial Sequence: Synthetic peptide
  Seed: SFRGRGVFEL
SMRGRGVFEL

SEQ ID NO: 25056 - protein, 10 aa, Artificial Sequence
  Description of Artificial Sequence: Synthetic peptide
  Seed: SFRGRGVFEL
SMRGRGVFEK

SEQ ID NO: 25057 - protein, 10 aa, Artificial Sequence
  Description of Artificial Sequence: Synthetic peptide
  Seed: SFRGRGVFEL
SMRGRGVFEM

SEQ ID NO: 25058 - protein, 10 aa, Artificial Sequence
  Description of Artificial Sequence: Synthetic peptide
  Seed: SFRGRGVFEL
SMRGRGVFEF

SEQ ID NO: 25059 - protein, 10 aa, Artificial Sequence
  Description of Artificial Sequence: Synthetic peptide
  Seed: SFRGRGVFEL
SMRGRGVFES

SEQ ID NO: 25060 - protein, 10 aa, Artificial Sequence
  Description of Artificial Sequence: Synthetic peptide
  Seed: SFRGRGVFEL
SMRGRGVFEY

SEQ ID NO: 25061 - protein, 10 aa, Artificial Sequence
  Description of Artificial Sequence: Synthetic peptide
  Seed: SFRGRGVFEL
SMRGRGVFEV

SEQ ID NO: 25062 - protein, 10 aa, Artificial Sequence
  Description of Artificial Sequence: Synthetic peptide
  Seed: SFRGRGVFEL
SFRGRGVFEA

SEQ ID NO: 25063 - protein, 10 aa, Artificial Sequence
  Description of Artificial Sequence: Synthetic peptide
  Seed: SFRGRGVFEL
SFRGRGVFEG

SEQ ID NO: 25064 - protein, 10 aa, Artificial Sequence
  Description of Artificial Sequence: Synthetic peptide
  Seed: SFRGRGVFEL
SLRGRGVFEM

SEQ ID NO: 25065 - protein, 10 aa, Artificial Sequence
  Description of Artificial Sequence: Synthetic peptide
  Seed: SFRGRGVFEL
SLRGRGVFEK

SEQ ID NO: 25066 - protein, 10 aa, Artificial Sequence
  Description of Artificial Sequence: Synthetic peptide
  Seed: SFRGRGVFEL
SLRGRGVFEL

SEQ ID NO: 25067 - protein, 10 aa, Artificial Sequence
  Description of Artificial Sequence: Synthetic peptide
  Seed: SFRGRGVFEL
SLRGRGVFEI

SEQ ID NO: 25068 - protein, 10 aa, Artificial Sequence
  Description of Artificial Sequence: Synthetic peptide
  Seed: SFRGRGVFEL
SGRGRGVFEK

SEQ ID NO: 25069 - protein, 10 aa, Artificial Sequence
  Description of Artificial Sequence: Synthetic peptide
  Seed: SFRGRGVFEL
SGRGRGVFEM

SEQ ID NO: 25070 - protein, 10 aa, Artificial Sequence
  Description of Artificial Sequence: Synthetic peptide
  Seed: SFRGRGVFEL
SGRGRGVFEF

SEQ ID NO: 25071 - protein, 10 aa, Artificial Sequence
  Description of Artificial Sequence: Synthetic peptide
  Seed: SFRGRGVFEL
SGRGRGVFEV

SEQ ID NO: 25072 - protein, 10 aa, Artificial Sequence
  Description of Artificial Sequence: Synthetic peptide
  Seed: SFRGRGVFEL
SHRGRGVFEI

SEQ ID NO: 25073 - protein, 10 aa, Artificial Sequence
  Description of Artificial Sequence: Synthetic peptide
  Seed: SFRGRGVFEL
SHRGRGVFEL

SEQ ID NO: 25074 - protein, 10 aa, Artificial Sequence
  Description of Artificial Sequence: Synthetic peptide
  Seed: SFRGRGVFEL
SHRGRGVFEK

SEQ ID NO: 25075 - protein, 10 aa, Artificial Sequence
  Description of Artificial Sequence: Synthetic peptide
  Seed: SFRGRGVFEL
SHRGRGVFEM

SEQ ID NO: 25076 - protein, 10 aa, Artificial Sequence
  Description of Artificial Sequence: Synthetic peptide
  Seed: SFRGRGVFEL
SHRGRGVFEF

SEQ ID NO: 25077 - protein, 10 aa, Artificial Sequence
  Description of Artificial Sequence: Synthetic peptide
  Seed: SFRGRGVFEL
SIRGRGVFEA

SEQ ID NO: 25078 - protein, 10 aa, Artificial Sequence
  Description of Artificial Sequence: Synthetic peptide
  Seed: SFRGRGVFEL
SIRGRGVFEG

SEQ ID NO: 25079 - protein, 10 aa, Artificial Sequence
  Description of Artificial Sequence: Synthetic peptide
  Seed: SFRGRGVFEL
SIRGRGVFEI

SEQ ID NO: 25080 - protein, 10 aa, Artificial Sequence
  Description of Artificial Sequence: Synthetic peptide
  Seed: SFRGRGVFEL
SIRGRGVFEL

SEQ ID NO: 25081 - protein, 10 aa, Artificial Sequence
  Description of Artificial Sequence: Synthetic peptide
  Seed: SFRGRGVFEL
SIRGRGVFEK

SEQ ID NO: 25082 - protein, 10 aa, Artificial Sequence
  Description of Artificial Sequence: Synthetic peptide
  Seed: SFRGRGVFEL
SIRGRGVFEM

SEQ ID NO: 25083 - protein, 10 aa, Artificial Sequence
  Description of Artificial Sequence: Synthetic peptide
  Seed: SFRGRGVFEL
SIRGRGVFEF

SEQ ID NO: 25084 - protein, 10 aa, Artificial Sequence
  Description of Artificial Sequence: Synthetic peptide
  Seed: SFRGRGVFEL
SIRGRGVFEY

SEQ ID NO: 25085 - protein, 10 aa, Artificial Sequence
  Description of Artificial Sequence: Synthetic peptide
  Seed: SFRGRGVFEL
SIRGRGVFEV

SEQ ID NO: 25086 - protein, 10 aa, Artificial Sequence
  Description of Artificial Sequence: Synthetic peptide
  Seed: SFRGRGVFEL
SLRGRGVFEA

SEQ ID NO: 25087 - protein, 10 aa, Artificial Sequence
  Description of Artificial Sequence: Synthetic peptide
  Seed: SFRGRGVFEL
SFRGRGVFEI

SEQ ID NO: 25088 - protein, 10 aa, Artificial Sequence
  Description of Artificial Sequence: Synthetic peptide
  Seed: SFRGRGVFEL
SFRGRGVFEK

SEQ ID NO: 25089 - protein, 10 aa, Artificial Sequence
  Description of Artificial Sequence: Synthetic peptide
  Seed: SFRGRGVFEL
SFRGRGVFEM

SEQ ID NO: 25090 - protein, 10 aa, Artificial Sequence
  Description of Artificial Sequence: Synthetic peptide
  Seed: SFRGRGVFEL
SSRGRGVFEV

SEQ ID NO: 25091 - protein, 10 aa, Artificial Sequence
  Description of Artificial Sequence: Synthetic peptide
  Seed: SFRGRGVFEL
STRGRGVFER

SEQ ID NO: 25092 - protein, 10 aa, Artificial Sequence
  Description of Artificial Sequence: Synthetic peptide
  Seed: SFRGRGVFEL
STRGRGVFEN

SEQ ID NO: 25093 - protein, 10 aa, Artificial Sequence
  Description of Artificial Sequence: Synthetic peptide
  Seed: SFRGRGVFEL
STRGRGVFEC

SEQ ID NO: 25094 - protein, 10 aa, Artificial Sequence
  Description of Artificial Sequence: Synthetic peptide
  Seed: SFRGRGVFEL
STRGRGVFEQ

SEQ ID NO: 25095 - protein, 10 aa, Artificial Sequence
  Description of Artificial Sequence: Synthetic peptide
  Seed: SFRGRGVFEL
STRGRGVFEG

SEQ ID NO: 25096 - protein, 10 aa, Artificial Sequence
  Description of Artificial Sequence: Synthetic peptide
  Seed: SFRGRGVFEL
STRGRGVFEH

SEQ ID NO: 25097 - protein, 10 aa, Artificial Sequence
  Description of Artificial Sequence: Synthetic peptide
  Seed: SFRGRGVFEL
STRGRGVFEI

SEQ ID NO: 25098 - protein, 10 aa, Artificial Sequence
  Description of Artificial Sequence: Synthetic peptide
  Seed: SFRGRGVFEL
STRGRGVFEL

SEQ ID NO: 25099 - protein, 10 aa, Artificial Sequence
  Description of Artificial Sequence: Synthetic peptide
  Seed: SFRGRGVFEL
STRGRGVFEK

SEQ ID NO: 25100 - protein, 10 aa, Artificial Sequence
  Description of Artificial Sequence: Synthetic peptide
  Seed: SFRGRGVFEL
STRGRGVFEM

SEQ ID NO: 25101 - protein, 10 aa, Artificial Sequence
  Description of Artificial Sequence: Synthetic peptide
  Seed: SFRGRGVFEL
STRGRGVFEF

SEQ ID NO: 25102 - protein, 10 aa, Artificial Sequence
  Description of Artificial Sequence: Synthetic peptide
  Seed: SFRGRGVFEL
STRGRGVFEP

SEQ ID NO: 25103 - protein, 10 aa, Artificial Sequence
  Description of Artificial Sequence: Synthetic peptide
  Seed: SFRGRGVFEL
STRGRGVFES

SEQ ID NO: 25104 - protein, 10 aa, Artificial Sequence
  Description of Artificial Sequence: Synthetic peptide
  Seed: SFRGRGVFEL
STRGRGVFET

SEQ ID NO: 25105 - protein, 10 aa, Artificial Sequence
  Description of Artificial Sequence: Synthetic peptide
  Seed: SFRGRGVFEL
STRGRGVFEY

SEQ ID NO: 25106 - protein, 10 aa, Artificial Sequence
  Description of Artificial Sequence: Synthetic peptide
  Seed: SFRGRGVFEL
STRGRGVFEV

SEQ ID NO: 25107 - protein, 10 aa, Artificial Sequence
  Description of Artificial Sequence: Synthetic peptide
  Seed: SFRGRGVFEL
SWRGRGVFEA

SEQ ID NO: 25108 - protein, 10 aa, Artificial Sequence
  Description of Artificial Sequence: Synthetic peptide
  Seed: SFRGRGVFEL
SWRGRGVFEI

SEQ ID NO: 25109 - protein, 10 aa, Artificial Sequence
  Description of Artificial Sequence: Synthetic peptide
  Seed: SFRGRGVFEL
SWRGRGVFEL

SEQ ID NO: 25110 - protein, 10 aa, Artificial Sequence
  Description of Artificial Sequence: Synthetic peptide
  Seed: SFRGRGVFEL
STRGRGVFEA

SEQ ID NO: 25111 - protein, 10 aa, Artificial Sequence
  Description of Artificial Sequence: Synthetic peptide
  Seed: SFRGRGVFEL
SSRGRGVFEY

SEQ ID NO: 25112 - protein, 10 aa, Artificial Sequence
  Description of Artificial Sequence: Synthetic peptide
  Seed: SFRGRGVFEL
SFRGRGVFEF

SEQ ID NO: 25113 - protein, 10 aa, Artificial Sequence
  Description of Artificial Sequence: Synthetic peptide
  Seed: SFRGRGVFEL
SSRGRGVFET

SEQ ID NO: 25114 - protein, 10 aa, Artificial Sequence
  Description of Artificial Sequence: Synthetic peptide
  Seed: SFRGRGVFEL
SFRGRGVFES

SEQ ID NO: 25115 - protein, 10 aa, Artificial Sequence
  Description of Artificial Sequence: Synthetic peptide
  Seed: SFRGRGVFEL
SFRGRGVFEW

SEQ ID NO: 25116 - protein, 10 aa, Artificial Sequence
  Description of Artificial Sequence: Synthetic peptide
  Seed: SFRGRGVFEL
SFRGRGVFEY

SEQ ID NO: 25117 - protein, 10 aa, Artificial Sequence
  Description of Artificial Sequence: Synthetic peptide
  Seed: SFRGRGVFEL
SFRGRGVFEV

SEQ ID NO: 25118 - protein, 10 aa, Artificial Sequence
  Description of Artificial Sequence: Synthetic peptide
  Seed: SFRGRGVFEL
SPRGRGVFEI

SEQ ID NO: 25119 - protein, 10 aa, Artificial Sequence
  Description of Artificial Sequence: Synthetic peptide
  Seed: SFRGRGVFEL
SPRGRGVFEL

SEQ ID NO: 25120 - protein, 10 aa, Artificial Sequence
  Description of Artificial Sequence: Synthetic peptide
  Seed: SFRGRGVFEL
SPRGRGVFEM

SEQ ID NO: 25121 - protein, 10 aa, Artificial Sequence
  Description of Artificial Sequence: Synthetic peptide
  Seed: SFRGRGVFEL
SPRGRGVFEF

SEQ ID NO: 25122 - protein, 10 aa, Artificial Sequence
  Description of Artificial Sequence: Synthetic peptide
  Seed: SFRGRGVFEL
SSRGRGVFEA

SEQ ID NO: 25123 - protein, 10 aa, Artificial Sequence
  Description of Artificial Sequence: Synthetic peptide
  Seed: SFRGRGVFEL
SSRGRGVFER

SEQ ID NO: 25124 - protein, 10 aa, Artificial Sequence
  Description of Artificial Sequence: Synthetic peptide
  Seed: SFRGRGVFEL
SSRGRGVFEC

SEQ ID NO: 25125 - protein, 10 aa, Artificial Sequence
  Description of Artificial Sequence: Synthetic peptide
  Seed: SFRGRGVFEL
SSRGRGVFEG

SEQ ID NO: 25126 - protein, 10 aa, Artificial Sequence
  Description of Artificial Sequence: Synthetic peptide
  Seed: SFRGRGVFEL
SSRGRGVFEI

SEQ ID NO: 25127 - protein, 10 aa, Artificial Sequence
  Description of Artificial Sequence: Synthetic peptide
  Seed: SFRGRGVFEL
SSRGRGVFEL

SEQ ID NO: 25128 - protein, 10 aa, Artificial Sequence
  Description of Artificial Sequence: Synthetic peptide
  Seed: SFRGRGVFEL
SSRGRGVFEK

SEQ ID NO: 25129 - protein, 10 aa, Artificial Sequence
  Description of Artificial Sequence: Synthetic peptide
  Seed: SFRGRGVFEL
SSRGRGVFEM

SEQ ID NO: 25130 - protein, 10 aa, Artificial Sequence
  Description of Artificial Sequence: Synthetic peptide
  Seed: SFRGRGVFEL
SSRGRGVFEF

SEQ ID NO: 25131 - protein, 10 aa, Artificial Sequence
  Description of Artificial Sequence: Synthetic peptide
  Seed: SFRGRGVFEL
SSRGRGVFEP

SEQ ID NO: 25132 - protein, 10 aa, Artificial Sequence
  Description of Artificial Sequence: Synthetic peptide
  Seed: SFRGRGVFEL
SSRGRGVFES

SEQ ID NO: 25133 - protein, 9 aa, Artificial Sequence
  Description of Artificial Sequence: Synthetic peptide
  Seed: SLTIERMVL
SWTIERMVY

SEQ ID NO: 25134 - protein, 9 aa, Artificial Sequence
  Description of Artificial Sequence: Synthetic peptide
  Seed: SLTIERMVL
SYTIERMVH

SEQ ID NO: 25135 - protein, 10 aa, Artificial Sequence
  Description of Artificial Sequence: Synthetic peptide
  Seed: SSTLELRSRY
SWTLELRSRF

SEQ ID NO: 25136 - protein, 10 aa, Artificial Sequence
  Description of Artificial Sequence: Synthetic peptide
  Seed: SRYWAIRTRS
SRYWAIRTRC

SEQ ID NO: 25137 - protein, 9 aa, Artificial Sequence
  Description of Artificial Sequence: Synthetic peptide
  Seed: SRYWAIRTR
SRYWAIRTS

SEQ ID NO: 25138 - protein, 9 aa, Artificial Sequence
  Description of Artificial Sequence: Synthetic peptide
  Seed: SRYWAIRTR
SRYWAIRTT

SEQ ID NO: 25139 - protein, 9 aa, Artificial Sequence
  Description of Artificial Sequence: Synthetic peptide
  Seed: SRYWAIRTR
SRYWAIRTW

SEQ ID NO: 25140 - protein, 9 aa, Artificial Sequence
  Description of Artificial Sequence: Synthetic peptide
  Seed: SRYWAIRTR
SRYWAIRTY

SEQ ID NO: 25141 - protein, 9 aa, Artificial Sequence
  Description of Artificial Sequence: Synthetic peptide
  Seed: SRYWAIRTR
SRYWAIRTV

SEQ ID NO: 25142 - protein, 10 aa, Artificial Sequence
  Description of Artificial Sequence: Synthetic peptide
  Seed: SRYWAIRTRS
SRYWAIRTRA

SEQ ID NO: 25143 - protein, 10 aa, Artificial Sequence
  Description of Artificial Sequence: Synthetic peptide
  Seed: SRYWAIRTRS
SRYWAIRTRR

SEQ ID NO: 25144 - protein, 10 aa, Artificial Sequence
  Description of Artificial Sequence: Synthetic peptide
  Seed: SRYWAIRTRS
SRYWAIRTRN

SEQ ID NO: 25145 - protein, 10 aa, Artificial Sequence
  Description of Artificial Sequence: Synthetic peptide
  Seed: SRYWAIRTRS
SRYWAIRTRD

SEQ ID NO: 25146 - protein, 10 aa, Artificial Sequence
  Description of Artificial Sequence: Synthetic peptide
  Seed: SRYWAIRTRS
SRYWAIRTRQ

SEQ ID NO: 25147 - protein, 10 aa, Artificial Sequence
  Description of Artificial Sequence: Synthetic peptide
  Seed: SRYWAIRTRS
SRYWAIRTRW

SEQ ID NO: 25148 - protein, 10 aa, Artificial Sequence
  Description of Artificial Sequence: Synthetic peptide
  Seed: SRYWAIRTRS
SRYWAIRTRE

SEQ ID NO: 25149 - protein, 10 aa, Artificial Sequence
  Description of Artificial Sequence: Synthetic peptide
  Seed: SRYWAIRTRS
SRYWAIRTRG

SEQ ID NO: 25150 - protein, 10 aa, Artificial Sequence
  Description of Artificial Sequence: Synthetic peptide
  Seed: SRYWAIRTRS
SRYWAIRTRH

SEQ ID NO: 25151 - protein, 10 aa, Artificial Sequence
  Description of Artificial Sequence: Synthetic peptide
  Seed: SRYWAIRTRS
SRYWAIRTRI

SEQ ID NO: 25152 - protein, 10 aa, Artificial Sequence
  Description of Artificial Sequence: Synthetic peptide
  Seed: SRYWAIRTRS
SRYWAIRTRL

SEQ ID NO: 25153 - protein, 10 aa, Artificial Sequence
  Description of Artificial Sequence: Synthetic peptide
  Seed: SRYWAIRTRS
SRYWAIRTRK

SEQ ID NO: 25154 - protein, 10 aa, Artificial Sequence
  Description of Artificial Sequence: Synthetic peptide
  Seed: SRYWAIRTRS
SRYWAIRTRM

SEQ ID NO: 25155 - protein, 10 aa, Artificial Sequence
  Description of Artificial Sequence: Synthetic peptide
  Seed: SRYWAIRTRS
SRYWAIRTRF

SEQ ID NO: 25156 - protein, 10 aa, Artificial Sequence
  Description of Artificial Sequence: Synthetic peptide
  Seed: SRYWAIRTRS
SRYWAIRTRP

SEQ ID NO: 25157 - protein, 9 aa, Artificial Sequence
  Description of Artificial Sequence: Synthetic peptide
  Seed: SRYWAIRTR
SRYWAIRTF

SEQ ID NO: 25158 - protein, 9 aa, Artificial Sequence
  Description of Artificial Sequence: Synthetic peptide
  Seed: SRYWAIRTR
SRYWAIRTM

SEQ ID NO: 25159 - protein, 9 aa, Artificial Sequence
  Description of Artificial Sequence: Synthetic peptide
  Seed: SRYWAIRTR
SRYWAIRTL

SEQ ID NO: 25160 - protein, 9 aa, Artificial Sequence
  Description of Artificial Sequence: Synthetic peptide
  Seed: SRNPGNAEI
SQNPGNAEY

SEQ ID NO: 25161 - protein, 9 aa, Artificial Sequence
  Description of Artificial Sequence: Synthetic peptide
  Seed: SRNPGNAEI
SQNPGNAEV

SEQ ID NO: 25162 - protein, 9 aa, Artificial Sequence
  Description of Artificial Sequence: Synthetic peptide
  Seed: SRNPGNAEI
SENPGNAEM

SEQ ID NO: 25163 - protein, 9 aa, Artificial Sequence
  Description of Artificial Sequence: Synthetic peptide
  Seed: SRNPGNAEI
SENPGNAEF

SEQ ID NO: 25164 - protein, 9 aa, Artificial Sequence
  Description of Artificial Sequence: Synthetic peptide
  Seed: SRNPGNAEI
SENPGNAEY

SEQ ID NO: 25165 - protein, 9 aa, Artificial Sequence
  Description of Artificial Sequence: Synthetic peptide
  Seed: SRNPGNAEI
SGNPGNAEF

SEQ ID NO: 25166 - protein, 9 aa, Artificial Sequence
  Description of Artificial Sequence: Synthetic peptide
  Seed: SRNPGNAEI
SGNPGNAEY

SEQ ID NO: 25167 - protein, 9 aa, Artificial Sequence
  Description of Artificial Sequence: Synthetic peptide
  Seed: SRNPGNAEI
SHNPGNAEL

SEQ ID NO: 25168 - protein, 9 aa, Artificial Sequence
  Description of Artificial Sequence: Synthetic peptide
  Seed: SRNPGNAEI
SHNPGNAEM

SEQ ID NO: 25169 - protein, 9 aa, Artificial Sequence
  Description of Artificial Sequence: Synthetic peptide
  Seed: SRNPGNAEI
SHNPGNAEF

SEQ ID NO: 25170 - protein, 9 aa, Artificial Sequence
  Description of Artificial Sequence: Synthetic peptide
  Seed: SRNPGNAEI
SHNPGNAEY

SEQ ID NO: 25171 - protein, 9 aa, Artificial Sequence
  Description of Artificial Sequence: Synthetic peptide
  Seed: SRNPGNAEI
SINPGNAEM

SEQ ID NO: 25172 - protein, 9 aa, Artificial Sequence
  Description of Artificial Sequence: Synthetic peptide
  Seed: SRNPGNAEI
SYNPGNAEL

SEQ ID NO: 25173 - protein, 9 aa, Artificial Sequence
  Description of Artificial Sequence: Synthetic peptide
  Seed: SRNPGNAEI
SYNPGNAEM

SEQ ID NO: 25174 - protein, 9 aa, Artificial Sequence
  Description of Artificial Sequence: Synthetic peptide
  Seed: SRNPGNAEI
SYNPGNAEF

SEQ ID NO: 25175 - protein, 9 aa, Artificial Sequence
  Description of Artificial Sequence: Synthetic peptide
  Seed: SRYWAIRTR
SRYWAIRTA

SEQ ID NO: 25176 - protein, 9 aa, Artificial Sequence
  Description of Artificial Sequence: Synthetic peptide
  Seed: SRYWAIRTR
SRYWAIRTG

SEQ ID NO: 25177 - protein, 9 aa, Artificial Sequence
  Description of Artificial Sequence: Synthetic peptide
  Seed: SRYWAIRTR
SRYWAIRTH

SEQ ID NO: 25178 - protein, 9 aa, Artificial Sequence
  Description of Artificial Sequence: Synthetic peptide
  Seed: SRYWAIRTR
SRYWAIRTI

SEQ ID NO: 25179 - protein, 10 aa, Artificial Sequence
  Description of Artificial Sequence: Synthetic peptide
  Seed: SRYWAIRTRS
SRYWAIRTRT

SEQ ID NO: 25180 - protein, 10 aa, Artificial Sequence
  Description of Artificial Sequence: Synthetic peptide
  Seed: SRYWAIRTRS
SRYWAIRTRY

SEQ ID NO: 25181 - protein, 9 aa, Artificial Sequence
  Description of Artificial Sequence: Synthetic peptide
  Seed: SRNPGNAEI
SQNPGNAEF

SEQ ID NO: 25182 - protein, 9 aa, Artificial Sequence
  Description of Artificial Sequence: Synthetic peptide
  Seed: SSFIRGTKV
SMFIRGTKA

SEQ ID NO: 25183 - protein, 9 aa, Artificial Sequence
  Description of Artificial Sequence: Synthetic peptide
  Seed: SSFIRGTKV
SIFIRGTKK

SEQ ID NO: 25184 - protein, 9 aa, Artificial Sequence
  Description of Artificial Sequence: Synthetic peptide
  Seed: SSFIRGTKV
SIFIRGTKM

SEQ ID NO: 25185 - protein, 9 aa, Artificial Sequence
  Description of Artificial Sequence: Synthetic peptide
  Seed: SSFIRGTKV
SIFIRGTKF

SEQ ID NO: 25186 - protein, 9 aa, Artificial Sequence
  Description of Artificial Sequence: Synthetic peptide
  Seed: SSFIRGTKV
SIFIRGTKW

SEQ ID NO: 25187 - protein, 9 aa, Artificial Sequence
  Description of Artificial Sequence: Synthetic peptide
  Seed: SSFIRGTKV
SIFIRGTKY

SEQ ID NO: 25188 - protein, 9 aa, Artificial Sequence
  Description of Artificial Sequence: Synthetic peptide
  Seed: SSFIRGTKV
SLFIRGTKK

SEQ ID NO: 25189 - protein, 9 aa, Artificial Sequence
  Description of Artificial Sequence: Synthetic peptide
  Seed: SSFIRGTKV
SLFIRGTKF

SEQ ID NO: 25190 - protein, 9 aa, Artificial Sequence
  Description of Artificial Sequence: Synthetic peptide
  Seed: SSFIRGTKV
SLFIRGTKW

SEQ ID NO: 25191 - protein, 9 aa, Artificial Sequence
  Description of Artificial Sequence: Synthetic peptide
  Seed: SSFIRGTKV
SLFIRGTKY

SEQ ID NO: 25192 - protein, 9 aa, Artificial Sequence
  Description of Artificial Sequence: Synthetic peptide
  Seed: SSFIRGTKV
SMFIRGTKL

SEQ ID NO: 25193 - protein, 10 aa, Artificial Sequence
  Description of Artificial Sequence: Synthetic peptide
  Seed: SRYWAIRTRS
SRYWAIRTRV

SEQ ID NO: 25194 - protein, 9 aa, Artificial Sequence
  Description of Artificial Sequence: Synthetic peptide
  Seed: SSFIRGTKV
SMFIRGTKK

SEQ ID NO: 25195 - protein, 9 aa, Artificial Sequence
  Description of Artificial Sequence: Synthetic peptide
  Seed: SSFIRGTKV
SMFIRGTKM

SEQ ID NO: 25196 - protein, 9 aa, Artificial Sequence
  Description of Artificial Sequence: Synthetic peptide
  Seed: SSFIRGTKV
SMFIRGTKF

SEQ ID NO: 25197 - protein, 9 aa, Artificial Sequence
  Description of Artificial Sequence: Synthetic peptide
  Seed: SSFIRGTKV
SMFIRGTKW

SEQ ID NO: 25198 - protein, 9 aa, Artificial Sequence
  Description of Artificial Sequence: Synthetic peptide
  Seed: SSFIRGTKV
SMFIRGTKY

SEQ ID NO: 25199 - protein, 9 aa, Artificial Sequence
  Description of Artificial Sequence: Synthetic peptide
  Seed: SSFIRGTKV
SFFIRGTKK

SEQ ID NO: 25200 - protein, 9 aa, Artificial Sequence
  Description of Artificial Sequence: Synthetic peptide
  Seed: SSFIRGTKV
SSFIRGTKA

SEQ ID NO: 25201 - protein, 9 aa, Artificial Sequence
  Description of Artificial Sequence: Synthetic peptide
  Seed: SSFIRGTKV
SSFIRGTKI

SEQ ID NO: 25202 - protein, 9 aa, Artificial Sequence
  Description of Artificial Sequence: Synthetic peptide
  Seed: SSFIRGTKV
SSFIRGTKL

SEQ ID NO: 25203 - protein, 9 aa, Artificial Sequence
  Description of Artificial Sequence: Synthetic peptide
  Seed: SSFIRGTKV
SGFIRGTKY

SEQ ID NO: 25204 - protein, 9 aa, Artificial Sequence
  Description of Artificial Sequence: Synthetic peptide
  Seed: SSFIRGTKV
SGFIRGTKW

SEQ ID NO: 25205 - protein, 9 aa, Artificial Sequence
  Description of Artificial Sequence: Synthetic peptide
  Seed: SSFIRGTKV
SGFIRGTKF

SEQ ID NO: 25206 - protein, 9 aa, Artificial Sequence
  Description of Artificial Sequence: Synthetic peptide
  Seed: SSFIRGTKV
SGFIRGTKM

SEQ ID NO: 25207 - protein, 8 aa, Artificial Sequence
  Description of Artificial Sequence: Synthetic peptide
  Seed: SSFIRGTK
STFIRGTK

SEQ ID NO: 25208 - protein, 8 aa, Artificial Sequence
  Description of Artificial Sequence: Synthetic peptide
  Seed: SSFIRGTK
SYFIRGTK

SEQ ID NO: 25209 - protein, 9 aa, Artificial Sequence
  Description of Artificial Sequence: Synthetic peptide
  Seed: SSFIRGTKV
SAFIRGTKA

SEQ ID NO: 25210 - protein, 9 aa, Artificial Sequence
  Description of Artificial Sequence: Synthetic peptide
  Seed: SSFIRGTKV
SAFIRGTKI

SEQ ID NO: 25211 - protein, 9 aa, Artificial Sequence
  Description of Artificial Sequence: Synthetic peptide
  Seed: SSFIRGTKV
SAFIRGTKL

SEQ ID NO: 25212 - protein, 9 aa, Artificial Sequence
  Description of Artificial Sequence: Synthetic peptide
  Seed: SSFIRGTKV
SAFIRGTKK

SEQ ID NO: 25213 - protein, 9 aa, Artificial Sequence
  Description of Artificial Sequence: Synthetic peptide
  Seed: SSFIRGTKV
SAFIRGTKM

SEQ ID NO: 25214 - protein, 9 aa, Artificial Sequence
  Description of Artificial Sequence: Synthetic peptide
  Seed: SSFIRGTKV
SAFIRGTKF

SEQ ID NO: 25215 - protein, 9 aa, Artificial Sequence
  Description of Artificial Sequence: Synthetic peptide
  Seed: SSFIRGTKV
SAFIRGTKW

SEQ ID NO: 25216 - protein, 9 aa, Artificial Sequence
  Description of Artificial Sequence: Synthetic peptide
  Seed: SSFIRGTKV
SAFIRGTKY

SEQ ID NO: 25217 - protein, 9 aa, Artificial Sequence
  Description of Artificial Sequence: Synthetic peptide
  Seed: SSFIRGTKV
SAFIRGTKV

SEQ ID NO: 25218 - protein, 9 aa, Artificial Sequence
  Description of Artificial Sequence: Synthetic peptide
  Seed: SSFIRGTKV
SNFIRGTKK

SEQ ID NO: 25219 - protein, 9 aa, Artificial Sequence
  Description of Artificial Sequence: Synthetic peptide
  Seed: SSFIRGTKV
SCFIRGTKW

SEQ ID NO: 25220 - protein, 9 aa, Artificial Sequence
  Description of Artificial Sequence: Synthetic peptide
  Seed: SSFIRGTKV
SCFIRGTKY

SEQ ID NO: 25221 - protein, 9 aa, Artificial Sequence
  Description of Artificial Sequence: Synthetic peptide
  Seed: SSFIRGTKV
SQFIRGTKK

SEQ ID NO: 25222 - protein, 9 aa, Artificial Sequence
  Description of Artificial Sequence: Synthetic peptide
  Seed: SSFIRGTKV
SQFIRGTKW

SEQ ID NO: 25223 - protein, 9 aa, Artificial Sequence
  Description of Artificial Sequence: Synthetic peptide
  Seed: SSFIRGTKV
SGFIRGTKL

SEQ ID NO: 25224 - protein, 9 aa, Artificial Sequence
  Description of Artificial Sequence: Synthetic peptide
  Seed: SSFIRGTKV
SGFIRGTKK

SEQ ID NO: 25225 - protein, 9 aa, Artificial Sequence
  Description of Artificial Sequence: Synthetic peptide
  Seed: SRNPGNAEI
SQNPGNAEW

SEQ ID NO: 25226 - protein, 9 aa, Artificial Sequence
  Description of Artificial Sequence: Synthetic peptide
  Seed: SRNPGNAEI
SQNPGNAEM

SEQ ID NO: 25227 - protein, 9 aa, Artificial Sequence
  Description of Artificial Sequence: Synthetic peptide
  Seed: SLTIERMVL
SYTIERMVI

SEQ ID NO: 25228 - protein, 9 aa, Artificial Sequence
  Description of Artificial Sequence: Synthetic peptide
  Seed: SQLVWMACH
SALVWMACF

SEQ ID NO: 25229 - protein, 10 aa, Artificial Sequence
  Description of Artificial Sequence: Synthetic peptide
  Seed: SPRGKLSTRG
SVRGKLSTRM

SEQ ID NO: 25230 - protein, 11 aa, Artificial Sequence
  Description of Artificial Sequence: Synthetic peptide
  Seed: SPRGKLSTRGV
SPRGKLSTRGA

SEQ ID NO: 25231 - protein, 11 aa, Artificial Sequence
  Description of Artificial Sequence: Synthetic peptide
  Seed: SPRGKLSTRGV
SPRGKLSTRGC

SEQ ID NO: 25232 - protein, 11 aa, Artificial Sequence
  Description of Artificial Sequence: Synthetic peptide
  Seed: SPRGKLSTRGV
SPRGKLSTRGI

SEQ ID NO: 25233 - protein, 11 aa, Artificial Sequence
  Description of Artificial Sequence: Synthetic peptide
  Seed: SPRGKLSTRGV
SPRGKLSTRGL

SEQ ID NO: 25234 - protein, 11 aa, Artificial Sequence
  Description of Artificial Sequence: Synthetic peptide
  Seed: SPRGKLSTRGV
SPRGKLSTRGM

SEQ ID NO: 25235 - protein, 11 aa, Artificial Sequence
  Description of Artificial Sequence: Synthetic peptide
  Seed: SPRGKLSTRGV
SPRGKLSTRGF

SEQ ID NO: 25236 - protein, 11 aa, Artificial Sequence
  Description of Artificial Sequence: Synthetic peptide
  Seed: SPRGKLSTRGV
SPRGKLSTRGT

SEQ ID NO: 25237 - protein, 8 aa, Artificial Sequence
  Description of Artificial Sequence: Synthetic peptide
  Seed: SQGTKRSY
SQGTKRSF

SEQ ID NO: 25238 - protein, 9 aa, Artificial Sequence
  Description of Artificial Sequence: Synthetic peptide
  Seed: SQLVWMACH
SALVWMACY

SEQ ID NO: 25239 - protein, 9 aa, Artificial Sequence
  Description of Artificial Sequence: Synthetic peptide
  Seed: SQLVWMACH
SELVWMACM

SEQ ID NO: 25240 - protein, 9 aa, Artificial Sequence
  Description of Artificial Sequence: Synthetic peptide
  Seed: SQLVWMACH
SRLVWMACM

SEQ ID NO: 25241 - protein, 9 aa, Artificial Sequence
  Description of Artificial Sequence: Synthetic peptide
  Seed: SQLVWMACH
SRLVWMACF

SEQ ID NO: 25242 - protein, 9 aa, Artificial Sequence
  Description of Artificial Sequence: Synthetic peptide
  Seed: SQLVWMACH
SRLVWMACY

SEQ ID NO: 25243 - protein, 9 aa, Artificial Sequence
  Description of Artificial Sequence: Synthetic peptide
  Seed: SQLVWMACH
SQLVWMACI

SEQ ID NO: 25244 - protein, 9 aa, Artificial Sequence
  Description of Artificial Sequence: Synthetic peptide
  Seed: SQLVWMACH
SQLVWMACL

SEQ ID NO: 25245 - protein, 9 aa, Artificial Sequence
  Description of Artificial Sequence: Synthetic peptide
  Seed: SQLVWMACH
SQLVWMACM

SEQ ID NO: 25246 - protein, 9 aa, Artificial Sequence
  Description of Artificial Sequence: Synthetic peptide
  Seed: SQLVWMACH
SQLVWMACF

SEQ ID NO: 25247 - protein, 9 aa, Artificial Sequence
  Description of Artificial Sequence: Synthetic peptide
  Seed: SQLVWMACH
SQLVWMACW

SEQ ID NO: 25248 - protein, 9 aa, Artificial Sequence
  Description of Artificial Sequence: Synthetic peptide
  Seed: SQLVWMACH
SQLVWMACY

SEQ ID NO: 25249 - protein, 10 aa, Artificial Sequence
  Description of Artificial Sequence: Synthetic peptide
  Seed: SPRGKLSTRG
SVRGKLSTRL

SEQ ID NO: 25250 - protein, 10 aa, Artificial Sequence
  Description of Artificial Sequence: Synthetic peptide
  Seed: SPRGKLSTRG
SPRGKLSTRV

SEQ ID NO: 25251 - protein, 10 aa, Artificial Sequence
  Description of Artificial Sequence: Synthetic peptide
  Seed: SPRGKLSTRG
SPRGKLSTRY

SEQ ID NO: 25252 - protein, 10 aa, Artificial Sequence
  Description of Artificial Sequence: Synthetic peptide
  Seed: SPRGKLSTRG
SPRGKLSTRT

SEQ ID NO: 25253 - protein, 9 aa, Artificial Sequence
  Description of Artificial Sequence: Synthetic peptide
  Seed: SPRGKLSTR
SLRGKLSTR

SEQ ID NO: 25254 - protein, 9 aa, Artificial Sequence
  Description of Artificial Sequence: Synthetic peptide
  Seed: SPRGKLSTR
SMRGKLSTR

SEQ ID NO: 25255 - protein, 9 aa, Artificial Sequence
  Description of Artificial Sequence: Synthetic peptide
  Seed: SPRGKLSTR
SFRGKLSTR

SEQ ID NO: 25256 - protein, 9 aa, Artificial Sequence
  Description of Artificial Sequence: Synthetic peptide
  Seed: SPRGKLSTR
SSRGKLSTR

SEQ ID NO: 25257 - protein, 9 aa, Artificial Sequence
  Description of Artificial Sequence: Synthetic peptide
  Seed: SPRGKLSTR
STRGKLSTR

SEQ ID NO: 25258 - protein, 9 aa, Artificial Sequence
  Description of Artificial Sequence: Synthetic peptide
  Seed: SPRGKLSTR
SWRGKLSTR

SEQ ID NO: 25259 - protein, 9 aa, Artificial Sequence
  Description of Artificial Sequence: Synthetic peptide
  Seed: SPRGKLSTR
SYRGKLSTR

SEQ ID NO: 25260 - protein, 9 aa, Artificial Sequence
  Description of Artificial Sequence: Synthetic peptide
  Seed: SPRGKLSTR
SVRGKLSTR

SEQ ID NO: 25261 - protein, 10 aa, Artificial Sequence
  Description of Artificial Sequence: Synthetic peptide
  Seed: SPRGKLSTRG
SARGKLSTRL

SEQ ID NO: 25262 - protein, 10 aa, Artificial Sequence
  Description of Artificial Sequence: Synthetic peptide
  Seed: SPRGKLSTRG
SARGKLSTRM

SEQ ID NO: 25263 - protein, 10 aa, Artificial Sequence
  Description of Artificial Sequence: Synthetic peptide
  Seed: SPRGKLSTRG
SIRGKLSTRL

SEQ ID NO: 25264 - protein, 10 aa, Artificial Sequence
  Description of Artificial Sequence: Synthetic peptide
  Seed: SPRGKLSTRG
SIRGKLSTRM

SEQ ID NO: 25265 - protein, 10 aa, Artificial Sequence
  Description of Artificial Sequence: Synthetic peptide
  Seed: SPRGKLSTRG
SPRGKLSTRA

SEQ ID NO: 25266 - protein, 10 aa, Artificial Sequence
  Description of Artificial Sequence: Synthetic peptide
  Seed: SPRGKLSTRG
SPRGKLSTRC

SEQ ID NO: 25267 - protein, 10 aa, Artificial Sequence
  Description of Artificial Sequence: Synthetic peptide
  Seed: SPRGKLSTRG
SPRGKLSTRI

SEQ ID NO: 25268 - protein, 10 aa, Artificial Sequence
  Description of Artificial Sequence: Synthetic peptide
  Seed: SPRGKLSTRG
SPRGKLSTRL

SEQ ID NO: 25269 - protein, 10 aa, Artificial Sequence
  Description of Artificial Sequence: Synthetic peptide
  Seed: SPRGKLSTRG
SPRGKLSTRM

SEQ ID NO: 25270 - protein, 10 aa, Artificial Sequence
  Description of Artificial Sequence: Synthetic peptide
  Seed: SPRGKLSTRG
SPRGKLSTRF

SEQ ID NO: 25271 - protein, 10 aa, Artificial Sequence
  Description of Artificial Sequence: Synthetic peptide
  Seed: SPRGKLSTRG
SPRGKLSTRS

SEQ ID NO: 25272 - protein, 9 aa, Artificial Sequence
  Description of Artificial Sequence: Synthetic peptide
  Seed: SQLVWMACH
SQLVWMACV

SEQ ID NO: 25273 - protein, 9 aa, Artificial Sequence
  Description of Artificial Sequence: Synthetic peptide
  Seed: SQLVWMACH
SELVWMACF

SEQ ID NO: 25274 - protein, 9 aa, Artificial Sequence
  Description of Artificial Sequence: Synthetic peptide
  Seed: SRNPGNAEI
SQNPGNAEL

SEQ ID NO: 25275 - protein, 9 aa, Artificial Sequence
  Description of Artificial Sequence: Synthetic peptide
  Seed: SRNPGNAEI
SANPGNAEY

SEQ ID NO: 25276 - protein, 11 aa, Artificial Sequence
  Description of Artificial Sequence: Synthetic peptide
  Seed: SQLVWMACNSA
SQLVWMACNSL

SEQ ID NO: 25277 - protein, 11 aa, Artificial Sequence
  Description of Artificial Sequence: Synthetic peptide
  Seed: SQLVWMACNSA
SQLVWMACNSV

SEQ ID NO: 25278 - protein, 11 aa, Artificial Sequence
  Description of Artificial Sequence: Synthetic peptide
  Seed: SQLVWMACNSA
SILVWMACNSV

SEQ ID NO: 25279 - protein, 11 aa, Artificial Sequence
  Description of Artificial Sequence: Synthetic peptide
  Seed: SQLVWMACNSA
SLLVWMACNSV

SEQ ID NO: 25280 - protein, 11 aa, Artificial Sequence
  Description of Artificial Sequence: Synthetic peptide
  Seed: SQLVWMACNSA
SMLVWMACNSV

SEQ ID NO: 25281 - protein, 11 aa, Artificial Sequence
  Description of Artificial Sequence: Synthetic peptide
  Seed: SQLVWMACNSA
STLVWMACNSV

SEQ ID NO: 25282 - protein, 11 aa, Artificial Sequence
  Description of Artificial Sequence: Synthetic peptide
  Seed: SQLVWMACNSA
SVLVWMACNSV

SEQ ID NO: 25283 - protein, 9 aa, Artificial Sequence
  Description of Artificial Sequence: Synthetic peptide
  Seed: SRNPGNAEI
SANPGNAEM

SEQ ID NO: 25284 - protein, 9 aa, Artificial Sequence
  Description of Artificial Sequence: Synthetic peptide
  Seed: SRNPGNAEI
SANPGNAEF

SEQ ID NO: 25285 - protein, 9 aa, Artificial Sequence
  Description of Artificial Sequence: Synthetic peptide
  Seed: SRNPGNAEI
SRNPGNAEL

SEQ ID NO: 25286 - protein, 9 aa, Artificial Sequence
  Description of Artificial Sequence: Synthetic peptide
  Seed: SQLVWMACH
SELVWMACY

SEQ ID NO: 25287 - protein, 9 aa, Artificial Sequence
  Description of Artificial Sequence: Synthetic peptide
  Seed: SRNPGNAEI
SRNPGNAEM

SEQ ID NO: 25288 - protein, 9 aa, Artificial Sequence
  Description of Artificial Sequence: Synthetic peptide
  Seed: SRNPGNAEI
SNNPGNAEF

SEQ ID NO: 25289 - protein, 9 aa, Artificial Sequence
  Description of Artificial Sequence: Synthetic peptide
  Seed: SRNPGNAEI
SNNPGNAEY

SEQ ID NO: 25290 - protein, 9 aa, Artificial Sequence
  Description of Artificial Sequence: Synthetic peptide
  Seed: SRNPGNAEI
SQNPGNAEA

SEQ ID NO: 25291 - protein, 9 aa, Artificial Sequence
  Description of Artificial Sequence: Synthetic peptide
  Seed: SRNPGNAEI
SQNPGNAEH

SEQ ID NO: 25292 - protein, 9 aa, Artificial Sequence
  Description of Artificial Sequence: Synthetic peptide
  Seed: SRNPGNAEI
SQNPGNAEI

SEQ ID NO: 25293 - protein, 11 aa, Artificial Sequence
  Description of Artificial Sequence: Synthetic peptide
  Seed: SQLVWMACNSA
SQLVWMACNSI

SEQ ID NO: 25294 - protein, 11 aa, Artificial Sequence
  Description of Artificial Sequence: Synthetic peptide
  Seed: SQLVWMACHSA
SVLVWMACHSV

SEQ ID NO: 25295 - protein, 11 aa, Artificial Sequence
  Description of Artificial Sequence: Synthetic peptide
  Seed: SQLVWMACHSA
STLVWMACHSV

SEQ ID NO: 25296 - protein, 11 aa, Artificial Sequence
  Description of Artificial Sequence: Synthetic peptide
  Seed: SQLVWMACHSA
SSLVWMACHSV

SEQ ID NO: 25297 - protein, 9 aa, Artificial Sequence
  Description of Artificial Sequence: Synthetic peptide
  Seed: SQLVWMACH
SHLVWMACM

SEQ ID NO: 25298 - protein, 9 aa, Artificial Sequence
  Description of Artificial Sequence: Synthetic peptide
  Seed: SQLVWMACH
SHLVWMACF

SEQ ID NO: 25299 - protein, 9 aa, Artificial Sequence
  Description of Artificial Sequence: Synthetic peptide
  Seed: SQLVWMACH
SHLVWMACY

SEQ ID NO: 25300 - protein, 9 aa, Artificial Sequence
  Description of Artificial Sequence: Synthetic peptide
  Seed: SQLVWMACH
SKLVWMACL

SEQ ID NO: 25301 - protein, 9 aa, Artificial Sequence
  Description of Artificial Sequence: Synthetic peptide
  Seed: SQLVWMACH
SKLVWMACM

SEQ ID NO: 25302 - protein, 9 aa, Artificial Sequence
  Description of Artificial Sequence: Synthetic peptide
  Seed: SQLVWMACH
SKLVWMACF

SEQ ID NO: 25303 - protein, 9 aa, Artificial Sequence
  Description of Artificial Sequence: Synthetic peptide
  Seed: SQLVWMACH
SKLVWMACY

SEQ ID NO: 25304 - protein, 9 aa, Artificial Sequence
  Description of Artificial Sequence: Synthetic peptide
  Seed: SQLVWMACH
SMLVWMACM

SEQ ID NO: 25305 - protein, 9 aa, Artificial Sequence
  Description of Artificial Sequence: Synthetic peptide
  Seed: SQLVWMACH
SMLVWMACF

SEQ ID NO: 25306 - protein, 9 aa, Artificial Sequence
  Description of Artificial Sequence: Synthetic peptide
  Seed: SQLVWMACH
SMLVWMACY

SEQ ID NO: 25307 - protein, 9 aa, Artificial Sequence
  Description of Artificial Sequence: Synthetic peptide
  Seed: SQLVWMACH
SSLVWMACF

SEQ ID NO: 25308 - protein, 9 aa, Artificial Sequence
  Description of Artificial Sequence: Synthetic peptide
  Seed: SQLVWMACH
SSLVWMACY

SEQ ID NO: 25309 - protein, 11 aa, Artificial Sequence
  Description of Artificial Sequence: Synthetic peptide
  Seed: SQLVWMACHSA
SALVWMACHSV

SEQ ID NO: 25310 - protein, 11 aa, Artificial Sequence
  Description of Artificial Sequence: Synthetic peptide
  Seed: SQLVWMACHSA
SQLVWMACHSI

SEQ ID NO: 25311 - protein, 11 aa, Artificial Sequence
  Description of Artificial Sequence: Synthetic peptide
  Seed: SQLVWMACHSA
SQLVWMACHSL

SEQ ID NO: 25312 - protein, 11 aa, Artificial Sequence
  Description of Artificial Sequence: Synthetic peptide
  Seed: SQLVWMACHSA
SQLVWMACHSV

SEQ ID NO: 25313 - protein, 11 aa, Artificial Sequence
  Description of Artificial Sequence: Synthetic peptide
  Seed: SQLVWMACHSA
SILVWMACHSV

SEQ ID NO: 25314 - protein, 11 aa, Artificial Sequence
  Description of Artificial Sequence: Synthetic peptide
  Seed: SQLVWMACHSA
SLLVWMACHSV

SEQ ID NO: 25315 - protein, 11 aa, Artificial Sequence
  Description of Artificial Sequence: Synthetic peptide
  Seed: SQLVWMACHSA
SMLVWMACHSV

SEQ ID NO: 25316 - protein, 9 aa, Artificial Sequence
  Description of Artificial Sequence: Synthetic peptide
  Seed: SSFIRGTKV
SSFIRGTKK

SEQ ID NO: 25317 - protein, 9 aa, Artificial Sequence
  Description of Artificial Sequence: Synthetic peptide
  Seed: SSFIRGTKV
SSFIRGTKM

SEQ ID NO: 25318 - protein, 9 aa, Artificial Sequence
  Description of Artificial Sequence: Synthetic peptide
  Seed: SSFIRGTKV
SSFIRGTKF

SEQ ID NO: 25319 - protein, 9 aa, Artificial Sequence
  Description of Artificial Sequence: Synthetic peptide
  Seed: SSTLELRSR
SMTLELRSR

SEQ ID NO: 25320 - protein, 10 aa, Artificial Sequence
  Description of Artificial Sequence: Synthetic peptide
  Seed: SSFIRGTRVV
SYFIRGTRVK

SEQ ID NO: 25321 - protein, 10 aa, Artificial Sequence
  Description of Artificial Sequence: Synthetic peptide
  Seed: SSFIRGTRVV
SVFIRGTRVA

SEQ ID NO: 25322 - protein, 10 aa, Artificial Sequence
  Description of Artificial Sequence: Synthetic peptide
  Seed: SSFIRGTRVV
SVFIRGTRVK

SEQ ID NO: 25323 - protein, 10 aa, Artificial Sequence
  Description of Artificial Sequence: Synthetic peptide
  Seed: SSFIRGTRVV
SVFIRGTRVV

SEQ ID NO: 25324 - protein, 9 aa, Artificial Sequence
  Description of Artificial Sequence: Synthetic peptide
  Seed: SSTLELRSR
SATLELRSR

SEQ ID NO: 25325 - protein, 9 aa, Artificial Sequence
  Description of Artificial Sequence: Synthetic peptide
  Seed: SSTLELRSR
SQTLELRSR

SEQ ID NO: 25326 - protein, 9 aa, Artificial Sequence
  Description of Artificial Sequence: Synthetic peptide
  Seed: SSTLELRSR
SITLELRSR

SEQ ID NO: 25327 - protein, 9 aa, Artificial Sequence
  Description of Artificial Sequence: Synthetic peptide
  Seed: SSTLELRSR
SLTLELRSR

SEQ ID NO: 25328 - protein, 9 aa, Artificial Sequence
  Description of Artificial Sequence: Synthetic peptide
  Seed: SSTLELRSR
SFTLELRSR

SEQ ID NO: 25329 - protein, 9 aa, Artificial Sequence
  Description of Artificial Sequence: Synthetic peptide
  Seed: SSTLELRSR
STTLELRSK

SEQ ID NO: 25330 - protein, 9 aa, Artificial Sequence
  Description of Artificial Sequence: Synthetic peptide
  Seed: SSTLELRSR
SYTLELRSR

SEQ ID NO: 25331 - protein, 9 aa, Artificial Sequence
  Description of Artificial Sequence: Synthetic peptide
  Seed: SSTLELRSR
SVTLELRSR

SEQ ID NO: 25332 - protein, 10 aa, Artificial Sequence
  Description of Artificial Sequence: Synthetic peptide
  Seed: SSTLELRSRY
SATLELRSRF

SEQ ID NO: 25333 - protein, 10 aa, Artificial Sequence
  Description of Artificial Sequence: Synthetic peptide
  Seed: SSTLELRSRY
SATLELRSRW

SEQ ID NO: 25334 - protein, 10 aa, Artificial Sequence
  Description of Artificial Sequence: Synthetic peptide
  Seed: SSTLELRSRY
SATLELRSRY

SEQ ID NO: 25335 - protein, 10 aa, Artificial Sequence
  Description of Artificial Sequence: Synthetic peptide
  Seed: SSTLELRSRY
SRTLELRSRF

SEQ ID NO: 25336 - protein, 10 aa, Artificial Sequence
  Description of Artificial Sequence: Synthetic peptide
  Seed: SSFIRGTRVV
SYFIRGTRVA

SEQ ID NO: 25337 - protein, 10 aa, Artificial Sequence
  Description of Artificial Sequence: Synthetic peptide
  Seed: SSFIRGTRVV
SWFIRGTRVK

SEQ ID NO: 25338 - protein, 10 aa, Artificial Sequence
  Description of Artificial Sequence: Synthetic peptide
  Seed: SSFIRGTRVV
STFIRGTRVV

SEQ ID NO: 25339 - protein, 10 aa, Artificial Sequence
  Description of Artificial Sequence: Synthetic peptide
  Seed: SSFIRGTRVV
STFIRGTRVK

SEQ ID NO: 25340 - protein, 9 aa, Artificial Sequence
  Description of Artificial Sequence: Synthetic peptide
  Seed: SSFIRGTRV
SVFIRGTRW

SEQ ID NO: 25341 - protein, 9 aa, Artificial Sequence
  Description of Artificial Sequence: Synthetic peptide
  Seed: SSFIRGTRV
SVFIRGTRY

SEQ ID NO: 25342 - protein, 9 aa, Artificial Sequence
  Description of Artificial Sequence: Synthetic peptide
  Seed: SSFIRGTRV
SVFIRGTRV

SEQ ID NO: 25343 - protein, 10 aa, Artificial Sequence
  Description of Artificial Sequence: Synthetic peptide
  Seed: SSFIRGTRVV
SAFIRGTRVK

SEQ ID NO: 25344 - protein, 10 aa, Artificial Sequence
  Description of Artificial Sequence: Synthetic peptide
  Seed: SSFIRGTRVV
SRFIRGTRVK

SEQ ID NO: 25345 - protein, 10 aa, Artificial Sequence
  Description of Artificial Sequence: Synthetic peptide
  Seed: SSFIRGTRVV
SNFIRGTRVK

SEQ ID NO: 25346 - protein, 10 aa, Artificial Sequence
  Description of Artificial Sequence: Synthetic peptide
  Seed: SSFIRGTRVV
SQFIRGTRVK

SEQ ID NO: 25347 - protein, 10 aa, Artificial Sequence
  Description of Artificial Sequence: Synthetic peptide
  Seed: SSFIRGTRVV
SGFIRGTRVK

SEQ ID NO: 25348 - protein, 10 aa, Artificial Sequence
  Description of Artificial Sequence: Synthetic peptide
  Seed: SSFIRGTRVV
SHFIRGTRVK

SEQ ID NO: 25349 - protein, 10 aa, Artificial Sequence
  Description of Artificial Sequence: Synthetic peptide
  Seed: SSFIRGTRVV
SIFIRGTRVK

SEQ ID NO: 25350 - protein, 10 aa, Artificial Sequence
  Description of Artificial Sequence: Synthetic peptide
  Seed: SSFIRGTRVV
SLFIRGTRVK

SEQ ID NO: 25351 - protein, 10 aa, Artificial Sequence
  Description of Artificial Sequence: Synthetic peptide
  Seed: SSFIRGTRVV
SMFIRGTRVK

SEQ ID NO: 25352 - protein, 10 aa, Artificial Sequence
  Description of Artificial Sequence: Synthetic peptide
  Seed: SSFIRGTRVV
SFFIRGTRVK

SEQ ID NO: 25353 - protein, 10 aa, Artificial Sequence
  Description of Artificial Sequence: Synthetic peptide
  Seed: SSFIRGTRVV
SSFIRGTRVK

SEQ ID NO: 25354 - protein, 10 aa, Artificial Sequence
  Description of Artificial Sequence: Synthetic peptide
  Seed: SSFIRGTRVV
STFIRGTRVA

SEQ ID NO: 25355 - protein, 10 aa, Artificial Sequence
  Description of Artificial Sequence: Synthetic peptide
  Seed: SSFIRGTRVV
STFIRGTRVI

SEQ ID NO: 25356 - protein, 10 aa, Artificial Sequence
  Description of Artificial Sequence: Synthetic peptide
  Seed: SSTLELRSRY
SRTLELRSRW

SEQ ID NO: 25357 - protein, 10 aa, Artificial Sequence
  Description of Artificial Sequence: Synthetic peptide
  Seed: SSTLELRSRY
SNTLELRSRF

SEQ ID NO: 25358 - protein, 9 aa, Artificial Sequence
  Description of Artificial Sequence: Synthetic peptide
  Seed: SSFIRGTKV
SSFIRGTKW

SEQ ID NO: 25359 - protein, 10 aa, Artificial Sequence
  Description of Artificial Sequence: Synthetic peptide
  Seed: SSTLELRSRY
SFTLELRSRW

SEQ ID NO: 25360 - protein, 10 aa, Artificial Sequence
  Description of Artificial Sequence: Synthetic peptide
  Seed: SSTLELRSRY
SLTLELRSRW

SEQ ID NO: 25361 - protein, 10 aa, Artificial Sequence
  Description of Artificial Sequence: Synthetic peptide
  Seed: SSTLELRSRY
SLTLELRSRY

SEQ ID NO: 25362 - protein, 10 aa, Artificial Sequence
  Description of Artificial Sequence: Synthetic peptide
  Seed: SSTLELRSRY
SKTLELRSRF

SEQ ID NO: 25363 - protein, 10 aa, Artificial Sequence
  Description of Artificial Sequence: Synthetic peptide
  Seed: SSTLELRSRY
SKTLELRSRW

SEQ ID NO: 25364 - protein, 10 aa, Artificial Sequence
  Description of Artificial Sequence: Synthetic peptide
  Seed: SSTLELRSRY
SKTLELRSRY

SEQ ID NO: 25365 - protein, 10 aa, Artificial Sequence
  Description of Artificial Sequence: Synthetic peptide
  Seed: SSTLELRSRY
SMTLELRSRF

SEQ ID NO: 25366 - protein, 10 aa, Artificial Sequence
  Description of Artificial Sequence: Synthetic peptide
  Seed: SSTLELRSRY
SMTLELRSRW

SEQ ID NO: 25367 - protein, 10 aa, Artificial Sequence
  Description of Artificial Sequence: Synthetic peptide
  Seed: SSTLELRSRY
SMTLELRSRY

SEQ ID NO: 25368 - protein, 10 aa, Artificial Sequence
  Description of Artificial Sequence: Synthetic peptide
  Seed: SSTLELRSRY
SFTLELRSRF

SEQ ID NO: 25369 - protein, 10 aa, Artificial Sequence
  Description of Artificial Sequence: Synthetic peptide
  Seed: SSTLELRSRY
SFTLELRSRY

SEQ ID NO: 25370 - protein, 10 aa, Artificial Sequence
  Description of Artificial Sequence: Synthetic peptide
  Seed: SSTLELRSRY
SNTLELRSRW

SEQ ID NO: 25371 - protein, 10 aa, Artificial Sequence
  Description of Artificial Sequence: Synthetic peptide
  Seed: SSTLELRSRY
SPTLELRSRF

SEQ ID NO: 25372 - protein, 10 aa, Artificial Sequence
  Description of Artificial Sequence: Synthetic peptide
  Seed: SSTLELRSRY
SPTLELRSRW

SEQ ID NO: 25373 - protein, 10 aa, Artificial Sequence
  Description of Artificial Sequence: Synthetic peptide
  Seed: SSTLELRSRY
SPTLELRSRY

SEQ ID NO: 25374 - protein, 10 aa, Artificial Sequence
  Description of Artificial Sequence: Synthetic peptide
  Seed: SSTLELRSRY
SSTLELRSRM

SEQ ID NO: 25375 - protein, 10 aa, Artificial Sequence
  Description of Artificial Sequence: Synthetic peptide
  Seed: SSTLELRSRY
SSTLELRSRF

SEQ ID NO: 25376 - protein, 10 aa, Artificial Sequence
  Description of Artificial Sequence: Synthetic peptide
  Seed: SSTLELRSRY
SSTLELRSRW

SEQ ID NO: 25377 - protein, 10 aa, Artificial Sequence
  Description of Artificial Sequence: Synthetic peptide
  Seed: SSTLELRSRY
STTLELRSRF

SEQ ID NO: 25378 - protein, 10 aa, Artificial Sequence
  Description of Artificial Sequence: Synthetic peptide
  Seed: SSTLELRSRY
STTLELRSRW

SEQ ID NO: 25379 - protein, 10 aa, Artificial Sequence
  Description of Artificial Sequence: Synthetic peptide
  Seed: SSTLELRSRY
SLTLELRSRF

SEQ ID NO: 25380 - protein, 10 aa, Artificial Sequence
  Description of Artificial Sequence: Synthetic peptide
  Seed: SSTLELRSRY
SITLELRSRY

SEQ ID NO: 25381 - protein, 10 aa, Artificial Sequence
  Description of Artificial Sequence: Synthetic peptide
  Seed: SSTLELRSRY
SITLELRSRW

SEQ ID NO: 25382 - protein, 10 aa, Artificial Sequence
  Description of Artificial Sequence: Synthetic peptide
  Seed: SSTLELRSRY
SITLELRSRF

SEQ ID NO: 25383 - protein, 10 aa, Artificial Sequence
  Description of Artificial Sequence: Synthetic peptide
  Seed: SSTLELRSRY
SDTLELRSRF

SEQ ID NO: 25384 - protein, 10 aa, Artificial Sequence
  Description of Artificial Sequence: Synthetic peptide
  Seed: SSTLELRSRY
SDTLELRSRW

SEQ ID NO: 25385 - protein, 10 aa, Artificial Sequence
  Description of Artificial Sequence: Synthetic peptide
  Seed: SSTLELRSRY
SDTLELRSRY

SEQ ID NO: 25386 - protein, 10 aa, Artificial Sequence
  Description of Artificial Sequence: Synthetic peptide
  Seed: SSTLELRSRY
SCTLELRSRF

SEQ ID NO: 25387 - protein, 10 aa, Artificial Sequence
  Description of Artificial Sequence: Synthetic peptide
  Seed: SSTLELRSRY
SCTLELRSRW

SEQ ID NO: 25388 - protein, 10 aa, Artificial Sequence
  Description of Artificial Sequence: Synthetic peptide
  Seed: SSTLELRSRY
SQTLELRSRF

SEQ ID NO: 25389 - protein, 10 aa, Artificial Sequence
  Description of Artificial Sequence: Synthetic peptide
  Seed: SSTLELRSRY
SQTLELRSRW

SEQ ID NO: 25390 - protein, 10 aa, Artificial Sequence
  Description of Artificial Sequence: Synthetic peptide
  Seed: SSTLELRSRY
SQTLELRSRY

SEQ ID NO: 25391 - protein, 10 aa, Artificial Sequence
  Description of Artificial Sequence: Synthetic peptide
  Seed: SSTLELRSRY
SETLELRSRF

SEQ ID NO: 25392 - protein, 10 aa, Artificial Sequence
  Description of Artificial Sequence: Synthetic peptide
  Seed: SSTLELRSRY
SETLELRSRW

SEQ ID NO: 25393 - protein, 10 aa, Artificial Sequence
  Description of Artificial Sequence: Synthetic peptide
  Seed: SSTLELRSRY
SETLELRSRY

SEQ ID NO: 25394 - protein, 10 aa, Artificial Sequence
  Description of Artificial Sequence: Synthetic peptide
  Seed: SSTLELRSRY
SGTLELRSRF

SEQ ID NO: 25395 - protein, 10 aa, Artificial Sequence
  Description of Artificial Sequence: Synthetic peptide
  Seed: SSTLELRSRY
SGTLELRSRW

SEQ ID NO: 25396 - protein, 10 aa, Artificial Sequence
  Description of Artificial Sequence: Synthetic peptide
  Seed: SSTLELRSRY
SGTLELRSRY

SEQ ID NO: 25397 - protein, 10 aa, Artificial Sequence
  Description of Artificial Sequence: Synthetic peptide
  Seed: SSTLELRSRY
SHTLELRSRF

SEQ ID NO: 25398 - protein, 10 aa, Artificial Sequence
  Description of Artificial Sequence: Synthetic peptide
  Seed: SSTLELRSRY
SHTLELRSRW

SEQ ID NO: 25399 - protein, 10 aa, Artificial Sequence
  Description of Artificial Sequence: Synthetic peptide
  Seed: SSTLELRSRY
SHTLELRSRY

SEQ ID NO: 25400 - protein, 9 aa, Artificial Sequence
  Description of Artificial Sequence: Synthetic peptide
  Seed: SSFIRGTRV
SVFIRGTRF

SEQ ID NO: 25401 - protein, 9 aa, Artificial Sequence
  Description of Artificial Sequence: Synthetic peptide
  Seed: SSFIRGTRV
SVFIRGTRM

SEQ ID NO: 25402 - protein, 9 aa, Artificial Sequence
  Description of Artificial Sequence: Synthetic peptide
  Seed: SSFIRGTRV
SVFIRGTRK

SEQ ID NO: 25403 - protein, 9 aa, Artificial Sequence
  Description of Artificial Sequence: Synthetic peptide
  Seed: SSFIRGTRV
SAFIRGTRW

SEQ ID NO: 25404 - protein, 9 aa, Artificial Sequence
  Description of Artificial Sequence: Synthetic peptide
  Seed: SSFIRGTRV
SAFIRGTRA

SEQ ID NO: 25405 - protein, 9 aa, Artificial Sequence
  Description of Artificial Sequence: Synthetic peptide
  Seed: SSFIRGTRV
SAFIRGTRI

SEQ ID NO: 25406 - protein, 9 aa, Artificial Sequence
  Description of Artificial Sequence: Synthetic peptide
  Seed: SSFIRGTRV
SAFIRGTRL

SEQ ID NO: 25407 - protein, 9 aa, Artificial Sequence
  Description of Artificial Sequence: Synthetic peptide
  Seed: SSFIRGTRV
SAFIRGTRK

SEQ ID NO: 25408 - protein, 9 aa, Artificial Sequence
  Description of Artificial Sequence: Synthetic peptide
  Seed: SSFIRGTRV
SAFIRGTRM

SEQ ID NO: 25409 - protein, 9 aa, Artificial Sequence
  Description of Artificial Sequence: Synthetic peptide
  Seed: SSFIRGTRV
SAFIRGTRF

SEQ ID NO: 25410 - protein, 9 aa, Artificial Sequence
  Description of Artificial Sequence: Synthetic peptide
  Seed: SSFIRGTRV
SAFIRGTRY

SEQ ID NO: 25411 - protein, 9 aa, Artificial Sequence
  Description of Artificial Sequence: Synthetic peptide
  Seed: SSFIRGTRV
SVFIRGTRL

SEQ ID NO: 25412 - protein, 9 aa, Artificial Sequence
  Description of Artificial Sequence: Synthetic peptide
  Seed: SSFIRGTRV
SAFIRGTRV

SEQ ID NO: 25413 - protein, 9 aa, Artificial Sequence
  Description of Artificial Sequence: Synthetic peptide
  Seed: SSFIRGTRV
SNFIRGTRK

SEQ ID NO: 25414 - protein, 9 aa, Artificial Sequence
  Description of Artificial Sequence: Synthetic peptide
  Seed: SSFIRGTRV
SNFIRGTRW

SEQ ID NO: 25415 - protein, 9 aa, Artificial Sequence
  Description of Artificial Sequence: Synthetic peptide
  Seed: SSFIRGTRV
SCFIRGTRW

SEQ ID NO: 25416 - protein, 9 aa, Artificial Sequence
  Description of Artificial Sequence: Synthetic peptide
  Seed: SSFIRGTRV
SQFIRGTRK

SEQ ID NO: 25417 - protein, 9 aa, Artificial Sequence
  Description of Artificial Sequence: Synthetic peptide
  Seed: SSFIRGTRV
SQFIRGTRW

SEQ ID NO: 25418 - protein, 9 aa, Artificial Sequence
  Description of Artificial Sequence: Synthetic peptide
  Seed: SSFIRGTRV
SGFIRGTRL

SEQ ID NO: 25419 - protein, 9 aa, Artificial Sequence
  Description of Artificial Sequence: Synthetic peptide
  Seed: SSFIRGTRV
SGFIRGTRK

SEQ ID NO: 25420 - protein, 9 aa, Artificial Sequence
  Description of Artificial Sequence: Synthetic peptide
  Seed: SSFIRGTRV
SGFIRGTRM

SEQ ID NO: 25421 - protein, 9 aa, Artificial Sequence
  Description of Artificial Sequence: Synthetic peptide
  Seed: SSFIRGTKV
SVFIRGTKV

SEQ ID NO: 25422 - protein, 9 aa, Artificial Sequence
  Description of Artificial Sequence: Synthetic peptide
  Seed: SSFIRGTKV
SVFIRGTKY

SEQ ID NO: 25423 - protein, 9 aa, Artificial Sequence
  Description of Artificial Sequence: Synthetic peptide
  Seed: SSFIRGTKV
SVFIRGTKW

SEQ ID NO: 25424 - protein, 9 aa, Artificial Sequence
  Description of Artificial Sequence: Synthetic peptide
  Seed: SSFIRGTKV
SVFIRGTKF

SEQ ID NO: 25425 - protein, 9 aa, Artificial Sequence
  Description of Artificial Sequence: Synthetic peptide
  Seed: SSFIRGTKV
SSFIRGTKY

SEQ ID NO: 25426 - protein, 9 aa, Artificial Sequence
  Description of Artificial Sequence: Synthetic peptide
  Seed: SSFIRGTKV
STFIRGTKA

SEQ ID NO: 25427 - protein, 9 aa, Artificial Sequence
  Description of Artificial Sequence: Synthetic peptide
  Seed: SSFIRGTKV
STFIRGTKI

SEQ ID NO: 25428 - protein, 9 aa, Artificial Sequence
  Description of Artificial Sequence: Synthetic peptide
  Seed: SSFIRGTKV
STFIRGTKL

SEQ ID NO: 25429 - protein, 9 aa, Artificial Sequence
  Description of Artificial Sequence: Synthetic peptide
  Seed: SSFIRGTKV
STFIRGTKK

SEQ ID NO: 25430 - protein, 9 aa, Artificial Sequence
  Description of Artificial Sequence: Synthetic peptide
  Seed: SSFIRGTKV
STFIRGTKM

SEQ ID NO: 25431 - protein, 9 aa, Artificial Sequence
  Description of Artificial Sequence: Synthetic peptide
  Seed: SSFIRGTKV
STFIRGTKF

SEQ ID NO: 25432 - protein, 9 aa, Artificial Sequence
  Description of Artificial Sequence: Synthetic peptide
  Seed: SSFIRGTKV
STFIRGTKS

SEQ ID NO: 25433 - protein, 9 aa, Artificial Sequence
  Description of Artificial Sequence: Synthetic peptide
  Seed: SSFIRGTKV
STFIRGTKW

SEQ ID NO: 25434 - protein, 9 aa, Artificial Sequence
  Description of Artificial Sequence: Synthetic peptide
  Seed: SSFIRGTKV
STFIRGTKY

SEQ ID NO: 25435 - protein, 9 aa, Artificial Sequence
  Description of Artificial Sequence: Synthetic peptide
  Seed: SSFIRGTKV
STFIRGTKV

SEQ ID NO: 25436 - protein, 9 aa, Artificial Sequence
  Description of Artificial Sequence: Synthetic peptide
  Seed: SSFIRGTKV
SWFIRGTKK

SEQ ID NO: 25437 - protein, 9 aa, Artificial Sequence
  Description of Artificial Sequence: Synthetic peptide
  Seed: SSFIRGTKV
SYFIRGTKA

SEQ ID NO: 25438 - protein, 9 aa, Artificial Sequence
  Description of Artificial Sequence: Synthetic peptide
  Seed: SSFIRGTKV
SYFIRGTKK

SEQ ID NO: 25439 - protein, 9 aa, Artificial Sequence
  Description of Artificial Sequence: Synthetic peptide
  Seed: SSFIRGTKV
SVFIRGTKA

SEQ ID NO: 25440 - protein, 9 aa, Artificial Sequence
  Description of Artificial Sequence: Synthetic peptide
  Seed: SSFIRGTKV
SVFIRGTKI

SEQ ID NO: 25441 - protein, 9 aa, Artificial Sequence
  Description of Artificial Sequence: Synthetic peptide
  Seed: SSFIRGTKV
SVFIRGTKL

SEQ ID NO: 25442 - protein, 9 aa, Artificial Sequence
  Description of Artificial Sequence: Synthetic peptide
  Seed: SSFIRGTKV
SVFIRGTKK

SEQ ID NO: 25443 - protein, 9 aa, Artificial Sequence
  Description of Artificial Sequence: Synthetic peptide
  Seed: SSFIRGTKV
SVFIRGTKM

SEQ ID NO: 25444 - protein, 9 aa, Artificial Sequence
  Description of Artificial Sequence: Synthetic peptide
  Seed: SSFIRGTRV
SGFIRGTRF

SEQ ID NO: 25445 - protein, 9 aa, Artificial Sequence
  Description of Artificial Sequence: Synthetic peptide
  Seed: SSFIRGTRV
SGFIRGTRW

SEQ ID NO: 25446 - protein, 9 aa, Artificial Sequence
  Description of Artificial Sequence: Synthetic peptide
  Seed: SSFIRGTRV
SGFIRGTRY

SEQ ID NO: 25447 - protein, 9 aa, Artificial Sequence
  Description of Artificial Sequence: Synthetic peptide
  Seed: SSFIRGTRV
SSFIRGTRW

SEQ ID NO: 25448 - protein, 9 aa, Artificial Sequence
  Description of Artificial Sequence: Synthetic peptide
  Seed: SSFIRGTRV
SSFIRGTRY

SEQ ID NO: 25449 - protein, 9 aa, Artificial Sequence
  Description of Artificial Sequence: Synthetic peptide
  Seed: SSFIRGTRV
STFIRGTRA

SEQ ID NO: 25450 - protein, 9 aa, Artificial Sequence
  Description of Artificial Sequence: Synthetic peptide
  Seed: SSFIRGTRV
STFIRGTRR

SEQ ID NO: 25451 - protein, 9 aa, Artificial Sequence
  Description of Artificial Sequence: Synthetic peptide
  Seed: SSFIRGTRV
STFIRGTRG

SEQ ID NO: 25452 - protein, 9 aa, Artificial Sequence
  Description of Artificial Sequence: Synthetic peptide
  Seed: SSFIRGTRV
STFIRGTRI

SEQ ID NO: 25453 - protein, 9 aa, Artificial Sequence
  Description of Artificial Sequence: Synthetic peptide
  Seed: SSFIRGTRV
STFIRGTRL

SEQ ID NO: 25454 - protein, 9 aa, Artificial Sequence
  Description of Artificial Sequence: Synthetic peptide
  Seed: SSFIRGTRV
STFIRGTRK

SEQ ID NO: 25455 - protein, 9 aa, Artificial Sequence
  Description of Artificial Sequence: Synthetic peptide
  Seed: SSFIRGTRV
STFIRGTRM

SEQ ID NO: 25456 - protein, 9 aa, Artificial Sequence
  Description of Artificial Sequence: Synthetic peptide
  Seed: SSFIRGTRV
STFIRGTRF

SEQ ID NO: 25457 - protein, 9 aa, Artificial Sequence
  Description of Artificial Sequence: Synthetic peptide
  Seed: SSFIRGTRV
STFIRGTRS

SEQ ID NO: 25458 - protein, 9 aa, Artificial Sequence
  Description of Artificial Sequence: Synthetic peptide
  Seed: SSFIRGTRV
STFIRGTRW

SEQ ID NO: 25459 - protein, 9 aa, Artificial Sequence
  Description of Artificial Sequence: Synthetic peptide
  Seed: SSFIRGTRV
STFIRGTRY

SEQ ID NO: 25460 - protein, 9 aa, Artificial Sequence
  Description of Artificial Sequence: Synthetic peptide
  Seed: SSFIRGTRV
STFIRGTRV

SEQ ID NO: 25461 - protein, 9 aa, Artificial Sequence
  Description of Artificial Sequence: Synthetic peptide
  Seed: SSFIRGTRV
SWFIRGTRK

SEQ ID NO: 25462 - protein, 9 aa, Artificial Sequence
  Description of Artificial Sequence: Synthetic peptide
  Seed: SSFIRGTRV
SYFIRGTRA

SEQ ID NO: 25463 - protein, 9 aa, Artificial Sequence
  Description of Artificial Sequence: Synthetic peptide
  Seed: SSFIRGTRV
SYFIRGTRK

SEQ ID NO: 25464 - protein, 9 aa, Artificial Sequence
  Description of Artificial Sequence: Synthetic peptide
  Seed: SSFIRGTRV
SVFIRGTRA

SEQ ID NO: 25465 - protein, 9 aa, Artificial Sequence
  Description of Artificial Sequence: Synthetic peptide
  Seed: SSFIRGTRV
SVFIRGTRI

SEQ ID NO: 25466 - protein, 9 aa, Artificial Sequence
  Description of Artificial Sequence: Synthetic peptide
  Seed: SSFIRGTRV
SSFIRGTRF

SEQ ID NO: 25467 - protein, 9 aa, Artificial Sequence
  Description of Artificial Sequence: Synthetic peptide
  Seed: SSFIRGTRV
SSFIRGTRK

SEQ ID NO: 25468 - protein, 9 aa, Artificial Sequence
  Description of Artificial Sequence: Synthetic peptide
  Seed: SSFIRGTRV
SHFIRGTRY

SEQ ID NO: 25469 - protein, 9 aa, Artificial Sequence
  Description of Artificial Sequence: Synthetic peptide
  Seed: SSFIRGTRV
SIFIRGTRA

SEQ ID NO: 25470 - protein, 9 aa, Artificial Sequence
  Description of Artificial Sequence: Synthetic peptide
  Seed: SSFIRGTRV
SIFIRGTRK

SEQ ID NO: 25471 - protein, 9 aa, Artificial Sequence
  Description of Artificial Sequence: Synthetic peptide
  Seed: SSFIRGTRV
SIFIRGTRF

SEQ ID NO: 25472 - protein, 9 aa, Artificial Sequence
  Description of Artificial Sequence: Synthetic peptide
  Seed: SSFIRGTRV
SIFIRGTRW

SEQ ID NO: 25473 - protein, 9 aa, Artificial Sequence
  Description of Artificial Sequence: Synthetic peptide
  Seed: SSFIRGTRV
SIFIRGTRY

SEQ ID NO: 25474 - protein, 9 aa, Artificial Sequence
  Description of Artificial Sequence: Synthetic peptide
  Seed: SSFIRGTRV
SLFIRGTRK

SEQ ID NO: 25475 - protein, 9 aa, Artificial Sequence
  Description of Artificial Sequence: Synthetic peptide
  Seed: SSFIRGTRV
SLFIRGTRF

SEQ ID NO: 25476 - protein, 9 aa, Artificial Sequence
  Description of Artificial Sequence: Synthetic peptide
  Seed: SSFIRGTRV
SLFIRGTRW

SEQ ID NO: 25477 - protein, 9 aa, Artificial Sequence
  Description of Artificial Sequence: Synthetic peptide
  Seed: SSFIRGTRV
SLFIRGTRY

SEQ ID NO: 25478 - protein, 9 aa, Artificial Sequence
  Description of Artificial Sequence: Synthetic peptide
  Seed: SSFIRGTRV
SMFIRGTRA

SEQ ID NO: 25479 - protein, 9 aa, Artificial Sequence
  Description of Artificial Sequence: Synthetic peptide
  Seed: SSFIRGTRV
SMFIRGTRK

SEQ ID NO: 25480 - protein, 9 aa, Artificial Sequence
  Description of Artificial Sequence: Synthetic peptide
  Seed: SSFIRGTRV
SMFIRGTRM

SEQ ID NO: 25481 - protein, 9 aa, Artificial Sequence
  Description of Artificial Sequence: Synthetic peptide
  Seed: SSFIRGTRV
SMFIRGTRF

SEQ ID NO: 25482 - protein, 9 aa, Artificial Sequence
  Description of Artificial Sequence: Synthetic peptide
  Seed: SSFIRGTRV
SMFIRGTRW

SEQ ID NO: 25483 - protein, 9 aa, Artificial Sequence
  Description of Artificial Sequence: Synthetic peptide
  Seed: SSFIRGTRV
SMFIRGTRY

SEQ ID NO: 25484 - protein, 9 aa, Artificial Sequence
  Description of Artificial Sequence: Synthetic peptide
  Seed: SSFIRGTRV
SFFIRGTRK

SEQ ID NO: 25485 - protein, 9 aa, Artificial Sequence
  Description of Artificial Sequence: Synthetic peptide
  Seed: SSFIRGTRV
SSFIRGTRA

SEQ ID NO: 25486 - protein, 9 aa, Artificial Sequence
  Description of Artificial Sequence: Synthetic peptide
  Seed: SSFIRGTRV
SSFIRGTRR

SEQ ID NO: 25487 - protein, 9 aa, Artificial Sequence
  Description of Artificial Sequence: Synthetic peptide
  Seed: SPRGKLSTR
SIRGKLSTR

SEQ ID NO: 25488 - protein, 9 aa, Artificial Sequence
  Description of Artificial Sequence: Synthetic peptide
  Seed: SPRGKLSTR
SGRGKLSTR

SEQ ID NO: 25489 - protein, 9 aa, Artificial Sequence
  Description of Artificial Sequence: Synthetic peptide
  Seed: SPRGKLSTR
SNRGKLSTR

SEQ ID NO: 25490 - protein, 10 aa, Artificial Sequence
  Description of Artificial Sequence: Synthetic peptide
  Seed: SLVGIDPFKL
SMVGIDPFKT

SEQ ID NO: 25491 - protein, 10 aa, Artificial Sequence
  Description of Artificial Sequence: Synthetic peptide
  Seed: SLVGIDPFKL
SLVGIDPFKA

SEQ ID NO: 25492 - protein, 10 aa, Artificial Sequence
  Description of Artificial Sequence: Synthetic peptide
  Seed: SLVGIDPFKL
SLVGIDPFKI

SEQ ID NO: 25493 - protein, 10 aa, Artificial Sequence
  Description of Artificial Sequence: Synthetic peptide
  Seed: SLVGIDPFKL
SLVGIDPFKM

SEQ ID NO: 25494 - protein, 10 aa, Artificial Sequence
  Description of Artificial Sequence: Synthetic peptide
  Seed: SLVGIDPFKL
SLVGIDPFKT

SEQ ID NO: 25495 - protein, 10 aa, Artificial Sequence
  Description of Artificial Sequence: Synthetic peptide
  Seed: SLVGIDPFKL
SLVGIDPFKV

SEQ ID NO: 25496 - protein, 10 aa, Artificial Sequence
  Description of Artificial Sequence: Synthetic peptide
  Seed: SLVGIDPFKL
SMVGIDPFKA

SEQ ID NO: 25497 - protein, 10 aa, Artificial Sequence
  Description of Artificial Sequence: Synthetic peptide
  Seed: SLVGIDPFKL
SMVGIDPFKI

SEQ ID NO: 25498 - protein, 10 aa, Artificial Sequence
  Description of Artificial Sequence: Synthetic peptide
  Seed: SLVGIDPFKL
SMVGIDPFKL

SEQ ID NO: 25499 - protein, 10 aa, Artificial Sequence
  Description of Artificial Sequence: Synthetic peptide
  Seed: SLVGIDPFKL
SMVGIDPFKM

SEQ ID NO: 25500 - protein, 10 aa, Artificial Sequence
  Description of Artificial Sequence: Synthetic peptide
  Seed: SLVGIDPFKL
SMVGIDPFKV

SEQ ID NO: 25501 - protein, 11 aa, Artificial Sequence
  Description of Artificial Sequence: Synthetic peptide
  Seed: SLVGIDPFKLL
SMVGIDPFKLA

SEQ ID NO: 25502 - protein, 10 aa, Artificial Sequence
  Description of Artificial Sequence: Synthetic peptide
  Seed: SLVGIDPFKL
STVGIDPFKL

SEQ ID NO: 25503 - protein, 10 aa, Artificial Sequence
  Description of Artificial Sequence: Synthetic peptide
  Seed: SLVGIDPFKL
STVGIDPFKV

SEQ ID NO: 25504 - protein, 10 aa, Artificial Sequence
  Description of Artificial Sequence: Synthetic peptide
  Seed: SLVGIDPFKL
SVVGIDPFKI

SEQ ID NO: 25505 - protein, 10 aa, Artificial Sequence
  Description of Artificial Sequence: Synthetic peptide
  Seed: SLVGIDPFKL
SVVGIDPFKL

SEQ ID NO: 25506 - protein, 10 aa, Artificial Sequence
  Description of Artificial Sequence: Synthetic peptide
  Seed: SLVGIDPFKL
SVVGIDPFKV

SEQ ID NO: 25507 - protein, 11 aa, Artificial Sequence
  Description of Artificial Sequence: Synthetic peptide
  Seed: SLVGIDPFKLL
SIVGIDPFKLV

SEQ ID NO: 25508 - protein, 11 aa, Artificial Sequence
  Description of Artificial Sequence: Synthetic peptide
  Seed: SLVGIDPFKLL
SLVGIDPFKLA

SEQ ID NO: 25509 - protein, 11 aa, Artificial Sequence
  Description of Artificial Sequence: Synthetic peptide
  Seed: SLVGIDPFKLL
SLVGIDPFKLI

SEQ ID NO: 25510 - protein, 11 aa, Artificial Sequence
  Description of Artificial Sequence: Synthetic peptide
  Seed: SLVGIDPFKLL
SLVGIDPFKLM

SEQ ID NO: 25511 - protein, 10 aa, Artificial Sequence
  Description of Artificial Sequence: Synthetic peptide
  Seed: SLVGIDPFKL
SIVGIDPFKV

SEQ ID NO: 25512 - protein, 10 aa, Artificial Sequence
  Description of Artificial Sequence: Synthetic peptide
  Seed: SLVGIDPFKL
SIVGIDPFKL

SEQ ID NO: 25513 - protein, 10 aa, Artificial Sequence
  Description of Artificial Sequence: Synthetic peptide
  Seed: SLVGIDPFKL
SIVGIDPFKI

SEQ ID NO: 25514 - protein, 10 aa, Artificial Sequence
  Description of Artificial Sequence: Synthetic peptide
  Seed: SLVGIDPFKL
SQVGIDPFKV

SEQ ID NO: 25515 - protein, 9 aa, Artificial Sequence
  Description of Artificial Sequence: Synthetic peptide
  Seed: SLVGIDPFK
SSVGIDPFR

SEQ ID NO: 25516 - protein, 9 aa, Artificial Sequence
  Description of Artificial Sequence: Synthetic peptide
  Seed: SLVGIDPFK
SSVGIDPFK

SEQ ID NO: 25517 - protein, 9 aa, Artificial Sequence
  Description of Artificial Sequence: Synthetic peptide
  Seed: SLVGIDPFK
SSVGIDPFY

SEQ ID NO: 25518 - protein, 9 aa, Artificial Sequence
  Description of Artificial Sequence: Synthetic peptide
  Seed: SLVGIDPFK
STVGIDPFR

SEQ ID NO: 25519 - protein, 9 aa, Artificial Sequence
  Description of Artificial Sequence: Synthetic peptide
  Seed: SLVGIDPFK
STVGIDPFH

SEQ ID NO: 25520 - protein, 9 aa, Artificial Sequence
  Description of Artificial Sequence: Synthetic peptide
  Seed: SLVGIDPFK
STVGIDPFK

SEQ ID NO: 25521 - protein, 9 aa, Artificial Sequence
  Description of Artificial Sequence: Synthetic peptide
  Seed: SLVGIDPFK
STVGIDPFY

SEQ ID NO: 25522 - protein, 9 aa, Artificial Sequence
  Description of Artificial Sequence: Synthetic peptide
  Seed: SLVGIDPFK
SWVGIDPFR

SEQ ID NO: 25523 - protein, 9 aa, Artificial Sequence
  Description of Artificial Sequence: Synthetic peptide
  Seed: SLVGIDPFK
SWVGIDPFK

SEQ ID NO: 25524 - protein, 9 aa, Artificial Sequence
  Description of Artificial Sequence: Synthetic peptide
  Seed: SLVGIDPFK
SYVGIDPFR

SEQ ID NO: 25525 - protein, 9 aa, Artificial Sequence
  Description of Artificial Sequence: Synthetic peptide
  Seed: SLVGIDPFK
SYVGIDPFK

SEQ ID NO: 25526 - protein, 9 aa, Artificial Sequence
  Description of Artificial Sequence: Synthetic peptide
  Seed: SLVGIDPFK
SVVGIDPFR

SEQ ID NO: 25527 - protein, 9 aa, Artificial Sequence
  Description of Artificial Sequence: Synthetic peptide
  Seed: SLVGIDPFK
SVVGIDPFK

SEQ ID NO: 25528 - protein, 9 aa, Artificial Sequence
  Description of Artificial Sequence: Synthetic peptide
  Seed: SLVGIDPFK
SVVGIDPFY

SEQ ID NO: 25529 - protein, 10 aa, Artificial Sequence
  Description of Artificial Sequence: Synthetic peptide
  Seed: SLVGIDPFKL
SAVGIDPFKV

SEQ ID NO: 25530 - protein, 10 aa, Artificial Sequence
  Description of Artificial Sequence: Synthetic peptide
  Seed: SLVGIDPFKL
SQVGIDPFKA

SEQ ID NO: 25531 - protein, 10 aa, Artificial Sequence
  Description of Artificial Sequence: Synthetic peptide
  Seed: SLVGIDPFKL
SQVGIDPFKI

SEQ ID NO: 25532 - protein, 10 aa, Artificial Sequence
  Description of Artificial Sequence: Synthetic peptide
  Seed: SLVGIDPFKL
SQVGIDPFKL

SEQ ID NO: 25533 - protein, 10 aa, Artificial Sequence
  Description of Artificial Sequence: Synthetic peptide
  Seed: SLVGIDPFKL
SQVGIDPFKM

SEQ ID NO: 25534 - protein, 11 aa, Artificial Sequence
  Description of Artificial Sequence: Synthetic peptide
  Seed: SLVGIDPFKLL
SLVGIDPFKLV

SEQ ID NO: 25535 - protein, 11 aa, Artificial Sequence
  Description of Artificial Sequence: Synthetic peptide
  Seed: SLVGIDPFKLL
SMVGIDPFKLI

SEQ ID NO: 25536 - protein, 10 aa, Artificial Sequence
  Description of Artificial Sequence: Synthetic peptide
  Seed: SLVGIDPFRL
SLVGIDPFRI

SEQ ID NO: 25537 - protein, 11 aa, Artificial Sequence
  Description of Artificial Sequence: Synthetic peptide
  Seed: SLVGIDPFKLL
SMVGIDPFKLL

SEQ ID NO: 25538 - protein, 10 aa, Artificial Sequence
  Description of Artificial Sequence: Synthetic peptide
  Seed: SLVGIDPFRL
SAVGIDPFRV

SEQ ID NO: 25539 - protein, 10 aa, Artificial Sequence
  Description of Artificial Sequence: Synthetic peptide
  Seed: SLVGIDPFRL
SQVGIDPFRA

SEQ ID NO: 25540 - protein, 10 aa, Artificial Sequence
  Description of Artificial Sequence: Synthetic peptide
  Seed: SLVGIDPFRL
SQVGIDPFRI

SEQ ID NO: 25541 - protein, 10 aa, Artificial Sequence
  Description of Artificial Sequence: Synthetic peptide
  Seed: SLVGIDPFRL
SQVGIDPFRL

SEQ ID NO: 25542 - protein, 10 aa, Artificial Sequence
  Description of Artificial Sequence: Synthetic peptide
  Seed: SLVGIDPFRL
SQVGIDPFRM

SEQ ID NO: 25543 - protein, 10 aa, Artificial Sequence
  Description of Artificial Sequence: Synthetic peptide
  Seed: SLVGIDPFRL
SQVGIDPFRV

SEQ ID NO: 25544 - protein, 10 aa, Artificial Sequence
  Description of Artificial Sequence: Synthetic peptide
  Seed: SLVGIDPFRL
SIVGIDPFRI

SEQ ID NO: 25545 - protein, 10 aa, Artificial Sequence
  Description of Artificial Sequence: Synthetic peptide
  Seed: SLVGIDPFRL
SIVGIDPFRL

SEQ ID NO: 25546 - protein, 10 aa, Artificial Sequence
  Description of Artificial Sequence: Synthetic peptide
  Seed: SLVGIDPFRL
SIVGIDPFRV

SEQ ID NO: 25547 - protein, 9 aa, Artificial Sequence
  Description of Artificial Sequence: Synthetic peptide
  Seed: SLVGIDPFR
SPVGIDPFK

SEQ ID NO: 25548 - protein, 11 aa, Artificial Sequence
  Description of Artificial Sequence: Synthetic peptide
  Seed: SLVGIDPFKLL
SMVGIDPFKLV

SEQ ID NO: 25549 - protein, 9 aa, Artificial Sequence
  Description of Artificial Sequence: Synthetic peptide
  Seed: SLVGIDPFR
SAVGIDPFR

SEQ ID NO: 25550 - protein, 9 aa, Artificial Sequence
  Description of Artificial Sequence: Synthetic peptide
  Seed: SLVGIDPFR
SAVGIDPFK

SEQ ID NO: 25551 - protein, 9 aa, Artificial Sequence
  Description of Artificial Sequence: Synthetic peptide
  Seed: SLVGIDPFR
SNVGIDPFR

SEQ ID NO: 25552 - protein, 9 aa, Artificial Sequence
  Description of Artificial Sequence: Synthetic peptide
  Seed: SLVGIDPFR
SNVGIDPFK

SEQ ID NO: 25553 - protein, 9 aa, Artificial Sequence
  Description of Artificial Sequence: Synthetic peptide
  Seed: SLVGIDPFR
SCVGIDPFR

SEQ ID NO: 25554 - protein, 9 aa, Artificial Sequence
  Description of Artificial Sequence: Synthetic peptide
  Seed: SLVGIDPFR
SQVGIDPFR

SEQ ID NO: 25555 - protein, 9 aa, Artificial Sequence
  Description of Artificial Sequence: Synthetic peptide
  Seed: SLVGIDPFR
SQVGIDPFK

SEQ ID NO: 25556 - protein, 9 aa, Artificial Sequence
  Description of Artificial Sequence: Synthetic peptide
  Seed: SLVGIDPFR
SGVGIDPFR

SEQ ID NO: 25557 - protein, 9 aa, Artificial Sequence
  Description of Artificial Sequence: Synthetic peptide
  Seed: SLVGIDPFR
SGVGIDPFK

SEQ ID NO: 25558 - protein, 9 aa, Artificial Sequence
  Description of Artificial Sequence: Synthetic peptide
  Seed: SLVGIDPFR
SIVGIDPFR

SEQ ID NO: 25559 - protein, 9 aa, Artificial Sequence
  Description of Artificial Sequence: Synthetic peptide
  Seed: SLVGIDPFR
SIVGIDPFK

SEQ ID NO: 25560 - protein, 9 aa, Artificial Sequence
  Description of Artificial Sequence: Synthetic peptide
  Seed: SLVGIDPFR
SIVGIDPFY

SEQ ID NO: 25561 - protein, 9 aa, Artificial Sequence
  Description of Artificial Sequence: Synthetic peptide
  Seed: SLVGIDPFR
SMVGIDPFR

SEQ ID NO: 25562 - protein, 9 aa, Artificial Sequence
  Description of Artificial Sequence: Synthetic peptide
  Seed: SLVGIDPFR
SMVGIDPFK

SEQ ID NO: 25563 - protein, 9 aa, Artificial Sequence
  Description of Artificial Sequence: Synthetic peptide
  Seed: SLVGIDPFR
SFVGIDPFR

SEQ ID NO: 25564 - protein, 9 aa, Artificial Sequence
  Description of Artificial Sequence: Synthetic peptide
  Seed: SLVGIDPFR
SFVGIDPFK

SEQ ID NO: 25565 - protein, 9 aa, Artificial Sequence
  Description of Artificial Sequence: Synthetic peptide
  Seed: SLVGIDPFR
SPVGIDPFR

SEQ ID NO: 25566 - protein, 10 aa, Artificial Sequence
  Description of Artificial Sequence: Synthetic peptide
  Seed: SLTIERMVLS
SITIERMVLL

SEQ ID NO: 25567 - protein, 10 aa, Artificial Sequence
  Description of Artificial Sequence: Synthetic peptide
  Seed: SLTIERMVLS
SQTIERMVLV

SEQ ID NO: 25568 - protein, 10 aa, Artificial Sequence
  Description of Artificial Sequence: Synthetic peptide
  Seed: SLTIERMVLS
SETIERMVLA

SEQ ID NO: 25569 - protein, 10 aa, Artificial Sequence
  Description of Artificial Sequence: Synthetic peptide
  Seed: SLTIERMVLS
SETIERMVLV

SEQ ID NO: 25570 - protein, 10 aa, Artificial Sequence
  Description of Artificial Sequence: Synthetic peptide
  Seed: SLTIERMVLS
SGTIERMVLA

SEQ ID NO: 25571 - protein, 10 aa, Artificial Sequence
  Description of Artificial Sequence: Synthetic peptide
  Seed: SLTIERMVLS
SGTIERMVLV

SEQ ID NO: 25572 - protein, 10 aa, Artificial Sequence
  Description of Artificial Sequence: Synthetic peptide
  Seed: SLTIERMVLS
SHTIERMVLA

SEQ ID NO: 25573 - protein, 10 aa, Artificial Sequence
  Description of Artificial Sequence: Synthetic peptide
  Seed: SLTIERMVLS
SHTIERMVLV

SEQ ID NO: 25574 - protein, 10 aa, Artificial Sequence
  Description of Artificial Sequence: Synthetic peptide
  Seed: SLTIERMVLS
SITIERMVLA

SEQ ID NO: 25575 - protein, 10 aa, Artificial Sequence
  Description of Artificial Sequence: Synthetic peptide
  Seed: SLTIERMVLS
SITIERMVLI

SEQ ID NO: 25576 - protein, 10 aa, Artificial Sequence
  Description of Artificial Sequence: Synthetic peptide
  Seed: SLTIERMVLS
SITIERMVLV

SEQ ID NO: 25577 - protein, 10 aa, Artificial Sequence
  Description of Artificial Sequence: Synthetic peptide
  Seed: SLTIERMVLS
SLTIERMVLA

SEQ ID NO: 25578 - protein, 10 aa, Artificial Sequence
  Description of Artificial Sequence: Synthetic peptide
  Seed: SLTIERMVLS
SLTIERMVLI

SEQ ID NO: 25579 - protein, 10 aa, Artificial Sequence
  Description of Artificial Sequence: Synthetic peptide
  Seed: SLTIERMVLS
SLTIERMVLL

SEQ ID NO: 25580 - protein, 10 aa, Artificial Sequence
  Description of Artificial Sequence: Synthetic peptide
  Seed: SLTIERMVLS
SLTIERMVLM

SEQ ID NO: 25581 - protein, 10 aa, Artificial Sequence
  Description of Artificial Sequence: Synthetic peptide
  Seed: SLTIERMVLS
SLTIERMVLT

SEQ ID NO: 25582 - protein, 10 aa, Artificial Sequence
  Description of Artificial Sequence: Synthetic peptide
  Seed: SLTIERMVLS
SLTIERMVLV

SEQ ID NO: 25583 - protein, 10 aa, Artificial Sequence
  Description of Artificial Sequence: Synthetic peptide
  Seed: SLTIERMVLS
SKTIERMVLA

SEQ ID NO: 25584 - protein, 10 aa, Artificial Sequence
  Description of Artificial Sequence: Synthetic peptide
  Seed: SLTIERMVLS
SKTIERMVLV

SEQ ID NO: 25585 - protein, 10 aa, Artificial Sequence
  Description of Artificial Sequence: Synthetic peptide
  Seed: SLTIERMVLS
SMTIERMVLA

SEQ ID NO: 25586 - protein, 10 aa, Artificial Sequence
  Description of Artificial Sequence: Synthetic peptide
  Seed: SLTIERMVLS
SQTIERMVLL

SEQ ID NO: 25587 - protein, 10 aa, Artificial Sequence
  Description of Artificial Sequence: Synthetic peptide
  Seed: SLTIERMVLS
SQTIERMVLI

SEQ ID NO: 25588 - protein, 10 aa, Artificial Sequence
  Description of Artificial Sequence: Synthetic peptide
  Seed: SLTIERMVLS
SQTIERMVLA

SEQ ID NO: 25589 - protein, 10 aa, Artificial Sequence
  Description of Artificial Sequence: Synthetic peptide
  Seed: SLTIERMVLS
SCTIERMVLV

SEQ ID NO: 25590 - protein, 9 aa, Artificial Sequence
  Description of Artificial Sequence: Synthetic peptide
  Seed: SLTIERMVL
SYTIERMVL

SEQ ID NO: 25591 - protein, 9 aa, Artificial Sequence
  Description of Artificial Sequence: Synthetic peptide
  Seed: SLTIERMVL
SYTIERMVM

SEQ ID NO: 25592 - protein, 9 aa, Artificial Sequence
  Description of Artificial Sequence: Synthetic peptide
  Seed: SLTIERMVL
SYTIERMVF

SEQ ID NO: 25593 - protein, 9 aa, Artificial Sequence
  Description of Artificial Sequence: Synthetic peptide
  Seed: SLTIERMVL
SYTIERMVW

SEQ ID NO: 25594 - protein, 9 aa, Artificial Sequence
  Description of Artificial Sequence: Synthetic peptide
  Seed: SLTIERMVL
SYTIERMVY

SEQ ID NO: 25595 - protein, 9 aa, Artificial Sequence
  Description of Artificial Sequence: Synthetic peptide
  Seed: SLTIERMVL
SYTIERMVV

SEQ ID NO: 25596 - protein, 9 aa, Artificial Sequence
  Description of Artificial Sequence: Synthetic peptide
  Seed: SLTIERMVL
SVTIERMVL

SEQ ID NO: 25597 - protein, 9 aa, Artificial Sequence
  Description of Artificial Sequence: Synthetic peptide
  Seed: SLTIERMVL
SVTIERMVM

SEQ ID NO: 25598 - protein, 9 aa, Artificial Sequence
  Description of Artificial Sequence: Synthetic peptide
  Seed: SLTIERMVL
SVTIERMVF

SEQ ID NO: 25599 - protein, 9 aa, Artificial Sequence
  Description of Artificial Sequence: Synthetic peptide
  Seed: SLTIERMVL
SVTIERMVY

SEQ ID NO: 25600 - protein, 10 aa, Artificial Sequence
  Description of Artificial Sequence: Synthetic peptide
  Seed: SLTIERMVLS
SATIERMVLA

SEQ ID NO: 25601 - protein, 10 aa, Artificial Sequence
  Description of Artificial Sequence: Synthetic peptide
  Seed: SLTIERMVLS
SATIERMVLV

SEQ ID NO: 25602 - protein, 10 aa, Artificial Sequence
  Description of Artificial Sequence: Synthetic peptide
  Seed: SLTIERMVLS
SRTIERMVLA

SEQ ID NO: 25603 - protein, 10 aa, Artificial Sequence
  Description of Artificial Sequence: Synthetic peptide
  Seed: SLTIERMVLS
SRTIERMVLV

SEQ ID NO: 25604 - protein, 10 aa, Artificial Sequence
  Description of Artificial Sequence: Synthetic peptide
  Seed: SLTIERMVLS
SNTIERMVLA

SEQ ID NO: 25605 - protein, 10 aa, Artificial Sequence
  Description of Artificial Sequence: Synthetic peptide
  Seed: SLTIERMVLS
SNTIERMVLV

SEQ ID NO: 25606 - protein, 10 aa, Artificial Sequence
  Description of Artificial Sequence: Synthetic peptide
  Seed: SLTIERMVLS
SDTIERMVLA

SEQ ID NO: 25607 - protein, 10 aa, Artificial Sequence
  Description of Artificial Sequence: Synthetic peptide
  Seed: SLTIERMVLS
SDTIERMVLV

SEQ ID NO: 25608 - protein, 10 aa, Artificial Sequence
  Description of Artificial Sequence: Synthetic peptide
  Seed: SLTIERMVLS
SCTIERMVLA

SEQ ID NO: 25609 - protein, 10 aa, Artificial Sequence
  Description of Artificial Sequence: Synthetic peptide
  Seed: SLTIERMVLS
SMTIERMVLC

SEQ ID NO: 25610 - protein, 10 aa, Artificial Sequence
  Description of Artificial Sequence: Synthetic peptide
  Seed: SLTIERMVLS
SMTIERMVLI

SEQ ID NO: 25611 - protein, 10 aa, Artificial Sequence
  Description of Artificial Sequence: Synthetic peptide
  Seed: SLTIERMVLS
SMTIERMVLL

SEQ ID NO: 25612 - protein, 8 aa, Artificial Sequence
  Description of Artificial Sequence: Synthetic peptide
  Seed: SLVGIDPF
SQVGIDPF

SEQ ID NO: 25613 - protein, 8 aa, Artificial Sequence
  Description of Artificial Sequence: Synthetic peptide
  Seed: SLVGIDPF
SLVGIDPY

SEQ ID NO: 25614 - protein, 8 aa, Artificial Sequence
  Description of Artificial Sequence: Synthetic peptide
  Seed: SLVGIDPF
SMVGIDPM

SEQ ID NO: 25615 - protein, 8 aa, Artificial Sequence
  Description of Artificial Sequence: Synthetic peptide
  Seed: SLVGIDPF
SMVGIDPF

SEQ ID NO: 25616 - protein, 8 aa, Artificial Sequence
  Description of Artificial Sequence: Synthetic peptide
  Seed: SLVGIDPF
SMVGIDPY

SEQ ID NO: 25617 - protein, 8 aa, Artificial Sequence
  Description of Artificial Sequence: Synthetic peptide
  Seed: SLVGIDPF
SQVGIDPY

SEQ ID NO: 25618 - protein, 10 aa, Artificial Sequence
  Description of Artificial Sequence: Synthetic peptide
  Seed: SLTIERMVLS
SVTIERMVLV

SEQ ID NO: 25619 - protein, 10 aa, Artificial Sequence
  Description of Artificial Sequence: Synthetic peptide
  Seed: SLTIERMVLS
SMTIERMVLM

SEQ ID NO: 25620 - protein, 10 aa, Artificial Sequence
  Description of Artificial Sequence: Synthetic peptide
  Seed: SLTIERMVLS
SVTIERMVLL

SEQ ID NO: 25621 - protein, 10 aa, Artificial Sequence
  Description of Artificial Sequence: Synthetic peptide
  Seed: SLTIERMVLS
SMTIERMVLT

SEQ ID NO: 25622 - protein, 10 aa, Artificial Sequence
  Description of Artificial Sequence: Synthetic peptide
  Seed: SLTIERMVLS
SMTIERMVLV

SEQ ID NO: 25623 - protein, 10 aa, Artificial Sequence
  Description of Artificial Sequence: Synthetic peptide
  Seed: SLTIERMVLS
SFTIERMVLA

SEQ ID NO: 25624 - protein, 10 aa, Artificial Sequence
  Description of Artificial Sequence: Synthetic peptide
  Seed: SLTIERMVLS
SFTIERMVLI

SEQ ID NO: 25625 - protein, 10 aa, Artificial Sequence
  Description of Artificial Sequence: Synthetic peptide
  Seed: SLTIERMVLS
SFTIERMVLV

SEQ ID NO: 25626 - protein, 10 aa, Artificial Sequence
  Description of Artificial Sequence: Synthetic peptide
  Seed: SLTIERMVLS
SPTIERMVLA

SEQ ID NO: 25627 - protein, 10 aa, Artificial Sequence
  Description of Artificial Sequence: Synthetic peptide
  Seed: SLTIERMVLS
SPTIERMVLV

SEQ ID NO: 25628 - protein, 10 aa, Artificial Sequence
  Description of Artificial Sequence: Synthetic peptide
  Seed: SLTIERMVLS
SSTIERMVLA

SEQ ID NO: 25629 - protein, 10 aa, Artificial Sequence
  Description of Artificial Sequence: Synthetic peptide
  Seed: SLTIERMVLS
SSTIERMVLV

SEQ ID NO: 25630 - protein, 10 aa, Artificial Sequence
  Description of Artificial Sequence: Synthetic peptide
  Seed: SLTIERMVLS
STTIERMVLA

SEQ ID NO: 25631 - protein, 10 aa, Artificial Sequence
  Description of Artificial Sequence: Synthetic peptide
  Seed: SLTIERMVLS
STTIERMVLV

SEQ ID NO: 25632 - protein, 10 aa, Artificial Sequence
  Description of Artificial Sequence: Synthetic peptide
  Seed: SLTIERMVLS
SWTIERMVLA

SEQ ID NO: 25633 - protein, 10 aa, Artificial Sequence
  Description of Artificial Sequence: Synthetic peptide
  Seed: SLTIERMVLS
SWTIERMVLV

SEQ ID NO: 25634 - protein, 10 aa, Artificial Sequence
  Description of Artificial Sequence: Synthetic peptide
  Seed: SLTIERMVLS
SYTIERMVLA

SEQ ID NO: 25635 - protein, 10 aa, Artificial Sequence
  Description of Artificial Sequence: Synthetic peptide
  Seed: SLTIERMVLS
SYTIERMVLI

SEQ ID NO: 25636 - protein, 10 aa, Artificial Sequence
  Description of Artificial Sequence: Synthetic peptide
  Seed: SLTIERMVLS
SYTIERMVLV

SEQ ID NO: 25637 - protein, 10 aa, Artificial Sequence
  Description of Artificial Sequence: Synthetic peptide
  Seed: SLTIERMVLS
SVTIERMVLA

SEQ ID NO: 25638 - protein, 10 aa, Artificial Sequence
  Description of Artificial Sequence: Synthetic peptide
  Seed: SLTIERMVLS
SVTIERMVLI

SEQ ID NO: 25639 - protein, 10 aa, Artificial Sequence
  Description of Artificial Sequence: Synthetic peptide
  Seed: SLVGIDPFRL
SLVGIDPFRA

SEQ ID NO: 25640 - protein, 10 aa, Artificial Sequence
  Description of Artificial Sequence: Synthetic peptide
  Seed: SLVGIDPFRL
SLVGIDPFRM

SEQ ID NO: 25641 - protein, 9 aa, Artificial Sequence
  Description of Artificial Sequence: Synthetic peptide
  Seed: SPRGKLSTR
SARGKLSTR

SEQ ID NO: 25642 - protein, 10 aa, Artificial Sequence
  Description of Artificial Sequence: Synthetic peptide
  Seed: SNLNDTTYQR
SYLNDTTYQK

SEQ ID NO: 25643 - protein, 10 aa, Artificial Sequence
  Description of Artificial Sequence: Synthetic peptide
  Seed: SNLNDTTYQR
SVLNDTTYQR

SEQ ID NO: 25644 - protein, 10 aa, Artificial Sequence
  Description of Artificial Sequence: Synthetic peptide
  Seed: SNLNDTTYQR
SVLNDTTYQK

SEQ ID NO: 25645 - protein, 10 aa, Artificial Sequence
  Description of Artificial Sequence: Synthetic peptide
  Seed: SLVGIDPFRL
SLVGIDPFRT

SEQ ID NO: 25646 - protein, 8 aa, Artificial Sequence
  Description of Artificial Sequence: Synthetic peptide
  Seed: SPRGKLST
SIRGKLSL

SEQ ID NO: 25647 - protein, 9 aa, Artificial Sequence
  Description of Artificial Sequence: Synthetic peptide
  Seed: SPIVPSFDM
SPIVPSFDL

SEQ ID NO: 25648 - protein, 9 aa, Artificial Sequence
  Description of Artificial Sequence: Synthetic peptide
  Seed: SPIVPSFDM
SPIVPSFDF

SEQ ID NO: 25649 - protein, 9 aa, Artificial Sequence
  Description of Artificial Sequence: Synthetic peptide
  Seed: SPIVPSFDM
SPIVPSFDY

SEQ ID NO: 25650 - protein, 9 aa, Artificial Sequence
  Description of Artificial Sequence: Synthetic peptide
  Seed: SPIVPSFDM
SPIVPSFDV

SEQ ID NO: 25651 - protein, 9 aa, Artificial Sequence
  Description of Artificial Sequence: Synthetic peptide
  Seed: SPIVPSFDM
SSIVPSFDY

SEQ ID NO: 25652 - protein, 9 aa, Artificial Sequence
  Description of Artificial Sequence: Synthetic peptide
  Seed: SPIVPSFDM
STIVPSFDY

SEQ ID NO: 25653 - protein, 9 aa, Artificial Sequence
  Description of Artificial Sequence: Synthetic peptide
  Seed: SPIVPSFDM
SVIVPSFDF

SEQ ID NO: 25654 - protein, 9 aa, Artificial Sequence
  Description of Artificial Sequence: Synthetic peptide
  Seed: SPIVPSFDM
SVIVPSFDY

SEQ ID NO: 25655 - protein, 8 aa, Artificial Sequence
  Description of Artificial Sequence: Synthetic peptide
  Seed: SPRGKLST
SARGKLSL

SEQ ID NO: 25656 - protein, 8 aa, Artificial Sequence
  Description of Artificial Sequence: Synthetic peptide
  Seed: SPRGKLST
SPRGKLSA

SEQ ID NO: 25657 - protein, 8 aa, Artificial Sequence
  Description of Artificial Sequence: Synthetic peptide
  Seed: SPRGKLST
SPRGKLSC

SEQ ID NO: 25658 - protein, 8 aa, Artificial Sequence
  Description of Artificial Sequence: Synthetic peptide
  Seed: SPRGKLST
SPRGKLSI

SEQ ID NO: 25659 - protein, 8 aa, Artificial Sequence
  Description of Artificial Sequence: Synthetic peptide
  Seed: SPRGKLST
SPRGKLSL

SEQ ID NO: 25660 - protein, 8 aa, Artificial Sequence
  Description of Artificial Sequence: Synthetic peptide
  Seed: SPRGKLST
SPRGKLSM

SEQ ID NO: 25661 - protein, 8 aa, Artificial Sequence
  Description of Artificial Sequence: Synthetic peptide
  Seed: SPRGKLST
SPRGKLSF

SEQ ID NO: 25662 - protein, 8 aa, Artificial Sequence
  Description of Artificial Sequence: Synthetic peptide
  Seed: SPRGKLST
SPRGKLSP

SEQ ID NO: 25663 - protein, 8 aa, Artificial Sequence
  Description of Artificial Sequence: Synthetic peptide
  Seed: SPRGKLST
SPRGKLSS

SEQ ID NO: 25664 - protein, 8 aa, Artificial Sequence
  Description of Artificial Sequence: Synthetic peptide
  Seed: SPRGKLST
SPRGKLSV

SEQ ID NO: 25665 - protein, 8 aa, Artificial Sequence
  Description of Artificial Sequence: Synthetic peptide
  Seed: SPRGKLST
SVRGKLSL

SEQ ID NO: 25666 - protein, 9 aa, Artificial Sequence
  Description of Artificial Sequence: Synthetic peptide
  Seed: SPIVPSFDM
SPIVPSFDI

SEQ ID NO: 25667 - protein, 9 aa, Artificial Sequence
  Description of Artificial Sequence: Synthetic peptide
  Seed: SPIVPSFDM
SPIVPSFDA

SEQ ID NO: 25668 - protein, 9 aa, Artificial Sequence
  Description of Artificial Sequence: Synthetic peptide
  Seed: SPIVPSFDM
SMIVPSFDY

SEQ ID NO: 25669 - protein, 9 aa, Artificial Sequence
  Description of Artificial Sequence: Synthetic peptide
  Seed: SPIVPSFDM
SIIVPSFDY

SEQ ID NO: 25670 - protein, 9 aa, Artificial Sequence
  Description of Artificial Sequence: Synthetic peptide
  Seed: SPIVPSFDM
SAIVPSFDM

SEQ ID NO: 25671 - protein, 9 aa, Artificial Sequence
  Description of Artificial Sequence: Synthetic peptide
  Seed: SPIVPSFDM
SAIVPSFDF

SEQ ID NO: 25672 - protein, 9 aa, Artificial Sequence
  Description of Artificial Sequence: Synthetic peptide
  Seed: SPIVPSFDM
SAIVPSFDY

SEQ ID NO: 25673 - protein, 10 aa, Artificial Sequence
  Description of Artificial Sequence: Synthetic peptide
  Seed: SNLNDTTYQR
SYLNDTTYQR

SEQ ID NO: 25674 - protein, 10 aa, Artificial Sequence
  Description of Artificial Sequence: Synthetic peptide
  Seed: SNLNDTTYQR
SWLNDTTYQK

SEQ ID NO: 25675 - protein, 10 aa, Artificial Sequence
  Description of Artificial Sequence: Synthetic peptide
  Seed: SNLNDTTYQR
SWLNDTTYQR

SEQ ID NO: 25676 - protein, 10 aa, Artificial Sequence
  Description of Artificial Sequence: Synthetic peptide
  Seed: SNLNDATYQR
SQLNDATYQK

SEQ ID NO: 25677 - protein, 10 aa, Artificial Sequence
  Description of Artificial Sequence: Synthetic peptide
  Seed: SNLNDATYQR
SALNDATYQK

SEQ ID NO: 25678 - protein, 10 aa, Artificial Sequence
  Description of Artificial Sequence: Synthetic peptide
  Seed: SNLNDATYQR
SRLNDATYQR

SEQ ID NO: 25679 - protein, 10 aa, Artificial Sequence
  Description of Artificial Sequence: Synthetic peptide
  Seed: SNLNDATYQR
SRLNDATYQK

SEQ ID NO: 25680 - protein, 10 aa, Artificial Sequence
  Description of Artificial Sequence: Synthetic peptide
  Seed: SNLNDATYQR
SNLNDATYQK

SEQ ID NO: 25681 - protein, 10 aa, Artificial Sequence
  Description of Artificial Sequence: Synthetic peptide
  Seed: SNLNDATYQR
SDLNDATYQR

SEQ ID NO: 25682 - protein, 10 aa, Artificial Sequence
  Description of Artificial Sequence: Synthetic peptide
  Seed: SNLNDATYQR
SDLNDATYQK

SEQ ID NO: 25683 - protein, 10 aa, Artificial Sequence
  Description of Artificial Sequence: Synthetic peptide
  Seed: SNLNDATYQR
SCLNDATYQR

SEQ ID NO: 25684 - protein, 10 aa, Artificial Sequence
  Description of Artificial Sequence: Synthetic peptide
  Seed: SNLNDATYQR
SCLNDATYQK

SEQ ID NO: 25685 - protein, 10 aa, Artificial Sequence
  Description of Artificial Sequence: Synthetic peptide
  Seed: SNLNDATYQR
SQLNDATYQR

SEQ ID NO: 25686 - protein, 10 aa, Artificial Sequence
  Description of Artificial Sequence: Synthetic peptide
  Seed: SNLNDATYQR
SELNDATYQR

SEQ ID NO: 25687 - protein, 10 aa, Artificial Sequence
  Description of Artificial Sequence: Synthetic peptide
  Seed: SNLNDTTYQR
STLNDTTYQK

SEQ ID NO: 25688 - protein, 10 aa, Artificial Sequence
  Description of Artificial Sequence: Synthetic peptide
  Seed: SNLNDATYQR
SELNDATYQK

SEQ ID NO: 25689 - protein, 10 aa, Artificial Sequence
  Description of Artificial Sequence: Synthetic peptide
  Seed: SNLNDATYQR
SGLNDATYQR

SEQ ID NO: 25690 - protein, 10 aa, Artificial Sequence
  Description of Artificial Sequence: Synthetic peptide
  Seed: SNLNDATYQR
SGLNDATYQK

SEQ ID NO: 25691 - protein, 10 aa, Artificial Sequence
  Description of Artificial Sequence: Synthetic peptide
  Seed: SNLNDATYQR
SHLNDATYQR

SEQ ID NO: 25692 - protein, 10 aa, Artificial Sequence
  Description of Artificial Sequence: Synthetic peptide
  Seed: SNLNDATYQR
SHLNDATYQK

SEQ ID NO: 25693 - protein, 10 aa, Artificial Sequence
  Description of Artificial Sequence: Synthetic peptide
  Seed: SNLNDATYQR
SILNDATYQR

SEQ ID NO: 25694 - protein, 10 aa, Artificial Sequence
  Description of Artificial Sequence: Synthetic peptide
  Seed: SNLNDATYQR
SILNDATYQK

SEQ ID NO: 25695 - protein, 10 aa, Artificial Sequence
  Description of Artificial Sequence: Synthetic peptide
  Seed: SNLNDATYQR
SLLNDATYQR

SEQ ID NO: 25696 - protein, 10 aa, Artificial Sequence
  Description of Artificial Sequence: Synthetic peptide
  Seed: SNLNDATYQR
SLLNDATYQK

SEQ ID NO: 25697 - protein, 10 aa, Artificial Sequence
  Description of Artificial Sequence: Synthetic peptide
  Seed: SNLNDATYQR
SALNDATYQR

SEQ ID NO: 25698 - protein, 11 aa, Artificial Sequence
  Description of Artificial Sequence: Synthetic peptide
  Seed: SLVGIDPFRLL
SMVGIDPFRLV

SEQ ID NO: 25699 - protein, 11 aa, Artificial Sequence
  Description of Artificial Sequence: Synthetic peptide
  Seed: SLVGIDPFRLL
SMVGIDPFRLM

SEQ ID NO: 25700 - protein, 11 aa, Artificial Sequence
  Description of Artificial Sequence: Synthetic peptide
  Seed: SLVGIDPFRLL
SMVGIDPFRLL

SEQ ID NO: 25701 - protein, 10 aa, Artificial Sequence
  Description of Artificial Sequence: Synthetic peptide
  Seed: SLVGIDPFRL
SLVGIDPFRV

SEQ ID NO: 25702 - protein, 10 aa, Artificial Sequence
  Description of Artificial Sequence: Synthetic peptide
  Seed: SLVGIDPFRL
SMVGIDPFRA

SEQ ID NO: 25703 - protein, 10 aa, Artificial Sequence
  Description of Artificial Sequence: Synthetic peptide
  Seed: SLVGIDPFRL
SMVGIDPFRI

SEQ ID NO: 25704 - protein, 10 aa, Artificial Sequence
  Description of Artificial Sequence: Synthetic peptide
  Seed: SLVGIDPFRL
SMVGIDPFRL

SEQ ID NO: 25705 - protein, 10 aa, Artificial Sequence
  Description of Artificial Sequence: Synthetic peptide
  Seed: SLVGIDPFRL
SMVGIDPFRM

SEQ ID NO: 25706 - protein, 10 aa, Artificial Sequence
  Description of Artificial Sequence: Synthetic peptide
  Seed: SLVGIDPFRL
SMVGIDPFRT

SEQ ID NO: 25707 - protein, 10 aa, Artificial Sequence
  Description of Artificial Sequence: Synthetic peptide
  Seed: SLVGIDPFRL
SMVGIDPFRV

SEQ ID NO: 25708 - protein, 10 aa, Artificial Sequence
  Description of Artificial Sequence: Synthetic peptide
  Seed: SLVGIDPFRL
STVGIDPFRL

SEQ ID NO: 25709 - protein, 10 aa, Artificial Sequence
  Description of Artificial Sequence: Synthetic peptide
  Seed: SLVGIDPFRL
STVGIDPFRV

SEQ ID NO: 25710 - protein, 10 aa, Artificial Sequence
  Description of Artificial Sequence: Synthetic peptide
  Seed: SLVGIDPFRL
SVVGIDPFRI

SEQ ID NO: 25711 - protein, 10 aa, Artificial Sequence
  Description of Artificial Sequence: Synthetic peptide
  Seed: SLVGIDPFRL
SVVGIDPFRL

SEQ ID NO: 25712 - protein, 10 aa, Artificial Sequence
  Description of Artificial Sequence: Synthetic peptide
  Seed: SLVGIDPFRL
SVVGIDPFRV

SEQ ID NO: 25713 - protein, 11 aa, Artificial Sequence
  Description of Artificial Sequence: Synthetic peptide
  Seed: SLVGIDPFRLL
SIVGIDPFRLV

SEQ ID NO: 25714 - protein, 11 aa, Artificial Sequence
  Description of Artificial Sequence: Synthetic peptide
  Seed: SLVGIDPFRLL
SLVGIDPFRLA

SEQ ID NO: 25715 - protein, 11 aa, Artificial Sequence
  Description of Artificial Sequence: Synthetic peptide
  Seed: SLVGIDPFRLL
SLVGIDPFRLI

SEQ ID NO: 25716 - protein, 11 aa, Artificial Sequence
  Description of Artificial Sequence: Synthetic peptide
  Seed: SLVGIDPFRLL
SLVGIDPFRLM

SEQ ID NO: 25717 - protein, 11 aa, Artificial Sequence
  Description of Artificial Sequence: Synthetic peptide
  Seed: SLVGIDPFRLL
SLVGIDPFRLV

SEQ ID NO: 25718 - protein, 11 aa, Artificial Sequence
  Description of Artificial Sequence: Synthetic peptide
  Seed: SLVGIDPFRLL
SMVGIDPFRLA

SEQ ID NO: 25719 - protein, 11 aa, Artificial Sequence
  Description of Artificial Sequence: Synthetic peptide
  Seed: SLVGIDPFRLL
SMVGIDPFRLI

SEQ ID NO: 25720 - protein, 10 aa, Artificial Sequence
  Description of Artificial Sequence: Synthetic peptide
  Seed: SNLNDATYQR
SKLNDATYQR

SEQ ID NO: 25721 - protein, 10 aa, Artificial Sequence
  Description of Artificial Sequence: Synthetic peptide
  Seed: SNLNDATYQR
SKLNDATYQK

SEQ ID NO: 25722 - protein, 10 aa, Artificial Sequence
  Description of Artificial Sequence: Synthetic peptide
  Seed: SNLNDATYQR
SMLNDATYQR

SEQ ID NO: 25723 - protein, 10 aa, Artificial Sequence
  Description of Artificial Sequence: Synthetic peptide
  Seed: SNLNDTTYQR
SQLNDTTYQR

SEQ ID NO: 25724 - protein, 10 aa, Artificial Sequence
  Description of Artificial Sequence: Synthetic peptide
  Seed: SNLNDTTYQR
SELNDTTYQR

SEQ ID NO: 25725 - protein, 10 aa, Artificial Sequence
  Description of Artificial Sequence: Synthetic peptide
  Seed: SNLNDTTYQR
SGLNDTTYQR

SEQ ID NO: 25726 - protein, 10 aa, Artificial Sequence
  Description of Artificial Sequence: Synthetic peptide
  Seed: SNLNDTTYQR
SGLNDTTYQK

SEQ ID NO: 25727 - protein, 10 aa, Artificial Sequence
  Description of Artificial Sequence: Synthetic peptide
  Seed: SNLNDTTYQR
SHLNDTTYQR

SEQ ID NO: 25728 - protein, 10 aa, Artificial Sequence
  Description of Artificial Sequence: Synthetic peptide
  Seed: SNLNDTTYQR
SHLNDTTYQK

SEQ ID NO: 25729 - protein, 10 aa, Artificial Sequence
  Description of Artificial Sequence: Synthetic peptide
  Seed: SNLNDTTYQR
SILNDTTYQR

SEQ ID NO: 25730 - protein, 10 aa, Artificial Sequence
  Description of Artificial Sequence: Synthetic peptide
  Seed: SNLNDTTYQR
SILNDTTYQK

SEQ ID NO: 25731 - protein, 10 aa, Artificial Sequence
  Description of Artificial Sequence: Synthetic peptide
  Seed: SNLNDTTYQR
SLLNDTTYQR

SEQ ID NO: 25732 - protein, 10 aa, Artificial Sequence
  Description of Artificial Sequence: Synthetic peptide
  Seed: SNLNDTTYQR
SLLNDTTYQK

SEQ ID NO: 25733 - protein, 10 aa, Artificial Sequence
  Description of Artificial Sequence: Synthetic peptide
  Seed: SNLNDTTYQR
SKLNDTTYQR

SEQ ID NO: 25734 - protein, 10 aa, Artificial Sequence
  Description of Artificial Sequence: Synthetic peptide
  Seed: SNLNDTTYQR
SKLNDTTYQK

SEQ ID NO: 25735 - protein, 10 aa, Artificial Sequence
  Description of Artificial Sequence: Synthetic peptide
  Seed: SNLNDTTYQR
SMLNDTTYQR

SEQ ID NO: 25736 - protein, 10 aa, Artificial Sequence
  Description of Artificial Sequence: Synthetic peptide
  Seed: SNLNDTTYQR
SMLNDTTYQK

SEQ ID NO: 25737 - protein, 10 aa, Artificial Sequence
  Description of Artificial Sequence: Synthetic peptide
  Seed: SNLNDTTYQR
SFLNDTTYQR

SEQ ID NO: 25738 - protein, 10 aa, Artificial Sequence
  Description of Artificial Sequence: Synthetic peptide
  Seed: SNLNDTTYQR
SFLNDTTYQK

SEQ ID NO: 25739 - protein, 10 aa, Artificial Sequence
  Description of Artificial Sequence: Synthetic peptide
  Seed: SNLNDTTYQR
SPLNDTTYQR

SEQ ID NO: 25740 - protein, 10 aa, Artificial Sequence
  Description of Artificial Sequence: Synthetic peptide
  Seed: SNLNDTTYQR
SSLNDTTYQR

SEQ ID NO: 25741 - protein, 10 aa, Artificial Sequence
  Description of Artificial Sequence: Synthetic peptide
  Seed: SNLNDTTYQR
SSLNDTTYQK

SEQ ID NO: 25742 - protein, 10 aa, Artificial Sequence
  Description of Artificial Sequence: Synthetic peptide
  Seed: SNLNDTTYQR
STLNDTTYQR

SEQ ID NO: 25743 - protein, 10 aa, Artificial Sequence
  Description of Artificial Sequence: Synthetic peptide
  Seed: SNLNDTTYQR
SQLNDTTYQK

SEQ ID NO: 25744 - protein, 10 aa, Artificial Sequence
  Description of Artificial Sequence: Synthetic peptide
  Seed: SNLNDTTYQR
SCLNDTTYQR

SEQ ID NO: 25745 - protein, 10 aa, Artificial Sequence
  Description of Artificial Sequence: Synthetic peptide
  Seed: SNLNDATYQR
SMLNDATYQK

SEQ ID NO: 25746 - protein, 10 aa, Artificial Sequence
  Description of Artificial Sequence: Synthetic peptide
  Seed: SNLNDTTYQR
SDLNDTTYQR

SEQ ID NO: 25747 - protein, 10 aa, Artificial Sequence
  Description of Artificial Sequence: Synthetic peptide
  Seed: SNLNDATYQR
SFLNDATYQR

SEQ ID NO: 25748 - protein, 10 aa, Artificial Sequence
  Description of Artificial Sequence: Synthetic peptide
  Seed: SNLNDATYQR
SFLNDATYQK

SEQ ID NO: 25749 - protein, 10 aa, Artificial Sequence
  Description of Artificial Sequence: Synthetic peptide
  Seed: SNLNDATYQR
SPLNDATYQR

SEQ ID NO: 25750 - protein, 10 aa, Artificial Sequence
  Description of Artificial Sequence: Synthetic peptide
  Seed: SNLNDATYQR
SPLNDATYQK

SEQ ID NO: 25751 - protein, 10 aa, Artificial Sequence
  Description of Artificial Sequence: Synthetic peptide
  Seed: SNLNDATYQR
SSLNDATYQR

SEQ ID NO: 25752 - protein, 10 aa, Artificial Sequence
  Description of Artificial Sequence: Synthetic peptide
  Seed: SNLNDATYQR
SSLNDATYQK

SEQ ID NO: 25753 - protein, 10 aa, Artificial Sequence
  Description of Artificial Sequence: Synthetic peptide
  Seed: SNLNDATYQR
STLNDATYQR

SEQ ID NO: 25754 - protein, 10 aa, Artificial Sequence
  Description of Artificial Sequence: Synthetic peptide
  Seed: SNLNDATYQR
STLNDATYQK

SEQ ID NO: 25755 - protein, 10 aa, Artificial Sequence
  Description of Artificial Sequence: Synthetic peptide
  Seed: SNLNDATYQR
SWLNDATYQR

SEQ ID NO: 25756 - protein, 10 aa, Artificial Sequence
  Description of Artificial Sequence: Synthetic peptide
  Seed: SNLNDATYQR
SWLNDATYQK

SEQ ID NO: 25757 - protein, 10 aa, Artificial Sequence
  Description of Artificial Sequence: Synthetic peptide
  Seed: SNLNDATYQR
SYLNDATYQR

SEQ ID NO: 25758 - protein, 10 aa, Artificial Sequence
  Description of Artificial Sequence: Synthetic peptide
  Seed: SNLNDATYQR
SYLNDATYQK

SEQ ID NO: 25759 - protein, 10 aa, Artificial Sequence
  Description of Artificial Sequence: Synthetic peptide
  Seed: SNLNDATYQR
SVLNDATYQR

SEQ ID NO: 25760 - protein, 10 aa, Artificial Sequence
  Description of Artificial Sequence: Synthetic peptide
  Seed: SNLNDATYQR
SVLNDATYQK

SEQ ID NO: 25761 - protein, 10 aa, Artificial Sequence
  Description of Artificial Sequence: Synthetic peptide
  Seed: SNLNDTTYQR
SALNDTTYQR

SEQ ID NO: 25762 - protein, 10 aa, Artificial Sequence
  Description of Artificial Sequence: Synthetic peptide
  Seed: SNLNDTTYQR
SALNDTTYQK

SEQ ID NO: 25763 - protein, 10 aa, Artificial Sequence
  Description of Artificial Sequence: Synthetic peptide
  Seed: SNLNDTTYQR
SRLNDTTYQR

SEQ ID NO: 25764 - protein, 10 aa, Artificial Sequence
  Description of Artificial Sequence: Synthetic peptide
  Seed: SNLNDTTYQR
SRLNDTTYQK

SEQ ID NO: 25765 - protein, 10 aa, Artificial Sequence
  Description of Artificial Sequence: Synthetic peptide
  Seed: SNLNDTTYQR
SNLNDTTYQK

SEQ ID NO: 25766 - protein, 10 aa, Artificial Sequence
  Description of Artificial Sequence: Synthetic peptide
  Seed: QISVQPTFSV
QGSVQPTFSV

SEQ ID NO: 25767 - protein, 9 aa, Artificial Sequence
  Description of Artificial Sequence: Synthetic peptide
  Seed: NPIVPSFDM
NMIVPSFDF

SEQ ID NO: 25768 - protein, 10 aa, Artificial Sequence
  Description of Artificial Sequence: Synthetic peptide
  Seed: QISVQPTFSV
QQSVQPTFSV

SEQ ID NO: 25769 - protein, 10 aa, Artificial Sequence
  Description of Artificial Sequence: Synthetic peptide
  Seed: FSARSALILR
FCARSALILV

SEQ ID NO: 25770 - protein, 10 aa, Artificial Sequence
  Description of Artificial Sequence: Synthetic peptide
  Seed: FSARSALILR
FRARSALILV

SEQ ID NO: 25771 - protein, 10 aa, Artificial Sequence
  Description of Artificial Sequence: Synthetic peptide
  Seed: FSARSALILR
FNARSALILR

SEQ ID NO: 25772 - protein, 10 aa, Artificial Sequence
  Description of Artificial Sequence: Synthetic peptide
  Seed: FSARSALILR
FNARSALILK

SEQ ID NO: 25773 - protein, 10 aa, Artificial Sequence
  Description of Artificial Sequence: Synthetic peptide
  Seed: FSARSALILR
FNARSALILV

SEQ ID NO: 25774 - protein, 10 aa, Artificial Sequence
  Description of Artificial Sequence: Synthetic peptide
  Seed: FSARSALILR
FDARSALILR

SEQ ID NO: 25775 - protein, 10 aa, Artificial Sequence
  Description of Artificial Sequence: Synthetic peptide
  Seed: FSARSALILR
FDARSALILK

SEQ ID NO: 25776 - protein, 10 aa, Artificial Sequence
  Description of Artificial Sequence: Synthetic peptide
  Seed: FSARSALILR
FDARSALILV

SEQ ID NO: 25777 - protein, 10 aa, Artificial Sequence
  Description of Artificial Sequence: Synthetic peptide
  Seed: FSARSALILR
FCARSALILR

SEQ ID NO: 25778 - protein, 10 aa, Artificial Sequence
  Description of Artificial Sequence: Synthetic peptide
  Seed: FSARSALILR
FCARSALILK

SEQ ID NO: 25779 - protein, 10 aa, Artificial Sequence
  Description of Artificial Sequence: Synthetic peptide
  Seed: FSARSALILR
FQARSALILA

SEQ ID NO: 25780 - protein, 10 aa, Artificial Sequence
  Description of Artificial Sequence: Synthetic peptide
  Seed: FSARSALILR
FGARSALILR

SEQ ID NO: 25781 - protein, 10 aa, Artificial Sequence
  Description of Artificial Sequence: Synthetic peptide
  Seed: FSARSALILR
FQARSALILR

SEQ ID NO: 25782 - protein, 10 aa, Artificial Sequence
  Description of Artificial Sequence: Synthetic peptide
  Seed: FSARSALILR
FQARSALILI

SEQ ID NO: 25783 - protein, 10 aa, Artificial Sequence
  Description of Artificial Sequence: Synthetic peptide
  Seed: FSARSALILR
FQARSALILL

SEQ ID NO: 25784 - protein, 10 aa, Artificial Sequence
  Description of Artificial Sequence: Synthetic peptide
  Seed: FSARSALILR
FQARSALILK

SEQ ID NO: 25785 - protein, 10 aa, Artificial Sequence
  Description of Artificial Sequence: Synthetic peptide
  Seed: FSARSALILR
FQARSALILM

SEQ ID NO: 25786 - protein, 10 aa, Artificial Sequence
  Description of Artificial Sequence: Synthetic peptide
  Seed: FSARSALILR
FQARSALILT

SEQ ID NO: 25787 - protein, 10 aa, Artificial Sequence
  Description of Artificial Sequence: Synthetic peptide
  Seed: FSARSALILR
FQARSALILV

SEQ ID NO: 25788 - protein, 10 aa, Artificial Sequence
  Description of Artificial Sequence: Synthetic peptide
  Seed: FSARSALILR
FEARSALILR

SEQ ID NO: 25789 - protein, 10 aa, Artificial Sequence
  Description of Artificial Sequence: Synthetic peptide
  Seed: FSARSALILR
FEARSALILK

SEQ ID NO: 25790 - protein, 10 aa, Artificial Sequence
  Description of Artificial Sequence: Synthetic peptide
  Seed: FSARSALILR
FRARSALILK

SEQ ID NO: 25791 - protein, 10 aa, Artificial Sequence
  Description of Artificial Sequence: Synthetic peptide
  Seed: FSARSALILR
FRARSALILR

SEQ ID NO: 25792 - protein, 10 aa, Artificial Sequence
  Description of Artificial Sequence: Synthetic peptide
  Seed: FSARSALILR
FAARSALILV

SEQ ID NO: 25793 - protein, 10 aa, Artificial Sequence
  Description of Artificial Sequence: Synthetic peptide
  Seed: FSARSALILR
FAARSALILK

SEQ ID NO: 25794 - protein, 9 aa, Artificial Sequence
  Description of Artificial Sequence: Synthetic peptide
  Seed: FSARSALIL
FTARSALIV

SEQ ID NO: 25795 - protein, 9 aa, Artificial Sequence
  Description of Artificial Sequence: Synthetic peptide
  Seed: FSARSALIL
FWARSALIF

SEQ ID NO: 25796 - protein, 9 aa, Artificial Sequence
  Description of Artificial Sequence: Synthetic peptide
  Seed: FSARSALIL
FWARSALIY

SEQ ID NO: 25797 - protein, 9 aa, Artificial Sequence
  Description of Artificial Sequence: Synthetic peptide
  Seed: FSARSALIL
FYARSALIM

SEQ ID NO: 25798 - protein, 9 aa, Artificial Sequence
  Description of Artificial Sequence: Synthetic peptide
  Seed: FSARSALIL
FYARSALIF

SEQ ID NO: 25799 - protein, 9 aa, Artificial Sequence
  Description of Artificial Sequence: Synthetic peptide
  Seed: FSARSALIL
FYARSALIY

SEQ ID NO: 25800 - protein, 9 aa, Artificial Sequence
  Description of Artificial Sequence: Synthetic peptide
  Seed: FSARSALIL
FVARSALIA

SEQ ID NO: 25801 - protein, 9 aa, Artificial Sequence
  Description of Artificial Sequence: Synthetic peptide
  Seed: FSARSALIL
FVARSALIH

SEQ ID NO: 25802 - protein, 9 aa, Artificial Sequence
  Description of Artificial Sequence: Synthetic peptide
  Seed: FSARSALIL
FVARSALII

SEQ ID NO: 25803 - protein, 9 aa, Artificial Sequence
  Description of Artificial Sequence: Synthetic peptide
  Seed: FSARSALIL
FVARSALIL

SEQ ID NO: 25804 - protein, 9 aa, Artificial Sequence
  Description of Artificial Sequence: Synthetic peptide
  Seed: FSARSALIL
FVARSALIM

SEQ ID NO: 25805 - protein, 9 aa, Artificial Sequence
  Description of Artificial Sequence: Synthetic peptide
  Seed: FSARSALIL
FVARSALIF

SEQ ID NO: 25806 - protein, 9 aa, Artificial Sequence
  Description of Artificial Sequence: Synthetic peptide
  Seed: FSARSALIL
FVARSALIW

SEQ ID NO: 25807 - protein, 9 aa, Artificial Sequence
  Description of Artificial Sequence: Synthetic peptide
  Seed: FSARSALIL
FVARSALIY

SEQ ID NO: 25808 - protein, 9 aa, Artificial Sequence
  Description of Artificial Sequence: Synthetic peptide
  Seed: FSARSALIL
FVARSALIV

SEQ ID NO: 25809 - protein, 10 aa, Artificial Sequence
  Description of Artificial Sequence: Synthetic peptide
  Seed: FSARSALILR
FAARSALILA

SEQ ID NO: 25810 - protein, 10 aa, Artificial Sequence
  Description of Artificial Sequence: Synthetic peptide
  Seed: FSARSALILR
FAARSALILR

SEQ ID NO: 25811 - protein, 10 aa, Artificial Sequence
  Description of Artificial Sequence: Synthetic peptide
  Seed: FSARSALILR
FAARSALILI

SEQ ID NO: 25812 - protein, 10 aa, Artificial Sequence
  Description of Artificial Sequence: Synthetic peptide
  Seed: FSARSALILR
FAARSALILL

SEQ ID NO: 25813 - protein, 10 aa, Artificial Sequence
  Description of Artificial Sequence: Synthetic peptide
  Seed: FSARSALILR
FEARSALILV

SEQ ID NO: 25814 - protein, 10 aa, Artificial Sequence
  Description of Artificial Sequence: Synthetic peptide
  Seed: FSARSALILR
FGARSALILK

SEQ ID NO: 25815 - protein, 9 aa, Artificial Sequence
  Description of Artificial Sequence: Synthetic peptide
  Seed: FSARSALIL
FTARSALIW

SEQ ID NO: 25816 - protein, 10 aa, Artificial Sequence
  Description of Artificial Sequence: Synthetic peptide
  Seed: FSARSALILR
FKARSALILR

SEQ ID NO: 25817 - protein, 10 aa, Artificial Sequence
  Description of Artificial Sequence: Synthetic peptide
  Seed: FSARSALILR
FLARSALILK

SEQ ID NO: 25818 - protein, 10 aa, Artificial Sequence
  Description of Artificial Sequence: Synthetic peptide
  Seed: FSARSALILR
FLARSALILM

SEQ ID NO: 25819 - protein, 10 aa, Artificial Sequence
  Description of Artificial Sequence: Synthetic peptide
  Seed: FSARSALILR
FLARSALILF

SEQ ID NO: 25820 - protein, 10 aa, Artificial Sequence
  Description of Artificial Sequence: Synthetic peptide
  Seed: FSARSALILR
FLARSALILP

SEQ ID NO: 25821 - protein, 10 aa, Artificial Sequence
  Description of Artificial Sequence: Synthetic peptide
  Seed: FSARSALILR
FLARSALILS

SEQ ID NO: 25822 - protein, 10 aa, Artificial Sequence
  Description of Artificial Sequence: Synthetic peptide
  Seed: FSARSALILR
FLARSALILT

SEQ ID NO: 25823 - protein, 10 aa, Artificial Sequence
  Description of Artificial Sequence: Synthetic peptide
  Seed: FSARSALILR
FLARSALILW

SEQ ID NO: 25824 - protein, 10 aa, Artificial Sequence
  Description of Artificial Sequence: Synthetic peptide
  Seed: FSARSALILR
FLARSALILY

SEQ ID NO: 25825 - protein, 10 aa, Artificial Sequence
  Description of Artificial Sequence: Synthetic peptide
  Seed: FSARSALILR
FLARSALILV

SEQ ID NO: 25826 - protein, 10 aa, Artificial Sequence
  Description of Artificial Sequence: Synthetic peptide
  Seed: FSARSALILR
FKARSALILK

SEQ ID NO: 25827 - protein, 10 aa, Artificial Sequence
  Description of Artificial Sequence: Synthetic peptide
  Seed: FSARSALILR
FGARSALILV

SEQ ID NO: 25828 - protein, 10 aa, Artificial Sequence
  Description of Artificial Sequence: Synthetic peptide
  Seed: FSARSALILR
FKARSALILV

SEQ ID NO: 25829 - protein, 10 aa, Artificial Sequence
  Description of Artificial Sequence: Synthetic peptide
  Seed: FSARSALILR
FMARSALILA

SEQ ID NO: 25830 - protein, 10 aa, Artificial Sequence
  Description of Artificial Sequence: Synthetic peptide
  Seed: FSARSALILR
FMARSALILR

SEQ ID NO: 25831 - protein, 10 aa, Artificial Sequence
  Description of Artificial Sequence: Synthetic peptide
  Seed: FSARSALILR
FMARSALILN

SEQ ID NO: 25832 - protein, 10 aa, Artificial Sequence
  Description of Artificial Sequence: Synthetic peptide
  Seed: FSARSALILR
FMARSALILD

SEQ ID NO: 25833 - protein, 10 aa, Artificial Sequence
  Description of Artificial Sequence: Synthetic peptide
  Seed: FSARSALILR
FMARSALILC

SEQ ID NO: 25834 - protein, 10 aa, Artificial Sequence
  Description of Artificial Sequence: Synthetic peptide
  Seed: FSARSALILR
FMARSALILQ

SEQ ID NO: 25835 - protein, 10 aa, Artificial Sequence
  Description of Artificial Sequence: Synthetic peptide
  Seed: FSARSALILR
FMARSALILE

SEQ ID NO: 25836 - protein, 10 aa, Artificial Sequence
  Description of Artificial Sequence: Synthetic peptide
  Seed: FSARSALILR
FMARSALILG

SEQ ID NO: 25837 - protein, 10 aa, Artificial Sequence
  Description of Artificial Sequence: Synthetic peptide
  Seed: FSARSALILR
FLARSALILL

SEQ ID NO: 25838 - protein, 10 aa, Artificial Sequence
  Description of Artificial Sequence: Synthetic peptide
  Seed: FSARSALILR
FLARSALILI

SEQ ID NO: 25839 - protein, 10 aa, Artificial Sequence
  Description of Artificial Sequence: Synthetic peptide
  Seed: FSARSALILR
FLARSALILH

SEQ ID NO: 25840 - protein, 10 aa, Artificial Sequence
  Description of Artificial Sequence: Synthetic peptide
  Seed: FSARSALILR
FLARSALILG

SEQ ID NO: 25841 - protein, 10 aa, Artificial Sequence
  Description of Artificial Sequence: Synthetic peptide
  Seed: FSARSALILR
FHARSALILR

SEQ ID NO: 25842 - protein, 10 aa, Artificial Sequence
  Description of Artificial Sequence: Synthetic peptide
  Seed: FSARSALILR
FHARSALILK

SEQ ID NO: 25843 - protein, 10 aa, Artificial Sequence
  Description of Artificial Sequence: Synthetic peptide
  Seed: FSARSALILR
FHARSALILV

SEQ ID NO: 25844 - protein, 10 aa, Artificial Sequence
  Description of Artificial Sequence: Synthetic peptide
  Seed: FSARSALILR
FIARSALILA

SEQ ID NO: 25845 - protein, 10 aa, Artificial Sequence
  Description of Artificial Sequence: Synthetic peptide
  Seed: FSARSALILR
FIARSALILR

SEQ ID NO: 25846 - protein, 10 aa, Artificial Sequence
  Description of Artificial Sequence: Synthetic peptide
  Seed: FSARSALILR
FIARSALILI

SEQ ID NO: 25847 - protein, 10 aa, Artificial Sequence
  Description of Artificial Sequence: Synthetic peptide
  Seed: FSARSALILR
FIARSALILL

SEQ ID NO: 25848 - protein, 10 aa, Artificial Sequence
  Description of Artificial Sequence: Synthetic peptide
  Seed: FSARSALILR
FIARSALILK

SEQ ID NO: 25849 - protein, 10 aa, Artificial Sequence
  Description of Artificial Sequence: Synthetic peptide
  Seed: FSARSALILR
FIARSALILM

SEQ ID NO: 25850 - protein, 10 aa, Artificial Sequence
  Description of Artificial Sequence: Synthetic peptide
  Seed: FSARSALILR
FIARSALILT

SEQ ID NO: 25851 - protein, 10 aa, Artificial Sequence
  Description of Artificial Sequence: Synthetic peptide
  Seed: FSARSALILR
FIARSALILY

SEQ ID NO: 25852 - protein, 10 aa, Artificial Sequence
  Description of Artificial Sequence: Synthetic peptide
  Seed: FSARSALILR
FIARSALILV

SEQ ID NO: 25853 - protein, 10 aa, Artificial Sequence
  Description of Artificial Sequence: Synthetic peptide
  Seed: FSARSALILR
FLARSALILA

SEQ ID NO: 25854 - protein, 10 aa, Artificial Sequence
  Description of Artificial Sequence: Synthetic peptide
  Seed: FSARSALILR
FLARSALILN

SEQ ID NO: 25855 - protein, 10 aa, Artificial Sequence
  Description of Artificial Sequence: Synthetic peptide
  Seed: FSARSALILR
FLARSALILD

SEQ ID NO: 25856 - protein, 10 aa, Artificial Sequence
  Description of Artificial Sequence: Synthetic peptide
  Seed: FSARSALILR
FLARSALILC

SEQ ID NO: 25857 - protein, 10 aa, Artificial Sequence
  Description of Artificial Sequence: Synthetic peptide
  Seed: FSARSALILR
FLARSALILQ

SEQ ID NO: 25858 - protein, 10 aa, Artificial Sequence
  Description of Artificial Sequence: Synthetic peptide
  Seed: FSARSALILR
FLARSALILE

SEQ ID NO: 25859 - protein, 9 aa, Artificial Sequence
  Description of Artificial Sequence: Synthetic peptide
  Seed: FSARSALIL
FTARSALIY

SEQ ID NO: 25860 - protein, 9 aa, Artificial Sequence
  Description of Artificial Sequence: Synthetic peptide
  Seed: FSARSALIL
FTARSALIF

SEQ ID NO: 25861 - protein, 9 aa, Artificial Sequence
  Description of Artificial Sequence: Synthetic peptide
  Seed: FSVQRNLPF
FPVQRNLPL

SEQ ID NO: 25862 - protein, 9 aa, Artificial Sequence
  Description of Artificial Sequence: Synthetic peptide
  Seed: FSARSALIL
FLARSALIH

SEQ ID NO: 25863 - protein, 9 aa, Artificial Sequence
  Description of Artificial Sequence: Synthetic peptide
  Seed: FSARSALIL
FIARSALIA

SEQ ID NO: 25864 - protein, 9 aa, Artificial Sequence
  Description of Artificial Sequence: Synthetic peptide
  Seed: FSARSALIL
FIARSALII

SEQ ID NO: 25865 - protein, 9 aa, Artificial Sequence
  Description of Artificial Sequence: Synthetic peptide
  Seed: FSARSALIL
FIARSALIL

SEQ ID NO: 25866 - protein, 9 aa, Artificial Sequence
  Description of Artificial Sequence: Synthetic peptide
  Seed: FSARSALIL
FIARSALIM

SEQ ID NO: 25867 - protein, 9 aa, Artificial Sequence
  Description of Artificial Sequence: Synthetic peptide
  Seed: FSARSALIL
FIARSALIF

SEQ ID NO: 25868 - protein, 9 aa, Artificial Sequence
  Description of Artificial Sequence: Synthetic peptide
  Seed: FSARSALIL
FIARSALIW

SEQ ID NO: 25869 - protein, 9 aa, Artificial Sequence
  Description of Artificial Sequence: Synthetic peptide
  Seed: FSARSALIL
FIARSALIY

SEQ ID NO: 25870 - protein, 9 aa, Artificial Sequence
  Description of Artificial Sequence: Synthetic peptide
  Seed: FSARSALIL
FIARSALIV

SEQ ID NO: 25871 - protein, 9 aa, Artificial Sequence
  Description of Artificial Sequence: Synthetic peptide
  Seed: FSARSALIL
FLARSALIA

SEQ ID NO: 25872 - protein, 9 aa, Artificial Sequence
  Description of Artificial Sequence: Synthetic peptide
  Seed: FSARSALIL
FLARSALII

SEQ ID NO: 25873 - protein, 9 aa, Artificial Sequence
  Description of Artificial Sequence: Synthetic peptide
  Seed: FSARSALIL
FKARSALII

SEQ ID NO: 25874 - protein, 9 aa, Artificial Sequence
  Description of Artificial Sequence: Synthetic peptide
  Seed: FSARSALIL
FLARSALIM

SEQ ID NO: 25875 - protein, 9 aa, Artificial Sequence
  Description of Artificial Sequence: Synthetic peptide
  Seed: FSARSALIL
FLARSALIF

SEQ ID NO: 25876 - protein, 9 aa, Artificial Sequence
  Description of Artificial Sequence: Synthetic peptide
  Seed: FSARSALIL
FLARSALIS

SEQ ID NO: 25877 - protein, 9 aa, Artificial Sequence
  Description of Artificial Sequence: Synthetic peptide
  Seed: FSARSALIL
FLARSALIT

SEQ ID NO: 25878 - protein, 9 aa, Artificial Sequence
  Description of Artificial Sequence: Synthetic peptide
  Seed: FSARSALIL
FLARSALIW

SEQ ID NO: 25879 - protein, 9 aa, Artificial Sequence
  Description of Artificial Sequence: Synthetic peptide
  Seed: FSARSALIL
FLARSALIY

SEQ ID NO: 25880 - protein, 9 aa, Artificial Sequence
  Description of Artificial Sequence: Synthetic peptide
  Seed: FSARSALIL
FLARSALIV

SEQ ID NO: 25881 - protein, 9 aa, Artificial Sequence
  Description of Artificial Sequence: Synthetic peptide
  Seed: FSARSALIL
FKARSALIA

SEQ ID NO: 25882 - protein, 9 aa, Artificial Sequence
  Description of Artificial Sequence: Synthetic peptide
  Seed: FSARSALIL
FHARSALIV

SEQ ID NO: 25883 - protein, 9 aa, Artificial Sequence
  Description of Artificial Sequence: Synthetic peptide
  Seed: FSARSALIL
FHARSALIY

SEQ ID NO: 25884 - protein, 9 aa, Artificial Sequence
  Description of Artificial Sequence: Synthetic peptide
  Seed: FSARSALIL
FHARSALIW

SEQ ID NO: 25885 - protein, 9 aa, Artificial Sequence
  Description of Artificial Sequence: Synthetic peptide
  Seed: FSARSALIL
FHARSALIF

SEQ ID NO: 25886 - protein, 9 aa, Artificial Sequence
  Description of Artificial Sequence: Synthetic peptide
  Seed: FSARSALIL
FQARSALIY

SEQ ID NO: 25887 - protein, 9 aa, Artificial Sequence
  Description of Artificial Sequence: Synthetic peptide
  Seed: FSARSALIL
FQARSALIV

SEQ ID NO: 25888 - protein, 9 aa, Artificial Sequence
  Description of Artificial Sequence: Synthetic peptide
  Seed: FSARSALIL
FEARSALIH

SEQ ID NO: 25889 - protein, 9 aa, Artificial Sequence
  Description of Artificial Sequence: Synthetic peptide
  Seed: FSARSALIL
FEARSALII

SEQ ID NO: 25890 - protein, 9 aa, Artificial Sequence
  Description of Artificial Sequence: Synthetic peptide
  Seed: FSARSALIL
FEARSALIL

SEQ ID NO: 25891 - protein, 9 aa, Artificial Sequence
  Description of Artificial Sequence: Synthetic peptide
  Seed: FSARSALIL
FEARSALIM

SEQ ID NO: 25892 - protein, 9 aa, Artificial Sequence
  Description of Artificial Sequence: Synthetic peptide
  Seed: FSARSALIL
FEARSALIF

SEQ ID NO: 25893 - protein, 9 aa, Artificial Sequence
  Description of Artificial Sequence: Synthetic peptide
  Seed: FSARSALIL
FEARSALIW

SEQ ID NO: 25894 - protein, 9 aa, Artificial Sequence
  Description of Artificial Sequence: Synthetic peptide
  Seed: FSARSALIL
FEARSALIY

SEQ ID NO: 25895 - protein, 9 aa, Artificial Sequence
  Description of Artificial Sequence: Synthetic peptide
  Seed: FSARSALIL
FGARSALII

SEQ ID NO: 25896 - protein, 9 aa, Artificial Sequence
  Description of Artificial Sequence: Synthetic peptide
  Seed: FSARSALIL
FGARSALIL

SEQ ID NO: 25897 - protein, 9 aa, Artificial Sequence
  Description of Artificial Sequence: Synthetic peptide
  Seed: FSARSALIL
FGARSALIM

SEQ ID NO: 25898 - protein, 9 aa, Artificial Sequence
  Description of Artificial Sequence: Synthetic peptide
  Seed: FSARSALIL
FGARSALIF

SEQ ID NO: 25899 - protein, 9 aa, Artificial Sequence
  Description of Artificial Sequence: Synthetic peptide
  Seed: FSARSALIL
FGARSALIY

SEQ ID NO: 25900 - protein, 9 aa, Artificial Sequence
  Description of Artificial Sequence: Synthetic peptide
  Seed: FSARSALIL
FGARSALIV

SEQ ID NO: 25901 - protein, 9 aa, Artificial Sequence
  Description of Artificial Sequence: Synthetic peptide
  Seed: FSARSALIL
FHARSALIH

SEQ ID NO: 25902 - protein, 9 aa, Artificial Sequence
  Description of Artificial Sequence: Synthetic peptide
  Seed: FSARSALIL
FHARSALII

SEQ ID NO: 25903 - protein, 9 aa, Artificial Sequence
  Description of Artificial Sequence: Synthetic peptide
  Seed: FSARSALIL
FHARSALIL

SEQ ID NO: 25904 - protein, 9 aa, Artificial Sequence
  Description of Artificial Sequence: Synthetic peptide
  Seed: FSARSALIL
FHARSALIM

SEQ ID NO: 25905 - protein, 9 aa, Artificial Sequence
  Description of Artificial Sequence: Synthetic peptide
  Seed: FSARSALIL
FKARSALIH

SEQ ID NO: 25906 - protein, 9 aa, Artificial Sequence
  Description of Artificial Sequence: Synthetic peptide
  Seed: FSARSALIL
FKARSALIL

SEQ ID NO: 25907 - protein, 9 aa, Artificial Sequence
  Description of Artificial Sequence: Synthetic peptide
  Seed: FSARSALIL
FTARSALIM

SEQ ID NO: 25908 - protein, 9 aa, Artificial Sequence
  Description of Artificial Sequence: Synthetic peptide
  Seed: FSARSALIL
FSARSALIA

SEQ ID NO: 25909 - protein, 9 aa, Artificial Sequence
  Description of Artificial Sequence: Synthetic peptide
  Seed: FSARSALIL
FPARSALII

SEQ ID NO: 25910 - protein, 9 aa, Artificial Sequence
  Description of Artificial Sequence: Synthetic peptide
  Seed: FSARSALIL
FPARSALIL

SEQ ID NO: 25911 - protein, 9 aa, Artificial Sequence
  Description of Artificial Sequence: Synthetic peptide
  Seed: FSARSALIL
FPARSALIM

SEQ ID NO: 25912 - protein, 9 aa, Artificial Sequence
  Description of Artificial Sequence: Synthetic peptide
  Seed: FSARSALIL
FPARSALIF

SEQ ID NO: 25913 - protein, 9 aa, Artificial Sequence
  Description of Artificial Sequence: Synthetic peptide
  Seed: FSARSALIL
FPARSALIS

SEQ ID NO: 25914 - protein, 9 aa, Artificial Sequence
  Description of Artificial Sequence: Synthetic peptide
  Seed: FSARSALIL
FPARSALIT

SEQ ID NO: 25915 - protein, 9 aa, Artificial Sequence
  Description of Artificial Sequence: Synthetic peptide
  Seed: FSARSALIL
FPARSALIW

SEQ ID NO: 25916 - protein, 9 aa, Artificial Sequence
  Description of Artificial Sequence: Synthetic peptide
  Seed: FSARSALIL
FPARSALIY

SEQ ID NO: 25917 - protein, 9 aa, Artificial Sequence
  Description of Artificial Sequence: Synthetic peptide
  Seed: FSARSALIL
FPARSALIV

SEQ ID NO: 25918 - protein, 9 aa, Artificial Sequence
  Description of Artificial Sequence: Synthetic peptide
  Seed: FSARSALIL
FSARSALIH

SEQ ID NO: 25919 - protein, 9 aa, Artificial Sequence
  Description of Artificial Sequence: Synthetic peptide
  Seed: FSARSALIL
FKARSALIM

SEQ ID NO: 25920 - protein, 9 aa, Artificial Sequence
  Description of Artificial Sequence: Synthetic peptide
  Seed: FSARSALIL
FSARSALII

SEQ ID NO: 25921 - protein, 9 aa, Artificial Sequence
  Description of Artificial Sequence: Synthetic peptide
  Seed: FSARSALIL
FSARSALIM

SEQ ID NO: 25922 - protein, 9 aa, Artificial Sequence
  Description of Artificial Sequence: Synthetic peptide
  Seed: FSARSALIL
FSARSALIF

SEQ ID NO: 25923 - protein, 9 aa, Artificial Sequence
  Description of Artificial Sequence: Synthetic peptide
  Seed: FSARSALIL
FSARSALIW

SEQ ID NO: 25924 - protein, 9 aa, Artificial Sequence
  Description of Artificial Sequence: Synthetic peptide
  Seed: FSARSALIL
FSARSALIY

SEQ ID NO: 25925 - protein, 9 aa, Artificial Sequence
  Description of Artificial Sequence: Synthetic peptide
  Seed: FSARSALIL
FSARSALIV

SEQ ID NO: 25926 - protein, 9 aa, Artificial Sequence
  Description of Artificial Sequence: Synthetic peptide
  Seed: FSARSALIL
FTARSALIH

SEQ ID NO: 25927 - protein, 9 aa, Artificial Sequence
  Description of Artificial Sequence: Synthetic peptide
  Seed: FSARSALIL
FTARSALII

SEQ ID NO: 25928 - protein, 9 aa, Artificial Sequence
  Description of Artificial Sequence: Synthetic peptide
  Seed: FSARSALIL
FTARSALIL

SEQ ID NO: 25929 - protein, 9 aa, Artificial Sequence
  Description of Artificial Sequence: Synthetic peptide
  Seed: FSARSALIL
FPARSALIG

SEQ ID NO: 25930 - protein, 9 aa, Artificial Sequence
  Description of Artificial Sequence: Synthetic peptide
  Seed: FSARSALIL
FPARSALIC

SEQ ID NO: 25931 - protein, 9 aa, Artificial Sequence
  Description of Artificial Sequence: Synthetic peptide
  Seed: FSARSALIL
FPARSALIA

SEQ ID NO: 25932 - protein, 9 aa, Artificial Sequence
  Description of Artificial Sequence: Synthetic peptide
  Seed: FSARSALIL
FFARSALIY

SEQ ID NO: 25933 - protein, 9 aa, Artificial Sequence
  Description of Artificial Sequence: Synthetic peptide
  Seed: FSARSALIL
FKARSALIF

SEQ ID NO: 25934 - protein, 9 aa, Artificial Sequence
  Description of Artificial Sequence: Synthetic peptide
  Seed: FSARSALIL
FKARSALIW

SEQ ID NO: 25935 - protein, 9 aa, Artificial Sequence
  Description of Artificial Sequence: Synthetic peptide
  Seed: FSARSALIL
FKARSALIY

SEQ ID NO: 25936 - protein, 9 aa, Artificial Sequence
  Description of Artificial Sequence: Synthetic peptide
  Seed: FSARSALIL
FKARSALIV

SEQ ID NO: 25937 - protein, 9 aa, Artificial Sequence
  Description of Artificial Sequence: Synthetic peptide
  Seed: FSARSALIL
FMARSALIA

SEQ ID NO: 25938 - protein, 9 aa, Artificial Sequence
  Description of Artificial Sequence: Synthetic peptide
  Seed: FSARSALIL
FMARSALIG

SEQ ID NO: 25939 - protein, 9 aa, Artificial Sequence
  Description of Artificial Sequence: Synthetic peptide
  Seed: FSARSALIL
FMARSALIH

SEQ ID NO: 25940 - protein, 9 aa, Artificial Sequence
  Description of Artificial Sequence: Synthetic peptide
  Seed: FSARSALIL
FMARSALII

SEQ ID NO: 25941 - protein, 9 aa, Artificial Sequence
  Description of Artificial Sequence: Synthetic peptide
  Seed: FSARSALIL
FMARSALIL

SEQ ID NO: 25942 - protein, 9 aa, Artificial Sequence
  Description of Artificial Sequence: Synthetic peptide
  Seed: FSARSALIL
FMARSALIM

SEQ ID NO: 25943 - protein, 9 aa, Artificial Sequence
  Description of Artificial Sequence: Synthetic peptide
  Seed: FSARSALIL
FMARSALIF

SEQ ID NO: 25944 - protein, 9 aa, Artificial Sequence
  Description of Artificial Sequence: Synthetic peptide
  Seed: FSARSALIL
FMARSALIS

SEQ ID NO: 25945 - protein, 9 aa, Artificial Sequence
  Description of Artificial Sequence: Synthetic peptide
  Seed: FSARSALIL
FMARSALIT

SEQ ID NO: 25946 - protein, 9 aa, Artificial Sequence
  Description of Artificial Sequence: Synthetic peptide
  Seed: FSARSALIL
FMARSALIW

SEQ ID NO: 25947 - protein, 9 aa, Artificial Sequence
  Description of Artificial Sequence: Synthetic peptide
  Seed: FSARSALIL
FMARSALIY

SEQ ID NO: 25948 - protein, 9 aa, Artificial Sequence
  Description of Artificial Sequence: Synthetic peptide
  Seed: FSARSALIL
FMARSALIV

SEQ ID NO: 25949 - protein, 9 aa, Artificial Sequence
  Description of Artificial Sequence: Synthetic peptide
  Seed: FSARSALIL
FFARSALIL

SEQ ID NO: 25950 - protein, 9 aa, Artificial Sequence
  Description of Artificial Sequence: Synthetic peptide
  Seed: FSARSALIL
FFARSALIM

SEQ ID NO: 25951 - protein, 9 aa, Artificial Sequence
  Description of Artificial Sequence: Synthetic peptide
  Seed: FSARSALIL
FFARSALIF

SEQ ID NO: 25952 - protein, 10 aa, Artificial Sequence
  Description of Artificial Sequence: Synthetic peptide
  Seed: FSARSALILR
FMARSALILH

SEQ ID NO: 25953 - protein, 10 aa, Artificial Sequence
  Description of Artificial Sequence: Synthetic peptide
  Seed: FSARSALILR
FMARSALILI

SEQ ID NO: 25954 - protein, 10 aa, Artificial Sequence
  Description of Artificial Sequence: Synthetic peptide
  Seed: FSARSALILR
FMARSALILL

SEQ ID NO: 25955 - protein, 9 aa, Artificial Sequence
  Description of Artificial Sequence: Synthetic peptide
  Seed: FSVQRNLPF
FIVQRNLPL

SEQ ID NO: 25956 - protein, 9 aa, Artificial Sequence
  Description of Artificial Sequence: Synthetic peptide
  Seed: FSVQRNLPF
FHVQRNLPL

SEQ ID NO: 25957 - protein, 9 aa, Artificial Sequence
  Description of Artificial Sequence: Synthetic peptide
  Seed: FSVQRNLPF
FHVQRNLPM

SEQ ID NO: 25958 - protein, 9 aa, Artificial Sequence
  Description of Artificial Sequence: Synthetic peptide
  Seed: FSVQRNLPF
FHVQRNLPF

SEQ ID NO: 25959 - protein, 9 aa, Artificial Sequence
  Description of Artificial Sequence: Synthetic peptide
  Seed: FSVQRNLPF
FHVQRNLPW

SEQ ID NO: 25960 - protein, 9 aa, Artificial Sequence
  Description of Artificial Sequence: Synthetic peptide
  Seed: FSVQRNLPF
FHVQRNLPY

SEQ ID NO: 25961 - protein, 9 aa, Artificial Sequence
  Description of Artificial Sequence: Synthetic peptide
  Seed: FSVQRNLPF
FHVQRNLPV

SEQ ID NO: 25962 - protein, 9 aa, Artificial Sequence
  Description of Artificial Sequence: Synthetic peptide
  Seed: FSVQRNLPF
FIVQRNLPA

SEQ ID NO: 25963 - protein, 9 aa, Artificial Sequence
  Description of Artificial Sequence: Synthetic peptide
  Seed: FSVQRNLPF
FIVQRNLPH

SEQ ID NO: 25964 - protein, 9 aa, Artificial Sequence
  Description of Artificial Sequence: Synthetic peptide
  Seed: FSVQRNLPF
FIVQRNLPI

SEQ ID NO: 25965 - protein, 9 aa, Artificial Sequence
  Description of Artificial Sequence: Synthetic peptide
  Seed: FSVQRNLPF
FIVQRNLPM

SEQ ID NO: 25966 - protein, 9 aa, Artificial Sequence
  Description of Artificial Sequence: Synthetic peptide
  Seed: FSVQRNLPF
FLVQRNLPY

SEQ ID NO: 25967 - protein, 9 aa, Artificial Sequence
  Description of Artificial Sequence: Synthetic peptide
  Seed: FSVQRNLPF
FIVQRNLPF

SEQ ID NO: 25968 - protein, 9 aa, Artificial Sequence
  Description of Artificial Sequence: Synthetic peptide
  Seed: FSVQRNLPF
FIVQRNLPW

SEQ ID NO: 25969 - protein, 9 aa, Artificial Sequence
  Description of Artificial Sequence: Synthetic peptide
  Seed: FSVQRNLPF
FIVQRNLPY

SEQ ID NO: 25970 - protein, 9 aa, Artificial Sequence
  Description of Artificial Sequence: Synthetic peptide
  Seed: FSVQRNLPF
FIVQRNLPV

SEQ ID NO: 25971 - protein, 9 aa, Artificial Sequence
  Description of Artificial Sequence: Synthetic peptide
  Seed: FSVQRNLPF
FLVQRNLPH

SEQ ID NO: 25972 - protein, 9 aa, Artificial Sequence
  Description of Artificial Sequence: Synthetic peptide
  Seed: FSVQRNLPF
FLVQRNLPI

SEQ ID NO: 25973 - protein, 9 aa, Artificial Sequence
  Description of Artificial Sequence: Synthetic peptide
  Seed: FSVQRNLPF
FLVQRNLPL

SEQ ID NO: 25974 - protein, 9 aa, Artificial Sequence
  Description of Artificial Sequence: Synthetic peptide
  Seed: FSVQRNLPF
FLVQRNLPM

SEQ ID NO: 25975 - protein, 9 aa, Artificial Sequence
  Description of Artificial Sequence: Synthetic peptide
  Seed: FSVQRNLPF
FLVQRNLPF

SEQ ID NO: 25976 - protein, 9 aa, Artificial Sequence
  Description of Artificial Sequence: Synthetic peptide
  Seed: FSVQRNLPF
FHVQRNLPI

SEQ ID NO: 25977 - protein, 9 aa, Artificial Sequence
  Description of Artificial Sequence: Synthetic peptide
  Seed: FSVQRNLPF
FHVQRNLPH

SEQ ID NO: 25978 - protein, 9 aa, Artificial Sequence
  Description of Artificial Sequence: Synthetic peptide
  Seed: FSVQRNLPF
FGVQRNLPV

SEQ ID NO: 25979 - protein, 9 aa, Artificial Sequence
  Description of Artificial Sequence: Synthetic peptide
  Seed: FSVQRNLPF
FGVQRNLPY

SEQ ID NO: 25980 - protein, 9 aa, Artificial Sequence
  Description of Artificial Sequence: Synthetic peptide
  Seed: FSVQRNLPF
FQVQRNLPP

SEQ ID NO: 25981 - protein, 9 aa, Artificial Sequence
  Description of Artificial Sequence: Synthetic peptide
  Seed: FSVQRNLPF
FQVQRNLPS

SEQ ID NO: 25982 - protein, 9 aa, Artificial Sequence
  Description of Artificial Sequence: Synthetic peptide
  Seed: FSVQRNLPF
FQVQRNLPT

SEQ ID NO: 25983 - protein, 9 aa, Artificial Sequence
  Description of Artificial Sequence: Synthetic peptide
  Seed: FSVQRNLPF
FQVQRNLPW

SEQ ID NO: 25984 - protein, 9 aa, Artificial Sequence
  Description of Artificial Sequence: Synthetic peptide
  Seed: FSVQRNLPF
FQVQRNLPY

SEQ ID NO: 25985 - protein, 9 aa, Artificial Sequence
  Description of Artificial Sequence: Synthetic peptide
  Seed: FSVQRNLPF
FQVQRNLPV

SEQ ID NO: 25986 - protein, 9 aa, Artificial Sequence
  Description of Artificial Sequence: Synthetic peptide
  Seed: FSVQRNLPF
FEVQRNLPH

SEQ ID NO: 25987 - protein, 9 aa, Artificial Sequence
  Description of Artificial Sequence: Synthetic peptide
  Seed: FSVQRNLPF
FEVQRNLPI

SEQ ID NO: 25988 - protein, 9 aa, Artificial Sequence
  Description of Artificial Sequence: Synthetic peptide
  Seed: FSVQRNLPF
FEVQRNLPL

SEQ ID NO: 25989 - protein, 9 aa, Artificial Sequence
  Description of Artificial Sequence: Synthetic peptide
  Seed: FSVQRNLPF
FEVQRNLPM

SEQ ID NO: 25990 - protein, 9 aa, Artificial Sequence
  Description of Artificial Sequence: Synthetic peptide
  Seed: FSVQRNLPF
FEVQRNLPF

SEQ ID NO: 25991 - protein, 9 aa, Artificial Sequence
  Description of Artificial Sequence: Synthetic peptide
  Seed: FSVQRNLPF
FEVQRNLPW

SEQ ID NO: 25992 - protein, 9 aa, Artificial Sequence
  Description of Artificial Sequence: Synthetic peptide
  Seed: FSVQRNLPF
FEVQRNLPY

SEQ ID NO: 25993 - protein, 9 aa, Artificial Sequence
  Description of Artificial Sequence: Synthetic peptide
  Seed: FSVQRNLPF
FEVQRNLPV

SEQ ID NO: 25994 - protein, 9 aa, Artificial Sequence
  Description of Artificial Sequence: Synthetic peptide
  Seed: FSVQRNLPF
FGVQRNLPI

SEQ ID NO: 25995 - protein, 9 aa, Artificial Sequence
  Description of Artificial Sequence: Synthetic peptide
  Seed: FSVQRNLPF
FGVQRNLPL

SEQ ID NO: 25996 - protein, 9 aa, Artificial Sequence
  Description of Artificial Sequence: Synthetic peptide
  Seed: FSVQRNLPF
FGVQRNLPM

SEQ ID NO: 25997 - protein, 9 aa, Artificial Sequence
  Description of Artificial Sequence: Synthetic peptide
  Seed: FSVQRNLPF
FGVQRNLPF

SEQ ID NO: 25998 - protein, 9 aa, Artificial Sequence
  Description of Artificial Sequence: Synthetic peptide
  Seed: FSVQRNLPF
FGVQRNLPW

SEQ ID NO: 25999 - protein, 9 aa, Artificial Sequence
  Description of Artificial Sequence: Synthetic peptide
  Seed: FSVQRNLPF
FLVQRNLPW

SEQ ID NO: 26000 - protein, 9 aa, Artificial Sequence
  Description of Artificial Sequence: Synthetic peptide
  Seed: FSVQRNLPF
FLVQRNLPV

SEQ ID NO: 26001 - protein, 10 aa, Artificial Sequence
  Description of Artificial Sequence: Synthetic peptide
  Seed: FSARSALILR
FMARSALILK

SEQ ID NO: 26002 - protein, 9 aa, Artificial Sequence
  Description of Artificial Sequence: Synthetic peptide
  Seed: FSVQRNLPF
FFVQRNLPY

SEQ ID NO: 26003 - protein, 9 aa, Artificial Sequence
  Description of Artificial Sequence: Synthetic peptide
  Seed: FSVQRNLPF
FFVQRNLPG

SEQ ID NO: 26004 - protein, 9 aa, Artificial Sequence
  Description of Artificial Sequence: Synthetic peptide
  Seed: FSVQRNLPF
FFVQRNLPH

SEQ ID NO: 26005 - protein, 9 aa, Artificial Sequence
  Description of Artificial Sequence: Synthetic peptide
  Seed: FSVQRNLPF
FFVQRNLPI

SEQ ID NO: 26006 - protein, 9 aa, Artificial Sequence
  Description of Artificial Sequence: Synthetic peptide
  Seed: FSVQRNLPF
FFVQRNLPL

SEQ ID NO: 26007 - protein, 9 aa, Artificial Sequence
  Description of Artificial Sequence: Synthetic peptide
  Seed: FSVQRNLPF
FFVQRNLPM

SEQ ID NO: 26008 - protein, 9 aa, Artificial Sequence
  Description of Artificial Sequence: Synthetic peptide
  Seed: FSVQRNLPF
FFVQRNLPF

SEQ ID NO: 26009 - protein, 9 aa, Artificial Sequence
  Description of Artificial Sequence: Synthetic peptide
  Seed: FSVQRNLPF
FFVQRNLPS

SEQ ID NO: 26010 - protein, 9 aa, Artificial Sequence
  Description of Artificial Sequence: Synthetic peptide
  Seed: FSVQRNLPF
FFVQRNLPT

SEQ ID NO: 26011 - protein, 9 aa, Artificial Sequence
  Description of Artificial Sequence: Synthetic peptide
  Seed: FSVQRNLPF
FFVQRNLPW

SEQ ID NO: 26012 - protein, 9 aa, Artificial Sequence
  Description of Artificial Sequence: Synthetic peptide
  Seed: FSVQRNLPF
FFVQRNLPV

SEQ ID NO: 26013 - protein, 9 aa, Artificial Sequence
  Description of Artificial Sequence: Synthetic peptide
  Seed: FSVQRNLPF
FKVQRNLPA

SEQ ID NO: 26014 - protein, 9 aa, Artificial Sequence
  Description of Artificial Sequence: Synthetic peptide
  Seed: FSVQRNLPF
FPVQRNLPA

SEQ ID NO: 26015 - protein, 9 aa, Artificial Sequence
  Description of Artificial Sequence: Synthetic peptide
  Seed: FSVQRNLPF
FPVQRNLPR

SEQ ID NO: 26016 - protein, 9 aa, Artificial Sequence
  Description of Artificial Sequence: Synthetic peptide
  Seed: FSVQRNLPF
FPVQRNLPN

SEQ ID NO: 26017 - protein, 9 aa, Artificial Sequence
  Description of Artificial Sequence: Synthetic peptide
  Seed: FSVQRNLPF
FPVQRNLPD

SEQ ID NO: 26018 - protein, 9 aa, Artificial Sequence
  Description of Artificial Sequence: Synthetic peptide
  Seed: FSVQRNLPF
FPVQRNLPC

SEQ ID NO: 26019 - protein, 9 aa, Artificial Sequence
  Description of Artificial Sequence: Synthetic peptide
  Seed: FSVQRNLPF
FPVQRNLPQ

SEQ ID NO: 26020 - protein, 9 aa, Artificial Sequence
  Description of Artificial Sequence: Synthetic peptide
  Seed: FSVQRNLPF
FPVQRNLPE

SEQ ID NO: 26021 - protein, 9 aa, Artificial Sequence
  Description of Artificial Sequence: Synthetic peptide
  Seed: FSVQRNLPF
FPVQRNLPG

SEQ ID NO: 26022 - protein, 9 aa, Artificial Sequence
  Description of Artificial Sequence: Synthetic peptide
  Seed: FSVQRNLPF
FPVQRNLPH

SEQ ID NO: 26023 - protein, 9 aa, Artificial Sequence
  Description of Artificial Sequence: Synthetic peptide
  Seed: FSVQRNLPF
FFVQRNLPQ

SEQ ID NO: 26024 - protein, 9 aa, Artificial Sequence
  Description of Artificial Sequence: Synthetic peptide
  Seed: FSVQRNLPF
FFVQRNLPC

SEQ ID NO: 26025 - protein, 9 aa, Artificial Sequence
  Description of Artificial Sequence: Synthetic peptide
  Seed: FSVQRNLPF
FFVQRNLPA

SEQ ID NO: 26026 - protein, 9 aa, Artificial Sequence
  Description of Artificial Sequence: Synthetic peptide
  Seed: FSVQRNLPF
FMVQRNLPV

SEQ ID NO: 26027 - protein, 9 aa, Artificial Sequence
  Description of Artificial Sequence: Synthetic peptide
  Seed: FSVQRNLPF
FKVQRNLPH

SEQ ID NO: 26028 - protein, 9 aa, Artificial Sequence
  Description of Artificial Sequence: Synthetic peptide
  Seed: FSVQRNLPF
FKVQRNLPI

SEQ ID NO: 26029 - protein, 9 aa, Artificial Sequence
  Description of Artificial Sequence: Synthetic peptide
  Seed: FSVQRNLPF
FKVQRNLPL

SEQ ID NO: 26030 - protein, 9 aa, Artificial Sequence
  Description of Artificial Sequence: Synthetic peptide
  Seed: FSVQRNLPF
FKVQRNLPM

SEQ ID NO: 26031 - protein, 9 aa, Artificial Sequence
  Description of Artificial Sequence: Synthetic peptide
  Seed: FSVQRNLPF
FKVQRNLPF

SEQ ID NO: 26032 - protein, 9 aa, Artificial Sequence
  Description of Artificial Sequence: Synthetic peptide
  Seed: FSVQRNLPF
FKVQRNLPW

SEQ ID NO: 26033 - protein, 9 aa, Artificial Sequence
  Description of Artificial Sequence: Synthetic peptide
  Seed: FSVQRNLPF
FKVQRNLPY

SEQ ID NO: 26034 - protein, 9 aa, Artificial Sequence
  Description of Artificial Sequence: Synthetic peptide
  Seed: FSVQRNLPF
FKVQRNLPV

SEQ ID NO: 26035 - protein, 9 aa, Artificial Sequence
  Description of Artificial Sequence: Synthetic peptide
  Seed: FSVQRNLPF
FMVQRNLPA

SEQ ID NO: 26036 - protein, 9 aa, Artificial Sequence
  Description of Artificial Sequence: Synthetic peptide
  Seed: FSVQRNLPF
FMVQRNLPG

SEQ ID NO: 26037 - protein, 9 aa, Artificial Sequence
  Description of Artificial Sequence: Synthetic peptide
  Seed: FSVQRNLPF
FMVQRNLPH

SEQ ID NO: 26038 - protein, 9 aa, Artificial Sequence
  Description of Artificial Sequence: Synthetic peptide
  Seed: FSVQRNLPF
FMVQRNLPI

SEQ ID NO: 26039 - protein, 9 aa, Artificial Sequence
  Description of Artificial Sequence: Synthetic peptide
  Seed: FSVQRNLPF
FMVQRNLPL

SEQ ID NO: 26040 - protein, 9 aa, Artificial Sequence
  Description of Artificial Sequence: Synthetic peptide
  Seed: FSVQRNLPF
FMVQRNLPM

SEQ ID NO: 26041 - protein, 9 aa, Artificial Sequence
  Description of Artificial Sequence: Synthetic peptide
  Seed: FSVQRNLPF
FMVQRNLPF

SEQ ID NO: 26042 - protein, 9 aa, Artificial Sequence
  Description of Artificial Sequence: Synthetic peptide
  Seed: FSVQRNLPF
FMVQRNLPS

SEQ ID NO: 26043 - protein, 9 aa, Artificial Sequence
  Description of Artificial Sequence: Synthetic peptide
  Seed: FSVQRNLPF
FMVQRNLPT

SEQ ID NO: 26044 - protein, 9 aa, Artificial Sequence
  Description of Artificial Sequence: Synthetic peptide
  Seed: FSVQRNLPF
FMVQRNLPW

SEQ ID NO: 26045 - protein, 9 aa, Artificial Sequence
  Description of Artificial Sequence: Synthetic peptide
  Seed: FSVQRNLPF
FMVQRNLPY

SEQ ID NO: 26046 - protein, 9 aa, Artificial Sequence
  Description of Artificial Sequence: Synthetic peptide
  Seed: FSVQRNLPF
FQVQRNLPF

SEQ ID NO: 26047 - protein, 9 aa, Artificial Sequence
  Description of Artificial Sequence: Synthetic peptide
  Seed: FSVQRNLPF
FQVQRNLPM

SEQ ID NO: 26048 - protein, 9 aa, Artificial Sequence
  Description of Artificial Sequence: Synthetic peptide
  Seed: FSVQRNLPF
FQVQRNLPL

SEQ ID NO: 26049 - protein, 10 aa, Artificial Sequence
  Description of Artificial Sequence: Synthetic peptide
  Seed: FSARSALILR
FYARSALILK

SEQ ID NO: 26050 - protein, 10 aa, Artificial Sequence
  Description of Artificial Sequence: Synthetic peptide
  Seed: FSARSALILR
FTARSALILL

SEQ ID NO: 26051 - protein, 10 aa, Artificial Sequence
  Description of Artificial Sequence: Synthetic peptide
  Seed: FSARSALILR
FTARSALILK

SEQ ID NO: 26052 - protein, 10 aa, Artificial Sequence
  Description of Artificial Sequence: Synthetic peptide
  Seed: FSARSALILR
FTARSALILM

SEQ ID NO: 26053 - protein, 10 aa, Artificial Sequence
  Description of Artificial Sequence: Synthetic peptide
  Seed: FSARSALILR
FTARSALILY

SEQ ID NO: 26054 - protein, 10 aa, Artificial Sequence
  Description of Artificial Sequence: Synthetic peptide
  Seed: FSARSALILR
FTARSALILV

SEQ ID NO: 26055 - protein, 10 aa, Artificial Sequence
  Description of Artificial Sequence: Synthetic peptide
  Seed: FSARSALILR
FWARSALILR

SEQ ID NO: 26056 - protein, 10 aa, Artificial Sequence
  Description of Artificial Sequence: Synthetic peptide
  Seed: FSARSALILR
FWARSALILK

SEQ ID NO: 26057 - protein, 10 aa, Artificial Sequence
  Description of Artificial Sequence: Synthetic peptide
  Seed: FSARSALILR
FWARSALILV

SEQ ID NO: 26058 - protein, 10 aa, Artificial Sequence
  Description of Artificial Sequence: Synthetic peptide
  Seed: FSARSALILR
FYARSALILR

SEQ ID NO: 26059 - protein, 10 aa, Artificial Sequence
  Description of Artificial Sequence: Synthetic peptide
  Seed: FSARSALILR
FYARSALILV

SEQ ID NO: 26060 - protein, 9 aa, Artificial Sequence
  Description of Artificial Sequence: Synthetic peptide
  Seed: FSVQRNLPF
FQVQRNLPI

SEQ ID NO: 26061 - protein, 10 aa, Artificial Sequence
  Description of Artificial Sequence: Synthetic peptide
  Seed: FSARSALILR
FVARSALILA

SEQ ID NO: 26062 - protein, 10 aa, Artificial Sequence
  Description of Artificial Sequence: Synthetic peptide
  Seed: FSARSALILR
FVARSALILR

SEQ ID NO: 26063 - protein, 10 aa, Artificial Sequence
  Description of Artificial Sequence: Synthetic peptide
  Seed: FSARSALILR
FVARSALILI

SEQ ID NO: 26064 - protein, 10 aa, Artificial Sequence
  Description of Artificial Sequence: Synthetic peptide
  Seed: FSARSALILR
FVARSALILL

SEQ ID NO: 26065 - protein, 10 aa, Artificial Sequence
  Description of Artificial Sequence: Synthetic peptide
  Seed: FSARSALILR
FVARSALILK

SEQ ID NO: 26066 - protein, 10 aa, Artificial Sequence
  Description of Artificial Sequence: Synthetic peptide
  Seed: FSARSALILR
FVARSALILM

SEQ ID NO: 26067 - protein, 10 aa, Artificial Sequence
  Description of Artificial Sequence: Synthetic peptide
  Seed: FSARSALILR
FVARSALILT

SEQ ID NO: 26068 - protein, 10 aa, Artificial Sequence
  Description of Artificial Sequence: Synthetic peptide
  Seed: FSARSALILR
FVARSALILY

SEQ ID NO: 26069 - protein, 10 aa, Artificial Sequence
  Description of Artificial Sequence: Synthetic peptide
  Seed: FSARSALILR
FVARSALILV

SEQ ID NO: 26070 - protein, 10 aa, Artificial Sequence
  Description of Artificial Sequence: Synthetic peptide
  Seed: FSARSALILR
FTARSALILI

SEQ ID NO: 26071 - protein, 10 aa, Artificial Sequence
  Description of Artificial Sequence: Synthetic peptide
  Seed: FSARSALILR
FTARSALILR

SEQ ID NO: 26072 - protein, 10 aa, Artificial Sequence
  Description of Artificial Sequence: Synthetic peptide
  Seed: FSARSALILR
FTARSALILA

SEQ ID NO: 26073 - protein, 10 aa, Artificial Sequence
  Description of Artificial Sequence: Synthetic peptide
  Seed: FSARSALILR
FSARSALILV

SEQ ID NO: 26074 - protein, 10 aa, Artificial Sequence
  Description of Artificial Sequence: Synthetic peptide
  Seed: FSARSALILR
FMARSALILM

SEQ ID NO: 26075 - protein, 10 aa, Artificial Sequence
  Description of Artificial Sequence: Synthetic peptide
  Seed: FSARSALILR
FMARSALILF

SEQ ID NO: 26076 - protein, 10 aa, Artificial Sequence
  Description of Artificial Sequence: Synthetic peptide
  Seed: FSARSALILR
FMARSALILP

SEQ ID NO: 26077 - protein, 10 aa, Artificial Sequence
  Description of Artificial Sequence: Synthetic peptide
  Seed: FSARSALILR
FMARSALILS

SEQ ID NO: 26078 - protein, 10 aa, Artificial Sequence
  Description of Artificial Sequence: Synthetic peptide
  Seed: FSARSALILR
FMARSALILT

SEQ ID NO: 26079 - protein, 10 aa, Artificial Sequence
  Description of Artificial Sequence: Synthetic peptide
  Seed: FSARSALILR
FMARSALILW

SEQ ID NO: 26080 - protein, 10 aa, Artificial Sequence
  Description of Artificial Sequence: Synthetic peptide
  Seed: FSARSALILR
FMARSALILY

SEQ ID NO: 26081 - protein, 10 aa, Artificial Sequence
  Description of Artificial Sequence: Synthetic peptide
  Seed: FSARSALILR
FMARSALILV

SEQ ID NO: 26082 - protein, 10 aa, Artificial Sequence
  Description of Artificial Sequence: Synthetic peptide
  Seed: FSARSALILR
FFARSALILR

SEQ ID NO: 26083 - protein, 10 aa, Artificial Sequence
  Description of Artificial Sequence: Synthetic peptide
  Seed: FSARSALILR
FFARSALILL

SEQ ID NO: 26084 - protein, 10 aa, Artificial Sequence
  Description of Artificial Sequence: Synthetic peptide
  Seed: FSARSALILR
FFARSALILK

SEQ ID NO: 26085 - protein, 10 aa, Artificial Sequence
  Description of Artificial Sequence: Synthetic peptide
  Seed: FSARSALILR
FFARSALILV

SEQ ID NO: 26086 - protein, 10 aa, Artificial Sequence
  Description of Artificial Sequence: Synthetic peptide
  Seed: FSARSALILR
FPARSALILR

SEQ ID NO: 26087 - protein, 10 aa, Artificial Sequence
  Description of Artificial Sequence: Synthetic peptide
  Seed: FSARSALILR
FPARSALILK

SEQ ID NO: 26088 - protein, 10 aa, Artificial Sequence
  Description of Artificial Sequence: Synthetic peptide
  Seed: FSARSALILR
FPARSALILV

SEQ ID NO: 26089 - protein, 10 aa, Artificial Sequence
  Description of Artificial Sequence: Synthetic peptide
  Seed: FSARSALILR
FSARSALILA

SEQ ID NO: 26090 - protein, 10 aa, Artificial Sequence
  Description of Artificial Sequence: Synthetic peptide
  Seed: FSARSALILR
FSARSALILI

SEQ ID NO: 26091 - protein, 10 aa, Artificial Sequence
  Description of Artificial Sequence: Synthetic peptide
  Seed: FSARSALILR
FSARSALILL

SEQ ID NO: 26092 - protein, 10 aa, Artificial Sequence
  Description of Artificial Sequence: Synthetic peptide
  Seed: FSARSALILR
FSARSALILK

SEQ ID NO: 26093 - protein, 9 aa, Artificial Sequence
  Description of Artificial Sequence: Synthetic peptide
  Seed: FSVQRNLPF
FAVQRNLPA

SEQ ID NO: 26094 - protein, 9 aa, Artificial Sequence
  Description of Artificial Sequence: Synthetic peptide
  Seed: FSVQRNLPF
FAVQRNLPN

SEQ ID NO: 26095 - protein, 9 aa, Artificial Sequence
  Description of Artificial Sequence: Synthetic peptide
  Seed: FSVQRNLPF
FAVQRNLPC

SEQ ID NO: 26096 - protein, 9 aa, Artificial Sequence
  Description of Artificial Sequence: Synthetic peptide
  Seed: FSVQRNLPF
FNVQRNLPL

SEQ ID NO: 26097 - protein, 9 aa, Artificial Sequence
  Description of Artificial Sequence: Synthetic peptide
  Seed: FSVQRNLPF
FNVQRNLPF

SEQ ID NO: 26098 - protein, 9 aa, Artificial Sequence
  Description of Artificial Sequence: Synthetic peptide
  Seed: FSVQRNLPF
FNVQRNLPW

SEQ ID NO: 26099 - protein, 9 aa, Artificial Sequence
  Description of Artificial Sequence: Synthetic peptide
  Seed: FSVQRNLPF
FNVQRNLPY

SEQ ID NO: 26100 - protein, 9 aa, Artificial Sequence
  Description of Artificial Sequence: Synthetic peptide
  Seed: FSVQRNLPF
FNVQRNLPV

SEQ ID NO: 26101 - protein, 9 aa, Artificial Sequence
  Description of Artificial Sequence: Synthetic peptide
  Seed: FSVQRNLPF
FDVQRNLPF

SEQ ID NO: 26102 - protein, 9 aa, Artificial Sequence
  Description of Artificial Sequence: Synthetic peptide
  Seed: FSVQRNLPF
FDVQRNLPY

SEQ ID NO: 26103 - protein, 9 aa, Artificial Sequence
  Description of Artificial Sequence: Synthetic peptide
  Seed: FSVQRNLPF
FCVQRNLPI

SEQ ID NO: 26104 - protein, 9 aa, Artificial Sequence
  Description of Artificial Sequence: Synthetic peptide
  Seed: FSVQRNLPF
FCVQRNLPL

SEQ ID NO: 26105 - protein, 9 aa, Artificial Sequence
  Description of Artificial Sequence: Synthetic peptide
  Seed: FSVQRNLPF
FCVQRNLPM

SEQ ID NO: 26106 - protein, 9 aa, Artificial Sequence
  Description of Artificial Sequence: Synthetic peptide
  Seed: FSVQRNLPF
FCVQRNLPF

SEQ ID NO: 26107 - protein, 9 aa, Artificial Sequence
  Description of Artificial Sequence: Synthetic peptide
  Seed: FSVQRNLPF
FCVQRNLPW

SEQ ID NO: 26108 - protein, 9 aa, Artificial Sequence
  Description of Artificial Sequence: Synthetic peptide
  Seed: FSVQRNLPF
FCVQRNLPY

SEQ ID NO: 26109 - protein, 9 aa, Artificial Sequence
  Description of Artificial Sequence: Synthetic peptide
  Seed: FSVQRNLPF
FCVQRNLPV

SEQ ID NO: 26110 - protein, 9 aa, Artificial Sequence
  Description of Artificial Sequence: Synthetic peptide
  Seed: FSVQRNLPF
FQVQRNLPA

SEQ ID NO: 26111 - protein, 9 aa, Artificial Sequence
  Description of Artificial Sequence: Synthetic peptide
  Seed: FSVQRNLPF
FQVQRNLPN

SEQ ID NO: 26112 - protein, 9 aa, Artificial Sequence
  Description of Artificial Sequence: Synthetic peptide
  Seed: FSVQRNLPF
FQVQRNLPC

SEQ ID NO: 26113 - protein, 9 aa, Artificial Sequence
  Description of Artificial Sequence: Synthetic peptide
  Seed: FSVQRNLPF
FQVQRNLPQ

SEQ ID NO: 26114 - protein, 9 aa, Artificial Sequence
  Description of Artificial Sequence: Synthetic peptide
  Seed: FSVQRNLPF
FQVQRNLPG

SEQ ID NO: 26115 - protein, 9 aa, Artificial Sequence
  Description of Artificial Sequence: Synthetic peptide
  Seed: FSVQRNLPF
FQVQRNLPH

SEQ ID NO: 26116 - protein, 9 aa, Artificial Sequence
  Description of Artificial Sequence: Synthetic peptide
  Seed: FSVQRNLPF
FNVQRNLPM

SEQ ID NO: 26117 - protein, 9 aa, Artificial Sequence
  Description of Artificial Sequence: Synthetic peptide
  Seed: FSVQRNLPF
FNVQRNLPI

SEQ ID NO: 26118 - protein, 9 aa, Artificial Sequence
  Description of Artificial Sequence: Synthetic peptide
  Seed: FSVQRNLPF
FAVQRNLPQ

SEQ ID NO: 26119 - protein, 9 aa, Artificial Sequence
  Description of Artificial Sequence: Synthetic peptide
  Seed: FSVQRNLPF
FRVQRNLPY

SEQ ID NO: 26120 - protein, 9 aa, Artificial Sequence
  Description of Artificial Sequence: Synthetic peptide
  Seed: FSVQRNLPF
FAVQRNLPE

SEQ ID NO: 26121 - protein, 9 aa, Artificial Sequence
  Description of Artificial Sequence: Synthetic peptide
  Seed: FSVQRNLPF
FAVQRNLPG

SEQ ID NO: 26122 - protein, 9 aa, Artificial Sequence
  Description of Artificial Sequence: Synthetic peptide
  Seed: FSVQRNLPF
FAVQRNLPH

SEQ ID NO: 26123 - protein, 9 aa, Artificial Sequence
  Description of Artificial Sequence: Synthetic peptide
  Seed: FSVQRNLPF
FAVQRNLPI

SEQ ID NO: 26124 - protein, 9 aa, Artificial Sequence
  Description of Artificial Sequence: Synthetic peptide
  Seed: FSVQRNLPF
FAVQRNLPL

SEQ ID NO: 26125 - protein, 9 aa, Artificial Sequence
  Description of Artificial Sequence: Synthetic peptide
  Seed: FSVQRNLPF
FAVQRNLPK

SEQ ID NO: 26126 - protein, 9 aa, Artificial Sequence
  Description of Artificial Sequence: Synthetic peptide
  Seed: FSVQRNLPF
FAVQRNLPF

SEQ ID NO: 26127 - protein, 9 aa, Artificial Sequence
  Description of Artificial Sequence: Synthetic peptide
  Seed: FSVQRNLPF
FAVQRNLPS

SEQ ID NO: 26128 - protein, 9 aa, Artificial Sequence
  Description of Artificial Sequence: Synthetic peptide
  Seed: FSVQRNLPF
FAVQRNLPT

SEQ ID NO: 26129 - protein, 9 aa, Artificial Sequence
  Description of Artificial Sequence: Synthetic peptide
  Seed: FSVQRNLPF
FAVQRNLPW

SEQ ID NO: 26130 - protein, 9 aa, Artificial Sequence
  Description of Artificial Sequence: Synthetic peptide
  Seed: FSVQRNLPF
FAVQRNLPV

SEQ ID NO: 26131 - protein, 9 aa, Artificial Sequence
  Description of Artificial Sequence: Synthetic peptide
  Seed: FSVQRNLPF
FRVQRNLPH

SEQ ID NO: 26132 - protein, 9 aa, Artificial Sequence
  Description of Artificial Sequence: Synthetic peptide
  Seed: FSVQRNLPF
FRVQRNLPI

SEQ ID NO: 26133 - protein, 9 aa, Artificial Sequence
  Description of Artificial Sequence: Synthetic peptide
  Seed: FSVQRNLPF
FRVQRNLPL

SEQ ID NO: 26134 - protein, 9 aa, Artificial Sequence
  Description of Artificial Sequence: Synthetic peptide
  Seed: FSVQRNLPF
FRVQRNLPM

SEQ ID NO: 26135 - protein, 9 aa, Artificial Sequence
  Description of Artificial Sequence: Synthetic peptide
  Seed: FSVQRNLPF
FRVQRNLPF

SEQ ID NO: 26136 - protein, 9 aa, Artificial Sequence
  Description of Artificial Sequence: Synthetic peptide
  Seed: FSVQRNLPF
FRVQRNLPW

SEQ ID NO: 26137 - protein, 9 aa, Artificial Sequence
  Description of Artificial Sequence: Synthetic peptide
  Seed: FSARSALIL
FQARSALIW

SEQ ID NO: 26138 - protein, 9 aa, Artificial Sequence
  Description of Artificial Sequence: Synthetic peptide
  Seed: FSARSALIL
FQARSALIT

SEQ ID NO: 26139 - protein, 9 aa, Artificial Sequence
  Description of Artificial Sequence: Synthetic peptide
  Seed: FSARSALIL
FQARSALIS

SEQ ID NO: 26140 - protein, 9 aa, Artificial Sequence
  Description of Artificial Sequence: Synthetic peptide
  Seed: FRGRGVFEL
FLGRGVFEL

SEQ ID NO: 26141 - protein, 9 aa, Artificial Sequence
  Description of Artificial Sequence: Synthetic peptide
  Seed: FRGRGVFEL
FIGRGVFEM

SEQ ID NO: 26142 - protein, 9 aa, Artificial Sequence
  Description of Artificial Sequence: Synthetic peptide
  Seed: FRGRGVFEL
FIGRGVFEF

SEQ ID NO: 26143 - protein, 9 aa, Artificial Sequence
  Description of Artificial Sequence: Synthetic peptide
  Seed: FRGRGVFEL
FIGRGVFES

SEQ ID NO: 26144 - protein, 9 aa, Artificial Sequence
  Description of Artificial Sequence: Synthetic peptide
  Seed: FRGRGVFEL
FIGRGVFET

SEQ ID NO: 26145 - protein, 9 aa, Artificial Sequence
  Description of Artificial Sequence: Synthetic peptide
  Seed: FRGRGVFEL
FIGRGVFEY

SEQ ID NO: 26146 - protein, 9 aa, Artificial Sequence
  Description of Artificial Sequence: Synthetic peptide
  Seed: FRGRGVFEL
FIGRGVFEV

SEQ ID NO: 26147 - protein, 9 aa, Artificial Sequence
  Description of Artificial Sequence: Synthetic peptide
  Seed: FRGRGVFEL
FLGRGVFEA

SEQ ID NO: 26148 - protein, 9 aa, Artificial Sequence
  Description of Artificial Sequence: Synthetic peptide
  Seed: FRGRGVFEL
FLGRGVFEC

SEQ ID NO: 26149 - protein, 9 aa, Artificial Sequence
  Description of Artificial Sequence: Synthetic peptide
  Seed: FRGRGVFEL
FLGRGVFEI

SEQ ID NO: 26150 - protein, 9 aa, Artificial Sequence
  Description of Artificial Sequence: Synthetic peptide
  Seed: FRGRGVFEL
FLGRGVFEM

SEQ ID NO: 26151 - protein, 9 aa, Artificial Sequence
  Description of Artificial Sequence: Synthetic peptide
  Seed: FRGRGVFEL
FMGRGVFEA

SEQ ID NO: 26152 - protein, 9 aa, Artificial Sequence
  Description of Artificial Sequence: Synthetic peptide
  Seed: FRGRGVFEL
FLGRGVFEF

SEQ ID NO: 26153 - protein, 9 aa, Artificial Sequence
  Description of Artificial Sequence: Synthetic peptide
  Seed: FRGRGVFEL
FLGRGVFES

SEQ ID NO: 26154 - protein, 9 aa, Artificial Sequence
  Description of Artificial Sequence: Synthetic peptide
  Seed: FRGRGVFEL
FLGRGVFET

SEQ ID NO: 26155 - protein, 9 aa, Artificial Sequence
  Description of Artificial Sequence: Synthetic peptide
  Seed: FRGRGVFEL
FLGRGVFEW

SEQ ID NO: 26156 - protein, 9 aa, Artificial Sequence
  Description of Artificial Sequence: Synthetic peptide
  Seed: FRGRGVFEL
FLGRGVFEY

SEQ ID NO: 26157 - protein, 9 aa, Artificial Sequence
  Description of Artificial Sequence: Synthetic peptide
  Seed: FRGRGVFEL
FLGRGVFEV

SEQ ID NO: 26158 - protein, 9 aa, Artificial Sequence
  Description of Artificial Sequence: Synthetic peptide
  Seed: FRGRGVFEL
FKGRGVFEL

SEQ ID NO: 26159 - protein, 9 aa, Artificial Sequence
  Description of Artificial Sequence: Synthetic peptide
  Seed: FRGRGVFEL
FKGRGVFEM

SEQ ID NO: 26160 - protein, 9 aa, Artificial Sequence
  Description of Artificial Sequence: Synthetic peptide
  Seed: FRGRGVFEL
FKGRGVFEF

SEQ ID NO: 26161 - protein, 9 aa, Artificial Sequence
  Description of Artificial Sequence: Synthetic peptide
  Seed: FRGRGVFEL
FIGRGVFEL

SEQ ID NO: 26162 - protein, 9 aa, Artificial Sequence
  Description of Artificial Sequence: Synthetic peptide
  Seed: FRGRGVFEL
FIGRGVFEI

SEQ ID NO: 26163 - protein, 9 aa, Artificial Sequence
  Description of Artificial Sequence: Synthetic peptide
  Seed: FRGRGVFEL
FIGRGVFEA

SEQ ID NO: 26164 - protein, 9 aa, Artificial Sequence
  Description of Artificial Sequence: Synthetic peptide
  Seed: FRGRGVFEL
FHGRGVFEY

SEQ ID NO: 26165 - protein, 9 aa, Artificial Sequence
  Description of Artificial Sequence: Synthetic peptide
  Seed: FRGRGVFEL
FQGRGVFEM

SEQ ID NO: 26166 - protein, 9 aa, Artificial Sequence
  Description of Artificial Sequence: Synthetic peptide
  Seed: FRGRGVFEL
FQGRGVFES

SEQ ID NO: 26167 - protein, 9 aa, Artificial Sequence
  Description of Artificial Sequence: Synthetic peptide
  Seed: FRGRGVFEL
FQGRGVFET

SEQ ID NO: 26168 - protein, 9 aa, Artificial Sequence
  Description of Artificial Sequence: Synthetic peptide
  Seed: FRGRGVFEL
FQGRGVFEW

SEQ ID NO: 26169 - protein, 9 aa, Artificial Sequence
  Description of Artificial Sequence: Synthetic peptide
  Seed: FRGRGVFEL
FQGRGVFEY

SEQ ID NO: 26170 - protein, 9 aa, Artificial Sequence
  Description of Artificial Sequence: Synthetic peptide
  Seed: FRGRGVFEL
FQGRGVFEV

SEQ ID NO: 26171 - protein, 9 aa, Artificial Sequence
  Description of Artificial Sequence: Synthetic peptide
  Seed: FRGRGVFEL
FEGRGVFEI

SEQ ID NO: 26172 - protein, 9 aa, Artificial Sequence
  Description of Artificial Sequence: Synthetic peptide
  Seed: FRGRGVFEL
FEGRGVFEL

SEQ ID NO: 26173 - protein, 9 aa, Artificial Sequence
  Description of Artificial Sequence: Synthetic peptide
  Seed: FRGRGVFEL
FEGRGVFEM

SEQ ID NO: 26174 - protein, 9 aa, Artificial Sequence
  Description of Artificial Sequence: Synthetic peptide
  Seed: FRGRGVFEL
FEGRGVFEF

SEQ ID NO: 26175 - protein, 9 aa, Artificial Sequence
  Description of Artificial Sequence: Synthetic peptide
  Seed: FRGRGVFEL
FEGRGVFEY

SEQ ID NO: 26176 - protein, 9 aa, Artificial Sequence
  Description of Artificial Sequence: Synthetic peptide
  Seed: FRGRGVFEL
FEGRGVFEV

SEQ ID NO: 26177 - protein, 9 aa, Artificial Sequence
  Description of Artificial Sequence: Synthetic peptide
  Seed: FRGRGVFEL
FGGRGVFEY

SEQ ID NO: 26178 - protein, 9 aa, Artificial Sequence
  Description of Artificial Sequence: Synthetic peptide
  Seed: FRGRGVFEL
FGGRGVFEV

SEQ ID NO: 26179 - protein, 9 aa, Artificial Sequence
  Description of Artificial Sequence: Synthetic peptide
  Seed: FRGRGVFEL
FHGRGVFEM

SEQ ID NO: 26180 - protein, 9 aa, Artificial Sequence
  Description of Artificial Sequence: Synthetic peptide
  Seed: FRGRGVFEL
FHGRGVFEF

SEQ ID NO: 26181 - protein, 9 aa, Artificial Sequence
  Description of Artificial Sequence: Synthetic peptide
  Seed: FRGRGVFEL
FHGRGVFEW

SEQ ID NO: 26182 - protein, 9 aa, Artificial Sequence
  Description of Artificial Sequence: Synthetic peptide
  Seed: FRGRGVFEL
FKGRGVFEY

SEQ ID NO: 26183 - protein, 9 aa, Artificial Sequence
  Description of Artificial Sequence: Synthetic peptide
  Seed: FRGRGVFEL
FMGRGVFEC

SEQ ID NO: 26184 - protein, 9 aa, Artificial Sequence
  Description of Artificial Sequence: Synthetic peptide
  Seed: FRGRGVFEL
FYGRGVFEF

SEQ ID NO: 26185 - protein, 9 aa, Artificial Sequence
  Description of Artificial Sequence: Synthetic peptide
  Seed: FRGRGVFEL
FTGRGVFEY

SEQ ID NO: 26186 - protein, 9 aa, Artificial Sequence
  Description of Artificial Sequence: Synthetic peptide
  Seed: FRGRGVFEL
FSGRGVFEF

SEQ ID NO: 26187 - protein, 9 aa, Artificial Sequence
  Description of Artificial Sequence: Synthetic peptide
  Seed: FRGRGVFEL
FSGRGVFEY

SEQ ID NO: 26188 - protein, 9 aa, Artificial Sequence
  Description of Artificial Sequence: Synthetic peptide
  Seed: FRGRGVFEL
FSGRGVFEV

SEQ ID NO: 26189 - protein, 9 aa, Artificial Sequence
  Description of Artificial Sequence: Synthetic peptide
  Seed: FRGRGVFEL
FTGRGVFEA

SEQ ID NO: 26190 - protein, 9 aa, Artificial Sequence
  Description of Artificial Sequence: Synthetic peptide
  Seed: FRGRGVFEL
FTGRGVFEI

SEQ ID NO: 26191 - protein, 9 aa, Artificial Sequence
  Description of Artificial Sequence: Synthetic peptide
  Seed: FRGRGVFEL
FTGRGVFEL

SEQ ID NO: 26192 - protein, 9 aa, Artificial Sequence
  Description of Artificial Sequence: Synthetic peptide
  Seed: FRGRGVFEL
FTGRGVFEM

SEQ ID NO: 26193 - protein, 9 aa, Artificial Sequence
  Description of Artificial Sequence: Synthetic peptide
  Seed: FRGRGVFEL
FTGRGVFEF

SEQ ID NO: 26194 - protein, 9 aa, Artificial Sequence
  Description of Artificial Sequence: Synthetic peptide
  Seed: FRGRGVFEL
FTGRGVFET

SEQ ID NO: 26195 - protein, 9 aa, Artificial Sequence
  Description of Artificial Sequence: Synthetic peptide
  Seed: FRGRGVFEL
FTGRGVFEV

SEQ ID NO: 26196 - protein, 9 aa, Artificial Sequence
  Description of Artificial Sequence: Synthetic peptide
  Seed: FRGRGVFEL
FMGRGVFEG

SEQ ID NO: 26197 - protein, 9 aa, Artificial Sequence
  Description of Artificial Sequence: Synthetic peptide
  Seed: FRGRGVFEL
FWGRGVFEI

SEQ ID NO: 26198 - protein, 9 aa, Artificial Sequence
  Description of Artificial Sequence: Synthetic peptide
  Seed: FRGRGVFEL
FWGRGVFEL

SEQ ID NO: 26199 - protein, 9 aa, Artificial Sequence
  Description of Artificial Sequence: Synthetic peptide
  Seed: FRGRGVFEL
FWGRGVFEM

SEQ ID NO: 26200 - protein, 9 aa, Artificial Sequence
  Description of Artificial Sequence: Synthetic peptide
  Seed: FRGRGVFEL
FWGRGVFEF

SEQ ID NO: 26201 - protein, 9 aa, Artificial Sequence
  Description of Artificial Sequence: Synthetic peptide
  Seed: FRGRGVFEL
FWGRGVFEW

SEQ ID NO: 26202 - protein, 9 aa, Artificial Sequence
  Description of Artificial Sequence: Synthetic peptide
  Seed: FRGRGVFEL
FWGRGVFEY

SEQ ID NO: 26203 - protein, 9 aa, Artificial Sequence
  Description of Artificial Sequence: Synthetic peptide
  Seed: FRGRGVFEL
FWGRGVFEV

SEQ ID NO: 26204 - protein, 9 aa, Artificial Sequence
  Description of Artificial Sequence: Synthetic peptide
  Seed: FRGRGVFEL
FYGRGVFEI

SEQ ID NO: 26205 - protein, 9 aa, Artificial Sequence
  Description of Artificial Sequence: Synthetic peptide
  Seed: FRGRGVFEL
FYGRGVFEL

SEQ ID NO: 26206 - protein, 9 aa, Artificial Sequence
  Description of Artificial Sequence: Synthetic peptide
  Seed: FRGRGVFEL
FSGRGVFEM

SEQ ID NO: 26207 - protein, 9 aa, Artificial Sequence
  Description of Artificial Sequence: Synthetic peptide
  Seed: FRGRGVFEL
FSGRGVFEL

SEQ ID NO: 26208 - protein, 9 aa, Artificial Sequence
  Description of Artificial Sequence: Synthetic peptide
  Seed: FRGRGVFEL
FSGRGVFEI

SEQ ID NO: 26209 - protein, 9 aa, Artificial Sequence
  Description of Artificial Sequence: Synthetic peptide
  Seed: FRGRGVFEL
FSGRGVFEA

SEQ ID NO: 26210 - protein, 9 aa, Artificial Sequence
  Description of Artificial Sequence: Synthetic peptide
  Seed: FRGRGVFEL
FMGRGVFEI

SEQ ID NO: 26211 - protein, 9 aa, Artificial Sequence
  Description of Artificial Sequence: Synthetic peptide
  Seed: FRGRGVFEL
FMGRGVFEL

SEQ ID NO: 26212 - protein, 9 aa, Artificial Sequence
  Description of Artificial Sequence: Synthetic peptide
  Seed: FRGRGVFEL
FMGRGVFEM

SEQ ID NO: 26213 - protein, 9 aa, Artificial Sequence
  Description of Artificial Sequence: Synthetic peptide
  Seed: FRGRGVFEL
FMGRGVFEF

SEQ ID NO: 26214 - protein, 9 aa, Artificial Sequence
  Description of Artificial Sequence: Synthetic peptide
  Seed: FRGRGVFEL
FMGRGVFES

SEQ ID NO: 26215 - protein, 9 aa, Artificial Sequence
  Description of Artificial Sequence: Synthetic peptide
  Seed: FRGRGVFEL
FMGRGVFET

SEQ ID NO: 26216 - protein, 9 aa, Artificial Sequence
  Description of Artificial Sequence: Synthetic peptide
  Seed: FRGRGVFEL
FMGRGVFEW

SEQ ID NO: 26217 - protein, 9 aa, Artificial Sequence
  Description of Artificial Sequence: Synthetic peptide
  Seed: FRGRGVFEL
FMGRGVFEY

SEQ ID NO: 26218 - protein, 9 aa, Artificial Sequence
  Description of Artificial Sequence: Synthetic peptide
  Seed: FRGRGVFEL
FMGRGVFEV

SEQ ID NO: 26219 - protein, 9 aa, Artificial Sequence
  Description of Artificial Sequence: Synthetic peptide
  Seed: FRGRGVFEL
FFGRGVFEI

SEQ ID NO: 26220 - protein, 9 aa, Artificial Sequence
  Description of Artificial Sequence: Synthetic peptide
  Seed: FRGRGVFEL
FFGRGVFEL

SEQ ID NO: 26221 - protein, 9 aa, Artificial Sequence
  Description of Artificial Sequence: Synthetic peptide
  Seed: FRGRGVFEL
FFGRGVFEM

SEQ ID NO: 26222 - protein, 9 aa, Artificial Sequence
  Description of Artificial Sequence: Synthetic peptide
  Seed: FRGRGVFEL
FFGRGVFEF

SEQ ID NO: 26223 - protein, 9 aa, Artificial Sequence
  Description of Artificial Sequence: Synthetic peptide
  Seed: FRGRGVFEL
FFGRGVFEW

SEQ ID NO: 26224 - protein, 9 aa, Artificial Sequence
  Description of Artificial Sequence: Synthetic peptide
  Seed: FRGRGVFEL
FFGRGVFEY

SEQ ID NO: 26225 - protein, 9 aa, Artificial Sequence
  Description of Artificial Sequence: Synthetic peptide
  Seed: FRGRGVFEL
FFGRGVFEV

SEQ ID NO: 26226 - protein, 9 aa, Artificial Sequence
  Description of Artificial Sequence: Synthetic peptide
  Seed: FRGRGVFEL
FPGRGVFEM

SEQ ID NO: 26227 - protein, 9 aa, Artificial Sequence
  Description of Artificial Sequence: Synthetic peptide
  Seed: FRGRGVFEL
FPGRGVFEF

SEQ ID NO: 26228 - protein, 9 aa, Artificial Sequence
  Description of Artificial Sequence: Synthetic peptide
  Seed: FRGRGVFEL
FPGRGVFEY

SEQ ID NO: 26229 - protein, 9 aa, Artificial Sequence
  Description of Artificial Sequence: Synthetic peptide
  Seed: FRGRGVFEL
FQGRGVFEI

SEQ ID NO: 26230 - protein, 9 aa, Artificial Sequence
  Description of Artificial Sequence: Synthetic peptide
  Seed: FRGRGVFEL
FQGRGVFEH

SEQ ID NO: 26231 - protein, 9 aa, Artificial Sequence
  Description of Artificial Sequence: Synthetic peptide
  Seed: FRGRGVFEL
FQGRGVFEC

SEQ ID NO: 26232 - protein, 10 aa, Artificial Sequence
  Description of Artificial Sequence: Synthetic peptide
  Seed: FQTAAQRAMM
FMTAAQRAMY

SEQ ID NO: 26233 - protein, 10 aa, Artificial Sequence
  Description of Artificial Sequence: Synthetic peptide
  Seed: FQTAAQRAMM
FKTAAQRAMF

SEQ ID NO: 26234 - protein, 10 aa, Artificial Sequence
  Description of Artificial Sequence: Synthetic peptide
  Seed: FQTAAQRAMM
FKTAAQRAMY

SEQ ID NO: 26235 - protein, 10 aa, Artificial Sequence
  Description of Artificial Sequence: Synthetic peptide
  Seed: FQTAAQRAMM
FKTAAQRAMV

SEQ ID NO: 26236 - protein, 10 aa, Artificial Sequence
  Description of Artificial Sequence: Synthetic peptide
  Seed: FQTAAQRAMM
FMTAAQRAMA

SEQ ID NO: 26237 - protein, 10 aa, Artificial Sequence
  Description of Artificial Sequence: Synthetic peptide
  Seed: FQTAAQRAMM
FMTAAQRAMI

SEQ ID NO: 26238 - protein, 10 aa, Artificial Sequence
  Description of Artificial Sequence: Synthetic peptide
  Seed: FQTAAQRAMM
FMTAAQRAML

SEQ ID NO: 26239 - protein, 10 aa, Artificial Sequence
  Description of Artificial Sequence: Synthetic peptide
  Seed: FQTAAQRAMM
FMTAAQRAMM

SEQ ID NO: 26240 - protein, 10 aa, Artificial Sequence
  Description of Artificial Sequence: Synthetic peptide
  Seed: FQTAAQRAMM
FMTAAQRAMF

SEQ ID NO: 26241 - protein, 10 aa, Artificial Sequence
  Description of Artificial Sequence: Synthetic peptide
  Seed: FQTAAQRAMM
FMTAAQRAMT

SEQ ID NO: 26242 - protein, 10 aa, Artificial Sequence
  Description of Artificial Sequence: Synthetic peptide
  Seed: FQTAAQRAMM
FMTAAQRAMV

SEQ ID NO: 26243 - protein, 9 aa, Artificial Sequence
  Description of Artificial Sequence: Synthetic peptide
  Seed: FRGRGVFEL
FQGRGVFEA

SEQ ID NO: 26244 - protein, 10 aa, Artificial Sequence
  Description of Artificial Sequence: Synthetic peptide
  Seed: FQTAAQRAMM
FFTAAQRAMA

SEQ ID NO: 26245 - protein, 10 aa, Artificial Sequence
  Description of Artificial Sequence: Synthetic peptide
  Seed: FQTAAQRAMM
FFTAAQRAMI

SEQ ID NO: 26246 - protein, 10 aa, Artificial Sequence
  Description of Artificial Sequence: Synthetic peptide
  Seed: FQTAAQRAMM
FFTAAQRAML

SEQ ID NO: 26247 - protein, 10 aa, Artificial Sequence
  Description of Artificial Sequence: Synthetic peptide
  Seed: FQTAAQRAMM
FFTAAQRAMM

SEQ ID NO: 26248 - protein, 10 aa, Artificial Sequence
  Description of Artificial Sequence: Synthetic peptide
  Seed: FQTAAQRAMM
FFTAAQRAMV

SEQ ID NO: 26249 - protein, 10 aa, Artificial Sequence
  Description of Artificial Sequence: Synthetic peptide
  Seed: FQTAAQRAMM
FPTAAQRAMA

SEQ ID NO: 26250 - protein, 10 aa, Artificial Sequence
  Description of Artificial Sequence: Synthetic peptide
  Seed: FQTAAQRAMM
FPTAAQRAMI

SEQ ID NO: 26251 - protein, 10 aa, Artificial Sequence
  Description of Artificial Sequence: Synthetic peptide
  Seed: FQTAAQRAMM
FPTAAQRAML

SEQ ID NO: 26252 - protein, 10 aa, Artificial Sequence
  Description of Artificial Sequence: Synthetic peptide
  Seed: FQTAAQRAMM
FPTAAQRAMM

SEQ ID NO: 26253 - protein, 10 aa, Artificial Sequence
  Description of Artificial Sequence: Synthetic peptide
  Seed: FQTAAQRAMM
FKTAAQRAMM

SEQ ID NO: 26254 - protein, 10 aa, Artificial Sequence
  Description of Artificial Sequence: Synthetic peptide
  Seed: FQTAAQRAMM
FKTAAQRAML

SEQ ID NO: 26255 - protein, 10 aa, Artificial Sequence
  Description of Artificial Sequence: Synthetic peptide
  Seed: FQTAAQRAMM
FKTAAQRAMI

SEQ ID NO: 26256 - protein, 10 aa, Artificial Sequence
  Description of Artificial Sequence: Synthetic peptide
  Seed: FQTAAQRAMM
FKTAAQRAMA

SEQ ID NO: 26257 - protein, 10 aa, Artificial Sequence
  Description of Artificial Sequence: Synthetic peptide
  Seed: FQTAAQRAMM
FHTAAQRAMI

SEQ ID NO: 26258 - protein, 10 aa, Artificial Sequence
  Description of Artificial Sequence: Synthetic peptide
  Seed: FQTAAQRAMM
FHTAAQRAML

SEQ ID NO: 26259 - protein, 10 aa, Artificial Sequence
  Description of Artificial Sequence: Synthetic peptide
  Seed: FQTAAQRAMM
FHTAAQRAMM

SEQ ID NO: 26260 - protein, 10 aa, Artificial Sequence
  Description of Artificial Sequence: Synthetic peptide
  Seed: FQTAAQRAMM
FHTAAQRAMF

SEQ ID NO: 26261 - protein, 10 aa, Artificial Sequence
  Description of Artificial Sequence: Synthetic peptide
  Seed: FQTAAQRAMM
FHTAAQRAMY

SEQ ID NO: 26262 - protein, 10 aa, Artificial Sequence
  Description of Artificial Sequence: Synthetic peptide
  Seed: FQTAAQRAMM
FHTAAQRAMV

SEQ ID NO: 26263 - protein, 10 aa, Artificial Sequence
  Description of Artificial Sequence: Synthetic peptide
  Seed: FQTAAQRAMM
FITAAQRAMA

SEQ ID NO: 26264 - protein, 10 aa, Artificial Sequence
  Description of Artificial Sequence: Synthetic peptide
  Seed: FQTAAQRAMM
FITAAQRAMI

SEQ ID NO: 26265 - protein, 10 aa, Artificial Sequence
  Description of Artificial Sequence: Synthetic peptide
  Seed: FQTAAQRAMM
FITAAQRAML

SEQ ID NO: 26266 - protein, 10 aa, Artificial Sequence
  Description of Artificial Sequence: Synthetic peptide
  Seed: FQTAAQRAMM
FITAAQRAMM

SEQ ID NO: 26267 - protein, 10 aa, Artificial Sequence
  Description of Artificial Sequence: Synthetic peptide
  Seed: FQTAAQRAMM
FITAAQRAMV

SEQ ID NO: 26268 - protein, 10 aa, Artificial Sequence
  Description of Artificial Sequence: Synthetic peptide
  Seed: FQTAAQRAMM
FLTAAQRAMA

SEQ ID NO: 26269 - protein, 10 aa, Artificial Sequence
  Description of Artificial Sequence: Synthetic peptide
  Seed: FQTAAQRAMM
FLTAAQRAMI

SEQ ID NO: 26270 - protein, 10 aa, Artificial Sequence
  Description of Artificial Sequence: Synthetic peptide
  Seed: FQTAAQRAMM
FLTAAQRAML

SEQ ID NO: 26271 - protein, 10 aa, Artificial Sequence
  Description of Artificial Sequence: Synthetic peptide
  Seed: FQTAAQRAMM
FLTAAQRAMM

SEQ ID NO: 26272 - protein, 10 aa, Artificial Sequence
  Description of Artificial Sequence: Synthetic peptide
  Seed: FQTAAQRAMM
FLTAAQRAMF

SEQ ID NO: 26273 - protein, 10 aa, Artificial Sequence
  Description of Artificial Sequence: Synthetic peptide
  Seed: FQTAAQRAMM
FLTAAQRAMT

SEQ ID NO: 26274 - protein, 10 aa, Artificial Sequence
  Description of Artificial Sequence: Synthetic peptide
  Seed: FQTAAQRAMM
FLTAAQRAMY

SEQ ID NO: 26275 - protein, 10 aa, Artificial Sequence
  Description of Artificial Sequence: Synthetic peptide
  Seed: FQTAAQRAMM
FLTAAQRAMV

SEQ ID NO: 26276 - protein, 10 aa, Artificial Sequence
  Description of Artificial Sequence: Synthetic peptide
  Seed: FQTAAQRAMM
FPTAAQRAMV

SEQ ID NO: 26277 - protein, 10 aa, Artificial Sequence
  Description of Artificial Sequence: Synthetic peptide
  Seed: FQTAAQRAMM
FSTAAQRAMA

SEQ ID NO: 26278 - protein, 10 aa, Artificial Sequence
  Description of Artificial Sequence: Synthetic peptide
  Seed: FQTAAQRAMM
FSTAAQRAMI

SEQ ID NO: 26279 - protein, 10 aa, Artificial Sequence
  Description of Artificial Sequence: Synthetic peptide
  Seed: FQTAAQRAMM
FVTAAQRAML

SEQ ID NO: 26280 - protein, 10 aa, Artificial Sequence
  Description of Artificial Sequence: Synthetic peptide
  Seed: FQTAAQRAMM
FVTAAQRAMY

SEQ ID NO: 26281 - protein, 10 aa, Artificial Sequence
  Description of Artificial Sequence: Synthetic peptide
  Seed: FQTAAQRAMM
FVTAAQRAMV

SEQ ID NO: 26282 - protein, 9 aa, Artificial Sequence
  Description of Artificial Sequence: Synthetic peptide
  Seed: FRGRGVFEL
FAGRGVFEA

SEQ ID NO: 26283 - protein, 9 aa, Artificial Sequence
  Description of Artificial Sequence: Synthetic peptide
  Seed: FRGRGVFEL
FAGRGVFEH

SEQ ID NO: 26284 - protein, 9 aa, Artificial Sequence
  Description of Artificial Sequence: Synthetic peptide
  Seed: FRGRGVFEL
FAGRGVFEI

SEQ ID NO: 26285 - protein, 9 aa, Artificial Sequence
  Description of Artificial Sequence: Synthetic peptide
  Seed: FRGRGVFEL
FAGRGVFEL

SEQ ID NO: 26286 - protein, 9 aa, Artificial Sequence
  Description of Artificial Sequence: Synthetic peptide
  Seed: FRGRGVFEL
FAGRGVFEM

SEQ ID NO: 26287 - protein, 9 aa, Artificial Sequence
  Description of Artificial Sequence: Synthetic peptide
  Seed: FRGRGVFEL
FAGRGVFEF

SEQ ID NO: 26288 - protein, 9 aa, Artificial Sequence
  Description of Artificial Sequence: Synthetic peptide
  Seed: FRGRGVFEL
FAGRGVFEW

SEQ ID NO: 26289 - protein, 9 aa, Artificial Sequence
  Description of Artificial Sequence: Synthetic peptide
  Seed: FRGRGVFEL
FAGRGVFEY

SEQ ID NO: 26290 - protein, 9 aa, Artificial Sequence
  Description of Artificial Sequence: Synthetic peptide
  Seed: FRGRGVFEL
FAGRGVFEV

SEQ ID NO: 26291 - protein, 9 aa, Artificial Sequence
  Description of Artificial Sequence: Synthetic peptide
  Seed: FRGRGVFEL
FRGRGVFEA

SEQ ID NO: 26292 - protein, 9 aa, Artificial Sequence
  Description of Artificial Sequence: Synthetic peptide
  Seed: FRGRGVFEL
FRGRGVFEC

SEQ ID NO: 26293 - protein, 9 aa, Artificial Sequence
  Description of Artificial Sequence: Synthetic peptide
  Seed: FRGRGVFEL
FRGRGVFEI

SEQ ID NO: 26294 - protein, 9 aa, Artificial Sequence
  Description of Artificial Sequence: Synthetic peptide
  Seed: FRGRGVFEL
FRGRGVFEM

SEQ ID NO: 26295 - protein, 9 aa, Artificial Sequence
  Description of Artificial Sequence: Synthetic peptide
  Seed: FRGRGVFEL
FRGRGVFEF

SEQ ID NO: 26296 - protein, 9 aa, Artificial Sequence
  Description of Artificial Sequence: Synthetic peptide
  Seed: FRGRGVFEL
FRGRGVFET

SEQ ID NO: 26297 - protein, 9 aa, Artificial Sequence
  Description of Artificial Sequence: Synthetic peptide
  Seed: FRGRGVFEL
FRGRGVFEY

SEQ ID NO: 26298 - protein, 9 aa, Artificial Sequence
  Description of Artificial Sequence: Synthetic peptide
  Seed: FRGRGVFEL
FRGRGVFEV

SEQ ID NO: 26299 - protein, 10 aa, Artificial Sequence
  Description of Artificial Sequence: Synthetic peptide
  Seed: FQTAAQRAMM
FVTAAQRAMM

SEQ ID NO: 26300 - protein, 10 aa, Artificial Sequence
  Description of Artificial Sequence: Synthetic peptide
  Seed: FQTAAQRAMM
FVTAAQRAMI

SEQ ID NO: 26301 - protein, 10 aa, Artificial Sequence
  Description of Artificial Sequence: Synthetic peptide
  Seed: FQTAAQRAMM
FSTAAQRAML

SEQ ID NO: 26302 - protein, 10 aa, Artificial Sequence
  Description of Artificial Sequence: Synthetic peptide
  Seed: FQTAAQRAMM
FVTAAQRAMA

SEQ ID NO: 26303 - protein, 10 aa, Artificial Sequence
  Description of Artificial Sequence: Synthetic peptide
  Seed: FQTAAQRAMM
FSTAAQRAMM

SEQ ID NO: 26304 - protein, 10 aa, Artificial Sequence
  Description of Artificial Sequence: Synthetic peptide
  Seed: FQTAAQRAMM
FSTAAQRAMF

SEQ ID NO: 26305 - protein, 10 aa, Artificial Sequence
  Description of Artificial Sequence: Synthetic peptide
  Seed: FQTAAQRAMM
FSTAAQRAMY

SEQ ID NO: 26306 - protein, 10 aa, Artificial Sequence
  Description of Artificial Sequence: Synthetic peptide
  Seed: FQTAAQRAMM
FSTAAQRAMV

SEQ ID NO: 26307 - protein, 10 aa, Artificial Sequence
  Description of Artificial Sequence: Synthetic peptide
  Seed: FQTAAQRAMM
FTTAAQRAMA

SEQ ID NO: 26308 - protein, 10 aa, Artificial Sequence
  Description of Artificial Sequence: Synthetic peptide
  Seed: FQTAAQRAMM
FTTAAQRAMI

SEQ ID NO: 26309 - protein, 10 aa, Artificial Sequence
  Description of Artificial Sequence: Synthetic peptide
  Seed: FQTAAQRAMM
FTTAAQRAML

SEQ ID NO: 26310 - protein, 10 aa, Artificial Sequence
  Description of Artificial Sequence: Synthetic peptide
  Seed: FQTAAQRAMM
FTTAAQRAMM

SEQ ID NO: 26311 - protein, 10 aa, Artificial Sequence
  Description of Artificial Sequence: Synthetic peptide
  Seed: FQTAAQRAMM
FTTAAQRAMV

SEQ ID NO: 26312 - protein, 10 aa, Artificial Sequence
  Description of Artificial Sequence: Synthetic peptide
  Seed: FQTAAQRAMM
FWTAAQRAMA

SEQ ID NO: 26313 - protein, 10 aa, Artificial Sequence
  Description of Artificial Sequence: Synthetic peptide
  Seed: FQTAAQRAMM
FWTAAQRAMI

SEQ ID NO: 26314 - protein, 10 aa, Artificial Sequence
  Description of Artificial Sequence: Synthetic peptide
  Seed: FQTAAQRAMM
FWTAAQRAML

SEQ ID NO: 26315 - protein, 10 aa, Artificial Sequence
  Description of Artificial Sequence: Synthetic peptide
  Seed: FQTAAQRAMM
FWTAAQRAMM

SEQ ID NO: 26316 - protein, 10 aa, Artificial Sequence
  Description of Artificial Sequence: Synthetic peptide
  Seed: FQTAAQRAMM
FWTAAQRAMV

SEQ ID NO: 26317 - protein, 10 aa, Artificial Sequence
  Description of Artificial Sequence: Synthetic peptide
  Seed: FQTAAQRAMM
FYTAAQRAMA

SEQ ID NO: 26318 - protein, 10 aa, Artificial Sequence
  Description of Artificial Sequence: Synthetic peptide
  Seed: FQTAAQRAMM
FYTAAQRAMI

SEQ ID NO: 26319 - protein, 10 aa, Artificial Sequence
  Description of Artificial Sequence: Synthetic peptide
  Seed: FQTAAQRAMM
FYTAAQRAML

SEQ ID NO: 26320 - protein, 10 aa, Artificial Sequence
  Description of Artificial Sequence: Synthetic peptide
  Seed: FQTAAQRAMM
FYTAAQRAMM

SEQ ID NO: 26321 - protein, 10 aa, Artificial Sequence
  Description of Artificial Sequence: Synthetic peptide
  Seed: FQTAAQRAMM
FYTAAQRAMV

SEQ ID NO: 26322 - protein, 9 aa, Artificial Sequence
  Description of Artificial Sequence: Synthetic peptide
  Seed: FRGRGVFEL
FYGRGVFEM

SEQ ID NO: 26323 - protein, 9 aa, Artificial Sequence
  Description of Artificial Sequence: Synthetic peptide
  Seed: FRGRGVFEL
FYGRGVFEW

SEQ ID NO: 26324 - protein, 9 aa, Artificial Sequence
  Description of Artificial Sequence: Synthetic peptide
  Seed: FSARSALIL
FQARSALIF

SEQ ID NO: 26325 - protein, 10 aa, Artificial Sequence
  Description of Artificial Sequence: Synthetic peptide
  Seed: FRLLQNSQVF
FWLLQNSQVF

SEQ ID NO: 26326 - protein, 10 aa, Artificial Sequence
  Description of Artificial Sequence: Synthetic peptide
  Seed: FRLLQNSQVF
FSLLQNSQVL

SEQ ID NO: 26327 - protein, 10 aa, Artificial Sequence
  Description of Artificial Sequence: Synthetic peptide
  Seed: FRLLQNSQVF
FSLLQNSQVM

SEQ ID NO: 26328 - protein, 10 aa, Artificial Sequence
  Description of Artificial Sequence: Synthetic peptide
  Seed: FRLLQNSQVF
FSLLQNSQVF

SEQ ID NO: 26329 - protein, 10 aa, Artificial Sequence
  Description of Artificial Sequence: Synthetic peptide
  Seed: FRLLQNSQVF
FSLLQNSQVY

SEQ ID NO: 26330 - protein, 10 aa, Artificial Sequence
  Description of Artificial Sequence: Synthetic peptide
  Seed: FRLLQNSQVF
FTLLQNSQVL

SEQ ID NO: 26331 - protein, 10 aa, Artificial Sequence
  Description of Artificial Sequence: Synthetic peptide
  Seed: FRLLQNSQVF
FTLLQNSQVM

SEQ ID NO: 26332 - protein, 10 aa, Artificial Sequence
  Description of Artificial Sequence: Synthetic peptide
  Seed: FRLLQNSQVF
FTLLQNSQVF

SEQ ID NO: 26333 - protein, 10 aa, Artificial Sequence
  Description of Artificial Sequence: Synthetic peptide
  Seed: FRLLQNSQVF
FTLLQNSQVY

SEQ ID NO: 26334 - protein, 10 aa, Artificial Sequence
  Description of Artificial Sequence: Synthetic peptide
  Seed: FRLLQNSQVF
FWLLQNSQVM

SEQ ID NO: 26335 - protein, 10 aa, Artificial Sequence
  Description of Artificial Sequence: Synthetic peptide
  Seed: FRLLQNSQVF
FWLLQNSQVY

SEQ ID NO: 26336 - protein, 10 aa, Artificial Sequence
  Description of Artificial Sequence: Synthetic peptide
  Seed: FRLLQNSQVF
FYLLQNSQVL

SEQ ID NO: 26337 - protein, 10 aa, Artificial Sequence
  Description of Artificial Sequence: Synthetic peptide
  Seed: FRLLQNSQVF
FYLLQNSQVM

SEQ ID NO: 26338 - protein, 10 aa, Artificial Sequence
  Description of Artificial Sequence: Synthetic peptide
  Seed: FRLLQNSQVF
FYLLQNSQVF

SEQ ID NO: 26339 - protein, 10 aa, Artificial Sequence
  Description of Artificial Sequence: Synthetic peptide
  Seed: FRLLQNSQVF
FYLLQNSQVY

SEQ ID NO: 26340 - protein, 10 aa, Artificial Sequence
  Description of Artificial Sequence: Synthetic peptide
  Seed: FRLLQNSQVF
FVLLQNSQVL

SEQ ID NO: 26341 - protein, 10 aa, Artificial Sequence
  Description of Artificial Sequence: Synthetic peptide
  Seed: FRLLQNSQVF
FVLLQNSQVM

SEQ ID NO: 26342 - protein, 10 aa, Artificial Sequence
  Description of Artificial Sequence: Synthetic peptide
  Seed: FRLLQNSQVF
FVLLQNSQVF

SEQ ID NO: 26343 - protein, 10 aa, Artificial Sequence
  Description of Artificial Sequence: Synthetic peptide
  Seed: FRLLQNSQVF
FVLLQNSQVY

SEQ ID NO: 26344 - protein, 8 aa, Artificial Sequence
  Description of Artificial Sequence: Synthetic peptide
  Seed: FSARSALI
FIARSALV

SEQ ID NO: 26345 - protein, 10 aa, Artificial Sequence
  Description of Artificial Sequence: Synthetic peptide
  Seed: FRLLQNSQVF
FPLLQNSQVY

SEQ ID NO: 26346 - protein, 10 aa, Artificial Sequence
  Description of Artificial Sequence: Synthetic peptide
  Seed: FRLLQNSQVF
FPLLQNSQVF

SEQ ID NO: 26347 - protein, 10 aa, Artificial Sequence
  Description of Artificial Sequence: Synthetic peptide
  Seed: FRLLQNSQVF
FPLLQNSQVM

SEQ ID NO: 26348 - protein, 10 aa, Artificial Sequence
  Description of Artificial Sequence: Synthetic peptide
  Seed: FRLLQNSQVF
FFLLQNSQVY

SEQ ID NO: 26349 - protein, 10 aa, Artificial Sequence
  Description of Artificial Sequence: Synthetic peptide
  Seed: FRLLQNSQVF
FILLQNSQVY

SEQ ID NO: 26350 - protein, 10 aa, Artificial Sequence
  Description of Artificial Sequence: Synthetic peptide
  Seed: FRLLQNSQVF
FLLLQNSQVM

SEQ ID NO: 26351 - protein, 10 aa, Artificial Sequence
  Description of Artificial Sequence: Synthetic peptide
  Seed: FRLLQNSQVF
FLLLQNSQVF

SEQ ID NO: 26352 - protein, 10 aa, Artificial Sequence
  Description of Artificial Sequence: Synthetic peptide
  Seed: FRLLQNSQVF
FLLLQNSQVY

SEQ ID NO: 26353 - protein, 10 aa, Artificial Sequence
  Description of Artificial Sequence: Synthetic peptide
  Seed: FRLLQNSQVF
FKLLQNSQVI

SEQ ID NO: 26354 - protein, 10 aa, Artificial Sequence
  Description of Artificial Sequence: Synthetic peptide
  Seed: FRLLQNSQVF
FKLLQNSQVL

SEQ ID NO: 26355 - protein, 10 aa, Artificial Sequence
  Description of Artificial Sequence: Synthetic peptide
  Seed: FRLLQNSQVF
FKLLQNSQVM

SEQ ID NO: 26356 - protein, 10 aa, Artificial Sequence
  Description of Artificial Sequence: Synthetic peptide
  Seed: FRLLQNSQVF
FKLLQNSQVW

SEQ ID NO: 26357 - protein, 10 aa, Artificial Sequence
  Description of Artificial Sequence: Synthetic peptide
  Seed: FRLLQNSQVF
FMLLQNSQVH

SEQ ID NO: 26358 - protein, 10 aa, Artificial Sequence
  Description of Artificial Sequence: Synthetic peptide
  Seed: FRLLQNSQVF
FMLLQNSQVI

SEQ ID NO: 26359 - protein, 10 aa, Artificial Sequence
  Description of Artificial Sequence: Synthetic peptide
  Seed: FRLLQNSQVF
FMLLQNSQVL

SEQ ID NO: 26360 - protein, 10 aa, Artificial Sequence
  Description of Artificial Sequence: Synthetic peptide
  Seed: FRLLQNSQVF
FMLLQNSQVM

SEQ ID NO: 26361 - protein, 10 aa, Artificial Sequence
  Description of Artificial Sequence: Synthetic peptide
  Seed: FRLLQNSQVF
FMLLQNSQVF

SEQ ID NO: 26362 - protein, 10 aa, Artificial Sequence
  Description of Artificial Sequence: Synthetic peptide
  Seed: FRLLQNSQVF
FMLLQNSQVW

SEQ ID NO: 26363 - protein, 10 aa, Artificial Sequence
  Description of Artificial Sequence: Synthetic peptide
  Seed: FRLLQNSQVF
FMLLQNSQVY

SEQ ID NO: 26364 - protein, 10 aa, Artificial Sequence
  Description of Artificial Sequence: Synthetic peptide
  Seed: FRLLQNSQVF
FFLLQNSQVM

SEQ ID NO: 26365 - protein, 10 aa, Artificial Sequence
  Description of Artificial Sequence: Synthetic peptide
  Seed: FRLLQNSQVF
FFLLQNSQVF

SEQ ID NO: 26366 - protein, 8 aa, Artificial Sequence
  Description of Artificial Sequence: Synthetic peptide
  Seed: FSARSALI
FLARSALA

SEQ ID NO: 26367 - protein, 8 aa, Artificial Sequence
  Description of Artificial Sequence: Synthetic peptide
  Seed: FSARSALI
FLARSALL

SEQ ID NO: 26368 - protein, 9 aa, Artificial Sequence
  Description of Artificial Sequence: Synthetic peptide
  Seed: FRGRGVFEL
FYGRGVFEY

SEQ ID NO: 26369 - protein, 9 aa, Artificial Sequence
  Description of Artificial Sequence: Synthetic peptide
  Seed: FSARSALIL
FCARSALIM

SEQ ID NO: 26370 - protein, 9 aa, Artificial Sequence
  Description of Artificial Sequence: Synthetic peptide
  Seed: FSARSALIL
FRARSALIM

SEQ ID NO: 26371 - protein, 9 aa, Artificial Sequence
  Description of Artificial Sequence: Synthetic peptide
  Seed: FSARSALIL
FRARSALIF

SEQ ID NO: 26372 - protein, 9 aa, Artificial Sequence
  Description of Artificial Sequence: Synthetic peptide
  Seed: FSARSALIL
FRARSALIW

SEQ ID NO: 26373 - protein, 9 aa, Artificial Sequence
  Description of Artificial Sequence: Synthetic peptide
  Seed: FSARSALIL
FRARSALIY

SEQ ID NO: 26374 - protein, 9 aa, Artificial Sequence
  Description of Artificial Sequence: Synthetic peptide
  Seed: FSARSALIL
FNARSALIL

SEQ ID NO: 26375 - protein, 9 aa, Artificial Sequence
  Description of Artificial Sequence: Synthetic peptide
  Seed: FSARSALIL
FNARSALIM

SEQ ID NO: 26376 - protein, 9 aa, Artificial Sequence
  Description of Artificial Sequence: Synthetic peptide
  Seed: FSARSALIL
FNARSALIF

SEQ ID NO: 26377 - protein, 9 aa, Artificial Sequence
  Description of Artificial Sequence: Synthetic peptide
  Seed: FSARSALIL
FNARSALIY

SEQ ID NO: 26378 - protein, 9 aa, Artificial Sequence
  Description of Artificial Sequence: Synthetic peptide
  Seed: FSARSALIL
FCARSALIL

SEQ ID NO: 26379 - protein, 9 aa, Artificial Sequence
  Description of Artificial Sequence: Synthetic peptide
  Seed: FSARSALIL
FCARSALIF

SEQ ID NO: 26380 - protein, 8 aa, Artificial Sequence
  Description of Artificial Sequence: Synthetic peptide
  Seed: FSARSALI
FLARSALM

SEQ ID NO: 26381 - protein, 9 aa, Artificial Sequence
  Description of Artificial Sequence: Synthetic peptide
  Seed: FSARSALIL
FCARSALIY

SEQ ID NO: 26382 - protein, 9 aa, Artificial Sequence
  Description of Artificial Sequence: Synthetic peptide
  Seed: FSARSALIL
FQARSALIA

SEQ ID NO: 26383 - protein, 9 aa, Artificial Sequence
  Description of Artificial Sequence: Synthetic peptide
  Seed: FSARSALIL
FQARSALIN

SEQ ID NO: 26384 - protein, 9 aa, Artificial Sequence
  Description of Artificial Sequence: Synthetic peptide
  Seed: FSARSALIL
FQARSALIC

SEQ ID NO: 26385 - protein, 9 aa, Artificial Sequence
  Description of Artificial Sequence: Synthetic peptide
  Seed: FSARSALIL
FQARSALIG

SEQ ID NO: 26386 - protein, 9 aa, Artificial Sequence
  Description of Artificial Sequence: Synthetic peptide
  Seed: FSARSALIL
FQARSALIH

SEQ ID NO: 26387 - protein, 9 aa, Artificial Sequence
  Description of Artificial Sequence: Synthetic peptide
  Seed: FSARSALIL
FQARSALII

SEQ ID NO: 26388 - protein, 9 aa, Artificial Sequence
  Description of Artificial Sequence: Synthetic peptide
  Seed: FSARSALIL
FQARSALIL

SEQ ID NO: 26389 - protein, 9 aa, Artificial Sequence
  Description of Artificial Sequence: Synthetic peptide
  Seed: FSARSALIL
FQARSALIM

SEQ ID NO: 26390 - protein, 9 aa, Artificial Sequence
  Description of Artificial Sequence: Synthetic peptide
  Seed: FSARSALIL
FRARSALIL

SEQ ID NO: 26391 - protein, 9 aa, Artificial Sequence
  Description of Artificial Sequence: Synthetic peptide
  Seed: FSARSALIL
FRARSALII

SEQ ID NO: 26392 - protein, 9 aa, Artificial Sequence
  Description of Artificial Sequence: Synthetic peptide
  Seed: FSARSALIL
FRARSALIH

SEQ ID NO: 26393 - protein, 9 aa, Artificial Sequence
  Description of Artificial Sequence: Synthetic peptide
  Seed: FSARSALIL
FAARSALIV

SEQ ID NO: 26394 - protein, 8 aa, Artificial Sequence
  Description of Artificial Sequence: Synthetic peptide
  Seed: FSARSALI
FMARSALA

SEQ ID NO: 26395 - protein, 8 aa, Artificial Sequence
  Description of Artificial Sequence: Synthetic peptide
  Seed: FSARSALI
FMARSALI

SEQ ID NO: 26396 - protein, 8 aa, Artificial Sequence
  Description of Artificial Sequence: Synthetic peptide
  Seed: FSARSALI
FMARSALL

SEQ ID NO: 26397 - protein, 8 aa, Artificial Sequence
  Description of Artificial Sequence: Synthetic peptide
  Seed: FSARSALI
FMARSALM

SEQ ID NO: 26398 - protein, 8 aa, Artificial Sequence
  Description of Artificial Sequence: Synthetic peptide
  Seed: FSARSALI
FMARSALV

SEQ ID NO: 26399 - protein, 8 aa, Artificial Sequence
  Description of Artificial Sequence: Synthetic peptide
  Seed: FSARSALI
FVARSALV

SEQ ID NO: 26400 - protein, 9 aa, Artificial Sequence
  Description of Artificial Sequence: Synthetic peptide
  Seed: FSARSALIL
FAARSALIA

SEQ ID NO: 26401 - protein, 9 aa, Artificial Sequence
  Description of Artificial Sequence: Synthetic peptide
  Seed: FSARSALIL
FAARSALIC

SEQ ID NO: 26402 - protein, 9 aa, Artificial Sequence
  Description of Artificial Sequence: Synthetic peptide
  Seed: FSARSALIL
FAARSALIQ

SEQ ID NO: 26403 - protein, 9 aa, Artificial Sequence
  Description of Artificial Sequence: Synthetic peptide
  Seed: FSARSALIL
FAARSALIH

SEQ ID NO: 26404 - protein, 9 aa, Artificial Sequence
  Description of Artificial Sequence: Synthetic peptide
  Seed: FSARSALIL
FAARSALII

SEQ ID NO: 26405 - protein, 9 aa, Artificial Sequence
  Description of Artificial Sequence: Synthetic peptide
  Seed: FSARSALIL
FAARSALIL

SEQ ID NO: 26406 - protein, 9 aa, Artificial Sequence
  Description of Artificial Sequence: Synthetic peptide
  Seed: FSARSALIL
FAARSALIM

SEQ ID NO: 26407 - protein, 9 aa, Artificial Sequence
  Description of Artificial Sequence: Synthetic peptide
  Seed: FSARSALIL
FAARSALIF

SEQ ID NO: 26408 - protein, 9 aa, Artificial Sequence
  Description of Artificial Sequence: Synthetic peptide
  Seed: FSARSALIL
FAARSALIS

SEQ ID NO: 26409 - protein, 9 aa, Artificial Sequence
  Description of Artificial Sequence: Synthetic peptide
  Seed: FSARSALIL
FAARSALIT

SEQ ID NO: 26410 - protein, 9 aa, Artificial Sequence
  Description of Artificial Sequence: Synthetic peptide
  Seed: FSARSALIL
FAARSALIW

SEQ ID NO: 26411 - protein, 9 aa, Artificial Sequence
  Description of Artificial Sequence: Synthetic peptide
  Seed: FSARSALIL
FAARSALIY

SEQ ID NO: 26412 - protein, 10 aa, Artificial Sequence
  Description of Artificial Sequence: Synthetic peptide
  Seed: FRLLQNSQVF
FILLQNSQVF

SEQ ID NO: 26413 - protein, 10 aa, Artificial Sequence
  Description of Artificial Sequence: Synthetic peptide
  Seed: FRLLQNSQVF
FILLQNSQVM

SEQ ID NO: 26414 - protein, 10 aa, Artificial Sequence
  Description of Artificial Sequence: Synthetic peptide
  Seed: FRLLQNSQVF
FHLLQNSQVY

SEQ ID NO: 26415 - protein, 10 aa, Artificial Sequence
  Description of Artificial Sequence: Synthetic peptide
  Seed: FRLLQNSQVF
FALLQNSQVM

SEQ ID NO: 26416 - protein, 9 aa, Artificial Sequence
  Description of Artificial Sequence: Synthetic peptide
  Seed: FRLLQNSQV
FKLLQNSQL

SEQ ID NO: 26417 - protein, 9 aa, Artificial Sequence
  Description of Artificial Sequence: Synthetic peptide
  Seed: FRLLQNSQV
FPLLQNSQL

SEQ ID NO: 26418 - protein, 9 aa, Artificial Sequence
  Description of Artificial Sequence: Synthetic peptide
  Seed: FRLLQNSQV
FYLLQNSQL

SEQ ID NO: 26419 - protein, 9 aa, Artificial Sequence
  Description of Artificial Sequence: Synthetic peptide
  Seed: FRLLQNSQV
FYLLQNSQM

SEQ ID NO: 26420 - protein, 9 aa, Artificial Sequence
  Description of Artificial Sequence: Synthetic peptide
  Seed: FRLLQNSQV
FYLLQNSQF

SEQ ID NO: 26421 - protein, 10 aa, Artificial Sequence
  Description of Artificial Sequence: Synthetic peptide
  Seed: FRLLQNSQVF
FALLQNSQVA

SEQ ID NO: 26422 - protein, 10 aa, Artificial Sequence
  Description of Artificial Sequence: Synthetic peptide
  Seed: FRLLQNSQVF
FALLQNSQVI

SEQ ID NO: 26423 - protein, 10 aa, Artificial Sequence
  Description of Artificial Sequence: Synthetic peptide
  Seed: FRLLQNSQVF
FALLQNSQVL

SEQ ID NO: 26424 - protein, 10 aa, Artificial Sequence
  Description of Artificial Sequence: Synthetic peptide
  Seed: FRLLQNSQVF
FALLQNSQVF

SEQ ID NO: 26425 - protein, 10 aa, Artificial Sequence
  Description of Artificial Sequence: Synthetic peptide
  Seed: FRLLQNSQVF
FHLLQNSQVF

SEQ ID NO: 26426 - protein, 10 aa, Artificial Sequence
  Description of Artificial Sequence: Synthetic peptide
  Seed: FRLLQNSQVF
FALLQNSQVY

SEQ ID NO: 26427 - protein, 10 aa, Artificial Sequence
  Description of Artificial Sequence: Synthetic peptide
  Seed: FRLLQNSQVF
FALLQNSQVV

SEQ ID NO: 26428 - protein, 10 aa, Artificial Sequence
  Description of Artificial Sequence: Synthetic peptide
  Seed: FRLLQNSQVF
FRLLQNSQVA

SEQ ID NO: 26429 - protein, 10 aa, Artificial Sequence
  Description of Artificial Sequence: Synthetic peptide
  Seed: FRLLQNSQVF
FRLLQNSQVR

SEQ ID NO: 26430 - protein, 10 aa, Artificial Sequence
  Description of Artificial Sequence: Synthetic peptide
  Seed: FRLLQNSQVF
FRLLQNSQVI

SEQ ID NO: 26431 - protein, 10 aa, Artificial Sequence
  Description of Artificial Sequence: Synthetic peptide
  Seed: FRLLQNSQVF
FRLLQNSQVK

SEQ ID NO: 26432 - protein, 10 aa, Artificial Sequence
  Description of Artificial Sequence: Synthetic peptide
  Seed: FRLLQNSQVF
FRLLQNSQVM

SEQ ID NO: 26433 - protein, 9 aa, Artificial Sequence
  Description of Artificial Sequence: Synthetic peptide
  Seed: FRLLQNSQV
FHLLQNSQV

SEQ ID NO: 26434 - protein, 9 aa, Artificial Sequence
  Description of Artificial Sequence: Synthetic peptide
  Seed: FRLLQNSQV
FHLLQNSQM

SEQ ID NO: 26435 - protein, 9 aa, Artificial Sequence
  Description of Artificial Sequence: Synthetic peptide
  Seed: FRLLQNSQV
FHLLQNSQL

SEQ ID NO: 26436 - protein, 9 aa, Artificial Sequence
  Description of Artificial Sequence: Synthetic peptide
  Seed: FRLLQNSQV
FHLLQNSQI

SEQ ID NO: 26437 - protein, 9 aa, Artificial Sequence
  Description of Artificial Sequence: Synthetic peptide
  Seed: FRGRGVFEL
FYGRGVFEV

SEQ ID NO: 26438 - protein, 9 aa, Artificial Sequence
  Description of Artificial Sequence: Synthetic peptide
  Seed: FRGRGVFEL
FVGRGVFEA

SEQ ID NO: 26439 - protein, 9 aa, Artificial Sequence
  Description of Artificial Sequence: Synthetic peptide
  Seed: FRGRGVFEL
FVGRGVFEI

SEQ ID NO: 26440 - protein, 9 aa, Artificial Sequence
  Description of Artificial Sequence: Synthetic peptide
  Seed: FRGRGVFEL
FVGRGVFEL

SEQ ID NO: 26441 - protein, 9 aa, Artificial Sequence
  Description of Artificial Sequence: Synthetic peptide
  Seed: FRGRGVFEL
FVGRGVFEM

SEQ ID NO: 26442 - protein, 9 aa, Artificial Sequence
  Description of Artificial Sequence: Synthetic peptide
  Seed: FRGRGVFEL
FVGRGVFEF

SEQ ID NO: 26443 - protein, 9 aa, Artificial Sequence
  Description of Artificial Sequence: Synthetic peptide
  Seed: FRGRGVFEL
FVGRGVFES

SEQ ID NO: 26444 - protein, 9 aa, Artificial Sequence
  Description of Artificial Sequence: Synthetic peptide
  Seed: FRGRGVFEL
FVGRGVFET

SEQ ID NO: 26445 - protein, 9 aa, Artificial Sequence
  Description of Artificial Sequence: Synthetic peptide
  Seed: FRGRGVFEL
FVGRGVFEY

SEQ ID NO: 26446 - protein, 9 aa, Artificial Sequence
  Description of Artificial Sequence: Synthetic peptide
  Seed: FRGRGVFEL
FVGRGVFEV

SEQ ID NO: 26447 - protein, 9 aa, Artificial Sequence
  Description of Artificial Sequence: Synthetic peptide
  Seed: FRLLQNSQV
FRLLQNSQA

SEQ ID NO: 26448 - protein, 9 aa, Artificial Sequence
  Description of Artificial Sequence: Synthetic peptide
  Seed: FRLLQNSQV
FRLLQNSQR

SEQ ID NO: 26449 - protein, 9 aa, Artificial Sequence
  Description of Artificial Sequence: Synthetic peptide
  Seed: FRLLQNSQV
FRLLQNSQL

SEQ ID NO: 26450 - protein, 9 aa, Artificial Sequence
  Description of Artificial Sequence: Synthetic peptide
  Seed: FRLLQNSQV
FRLLQNSQK

SEQ ID NO: 26451 - protein, 9 aa, Artificial Sequence
  Description of Artificial Sequence: Synthetic peptide
  Seed: FRLLQNSQV
FRLLQNSQM

SEQ ID NO: 26452 - protein, 9 aa, Artificial Sequence
  Description of Artificial Sequence: Synthetic peptide
  Seed: FRLLQNSQV
FRLLQNSQF

SEQ ID NO: 26453 - protein, 9 aa, Artificial Sequence
  Description of Artificial Sequence: Synthetic peptide
  Seed: FRLLQNSQV
FRLLQNSQY

SEQ ID NO: 26454 - protein, 9 aa, Artificial Sequence
  Description of Artificial Sequence: Synthetic peptide
  Seed: FRLLQNSQV
FQLLQNSQL

SEQ ID NO: 26455 - protein, 10 aa, Artificial Sequence
  Description of Artificial Sequence: Synthetic peptide
  Seed: FRLLQNSQVF
FRLLQNSQVV

SEQ ID NO: 26456 - protein, 10 aa, Artificial Sequence
  Description of Artificial Sequence: Synthetic peptide
  Seed: FRLLQNSQVF
FNLLQNSQVA

SEQ ID NO: 26457 - protein, 10 aa, Artificial Sequence
  Description of Artificial Sequence: Synthetic peptide
  Seed: FRLLQNSQVF
FNLLQNSQVI

SEQ ID NO: 26458 - protein, 10 aa, Artificial Sequence
  Description of Artificial Sequence: Synthetic peptide
  Seed: FRLLQNSQVF
FQLLQNSQVL

SEQ ID NO: 26459 - protein, 10 aa, Artificial Sequence
  Description of Artificial Sequence: Synthetic peptide
  Seed: FRLLQNSQVF
FQLLQNSQVF

SEQ ID NO: 26460 - protein, 10 aa, Artificial Sequence
  Description of Artificial Sequence: Synthetic peptide
  Seed: FRLLQNSQVF
FQLLQNSQVW

SEQ ID NO: 26461 - protein, 10 aa, Artificial Sequence
  Description of Artificial Sequence: Synthetic peptide
  Seed: FRLLQNSQVF
FQLLQNSQVY

SEQ ID NO: 26462 - protein, 10 aa, Artificial Sequence
  Description of Artificial Sequence: Synthetic peptide
  Seed: FRLLQNSQVF
FQLLQNSQVV

SEQ ID NO: 26463 - protein, 10 aa, Artificial Sequence
  Description of Artificial Sequence: Synthetic peptide
  Seed: FRLLQNSQVF
FELLQNSQVA

SEQ ID NO: 26464 - protein, 10 aa, Artificial Sequence
  Description of Artificial Sequence: Synthetic peptide
  Seed: FRLLQNSQVF
FELLQNSQVI

SEQ ID NO: 26465 - protein, 10 aa, Artificial Sequence
  Description of Artificial Sequence: Synthetic peptide
  Seed: FRLLQNSQVF
FELLQNSQVL

SEQ ID NO: 26466 - protein, 10 aa, Artificial Sequence
  Description of Artificial Sequence: Synthetic peptide
  Seed: FRLLQNSQVF
FELLQNSQVM

SEQ ID NO: 26467 - protein, 10 aa, Artificial Sequence
  Description of Artificial Sequence: Synthetic peptide
  Seed: FRLLQNSQVF
FELLQNSQVF

SEQ ID NO: 26468 - protein, 10 aa, Artificial Sequence
  Description of Artificial Sequence: Synthetic peptide
  Seed: FRLLQNSQVF
FELLQNSQVY

SEQ ID NO: 26469 - protein, 10 aa, Artificial Sequence
  Description of Artificial Sequence: Synthetic peptide
  Seed: FRLLQNSQVF
FELLQNSQVV

SEQ ID NO: 26470 - protein, 10 aa, Artificial Sequence
  Description of Artificial Sequence: Synthetic peptide
  Seed: FRLLQNSQVF
FGLLQNSQVA

SEQ ID NO: 26471 - protein, 10 aa, Artificial Sequence
  Description of Artificial Sequence: Synthetic peptide
  Seed: FRLLQNSQVF
FGLLQNSQVI

SEQ ID NO: 26472 - protein, 10 aa, Artificial Sequence
  Description of Artificial Sequence: Synthetic peptide
  Seed: FRLLQNSQVF
FGLLQNSQVL

SEQ ID NO: 26473 - protein, 10 aa, Artificial Sequence
  Description of Artificial Sequence: Synthetic peptide
  Seed: FRLLQNSQVF
FGLLQNSQVM

SEQ ID NO: 26474 - protein, 10 aa, Artificial Sequence
  Description of Artificial Sequence: Synthetic peptide
  Seed: FRLLQNSQVF
FGLLQNSQVF

SEQ ID NO: 26475 - protein, 10 aa, Artificial Sequence
  Description of Artificial Sequence: Synthetic peptide
  Seed: FRLLQNSQVF
FGLLQNSQVY

SEQ ID NO: 26476 - protein, 10 aa, Artificial Sequence
  Description of Artificial Sequence: Synthetic peptide
  Seed: FRLLQNSQVF
FHLLQNSQVL

SEQ ID NO: 26477 - protein, 10 aa, Artificial Sequence
  Description of Artificial Sequence: Synthetic peptide
  Seed: FRLLQNSQVF
FHLLQNSQVM

SEQ ID NO: 26478 - protein, 10 aa, Artificial Sequence
  Description of Artificial Sequence: Synthetic peptide
  Seed: FRLLQNSQVF
FQLLQNSQVM

SEQ ID NO: 26479 - protein, 10 aa, Artificial Sequence
  Description of Artificial Sequence: Synthetic peptide
  Seed: FRLLQNSQVF
FQLLQNSQVI

SEQ ID NO: 26480 - protein, 10 aa, Artificial Sequence
  Description of Artificial Sequence: Synthetic peptide
  Seed: FRLLQNSQVF
FNLLQNSQVL

SEQ ID NO: 26481 - protein, 10 aa, Artificial Sequence
  Description of Artificial Sequence: Synthetic peptide
  Seed: FRLLQNSQVF
FQLLQNSQVH

SEQ ID NO: 26482 - protein, 10 aa, Artificial Sequence
  Description of Artificial Sequence: Synthetic peptide
  Seed: FRLLQNSQVF
FNLLQNSQVM

SEQ ID NO: 26483 - protein, 10 aa, Artificial Sequence
  Description of Artificial Sequence: Synthetic peptide
  Seed: FRLLQNSQVF
FNLLQNSQVF

SEQ ID NO: 26484 - protein, 10 aa, Artificial Sequence
  Description of Artificial Sequence: Synthetic peptide
  Seed: FRLLQNSQVF
FNLLQNSQVY

SEQ ID NO: 26485 - protein, 10 aa, Artificial Sequence
  Description of Artificial Sequence: Synthetic peptide
  Seed: FRLLQNSQVF
FNLLQNSQVV

SEQ ID NO: 26486 - protein, 10 aa, Artificial Sequence
  Description of Artificial Sequence: Synthetic peptide
  Seed: FRLLQNSQVF
FDLLQNSQVA

SEQ ID NO: 26487 - protein, 10 aa, Artificial Sequence
  Description of Artificial Sequence: Synthetic peptide
  Seed: FRLLQNSQVF
FDLLQNSQVI

SEQ ID NO: 26488 - protein, 10 aa, Artificial Sequence
  Description of Artificial Sequence: Synthetic peptide
  Seed: FRLLQNSQVF
FDLLQNSQVL

SEQ ID NO: 26489 - protein, 10 aa, Artificial Sequence
  Description of Artificial Sequence: Synthetic peptide
  Seed: FRLLQNSQVF
FDLLQNSQVM

SEQ ID NO: 26490 - protein, 10 aa, Artificial Sequence
  Description of Artificial Sequence: Synthetic peptide
  Seed: FRLLQNSQVF
FDLLQNSQVF

SEQ ID NO: 26491 - protein, 10 aa, Artificial Sequence
  Description of Artificial Sequence: Synthetic peptide
  Seed: FRLLQNSQVF
FDLLQNSQVY

SEQ ID NO: 26492 - protein, 10 aa, Artificial Sequence
  Description of Artificial Sequence: Synthetic peptide
  Seed: FRLLQNSQVF
FDLLQNSQVV

SEQ ID NO: 26493 - protein, 10 aa, Artificial Sequence
  Description of Artificial Sequence: Synthetic peptide
  Seed: FRLLQNSQVF
FCLLQNSQVA

SEQ ID NO: 26494 - protein, 10 aa, Artificial Sequence
  Description of Artificial Sequence: Synthetic peptide
  Seed: FRLLQNSQVF
FCLLQNSQVI

SEQ ID NO: 26495 - protein, 10 aa, Artificial Sequence
  Description of Artificial Sequence: Synthetic peptide
  Seed: FRLLQNSQVF
FCLLQNSQVL

SEQ ID NO: 26496 - protein, 10 aa, Artificial Sequence
  Description of Artificial Sequence: Synthetic peptide
  Seed: FRLLQNSQVF
FCLLQNSQVM

SEQ ID NO: 26497 - protein, 10 aa, Artificial Sequence
  Description of Artificial Sequence: Synthetic peptide
  Seed: FRLLQNSQVF
FCLLQNSQVF

SEQ ID NO: 26498 - protein, 10 aa, Artificial Sequence
  Description of Artificial Sequence: Synthetic peptide
  Seed: FRLLQNSQVF
FCLLQNSQVY

SEQ ID NO: 26499 - protein, 10 aa, Artificial Sequence
  Description of Artificial Sequence: Synthetic peptide
  Seed: FRLLQNSQVF
FCLLQNSQVV

SEQ ID NO: 26500 - protein, 10 aa, Artificial Sequence
  Description of Artificial Sequence: Synthetic peptide
  Seed: FRLLQNSQVF
FQLLQNSQVA

SEQ ID NO: 26501 - protein, 9 aa, Artificial Sequence
  Description of Artificial Sequence: Synthetic peptide
  Seed: FSVQRNLPF
FPVQRNLPI

SEQ ID NO: 26502 - protein, 9 aa, Artificial Sequence
  Description of Artificial Sequence: Synthetic peptide
  Seed: FSVQRNLPF
FPVQRNLPK

SEQ ID NO: 26503 - protein, 9 aa, Artificial Sequence
  Description of Artificial Sequence: Synthetic peptide
  Seed: GKWMRELVL
GHWMRELVA

SEQ ID NO: 26504 - protein, 11 aa, Artificial Sequence
  Description of Artificial Sequence: Synthetic peptide
  Seed: GKFQTAAQRAM
GNFQTAAQRAY

SEQ ID NO: 26505 - protein, 11 aa, Artificial Sequence
  Description of Artificial Sequence: Synthetic peptide
  Seed: GKDPKKTGGPI
GVDPKKTGGPL

SEQ ID NO: 26506 - protein, 11 aa, Artificial Sequence
  Description of Artificial Sequence: Synthetic peptide
  Seed: GKDPKKTGGPI
GVDPKKTGGPM

SEQ ID NO: 26507 - protein, 11 aa, Artificial Sequence
  Description of Artificial Sequence: Synthetic peptide
  Seed: GKDPKKTGGPI
GVDPKKTGGPF

SEQ ID NO: 26508 - protein, 11 aa, Artificial Sequence
  Description of Artificial Sequence: Synthetic peptide
  Seed: GKDPKKTGGPI
GVDPKKTGGPV

SEQ ID NO: 26509 - protein, 11 aa, Artificial Sequence
  Description of Artificial Sequence: Synthetic peptide
  Seed: GKFQTAAQRAM
GAFQTAAQRAF

SEQ ID NO: 26510 - protein, 11 aa, Artificial Sequence
  Description of Artificial Sequence: Synthetic peptide
  Seed: GKFQTAAQRAM
GAFQTAAQRAY

SEQ ID NO: 26511 - protein, 11 aa, Artificial Sequence
  Description of Artificial Sequence: Synthetic peptide
  Seed: GKFQTAAQRAM
GRFQTAAQRAF

SEQ ID NO: 26512 - protein, 11 aa, Artificial Sequence
  Description of Artificial Sequence: Synthetic peptide
  Seed: GKFQTAAQRAM
GRFQTAAQRAY

SEQ ID NO: 26513 - protein, 11 aa, Artificial Sequence
  Description of Artificial Sequence: Synthetic peptide
  Seed: GKFQTAAQRAM
GNFQTAAQRAF

SEQ ID NO: 26514 - protein, 11 aa, Artificial Sequence
  Description of Artificial Sequence: Synthetic peptide
  Seed: GKFQTAAQRAM
GDFQTAAQRAF

SEQ ID NO: 26515 - protein, 11 aa, Artificial Sequence
  Description of Artificial Sequence: Synthetic peptide
  Seed: GKFQTAAQRAM
GGFQTAAQRAF

SEQ ID NO: 26516 - protein, 11 aa, Artificial Sequence
  Description of Artificial Sequence: Synthetic peptide
  Seed: GKFQTAAQRAM
GDFQTAAQRAY

SEQ ID NO: 26517 - protein, 11 aa, Artificial Sequence
  Description of Artificial Sequence: Synthetic peptide
  Seed: GKFQTAAQRAM
GCFQTAAQRAF

SEQ ID NO: 26518 - protein, 11 aa, Artificial Sequence
  Description of Artificial Sequence: Synthetic peptide
  Seed: GKFQTAAQRAM
GCFQTAAQRAY

SEQ ID NO: 26519 - protein, 11 aa, Artificial Sequence
  Description of Artificial Sequence: Synthetic peptide
  Seed: GKFQTAAQRAM
GQFQTAAQRAL

SEQ ID NO: 26520 - protein, 11 aa, Artificial Sequence
  Description of Artificial Sequence: Synthetic peptide
  Seed: GKFQTAAQRAM
GQFQTAAQRAM

SEQ ID NO: 26521 - protein, 11 aa, Artificial Sequence
  Description of Artificial Sequence: Synthetic peptide
  Seed: GKFQTAAQRAM
GQFQTAAQRAF

SEQ ID NO: 26522 - protein, 11 aa, Artificial Sequence
  Description of Artificial Sequence: Synthetic peptide
  Seed: GKFQTAAQRAM
GQFQTAAQRAY

SEQ ID NO: 26523 - protein, 11 aa, Artificial Sequence
  Description of Artificial Sequence: Synthetic peptide
  Seed: GKFQTAAQRAM
GEFQTAAQRAM

SEQ ID NO: 26524 - protein, 11 aa, Artificial Sequence
  Description of Artificial Sequence: Synthetic peptide
  Seed: GKFQTAAQRAM
GEFQTAAQRAF

SEQ ID NO: 26525 - protein, 11 aa, Artificial Sequence
  Description of Artificial Sequence: Synthetic peptide
  Seed: GKDPKKTGGPI
GVDPKKTGGPI

SEQ ID NO: 26526 - protein, 11 aa, Artificial Sequence
  Description of Artificial Sequence: Synthetic peptide
  Seed: GKDPKKTGGPI
GYDPKKTGGPV

SEQ ID NO: 26527 - protein, 11 aa, Artificial Sequence
  Description of Artificial Sequence: Synthetic peptide
  Seed: GKDPKKTGGPI
GYDPKKTGGPF

SEQ ID NO: 26528 - protein, 11 aa, Artificial Sequence
  Description of Artificial Sequence: Synthetic peptide
  Seed: GKDPKKTGGPI
GYDPKKTGGPM

SEQ ID NO: 26529 - protein, 11 aa, Artificial Sequence
  Description of Artificial Sequence: Synthetic peptide
  Seed: GKDPKKTGGPI
GPDPKKTGGPF

SEQ ID NO: 26530 - protein, 11 aa, Artificial Sequence
  Description of Artificial Sequence: Synthetic peptide
  Seed: GKDPKKTGGPI
GPDPKKTGGPV

SEQ ID NO: 26531 - protein, 11 aa, Artificial Sequence
  Description of Artificial Sequence: Synthetic peptide
  Seed: GKDPKKTGGPI
GSDPKKTGGPI

SEQ ID NO: 26532 - protein, 11 aa, Artificial Sequence
  Description of Artificial Sequence: Synthetic peptide
  Seed: GKDPKKTGGPI
GSDPKKTGGPL

SEQ ID NO: 26533 - protein, 11 aa, Artificial Sequence
  Description of Artificial Sequence: Synthetic peptide
  Seed: GKDPKKTGGPI
GSDPKKTGGPM

SEQ ID NO: 26534 - protein, 11 aa, Artificial Sequence
  Description of Artificial Sequence: Synthetic peptide
  Seed: GKDPKKTGGPI
GSDPKKTGGPF

SEQ ID NO: 26535 - protein, 11 aa, Artificial Sequence
  Description of Artificial Sequence: Synthetic peptide
  Seed: GKDPKKTGGPI
GSDPKKTGGPV

SEQ ID NO: 26536 - protein, 11 aa, Artificial Sequence
  Description of Artificial Sequence: Synthetic peptide
  Seed: GKDPKKTGGPI
GTDPKKTGGPI

SEQ ID NO: 26537 - protein, 11 aa, Artificial Sequence
  Description of Artificial Sequence: Synthetic peptide
  Seed: GKDPKKTGGPI
GTDPKKTGGPL

SEQ ID NO: 26538 - protein, 11 aa, Artificial Sequence
  Description of Artificial Sequence: Synthetic peptide
  Seed: GKDPKKTGGPI
GTDPKKTGGPM

SEQ ID NO: 26539 - protein, 11 aa, Artificial Sequence
  Description of Artificial Sequence: Synthetic peptide
  Seed: GKDPKKTGGPI
GTDPKKTGGPF

SEQ ID NO: 26540 - protein, 11 aa, Artificial Sequence
  Description of Artificial Sequence: Synthetic peptide
  Seed: GKDPKKTGGPI
GTDPKKTGGPV

SEQ ID NO: 26541 - protein, 11 aa, Artificial Sequence
  Description of Artificial Sequence: Synthetic peptide
  Seed: GKDPKKTGGPI
GWDPKKTGGPI

SEQ ID NO: 26542 - protein, 11 aa, Artificial Sequence
  Description of Artificial Sequence: Synthetic peptide
  Seed: GKDPKKTGGPI
GWDPKKTGGPL

SEQ ID NO: 26543 - protein, 11 aa, Artificial Sequence
  Description of Artificial Sequence: Synthetic peptide
  Seed: GKDPKKTGGPI
GWDPKKTGGPM

SEQ ID NO: 26544 - protein, 11 aa, Artificial Sequence
  Description of Artificial Sequence: Synthetic peptide
  Seed: GKDPKKTGGPI
GWDPKKTGGPF

SEQ ID NO: 26545 - protein, 11 aa, Artificial Sequence
  Description of Artificial Sequence: Synthetic peptide
  Seed: GKDPKKTGGPI
GWDPKKTGGPV

SEQ ID NO: 26546 - protein, 11 aa, Artificial Sequence
  Description of Artificial Sequence: Synthetic peptide
  Seed: GKDPKKTGGPI
GYDPKKTGGPI

SEQ ID NO: 26547 - protein, 11 aa, Artificial Sequence
  Description of Artificial Sequence: Synthetic peptide
  Seed: GKDPKKTGGPI
GYDPKKTGGPL

SEQ ID NO: 26548 - protein, 11 aa, Artificial Sequence
  Description of Artificial Sequence: Synthetic peptide
  Seed: GKFQTAAQRAM
GEFQTAAQRAY

SEQ ID NO: 26549 - protein, 11 aa, Artificial Sequence
  Description of Artificial Sequence: Synthetic peptide
  Seed: GKFQTAAQRAM
GGFQTAAQRAY

SEQ ID NO: 26550 - protein, 11 aa, Artificial Sequence
  Description of Artificial Sequence: Synthetic peptide
  Seed: GKDPKKTGGPI
GPDPKKTGGPL

SEQ ID NO: 26551 - protein, 11 aa, Artificial Sequence
  Description of Artificial Sequence: Synthetic peptide
  Seed: GKFQTAAQRAM
GVFQTAAQRAF

SEQ ID NO: 26552 - protein, 11 aa, Artificial Sequence
  Description of Artificial Sequence: Synthetic peptide
  Seed: GKFQTAAQRAM
GVFQTAAQRAY

SEQ ID NO: 26553 - protein, 10 aa, Artificial Sequence
  Description of Artificial Sequence: Synthetic peptide
  Seed: GKMIDGIGRF
GAMIDGIGRF

SEQ ID NO: 26554 - protein, 10 aa, Artificial Sequence
  Description of Artificial Sequence: Synthetic peptide
  Seed: GKMIDGIGRF
GAMIDGIGRY

SEQ ID NO: 26555 - protein, 10 aa, Artificial Sequence
  Description of Artificial Sequence: Synthetic peptide
  Seed: GKMIDGIGRF
GRMIDGIGRR

SEQ ID NO: 26556 - protein, 10 aa, Artificial Sequence
  Description of Artificial Sequence: Synthetic peptide
  Seed: GKMIDGIGRF
GRMIDGIGRI

SEQ ID NO: 26557 - protein, 10 aa, Artificial Sequence
  Description of Artificial Sequence: Synthetic peptide
  Seed: GKMIDGIGRF
GRMIDGIGRL

SEQ ID NO: 26558 - protein, 10 aa, Artificial Sequence
  Description of Artificial Sequence: Synthetic peptide
  Seed: GKMIDGIGRF
GRMIDGIGRK

SEQ ID NO: 26559 - protein, 10 aa, Artificial Sequence
  Description of Artificial Sequence: Synthetic peptide
  Seed: GKMIDGIGRF
GRMIDGIGRM

SEQ ID NO: 26560 - protein, 10 aa, Artificial Sequence
  Description of Artificial Sequence: Synthetic peptide
  Seed: GKMIDGIGRF
GRMIDGIGRW

SEQ ID NO: 26561 - protein, 11 aa, Artificial Sequence
  Description of Artificial Sequence: Synthetic peptide
  Seed: GKFQTAAQRAM
GHFQTAAQRAM

SEQ ID NO: 26562 - protein, 10 aa, Artificial Sequence
  Description of Artificial Sequence: Synthetic peptide
  Seed: GKMIDGIGRF
GRMIDGIGRY

SEQ ID NO: 26563 - protein, 10 aa, Artificial Sequence
  Description of Artificial Sequence: Synthetic peptide
  Seed: GKMIDGIGRF
GRMIDGIGRV

SEQ ID NO: 26564 - protein, 10 aa, Artificial Sequence
  Description of Artificial Sequence: Synthetic peptide
  Seed: GKMIDGIGRF
GNMIDGIGRF

SEQ ID NO: 26565 - protein, 10 aa, Artificial Sequence
  Description of Artificial Sequence: Synthetic peptide
  Seed: GKMIDGIGRF
GNMIDGIGRY

SEQ ID NO: 26566 - protein, 10 aa, Artificial Sequence
  Description of Artificial Sequence: Synthetic peptide
  Seed: GKMIDGIGRF
GDMIDGIGRF

SEQ ID NO: 26567 - protein, 10 aa, Artificial Sequence
  Description of Artificial Sequence: Synthetic peptide
  Seed: GKMIDGIGRF
GDMIDGIGRY

SEQ ID NO: 26568 - protein, 10 aa, Artificial Sequence
  Description of Artificial Sequence: Synthetic peptide
  Seed: GKMIDGIGRF
GCMIDGIGRF

SEQ ID NO: 26569 - protein, 10 aa, Artificial Sequence
  Description of Artificial Sequence: Synthetic peptide
  Seed: GKMIDGIGRF
GCMIDGIGRY

SEQ ID NO: 26570 - protein, 10 aa, Artificial Sequence
  Description of Artificial Sequence: Synthetic peptide
  Seed: GKMIDGIGRF
GQMIDGIGRM

SEQ ID NO: 26571 - protein, 11 aa, Artificial Sequence
  Description of Artificial Sequence: Synthetic peptide
  Seed: GKFQTAAQRAM
GYFQTAAQRAY

SEQ ID NO: 26572 - protein, 11 aa, Artificial Sequence
  Description of Artificial Sequence: Synthetic peptide
  Seed: GKFQTAAQRAM
GYFQTAAQRAF

SEQ ID NO: 26573 - protein, 11 aa, Artificial Sequence
  Description of Artificial Sequence: Synthetic peptide
  Seed: GKFQTAAQRAM
GWFQTAAQRAY

SEQ ID NO: 26574 - protein, 11 aa, Artificial Sequence
  Description of Artificial Sequence: Synthetic peptide
  Seed: GKFQTAAQRAM
GWFQTAAQRAF

SEQ ID NO: 26575 - protein, 11 aa, Artificial Sequence
  Description of Artificial Sequence: Synthetic peptide
  Seed: GKFQTAAQRAM
GHFQTAAQRAF

SEQ ID NO: 26576 - protein, 11 aa, Artificial Sequence
  Description of Artificial Sequence: Synthetic peptide
  Seed: GKFQTAAQRAM
GHFQTAAQRAY

SEQ ID NO: 26577 - protein, 11 aa, Artificial Sequence
  Description of Artificial Sequence: Synthetic peptide
  Seed: GKFQTAAQRAM
GIFQTAAQRAF

SEQ ID NO: 26578 - protein, 11 aa, Artificial Sequence
  Description of Artificial Sequence: Synthetic peptide
  Seed: GKFQTAAQRAM
GIFQTAAQRAY

SEQ ID NO: 26579 - protein, 11 aa, Artificial Sequence
  Description of Artificial Sequence: Synthetic peptide
  Seed: GKFQTAAQRAM
GLFQTAAQRAF

SEQ ID NO: 26580 - protein, 11 aa, Artificial Sequence
  Description of Artificial Sequence: Synthetic peptide
  Seed: GKFQTAAQRAM
GLFQTAAQRAY

SEQ ID NO: 26581 - protein, 11 aa, Artificial Sequence
  Description of Artificial Sequence: Synthetic peptide
  Seed: GKFQTAAQRAM
GKFQTAAQRAF

SEQ ID NO: 26582 - protein, 11 aa, Artificial Sequence
  Description of Artificial Sequence: Synthetic peptide
  Seed: GKFQTAAQRAM
GKFQTAAQRAY

SEQ ID NO: 26583 - protein, 11 aa, Artificial Sequence
  Description of Artificial Sequence: Synthetic peptide
  Seed: GKFQTAAQRAM
GMFQTAAQRAM

SEQ ID NO: 26584 - protein, 11 aa, Artificial Sequence
  Description of Artificial Sequence: Synthetic peptide
  Seed: GKFQTAAQRAM
GMFQTAAQRAF

SEQ ID NO: 26585 - protein, 11 aa, Artificial Sequence
  Description of Artificial Sequence: Synthetic peptide
  Seed: GKFQTAAQRAM
GMFQTAAQRAY

SEQ ID NO: 26586 - protein, 11 aa, Artificial Sequence
  Description of Artificial Sequence: Synthetic peptide
  Seed: GKFQTAAQRAM
GFFQTAAQRAF

SEQ ID NO: 26587 - protein, 11 aa, Artificial Sequence
  Description of Artificial Sequence: Synthetic peptide
  Seed: GKFQTAAQRAM
GFFQTAAQRAY

SEQ ID NO: 26588 - protein, 11 aa, Artificial Sequence
  Description of Artificial Sequence: Synthetic peptide
  Seed: GKFQTAAQRAM
GPFQTAAQRAF

SEQ ID NO: 26589 - protein, 11 aa, Artificial Sequence
  Description of Artificial Sequence: Synthetic peptide
  Seed: GKFQTAAQRAM
GPFQTAAQRAY

SEQ ID NO: 26590 - protein, 11 aa, Artificial Sequence
  Description of Artificial Sequence: Synthetic peptide
  Seed: GKFQTAAQRAM
GSFQTAAQRAF

SEQ ID NO: 26591 - protein, 11 aa, Artificial Sequence
  Description of Artificial Sequence: Synthetic peptide
  Seed: GKFQTAAQRAM
GSFQTAAQRAY

SEQ ID NO: 26592 - protein, 11 aa, Artificial Sequence
  Description of Artificial Sequence: Synthetic peptide
  Seed: GKFQTAAQRAM
GTFQTAAQRAF

SEQ ID NO: 26593 - protein, 11 aa, Artificial Sequence
  Description of Artificial Sequence: Synthetic peptide
  Seed: GKFQTAAQRAM
GTFQTAAQRAY

SEQ ID NO: 26594 - protein, 11 aa, Artificial Sequence
  Description of Artificial Sequence: Synthetic peptide
  Seed: GKDPKKTGGPI
GPDPKKTGGPM

SEQ ID NO: 26595 - protein, 11 aa, Artificial Sequence
  Description of Artificial Sequence: Synthetic peptide
  Seed: GKDPKKTGGPI
GPDPKKTGGPI

SEQ ID NO: 26596 - protein, 9 aa, Artificial Sequence
  Description of Artificial Sequence: Synthetic peptide
  Seed: FSVQRNLPF
FPVQRNLPM

SEQ ID NO: 26597 - protein, 11 aa, Artificial Sequence
  Description of Artificial Sequence: Synthetic peptide
  Seed: GKDPKKTGGPI
GNDPKKTGGPI

SEQ ID NO: 26598 - protein, 11 aa, Artificial Sequence
  Description of Artificial Sequence: Synthetic peptide
  Seed: GKDPKKTGGPI
GADPKKTGGPL

SEQ ID NO: 26599 - protein, 11 aa, Artificial Sequence
  Description of Artificial Sequence: Synthetic peptide
  Seed: GKDPKKTGGPI
GADPKKTGGPM

SEQ ID NO: 26600 - protein, 11 aa, Artificial Sequence
  Description of Artificial Sequence: Synthetic peptide
  Seed: GKDPKKTGGPI
GADPKKTGGPF

SEQ ID NO: 26601 - protein, 11 aa, Artificial Sequence
  Description of Artificial Sequence: Synthetic peptide
  Seed: GKDPKKTGGPI
GADPKKTGGPV

SEQ ID NO: 26602 - protein, 11 aa, Artificial Sequence
  Description of Artificial Sequence: Synthetic peptide
  Seed: GKDPKKTGGPI
GRDPKKTGGPL

SEQ ID NO: 26603 - protein, 11 aa, Artificial Sequence
  Description of Artificial Sequence: Synthetic peptide
  Seed: GKDPKKTGGPI
GRDPKKTGGPM

SEQ ID NO: 26604 - protein, 11 aa, Artificial Sequence
  Description of Artificial Sequence: Synthetic peptide
  Seed: GKDPKKTGGPI
GRDPKKTGGPF

SEQ ID NO: 26605 - protein, 11 aa, Artificial Sequence
  Description of Artificial Sequence: Synthetic peptide
  Seed: GKDPKKTGGPI
GRDPKKTGGPV

SEQ ID NO: 26606 - protein, 11 aa, Artificial Sequence
  Description of Artificial Sequence: Synthetic peptide
  Seed: GKDPKKTGGPI
GNDPKKTGGPL

SEQ ID NO: 26607 - protein, 11 aa, Artificial Sequence
  Description of Artificial Sequence: Synthetic peptide
  Seed: GKDPKKTGGPI
GCDPKKTGGPM

SEQ ID NO: 26608 - protein, 11 aa, Artificial Sequence
  Description of Artificial Sequence: Synthetic peptide
  Seed: GKDPKKTGGPI
GNDPKKTGGPM

SEQ ID NO: 26609 - protein, 11 aa, Artificial Sequence
  Description of Artificial Sequence: Synthetic peptide
  Seed: GKDPKKTGGPI
GNDPKKTGGPF

SEQ ID NO: 26610 - protein, 11 aa, Artificial Sequence
  Description of Artificial Sequence: Synthetic peptide
  Seed: GKDPKKTGGPI
GNDPKKTGGPV

SEQ ID NO: 26611 - protein, 11 aa, Artificial Sequence
  Description of Artificial Sequence: Synthetic peptide
  Seed: GKDPKKTGGPI
GDDPKKTGGPI

SEQ ID NO: 26612 - protein, 11 aa, Artificial Sequence
  Description of Artificial Sequence: Synthetic peptide
  Seed: GKDPKKTGGPI
GDDPKKTGGPL

SEQ ID NO: 26613 - protein, 11 aa, Artificial Sequence
  Description of Artificial Sequence: Synthetic peptide
  Seed: GKDPKKTGGPI
GDDPKKTGGPM

SEQ ID NO: 26614 - protein, 11 aa, Artificial Sequence
  Description of Artificial Sequence: Synthetic peptide
  Seed: GKDPKKTGGPI
GDDPKKTGGPF

SEQ ID NO: 26615 - protein, 11 aa, Artificial Sequence
  Description of Artificial Sequence: Synthetic peptide
  Seed: GKDPKKTGGPI
GDDPKKTGGPV

SEQ ID NO: 26616 - protein, 11 aa, Artificial Sequence
  Description of Artificial Sequence: Synthetic peptide
  Seed: GKDPKKTGGPI
GCDPKKTGGPI

SEQ ID NO: 26617 - protein, 11 aa, Artificial Sequence
  Description of Artificial Sequence: Synthetic peptide
  Seed: GKDPKKTGGPI
GADPKKTGGPI

SEQ ID NO: 26618 - protein, 9 aa, Artificial Sequence
  Description of Artificial Sequence: Synthetic peptide
  Seed: GINDRNFWR
GVNDRNFWY

SEQ ID NO: 26619 - protein, 9 aa, Artificial Sequence
  Description of Artificial Sequence: Synthetic peptide
  Seed: GINDRNFWR
GVNDRNFWK

SEQ ID NO: 26620 - protein, 9 aa, Artificial Sequence
  Description of Artificial Sequence: Synthetic peptide
  Seed: GINDRNFWR
GHNDRNFWR

SEQ ID NO: 26621 - protein, 9 aa, Artificial Sequence
  Description of Artificial Sequence: Synthetic peptide
  Seed: GINDRNFWR
GINDRNFWK

SEQ ID NO: 26622 - protein, 9 aa, Artificial Sequence
  Description of Artificial Sequence: Synthetic peptide
  Seed: GINDRNFWR
GLNDRNFWR

SEQ ID NO: 26623 - protein, 9 aa, Artificial Sequence
  Description of Artificial Sequence: Synthetic peptide
  Seed: GINDRNFWR
GLNDRNFWK

SEQ ID NO: 26624 - protein, 9 aa, Artificial Sequence
  Description of Artificial Sequence: Synthetic peptide
  Seed: GINDRNFWR
GMNDRNFWR

SEQ ID NO: 26625 - protein, 9 aa, Artificial Sequence
  Description of Artificial Sequence: Synthetic peptide
  Seed: GINDRNFWR
GMNDRNFWH

SEQ ID NO: 26626 - protein, 9 aa, Artificial Sequence
  Description of Artificial Sequence: Synthetic peptide
  Seed: GINDRNFWR
GMNDRNFWK

SEQ ID NO: 26627 - protein, 9 aa, Artificial Sequence
  Description of Artificial Sequence: Synthetic peptide
  Seed: GINDRNFWR
GMNDRNFWY

SEQ ID NO: 26628 - protein, 9 aa, Artificial Sequence
  Description of Artificial Sequence: Synthetic peptide
  Seed: GINDRNFWR
GFNDRNFWR

SEQ ID NO: 26629 - protein, 9 aa, Artificial Sequence
  Description of Artificial Sequence: Synthetic peptide
  Seed: GINDRNFWR
GFNDRNFWK

SEQ ID NO: 26630 - protein, 9 aa, Artificial Sequence
  Description of Artificial Sequence: Synthetic peptide
  Seed: GINDRNFWR
GSNDRNFWR

SEQ ID NO: 26631 - protein, 9 aa, Artificial Sequence
  Description of Artificial Sequence: Synthetic peptide
  Seed: GINDRNFWR
GSNDRNFWK

SEQ ID NO: 26632 - protein, 9 aa, Artificial Sequence
  Description of Artificial Sequence: Synthetic peptide
  Seed: GINDRNFWR
GTNDRNFWR

SEQ ID NO: 26633 - protein, 9 aa, Artificial Sequence
  Description of Artificial Sequence: Synthetic peptide
  Seed: GINDRNFWR
GTNDRNFWK

SEQ ID NO: 26634 - protein, 9 aa, Artificial Sequence
  Description of Artificial Sequence: Synthetic peptide
  Seed: GINDRNFWR
GTNDRNFWY

SEQ ID NO: 26635 - protein, 9 aa, Artificial Sequence
  Description of Artificial Sequence: Synthetic peptide
  Seed: GINDRNFWR
GWNDRNFWR

SEQ ID NO: 26636 - protein, 9 aa, Artificial Sequence
  Description of Artificial Sequence: Synthetic peptide
  Seed: GINDRNFWR
GWNDRNFWK

SEQ ID NO: 26637 - protein, 9 aa, Artificial Sequence
  Description of Artificial Sequence: Synthetic peptide
  Seed: GINDRNFWR
GYNDRNFWR

SEQ ID NO: 26638 - protein, 9 aa, Artificial Sequence
  Description of Artificial Sequence: Synthetic peptide
  Seed: GINDRNFWR
GYNDRNFWK

SEQ ID NO: 26639 - protein, 11 aa, Artificial Sequence
  Description of Artificial Sequence: Synthetic peptide
  Seed: GKDPKKTGGPI
GCDPKKTGGPL

SEQ ID NO: 26640 - protein, 11 aa, Artificial Sequence
  Description of Artificial Sequence: Synthetic peptide
  Seed: GKDPKKTGGPI
GCDPKKTGGPF

SEQ ID NO: 26641 - protein, 11 aa, Artificial Sequence
  Description of Artificial Sequence: Synthetic peptide
  Seed: GKDPKKTGGPI
GFDPKKTGGPV

SEQ ID NO: 26642 - protein, 11 aa, Artificial Sequence
  Description of Artificial Sequence: Synthetic peptide
  Seed: GKDPKKTGGPI
GKDPKKTGGPF

SEQ ID NO: 26643 - protein, 11 aa, Artificial Sequence
  Description of Artificial Sequence: Synthetic peptide
  Seed: GKDPKKTGGPI
GIDPKKTGGPF

SEQ ID NO: 26644 - protein, 11 aa, Artificial Sequence
  Description of Artificial Sequence: Synthetic peptide
  Seed: GKDPKKTGGPI
GIDPKKTGGPV

SEQ ID NO: 26645 - protein, 11 aa, Artificial Sequence
  Description of Artificial Sequence: Synthetic peptide
  Seed: GKDPKKTGGPI
GLDPKKTGGPI

SEQ ID NO: 26646 - protein, 11 aa, Artificial Sequence
  Description of Artificial Sequence: Synthetic peptide
  Seed: GKDPKKTGGPI
GLDPKKTGGPL

SEQ ID NO: 26647 - protein, 11 aa, Artificial Sequence
  Description of Artificial Sequence: Synthetic peptide
  Seed: GKDPKKTGGPI
GLDPKKTGGPM

SEQ ID NO: 26648 - protein, 11 aa, Artificial Sequence
  Description of Artificial Sequence: Synthetic peptide
  Seed: GKDPKKTGGPI
GLDPKKTGGPF

SEQ ID NO: 26649 - protein, 11 aa, Artificial Sequence
  Description of Artificial Sequence: Synthetic peptide
  Seed: GKDPKKTGGPI
GLDPKKTGGPV

SEQ ID NO: 26650 - protein, 11 aa, Artificial Sequence
  Description of Artificial Sequence: Synthetic peptide
  Seed: GKDPKKTGGPI
GKDPKKTGGPL

SEQ ID NO: 26651 - protein, 11 aa, Artificial Sequence
  Description of Artificial Sequence: Synthetic peptide
  Seed: GKDPKKTGGPI
GKDPKKTGGPM

SEQ ID NO: 26652 - protein, 11 aa, Artificial Sequence
  Description of Artificial Sequence: Synthetic peptide
  Seed: GKDPKKTGGPI
GKDPKKTGGPV

SEQ ID NO: 26653 - protein, 11 aa, Artificial Sequence
  Description of Artificial Sequence: Synthetic peptide
  Seed: GKDPKKTGGPI
GCDPKKTGGPV

SEQ ID NO: 26654 - protein, 11 aa, Artificial Sequence
  Description of Artificial Sequence: Synthetic peptide
  Seed: GKDPKKTGGPI
GMDPKKTGGPI

SEQ ID NO: 26655 - protein, 11 aa, Artificial Sequence
  Description of Artificial Sequence: Synthetic peptide
  Seed: GKDPKKTGGPI
GMDPKKTGGPL

SEQ ID NO: 26656 - protein, 11 aa, Artificial Sequence
  Description of Artificial Sequence: Synthetic peptide
  Seed: GKDPKKTGGPI
GMDPKKTGGPM

SEQ ID NO: 26657 - protein, 11 aa, Artificial Sequence
  Description of Artificial Sequence: Synthetic peptide
  Seed: GKDPKKTGGPI
GMDPKKTGGPF

SEQ ID NO: 26658 - protein, 11 aa, Artificial Sequence
  Description of Artificial Sequence: Synthetic peptide
  Seed: GKDPKKTGGPI
GMDPKKTGGPV

SEQ ID NO: 26659 - protein, 11 aa, Artificial Sequence
  Description of Artificial Sequence: Synthetic peptide
  Seed: GKDPKKTGGPI
GFDPKKTGGPI

SEQ ID NO: 26660 - protein, 11 aa, Artificial Sequence
  Description of Artificial Sequence: Synthetic peptide
  Seed: GKDPKKTGGPI
GFDPKKTGGPL

SEQ ID NO: 26661 - protein, 11 aa, Artificial Sequence
  Description of Artificial Sequence: Synthetic peptide
  Seed: GKDPKKTGGPI
GFDPKKTGGPM

SEQ ID NO: 26662 - protein, 11 aa, Artificial Sequence
  Description of Artificial Sequence: Synthetic peptide
  Seed: GKDPKKTGGPI
GFDPKKTGGPF

SEQ ID NO: 26663 - protein, 11 aa, Artificial Sequence
  Description of Artificial Sequence: Synthetic peptide
  Seed: GKDPKKTGGPI
GIDPKKTGGPM

SEQ ID NO: 26664 - protein, 11 aa, Artificial Sequence
  Description of Artificial Sequence: Synthetic peptide
  Seed: GKDPKKTGGPI
GIDPKKTGGPL

SEQ ID NO: 26665 - protein, 11 aa, Artificial Sequence
  Description of Artificial Sequence: Synthetic peptide
  Seed: GKDPKKTGGPI
GIDPKKTGGPI

SEQ ID NO: 26666 - protein, 11 aa, Artificial Sequence
  Description of Artificial Sequence: Synthetic peptide
  Seed: GKDPKKTGGPI
GHDPKKTGGPV

SEQ ID NO: 26667 - protein, 11 aa, Artificial Sequence
  Description of Artificial Sequence: Synthetic peptide
  Seed: GKDPKKTGGPI
GQDPKKTGGPI

SEQ ID NO: 26668 - protein, 11 aa, Artificial Sequence
  Description of Artificial Sequence: Synthetic peptide
  Seed: GKDPKKTGGPI
GQDPKKTGGPL

SEQ ID NO: 26669 - protein, 11 aa, Artificial Sequence
  Description of Artificial Sequence: Synthetic peptide
  Seed: GKDPKKTGGPI
GQDPKKTGGPM

SEQ ID NO: 26670 - protein, 11 aa, Artificial Sequence
  Description of Artificial Sequence: Synthetic peptide
  Seed: GKDPKKTGGPI
GQDPKKTGGPF

SEQ ID NO: 26671 - protein, 11 aa, Artificial Sequence
  Description of Artificial Sequence: Synthetic peptide
  Seed: GKDPKKTGGPI
GQDPKKTGGPV

SEQ ID NO: 26672 - protein, 11 aa, Artificial Sequence
  Description of Artificial Sequence: Synthetic peptide
  Seed: GKDPKKTGGPI
GEDPKKTGGPI

SEQ ID NO: 26673 - protein, 11 aa, Artificial Sequence
  Description of Artificial Sequence: Synthetic peptide
  Seed: GKDPKKTGGPI
GEDPKKTGGPL

SEQ ID NO: 26674 - protein, 11 aa, Artificial Sequence
  Description of Artificial Sequence: Synthetic peptide
  Seed: GKDPKKTGGPI
GEDPKKTGGPM

SEQ ID NO: 26675 - protein, 11 aa, Artificial Sequence
  Description of Artificial Sequence: Synthetic peptide
  Seed: GKDPKKTGGPI
GEDPKKTGGPF

SEQ ID NO: 26676 - protein, 11 aa, Artificial Sequence
  Description of Artificial Sequence: Synthetic peptide
  Seed: GKDPKKTGGPI
GEDPKKTGGPV

SEQ ID NO: 26677 - protein, 11 aa, Artificial Sequence
  Description of Artificial Sequence: Synthetic peptide
  Seed: GKDPKKTGGPI
GGDPKKTGGPI

SEQ ID NO: 26678 - protein, 11 aa, Artificial Sequence
  Description of Artificial Sequence: Synthetic peptide
  Seed: GKDPKKTGGPI
GGDPKKTGGPL

SEQ ID NO: 26679 - protein, 11 aa, Artificial Sequence
  Description of Artificial Sequence: Synthetic peptide
  Seed: GKDPKKTGGPI
GGDPKKTGGPM

SEQ ID NO: 26680 - protein, 11 aa, Artificial Sequence
  Description of Artificial Sequence: Synthetic peptide
  Seed: GKDPKKTGGPI
GGDPKKTGGPF

SEQ ID NO: 26681 - protein, 11 aa, Artificial Sequence
  Description of Artificial Sequence: Synthetic peptide
  Seed: GKDPKKTGGPI
GGDPKKTGGPV

SEQ ID NO: 26682 - protein, 11 aa, Artificial Sequence
  Description of Artificial Sequence: Synthetic peptide
  Seed: GKDPKKTGGPI
GHDPKKTGGPI

SEQ ID NO: 26683 - protein, 11 aa, Artificial Sequence
  Description of Artificial Sequence: Synthetic peptide
  Seed: GKDPKKTGGPI
GHDPKKTGGPL

SEQ ID NO: 26684 - protein, 11 aa, Artificial Sequence
  Description of Artificial Sequence: Synthetic peptide
  Seed: GKDPKKTGGPI
GHDPKKTGGPM

SEQ ID NO: 26685 - protein, 11 aa, Artificial Sequence
  Description of Artificial Sequence: Synthetic peptide
  Seed: GKDPKKTGGPI
GHDPKKTGGPF

SEQ ID NO: 26686 - protein, 10 aa, Artificial Sequence
  Description of Artificial Sequence: Synthetic peptide
  Seed: GKMIDGIGRF
GQMIDGIGRF

SEQ ID NO: 26687 - protein, 10 aa, Artificial Sequence
  Description of Artificial Sequence: Synthetic peptide
  Seed: GKMIDGIGRF
GQMIDGIGRY

SEQ ID NO: 26688 - protein, 10 aa, Artificial Sequence
  Description of Artificial Sequence: Synthetic peptide
  Seed: GKMIDGIGRF
GEMIDGIGRF

SEQ ID NO: 26689 - protein, 10 aa, Artificial Sequence
  Description of Artificial Sequence: Synthetic peptide
  Seed: GKWMRELILY
GHWMRELILY

SEQ ID NO: 26690 - protein, 10 aa, Artificial Sequence
  Description of Artificial Sequence: Synthetic peptide
  Seed: GKWMRELILY
GDWMRELILY

SEQ ID NO: 26691 - protein, 10 aa, Artificial Sequence
  Description of Artificial Sequence: Synthetic peptide
  Seed: GKWMRELILY
GCWMRELILY

SEQ ID NO: 26692 - protein, 10 aa, Artificial Sequence
  Description of Artificial Sequence: Synthetic peptide
  Seed: GKWMRELILY
GQWMRELILM

SEQ ID NO: 26693 - protein, 10 aa, Artificial Sequence
  Description of Artificial Sequence: Synthetic peptide
  Seed: GKWMRELILY
GQWMRELILF

SEQ ID NO: 26694 - protein, 10 aa, Artificial Sequence
  Description of Artificial Sequence: Synthetic peptide
  Seed: GKWMRELILY
GQWMRELILY

SEQ ID NO: 26695 - protein, 10 aa, Artificial Sequence
  Description of Artificial Sequence: Synthetic peptide
  Seed: GKWMRELILY
GEWMRELILF

SEQ ID NO: 26696 - protein, 10 aa, Artificial Sequence
  Description of Artificial Sequence: Synthetic peptide
  Seed: GKWMRELILY
GEWMRELILY

SEQ ID NO: 26697 - protein, 10 aa, Artificial Sequence
  Description of Artificial Sequence: Synthetic peptide
  Seed: GKWMRELILY
GGWMRELILY

SEQ ID NO: 26698 - protein, 10 aa, Artificial Sequence
  Description of Artificial Sequence: Synthetic peptide
  Seed: GKWMRELILY
GHWMRELILF

SEQ ID NO: 26699 - protein, 10 aa, Artificial Sequence
  Description of Artificial Sequence: Synthetic peptide
  Seed: GKWMRELILY
GIWMRELILY

SEQ ID NO: 26700 - protein, 10 aa, Artificial Sequence
  Description of Artificial Sequence: Synthetic peptide
  Seed: GKWMRELILY
GWWMRELILY

SEQ ID NO: 26701 - protein, 10 aa, Artificial Sequence
  Description of Artificial Sequence: Synthetic peptide
  Seed: GKWMRELILY
GLWMRELILY

SEQ ID NO: 26702 - protein, 10 aa, Artificial Sequence
  Description of Artificial Sequence: Synthetic peptide
  Seed: GKWMRELILY
GKWMRELILM

SEQ ID NO: 26703 - protein, 10 aa, Artificial Sequence
  Description of Artificial Sequence: Synthetic peptide
  Seed: GKWMRELILY
GKWMRELILF

SEQ ID NO: 26704 - protein, 10 aa, Artificial Sequence
  Description of Artificial Sequence: Synthetic peptide
  Seed: GKWMRELILY
GMWMRELILF

SEQ ID NO: 26705 - protein, 10 aa, Artificial Sequence
  Description of Artificial Sequence: Synthetic peptide
  Seed: GKWMRELILY
GMWMRELILY

SEQ ID NO: 26706 - protein, 10 aa, Artificial Sequence
  Description of Artificial Sequence: Synthetic peptide
  Seed: GKWMRELILY
GFWMRELILF

SEQ ID NO: 26707 - protein, 10 aa, Artificial Sequence
  Description of Artificial Sequence: Synthetic peptide
  Seed: GKWMRELILY
GFWMRELILY

SEQ ID NO: 26708 - protein, 10 aa, Artificial Sequence
  Description of Artificial Sequence: Synthetic peptide
  Seed: GKWMRELILY
GPWMRELILY

SEQ ID NO: 26709 - protein, 10 aa, Artificial Sequence
  Description of Artificial Sequence: Synthetic peptide
  Seed: GKWMRELILY
GSWMRELILY

SEQ ID NO: 26710 - protein, 10 aa, Artificial Sequence
  Description of Artificial Sequence: Synthetic peptide
  Seed: GKWMRELILY
GNWMRELILY

SEQ ID NO: 26711 - protein, 10 aa, Artificial Sequence
  Description of Artificial Sequence: Synthetic peptide
  Seed: GKWMRELILY
GRWMRELILY

SEQ ID NO: 26712 - protein, 10 aa, Artificial Sequence
  Description of Artificial Sequence: Synthetic peptide
  Seed: GKWMRELILY
GAWMRELILY

SEQ ID NO: 26713 - protein, 9 aa, Artificial Sequence
  Description of Artificial Sequence: Synthetic peptide
  Seed: GKWMRELIL
GVWMRELIY

SEQ ID NO: 26714 - protein, 9 aa, Artificial Sequence
  Description of Artificial Sequence: Synthetic peptide
  Seed: GKWMRELIL
GKWMRELIM

SEQ ID NO: 26715 - protein, 9 aa, Artificial Sequence
  Description of Artificial Sequence: Synthetic peptide
  Seed: GKWMRELIL
GKWMRELIF

SEQ ID NO: 26716 - protein, 9 aa, Artificial Sequence
  Description of Artificial Sequence: Synthetic peptide
  Seed: GKWMRELIL
GKWMRELIY

SEQ ID NO: 26717 - protein, 9 aa, Artificial Sequence
  Description of Artificial Sequence: Synthetic peptide
  Seed: GKWMRELIL
GMWMRELIH

SEQ ID NO: 26718 - protein, 9 aa, Artificial Sequence
  Description of Artificial Sequence: Synthetic peptide
  Seed: GKWMRELIL
GMWMRELII

SEQ ID NO: 26719 - protein, 9 aa, Artificial Sequence
  Description of Artificial Sequence: Synthetic peptide
  Seed: GKWMRELIL
GMWMRELIL

SEQ ID NO: 26720 - protein, 9 aa, Artificial Sequence
  Description of Artificial Sequence: Synthetic peptide
  Seed: GKWMRELIL
GMWMRELIM

SEQ ID NO: 26721 - protein, 9 aa, Artificial Sequence
  Description of Artificial Sequence: Synthetic peptide
  Seed: GKWMRELIL
GMWMRELIF

SEQ ID NO: 26722 - protein, 9 aa, Artificial Sequence
  Description of Artificial Sequence: Synthetic peptide
  Seed: GKWMRELIL
GMWMRELIW

SEQ ID NO: 26723 - protein, 9 aa, Artificial Sequence
  Description of Artificial Sequence: Synthetic peptide
  Seed: GKWMRELIL
GMWMRELIY

SEQ ID NO: 26724 - protein, 9 aa, Artificial Sequence
  Description of Artificial Sequence: Synthetic peptide
  Seed: GKWMRELIL
GFWMRELIF

SEQ ID NO: 26725 - protein, 9 aa, Artificial Sequence
  Description of Artificial Sequence: Synthetic peptide
  Seed: GKWMRELIL
GSWMRELIM

SEQ ID NO: 26726 - protein, 9 aa, Artificial Sequence
  Description of Artificial Sequence: Synthetic peptide
  Seed: GKWMRELIL
GSWMRELIF

SEQ ID NO: 26727 - protein, 9 aa, Artificial Sequence
  Description of Artificial Sequence: Synthetic peptide
  Seed: GKWMRELIL
GSWMRELIY

SEQ ID NO: 26728 - protein, 9 aa, Artificial Sequence
  Description of Artificial Sequence: Synthetic peptide
  Seed: GKWMRELIL
GTWMRELIF

SEQ ID NO: 26729 - protein, 9 aa, Artificial Sequence
  Description of Artificial Sequence: Synthetic peptide
  Seed: GKWMRELIL
GTWMRELIY

SEQ ID NO: 26730 - protein, 9 aa, Artificial Sequence
  Description of Artificial Sequence: Synthetic peptide
  Seed: GKWMRELIL
GYWMRELIF

SEQ ID NO: 26731 - protein, 9 aa, Artificial Sequence
  Description of Artificial Sequence: Synthetic peptide
  Seed: GKWMRELIL
GYWMRELIY

SEQ ID NO: 26732 - protein, 9 aa, Artificial Sequence
  Description of Artificial Sequence: Synthetic peptide
  Seed: GKWMRELIL
GVWMRELIF

SEQ ID NO: 26733 - protein, 10 aa, Artificial Sequence
  Description of Artificial Sequence: Synthetic peptide
  Seed: GKWMRELILY
GTWMRELILY

SEQ ID NO: 26734 - protein, 10 aa, Artificial Sequence
  Description of Artificial Sequence: Synthetic peptide
  Seed: GKWMRELILY
GYWMRELILF

SEQ ID NO: 26735 - protein, 10 aa, Artificial Sequence
  Description of Artificial Sequence: Synthetic peptide
  Seed: GKMIDGIGRF
GEMIDGIGRY

SEQ ID NO: 26736 - protein, 9 aa, Artificial Sequence
  Description of Artificial Sequence: Synthetic peptide
  Seed: GKWMRELVL
GQWMRELVK

SEQ ID NO: 26737 - protein, 9 aa, Artificial Sequence
  Description of Artificial Sequence: Synthetic peptide
  Seed: GKWMRELVL
GRWMRELVV

SEQ ID NO: 26738 - protein, 9 aa, Artificial Sequence
  Description of Artificial Sequence: Synthetic peptide
  Seed: GKWMRELVL
GNWMRELVM

SEQ ID NO: 26739 - protein, 9 aa, Artificial Sequence
  Description of Artificial Sequence: Synthetic peptide
  Seed: GKWMRELVL
GNWMRELVF

SEQ ID NO: 26740 - protein, 9 aa, Artificial Sequence
  Description of Artificial Sequence: Synthetic peptide
  Seed: GKWMRELVL
GNWMRELVY

SEQ ID NO: 26741 - protein, 9 aa, Artificial Sequence
  Description of Artificial Sequence: Synthetic peptide
  Seed: GKWMRELVL
GQWMRELVA

SEQ ID NO: 26742 - protein, 9 aa, Artificial Sequence
  Description of Artificial Sequence: Synthetic peptide
  Seed: GKWMRELVL
GQWMRELVG

SEQ ID NO: 26743 - protein, 9 aa, Artificial Sequence
  Description of Artificial Sequence: Synthetic peptide
  Seed: GKWMRELVL
GQWMRELVH

SEQ ID NO: 26744 - protein, 9 aa, Artificial Sequence
  Description of Artificial Sequence: Synthetic peptide
  Seed: GKWMRELVL
GQWMRELVI

SEQ ID NO: 26745 - protein, 9 aa, Artificial Sequence
  Description of Artificial Sequence: Synthetic peptide
  Seed: GKWMRELVL
GQWMRELVL

SEQ ID NO: 26746 - protein, 9 aa, Artificial Sequence
  Description of Artificial Sequence: Synthetic peptide
  Seed: GKWMRELVL
GQWMRELVM

SEQ ID NO: 26747 - protein, 10 aa, Artificial Sequence
  Description of Artificial Sequence: Synthetic peptide
  Seed: GKWMRELILY
GYWMRELILY

SEQ ID NO: 26748 - protein, 9 aa, Artificial Sequence
  Description of Artificial Sequence: Synthetic peptide
  Seed: GKWMRELVL
GQWMRELVF

SEQ ID NO: 26749 - protein, 9 aa, Artificial Sequence
  Description of Artificial Sequence: Synthetic peptide
  Seed: GKWMRELVL
GQWMRELVW

SEQ ID NO: 26750 - protein, 9 aa, Artificial Sequence
  Description of Artificial Sequence: Synthetic peptide
  Seed: GKWMRELVL
GQWMRELVY

SEQ ID NO: 26751 - protein, 9 aa, Artificial Sequence
  Description of Artificial Sequence: Synthetic peptide
  Seed: GKWMRELVL
GQWMRELVV

SEQ ID NO: 26752 - protein, 9 aa, Artificial Sequence
  Description of Artificial Sequence: Synthetic peptide
  Seed: GKWMRELVL
GEWMRELVL

SEQ ID NO: 26753 - protein, 9 aa, Artificial Sequence
  Description of Artificial Sequence: Synthetic peptide
  Seed: GKWMRELVL
GEWMRELVM

SEQ ID NO: 26754 - protein, 9 aa, Artificial Sequence
  Description of Artificial Sequence: Synthetic peptide
  Seed: GKWMRELVL
GEWMRELVF

SEQ ID NO: 26755 - protein, 9 aa, Artificial Sequence
  Description of Artificial Sequence: Synthetic peptide
  Seed: GKWMRELVL
GEWMRELVY

SEQ ID NO: 26756 - protein, 9 aa, Artificial Sequence
  Description of Artificial Sequence: Synthetic peptide
  Seed: GKWMRELVL
GGWMRELVF

SEQ ID NO: 26757 - protein, 9 aa, Artificial Sequence
  Description of Artificial Sequence: Synthetic peptide
  Seed: GKWMRELVL
GRWMRELVY

SEQ ID NO: 26758 - protein, 9 aa, Artificial Sequence
  Description of Artificial Sequence: Synthetic peptide
  Seed: GKWMRELVL
GRWMRELVW

SEQ ID NO: 26759 - protein, 9 aa, Artificial Sequence
  Description of Artificial Sequence: Synthetic peptide
  Seed: GKWMRELVL
GRWMRELVT

SEQ ID NO: 26760 - protein, 9 aa, Artificial Sequence
  Description of Artificial Sequence: Synthetic peptide
  Seed: GKWMRELVL
GRWMRELVS

SEQ ID NO: 26761 - protein, 10 aa, Artificial Sequence
  Description of Artificial Sequence: Synthetic peptide
  Seed: GKWMRELILY
GVWMRELILY

SEQ ID NO: 26762 - protein, 9 aa, Artificial Sequence
  Description of Artificial Sequence: Synthetic peptide
  Seed: GKWMRELVL
GAWMRELVL

SEQ ID NO: 26763 - protein, 9 aa, Artificial Sequence
  Description of Artificial Sequence: Synthetic peptide
  Seed: GKWMRELVL
GAWMRELVM

SEQ ID NO: 26764 - protein, 9 aa, Artificial Sequence
  Description of Artificial Sequence: Synthetic peptide
  Seed: GKWMRELVL
GAWMRELVF

SEQ ID NO: 26765 - protein, 9 aa, Artificial Sequence
  Description of Artificial Sequence: Synthetic peptide
  Seed: GKWMRELVL
GAWMRELVY

SEQ ID NO: 26766 - protein, 9 aa, Artificial Sequence
  Description of Artificial Sequence: Synthetic peptide
  Seed: GKWMRELVL
GRWMRELVA

SEQ ID NO: 26767 - protein, 9 aa, Artificial Sequence
  Description of Artificial Sequence: Synthetic peptide
  Seed: GKWMRELVL
GRWMRELVR

SEQ ID NO: 26768 - protein, 9 aa, Artificial Sequence
  Description of Artificial Sequence: Synthetic peptide
  Seed: GKWMRELVL
GRWMRELVN

SEQ ID NO: 26769 - protein, 9 aa, Artificial Sequence
  Description of Artificial Sequence: Synthetic peptide
  Seed: GKWMRELVL
GRWMRELVC

SEQ ID NO: 26770 - protein, 9 aa, Artificial Sequence
  Description of Artificial Sequence: Synthetic peptide
  Seed: GKWMRELVL
GRWMRELVQ

SEQ ID NO: 26771 - protein, 9 aa, Artificial Sequence
  Description of Artificial Sequence: Synthetic peptide
  Seed: GKWMRELVL
GRWMRELVE

SEQ ID NO: 26772 - protein, 9 aa, Artificial Sequence
  Description of Artificial Sequence: Synthetic peptide
  Seed: GKWMRELVL
GRWMRELVG

SEQ ID NO: 26773 - protein, 9 aa, Artificial Sequence
  Description of Artificial Sequence: Synthetic peptide
  Seed: GKWMRELVL
GRWMRELVH

SEQ ID NO: 26774 - protein, 9 aa, Artificial Sequence
  Description of Artificial Sequence: Synthetic peptide
  Seed: GKWMRELVL
GRWMRELVI

SEQ ID NO: 26775 - protein, 9 aa, Artificial Sequence
  Description of Artificial Sequence: Synthetic peptide
  Seed: GKWMRELVL
GRWMRELVK

SEQ ID NO: 26776 - protein, 9 aa, Artificial Sequence
  Description of Artificial Sequence: Synthetic peptide
  Seed: GKWMRELVL
GRWMRELVM

SEQ ID NO: 26777 - protein, 9 aa, Artificial Sequence
  Description of Artificial Sequence: Synthetic peptide
  Seed: GKWMRELVL
GRWMRELVF

SEQ ID NO: 26778 - protein, 9 aa, Artificial Sequence
  Description of Artificial Sequence: Synthetic peptide
  Seed: GKWMRELVL
GRWMRELVP

SEQ ID NO: 26779 - protein, 9 aa, Artificial Sequence
  Description of Artificial Sequence: Synthetic peptide
  Seed: GKWMRELIL
GKWMRELII

SEQ ID NO: 26780 - protein, 9 aa, Artificial Sequence
  Description of Artificial Sequence: Synthetic peptide
  Seed: GKWMRELIL
GLWMRELIY

SEQ ID NO: 26781 - protein, 9 aa, Artificial Sequence
  Description of Artificial Sequence: Synthetic peptide
  Seed: GKWMRELIL
GLWMRELIF

SEQ ID NO: 26782 - protein, 11 aa, Artificial Sequence
  Description of Artificial Sequence: Synthetic peptide
  Seed: GKMIDGIGRFY
GRMIDGIGRFM

SEQ ID NO: 26783 - protein, 10 aa, Artificial Sequence
  Description of Artificial Sequence: Synthetic peptide
  Seed: GKMIDGIGRF
GYMIDGIGRY

SEQ ID NO: 26784 - protein, 10 aa, Artificial Sequence
  Description of Artificial Sequence: Synthetic peptide
  Seed: GKMIDGIGRF
GVMIDGIGRF

SEQ ID NO: 26785 - protein, 10 aa, Artificial Sequence
  Description of Artificial Sequence: Synthetic peptide
  Seed: GKMIDGIGRF
GVMIDGIGRY

SEQ ID NO: 26786 - protein, 11 aa, Artificial Sequence
  Description of Artificial Sequence: Synthetic peptide
  Seed: GKMIDGIGRFY
GAMIDGIGRFY

SEQ ID NO: 26787 - protein, 11 aa, Artificial Sequence
  Description of Artificial Sequence: Synthetic peptide
  Seed: GKMIDGIGRFY
GRMIDGIGRFA

SEQ ID NO: 26788 - protein, 11 aa, Artificial Sequence
  Description of Artificial Sequence: Synthetic peptide
  Seed: GKMIDGIGRFY
GRMIDGIGRFR

SEQ ID NO: 26789 - protein, 11 aa, Artificial Sequence
  Description of Artificial Sequence: Synthetic peptide
  Seed: GKMIDGIGRFY
GRMIDGIGRFI

SEQ ID NO: 26790 - protein, 11 aa, Artificial Sequence
  Description of Artificial Sequence: Synthetic peptide
  Seed: GKMIDGIGRFY
GRMIDGIGRFL

SEQ ID NO: 26791 - protein, 11 aa, Artificial Sequence
  Description of Artificial Sequence: Synthetic peptide
  Seed: GKMIDGIGRFY
GRMIDGIGRFK

SEQ ID NO: 26792 - protein, 11 aa, Artificial Sequence
  Description of Artificial Sequence: Synthetic peptide
  Seed: GKMIDGIGRFY
GRMIDGIGRFF

SEQ ID NO: 26793 - protein, 9 aa, Artificial Sequence
  Description of Artificial Sequence: Synthetic peptide
  Seed: GKWMRELIL
GLWMRELIM

SEQ ID NO: 26794 - protein, 11 aa, Artificial Sequence
  Description of Artificial Sequence: Synthetic peptide
  Seed: GKMIDGIGRFY
GRMIDGIGRFW

SEQ ID NO: 26795 - protein, 11 aa, Artificial Sequence
  Description of Artificial Sequence: Synthetic peptide
  Seed: GKMIDGIGRFY
GRMIDGIGRFV

SEQ ID NO: 26796 - protein, 11 aa, Artificial Sequence
  Description of Artificial Sequence: Synthetic peptide
  Seed: GKMIDGIGRFY
GQMIDGIGRFM

SEQ ID NO: 26797 - protein, 11 aa, Artificial Sequence
  Description of Artificial Sequence: Synthetic peptide
  Seed: GKMIDGIGRFY
GQMIDGIGRFF

SEQ ID NO: 26798 - protein, 11 aa, Artificial Sequence
  Description of Artificial Sequence: Synthetic peptide
  Seed: GKMIDGIGRFY
GQMIDGIGRFY

SEQ ID NO: 26799 - protein, 11 aa, Artificial Sequence
  Description of Artificial Sequence: Synthetic peptide
  Seed: GKMIDGIGRFY
GHMIDGIGRFY

SEQ ID NO: 26800 - protein, 11 aa, Artificial Sequence
  Description of Artificial Sequence: Synthetic peptide
  Seed: GKMIDGIGRFY
GIMIDGIGRFY

SEQ ID NO: 26801 - protein, 11 aa, Artificial Sequence
  Description of Artificial Sequence: Synthetic peptide
  Seed: GKMIDGIGRFY
GLMIDGIGRFY

SEQ ID NO: 26802 - protein, 10 aa, Artificial Sequence
  Description of Artificial Sequence: Synthetic peptide
  Seed: GKMIDGIGRF
GYMIDGIGRF

SEQ ID NO: 26803 - protein, 10 aa, Artificial Sequence
  Description of Artificial Sequence: Synthetic peptide
  Seed: GKMIDGIGRF
GWMIDGIGRY

SEQ ID NO: 26804 - protein, 10 aa, Artificial Sequence
  Description of Artificial Sequence: Synthetic peptide
  Seed: GKMIDGIGRF
GWMIDGIGRF

SEQ ID NO: 26805 - protein, 10 aa, Artificial Sequence
  Description of Artificial Sequence: Synthetic peptide
  Seed: GKMIDGIGRF
GTMIDGIGRY

SEQ ID NO: 26806 - protein, 10 aa, Artificial Sequence
  Description of Artificial Sequence: Synthetic peptide
  Seed: GKMIDGIGRF
GGMIDGIGRF

SEQ ID NO: 26807 - protein, 10 aa, Artificial Sequence
  Description of Artificial Sequence: Synthetic peptide
  Seed: GKMIDGIGRF
GGMIDGIGRY

SEQ ID NO: 26808 - protein, 10 aa, Artificial Sequence
  Description of Artificial Sequence: Synthetic peptide
  Seed: GKMIDGIGRF
GHMIDGIGRF

SEQ ID NO: 26809 - protein, 10 aa, Artificial Sequence
  Description of Artificial Sequence: Synthetic peptide
  Seed: GKMIDGIGRF
GHMIDGIGRY

SEQ ID NO: 26810 - protein, 10 aa, Artificial Sequence
  Description of Artificial Sequence: Synthetic peptide
  Seed: GKMIDGIGRF
GIMIDGIGRF

SEQ ID NO: 26811 - protein, 10 aa, Artificial Sequence
  Description of Artificial Sequence: Synthetic peptide
  Seed: GKMIDGIGRF
GIMIDGIGRY

SEQ ID NO: 26812 - protein, 10 aa, Artificial Sequence
  Description of Artificial Sequence: Synthetic peptide
  Seed: GKMIDGIGRF
GLMIDGIGRF

SEQ ID NO: 26813 - protein, 10 aa, Artificial Sequence
  Description of Artificial Sequence: Synthetic peptide
  Seed: GKMIDGIGRF
GLMIDGIGRY

SEQ ID NO: 26814 - protein, 10 aa, Artificial Sequence
  Description of Artificial Sequence: Synthetic peptide
  Seed: GKMIDGIGRF
GKMIDGIGRY

SEQ ID NO: 26815 - protein, 10 aa, Artificial Sequence
  Description of Artificial Sequence: Synthetic peptide
  Seed: GKMIDGIGRF
GMMIDGIGRM

SEQ ID NO: 26816 - protein, 10 aa, Artificial Sequence
  Description of Artificial Sequence: Synthetic peptide
  Seed: GKMIDGIGRF
GMMIDGIGRF

SEQ ID NO: 26817 - protein, 10 aa, Artificial Sequence
  Description of Artificial Sequence: Synthetic peptide
  Seed: GKMIDGIGRF
GMMIDGIGRY

SEQ ID NO: 26818 - protein, 10 aa, Artificial Sequence
  Description of Artificial Sequence: Synthetic peptide
  Seed: GKMIDGIGRF
GFMIDGIGRF

SEQ ID NO: 26819 - protein, 10 aa, Artificial Sequence
  Description of Artificial Sequence: Synthetic peptide
  Seed: GKMIDGIGRF
GFMIDGIGRY

SEQ ID NO: 26820 - protein, 10 aa, Artificial Sequence
  Description of Artificial Sequence: Synthetic peptide
  Seed: GKMIDGIGRF
GPMIDGIGRF

SEQ ID NO: 26821 - protein, 10 aa, Artificial Sequence
  Description of Artificial Sequence: Synthetic peptide
  Seed: GKMIDGIGRF
GPMIDGIGRY

SEQ ID NO: 26822 - protein, 10 aa, Artificial Sequence
  Description of Artificial Sequence: Synthetic peptide
  Seed: GKMIDGIGRF
GSMIDGIGRF

SEQ ID NO: 26823 - protein, 10 aa, Artificial Sequence
  Description of Artificial Sequence: Synthetic peptide
  Seed: GKMIDGIGRF
GSMIDGIGRY

SEQ ID NO: 26824 - protein, 10 aa, Artificial Sequence
  Description of Artificial Sequence: Synthetic peptide
  Seed: GKMIDGIGRF
GTMIDGIGRF

SEQ ID NO: 26825 - protein, 11 aa, Artificial Sequence
  Description of Artificial Sequence: Synthetic peptide
  Seed: GKMIDGIGRFY
GKMIDGIGRFF

SEQ ID NO: 26826 - protein, 11 aa, Artificial Sequence
  Description of Artificial Sequence: Synthetic peptide
  Seed: GKMIDGIGRFY
GMMIDGIGRFF

SEQ ID NO: 26827 - protein, 11 aa, Artificial Sequence
  Description of Artificial Sequence: Synthetic peptide
  Seed: GKMIDGIGRFY
GMMIDGIGRFY

SEQ ID NO: 26828 - protein, 9 aa, Artificial Sequence
  Description of Artificial Sequence: Synthetic peptide
  Seed: GKWMRELIL
GNWMRELIY

SEQ ID NO: 26829 - protein, 9 aa, Artificial Sequence
  Description of Artificial Sequence: Synthetic peptide
  Seed: GKWMRELIL
GQWMRELIH

SEQ ID NO: 26830 - protein, 9 aa, Artificial Sequence
  Description of Artificial Sequence: Synthetic peptide
  Seed: GKWMRELIL
GQWMRELII

SEQ ID NO: 26831 - protein, 9 aa, Artificial Sequence
  Description of Artificial Sequence: Synthetic peptide
  Seed: GKWMRELIL
GQWMRELIL

SEQ ID NO: 26832 - protein, 9 aa, Artificial Sequence
  Description of Artificial Sequence: Synthetic peptide
  Seed: GKWMRELIL
GQWMRELIM

SEQ ID NO: 26833 - protein, 9 aa, Artificial Sequence
  Description of Artificial Sequence: Synthetic peptide
  Seed: GKWMRELIL
GQWMRELIF

SEQ ID NO: 26834 - protein, 9 aa, Artificial Sequence
  Description of Artificial Sequence: Synthetic peptide
  Seed: GKWMRELIL
GQWMRELIW

SEQ ID NO: 26835 - protein, 9 aa, Artificial Sequence
  Description of Artificial Sequence: Synthetic peptide
  Seed: GKWMRELIL
GQWMRELIY

SEQ ID NO: 26836 - protein, 9 aa, Artificial Sequence
  Description of Artificial Sequence: Synthetic peptide
  Seed: GKWMRELIL
GQWMRELIV

SEQ ID NO: 26837 - protein, 9 aa, Artificial Sequence
  Description of Artificial Sequence: Synthetic peptide
  Seed: GKWMRELIL
GEWMRELIM

SEQ ID NO: 26838 - protein, 9 aa, Artificial Sequence
  Description of Artificial Sequence: Synthetic peptide
  Seed: GKWMRELIL
GEWMRELIF

SEQ ID NO: 26839 - protein, 9 aa, Artificial Sequence
  Description of Artificial Sequence: Synthetic peptide
  Seed: GKWMRELIL
GEWMRELIY

SEQ ID NO: 26840 - protein, 9 aa, Artificial Sequence
  Description of Artificial Sequence: Synthetic peptide
  Seed: GKWMRELIL
GGWMRELIF

SEQ ID NO: 26841 - protein, 9 aa, Artificial Sequence
  Description of Artificial Sequence: Synthetic peptide
  Seed: GKWMRELIL
GGWMRELIY

SEQ ID NO: 26842 - protein, 9 aa, Artificial Sequence
  Description of Artificial Sequence: Synthetic peptide
  Seed: GKWMRELIL
GHWMRELIL

SEQ ID NO: 26843 - protein, 9 aa, Artificial Sequence
  Description of Artificial Sequence: Synthetic peptide
  Seed: GKWMRELIL
GHWMRELIM

SEQ ID NO: 26844 - protein, 9 aa, Artificial Sequence
  Description of Artificial Sequence: Synthetic peptide
  Seed: GKWMRELIL
GHWMRELIF

SEQ ID NO: 26845 - protein, 9 aa, Artificial Sequence
  Description of Artificial Sequence: Synthetic peptide
  Seed: GKWMRELIL
GHWMRELIY

SEQ ID NO: 26846 - protein, 9 aa, Artificial Sequence
  Description of Artificial Sequence: Synthetic peptide
  Seed: GKWMRELIL
GIWMRELIF

SEQ ID NO: 26847 - protein, 9 aa, Artificial Sequence
  Description of Artificial Sequence: Synthetic peptide
  Seed: GKWMRELIL
GIWMRELIY

SEQ ID NO: 26848 - protein, 9 aa, Artificial Sequence
  Description of Artificial Sequence: Synthetic peptide
  Seed: GKWMRELIL
GQWMRELIA

SEQ ID NO: 26849 - protein, 9 aa, Artificial Sequence
  Description of Artificial Sequence: Synthetic peptide
  Seed: GKWMRELIL
GNWMRELIF

SEQ ID NO: 26850 - protein, 11 aa, Artificial Sequence
  Description of Artificial Sequence: Synthetic peptide
  Seed: GKMIDGIGRFY
GFMIDGIGRFY

SEQ ID NO: 26851 - protein, 9 aa, Artificial Sequence
  Description of Artificial Sequence: Synthetic peptide
  Seed: GKWMRELIL
GRWMRELIV

SEQ ID NO: 26852 - protein, 11 aa, Artificial Sequence
  Description of Artificial Sequence: Synthetic peptide
  Seed: GKMIDGIGRFY
GSMIDGIGRFY

SEQ ID NO: 26853 - protein, 11 aa, Artificial Sequence
  Description of Artificial Sequence: Synthetic peptide
  Seed: GKMIDGIGRFY
GTMIDGIGRFY

SEQ ID NO: 26854 - protein, 11 aa, Artificial Sequence
  Description of Artificial Sequence: Synthetic peptide
  Seed: GKMIDGIGRFY
GYMIDGIGRFY

SEQ ID NO: 26855 - protein, 11 aa, Artificial Sequence
  Description of Artificial Sequence: Synthetic peptide
  Seed: GKMIDGIGRFY
GVMIDGIGRFY

SEQ ID NO: 26856 - protein, 9 aa, Artificial Sequence
  Description of Artificial Sequence: Synthetic peptide
  Seed: GKWMRELIL
GAWMRELIM

SEQ ID NO: 26857 - protein, 9 aa, Artificial Sequence
  Description of Artificial Sequence: Synthetic peptide
  Seed: GKWMRELIL
GAWMRELIF

SEQ ID NO: 26858 - protein, 9 aa, Artificial Sequence
  Description of Artificial Sequence: Synthetic peptide
  Seed: GKWMRELIL
GAWMRELIY

SEQ ID NO: 26859 - protein, 9 aa, Artificial Sequence
  Description of Artificial Sequence: Synthetic peptide
  Seed: GKWMRELIL
GRWMRELIA

SEQ ID NO: 26860 - protein, 9 aa, Artificial Sequence
  Description of Artificial Sequence: Synthetic peptide
  Seed: GKWMRELIL
GRWMRELIC

SEQ ID NO: 26861 - protein, 9 aa, Artificial Sequence
  Description of Artificial Sequence: Synthetic peptide
  Seed: GKWMRELIL
GRWMRELIG

SEQ ID NO: 26862 - protein, 9 aa, Artificial Sequence
  Description of Artificial Sequence: Synthetic peptide
  Seed: GKWMRELIL
GRWMRELII

SEQ ID NO: 26863 - protein, 9 aa, Artificial Sequence
  Description of Artificial Sequence: Synthetic peptide
  Seed: GKWMRELIL
GRWMRELIL

SEQ ID NO: 26864 - protein, 9 aa, Artificial Sequence
  Description of Artificial Sequence: Synthetic peptide
  Seed: GKWMRELIL
GRWMRELIM

SEQ ID NO: 26865 - protein, 9 aa, Artificial Sequence
  Description of Artificial Sequence: Synthetic peptide
  Seed: GKWMRELIL
GRWMRELIF

SEQ ID NO: 26866 - protein, 9 aa, Artificial Sequence
  Description of Artificial Sequence: Synthetic peptide
  Seed: GKWMRELIL
GRWMRELIP

SEQ ID NO: 26867 - protein, 9 aa, Artificial Sequence
  Description of Artificial Sequence: Synthetic peptide
  Seed: GKWMRELIL
GRWMRELIS

SEQ ID NO: 26868 - protein, 9 aa, Artificial Sequence
  Description of Artificial Sequence: Synthetic peptide
  Seed: GKWMRELIL
GRWMRELIT

SEQ ID NO: 26869 - protein, 9 aa, Artificial Sequence
  Description of Artificial Sequence: Synthetic peptide
  Seed: GKWMRELIL
GRWMRELIW

SEQ ID NO: 26870 - protein, 9 aa, Artificial Sequence
  Description of Artificial Sequence: Synthetic peptide
  Seed: GKWMRELIL
GRWMRELIY

SEQ ID NO: 26871 - protein, 9 aa, Artificial Sequence
  Description of Artificial Sequence: Synthetic peptide
  Seed: GINDRNFWR
GGNDRNFWK

SEQ ID NO: 26872 - protein, 9 aa, Artificial Sequence
  Description of Artificial Sequence: Synthetic peptide
  Seed: GINDRNFWR
GGNDRNFWR

SEQ ID NO: 26873 - protein, 9 aa, Artificial Sequence
  Description of Artificial Sequence: Synthetic peptide
  Seed: GINDRNFWR
GQNDRNFWK

SEQ ID NO: 26874 - protein, 9 aa, Artificial Sequence
  Description of Artificial Sequence: Synthetic peptide
  Seed: FYIQMCTEL
FFIQMCTEA

SEQ ID NO: 26875 - protein, 9 aa, Artificial Sequence
  Description of Artificial Sequence: Synthetic peptide
  Seed: FYIQMCTEL
FLIQMCTEY

SEQ ID NO: 26876 - protein, 9 aa, Artificial Sequence
  Description of Artificial Sequence: Synthetic peptide
  Seed: FYIQMCTEL
FKIQMCTEY

SEQ ID NO: 26877 - protein, 9 aa, Artificial Sequence
  Description of Artificial Sequence: Synthetic peptide
  Seed: FYIQMCTEL
FMIQMCTEI

SEQ ID NO: 26878 - protein, 9 aa, Artificial Sequence
  Description of Artificial Sequence: Synthetic peptide
  Seed: FYIQMCTEL
FMIQMCTEL

SEQ ID NO: 26879 - protein, 9 aa, Artificial Sequence
  Description of Artificial Sequence: Synthetic peptide
  Seed: FYIQMCTEL
FMIQMCTEM

SEQ ID NO: 26880 - protein, 9 aa, Artificial Sequence
  Description of Artificial Sequence: Synthetic peptide
  Seed: FYIQMCTEL
FMIQMCTEF

SEQ ID NO: 26881 - protein, 9 aa, Artificial Sequence
  Description of Artificial Sequence: Synthetic peptide
  Seed: FYIQMCTEL
FMIQMCTEW

SEQ ID NO: 26882 - protein, 9 aa, Artificial Sequence
  Description of Artificial Sequence: Synthetic peptide
  Seed: FYIQMCTEL
FMIQMCTEY

SEQ ID NO: 26883 - protein, 9 aa, Artificial Sequence
  Description of Artificial Sequence: Synthetic peptide
  Seed: FYIQMCTEL
FMIQMCTEV

SEQ ID NO: 26884 - protein, 9 aa, Artificial Sequence
  Description of Artificial Sequence: Synthetic peptide
  Seed: FYIQMCTEL
FFIQMCTEH

SEQ ID NO: 26885 - protein, 9 aa, Artificial Sequence
  Description of Artificial Sequence: Synthetic peptide
  Seed: FYIQMCTEL
FSIQMCTEM

SEQ ID NO: 26886 - protein, 9 aa, Artificial Sequence
  Description of Artificial Sequence: Synthetic peptide
  Seed: FYIQMCTEL
FFIQMCTEI

SEQ ID NO: 26887 - protein, 9 aa, Artificial Sequence
  Description of Artificial Sequence: Synthetic peptide
  Seed: FYIQMCTEL
FFIQMCTEL

SEQ ID NO: 26888 - protein, 9 aa, Artificial Sequence
  Description of Artificial Sequence: Synthetic peptide
  Seed: FYIQMCTEL
FFIQMCTEM

SEQ ID NO: 26889 - protein, 9 aa, Artificial Sequence
  Description of Artificial Sequence: Synthetic peptide
  Seed: FYIQMCTEL
FFIQMCTEF

SEQ ID NO: 26890 - protein, 9 aa, Artificial Sequence
  Description of Artificial Sequence: Synthetic peptide
  Seed: FYIQMCTEL
FFIQMCTEW

SEQ ID NO: 26891 - protein, 9 aa, Artificial Sequence
  Description of Artificial Sequence: Synthetic peptide
  Seed: FYIQMCTEL
FFIQMCTEY

SEQ ID NO: 26892 - protein, 9 aa, Artificial Sequence
  Description of Artificial Sequence: Synthetic peptide
  Seed: FYIQMCTEL
FFIQMCTEV

SEQ ID NO: 26893 - protein, 9 aa, Artificial Sequence
  Description of Artificial Sequence: Synthetic peptide
  Seed: FYIQMCTEL
FPIQMCTEM

SEQ ID NO: 26894 - protein, 9 aa, Artificial Sequence
  Description of Artificial Sequence: Synthetic peptide
  Seed: FYIQMCTEL
FPIQMCTEY

SEQ ID NO: 26895 - protein, 9 aa, Artificial Sequence
  Description of Artificial Sequence: Synthetic peptide
  Seed: FYIQMCTEL
FLIQMCTEF

SEQ ID NO: 26896 - protein, 9 aa, Artificial Sequence
  Description of Artificial Sequence: Synthetic peptide
  Seed: FYIQMCTEL
FLIQMCTEM

SEQ ID NO: 26897 - protein, 9 aa, Artificial Sequence
  Description of Artificial Sequence: Synthetic peptide
  Seed: FYIQMCTEL
FLIQMCTEL

SEQ ID NO: 26898 - protein, 9 aa, Artificial Sequence
  Description of Artificial Sequence: Synthetic peptide
  Seed: FYIQMCTEL
FIIQMCTEY

SEQ ID NO: 26899 - protein, 9 aa, Artificial Sequence
  Description of Artificial Sequence: Synthetic peptide
  Seed: FYIQMCTEL
FRIQMCTEW

SEQ ID NO: 26900 - protein, 9 aa, Artificial Sequence
  Description of Artificial Sequence: Synthetic peptide
  Seed: FYIQMCTEL
FRIQMCTEY

SEQ ID NO: 26901 - protein, 9 aa, Artificial Sequence
  Description of Artificial Sequence: Synthetic peptide
  Seed: FYIQMCTEL
FRIQMCTEV

SEQ ID NO: 26902 - protein, 9 aa, Artificial Sequence
  Description of Artificial Sequence: Synthetic peptide
  Seed: FYIQMCTEL
FNIQMCTEM

SEQ ID NO: 26903 - protein, 9 aa, Artificial Sequence
  Description of Artificial Sequence: Synthetic peptide
  Seed: FYIQMCTEL
FQIQMCTEL

SEQ ID NO: 26904 - protein, 9 aa, Artificial Sequence
  Description of Artificial Sequence: Synthetic peptide
  Seed: FYIQMCTEL
FQIQMCTEM

SEQ ID NO: 26905 - protein, 9 aa, Artificial Sequence
  Description of Artificial Sequence: Synthetic peptide
  Seed: FYIQMCTEL
FQIQMCTEF

SEQ ID NO: 26906 - protein, 9 aa, Artificial Sequence
  Description of Artificial Sequence: Synthetic peptide
  Seed: FYIQMCTEL
FQIQMCTEW

SEQ ID NO: 26907 - protein, 9 aa, Artificial Sequence
  Description of Artificial Sequence: Synthetic peptide
  Seed: FYIQMCTEL
FQIQMCTEY

SEQ ID NO: 26908 - protein, 9 aa, Artificial Sequence
  Description of Artificial Sequence: Synthetic peptide
  Seed: FYIQMCTEL
FGIQMCTEM

SEQ ID NO: 26909 - protein, 9 aa, Artificial Sequence
  Description of Artificial Sequence: Synthetic peptide
  Seed: FYIQMCTEL
FGIQMCTEY

SEQ ID NO: 26910 - protein, 9 aa, Artificial Sequence
  Description of Artificial Sequence: Synthetic peptide
  Seed: FYIQMCTEL
FHIQMCTEL

SEQ ID NO: 26911 - protein, 9 aa, Artificial Sequence
  Description of Artificial Sequence: Synthetic peptide
  Seed: FYIQMCTEL
FHIQMCTEM

SEQ ID NO: 26912 - protein, 9 aa, Artificial Sequence
  Description of Artificial Sequence: Synthetic peptide
  Seed: FYIQMCTEL
FHIQMCTEF

SEQ ID NO: 26913 - protein, 9 aa, Artificial Sequence
  Description of Artificial Sequence: Synthetic peptide
  Seed: FYIQMCTEL
FHIQMCTEW

SEQ ID NO: 26914 - protein, 9 aa, Artificial Sequence
  Description of Artificial Sequence: Synthetic peptide
  Seed: FYIQMCTEL
FHIQMCTEY

SEQ ID NO: 26915 - protein, 9 aa, Artificial Sequence
  Description of Artificial Sequence: Synthetic peptide
  Seed: FYIQMCTEL
FIIQMCTEL

SEQ ID NO: 26916 - protein, 9 aa, Artificial Sequence
  Description of Artificial Sequence: Synthetic peptide
  Seed: FYIQMCTEL
FIIQMCTEM

SEQ ID NO: 26917 - protein, 9 aa, Artificial Sequence
  Description of Artificial Sequence: Synthetic peptide
  Seed: FYIQMCTEL
FIIQMCTEF

SEQ ID NO: 26918 - protein, 9 aa, Artificial Sequence
  Description of Artificial Sequence: Synthetic peptide
  Seed: FYIQMCTEL
FSIQMCTEL

SEQ ID NO: 26919 - protein, 9 aa, Artificial Sequence
  Description of Artificial Sequence: Synthetic peptide
  Seed: FYIQMCTEL
FSIQMCTEF

SEQ ID NO: 26920 - protein, 10 aa, Artificial Sequence
  Description of Artificial Sequence: Synthetic peptide
  Seed: FYIQMCTELK
FIIQMCTELR

SEQ ID NO: 26921 - protein, 10 aa, Artificial Sequence
  Description of Artificial Sequence: Synthetic peptide
  Seed: FYIQMCTELK
FDIQMCTELR

SEQ ID NO: 26922 - protein, 9 aa, Artificial Sequence
  Description of Artificial Sequence: Synthetic peptide
  Seed: FYIQMCTEL
FVIQMCTEM

SEQ ID NO: 26923 - protein, 9 aa, Artificial Sequence
  Description of Artificial Sequence: Synthetic peptide
  Seed: FYIQMCTEL
FVIQMCTEF

SEQ ID NO: 26924 - protein, 9 aa, Artificial Sequence
  Description of Artificial Sequence: Synthetic peptide
  Seed: FYIQMCTEL
FVIQMCTEY

SEQ ID NO: 26925 - protein, 10 aa, Artificial Sequence
  Description of Artificial Sequence: Synthetic peptide
  Seed: FYIQMCTELK
FAIQMCTELR

SEQ ID NO: 26926 - protein, 10 aa, Artificial Sequence
  Description of Artificial Sequence: Synthetic peptide
  Seed: FYIQMCTELK
FAIQMCTELK

SEQ ID NO: 26927 - protein, 10 aa, Artificial Sequence
  Description of Artificial Sequence: Synthetic peptide
  Seed: FYIQMCTELK
FRIQMCTELR

SEQ ID NO: 26928 - protein, 10 aa, Artificial Sequence
  Description of Artificial Sequence: Synthetic peptide
  Seed: FYIQMCTELK
FRIQMCTELK

SEQ ID NO: 26929 - protein, 10 aa, Artificial Sequence
  Description of Artificial Sequence: Synthetic peptide
  Seed: FYIQMCTELK
FNIQMCTELR

SEQ ID NO: 26930 - protein, 10 aa, Artificial Sequence
  Description of Artificial Sequence: Synthetic peptide
  Seed: FYIQMCTELK
FNIQMCTELK

SEQ ID NO: 26931 - protein, 10 aa, Artificial Sequence
  Description of Artificial Sequence: Synthetic peptide
  Seed: FYIQMCTELK
FDIQMCTELK

SEQ ID NO: 26932 - protein, 9 aa, Artificial Sequence
  Description of Artificial Sequence: Synthetic peptide
  Seed: FYIQMCTEL
FSIQMCTEY

SEQ ID NO: 26933 - protein, 10 aa, Artificial Sequence
  Description of Artificial Sequence: Synthetic peptide
  Seed: FYIQMCTELK
FCIQMCTELR

SEQ ID NO: 26934 - protein, 10 aa, Artificial Sequence
  Description of Artificial Sequence: Synthetic peptide
  Seed: FYIQMCTELK
FCIQMCTELK

SEQ ID NO: 26935 - protein, 10 aa, Artificial Sequence
  Description of Artificial Sequence: Synthetic peptide
  Seed: FYIQMCTELK
FQIQMCTELR

SEQ ID NO: 26936 - protein, 10 aa, Artificial Sequence
  Description of Artificial Sequence: Synthetic peptide
  Seed: FYIQMCTELK
FQIQMCTELK

SEQ ID NO: 26937 - protein, 10 aa, Artificial Sequence
  Description of Artificial Sequence: Synthetic peptide
  Seed: FYIQMCTELK
FEIQMCTELR

SEQ ID NO: 26938 - protein, 10 aa, Artificial Sequence
  Description of Artificial Sequence: Synthetic peptide
  Seed: FYIQMCTELK
FEIQMCTELK

SEQ ID NO: 26939 - protein, 10 aa, Artificial Sequence
  Description of Artificial Sequence: Synthetic peptide
  Seed: FYIQMCTELK
FGIQMCTELR

SEQ ID NO: 26940 - protein, 10 aa, Artificial Sequence
  Description of Artificial Sequence: Synthetic peptide
  Seed: FYIQMCTELK
FGIQMCTELK

SEQ ID NO: 26941 - protein, 10 aa, Artificial Sequence
  Description of Artificial Sequence: Synthetic peptide
  Seed: FYIQMCTELK
FHIQMCTELR

SEQ ID NO: 26942 - protein, 9 aa, Artificial Sequence
  Description of Artificial Sequence: Synthetic peptide
  Seed: FYIQMCTEL
FVIQMCTEL

SEQ ID NO: 26943 - protein, 9 aa, Artificial Sequence
  Description of Artificial Sequence: Synthetic peptide
  Seed: FYIQMCTEL
FYIQMCTEV

SEQ ID NO: 26944 - protein, 9 aa, Artificial Sequence
  Description of Artificial Sequence: Synthetic peptide
  Seed: FYIQMCTEL
FYIQMCTEY

SEQ ID NO: 26945 - protein, 9 aa, Artificial Sequence
  Description of Artificial Sequence: Synthetic peptide
  Seed: FYIQMCTEL
FYIQMCTEW

SEQ ID NO: 26946 - protein, 9 aa, Artificial Sequence
  Description of Artificial Sequence: Synthetic peptide
  Seed: FYIQMCTEL
FTIQMCTEL

SEQ ID NO: 26947 - protein, 9 aa, Artificial Sequence
  Description of Artificial Sequence: Synthetic peptide
  Seed: FYIQMCTEL
FTIQMCTEM

SEQ ID NO: 26948 - protein, 9 aa, Artificial Sequence
  Description of Artificial Sequence: Synthetic peptide
  Seed: FYIQMCTEL
FTIQMCTEF

SEQ ID NO: 26949 - protein, 9 aa, Artificial Sequence
  Description of Artificial Sequence: Synthetic peptide
  Seed: FYIQMCTEL
FTIQMCTEY

SEQ ID NO: 26950 - protein, 9 aa, Artificial Sequence
  Description of Artificial Sequence: Synthetic peptide
  Seed: FYIQMCTEL
FWIQMCTEI

SEQ ID NO: 26951 - protein, 9 aa, Artificial Sequence
  Description of Artificial Sequence: Synthetic peptide
  Seed: FYIQMCTEL
FWIQMCTEL

SEQ ID NO: 26952 - protein, 9 aa, Artificial Sequence
  Description of Artificial Sequence: Synthetic peptide
  Seed: FYIQMCTEL
FWIQMCTEM

SEQ ID NO: 26953 - protein, 9 aa, Artificial Sequence
  Description of Artificial Sequence: Synthetic peptide
  Seed: FYIQMCTEL
FWIQMCTEF

SEQ ID NO: 26954 - protein, 9 aa, Artificial Sequence
  Description of Artificial Sequence: Synthetic peptide
  Seed: FYIQMCTEL
FWIQMCTEW

SEQ ID NO: 26955 - protein, 9 aa, Artificial Sequence
  Description of Artificial Sequence: Synthetic peptide
  Seed: FYIQMCTEL
FWIQMCTEY

SEQ ID NO: 26956 - protein, 9 aa, Artificial Sequence
  Description of Artificial Sequence: Synthetic peptide
  Seed: FYIQMCTEL
FWIQMCTEV

SEQ ID NO: 26957 - protein, 9 aa, Artificial Sequence
  Description of Artificial Sequence: Synthetic peptide
  Seed: FYIQMCTEL
FYIQMCTEA

SEQ ID NO: 26958 - protein, 9 aa, Artificial Sequence
  Description of Artificial Sequence: Synthetic peptide
  Seed: FYIQMCTEL
FYIQMCTEQ

SEQ ID NO: 26959 - protein, 9 aa, Artificial Sequence
  Description of Artificial Sequence: Synthetic peptide
  Seed: FYIQMCTEL
FYIQMCTEH

SEQ ID NO: 26960 - protein, 9 aa, Artificial Sequence
  Description of Artificial Sequence: Synthetic peptide
  Seed: FYIQMCTEL
FYIQMCTEM

SEQ ID NO: 26961 - protein, 9 aa, Artificial Sequence
  Description of Artificial Sequence: Synthetic peptide
  Seed: FYIQMCTEL
FYIQMCTES

SEQ ID NO: 26962 - protein, 9 aa, Artificial Sequence
  Description of Artificial Sequence: Synthetic peptide
  Seed: FYIQMCTEL
FYIQMCTET

SEQ ID NO: 26963 - protein, 9 aa, Artificial Sequence
  Description of Artificial Sequence: Synthetic peptide
  Seed: FYIQMCTEL
FRIQMCTEF

SEQ ID NO: 26964 - protein, 9 aa, Artificial Sequence
  Description of Artificial Sequence: Synthetic peptide
  Seed: FYIQMCTEL
FRIQMCTEM

SEQ ID NO: 26965 - protein, 9 aa, Artificial Sequence
  Description of Artificial Sequence: Synthetic peptide
  Seed: FYIQMCTEL
FRIQMCTEL

SEQ ID NO: 26966 - protein, 9 aa, Artificial Sequence
  Description of Artificial Sequence: Synthetic peptide
  Seed: FSVQRNLPF
FWVQRNLPL

SEQ ID NO: 26967 - protein, 9 aa, Artificial Sequence
  Description of Artificial Sequence: Synthetic peptide
  Seed: FSVQRNLPF
FTVQRNLPM

SEQ ID NO: 26968 - protein, 9 aa, Artificial Sequence
  Description of Artificial Sequence: Synthetic peptide
  Seed: FSVQRNLPF
FTVQRNLPF

SEQ ID NO: 26969 - protein, 9 aa, Artificial Sequence
  Description of Artificial Sequence: Synthetic peptide
  Seed: FSVQRNLPF
FTVQRNLPT

SEQ ID NO: 26970 - protein, 9 aa, Artificial Sequence
  Description of Artificial Sequence: Synthetic peptide
  Seed: FSVQRNLPF
FTVQRNLPV

SEQ ID NO: 26971 - protein, 9 aa, Artificial Sequence
  Description of Artificial Sequence: Synthetic peptide
  Seed: FSVQRNLPF
FWVQRNLPA

SEQ ID NO: 26972 - protein, 9 aa, Artificial Sequence
  Description of Artificial Sequence: Synthetic peptide
  Seed: FSVQRNLPF
FWVQRNLPH

SEQ ID NO: 26973 - protein, 9 aa, Artificial Sequence
  Description of Artificial Sequence: Synthetic peptide
  Seed: FSVQRNLPF
FWVQRNLPI

SEQ ID NO: 26974 - protein, 9 aa, Artificial Sequence
  Description of Artificial Sequence: Synthetic peptide
  Seed: FSVQRNLPF
FWVQRNLPM

SEQ ID NO: 26975 - protein, 9 aa, Artificial Sequence
  Description of Artificial Sequence: Synthetic peptide
  Seed: FYIQMCTEL
FRIQMCTEI

SEQ ID NO: 26976 - protein, 9 aa, Artificial Sequence
  Description of Artificial Sequence: Synthetic peptide
  Seed: FSVQRNLPF
FWVQRNLPF

SEQ ID NO: 26977 - protein, 9 aa, Artificial Sequence
  Description of Artificial Sequence: Synthetic peptide
  Seed: FSVQRNLPF
FWVQRNLPW

SEQ ID NO: 26978 - protein, 9 aa, Artificial Sequence
  Description of Artificial Sequence: Synthetic peptide
  Seed: FSVQRNLPF
FWVQRNLPY

SEQ ID NO: 26979 - protein, 9 aa, Artificial Sequence
  Description of Artificial Sequence: Synthetic peptide
  Seed: FSVQRNLPF
FWVQRNLPV

SEQ ID NO: 26980 - protein, 9 aa, Artificial Sequence
  Description of Artificial Sequence: Synthetic peptide
  Seed: FSVQRNLPF
FYVQRNLPA

SEQ ID NO: 26981 - protein, 9 aa, Artificial Sequence
  Description of Artificial Sequence: Synthetic peptide
  Seed: FSVQRNLPF
FYVQRNLPR

SEQ ID NO: 26982 - protein, 9 aa, Artificial Sequence
  Description of Artificial Sequence: Synthetic peptide
  Seed: FSVQRNLPF
FYVQRNLPN

SEQ ID NO: 26983 - protein, 9 aa, Artificial Sequence
  Description of Artificial Sequence: Synthetic peptide
  Seed: FSVQRNLPF
FYVQRNLPC

SEQ ID NO: 26984 - protein, 9 aa, Artificial Sequence
  Description of Artificial Sequence: Synthetic peptide
  Seed: FSVQRNLPF
FYVQRNLPQ

SEQ ID NO: 26985 - protein, 9 aa, Artificial Sequence
  Description of Artificial Sequence: Synthetic peptide
  Seed: FSVQRNLPF
FTVQRNLPL

SEQ ID NO: 26986 - protein, 9 aa, Artificial Sequence
  Description of Artificial Sequence: Synthetic peptide
  Seed: FSVQRNLPF
FTVQRNLPI

SEQ ID NO: 26987 - protein, 9 aa, Artificial Sequence
  Description of Artificial Sequence: Synthetic peptide
  Seed: FSVQRNLPF
FTVQRNLPH

SEQ ID NO: 26988 - protein, 9 aa, Artificial Sequence
  Description of Artificial Sequence: Synthetic peptide
  Seed: FSVQRNLPF
FTVQRNLPC

SEQ ID NO: 26989 - protein, 9 aa, Artificial Sequence
  Description of Artificial Sequence: Synthetic peptide
  Seed: FSVQRNLPF
FPVQRNLPF

SEQ ID NO: 26990 - protein, 9 aa, Artificial Sequence
  Description of Artificial Sequence: Synthetic peptide
  Seed: FSVQRNLPF
FPVQRNLPP

SEQ ID NO: 26991 - protein, 9 aa, Artificial Sequence
  Description of Artificial Sequence: Synthetic peptide
  Seed: FSVQRNLPF
FPVQRNLPS

SEQ ID NO: 26992 - protein, 9 aa, Artificial Sequence
  Description of Artificial Sequence: Synthetic peptide
  Seed: FSVQRNLPF
FPVQRNLPT

SEQ ID NO: 26993 - protein, 9 aa, Artificial Sequence
  Description of Artificial Sequence: Synthetic peptide
  Seed: FSVQRNLPF
FPVQRNLPW

SEQ ID NO: 26994 - protein, 9 aa, Artificial Sequence
  Description of Artificial Sequence: Synthetic peptide
  Seed: FSVQRNLPF
FPVQRNLPY

SEQ ID NO: 26995 - protein, 9 aa, Artificial Sequence
  Description of Artificial Sequence: Synthetic peptide
  Seed: FSVQRNLPF
FPVQRNLPV

SEQ ID NO: 26996 - protein, 9 aa, Artificial Sequence
  Description of Artificial Sequence: Synthetic peptide
  Seed: FSVQRNLPF
FSVQRNLPA

SEQ ID NO: 26997 - protein, 9 aa, Artificial Sequence
  Description of Artificial Sequence: Synthetic peptide
  Seed: FSVQRNLPF
FSVQRNLPC

SEQ ID NO: 26998 - protein, 9 aa, Artificial Sequence
  Description of Artificial Sequence: Synthetic peptide
  Seed: FSVQRNLPF
FSVQRNLPH

SEQ ID NO: 26999 - protein, 9 aa, Artificial Sequence
  Description of Artificial Sequence: Synthetic peptide
  Seed: FSVQRNLPF
FSVQRNLPI

SEQ ID NO: 27000 - protein, 9 aa, Artificial Sequence
  Description of Artificial Sequence: Synthetic peptide
  Seed: FSVQRNLPF
FSVQRNLPM

SEQ ID NO: 27001 - protein, 9 aa, Artificial Sequence
  Description of Artificial Sequence: Synthetic peptide
  Seed: FSVQRNLPF
FSVQRNLPS

SEQ ID NO: 27002 - protein, 9 aa, Artificial Sequence
  Description of Artificial Sequence: Synthetic peptide
  Seed: FSVQRNLPF
FSVQRNLPT

SEQ ID NO: 27003 - protein, 9 aa, Artificial Sequence
  Description of Artificial Sequence: Synthetic peptide
  Seed: FSVQRNLPF
FSVQRNLPY

SEQ ID NO: 27004 - protein, 9 aa, Artificial Sequence
  Description of Artificial Sequence: Synthetic peptide
  Seed: FSVQRNLPF
FSVQRNLPV

SEQ ID NO: 27005 - protein, 9 aa, Artificial Sequence
  Description of Artificial Sequence: Synthetic peptide
  Seed: FSVQRNLPF
FTVQRNLPA

SEQ ID NO: 27006 - protein, 9 aa, Artificial Sequence
  Description of Artificial Sequence: Synthetic peptide
  Seed: FSVQRNLPF
FYVQRNLPE

SEQ ID NO: 27007 - protein, 9 aa, Artificial Sequence
  Description of Artificial Sequence: Synthetic peptide
  Seed: FSVQRNLPF
FYVQRNLPG

SEQ ID NO: 27008 - protein, 9 aa, Artificial Sequence
  Description of Artificial Sequence: Synthetic peptide
  Seed: FSVQRNLPF
FYVQRNLPH

SEQ ID NO: 27009 - protein, 11 aa, Artificial Sequence
  Description of Artificial Sequence: Synthetic peptide
  Seed: FSVQRNLPFEK
FIVQRNLPFEK

SEQ ID NO: 27010 - protein, 11 aa, Artificial Sequence
  Description of Artificial Sequence: Synthetic peptide
  Seed: FSVQRNLPFEK
FTVQRNLPFER

SEQ ID NO: 27011 - protein, 11 aa, Artificial Sequence
  Description of Artificial Sequence: Synthetic peptide
  Seed: FSVQRNLPFEK
FTVQRNLPFEK

SEQ ID NO: 27012 - protein, 11 aa, Artificial Sequence
  Description of Artificial Sequence: Synthetic peptide
  Seed: FSVQRNLPFEK
FVVQRNLPFER

SEQ ID NO: 27013 - protein, 11 aa, Artificial Sequence
  Description of Artificial Sequence: Synthetic peptide
  Seed: FSVQRNLPFEK
FVVQRNLPFEK

SEQ ID NO: 27014 - protein, 11 aa, Artificial Sequence
  Description of Artificial Sequence: Synthetic peptide
  Seed: FSVQRNLPFER
FAVQRNLPFER

SEQ ID NO: 27015 - protein, 11 aa, Artificial Sequence
  Description of Artificial Sequence: Synthetic peptide
  Seed: FSVQRNLPFER
FAVQRNLPFEK

SEQ ID NO: 27016 - protein, 11 aa, Artificial Sequence
  Description of Artificial Sequence: Synthetic peptide
  Seed: FSVQRNLPFER
FIVQRNLPFER

SEQ ID NO: 27017 - protein, 11 aa, Artificial Sequence
  Description of Artificial Sequence: Synthetic peptide
  Seed: FSVQRNLPFER
FMVQRNLPFER

SEQ ID NO: 27018 - protein, 9 aa, Artificial Sequence
  Description of Artificial Sequence: Synthetic peptide
  Seed: FYIQMCTEL
FAIQMCTEL

SEQ ID NO: 27019 - protein, 9 aa, Artificial Sequence
  Description of Artificial Sequence: Synthetic peptide
  Seed: FYIQMCTEL
FAIQMCTEM

SEQ ID NO: 27020 - protein, 9 aa, Artificial Sequence
  Description of Artificial Sequence: Synthetic peptide
  Seed: FYIQMCTEL
FAIQMCTEF

SEQ ID NO: 27021 - protein, 9 aa, Artificial Sequence
  Description of Artificial Sequence: Synthetic peptide
  Seed: FYIQMCTEL
FAIQMCTEY

SEQ ID NO: 27022 - protein, 9 aa, Artificial Sequence
  Description of Artificial Sequence: Synthetic peptide
  Seed: FSVQRNLPF
FYVQRNLPI

SEQ ID NO: 27023 - protein, 9 aa, Artificial Sequence
  Description of Artificial Sequence: Synthetic peptide
  Seed: FSVQRNLPF
FYVQRNLPL

SEQ ID NO: 27024 - protein, 9 aa, Artificial Sequence
  Description of Artificial Sequence: Synthetic peptide
  Seed: FSVQRNLPF
FYVQRNLPK

SEQ ID NO: 27025 - protein, 9 aa, Artificial Sequence
  Description of Artificial Sequence: Synthetic peptide
  Seed: FSVQRNLPF
FYVQRNLPM

SEQ ID NO: 27026 - protein, 9 aa, Artificial Sequence
  Description of Artificial Sequence: Synthetic peptide
  Seed: FSVQRNLPF
FYVQRNLPF

SEQ ID NO: 27027 - protein, 9 aa, Artificial Sequence
  Description of Artificial Sequence: Synthetic peptide
  Seed: FSVQRNLPF
FYVQRNLPS

SEQ ID NO: 27028 - protein, 9 aa, Artificial Sequence
  Description of Artificial Sequence: Synthetic peptide
  Seed: FSVQRNLPF
FYVQRNLPT

SEQ ID NO: 27029 - protein, 9 aa, Artificial Sequence
  Description of Artificial Sequence: Synthetic peptide
  Seed: FSVQRNLPF
FYVQRNLPW

SEQ ID NO: 27030 - protein, 9 aa, Artificial Sequence
  Description of Artificial Sequence: Synthetic peptide
  Seed: FSVQRNLPF
FYVQRNLPY

SEQ ID NO: 27031 - protein, 9 aa, Artificial Sequence
  Description of Artificial Sequence: Synthetic peptide
  Seed: FSVQRNLPF
FYVQRNLPV

SEQ ID NO: 27032 - protein, 9 aa, Artificial Sequence
  Description of Artificial Sequence: Synthetic peptide
  Seed: FSVQRNLPF
FVVQRNLPA

SEQ ID NO: 27033 - protein, 9 aa, Artificial Sequence
  Description of Artificial Sequence: Synthetic peptide
  Seed: FSVQRNLPF
FVVQRNLPH

SEQ ID NO: 27034 - protein, 9 aa, Artificial Sequence
  Description of Artificial Sequence: Synthetic peptide
  Seed: FSVQRNLPF
FVVQRNLPI

SEQ ID NO: 27035 - protein, 9 aa, Artificial Sequence
  Description of Artificial Sequence: Synthetic peptide
  Seed: FSVQRNLPF
FVVQRNLPL

SEQ ID NO: 27036 - protein, 9 aa, Artificial Sequence
  Description of Artificial Sequence: Synthetic peptide
  Seed: FSVQRNLPF
FVVQRNLPM

SEQ ID NO: 27037 - protein, 9 aa, Artificial Sequence
  Description of Artificial Sequence: Synthetic peptide
  Seed: FSVQRNLPF
FVVQRNLPF

SEQ ID NO: 27038 - protein, 9 aa, Artificial Sequence
  Description of Artificial Sequence: Synthetic peptide
  Seed: FSVQRNLPF
FVVQRNLPW

SEQ ID NO: 27039 - protein, 9 aa, Artificial Sequence
  Description of Artificial Sequence: Synthetic peptide
  Seed: FSVQRNLPF
FVVQRNLPY

SEQ ID NO: 27040 - protein, 9 aa, Artificial Sequence
  Description of Artificial Sequence: Synthetic peptide
  Seed: FSVQRNLPF
FVVQRNLPV

SEQ ID NO: 27041 - protein, 10 aa, Artificial Sequence
  Description of Artificial Sequence: Synthetic peptide
  Seed: FYIQMCTELK
FHIQMCTELK

SEQ ID NO: 27042 - protein, 10 aa, Artificial Sequence
  Description of Artificial Sequence: Synthetic peptide
  Seed: FYIQMCTELK
FIIQMCTELK

SEQ ID NO: 27043 - protein, 9 aa, Artificial Sequence
  Description of Artificial Sequence: Synthetic peptide
  Seed: GINDRNFWR
GQNDRNFWR

SEQ ID NO: 27044 - protein, 9 aa, Artificial Sequence
  Description of Artificial Sequence: Synthetic peptide
  Seed: GAKPEEVSF
GMKPEEVSF

SEQ ID NO: 27045 - protein, 9 aa, Artificial Sequence
  Description of Artificial Sequence: Synthetic peptide
  Seed: GAKPEEVSF
GQKPEEVSY

SEQ ID NO: 27046 - protein, 9 aa, Artificial Sequence
  Description of Artificial Sequence: Synthetic peptide
  Seed: GAKPEEVSF
GHKPEEVSF

SEQ ID NO: 27047 - protein, 9 aa, Artificial Sequence
  Description of Artificial Sequence: Synthetic peptide
  Seed: GAKPEEVSF
GHKPEEVSY

SEQ ID NO: 27048 - protein, 9 aa, Artificial Sequence
  Description of Artificial Sequence: Synthetic peptide
  Seed: GAKPEEVSF
GLKPEEVSF

SEQ ID NO: 27049 - protein, 9 aa, Artificial Sequence
  Description of Artificial Sequence: Synthetic peptide
  Seed: GAKPEEVSF
GLKPEEVSY

SEQ ID NO: 27050 - protein, 9 aa, Artificial Sequence
  Description of Artificial Sequence: Synthetic peptide
  Seed: GAKPEEVSF
GKKPEEVSM

SEQ ID NO: 27051 - protein, 9 aa, Artificial Sequence
  Description of Artificial Sequence: Synthetic peptide
  Seed: GAKPEEVSF
GKKPEEVSF

SEQ ID NO: 27052 - protein, 9 aa, Artificial Sequence
  Description of Artificial Sequence: Synthetic peptide
  Seed: GAKPEEVSF
GKKPEEVSY

SEQ ID NO: 27053 - protein, 9 aa, Artificial Sequence
  Description of Artificial Sequence: Synthetic peptide
  Seed: GAKPEEVSF
GMKPEEVSM

SEQ ID NO: 27054 - protein, 9 aa, Artificial Sequence
  Description of Artificial Sequence: Synthetic peptide
  Seed: GAKPEEVSF
GMKPEEVSY

SEQ ID NO: 27055 - protein, 10 aa, Artificial Sequence
  Description of Artificial Sequence: Synthetic peptide
  Seed: GAKPEEVSFR
GTKPEEVSFK

SEQ ID NO: 27056 - protein, 9 aa, Artificial Sequence
  Description of Artificial Sequence: Synthetic peptide
  Seed: GAKPEEVSF
GSKPEEVSY

SEQ ID NO: 27057 - protein, 10 aa, Artificial Sequence
  Description of Artificial Sequence: Synthetic peptide
  Seed: GAKPEEVSFR
GQKPEEVSFR

SEQ ID NO: 27058 - protein, 10 aa, Artificial Sequence
  Description of Artificial Sequence: Synthetic peptide
  Seed: GAKPEEVSFR
GIKPEEVSFR

SEQ ID NO: 27059 - protein, 10 aa, Artificial Sequence
  Description of Artificial Sequence: Synthetic peptide
  Seed: GAKPEEVSFR
GLKPEEVSFR

SEQ ID NO: 27060 - protein, 10 aa, Artificial Sequence
  Description of Artificial Sequence: Synthetic peptide
  Seed: GAKPEEVSFR
GMKPEEVSFR

SEQ ID NO: 27061 - protein, 10 aa, Artificial Sequence
  Description of Artificial Sequence: Synthetic peptide
  Seed: GAKPEEVSFR
GMKPEEVSFK

SEQ ID NO: 27062 - protein, 10 aa, Artificial Sequence
  Description of Artificial Sequence: Synthetic peptide
  Seed: GAKPEEVSFR
GFKPEEVSFR

SEQ ID NO: 27063 - protein, 10 aa, Artificial Sequence
  Description of Artificial Sequence: Synthetic peptide
  Seed: GAKPEEVSFR
GFKPEEVSFK

SEQ ID NO: 27064 - protein, 10 aa, Artificial Sequence
  Description of Artificial Sequence: Synthetic peptide
  Seed: GAKPEEVSFR
GSKPEEVSFR

SEQ ID NO: 27065 - protein, 9 aa, Artificial Sequence
  Description of Artificial Sequence: Synthetic peptide
  Seed: GAKPEEVSF
GQKPEEVSF

SEQ ID NO: 27066 - protein, 9 aa, Artificial Sequence
  Description of Artificial Sequence: Synthetic peptide
  Seed: GAKPEEVSF
GQKPEEVSM

SEQ ID NO: 27067 - protein, 9 aa, Artificial Sequence
  Description of Artificial Sequence: Synthetic peptide
  Seed: GAKPEEVSF
GQKPEEVSL

SEQ ID NO: 27068 - protein, 9 aa, Artificial Sequence
  Description of Artificial Sequence: Synthetic peptide
  Seed: GAKPEEVSF
GRKPEEVSY

SEQ ID NO: 27069 - protein, 11 aa, Artificial Sequence
  Description of Artificial Sequence: Synthetic peptide
  Seed: FYIQMCTELKL
FTIQMCTELKM

SEQ ID NO: 27070 - protein, 11 aa, Artificial Sequence
  Description of Artificial Sequence: Synthetic peptide
  Seed: FYIQMCTELKL
FTIQMCTELKV

SEQ ID NO: 27071 - protein, 11 aa, Artificial Sequence
  Description of Artificial Sequence: Synthetic peptide
  Seed: FYIQMCTELKL
FWIQMCTELKI

SEQ ID NO: 27072 - protein, 11 aa, Artificial Sequence
  Description of Artificial Sequence: Synthetic peptide
  Seed: FYIQMCTELKL
FWIQMCTELKL

SEQ ID NO: 27073 - protein, 11 aa, Artificial Sequence
  Description of Artificial Sequence: Synthetic peptide
  Seed: FYIQMCTELKL
FWIQMCTELKM

SEQ ID NO: 27074 - protein, 11 aa, Artificial Sequence
  Description of Artificial Sequence: Synthetic peptide
  Seed: FYIQMCTELKL
FWIQMCTELKF

SEQ ID NO: 27075 - protein, 11 aa, Artificial Sequence
  Description of Artificial Sequence: Synthetic peptide
  Seed: FYIQMCTELKL
FWIQMCTELKW

SEQ ID NO: 27076 - protein, 11 aa, Artificial Sequence
  Description of Artificial Sequence: Synthetic peptide
  Seed: FYIQMCTELKL
FWIQMCTELKV

SEQ ID NO: 27077 - protein, 11 aa, Artificial Sequence
  Description of Artificial Sequence: Synthetic peptide
  Seed: FYIQMCTELKL
FYIQMCTELKI

SEQ ID NO: 27078 - protein, 11 aa, Artificial Sequence
  Description of Artificial Sequence: Synthetic peptide
  Seed: FYIQMCTELKL
FYIQMCTELKM

SEQ ID NO: 27079 - protein, 11 aa, Artificial Sequence
  Description of Artificial Sequence: Synthetic peptide
  Seed: FYIQMCTELKL
FYIQMCTELKF

SEQ ID NO: 27080 - protein, 11 aa, Artificial Sequence
  Description of Artificial Sequence: Synthetic peptide
  Seed: FYIQMCTELKL
FYIQMCTELKW

SEQ ID NO: 27081 - protein, 11 aa, Artificial Sequence
  Description of Artificial Sequence: Synthetic peptide
  Seed: FYIQMCTELKL
FYIQMCTELKY

SEQ ID NO: 27082 - protein, 11 aa, Artificial Sequence
  Description of Artificial Sequence: Synthetic peptide
  Seed: FYIQMCTELKL
FYIQMCTELKV

SEQ ID NO: 27083 - protein, 11 aa, Artificial Sequence
  Description of Artificial Sequence: Synthetic peptide
  Seed: FYIQMCTELKL
FVIQMCTELKI

SEQ ID NO: 27084 - protein, 11 aa, Artificial Sequence
  Description of Artificial Sequence: Synthetic peptide
  Seed: FYIQMCTELKL
FVIQMCTELKL

SEQ ID NO: 27085 - protein, 11 aa, Artificial Sequence
  Description of Artificial Sequence: Synthetic peptide
  Seed: FYIQMCTELKL
FVIQMCTELKM

SEQ ID NO: 27086 - protein, 11 aa, Artificial Sequence
  Description of Artificial Sequence: Synthetic peptide
  Seed: FYIQMCTELKL
FVIQMCTELKV

SEQ ID NO: 27087 - protein, 9 aa, Artificial Sequence
  Description of Artificial Sequence: Synthetic peptide
  Seed: GAKPEEVSF
GAKPEEVSY

SEQ ID NO: 27088 - protein, 10 aa, Artificial Sequence
  Description of Artificial Sequence: Synthetic peptide
  Seed: GAKPEEVSFR
GTKPEEVSFR

SEQ ID NO: 27089 - protein, 10 aa, Artificial Sequence
  Description of Artificial Sequence: Synthetic peptide
  Seed: GAKPEEVSFR
GWKPEEVSFR

SEQ ID NO: 27090 - protein, 10 aa, Artificial Sequence
  Description of Artificial Sequence: Synthetic peptide
  Seed: FYIQMCTELK
FLIQMCTELR

SEQ ID NO: 27091 - protein, 9 aa, Artificial Sequence
  Description of Artificial Sequence: Synthetic peptide
  Seed: GIGTMVMEL
GMGTMVMET

SEQ ID NO: 27092 - protein, 9 aa, Artificial Sequence
  Description of Artificial Sequence: Synthetic peptide
  Seed: GIGTMVMEL
GLGTMVMEL

SEQ ID NO: 27093 - protein, 9 aa, Artificial Sequence
  Description of Artificial Sequence: Synthetic peptide
  Seed: GIGTMVMEL
GLGTMVMEM

SEQ ID NO: 27094 - protein, 9 aa, Artificial Sequence
  Description of Artificial Sequence: Synthetic peptide
  Seed: GIGTMVMEL
GLGTMVMET

SEQ ID NO: 27095 - protein, 9 aa, Artificial Sequence
  Description of Artificial Sequence: Synthetic peptide
  Seed: GIGTMVMEL
GLGTMVMEV

SEQ ID NO: 27096 - protein, 9 aa, Artificial Sequence
  Description of Artificial Sequence: Synthetic peptide
  Seed: GIGTMVMEL
GMGTMVMEA

SEQ ID NO: 27097 - protein, 9 aa, Artificial Sequence
  Description of Artificial Sequence: Synthetic peptide
  Seed: GIGTMVMEL
GMGTMVMEC

SEQ ID NO: 27098 - protein, 9 aa, Artificial Sequence
  Description of Artificial Sequence: Synthetic peptide
  Seed: GIGTMVMEL
GMGTMVMEI

SEQ ID NO: 27099 - protein, 9 aa, Artificial Sequence
  Description of Artificial Sequence: Synthetic peptide
  Seed: GIGTMVMEL
GMGTMVMEL

SEQ ID NO: 27100 - protein, 9 aa, Artificial Sequence
  Description of Artificial Sequence: Synthetic peptide
  Seed: GIGTMVMEL
GMGTMVMEM

SEQ ID NO: 27101 - protein, 9 aa, Artificial Sequence
  Description of Artificial Sequence: Synthetic peptide
  Seed: GIGTMVMEL
GMGTMVMEV

SEQ ID NO: 27102 - protein, 10 aa, Artificial Sequence
  Description of Artificial Sequence: Synthetic peptide
  Seed: GAKPEEVSFR
GYKPEEVSFR

SEQ ID NO: 27103 - protein, 9 aa, Artificial Sequence
  Description of Artificial Sequence: Synthetic peptide
  Seed: GIGTMVMEL
GTGTMVMEV

SEQ ID NO: 27104 - protein, 9 aa, Artificial Sequence
  Description of Artificial Sequence: Synthetic peptide
  Seed: GIGTMVMEL
GVGTMVMEI

SEQ ID NO: 27105 - protein, 9 aa, Artificial Sequence
  Description of Artificial Sequence: Synthetic peptide
  Seed: GIGTMVMEL
GVGTMVMEV

SEQ ID NO: 27106 - protein, 9 aa, Artificial Sequence
  Description of Artificial Sequence: Synthetic peptide
  Seed: GINDRNFWR
GANDRNFWR

SEQ ID NO: 27107 - protein, 9 aa, Artificial Sequence
  Description of Artificial Sequence: Synthetic peptide
  Seed: GINDRNFWR
GANDRNFWK

SEQ ID NO: 27108 - protein, 9 aa, Artificial Sequence
  Description of Artificial Sequence: Synthetic peptide
  Seed: GINDRNFWR
GNNDRNFWR

SEQ ID NO: 27109 - protein, 9 aa, Artificial Sequence
  Description of Artificial Sequence: Synthetic peptide
  Seed: GINDRNFWR
GNNDRNFWK

SEQ ID NO: 27110 - protein, 9 aa, Artificial Sequence
  Description of Artificial Sequence: Synthetic peptide
  Seed: GINDRNFWR
GCNDRNFWR

SEQ ID NO: 27111 - protein, 9 aa, Artificial Sequence
  Description of Artificial Sequence: Synthetic peptide
  Seed: GIGTMVMEL
GLGTMVMEI

SEQ ID NO: 27112 - protein, 9 aa, Artificial Sequence
  Description of Artificial Sequence: Synthetic peptide
  Seed: GIGTMVMEL
GLGTMVMEC

SEQ ID NO: 27113 - protein, 9 aa, Artificial Sequence
  Description of Artificial Sequence: Synthetic peptide
  Seed: GIGTMVMEL
GLGTMVMEA

SEQ ID NO: 27114 - protein, 9 aa, Artificial Sequence
  Description of Artificial Sequence: Synthetic peptide
  Seed: GIGTMVMEL
GIGTMVMEV

SEQ ID NO: 27115 - protein, 10 aa, Artificial Sequence
  Description of Artificial Sequence: Synthetic peptide
  Seed: GAKPEEVSFR
GYKPEEVSFK

SEQ ID NO: 27116 - protein, 10 aa, Artificial Sequence
  Description of Artificial Sequence: Synthetic peptide
  Seed: GAKPEEVSFR
GVKPEEVSFR

SEQ ID NO: 27117 - protein, 9 aa, Artificial Sequence
  Description of Artificial Sequence: Synthetic peptide
  Seed: GENGRRTRI
GENGRRTRL

SEQ ID NO: 27118 - protein, 9 aa, Artificial Sequence
  Description of Artificial Sequence: Synthetic peptide
  Seed: GENGRRTRI
GENGRRTRM

SEQ ID NO: 27119 - protein, 9 aa, Artificial Sequence
  Description of Artificial Sequence: Synthetic peptide
  Seed: GENGRRTRI
GENGRRTRF

SEQ ID NO: 27120 - protein, 9 aa, Artificial Sequence
  Description of Artificial Sequence: Synthetic peptide
  Seed: GERQNATEI
GDRQNATEL

SEQ ID NO: 27121 - protein, 9 aa, Artificial Sequence
  Description of Artificial Sequence: Synthetic peptide
  Seed: GERQNATEI
GERQNATEA

SEQ ID NO: 27122 - protein, 9 aa, Artificial Sequence
  Description of Artificial Sequence: Synthetic peptide
  Seed: GERQNATEI
GERQNATEL

SEQ ID NO: 27123 - protein, 9 aa, Artificial Sequence
  Description of Artificial Sequence: Synthetic peptide
  Seed: GERQNATEI
GERQNATEM

SEQ ID NO: 27124 - protein, 9 aa, Artificial Sequence
  Description of Artificial Sequence: Synthetic peptide
  Seed: GERQNATEI
GERQNATEF

SEQ ID NO: 27125 - protein, 9 aa, Artificial Sequence
  Description of Artificial Sequence: Synthetic peptide
  Seed: GERQNATEI
GERQNATEP

SEQ ID NO: 27126 - protein, 9 aa, Artificial Sequence
  Description of Artificial Sequence: Synthetic peptide
  Seed: GERQNATEI
GERQNATEV

SEQ ID NO: 27127 - protein, 9 aa, Artificial Sequence
  Description of Artificial Sequence: Synthetic peptide
  Seed: GIGTMVMEL
GAGTMVMEV

SEQ ID NO: 27128 - protein, 9 aa, Artificial Sequence
  Description of Artificial Sequence: Synthetic peptide
  Seed: GIGTMVMEL
GQGTMVMEI

SEQ ID NO: 27129 - protein, 9 aa, Artificial Sequence
  Description of Artificial Sequence: Synthetic peptide
  Seed: GIGTMVMEL
GQGTMVMEL

SEQ ID NO: 27130 - protein, 9 aa, Artificial Sequence
  Description of Artificial Sequence: Synthetic peptide
  Seed: GIGTMVMEL
GQGTMVMEV

SEQ ID NO: 27131 - protein, 9 aa, Artificial Sequence
  Description of Artificial Sequence: Synthetic peptide
  Seed: GIGTMVMEL
GIGTMVMEA

SEQ ID NO: 27132 - protein, 9 aa, Artificial Sequence
  Description of Artificial Sequence: Synthetic peptide
  Seed: GIGTMVMEL
GIGTMVMEI

SEQ ID NO: 27133 - protein, 11 aa, Artificial Sequence
  Description of Artificial Sequence: Synthetic peptide
  Seed: FYIQMCTELKL
FTIQMCTELKL

SEQ ID NO: 27134 - protein, 11 aa, Artificial Sequence
  Description of Artificial Sequence: Synthetic peptide
  Seed: FYIQMCTELKL
FTIQMCTELKI

SEQ ID NO: 27135 - protein, 11 aa, Artificial Sequence
  Description of Artificial Sequence: Synthetic peptide
  Seed: FYIQMCTELKL
FSIQMCTELKV

SEQ ID NO: 27136 - protein, 11 aa, Artificial Sequence
  Description of Artificial Sequence: Synthetic peptide
  Seed: FYIQMCTELKL
FDIQMCTELKI

SEQ ID NO: 27137 - protein, 11 aa, Artificial Sequence
  Description of Artificial Sequence: Synthetic peptide
  Seed: FYIQMCTELKL
FAIQMCTELKV

SEQ ID NO: 27138 - protein, 11 aa, Artificial Sequence
  Description of Artificial Sequence: Synthetic peptide
  Seed: FYIQMCTELKL
FRIQMCTELKI

SEQ ID NO: 27139 - protein, 11 aa, Artificial Sequence
  Description of Artificial Sequence: Synthetic peptide
  Seed: FYIQMCTELKL
FRIQMCTELKL

SEQ ID NO: 27140 - protein, 11 aa, Artificial Sequence
  Description of Artificial Sequence: Synthetic peptide
  Seed: FYIQMCTELKL
FRIQMCTELKM

SEQ ID NO: 27141 - protein, 11 aa, Artificial Sequence
  Description of Artificial Sequence: Synthetic peptide
  Seed: FYIQMCTELKL
FRIQMCTELKV

SEQ ID NO: 27142 - protein, 11 aa, Artificial Sequence
  Description of Artificial Sequence: Synthetic peptide
  Seed: FYIQMCTELKL
FNIQMCTELKI

SEQ ID NO: 27143 - protein, 11 aa, Artificial Sequence
  Description of Artificial Sequence: Synthetic peptide
  Seed: FYIQMCTELKL
FNIQMCTELKL

SEQ ID NO: 27144 - protein, 11 aa, Artificial Sequence
  Description of Artificial Sequence: Synthetic peptide
  Seed: FYIQMCTELKL
FNIQMCTELKM

SEQ ID NO: 27145 - protein, 11 aa, Artificial Sequence
  Description of Artificial Sequence: Synthetic peptide
  Seed: FYIQMCTELKL
FNIQMCTELKV

SEQ ID NO: 27146 - protein, 11 aa, Artificial Sequence
  Description of Artificial Sequence: Synthetic peptide
  Seed: FYIQMCTELKL
FDIQMCTELKL

SEQ ID NO: 27147 - protein, 11 aa, Artificial Sequence
  Description of Artificial Sequence: Synthetic peptide
  Seed: FYIQMCTELKL
FSIQMCTELKM

SEQ ID NO: 27148 - protein, 11 aa, Artificial Sequence
  Description of Artificial Sequence: Synthetic peptide
  Seed: FYIQMCTELKL
FDIQMCTELKM

SEQ ID NO: 27149 - protein, 11 aa, Artificial Sequence
  Description of Artificial Sequence: Synthetic peptide
  Seed: FYIQMCTELKL
FDIQMCTELKV

SEQ ID NO: 27150 - protein, 11 aa, Artificial Sequence
  Description of Artificial Sequence: Synthetic peptide
  Seed: FYIQMCTELKL
FCIQMCTELKI

SEQ ID NO: 27151 - protein, 11 aa, Artificial Sequence
  Description of Artificial Sequence: Synthetic peptide
  Seed: FYIQMCTELKL
FCIQMCTELKL

SEQ ID NO: 27152 - protein, 11 aa, Artificial Sequence
  Description of Artificial Sequence: Synthetic peptide
  Seed: FYIQMCTELKL
FCIQMCTELKM

SEQ ID NO: 27153 - protein, 11 aa, Artificial Sequence
  Description of Artificial Sequence: Synthetic peptide
  Seed: FYIQMCTELKL
FCIQMCTELKV

SEQ ID NO: 27154 - protein, 11 aa, Artificial Sequence
  Description of Artificial Sequence: Synthetic peptide
  Seed: FYIQMCTELKL
FQIQMCTELKA

SEQ ID NO: 27155 - protein, 11 aa, Artificial Sequence
  Description of Artificial Sequence: Synthetic peptide
  Seed: FYIQMCTELKL
FQIQMCTELKI

SEQ ID NO: 27156 - protein, 11 aa, Artificial Sequence
  Description of Artificial Sequence: Synthetic peptide
  Seed: FYIQMCTELKL
FQIQMCTELKL

SEQ ID NO: 27157 - protein, 11 aa, Artificial Sequence
  Description of Artificial Sequence: Synthetic peptide
  Seed: FYIQMCTELKL
FAIQMCTELKM

SEQ ID NO: 27158 - protein, 11 aa, Artificial Sequence
  Description of Artificial Sequence: Synthetic peptide
  Seed: FYIQMCTELKL
FAIQMCTELKL

SEQ ID NO: 27159 - protein, 11 aa, Artificial Sequence
  Description of Artificial Sequence: Synthetic peptide
  Seed: FYIQMCTELKL
FAIQMCTELKI

SEQ ID NO: 27160 - protein, 10 aa, Artificial Sequence
  Description of Artificial Sequence: Synthetic peptide
  Seed: FYIQMCTELK
FVIQMCTELY

SEQ ID NO: 27161 - protein, 10 aa, Artificial Sequence
  Description of Artificial Sequence: Synthetic peptide
  Seed: FYIQMCTELK
FLIQMCTELK

SEQ ID NO: 27162 - protein, 10 aa, Artificial Sequence
  Description of Artificial Sequence: Synthetic peptide
  Seed: FYIQMCTELK
FKIQMCTELR

SEQ ID NO: 27163 - protein, 10 aa, Artificial Sequence
  Description of Artificial Sequence: Synthetic peptide
  Seed: FYIQMCTELK
FKIQMCTELK

SEQ ID NO: 27164 - protein, 10 aa, Artificial Sequence
  Description of Artificial Sequence: Synthetic peptide
  Seed: FYIQMCTELK
FMIQMCTELR

SEQ ID NO: 27165 - protein, 10 aa, Artificial Sequence
  Description of Artificial Sequence: Synthetic peptide
  Seed: FYIQMCTELK
FMIQMCTELK

SEQ ID NO: 27166 - protein, 10 aa, Artificial Sequence
  Description of Artificial Sequence: Synthetic peptide
  Seed: FYIQMCTELK
FFIQMCTELR

SEQ ID NO: 27167 - protein, 10 aa, Artificial Sequence
  Description of Artificial Sequence: Synthetic peptide
  Seed: FYIQMCTELK
FFIQMCTELK

SEQ ID NO: 27168 - protein, 10 aa, Artificial Sequence
  Description of Artificial Sequence: Synthetic peptide
  Seed: FYIQMCTELK
FPIQMCTELR

SEQ ID NO: 27169 - protein, 10 aa, Artificial Sequence
  Description of Artificial Sequence: Synthetic peptide
  Seed: FYIQMCTELK
FPIQMCTELK

SEQ ID NO: 27170 - protein, 10 aa, Artificial Sequence
  Description of Artificial Sequence: Synthetic peptide
  Seed: FYIQMCTELK
FSIQMCTELR

SEQ ID NO: 27171 - protein, 10 aa, Artificial Sequence
  Description of Artificial Sequence: Synthetic peptide
  Seed: FYIQMCTELK
FSIQMCTELK

SEQ ID NO: 27172 - protein, 10 aa, Artificial Sequence
  Description of Artificial Sequence: Synthetic peptide
  Seed: FYIQMCTELK
FTIQMCTELR

SEQ ID NO: 27173 - protein, 10 aa, Artificial Sequence
  Description of Artificial Sequence: Synthetic peptide
  Seed: FYIQMCTELK
FTIQMCTELK

SEQ ID NO: 27174 - protein, 10 aa, Artificial Sequence
  Description of Artificial Sequence: Synthetic peptide
  Seed: FYIQMCTELK
FTIQMCTELY

SEQ ID NO: 27175 - protein, 10 aa, Artificial Sequence
  Description of Artificial Sequence: Synthetic peptide
  Seed: FYIQMCTELK
FWIQMCTELR

SEQ ID NO: 27176 - protein, 10 aa, Artificial Sequence
  Description of Artificial Sequence: Synthetic peptide
  Seed: FYIQMCTELK
FWIQMCTELK

SEQ ID NO: 27177 - protein, 10 aa, Artificial Sequence
  Description of Artificial Sequence: Synthetic peptide
  Seed: FYIQMCTELK
FYIQMCTELR

SEQ ID NO: 27178 - protein, 10 aa, Artificial Sequence
  Description of Artificial Sequence: Synthetic peptide
  Seed: FYIQMCTELK
FVIQMCTELR

SEQ ID NO: 27179 - protein, 10 aa, Artificial Sequence
  Description of Artificial Sequence: Synthetic peptide
  Seed: FYIQMCTELK
FVIQMCTELK

SEQ ID NO: 27180 - protein, 11 aa, Artificial Sequence
  Description of Artificial Sequence: Synthetic peptide
  Seed: FYIQMCTELKL
FQIQMCTELKM

SEQ ID NO: 27181 - protein, 11 aa, Artificial Sequence
  Description of Artificial Sequence: Synthetic peptide
  Seed: FYIQMCTELKL
FQIQMCTELKV

SEQ ID NO: 27182 - protein, 11 aa, Artificial Sequence
  Description of Artificial Sequence: Synthetic peptide
  Seed: FYIQMCTELKL
FEIQMCTELKI

SEQ ID NO: 27183 - protein, 11 aa, Artificial Sequence
  Description of Artificial Sequence: Synthetic peptide
  Seed: FYIQMCTELKL
FKIQMCTELKL

SEQ ID NO: 27184 - protein, 11 aa, Artificial Sequence
  Description of Artificial Sequence: Synthetic peptide
  Seed: FYIQMCTELKL
FKIQMCTELKV

SEQ ID NO: 27185 - protein, 11 aa, Artificial Sequence
  Description of Artificial Sequence: Synthetic peptide
  Seed: FYIQMCTELKL
FMIQMCTELKA

SEQ ID NO: 27186 - protein, 11 aa, Artificial Sequence
  Description of Artificial Sequence: Synthetic peptide
  Seed: FYIQMCTELKL
FMIQMCTELKI

SEQ ID NO: 27187 - protein, 11 aa, Artificial Sequence
  Description of Artificial Sequence: Synthetic peptide
  Seed: FYIQMCTELKL
FMIQMCTELKL

SEQ ID NO: 27188 - protein, 11 aa, Artificial Sequence
  Description of Artificial Sequence: Synthetic peptide
  Seed: FYIQMCTELKL
FMIQMCTELKM

SEQ ID NO: 27189 - protein, 11 aa, Artificial Sequence
  Description of Artificial Sequence: Synthetic peptide
  Seed: FYIQMCTELKL
FMIQMCTELKT

SEQ ID NO: 27190 - protein, 11 aa, Artificial Sequence
  Description of Artificial Sequence: Synthetic peptide
  Seed: FYIQMCTELKL
FMIQMCTELKV

SEQ ID NO: 27191 - protein, 11 aa, Artificial Sequence
  Description of Artificial Sequence: Synthetic peptide
  Seed: FYIQMCTELKL
FFIQMCTELKI

SEQ ID NO: 27192 - protein, 11 aa, Artificial Sequence
  Description of Artificial Sequence: Synthetic peptide
  Seed: FYIQMCTELKL
FFIQMCTELKL

SEQ ID NO: 27193 - protein, 11 aa, Artificial Sequence
  Description of Artificial Sequence: Synthetic peptide
  Seed: FYIQMCTELKL
FFIQMCTELKM

SEQ ID NO: 27194 - protein, 11 aa, Artificial Sequence
  Description of Artificial Sequence: Synthetic peptide
  Seed: FYIQMCTELKL
FFIQMCTELKF

SEQ ID NO: 27195 - protein, 11 aa, Artificial Sequence
  Description of Artificial Sequence: Synthetic peptide
  Seed: FYIQMCTELKL
FFIQMCTELKW

SEQ ID NO: 27196 - protein, 11 aa, Artificial Sequence
  Description of Artificial Sequence: Synthetic peptide
  Seed: FYIQMCTELKL
FFIQMCTELKV

SEQ ID NO: 27197 - protein, 11 aa, Artificial Sequence
  Description of Artificial Sequence: Synthetic peptide
  Seed: FYIQMCTELKL
FPIQMCTELKI

SEQ ID NO: 27198 - protein, 11 aa, Artificial Sequence
  Description of Artificial Sequence: Synthetic peptide
  Seed: FYIQMCTELKL
FPIQMCTELKL

SEQ ID NO: 27199 - protein, 11 aa, Artificial Sequence
  Description of Artificial Sequence: Synthetic peptide
  Seed: FYIQMCTELKL
FPIQMCTELKM

SEQ ID NO: 27200 - protein, 11 aa, Artificial Sequence
  Description of Artificial Sequence: Synthetic peptide
  Seed: FYIQMCTELKL
FPIQMCTELKV

SEQ ID NO: 27201 - protein, 11 aa, Artificial Sequence
  Description of Artificial Sequence: Synthetic peptide
  Seed: FYIQMCTELKL
FSIQMCTELKI

SEQ ID NO: 27202 - protein, 11 aa, Artificial Sequence
  Description of Artificial Sequence: Synthetic peptide
  Seed: FYIQMCTELKL
FSIQMCTELKL

SEQ ID NO: 27203 - protein, 11 aa, Artificial Sequence
  Description of Artificial Sequence: Synthetic peptide
  Seed: FYIQMCTELKL
FKIQMCTELKM

SEQ ID NO: 27204 - protein, 11 aa, Artificial Sequence
  Description of Artificial Sequence: Synthetic peptide
  Seed: FYIQMCTELKL
FKIQMCTELKI

SEQ ID NO: 27205 - protein, 11 aa, Artificial Sequence
  Description of Artificial Sequence: Synthetic peptide
  Seed: FYIQMCTELKL
FEIQMCTELKL

SEQ ID NO: 27206 - protein, 11 aa, Artificial Sequence
  Description of Artificial Sequence: Synthetic peptide
  Seed: FYIQMCTELKL
FLIQMCTELKV

SEQ ID NO: 27207 - protein, 11 aa, Artificial Sequence
  Description of Artificial Sequence: Synthetic peptide
  Seed: FYIQMCTELKL
FEIQMCTELKM

SEQ ID NO: 27208 - protein, 11 aa, Artificial Sequence
  Description of Artificial Sequence: Synthetic peptide
  Seed: FYIQMCTELKL
FEIQMCTELKV

SEQ ID NO: 27209 - protein, 11 aa, Artificial Sequence
  Description of Artificial Sequence: Synthetic peptide
  Seed: FYIQMCTELKL
FGIQMCTELKI

SEQ ID NO: 27210 - protein, 11 aa, Artificial Sequence
  Description of Artificial Sequence: Synthetic peptide
  Seed: FYIQMCTELKL
FGIQMCTELKL

SEQ ID NO: 27211 - protein, 11 aa, Artificial Sequence
  Description of Artificial Sequence: Synthetic peptide
  Seed: FYIQMCTELKL
FGIQMCTELKM

SEQ ID NO: 27212 - protein, 11 aa, Artificial Sequence
  Description of Artificial Sequence: Synthetic peptide
  Seed: FYIQMCTELKL
FGIQMCTELKV

SEQ ID NO: 27213 - protein, 11 aa, Artificial Sequence
  Description of Artificial Sequence: Synthetic peptide
  Seed: FYIQMCTELKL
FHIQMCTELKI

SEQ ID NO: 27214 - protein, 11 aa, Artificial Sequence
  Description of Artificial Sequence: Synthetic peptide
  Seed: FYIQMCTELKL
FHIQMCTELKL

SEQ ID NO: 27215 - protein, 11 aa, Artificial Sequence
  Description of Artificial Sequence: Synthetic peptide
  Seed: FYIQMCTELKL
FHIQMCTELKM

SEQ ID NO: 27216 - protein, 11 aa, Artificial Sequence
  Description of Artificial Sequence: Synthetic peptide
  Seed: FYIQMCTELKL
FHIQMCTELKV

SEQ ID NO: 27217 - protein, 11 aa, Artificial Sequence
  Description of Artificial Sequence: Synthetic peptide
  Seed: FYIQMCTELKL
FIIQMCTELKI

SEQ ID NO: 27218 - protein, 11 aa, Artificial Sequence
  Description of Artificial Sequence: Synthetic peptide
  Seed: FYIQMCTELKL
FIIQMCTELKL

SEQ ID NO: 27219 - protein, 11 aa, Artificial Sequence
  Description of Artificial Sequence: Synthetic peptide
  Seed: FYIQMCTELKL
FIIQMCTELKM

SEQ ID NO: 27220 - protein, 11 aa, Artificial Sequence
  Description of Artificial Sequence: Synthetic peptide
  Seed: FYIQMCTELKL
FIIQMCTELKV

SEQ ID NO: 27221 - protein, 11 aa, Artificial Sequence
  Description of Artificial Sequence: Synthetic peptide
  Seed: FYIQMCTELKL
FLIQMCTELKA

SEQ ID NO: 27222 - protein, 11 aa, Artificial Sequence
  Description of Artificial Sequence: Synthetic peptide
  Seed: FYIQMCTELKL
FLIQMCTELKI

SEQ ID NO: 27223 - protein, 11 aa, Artificial Sequence
  Description of Artificial Sequence: Synthetic peptide
  Seed: FYIQMCTELKL
FLIQMCTELKL

SEQ ID NO: 27224 - protein, 11 aa, Artificial Sequence
  Description of Artificial Sequence: Synthetic peptide
  Seed: FYIQMCTELKL
FLIQMCTELKM

SEQ ID NO: 27225 - protein, 11 aa, Artificial Sequence
  Description of Artificial Sequence: Synthetic peptide
  Seed: FYIQMCTELKL
FLIQMCTELKT

SEQ ID NO: 27226 - protein, 10 aa, Artificial Sequence
  Description of Artificial Sequence: Synthetic peptide
  Seed: FQTAAQRAMM
FHTAAQRAMA

SEQ ID NO: 27227 - protein, 10 aa, Artificial Sequence
  Description of Artificial Sequence: Synthetic peptide
  Seed: FQTAAQRAMM
FGTAAQRAMV

SEQ ID NO: 27228 - protein, 10 aa, Artificial Sequence
  Description of Artificial Sequence: Synthetic peptide
  Seed: FQTAAQRAMM
FGTAAQRAMM

SEQ ID NO: 27229 - protein, 10 aa, Artificial Sequence
  Description of Artificial Sequence: Synthetic peptide
  Seed: FERATVMAAF
FQRATVMAAY

SEQ ID NO: 27230 - protein, 10 aa, Artificial Sequence
  Description of Artificial Sequence: Synthetic peptide
  Seed: FERATVMAAF
FQRATVMAAR

SEQ ID NO: 27231 - protein, 10 aa, Artificial Sequence
  Description of Artificial Sequence: Synthetic peptide
  Seed: FERATVMAAF
FQRATVMAAG

SEQ ID NO: 27232 - protein, 10 aa, Artificial Sequence
  Description of Artificial Sequence: Synthetic peptide
  Seed: FERATVMAAF
FQRATVMAAH

SEQ ID NO: 27233 - protein, 10 aa, Artificial Sequence
  Description of Artificial Sequence: Synthetic peptide
  Seed: FERATVMAAF
FQRATVMAAI

SEQ ID NO: 27234 - protein, 10 aa, Artificial Sequence
  Description of Artificial Sequence: Synthetic peptide
  Seed: FERATVMAAF
FQRATVMAAL

SEQ ID NO: 27235 - protein, 10 aa, Artificial Sequence
  Description of Artificial Sequence: Synthetic peptide
  Seed: FERATVMAAF
FQRATVMAAK

SEQ ID NO: 27236 - protein, 10 aa, Artificial Sequence
  Description of Artificial Sequence: Synthetic peptide
  Seed: FERATVMAAF
FQRATVMAAM

SEQ ID NO: 27237 - protein, 10 aa, Artificial Sequence
  Description of Artificial Sequence: Synthetic peptide
  Seed: FERATVMAAF
FQRATVMAAF

SEQ ID NO: 27238 - protein, 10 aa, Artificial Sequence
  Description of Artificial Sequence: Synthetic peptide
  Seed: FERATVMAAF
FQRATVMAAW

SEQ ID NO: 27239 - protein, 10 aa, Artificial Sequence
  Description of Artificial Sequence: Synthetic peptide
  Seed: FERATVMAAF
FQRATVMAAV

SEQ ID NO: 27240 - protein, 10 aa, Artificial Sequence
  Description of Artificial Sequence: Synthetic peptide
  Seed: FERATVMAAF
FERATVMAAL

SEQ ID NO: 27241 - protein, 10 aa, Artificial Sequence
  Description of Artificial Sequence: Synthetic peptide
  Seed: FERATVMAAF
FERATVMAAA

SEQ ID NO: 27242 - protein, 10 aa, Artificial Sequence
  Description of Artificial Sequence: Synthetic peptide
  Seed: FERATVMAAF
FERATVMAAR

SEQ ID NO: 27243 - protein, 10 aa, Artificial Sequence
  Description of Artificial Sequence: Synthetic peptide
  Seed: FERATVMAAF
FERATVMAAN

SEQ ID NO: 27244 - protein, 10 aa, Artificial Sequence
  Description of Artificial Sequence: Synthetic peptide
  Seed: FERATVMAAF
FERATVMAAD

SEQ ID NO: 27245 - protein, 10 aa, Artificial Sequence
  Description of Artificial Sequence: Synthetic peptide
  Seed: FERATVMAAF
FERATVMAAC

SEQ ID NO: 27246 - protein, 10 aa, Artificial Sequence
  Description of Artificial Sequence: Synthetic peptide
  Seed: FERATVMAAF
FERATVMAAQ

SEQ ID NO: 27247 - protein, 10 aa, Artificial Sequence
  Description of Artificial Sequence: Synthetic peptide
  Seed: FERATVMAAF
FERATVMAAE

SEQ ID NO: 27248 - protein, 10 aa, Artificial Sequence
  Description of Artificial Sequence: Synthetic peptide
  Seed: FERATVMAAF
FERATVMAAG

SEQ ID NO: 27249 - protein, 10 aa, Artificial Sequence
  Description of Artificial Sequence: Synthetic peptide
  Seed: FERATVMAAF
FERATVMAAH

SEQ ID NO: 27250 - protein, 10 aa, Artificial Sequence
  Description of Artificial Sequence: Synthetic peptide
  Seed: FERATVMAAF
FQRATVMAAA

SEQ ID NO: 27251 - protein, 10 aa, Artificial Sequence
  Description of Artificial Sequence: Synthetic peptide
  Seed: FERATVMAAF
FCRATVMAAV

SEQ ID NO: 27252 - protein, 10 aa, Artificial Sequence
  Description of Artificial Sequence: Synthetic peptide
  Seed: FERATVMAAF
FCRATVMAAY

SEQ ID NO: 27253 - protein, 10 aa, Artificial Sequence
  Description of Artificial Sequence: Synthetic peptide
  Seed: FERATVMAAF
FCRATVMAAF

SEQ ID NO: 27254 - protein, 10 aa, Artificial Sequence
  Description of Artificial Sequence: Synthetic peptide
  Seed: FERATVMAAF
FNRATVMAAL

SEQ ID NO: 27255 - protein, 10 aa, Artificial Sequence
  Description of Artificial Sequence: Synthetic peptide
  Seed: FERATVMAAF
FNRATVMAAK

SEQ ID NO: 27256 - protein, 10 aa, Artificial Sequence
  Description of Artificial Sequence: Synthetic peptide
  Seed: FERATVMAAF
FNRATVMAAM

SEQ ID NO: 27257 - protein, 10 aa, Artificial Sequence
  Description of Artificial Sequence: Synthetic peptide
  Seed: FERATVMAAF
FNRATVMAAF

SEQ ID NO: 27258 - protein, 10 aa, Artificial Sequence
  Description of Artificial Sequence: Synthetic peptide
  Seed: FERATVMAAF
FNRATVMAAY

SEQ ID NO: 27259 - protein, 10 aa, Artificial Sequence
  Description of Artificial Sequence: Synthetic peptide
  Seed: FERATVMAAF
FNRATVMAAV

SEQ ID NO: 27260 - protein, 10 aa, Artificial Sequence
  Description of Artificial Sequence: Synthetic peptide
  Seed: FERATVMAAF
FDRATVMAAR

SEQ ID NO: 27261 - protein, 10 aa, Artificial Sequence
  Description of Artificial Sequence: Synthetic peptide
  Seed: FERATVMAAF
FDRATVMAAI

SEQ ID NO: 27262 - protein, 10 aa, Artificial Sequence
  Description of Artificial Sequence: Synthetic peptide
  Seed: FERATVMAAF
FDRATVMAAL

SEQ ID NO: 27263 - protein, 10 aa, Artificial Sequence
  Description of Artificial Sequence: Synthetic peptide
  Seed: FERATVMAAF
FDRATVMAAK

SEQ ID NO: 27264 - protein, 10 aa, Artificial Sequence
  Description of Artificial Sequence: Synthetic peptide
  Seed: FERATVMAAF
FDRATVMAAM

SEQ ID NO: 27265 - protein, 10 aa, Artificial Sequence
  Description of Artificial Sequence: Synthetic peptide
  Seed: FERATVMAAF
FDRATVMAAF

SEQ ID NO: 27266 - protein, 10 aa, Artificial Sequence
  Description of Artificial Sequence: Synthetic peptide
  Seed: FERATVMAAF
FDRATVMAAY

SEQ ID NO: 27267 - protein, 10 aa, Artificial Sequence
  Description of Artificial Sequence: Synthetic peptide
  Seed: FERATVMAAF
FDRATVMAAV

SEQ ID NO: 27268 - protein, 10 aa, Artificial Sequence
  Description of Artificial Sequence: Synthetic peptide
  Seed: FERATVMAAF
FCRATVMAAR

SEQ ID NO: 27269 - protein, 10 aa, Artificial Sequence
  Description of Artificial Sequence: Synthetic peptide
  Seed: FERATVMAAF
FCRATVMAAI

SEQ ID NO: 27270 - protein, 10 aa, Artificial Sequence
  Description of Artificial Sequence: Synthetic peptide
  Seed: FERATVMAAF
FCRATVMAAL

SEQ ID NO: 27271 - protein, 10 aa, Artificial Sequence
  Description of Artificial Sequence: Synthetic peptide
  Seed: FERATVMAAF
FCRATVMAAK

SEQ ID NO: 27272 - protein, 10 aa, Artificial Sequence
  Description of Artificial Sequence: Synthetic peptide
  Seed: FERATVMAAF
FCRATVMAAM

SEQ ID NO: 27273 - protein, 10 aa, Artificial Sequence
  Description of Artificial Sequence: Synthetic peptide
  Seed: FERATVMAAF
FERATVMAAI

SEQ ID NO: 27274 - protein, 10 aa, Artificial Sequence
  Description of Artificial Sequence: Synthetic peptide
  Seed: FERATVMAAF
FERATVMAAK

SEQ ID NO: 27275 - protein, 10 aa, Artificial Sequence
  Description of Artificial Sequence: Synthetic peptide
  Seed: FERATVMAAF
FNRATVMAAR

SEQ ID NO: 27276 - protein, 10 aa, Artificial Sequence
  Description of Artificial Sequence: Synthetic peptide
  Seed: FERATVMAAF
FIRATVMAAV

SEQ ID NO: 27277 - protein, 10 aa, Artificial Sequence
  Description of Artificial Sequence: Synthetic peptide
  Seed: FERATVMAAF
FHRATVMAAV

SEQ ID NO: 27278 - protein, 10 aa, Artificial Sequence
  Description of Artificial Sequence: Synthetic peptide
  Seed: FERATVMAAF
FIRATVMAAR

SEQ ID NO: 27279 - protein, 10 aa, Artificial Sequence
  Description of Artificial Sequence: Synthetic peptide
  Seed: FERATVMAAF
FIRATVMAAI

SEQ ID NO: 27280 - protein, 10 aa, Artificial Sequence
  Description of Artificial Sequence: Synthetic peptide
  Seed: FERATVMAAF
FIRATVMAAL

SEQ ID NO: 27281 - protein, 10 aa, Artificial Sequence
  Description of Artificial Sequence: Synthetic peptide
  Seed: FERATVMAAF
FIRATVMAAK

SEQ ID NO: 27282 - protein, 10 aa, Artificial Sequence
  Description of Artificial Sequence: Synthetic peptide
  Seed: FERATVMAAF
FIRATVMAAM

SEQ ID NO: 27283 - protein, 10 aa, Artificial Sequence
  Description of Artificial Sequence: Synthetic peptide
  Seed: FERATVMAAF
FIRATVMAAF

SEQ ID NO: 27284 - protein, 10 aa, Artificial Sequence
  Description of Artificial Sequence: Synthetic peptide
  Seed: FERATVMAAF
FIRATVMAAW

SEQ ID NO: 27285 - protein, 10 aa, Artificial Sequence
  Description of Artificial Sequence: Synthetic peptide
  Seed: FERATVMAAF
FIRATVMAAY

SEQ ID NO: 27286 - protein, 10 aa, Artificial Sequence
  Description of Artificial Sequence: Synthetic peptide
  Seed: FERATVMAAF
FLRATVMAAR

SEQ ID NO: 27287 - protein, 10 aa, Artificial Sequence
  Description of Artificial Sequence: Synthetic peptide
  Seed: FERATVMAAF
FERATVMAAM

SEQ ID NO: 27288 - protein, 10 aa, Artificial Sequence
  Description of Artificial Sequence: Synthetic peptide
  Seed: FERATVMAAF
FLRATVMAAH

SEQ ID NO: 27289 - protein, 10 aa, Artificial Sequence
  Description of Artificial Sequence: Synthetic peptide
  Seed: FERATVMAAF
FLRATVMAAI

SEQ ID NO: 27290 - protein, 10 aa, Artificial Sequence
  Description of Artificial Sequence: Synthetic peptide
  Seed: FERATVMAAF
FLRATVMAAL

SEQ ID NO: 27291 - protein, 10 aa, Artificial Sequence
  Description of Artificial Sequence: Synthetic peptide
  Seed: FERATVMAAF
FLRATVMAAK

SEQ ID NO: 27292 - protein, 10 aa, Artificial Sequence
  Description of Artificial Sequence: Synthetic peptide
  Seed: FERATVMAAF
FLRATVMAAM

SEQ ID NO: 27293 - protein, 10 aa, Artificial Sequence
  Description of Artificial Sequence: Synthetic peptide
  Seed: FERATVMAAF
FLRATVMAAF

SEQ ID NO: 27294 - protein, 10 aa, Artificial Sequence
  Description of Artificial Sequence: Synthetic peptide
  Seed: FERATVMAAF
FLRATVMAAW

SEQ ID NO: 27295 - protein, 10 aa, Artificial Sequence
  Description of Artificial Sequence: Synthetic peptide
  Seed: FERATVMAAF
FLRATVMAAY

SEQ ID NO: 27296 - protein, 10 aa, Artificial Sequence
  Description of Artificial Sequence: Synthetic peptide
  Seed: FERATVMAAF
FLRATVMAAV

SEQ ID NO: 27297 - protein, 10 aa, Artificial Sequence
  Description of Artificial Sequence: Synthetic peptide
  Seed: FERATVMAAF
FHRATVMAAY

SEQ ID NO: 27298 - protein, 10 aa, Artificial Sequence
  Description of Artificial Sequence: Synthetic peptide
  Seed: FERATVMAAF
FHRATVMAAW

SEQ ID NO: 27299 - protein, 10 aa, Artificial Sequence
  Description of Artificial Sequence: Synthetic peptide
  Seed: FERATVMAAF
FHRATVMAAF

SEQ ID NO: 27300 - protein, 10 aa, Artificial Sequence
  Description of Artificial Sequence: Synthetic peptide
  Seed: FERATVMAAF
FHRATVMAAM

SEQ ID NO: 27301 - protein, 10 aa, Artificial Sequence
  Description of Artificial Sequence: Synthetic peptide
  Seed: FERATVMAAF
FERATVMAAP

SEQ ID NO: 27302 - protein, 10 aa, Artificial Sequence
  Description of Artificial Sequence: Synthetic peptide
  Seed: FERATVMAAF
FERATVMAAS

SEQ ID NO: 27303 - protein, 10 aa, Artificial Sequence
  Description of Artificial Sequence: Synthetic peptide
  Seed: FERATVMAAF
FERATVMAAT

SEQ ID NO: 27304 - protein, 10 aa, Artificial Sequence
  Description of Artificial Sequence: Synthetic peptide
  Seed: FERATVMAAF
FERATVMAAW

SEQ ID NO: 27305 - protein, 10 aa, Artificial Sequence
  Description of Artificial Sequence: Synthetic peptide
  Seed: FERATVMAAF
FERATVMAAY

SEQ ID NO: 27306 - protein, 10 aa, Artificial Sequence
  Description of Artificial Sequence: Synthetic peptide
  Seed: FERATVMAAF
FERATVMAAV

SEQ ID NO: 27307 - protein, 10 aa, Artificial Sequence
  Description of Artificial Sequence: Synthetic peptide
  Seed: FERATVMAAF
FGRATVMAAR

SEQ ID NO: 27308 - protein, 10 aa, Artificial Sequence
  Description of Artificial Sequence: Synthetic peptide
  Seed: FERATVMAAF
FGRATVMAAI

SEQ ID NO: 27309 - protein, 10 aa, Artificial Sequence
  Description of Artificial Sequence: Synthetic peptide
  Seed: FERATVMAAF
FGRATVMAAL

SEQ ID NO: 27310 - protein, 10 aa, Artificial Sequence
  Description of Artificial Sequence: Synthetic peptide
  Seed: FERATVMAAF
FGRATVMAAK

SEQ ID NO: 27311 - protein, 10 aa, Artificial Sequence
  Description of Artificial Sequence: Synthetic peptide
  Seed: FERATVMAAF
FGRATVMAAM

SEQ ID NO: 27312 - protein, 10 aa, Artificial Sequence
  Description of Artificial Sequence: Synthetic peptide
  Seed: FERATVMAAF
FGRATVMAAF

SEQ ID NO: 27313 - protein, 10 aa, Artificial Sequence
  Description of Artificial Sequence: Synthetic peptide
  Seed: FERATVMAAF
FGRATVMAAY

SEQ ID NO: 27314 - protein, 10 aa, Artificial Sequence
  Description of Artificial Sequence: Synthetic peptide
  Seed: FERATVMAAF
FGRATVMAAV

SEQ ID NO: 27315 - protein, 10 aa, Artificial Sequence
  Description of Artificial Sequence: Synthetic peptide
  Seed: FERATVMAAF
FHRATVMAAR

SEQ ID NO: 27316 - protein, 10 aa, Artificial Sequence
  Description of Artificial Sequence: Synthetic peptide
  Seed: FERATVMAAF
FHRATVMAAH

SEQ ID NO: 27317 - protein, 10 aa, Artificial Sequence
  Description of Artificial Sequence: Synthetic peptide
  Seed: FERATVMAAF
FHRATVMAAI

SEQ ID NO: 27318 - protein, 10 aa, Artificial Sequence
  Description of Artificial Sequence: Synthetic peptide
  Seed: FERATVMAAF
FHRATVMAAL

SEQ ID NO: 27319 - protein, 10 aa, Artificial Sequence
  Description of Artificial Sequence: Synthetic peptide
  Seed: FERATVMAAF
FHRATVMAAK

SEQ ID NO: 27320 - protein, 10 aa, Artificial Sequence
  Description of Artificial Sequence: Synthetic peptide
  Seed: FERATVMAAF
FNRATVMAAI

SEQ ID NO: 27321 - protein, 10 aa, Artificial Sequence
  Description of Artificial Sequence: Synthetic peptide
  Seed: FERATVMAAF
FRRATVMAAV

SEQ ID NO: 27322 - protein, 10 aa, Artificial Sequence
  Description of Artificial Sequence: Synthetic peptide
  Seed: FQTAAQRAMM
FGTAAQRAML

SEQ ID NO: 27323 - protein, 9 aa, Artificial Sequence
  Description of Artificial Sequence: Synthetic peptide
  Seed: FERATVMAA
FMRATVMAF

SEQ ID NO: 27324 - protein, 9 aa, Artificial Sequence
  Description of Artificial Sequence: Synthetic peptide
  Seed: FERATVMAA
FKRATVMAV

SEQ ID NO: 27325 - protein, 9 aa, Artificial Sequence
  Description of Artificial Sequence: Synthetic peptide
  Seed: FERATVMAA
FMRATVMAA

SEQ ID NO: 27326 - protein, 9 aa, Artificial Sequence
  Description of Artificial Sequence: Synthetic peptide
  Seed: FERATVMAA
FMRATVMAN

SEQ ID NO: 27327 - protein, 9 aa, Artificial Sequence
  Description of Artificial Sequence: Synthetic peptide
  Seed: FERATVMAA
FMRATVMAQ

SEQ ID NO: 27328 - protein, 9 aa, Artificial Sequence
  Description of Artificial Sequence: Synthetic peptide
  Seed: FERATVMAA
FMRATVMAG

SEQ ID NO: 27329 - protein, 9 aa, Artificial Sequence
  Description of Artificial Sequence: Synthetic peptide
  Seed: FERATVMAA
FMRATVMAH

SEQ ID NO: 27330 - protein, 9 aa, Artificial Sequence
  Description of Artificial Sequence: Synthetic peptide
  Seed: FERATVMAA
FMRATVMAI

SEQ ID NO: 27331 - protein, 9 aa, Artificial Sequence
  Description of Artificial Sequence: Synthetic peptide
  Seed: FERATVMAA
FMRATVMAL

SEQ ID NO: 27332 - protein, 9 aa, Artificial Sequence
  Description of Artificial Sequence: Synthetic peptide
  Seed: FERATVMAA
FMRATVMAM

SEQ ID NO: 27333 - protein, 9 aa, Artificial Sequence
  Description of Artificial Sequence: Synthetic peptide
  Seed: FERATVMAA
FMRATVMAS

SEQ ID NO: 27334 - protein, 9 aa, Artificial Sequence
  Description of Artificial Sequence: Synthetic peptide
  Seed: FERATVMAA
FPRATVMAF

SEQ ID NO: 27335 - protein, 9 aa, Artificial Sequence
  Description of Artificial Sequence: Synthetic peptide
  Seed: FERATVMAA
FMRATVMAT

SEQ ID NO: 27336 - protein, 9 aa, Artificial Sequence
  Description of Artificial Sequence: Synthetic peptide
  Seed: FERATVMAA
FMRATVMAW

SEQ ID NO: 27337 - protein, 9 aa, Artificial Sequence
  Description of Artificial Sequence: Synthetic peptide
  Seed: FERATVMAA
FMRATVMAY

SEQ ID NO: 27338 - protein, 9 aa, Artificial Sequence
  Description of Artificial Sequence: Synthetic peptide
  Seed: FERATVMAA
FMRATVMAV

SEQ ID NO: 27339 - protein, 9 aa, Artificial Sequence
  Description of Artificial Sequence: Synthetic peptide
  Seed: FERATVMAA
FFRATVMAL

SEQ ID NO: 27340 - protein, 9 aa, Artificial Sequence
  Description of Artificial Sequence: Synthetic peptide
  Seed: FERATVMAA
FFRATVMAM

SEQ ID NO: 27341 - protein, 9 aa, Artificial Sequence
  Description of Artificial Sequence: Synthetic peptide
  Seed: FERATVMAA
FFRATVMAF

SEQ ID NO: 27342 - protein, 9 aa, Artificial Sequence
  Description of Artificial Sequence: Synthetic peptide
  Seed: FERATVMAA
FFRATVMAW

SEQ ID NO: 27343 - protein, 9 aa, Artificial Sequence
  Description of Artificial Sequence: Synthetic peptide
  Seed: FERATVMAA
FFRATVMAY

SEQ ID NO: 27344 - protein, 9 aa, Artificial Sequence
  Description of Artificial Sequence: Synthetic peptide
  Seed: FERATVMAA
FKRATVMAY

SEQ ID NO: 27345 - protein, 9 aa, Artificial Sequence
  Description of Artificial Sequence: Synthetic peptide
  Seed: FERATVMAA
FKRATVMAW

SEQ ID NO: 27346 - protein, 9 aa, Artificial Sequence
  Description of Artificial Sequence: Synthetic peptide
  Seed: FERATVMAA
FKRATVMAF

SEQ ID NO: 27347 - protein, 9 aa, Artificial Sequence
  Description of Artificial Sequence: Synthetic peptide
  Seed: FERATVMAA
FKRATVMAM

SEQ ID NO: 27348 - protein, 9 aa, Artificial Sequence
  Description of Artificial Sequence: Synthetic peptide
  Seed: FERATVMAA
FIRATVMAI

SEQ ID NO: 27349 - protein, 9 aa, Artificial Sequence
  Description of Artificial Sequence: Synthetic peptide
  Seed: FERATVMAA
FIRATVMAL

SEQ ID NO: 27350 - protein, 9 aa, Artificial Sequence
  Description of Artificial Sequence: Synthetic peptide
  Seed: FERATVMAA
FIRATVMAM

SEQ ID NO: 27351 - protein, 9 aa, Artificial Sequence
  Description of Artificial Sequence: Synthetic peptide
  Seed: FERATVMAA
FIRATVMAF

SEQ ID NO: 27352 - protein, 9 aa, Artificial Sequence
  Description of Artificial Sequence: Synthetic peptide
  Seed: FERATVMAA
FIRATVMAW

SEQ ID NO: 27353 - protein, 9 aa, Artificial Sequence
  Description of Artificial Sequence: Synthetic peptide
  Seed: FERATVMAA
FIRATVMAY

SEQ ID NO: 27354 - protein, 9 aa, Artificial Sequence
  Description of Artificial Sequence: Synthetic peptide
  Seed: FERATVMAA
FLRATVMAH

SEQ ID NO: 27355 - protein, 9 aa, Artificial Sequence
  Description of Artificial Sequence: Synthetic peptide
  Seed: FERATVMAA
FLRATVMAI

SEQ ID NO: 27356 - protein, 9 aa, Artificial Sequence
  Description of Artificial Sequence: Synthetic peptide
  Seed: FERATVMAA
FLRATVMAL

SEQ ID NO: 27357 - protein, 9 aa, Artificial Sequence
  Description of Artificial Sequence: Synthetic peptide
  Seed: FERATVMAA
FLRATVMAM

SEQ ID NO: 27358 - protein, 9 aa, Artificial Sequence
  Description of Artificial Sequence: Synthetic peptide
  Seed: FERATVMAA
FLRATVMAF

SEQ ID NO: 27359 - protein, 9 aa, Artificial Sequence
  Description of Artificial Sequence: Synthetic peptide
  Seed: FERATVMAA
FLRATVMAW

SEQ ID NO: 27360 - protein, 9 aa, Artificial Sequence
  Description of Artificial Sequence: Synthetic peptide
  Seed: FERATVMAA
FLRATVMAY

SEQ ID NO: 27361 - protein, 9 aa, Artificial Sequence
  Description of Artificial Sequence: Synthetic peptide
  Seed: FERATVMAA
FLRATVMAV

SEQ ID NO: 27362 - protein, 9 aa, Artificial Sequence
  Description of Artificial Sequence: Synthetic peptide
  Seed: FERATVMAA
FKRATVMAA

SEQ ID NO: 27363 - protein, 9 aa, Artificial Sequence
  Description of Artificial Sequence: Synthetic peptide
  Seed: FERATVMAA
FKRATVMAG

SEQ ID NO: 27364 - protein, 9 aa, Artificial Sequence
  Description of Artificial Sequence: Synthetic peptide
  Seed: FERATVMAA
FKRATVMAH

SEQ ID NO: 27365 - protein, 9 aa, Artificial Sequence
  Description of Artificial Sequence: Synthetic peptide
  Seed: FERATVMAA
FKRATVMAI

SEQ ID NO: 27366 - protein, 9 aa, Artificial Sequence
  Description of Artificial Sequence: Synthetic peptide
  Seed: FERATVMAA
FKRATVMAL

SEQ ID NO: 27367 - protein, 9 aa, Artificial Sequence
  Description of Artificial Sequence: Synthetic peptide
  Seed: FERATVMAA
FPRATVMAM

SEQ ID NO: 27368 - protein, 9 aa, Artificial Sequence
  Description of Artificial Sequence: Synthetic peptide
  Seed: FERATVMAA
FPRATVMAY

SEQ ID NO: 27369 - protein, 10 aa, Artificial Sequence
  Description of Artificial Sequence: Synthetic peptide
  Seed: FERATVMAAF
FRRATVMAAY

SEQ ID NO: 27370 - protein, 10 aa, Artificial Sequence
  Description of Artificial Sequence: Synthetic peptide
  Seed: FERATVMAAF
FARATVMAAM

SEQ ID NO: 27371 - protein, 9 aa, Artificial Sequence
  Description of Artificial Sequence: Synthetic peptide
  Seed: FERATVMAA
FVRATVMAL

SEQ ID NO: 27372 - protein, 9 aa, Artificial Sequence
  Description of Artificial Sequence: Synthetic peptide
  Seed: FERATVMAA
FVRATVMAM

SEQ ID NO: 27373 - protein, 9 aa, Artificial Sequence
  Description of Artificial Sequence: Synthetic peptide
  Seed: FERATVMAA
FVRATVMAF

SEQ ID NO: 27374 - protein, 9 aa, Artificial Sequence
  Description of Artificial Sequence: Synthetic peptide
  Seed: FERATVMAA
FVRATVMAW

SEQ ID NO: 27375 - protein, 9 aa, Artificial Sequence
  Description of Artificial Sequence: Synthetic peptide
  Seed: FERATVMAA
FVRATVMAY

SEQ ID NO: 27376 - protein, 10 aa, Artificial Sequence
  Description of Artificial Sequence: Synthetic peptide
  Seed: FERATVMAAF
FARATVMAAR

SEQ ID NO: 27377 - protein, 10 aa, Artificial Sequence
  Description of Artificial Sequence: Synthetic peptide
  Seed: FERATVMAAF
FARATVMAAI

SEQ ID NO: 27378 - protein, 10 aa, Artificial Sequence
  Description of Artificial Sequence: Synthetic peptide
  Seed: FERATVMAAF
FARATVMAAL

SEQ ID NO: 27379 - protein, 10 aa, Artificial Sequence
  Description of Artificial Sequence: Synthetic peptide
  Seed: FERATVMAAF
FARATVMAAK

SEQ ID NO: 27380 - protein, 10 aa, Artificial Sequence
  Description of Artificial Sequence: Synthetic peptide
  Seed: FERATVMAAF
FARATVMAAF

SEQ ID NO: 27381 - protein, 9 aa, Artificial Sequence
  Description of Artificial Sequence: Synthetic peptide
  Seed: FERATVMAA
FSRATVMAH

SEQ ID NO: 27382 - protein, 10 aa, Artificial Sequence
  Description of Artificial Sequence: Synthetic peptide
  Seed: FERATVMAAF
FARATVMAAY

SEQ ID NO: 27383 - protein, 10 aa, Artificial Sequence
  Description of Artificial Sequence: Synthetic peptide
  Seed: FERATVMAAF
FARATVMAAV

SEQ ID NO: 27384 - protein, 10 aa, Artificial Sequence
  Description of Artificial Sequence: Synthetic peptide
  Seed: FERATVMAAF
FRRATVMAAR

SEQ ID NO: 27385 - protein, 10 aa, Artificial Sequence
  Description of Artificial Sequence: Synthetic peptide
  Seed: FERATVMAAF
FRRATVMAAI

SEQ ID NO: 27386 - protein, 10 aa, Artificial Sequence
  Description of Artificial Sequence: Synthetic peptide
  Seed: FERATVMAAF
FRRATVMAAL

SEQ ID NO: 27387 - protein, 10 aa, Artificial Sequence
  Description of Artificial Sequence: Synthetic peptide
  Seed: FERATVMAAF
FRRATVMAAK

SEQ ID NO: 27388 - protein, 10 aa, Artificial Sequence
  Description of Artificial Sequence: Synthetic peptide
  Seed: FERATVMAAF
FRRATVMAAM

SEQ ID NO: 27389 - protein, 10 aa, Artificial Sequence
  Description of Artificial Sequence: Synthetic peptide
  Seed: FERATVMAAF
FRRATVMAAF

SEQ ID NO: 27390 - protein, 10 aa, Artificial Sequence
  Description of Artificial Sequence: Synthetic peptide
  Seed: FERATVMAAF
FRRATVMAAW

SEQ ID NO: 27391 - protein, 9 aa, Artificial Sequence
  Description of Artificial Sequence: Synthetic peptide
  Seed: FERATVMAA
FVRATVMAI

SEQ ID NO: 27392 - protein, 9 aa, Artificial Sequence
  Description of Artificial Sequence: Synthetic peptide
  Seed: FERATVMAA
FVRATVMAH

SEQ ID NO: 27393 - protein, 9 aa, Artificial Sequence
  Description of Artificial Sequence: Synthetic peptide
  Seed: FERATVMAA
FYRATVMAY

SEQ ID NO: 27394 - protein, 9 aa, Artificial Sequence
  Description of Artificial Sequence: Synthetic peptide
  Seed: FERATVMAA
FYRATVMAF

SEQ ID NO: 27395 - protein, 9 aa, Artificial Sequence
  Description of Artificial Sequence: Synthetic peptide
  Seed: FERATVMAA
FSRATVMAI

SEQ ID NO: 27396 - protein, 9 aa, Artificial Sequence
  Description of Artificial Sequence: Synthetic peptide
  Seed: FERATVMAA
FSRATVMAL

SEQ ID NO: 27397 - protein, 9 aa, Artificial Sequence
  Description of Artificial Sequence: Synthetic peptide
  Seed: FERATVMAA
FSRATVMAM

SEQ ID NO: 27398 - protein, 9 aa, Artificial Sequence
  Description of Artificial Sequence: Synthetic peptide
  Seed: FERATVMAA
FSRATVMAF

SEQ ID NO: 27399 - protein, 9 aa, Artificial Sequence
  Description of Artificial Sequence: Synthetic peptide
  Seed: FERATVMAA
FSRATVMAW

SEQ ID NO: 27400 - protein, 9 aa, Artificial Sequence
  Description of Artificial Sequence: Synthetic peptide
  Seed: FERATVMAA
FSRATVMAY

SEQ ID NO: 27401 - protein, 9 aa, Artificial Sequence
  Description of Artificial Sequence: Synthetic peptide
  Seed: FERATVMAA
FSRATVMAV

SEQ ID NO: 27402 - protein, 9 aa, Artificial Sequence
  Description of Artificial Sequence: Synthetic peptide
  Seed: FERATVMAA
FTRATVMAH

SEQ ID NO: 27403 - protein, 9 aa, Artificial Sequence
  Description of Artificial Sequence: Synthetic peptide
  Seed: FERATVMAA
FTRATVMAI

SEQ ID NO: 27404 - protein, 9 aa, Artificial Sequence
  Description of Artificial Sequence: Synthetic peptide
  Seed: FERATVMAA
FTRATVMAL

SEQ ID NO: 27405 - protein, 9 aa, Artificial Sequence
  Description of Artificial Sequence: Synthetic peptide
  Seed: FERATVMAA
FTRATVMAM

SEQ ID NO: 27406 - protein, 9 aa, Artificial Sequence
  Description of Artificial Sequence: Synthetic peptide
  Seed: FERATVMAA
FTRATVMAF

SEQ ID NO: 27407 - protein, 9 aa, Artificial Sequence
  Description of Artificial Sequence: Synthetic peptide
  Seed: FERATVMAA
FTRATVMAW

SEQ ID NO: 27408 - protein, 9 aa, Artificial Sequence
  Description of Artificial Sequence: Synthetic peptide
  Seed: FERATVMAA
FTRATVMAY

SEQ ID NO: 27409 - protein, 9 aa, Artificial Sequence
  Description of Artificial Sequence: Synthetic peptide
  Seed: FERATVMAA
FWRATVMAM

SEQ ID NO: 27410 - protein, 9 aa, Artificial Sequence
  Description of Artificial Sequence: Synthetic peptide
  Seed: FERATVMAA
FWRATVMAF

SEQ ID NO: 27411 - protein, 9 aa, Artificial Sequence
  Description of Artificial Sequence: Synthetic peptide
  Seed: FERATVMAA
FWRATVMAY

SEQ ID NO: 27412 - protein, 9 aa, Artificial Sequence
  Description of Artificial Sequence: Synthetic peptide
  Seed: FERATVMAA
FYRATVMAL

SEQ ID NO: 27413 - protein, 9 aa, Artificial Sequence
  Description of Artificial Sequence: Synthetic peptide
  Seed: FERATVMAA
FYRATVMAM

SEQ ID NO: 27414 - protein, 10 aa, Artificial Sequence
  Description of Artificial Sequence: Synthetic peptide
  Seed: FERATVMAAF
FKRATVMAAR

SEQ ID NO: 27415 - protein, 10 aa, Artificial Sequence
  Description of Artificial Sequence: Synthetic peptide
  Seed: FERATVMAAF
FKRATVMAAI

SEQ ID NO: 27416 - protein, 10 aa, Artificial Sequence
  Description of Artificial Sequence: Synthetic peptide
  Seed: FERATVMAAF
FKRATVMAAL

SEQ ID NO: 27417 - protein, 9 aa, Artificial Sequence
  Description of Artificial Sequence: Synthetic peptide
  Seed: FFGDNAEEY
FPGDNAEEM

SEQ ID NO: 27418 - protein, 9 aa, Artificial Sequence
  Description of Artificial Sequence: Synthetic peptide
  Seed: FFGDNAEEY
FFGDNAEEM

SEQ ID NO: 27419 - protein, 9 aa, Artificial Sequence
  Description of Artificial Sequence: Synthetic peptide
  Seed: FFGDNAEEY
FFGDNAEEW

SEQ ID NO: 27420 - protein, 9 aa, Artificial Sequence
  Description of Artificial Sequence: Synthetic peptide
  Seed: FFGDNAEEY
FFGDNAEEV

SEQ ID NO: 27421 - protein, 9 aa, Artificial Sequence
  Description of Artificial Sequence: Synthetic peptide
  Seed: FFGDNAEEY
FPGDNAEEA

SEQ ID NO: 27422 - protein, 9 aa, Artificial Sequence
  Description of Artificial Sequence: Synthetic peptide
  Seed: FFGDNAEEY
FPGDNAEEQ

SEQ ID NO: 27423 - protein, 9 aa, Artificial Sequence
  Description of Artificial Sequence: Synthetic peptide
  Seed: FFGDNAEEY
FPGDNAEEH

SEQ ID NO: 27424 - protein, 9 aa, Artificial Sequence
  Description of Artificial Sequence: Synthetic peptide
  Seed: FFGDNAEEY
FPGDNAEEI

SEQ ID NO: 27425 - protein, 9 aa, Artificial Sequence
  Description of Artificial Sequence: Synthetic peptide
  Seed: FFGDNAEEY
FPGDNAEEL

SEQ ID NO: 27426 - protein, 9 aa, Artificial Sequence
  Description of Artificial Sequence: Synthetic peptide
  Seed: FFGDNAEEY
FPGDNAEEF

SEQ ID NO: 27427 - protein, 9 aa, Artificial Sequence
  Description of Artificial Sequence: Synthetic peptide
  Seed: FFGDNAEEY
FWGDNAEEL

SEQ ID NO: 27428 - protein, 9 aa, Artificial Sequence
  Description of Artificial Sequence: Synthetic peptide
  Seed: FFGDNAEEY
FPGDNAEEW

SEQ ID NO: 27429 - protein, 9 aa, Artificial Sequence
  Description of Artificial Sequence: Synthetic peptide
  Seed: FFGDNAEEY
FPGDNAEEY

SEQ ID NO: 27430 - protein, 9 aa, Artificial Sequence
  Description of Artificial Sequence: Synthetic peptide
  Seed: FFGDNAEEY
FPGDNAEEV

SEQ ID NO: 27431 - protein, 9 aa, Artificial Sequence
  Description of Artificial Sequence: Synthetic peptide
  Seed: FFGDNAEEY
FSGDNAEEM

SEQ ID NO: 27432 - protein, 9 aa, Artificial Sequence
  Description of Artificial Sequence: Synthetic peptide
  Seed: FFGDNAEEY
FSGDNAEEF

SEQ ID NO: 27433 - protein, 9 aa, Artificial Sequence
  Description of Artificial Sequence: Synthetic peptide
  Seed: FFGDNAEEY
FSGDNAEEY

SEQ ID NO: 27434 - protein, 9 aa, Artificial Sequence
  Description of Artificial Sequence: Synthetic peptide
  Seed: FFGDNAEEY
FTGDNAEEM

SEQ ID NO: 27435 - protein, 9 aa, Artificial Sequence
  Description of Artificial Sequence: Synthetic peptide
  Seed: FFGDNAEEY
FTGDNAEEF

SEQ ID NO: 27436 - protein, 9 aa, Artificial Sequence
  Description of Artificial Sequence: Synthetic peptide
  Seed: FFGDNAEEY
FTGDNAEEY

SEQ ID NO: 27437 - protein, 9 aa, Artificial Sequence
  Description of Artificial Sequence: Synthetic peptide
  Seed: FFGDNAEEY
FFGDNAEEL

SEQ ID NO: 27438 - protein, 9 aa, Artificial Sequence
  Description of Artificial Sequence: Synthetic peptide
  Seed: FFGDNAEEY
FFGDNAEEI

SEQ ID NO: 27439 - protein, 9 aa, Artificial Sequence
  Description of Artificial Sequence: Synthetic peptide
  Seed: FFGDNAEEY
FMGDNAEEY

SEQ ID NO: 27440 - protein, 9 aa, Artificial Sequence
  Description of Artificial Sequence: Synthetic peptide
  Seed: FFGDNAEEY
FMGDNAEEW

SEQ ID NO: 27441 - protein, 9 aa, Artificial Sequence
  Description of Artificial Sequence: Synthetic peptide
  Seed: FEREGYSLV
FEREGYSLY

SEQ ID NO: 27442 - protein, 9 aa, Artificial Sequence
  Description of Artificial Sequence: Synthetic peptide
  Seed: FFGDNAEEY
FAGDNAEEH

SEQ ID NO: 27443 - protein, 9 aa, Artificial Sequence
  Description of Artificial Sequence: Synthetic peptide
  Seed: FFGDNAEEY
FAGDNAEEL

SEQ ID NO: 27444 - protein, 9 aa, Artificial Sequence
  Description of Artificial Sequence: Synthetic peptide
  Seed: FFGDNAEEY
FAGDNAEEM

SEQ ID NO: 27445 - protein, 9 aa, Artificial Sequence
  Description of Artificial Sequence: Synthetic peptide
  Seed: FFGDNAEEY
FAGDNAEEF

SEQ ID NO: 27446 - protein, 9 aa, Artificial Sequence
  Description of Artificial Sequence: Synthetic peptide
  Seed: FFGDNAEEY
FAGDNAEEW

SEQ ID NO: 27447 - protein, 9 aa, Artificial Sequence
  Description of Artificial Sequence: Synthetic peptide
  Seed: FFGDNAEEY
FAGDNAEEY

SEQ ID NO: 27448 - protein, 9 aa, Artificial Sequence
  Description of Artificial Sequence: Synthetic peptide
  Seed: FFGDNAEEY
FCGDNAEEY

SEQ ID NO: 27449 - protein, 9 aa, Artificial Sequence
  Description of Artificial Sequence: Synthetic peptide
  Seed: FFGDNAEEY
FQGDNAEEY

SEQ ID NO: 27450 - protein, 9 aa, Artificial Sequence
  Description of Artificial Sequence: Synthetic peptide
  Seed: FFGDNAEEY
FGGDNAEEY

SEQ ID NO: 27451 - protein, 9 aa, Artificial Sequence
  Description of Artificial Sequence: Synthetic peptide
  Seed: FFGDNAEEY
FIGDNAEEM

SEQ ID NO: 27452 - protein, 9 aa, Artificial Sequence
  Description of Artificial Sequence: Synthetic peptide
  Seed: FFGDNAEEY
FIGDNAEEF

SEQ ID NO: 27453 - protein, 9 aa, Artificial Sequence
  Description of Artificial Sequence: Synthetic peptide
  Seed: FFGDNAEEY
FIGDNAEEY

SEQ ID NO: 27454 - protein, 9 aa, Artificial Sequence
  Description of Artificial Sequence: Synthetic peptide
  Seed: FFGDNAEEY
FLGDNAEEM

SEQ ID NO: 27455 - protein, 9 aa, Artificial Sequence
  Description of Artificial Sequence: Synthetic peptide
  Seed: FFGDNAEEY
FLGDNAEEF

SEQ ID NO: 27456 - protein, 9 aa, Artificial Sequence
  Description of Artificial Sequence: Synthetic peptide
  Seed: FFGDNAEEY
FLGDNAEEY

SEQ ID NO: 27457 - protein, 9 aa, Artificial Sequence
  Description of Artificial Sequence: Synthetic peptide
  Seed: FFGDNAEEY
FMGDNAEEL

SEQ ID NO: 27458 - protein, 9 aa, Artificial Sequence
  Description of Artificial Sequence: Synthetic peptide
  Seed: FFGDNAEEY
FMGDNAEEM

SEQ ID NO: 27459 - protein, 9 aa, Artificial Sequence
  Description of Artificial Sequence: Synthetic peptide
  Seed: FFGDNAEEY
FMGDNAEEF

SEQ ID NO: 27460 - protein, 9 aa, Artificial Sequence
  Description of Artificial Sequence: Synthetic peptide
  Seed: FFGDNAEEY
FWGDNAEEI

SEQ ID NO: 27461 - protein, 9 aa, Artificial Sequence
  Description of Artificial Sequence: Synthetic peptide
  Seed: FFGDNAEEY
FWGDNAEEM

SEQ ID NO: 27462 - protein, 10 aa, Artificial Sequence
  Description of Artificial Sequence: Synthetic peptide
  Seed: FERATVMAAF
FKRATVMAAK

SEQ ID NO: 27463 - protein, 10 aa, Artificial Sequence
  Description of Artificial Sequence: Synthetic peptide
  Seed: FIRGTKVIPR
FWRGTKVIPK

SEQ ID NO: 27464 - protein, 10 aa, Artificial Sequence
  Description of Artificial Sequence: Synthetic peptide
  Seed: FIRGTKVIPR
FFRGTKVIPK

SEQ ID NO: 27465 - protein, 10 aa, Artificial Sequence
  Description of Artificial Sequence: Synthetic peptide
  Seed: FIRGTKVIPR
FPRGTKVIPR

SEQ ID NO: 27466 - protein, 10 aa, Artificial Sequence
  Description of Artificial Sequence: Synthetic peptide
  Seed: FIRGTKVIPR
FSRGTKVIPR

SEQ ID NO: 27467 - protein, 10 aa, Artificial Sequence
  Description of Artificial Sequence: Synthetic peptide
  Seed: FIRGTKVIPR
FSRGTKVIPK

SEQ ID NO: 27468 - protein, 10 aa, Artificial Sequence
  Description of Artificial Sequence: Synthetic peptide
  Seed: FIRGTKVIPR
FTRGTKVIPR

SEQ ID NO: 27469 - protein, 10 aa, Artificial Sequence
  Description of Artificial Sequence: Synthetic peptide
  Seed: FIRGTKVIPR
FTRGTKVIPK

SEQ ID NO: 27470 - protein, 10 aa, Artificial Sequence
  Description of Artificial Sequence: Synthetic peptide
  Seed: FIRGTKVIPR
FTRGTKVIPM

SEQ ID NO: 27471 - protein, 10 aa, Artificial Sequence
  Description of Artificial Sequence: Synthetic peptide
  Seed: FIRGTKVIPR
FTRGTKVIPY

SEQ ID NO: 27472 - protein, 10 aa, Artificial Sequence
  Description of Artificial Sequence: Synthetic peptide
  Seed: FIRGTKVIPR
FWRGTKVIPR

SEQ ID NO: 27473 - protein, 10 aa, Artificial Sequence
  Description of Artificial Sequence: Synthetic peptide
  Seed: FIRGTKVIPR
FYRGTKVIPR

SEQ ID NO: 27474 - protein, 9 aa, Artificial Sequence
  Description of Artificial Sequence: Synthetic peptide
  Seed: FFGDNAEEY
FWGDNAEEF

SEQ ID NO: 27475 - protein, 10 aa, Artificial Sequence
  Description of Artificial Sequence: Synthetic peptide
  Seed: FIRGTKVIPR
FYRGTKVIPK

SEQ ID NO: 27476 - protein, 10 aa, Artificial Sequence
  Description of Artificial Sequence: Synthetic peptide
  Seed: FIRGTKVIPR
FVRGTKVIPR

SEQ ID NO: 27477 - protein, 10 aa, Artificial Sequence
  Description of Artificial Sequence: Synthetic peptide
  Seed: FIRGTKVIPR
FVRGTKVIPK

SEQ ID NO: 27478 - protein, 10 aa, Artificial Sequence
  Description of Artificial Sequence: Synthetic peptide
  Seed: FIRGTKVIPR
FVRGTKVIPM

SEQ ID NO: 27479 - protein, 10 aa, Artificial Sequence
  Description of Artificial Sequence: Synthetic peptide
  Seed: FIRGTKVIPR
FVRGTKVIPY

SEQ ID NO: 27480 - protein, 10 aa, Artificial Sequence
  Description of Artificial Sequence: Synthetic peptide
  Seed: FIRGTKVSPR
FARGTKVSPR

SEQ ID NO: 27481 - protein, 10 aa, Artificial Sequence
  Description of Artificial Sequence: Synthetic peptide
  Seed: FIRGTKVSPR
FARGTKVSPK

SEQ ID NO: 27482 - protein, 10 aa, Artificial Sequence
  Description of Artificial Sequence: Synthetic peptide
  Seed: FIRGTKVSPR
FARGTKVSPY

SEQ ID NO: 27483 - protein, 10 aa, Artificial Sequence
  Description of Artificial Sequence: Synthetic peptide
  Seed: FIRGTKVSPR
FNRGTKVSPR

SEQ ID NO: 27484 - protein, 10 aa, Artificial Sequence
  Description of Artificial Sequence: Synthetic peptide
  Seed: FIRGTKVIPR
FFRGTKVIPR

SEQ ID NO: 27485 - protein, 10 aa, Artificial Sequence
  Description of Artificial Sequence: Synthetic peptide
  Seed: FIRGTKVIPR
FMRGTKVIPK

SEQ ID NO: 27486 - protein, 10 aa, Artificial Sequence
  Description of Artificial Sequence: Synthetic peptide
  Seed: FIRGTKVIPR
FMRGTKVIPR

SEQ ID NO: 27487 - protein, 10 aa, Artificial Sequence
  Description of Artificial Sequence: Synthetic peptide
  Seed: FIRGTKVIPR
FLRGTKVIPK

SEQ ID NO: 27488 - protein, 9 aa, Artificial Sequence
  Description of Artificial Sequence: Synthetic peptide
  Seed: FFGDNAEEY
FWGDNAEEW

SEQ ID NO: 27489 - protein, 9 aa, Artificial Sequence
  Description of Artificial Sequence: Synthetic peptide
  Seed: FFGDNAEEY
FWGDNAEEY

SEQ ID NO: 27490 - protein, 9 aa, Artificial Sequence
  Description of Artificial Sequence: Synthetic peptide
  Seed: FFGDNAEEY
FYGDNAEEI

SEQ ID NO: 27491 - protein, 9 aa, Artificial Sequence
  Description of Artificial Sequence: Synthetic peptide
  Seed: FFGDNAEEY
FYGDNAEEL

SEQ ID NO: 27492 - protein, 9 aa, Artificial Sequence
  Description of Artificial Sequence: Synthetic peptide
  Seed: FFGDNAEEY
FYGDNAEEM

SEQ ID NO: 27493 - protein, 9 aa, Artificial Sequence
  Description of Artificial Sequence: Synthetic peptide
  Seed: FFGDNAEEY
FYGDNAEEF

SEQ ID NO: 27494 - protein, 9 aa, Artificial Sequence
  Description of Artificial Sequence: Synthetic peptide
  Seed: FFGDNAEEY
FYGDNAEEW

SEQ ID NO: 27495 - protein, 9 aa, Artificial Sequence
  Description of Artificial Sequence: Synthetic peptide
  Seed: FFGDNAEEY
FYGDNAEEY

SEQ ID NO: 27496 - protein, 9 aa, Artificial Sequence
  Description of Artificial Sequence: Synthetic peptide
  Seed: FFGDNAEEY
FYGDNAEEV

SEQ ID NO: 27497 - protein, 9 aa, Artificial Sequence
  Description of Artificial Sequence: Synthetic peptide
  Seed: FFGDNAEEY
FVGDNAEEM

SEQ ID NO: 27498 - protein, 9 aa, Artificial Sequence
  Description of Artificial Sequence: Synthetic peptide
  Seed: FFGDNAEEY
FVGDNAEEF

SEQ ID NO: 27499 - protein, 9 aa, Artificial Sequence
  Description of Artificial Sequence: Synthetic peptide
  Seed: FFGDNAEEY
FVGDNAEEY

SEQ ID NO: 27500 - protein, 10 aa, Artificial Sequence
  Description of Artificial Sequence: Synthetic peptide
  Seed: FIRGTKVIPR
FARGTKVIPR

SEQ ID NO: 27501 - protein, 10 aa, Artificial Sequence
  Description of Artificial Sequence: Synthetic peptide
  Seed: FIRGTKVIPR
FARGTKVIPK

SEQ ID NO: 27502 - protein, 10 aa, Artificial Sequence
  Description of Artificial Sequence: Synthetic peptide
  Seed: FIRGTKVIPR
FNRGTKVIPR

SEQ ID NO: 27503 - protein, 10 aa, Artificial Sequence
  Description of Artificial Sequence: Synthetic peptide
  Seed: FIRGTKVIPR
FQRGTKVIPR

SEQ ID NO: 27504 - protein, 10 aa, Artificial Sequence
  Description of Artificial Sequence: Synthetic peptide
  Seed: FIRGTKVIPR
FGRGTKVIPR

SEQ ID NO: 27505 - protein, 10 aa, Artificial Sequence
  Description of Artificial Sequence: Synthetic peptide
  Seed: FIRGTKVIPR
FIRGTKVIPK

SEQ ID NO: 27506 - protein, 10 aa, Artificial Sequence
  Description of Artificial Sequence: Synthetic peptide
  Seed: FIRGTKVIPR
FLRGTKVIPR

SEQ ID NO: 27507 - protein, 9 aa, Artificial Sequence
  Description of Artificial Sequence: Synthetic peptide
  Seed: FEREGYSLV
FEREGYSLW

SEQ ID NO: 27508 - protein, 9 aa, Artificial Sequence
  Description of Artificial Sequence: Synthetic peptide
  Seed: FEREGYSLV
FEREGYSLT

SEQ ID NO: 27509 - protein, 9 aa, Artificial Sequence
  Description of Artificial Sequence: Synthetic peptide
  Seed: FEREGYSLV
FEREGYSLS

SEQ ID NO: 27510 - protein, 10 aa, Artificial Sequence
  Description of Artificial Sequence: Synthetic peptide
  Seed: FERATVMAAF
FSRATVMAAR

SEQ ID NO: 27511 - protein, 10 aa, Artificial Sequence
  Description of Artificial Sequence: Synthetic peptide
  Seed: FERATVMAAF
FFRATVMAAV

SEQ ID NO: 27512 - protein, 10 aa, Artificial Sequence
  Description of Artificial Sequence: Synthetic peptide
  Seed: FERATVMAAF
FPRATVMAAR

SEQ ID NO: 27513 - protein, 10 aa, Artificial Sequence
  Description of Artificial Sequence: Synthetic peptide
  Seed: FERATVMAAF
FPRATVMAAI

SEQ ID NO: 27514 - protein, 10 aa, Artificial Sequence
  Description of Artificial Sequence: Synthetic peptide
  Seed: FERATVMAAF
FPRATVMAAL

SEQ ID NO: 27515 - protein, 10 aa, Artificial Sequence
  Description of Artificial Sequence: Synthetic peptide
  Seed: FERATVMAAF
FPRATVMAAK

SEQ ID NO: 27516 - protein, 10 aa, Artificial Sequence
  Description of Artificial Sequence: Synthetic peptide
  Seed: FERATVMAAF
FPRATVMAAM

SEQ ID NO: 27517 - protein, 10 aa, Artificial Sequence
  Description of Artificial Sequence: Synthetic peptide
  Seed: FERATVMAAF
FPRATVMAAF

SEQ ID NO: 27518 - protein, 10 aa, Artificial Sequence
  Description of Artificial Sequence: Synthetic peptide
  Seed: FERATVMAAF
FPRATVMAAY

SEQ ID NO: 27519 - protein, 10 aa, Artificial Sequence
  Description of Artificial Sequence: Synthetic peptide
  Seed: FERATVMAAF
FPRATVMAAV

SEQ ID NO: 27520 - protein, 10 aa, Artificial Sequence
  Description of Artificial Sequence: Synthetic peptide
  Seed: FERATVMAAF
FSRATVMAAI

SEQ ID NO: 27521 - protein, 9 aa, Artificial Sequence
  Description of Artificial Sequence: Synthetic peptide
  Seed: FEREGYSLV
FEREGYSLP

SEQ ID NO: 27522 - protein, 10 aa, Artificial Sequence
  Description of Artificial Sequence: Synthetic peptide
  Seed: FERATVMAAF
FSRATVMAAL

SEQ ID NO: 27523 - protein, 10 aa, Artificial Sequence
  Description of Artificial Sequence: Synthetic peptide
  Seed: FERATVMAAF
FSRATVMAAK

SEQ ID NO: 27524 - protein, 10 aa, Artificial Sequence
  Description of Artificial Sequence: Synthetic peptide
  Seed: FERATVMAAF
FSRATVMAAM

SEQ ID NO: 27525 - protein, 10 aa, Artificial Sequence
  Description of Artificial Sequence: Synthetic peptide
  Seed: FERATVMAAF
FSRATVMAAF

SEQ ID NO: 27526 - protein, 10 aa, Artificial Sequence
  Description of Artificial Sequence: Synthetic peptide
  Seed: FERATVMAAF
FSRATVMAAY

SEQ ID NO: 27527 - protein, 10 aa, Artificial Sequence
  Description of Artificial Sequence: Synthetic peptide
  Seed: FERATVMAAF
FSRATVMAAV

SEQ ID NO: 27528 - protein, 10 aa, Artificial Sequence
  Description of Artificial Sequence: Synthetic peptide
  Seed: FERATVMAAF
FTRATVMAAR

SEQ ID NO: 27529 - protein, 10 aa, Artificial Sequence
  Description of Artificial Sequence: Synthetic peptide
  Seed: FERATVMAAF
FTRATVMAAI

SEQ ID NO: 27530 - protein, 10 aa, Artificial Sequence
  Description of Artificial Sequence: Synthetic peptide
  Seed: FERATVMAAF
FTRATVMAAL

SEQ ID NO: 27531 - protein, 10 aa, Artificial Sequence
  Description of Artificial Sequence: Synthetic peptide
  Seed: FERATVMAAF
FFRATVMAAY

SEQ ID NO: 27532 - protein, 10 aa, Artificial Sequence
  Description of Artificial Sequence: Synthetic peptide
  Seed: FERATVMAAF
FFRATVMAAF

SEQ ID NO: 27533 - protein, 10 aa, Artificial Sequence
  Description of Artificial Sequence: Synthetic peptide
  Seed: FERATVMAAF
FFRATVMAAM

SEQ ID NO: 27534 - protein, 10 aa, Artificial Sequence
  Description of Artificial Sequence: Synthetic peptide
  Seed: FERATVMAAF
FFRATVMAAK

SEQ ID NO: 27535 - protein, 10 aa, Artificial Sequence
  Description of Artificial Sequence: Synthetic peptide
  Seed: FERATVMAAF
FKRATVMAAM

SEQ ID NO: 27536 - protein, 10 aa, Artificial Sequence
  Description of Artificial Sequence: Synthetic peptide
  Seed: FERATVMAAF
FKRATVMAAF

SEQ ID NO: 27537 - protein, 10 aa, Artificial Sequence
  Description of Artificial Sequence: Synthetic peptide
  Seed: FERATVMAAF
FKRATVMAAW

SEQ ID NO: 27538 - protein, 10 aa, Artificial Sequence
  Description of Artificial Sequence: Synthetic peptide
  Seed: FERATVMAAF
FKRATVMAAY

SEQ ID NO: 27539 - protein, 10 aa, Artificial Sequence
  Description of Artificial Sequence: Synthetic peptide
  Seed: FERATVMAAF
FKRATVMAAV

SEQ ID NO: 27540 - protein, 10 aa, Artificial Sequence
  Description of Artificial Sequence: Synthetic peptide
  Seed: FERATVMAAF
FMRATVMAAA

SEQ ID NO: 27541 - protein, 10 aa, Artificial Sequence
  Description of Artificial Sequence: Synthetic peptide
  Seed: FERATVMAAF
FMRATVMAAR

SEQ ID NO: 27542 - protein, 10 aa, Artificial Sequence
  Description of Artificial Sequence: Synthetic peptide
  Seed: FERATVMAAF
FMRATVMAAH

SEQ ID NO: 27543 - protein, 10 aa, Artificial Sequence
  Description of Artificial Sequence: Synthetic peptide
  Seed: FERATVMAAF
FMRATVMAAI

SEQ ID NO: 27544 - protein, 10 aa, Artificial Sequence
  Description of Artificial Sequence: Synthetic peptide
  Seed: FERATVMAAF
FMRATVMAAL

SEQ ID NO: 27545 - protein, 10 aa, Artificial Sequence
  Description of Artificial Sequence: Synthetic peptide
  Seed: FERATVMAAF
FMRATVMAAK

SEQ ID NO: 27546 - protein, 10 aa, Artificial Sequence
  Description of Artificial Sequence: Synthetic peptide
  Seed: FERATVMAAF
FMRATVMAAM

SEQ ID NO: 27547 - protein, 10 aa, Artificial Sequence
  Description of Artificial Sequence: Synthetic peptide
  Seed: FERATVMAAF
FMRATVMAAF

SEQ ID NO: 27548 - protein, 10 aa, Artificial Sequence
  Description of Artificial Sequence: Synthetic peptide
  Seed: FERATVMAAF
FMRATVMAAW

SEQ ID NO: 27549 - protein, 10 aa, Artificial Sequence
  Description of Artificial Sequence: Synthetic peptide
  Seed: FERATVMAAF
FMRATVMAAY

SEQ ID NO: 27550 - protein, 10 aa, Artificial Sequence
  Description of Artificial Sequence: Synthetic peptide
  Seed: FERATVMAAF
FMRATVMAAV

SEQ ID NO: 27551 - protein, 10 aa, Artificial Sequence
  Description of Artificial Sequence: Synthetic peptide
  Seed: FERATVMAAF
FFRATVMAAR

SEQ ID NO: 27552 - protein, 10 aa, Artificial Sequence
  Description of Artificial Sequence: Synthetic peptide
  Seed: FERATVMAAF
FFRATVMAAI

SEQ ID NO: 27553 - protein, 10 aa, Artificial Sequence
  Description of Artificial Sequence: Synthetic peptide
  Seed: FERATVMAAF
FFRATVMAAL

SEQ ID NO: 27554 - protein, 10 aa, Artificial Sequence
  Description of Artificial Sequence: Synthetic peptide
  Seed: FERATVMAAF
FTRATVMAAK

SEQ ID NO: 27555 - protein, 10 aa, Artificial Sequence
  Description of Artificial Sequence: Synthetic peptide
  Seed: FERATVMAAF
FTRATVMAAM

SEQ ID NO: 27556 - protein, 10 aa, Artificial Sequence
  Description of Artificial Sequence: Synthetic peptide
  Seed: FERATVMAAF
FTRATVMAAF

SEQ ID NO: 27557 - protein, 10 aa, Artificial Sequence
  Description of Artificial Sequence: Synthetic peptide
  Seed: FERATVMAAF
FVRATVMAAM

SEQ ID NO: 27558 - protein, 10 aa, Artificial Sequence
  Description of Artificial Sequence: Synthetic peptide
  Seed: FERATVMAAF
FVRATVMAAY

SEQ ID NO: 27559 - protein, 10 aa, Artificial Sequence
  Description of Artificial Sequence: Synthetic peptide
  Seed: FERATVMAAF
FVRATVMAAV

SEQ ID NO: 27560 - protein, 8 aa, Artificial Sequence
  Description of Artificial Sequence: Synthetic peptide
  Seed: FEREGYSL
FEREGYSI

SEQ ID NO: 27561 - protein, 8 aa, Artificial Sequence
  Description of Artificial Sequence: Synthetic peptide
  Seed: FEREGYSL
FEREGYSM

SEQ ID NO: 27562 - protein, 8 aa, Artificial Sequence
  Description of Artificial Sequence: Synthetic peptide
  Seed: FEREGYSL
FEREGYSF

SEQ ID NO: 27563 - protein, 8 aa, Artificial Sequence
  Description of Artificial Sequence: Synthetic peptide
  Seed: FEREGYSL
FEREGYSW

SEQ ID NO: 27564 - protein, 8 aa, Artificial Sequence
  Description of Artificial Sequence: Synthetic peptide
  Seed: FEREGYSL
FEREGYSY

SEQ ID NO: 27565 - protein, 8 aa, Artificial Sequence
  Description of Artificial Sequence: Synthetic peptide
  Seed: FEREGYSL
FEREGYSV

SEQ ID NO: 27566 - protein, 9 aa, Artificial Sequence
  Description of Artificial Sequence: Synthetic peptide
  Seed: FEREGYSLV
FDREGYSLL

SEQ ID NO: 27567 - protein, 9 aa, Artificial Sequence
  Description of Artificial Sequence: Synthetic peptide
  Seed: FEREGYSLV
FDREGYSLM

SEQ ID NO: 27568 - protein, 9 aa, Artificial Sequence
  Description of Artificial Sequence: Synthetic peptide
  Seed: FEREGYSLV
FDREGYSLF

SEQ ID NO: 27569 - protein, 9 aa, Artificial Sequence
  Description of Artificial Sequence: Synthetic peptide
  Seed: FEREGYSLV
FQREGYSLL

SEQ ID NO: 27570 - protein, 9 aa, Artificial Sequence
  Description of Artificial Sequence: Synthetic peptide
  Seed: FEREGYSLV
FEREGYSLA

SEQ ID NO: 27571 - protein, 9 aa, Artificial Sequence
  Description of Artificial Sequence: Synthetic peptide
  Seed: FEREGYSLV
FEREGYSLC

SEQ ID NO: 27572 - protein, 9 aa, Artificial Sequence
  Description of Artificial Sequence: Synthetic peptide
  Seed: FEREGYSLV
FEREGYSLH

SEQ ID NO: 27573 - protein, 9 aa, Artificial Sequence
  Description of Artificial Sequence: Synthetic peptide
  Seed: FEREGYSLV
FEREGYSLL

SEQ ID NO: 27574 - protein, 9 aa, Artificial Sequence
  Description of Artificial Sequence: Synthetic peptide
  Seed: FEREGYSLV
FEREGYSLM

SEQ ID NO: 27575 - protein, 9 aa, Artificial Sequence
  Description of Artificial Sequence: Synthetic peptide
  Seed: FEREGYSLV
FEREGYSLF

SEQ ID NO: 27576 - protein, 10 aa, Artificial Sequence
  Description of Artificial Sequence: Synthetic peptide
  Seed: FERATVMAAF
FVRATVMAAF

SEQ ID NO: 27577 - protein, 10 aa, Artificial Sequence
  Description of Artificial Sequence: Synthetic peptide
  Seed: FERATVMAAF
FVRATVMAAK

SEQ ID NO: 27578 - protein, 10 aa, Artificial Sequence
  Description of Artificial Sequence: Synthetic peptide
  Seed: FERATVMAAF
FTRATVMAAY

SEQ ID NO: 27579 - protein, 10 aa, Artificial Sequence
  Description of Artificial Sequence: Synthetic peptide
  Seed: FERATVMAAF
FVRATVMAAL

SEQ ID NO: 27580 - protein, 10 aa, Artificial Sequence
  Description of Artificial Sequence: Synthetic peptide
  Seed: FERATVMAAF
FTRATVMAAV

SEQ ID NO: 27581 - protein, 10 aa, Artificial Sequence
  Description of Artificial Sequence: Synthetic peptide
  Seed: FERATVMAAF
FWRATVMAAR

SEQ ID NO: 27582 - protein, 10 aa, Artificial Sequence
  Description of Artificial Sequence: Synthetic peptide
  Seed: FERATVMAAF
FWRATVMAAI

SEQ ID NO: 27583 - protein, 10 aa, Artificial Sequence
  Description of Artificial Sequence: Synthetic peptide
  Seed: FERATVMAAF
FWRATVMAAL

SEQ ID NO: 27584 - protein, 10 aa, Artificial Sequence
  Description of Artificial Sequence: Synthetic peptide
  Seed: FERATVMAAF
FWRATVMAAK

SEQ ID NO: 27585 - protein, 10 aa, Artificial Sequence
  Description of Artificial Sequence: Synthetic peptide
  Seed: FERATVMAAF
FWRATVMAAM

SEQ ID NO: 27586 - protein, 10 aa, Artificial Sequence
  Description of Artificial Sequence: Synthetic peptide
  Seed: FERATVMAAF
FWRATVMAAF

SEQ ID NO: 27587 - protein, 10 aa, Artificial Sequence
  Description of Artificial Sequence: Synthetic peptide
  Seed: FERATVMAAF
FWRATVMAAY

SEQ ID NO: 27588 - protein, 10 aa, Artificial Sequence
  Description of Artificial Sequence: Synthetic peptide
  Seed: FERATVMAAF
FWRATVMAAV

SEQ ID NO: 27589 - protein, 10 aa, Artificial Sequence
  Description of Artificial Sequence: Synthetic peptide
  Seed: FERATVMAAF
FYRATVMAAR

SEQ ID NO: 27590 - protein, 10 aa, Artificial Sequence
  Description of Artificial Sequence: Synthetic peptide
  Seed: FERATVMAAF
FYRATVMAAI

SEQ ID NO: 27591 - protein, 10 aa, Artificial Sequence
  Description of Artificial Sequence: Synthetic peptide
  Seed: FERATVMAAF
FYRATVMAAL

SEQ ID NO: 27592 - protein, 10 aa, Artificial Sequence
  Description of Artificial Sequence: Synthetic peptide
  Seed: FERATVMAAF
FYRATVMAAK

SEQ ID NO: 27593 - protein, 10 aa, Artificial Sequence
  Description of Artificial Sequence: Synthetic peptide
  Seed: FERATVMAAF
FYRATVMAAM

SEQ ID NO: 27594 - protein, 10 aa, Artificial Sequence
  Description of Artificial Sequence: Synthetic peptide
  Seed: FERATVMAAF
FYRATVMAAF

SEQ ID NO: 27595 - protein, 10 aa, Artificial Sequence
  Description of Artificial Sequence: Synthetic peptide
  Seed: FERATVMAAF
FYRATVMAAY

SEQ ID NO: 27596 - protein, 10 aa, Artificial Sequence
  Description of Artificial Sequence: Synthetic peptide
  Seed: FERATVMAAF
FYRATVMAAV

SEQ ID NO: 27597 - protein, 10 aa, Artificial Sequence
  Description of Artificial Sequence: Synthetic peptide
  Seed: FERATVMAAF
FVRATVMAAR

SEQ ID NO: 27598 - protein, 10 aa, Artificial Sequence
  Description of Artificial Sequence: Synthetic peptide
  Seed: FERATVMAAF
FVRATVMAAI

SEQ ID NO: 27599 - protein, 9 aa, Artificial Sequence
  Description of Artificial Sequence: Synthetic peptide
  Seed: FERATVMAA
FIRATVMAH

SEQ ID NO: 27600 - protein, 9 aa, Artificial Sequence
  Description of Artificial Sequence: Synthetic peptide
  Seed: FERATVMAA
FHRATVMAV

SEQ ID NO: 27601 - protein, 9 aa, Artificial Sequence
  Description of Artificial Sequence: Synthetic peptide
  Seed: FERATVMAA
FHRATVMAY

SEQ ID NO: 27602 - protein, 10 aa, Artificial Sequence
  Description of Artificial Sequence: Synthetic peptide
  Seed: FERATIMAAF
FRRATIMAAF

SEQ ID NO: 27603 - protein, 10 aa, Artificial Sequence
  Description of Artificial Sequence: Synthetic peptide
  Seed: FERATIMAAF
FARATIMAAM

SEQ ID NO: 27604 - protein, 10 aa, Artificial Sequence
  Description of Artificial Sequence: Synthetic peptide
  Seed: FERATIMAAF
FARATIMAAF

SEQ ID NO: 27605 - protein, 10 aa, Artificial Sequence
  Description of Artificial Sequence: Synthetic peptide
  Seed: FERATIMAAF
FARATIMAAY

SEQ ID NO: 27606 - protein, 10 aa, Artificial Sequence
  Description of Artificial Sequence: Synthetic peptide
  Seed: FERATIMAAF
FARATIMAAV

SEQ ID NO: 27607 - protein, 10 aa, Artificial Sequence
  Description of Artificial Sequence: Synthetic peptide
  Seed: FERATIMAAF
FRRATIMAAR

SEQ ID NO: 27608 - protein, 10 aa, Artificial Sequence
  Description of Artificial Sequence: Synthetic peptide
  Seed: FERATIMAAF
FRRATIMAAI

SEQ ID NO: 27609 - protein, 10 aa, Artificial Sequence
  Description of Artificial Sequence: Synthetic peptide
  Seed: FERATIMAAF
FRRATIMAAL

SEQ ID NO: 27610 - protein, 10 aa, Artificial Sequence
  Description of Artificial Sequence: Synthetic peptide
  Seed: FERATIMAAF
FRRATIMAAK

SEQ ID NO: 27611 - protein, 10 aa, Artificial Sequence
  Description of Artificial Sequence: Synthetic peptide
  Seed: FERATIMAAF
FRRATIMAAM

SEQ ID NO: 27612 - protein, 10 aa, Artificial Sequence
  Description of Artificial Sequence: Synthetic peptide
  Seed: FERATIMAAF
FRRATIMAAW

SEQ ID NO: 27613 - protein, 10 aa, Artificial Sequence
  Description of Artificial Sequence: Synthetic peptide
  Seed: FERATIMAAF
FDRATIMAAR

SEQ ID NO: 27614 - protein, 10 aa, Artificial Sequence
  Description of Artificial Sequence: Synthetic peptide
  Seed: FERATIMAAF
FRRATIMAAY

SEQ ID NO: 27615 - protein, 10 aa, Artificial Sequence
  Description of Artificial Sequence: Synthetic peptide
  Seed: FERATIMAAF
FRRATIMAAV

SEQ ID NO: 27616 - protein, 10 aa, Artificial Sequence
  Description of Artificial Sequence: Synthetic peptide
  Seed: FERATIMAAF
FNRATIMAAR

SEQ ID NO: 27617 - protein, 10 aa, Artificial Sequence
  Description of Artificial Sequence: Synthetic peptide
  Seed: FERATIMAAF
FNRATIMAAI

SEQ ID NO: 27618 - protein, 10 aa, Artificial Sequence
  Description of Artificial Sequence: Synthetic peptide
  Seed: FERATIMAAF
FNRATIMAAL

SEQ ID NO: 27619 - protein, 10 aa, Artificial Sequence
  Description of Artificial Sequence: Synthetic peptide
  Seed: FERATIMAAF
FNRATIMAAK

SEQ ID NO: 27620 - protein, 10 aa, Artificial Sequence
  Description of Artificial Sequence: Synthetic peptide
  Seed: FERATIMAAF
FNRATIMAAM

SEQ ID NO: 27621 - protein, 10 aa, Artificial Sequence
  Description of Artificial Sequence: Synthetic peptide
  Seed: FERATIMAAF
FNRATIMAAF

SEQ ID NO: 27622 - protein, 10 aa, Artificial Sequence
  Description of Artificial Sequence: Synthetic peptide
  Seed: FERATIMAAF
FNRATIMAAY

SEQ ID NO: 27623 - protein, 10 aa, Artificial Sequence
  Description of Artificial Sequence: Synthetic peptide
  Seed: FERATIMAAF
FARATIMAAK

SEQ ID NO: 27624 - protein, 10 aa, Artificial Sequence
  Description of Artificial Sequence: Synthetic peptide
  Seed: FERATIMAAF
FARATIMAAL

SEQ ID NO: 27625 - protein, 10 aa, Artificial Sequence
  Description of Artificial Sequence: Synthetic peptide
  Seed: FERATIMAAF
FARATIMAAI

SEQ ID NO: 27626 - protein, 10 aa, Artificial Sequence
  Description of Artificial Sequence: Synthetic peptide
  Seed: FERATIMAAF
FARATIMAAR

SEQ ID NO: 27627 - protein, 9 aa, Artificial Sequence
  Description of Artificial Sequence: Synthetic peptide
  Seed: FERATIMAA
FTRATIMAL

SEQ ID NO: 27628 - protein, 9 aa, Artificial Sequence
  Description of Artificial Sequence: Synthetic peptide
  Seed: FERATIMAA
FTRATIMAM

SEQ ID NO: 27629 - protein, 9 aa, Artificial Sequence
  Description of Artificial Sequence: Synthetic peptide
  Seed: FERATIMAA
FTRATIMAF

SEQ ID NO: 27630 - protein, 9 aa, Artificial Sequence
  Description of Artificial Sequence: Synthetic peptide
  Seed: FERATIMAA
FTRATIMAW

SEQ ID NO: 27631 - protein, 9 aa, Artificial Sequence
  Description of Artificial Sequence: Synthetic peptide
  Seed: FERATIMAA
FTRATIMAY

SEQ ID NO: 27632 - protein, 9 aa, Artificial Sequence
  Description of Artificial Sequence: Synthetic peptide
  Seed: FERATIMAA
FWRATIMAM

SEQ ID NO: 27633 - protein, 9 aa, Artificial Sequence
  Description of Artificial Sequence: Synthetic peptide
  Seed: FERATIMAA
FWRATIMAF

SEQ ID NO: 27634 - protein, 9 aa, Artificial Sequence
  Description of Artificial Sequence: Synthetic peptide
  Seed: FERATIMAA
FWRATIMAY

SEQ ID NO: 27635 - protein, 9 aa, Artificial Sequence
  Description of Artificial Sequence: Synthetic peptide
  Seed: FERATIMAA
FYRATIMAL

SEQ ID NO: 27636 - protein, 9 aa, Artificial Sequence
  Description of Artificial Sequence: Synthetic peptide
  Seed: FERATIMAA
FYRATIMAM

SEQ ID NO: 27637 - protein, 9 aa, Artificial Sequence
  Description of Artificial Sequence: Synthetic peptide
  Seed: FERATIMAA
FYRATIMAF

SEQ ID NO: 27638 - protein, 9 aa, Artificial Sequence
  Description of Artificial Sequence: Synthetic peptide
  Seed: FERATIMAA
FYRATIMAY

SEQ ID NO: 27639 - protein, 9 aa, Artificial Sequence
  Description of Artificial Sequence: Synthetic peptide
  Seed: FERATIMAA
FVRATIMAH

SEQ ID NO: 27640 - protein, 9 aa, Artificial Sequence
  Description of Artificial Sequence: Synthetic peptide
  Seed: FERATIMAA
FVRATIMAI

SEQ ID NO: 27641 - protein, 9 aa, Artificial Sequence
  Description of Artificial Sequence: Synthetic peptide
  Seed: FERATIMAA
FVRATIMAL

SEQ ID NO: 27642 - protein, 9 aa, Artificial Sequence
  Description of Artificial Sequence: Synthetic peptide
  Seed: FERATIMAA
FVRATIMAM

SEQ ID NO: 27643 - protein, 9 aa, Artificial Sequence
  Description of Artificial Sequence: Synthetic peptide
  Seed: FERATIMAA
FVRATIMAF

SEQ ID NO: 27644 - protein, 9 aa, Artificial Sequence
  Description of Artificial Sequence: Synthetic peptide
  Seed: FERATIMAA
FVRATIMAW

SEQ ID NO: 27645 - protein, 9 aa, Artificial Sequence
  Description of Artificial Sequence: Synthetic peptide
  Seed: FERATIMAA
FVRATIMAY

SEQ ID NO: 27646 - protein, 10 aa, Artificial Sequence
  Description of Artificial Sequence: Synthetic peptide
  Seed: FERATIMAAF
FNRATIMAAV

SEQ ID NO: 27647 - protein, 10 aa, Artificial Sequence
  Description of Artificial Sequence: Synthetic peptide
  Seed: FERATIMAAF
FDRATIMAAI

SEQ ID NO: 27648 - protein, 10 aa, Artificial Sequence
  Description of Artificial Sequence: Synthetic peptide
  Seed: FERATIMAAF
FGRATIMAAR

SEQ ID NO: 27649 - protein, 10 aa, Artificial Sequence
  Description of Artificial Sequence: Synthetic peptide
  Seed: FERATIMAAF
FERATIMAAG

SEQ ID NO: 27650 - protein, 10 aa, Artificial Sequence
  Description of Artificial Sequence: Synthetic peptide
  Seed: FERATIMAAF
FQRATIMAAY

SEQ ID NO: 27651 - protein, 10 aa, Artificial Sequence
  Description of Artificial Sequence: Synthetic peptide
  Seed: FERATIMAAF
FQRATIMAAV

SEQ ID NO: 27652 - protein, 10 aa, Artificial Sequence
  Description of Artificial Sequence: Synthetic peptide
  Seed: FERATIMAAF
FERATIMAAA

SEQ ID NO: 27653 - protein, 10 aa, Artificial Sequence
  Description of Artificial Sequence: Synthetic peptide
  Seed: FERATIMAAF
FERATIMAAR

SEQ ID NO: 27654 - protein, 10 aa, Artificial Sequence
  Description of Artificial Sequence: Synthetic peptide
  Seed: FERATIMAAF
FERATIMAAN

SEQ ID NO: 27655 - protein, 10 aa, Artificial Sequence
  Description of Artificial Sequence: Synthetic peptide
  Seed: FERATIMAAF
FERATIMAAD

SEQ ID NO: 27656 - protein, 10 aa, Artificial Sequence
  Description of Artificial Sequence: Synthetic peptide
  Seed: FERATIMAAF
FERATIMAAC

SEQ ID NO: 27657 - protein, 10 aa, Artificial Sequence
  Description of Artificial Sequence: Synthetic peptide
  Seed: FERATIMAAF
FERATIMAAQ

SEQ ID NO: 27658 - protein, 10 aa, Artificial Sequence
  Description of Artificial Sequence: Synthetic peptide
  Seed: FERATIMAAF
FERATIMAAE

SEQ ID NO: 27659 - protein, 10 aa, Artificial Sequence
  Description of Artificial Sequence: Synthetic peptide
  Seed: FERATIMAAF
FERATIMAAH

SEQ ID NO: 27660 - protein, 10 aa, Artificial Sequence
  Description of Artificial Sequence: Synthetic peptide
  Seed: FERATIMAAF
FDRATIMAAL

SEQ ID NO: 27661 - protein, 10 aa, Artificial Sequence
  Description of Artificial Sequence: Synthetic peptide
  Seed: FERATIMAAF
FERATIMAAI

SEQ ID NO: 27662 - protein, 10 aa, Artificial Sequence
  Description of Artificial Sequence: Synthetic peptide
  Seed: FERATIMAAF
FERATIMAAL

SEQ ID NO: 27663 - protein, 10 aa, Artificial Sequence
  Description of Artificial Sequence: Synthetic peptide
  Seed: FERATIMAAF
FERATIMAAK

SEQ ID NO: 27664 - protein, 10 aa, Artificial Sequence
  Description of Artificial Sequence: Synthetic peptide
  Seed: FERATIMAAF
FERATIMAAM

SEQ ID NO: 27665 - protein, 10 aa, Artificial Sequence
  Description of Artificial Sequence: Synthetic peptide
  Seed: FERATIMAAF
FERATIMAAP

SEQ ID NO: 27666 - protein, 10 aa, Artificial Sequence
  Description of Artificial Sequence: Synthetic peptide
  Seed: FERATIMAAF
FERATIMAAS

SEQ ID NO: 27667 - protein, 10 aa, Artificial Sequence
  Description of Artificial Sequence: Synthetic peptide
  Seed: FERATIMAAF
FERATIMAAT

SEQ ID NO: 27668 - protein, 10 aa, Artificial Sequence
  Description of Artificial Sequence: Synthetic peptide
  Seed: FERATIMAAF
FERATIMAAW

SEQ ID NO: 27669 - protein, 10 aa, Artificial Sequence
  Description of Artificial Sequence: Synthetic peptide
  Seed: FERATIMAAF
FERATIMAAY

SEQ ID NO: 27670 - protein, 10 aa, Artificial Sequence
  Description of Artificial Sequence: Synthetic peptide
  Seed: FERATIMAAF
FQRATIMAAW

SEQ ID NO: 27671 - protein, 10 aa, Artificial Sequence
  Description of Artificial Sequence: Synthetic peptide
  Seed: FERATIMAAF
FQRATIMAAF

SEQ ID NO: 27672 - protein, 10 aa, Artificial Sequence
  Description of Artificial Sequence: Synthetic peptide
  Seed: FERATIMAAF
FQRATIMAAM

SEQ ID NO: 27673 - protein, 10 aa, Artificial Sequence
  Description of Artificial Sequence: Synthetic peptide
  Seed: FERATIMAAF
FQRATIMAAK

SEQ ID NO: 27674 - protein, 10 aa, Artificial Sequence
  Description of Artificial Sequence: Synthetic peptide
  Seed: FERATIMAAF
FDRATIMAAK

SEQ ID NO: 27675 - protein, 10 aa, Artificial Sequence
  Description of Artificial Sequence: Synthetic peptide
  Seed: FERATIMAAF
FDRATIMAAM

SEQ ID NO: 27676 - protein, 10 aa, Artificial Sequence
  Description of Artificial Sequence: Synthetic peptide
  Seed: FERATIMAAF
FDRATIMAAF

SEQ ID NO: 27677 - protein, 10 aa, Artificial Sequence
  Description of Artificial Sequence: Synthetic peptide
  Seed: FERATIMAAF
FDRATIMAAY

SEQ ID NO: 27678 - protein, 10 aa, Artificial Sequence
  Description of Artificial Sequence: Synthetic peptide
  Seed: FERATIMAAF
FDRATIMAAV

SEQ ID NO: 27679 - protein, 10 aa, Artificial Sequence
  Description of Artificial Sequence: Synthetic peptide
  Seed: FERATIMAAF
FCRATIMAAR

SEQ ID NO: 27680 - protein, 10 aa, Artificial Sequence
  Description of Artificial Sequence: Synthetic peptide
  Seed: FERATIMAAF
FCRATIMAAI

SEQ ID NO: 27681 - protein, 10 aa, Artificial Sequence
  Description of Artificial Sequence: Synthetic peptide
  Seed: FERATIMAAF
FCRATIMAAL

SEQ ID NO: 27682 - protein, 10 aa, Artificial Sequence
  Description of Artificial Sequence: Synthetic peptide
  Seed: FERATIMAAF
FCRATIMAAK

SEQ ID NO: 27683 - protein, 10 aa, Artificial Sequence
  Description of Artificial Sequence: Synthetic peptide
  Seed: FERATIMAAF
FCRATIMAAM

SEQ ID NO: 27684 - protein, 10 aa, Artificial Sequence
  Description of Artificial Sequence: Synthetic peptide
  Seed: FERATIMAAF
FCRATIMAAF

SEQ ID NO: 27685 - protein, 10 aa, Artificial Sequence
  Description of Artificial Sequence: Synthetic peptide
  Seed: FERATIMAAF
FCRATIMAAY

SEQ ID NO: 27686 - protein, 10 aa, Artificial Sequence
  Description of Artificial Sequence: Synthetic peptide
  Seed: FERATIMAAF
FCRATIMAAV

SEQ ID NO: 27687 - protein, 10 aa, Artificial Sequence
  Description of Artificial Sequence: Synthetic peptide
  Seed: FERATIMAAF
FQRATIMAAA

SEQ ID NO: 27688 - protein, 10 aa, Artificial Sequence
  Description of Artificial Sequence: Synthetic peptide
  Seed: FERATIMAAF
FQRATIMAAR

SEQ ID NO: 27689 - protein, 10 aa, Artificial Sequence
  Description of Artificial Sequence: Synthetic peptide
  Seed: FERATIMAAF
FQRATIMAAG

SEQ ID NO: 27690 - protein, 10 aa, Artificial Sequence
  Description of Artificial Sequence: Synthetic peptide
  Seed: FERATIMAAF
FQRATIMAAH

SEQ ID NO: 27691 - protein, 10 aa, Artificial Sequence
  Description of Artificial Sequence: Synthetic peptide
  Seed: FERATIMAAF
FQRATIMAAI

SEQ ID NO: 27692 - protein, 10 aa, Artificial Sequence
  Description of Artificial Sequence: Synthetic peptide
  Seed: FERATIMAAF
FQRATIMAAL

SEQ ID NO: 27693 - protein, 9 aa, Artificial Sequence
  Description of Artificial Sequence: Synthetic peptide
  Seed: FERATIMAA
FTRATIMAI

SEQ ID NO: 27694 - protein, 9 aa, Artificial Sequence
  Description of Artificial Sequence: Synthetic peptide
  Seed: FERATIMAA
FTRATIMAH

SEQ ID NO: 27695 - protein, 9 aa, Artificial Sequence
  Description of Artificial Sequence: Synthetic peptide
  Seed: FERATIMAA
FSRATIMAV

SEQ ID NO: 27696 - protein, 9 aa, Artificial Sequence
  Description of Artificial Sequence: Synthetic peptide
  Seed: FERATIMAA
FHRATIMAL

SEQ ID NO: 27697 - protein, 9 aa, Artificial Sequence
  Description of Artificial Sequence: Synthetic peptide
  Seed: FERATIMAA
FERATIMAV

SEQ ID NO: 27698 - protein, 9 aa, Artificial Sequence
  Description of Artificial Sequence: Synthetic peptide
  Seed: FERATIMAA
FGRATIMAL

SEQ ID NO: 27699 - protein, 9 aa, Artificial Sequence
  Description of Artificial Sequence: Synthetic peptide
  Seed: FERATIMAA
FGRATIMAM

SEQ ID NO: 27700 - protein, 9 aa, Artificial Sequence
  Description of Artificial Sequence: Synthetic peptide
  Seed: FERATIMAA
FGRATIMAF

SEQ ID NO: 27701 - protein, 9 aa, Artificial Sequence
  Description of Artificial Sequence: Synthetic peptide
  Seed: FERATIMAA
FGRATIMAW

SEQ ID NO: 27702 - protein, 9 aa, Artificial Sequence
  Description of Artificial Sequence: Synthetic peptide
  Seed: FERATIMAA
FGRATIMAY

SEQ ID NO: 27703 - protein, 9 aa, Artificial Sequence
  Description of Artificial Sequence: Synthetic peptide
  Seed: FERATIMAA
FHRATIMAA

SEQ ID NO: 27704 - protein, 9 aa, Artificial Sequence
  Description of Artificial Sequence: Synthetic peptide
  Seed: FERATIMAA
FHRATIMAH

SEQ ID NO: 27705 - protein, 9 aa, Artificial Sequence
  Description of Artificial Sequence: Synthetic peptide
  Seed: FERATIMAA
FHRATIMAI

SEQ ID NO: 27706 - protein, 9 aa, Artificial Sequence
  Description of Artificial Sequence: Synthetic peptide
  Seed: FERATIMAA
FHRATIMAM

SEQ ID NO: 27707 - protein, 9 aa, Artificial Sequence
  Description of Artificial Sequence: Synthetic peptide
  Seed: FERATIMAA
FSRATIMAY

SEQ ID NO: 27708 - protein, 9 aa, Artificial Sequence
  Description of Artificial Sequence: Synthetic peptide
  Seed: FERATIMAA
FHRATIMAF

SEQ ID NO: 27709 - protein, 9 aa, Artificial Sequence
  Description of Artificial Sequence: Synthetic peptide
  Seed: FERATIMAA
FHRATIMAW

SEQ ID NO: 27710 - protein, 9 aa, Artificial Sequence
  Description of Artificial Sequence: Synthetic peptide
  Seed: FERATIMAA
FHRATIMAY

SEQ ID NO: 27711 - protein, 9 aa, Artificial Sequence
  Description of Artificial Sequence: Synthetic peptide
  Seed: FERATIMAA
FHRATIMAV

SEQ ID NO: 27712 - protein, 9 aa, Artificial Sequence
  Description of Artificial Sequence: Synthetic peptide
  Seed: FERATIMAA
FIRATIMAH

SEQ ID NO: 27713 - protein, 9 aa, Artificial Sequence
  Description of Artificial Sequence: Synthetic peptide
  Seed: FERATIMAA
FIRATIMAI

SEQ ID NO: 27714 - protein, 9 aa, Artificial Sequence
  Description of Artificial Sequence: Synthetic peptide
  Seed: FERATIMAA
FIRATIMAL

SEQ ID NO: 27715 - protein, 9 aa, Artificial Sequence
  Description of Artificial Sequence: Synthetic peptide
  Seed: FERATIMAA
FIRATIMAM

SEQ ID NO: 27716 - protein, 9 aa, Artificial Sequence
  Description of Artificial Sequence: Synthetic peptide
  Seed: FERATIMAA
FIRATIMAF

SEQ ID NO: 27717 - protein, 9 aa, Artificial Sequence
  Description of Artificial Sequence: Synthetic peptide
  Seed: FERATIMAA
FERATIMAY

SEQ ID NO: 27718 - protein, 9 aa, Artificial Sequence
  Description of Artificial Sequence: Synthetic peptide
  Seed: FERATIMAA
FERATIMAW

SEQ ID NO: 27719 - protein, 9 aa, Artificial Sequence
  Description of Artificial Sequence: Synthetic peptide
  Seed: FERATIMAA
FERATIMAT

SEQ ID NO: 27720 - protein, 9 aa, Artificial Sequence
  Description of Artificial Sequence: Synthetic peptide
  Seed: FERATIMAA
FERATIMAS

SEQ ID NO: 27721 - protein, 9 aa, Artificial Sequence
  Description of Artificial Sequence: Synthetic peptide
  Seed: FERATIMAA
FQRATIMAH

SEQ ID NO: 27722 - protein, 9 aa, Artificial Sequence
  Description of Artificial Sequence: Synthetic peptide
  Seed: FERATIMAA
FQRATIMAI

SEQ ID NO: 27723 - protein, 9 aa, Artificial Sequence
  Description of Artificial Sequence: Synthetic peptide
  Seed: FERATIMAA
FQRATIMAL

SEQ ID NO: 27724 - protein, 9 aa, Artificial Sequence
  Description of Artificial Sequence: Synthetic peptide
  Seed: FERATIMAA
FQRATIMAM

SEQ ID NO: 27725 - protein, 9 aa, Artificial Sequence
  Description of Artificial Sequence: Synthetic peptide
  Seed: FERATIMAA
FQRATIMAF

SEQ ID NO: 27726 - protein, 9 aa, Artificial Sequence
  Description of Artificial Sequence: Synthetic peptide
  Seed: FERATIMAA
FQRATIMAP

SEQ ID NO: 27727 - protein, 9 aa, Artificial Sequence
  Description of Artificial Sequence: Synthetic peptide
  Seed: FERATIMAA
FQRATIMAS

SEQ ID NO: 27728 - protein, 9 aa, Artificial Sequence
  Description of Artificial Sequence: Synthetic peptide
  Seed: FERATIMAA
FQRATIMAT

SEQ ID NO: 27729 - protein, 9 aa, Artificial Sequence
  Description of Artificial Sequence: Synthetic peptide
  Seed: FERATIMAA
FQRATIMAW

SEQ ID NO: 27730 - protein, 9 aa, Artificial Sequence
  Description of Artificial Sequence: Synthetic peptide
  Seed: FERATIMAA
FQRATIMAY

SEQ ID NO: 27731 - protein, 9 aa, Artificial Sequence
  Description of Artificial Sequence: Synthetic peptide
  Seed: FERATIMAA
FQRATIMAV

SEQ ID NO: 27732 - protein, 9 aa, Artificial Sequence
  Description of Artificial Sequence: Synthetic peptide
  Seed: FERATIMAA
FERATIMAC

SEQ ID NO: 27733 - protein, 9 aa, Artificial Sequence
  Description of Artificial Sequence: Synthetic peptide
  Seed: FERATIMAA
FERATIMAG

SEQ ID NO: 27734 - protein, 9 aa, Artificial Sequence
  Description of Artificial Sequence: Synthetic peptide
  Seed: FERATIMAA
FERATIMAH

SEQ ID NO: 27735 - protein, 9 aa, Artificial Sequence
  Description of Artificial Sequence: Synthetic peptide
  Seed: FERATIMAA
FERATIMAI

SEQ ID NO: 27736 - protein, 9 aa, Artificial Sequence
  Description of Artificial Sequence: Synthetic peptide
  Seed: FERATIMAA
FERATIMAL

SEQ ID NO: 27737 - protein, 9 aa, Artificial Sequence
  Description of Artificial Sequence: Synthetic peptide
  Seed: FERATIMAA
FERATIMAM

SEQ ID NO: 27738 - protein, 9 aa, Artificial Sequence
  Description of Artificial Sequence: Synthetic peptide
  Seed: FERATIMAA
FERATIMAF

SEQ ID NO: 27739 - protein, 9 aa, Artificial Sequence
  Description of Artificial Sequence: Synthetic peptide
  Seed: FERATIMAA
FERATIMAP

SEQ ID NO: 27740 - protein, 9 aa, Artificial Sequence
  Description of Artificial Sequence: Synthetic peptide
  Seed: FERATIMAA
FIRATIMAW

SEQ ID NO: 27741 - protein, 9 aa, Artificial Sequence
  Description of Artificial Sequence: Synthetic peptide
  Seed: FERATIMAA
FIRATIMAY

SEQ ID NO: 27742 - protein, 9 aa, Artificial Sequence
  Description of Artificial Sequence: Synthetic peptide
  Seed: FERATIMAA
FLRATIMAH

SEQ ID NO: 27743 - protein, 9 aa, Artificial Sequence
  Description of Artificial Sequence: Synthetic peptide
  Seed: FERATIMAA
FMRATIMAL

SEQ ID NO: 27744 - protein, 9 aa, Artificial Sequence
  Description of Artificial Sequence: Synthetic peptide
  Seed: FERATIMAA
FMRATIMAF

SEQ ID NO: 27745 - protein, 9 aa, Artificial Sequence
  Description of Artificial Sequence: Synthetic peptide
  Seed: FERATIMAA
FMRATIMAS

SEQ ID NO: 27746 - protein, 9 aa, Artificial Sequence
  Description of Artificial Sequence: Synthetic peptide
  Seed: FERATIMAA
FMRATIMAT

SEQ ID NO: 27747 - protein, 9 aa, Artificial Sequence
  Description of Artificial Sequence: Synthetic peptide
  Seed: FERATIMAA
FMRATIMAW

SEQ ID NO: 27748 - protein, 9 aa, Artificial Sequence
  Description of Artificial Sequence: Synthetic peptide
  Seed: FERATIMAA
FMRATIMAY

SEQ ID NO: 27749 - protein, 9 aa, Artificial Sequence
  Description of Artificial Sequence: Synthetic peptide
  Seed: FERATIMAA
FMRATIMAV

SEQ ID NO: 27750 - protein, 9 aa, Artificial Sequence
  Description of Artificial Sequence: Synthetic peptide
  Seed: FERATIMAA
FFRATIMAL

SEQ ID NO: 27751 - protein, 9 aa, Artificial Sequence
  Description of Artificial Sequence: Synthetic peptide
  Seed: FERATIMAA
FFRATIMAM

SEQ ID NO: 27752 - protein, 9 aa, Artificial Sequence
  Description of Artificial Sequence: Synthetic peptide
  Seed: FERATIMAA
FFRATIMAF

SEQ ID NO: 27753 - protein, 9 aa, Artificial Sequence
  Description of Artificial Sequence: Synthetic peptide
  Seed: FERATIMAA
FFRATIMAY

SEQ ID NO: 27754 - protein, 9 aa, Artificial Sequence
  Description of Artificial Sequence: Synthetic peptide
  Seed: FERATIMAA
FPRATIMAM

SEQ ID NO: 27755 - protein, 9 aa, Artificial Sequence
  Description of Artificial Sequence: Synthetic peptide
  Seed: FERATIMAA
FPRATIMAF

SEQ ID NO: 27756 - protein, 9 aa, Artificial Sequence
  Description of Artificial Sequence: Synthetic peptide
  Seed: FERATIMAA
FPRATIMAY

SEQ ID NO: 27757 - protein, 9 aa, Artificial Sequence
  Description of Artificial Sequence: Synthetic peptide
  Seed: FERATIMAA
FSRATIMAH

SEQ ID NO: 27758 - protein, 9 aa, Artificial Sequence
  Description of Artificial Sequence: Synthetic peptide
  Seed: FERATIMAA
FSRATIMAI

SEQ ID NO: 27759 - protein, 9 aa, Artificial Sequence
  Description of Artificial Sequence: Synthetic peptide
  Seed: FERATIMAA
FSRATIMAL

SEQ ID NO: 27760 - protein, 9 aa, Artificial Sequence
  Description of Artificial Sequence: Synthetic peptide
  Seed: FERATIMAA
FSRATIMAM

SEQ ID NO: 27761 - protein, 9 aa, Artificial Sequence
  Description of Artificial Sequence: Synthetic peptide
  Seed: FERATIMAA
FSRATIMAF

SEQ ID NO: 27762 - protein, 9 aa, Artificial Sequence
  Description of Artificial Sequence: Synthetic peptide
  Seed: FERATIMAA
FSRATIMAW

SEQ ID NO: 27763 - protein, 9 aa, Artificial Sequence
  Description of Artificial Sequence: Synthetic peptide
  Seed: FERATIMAA
FMRATIMAM

SEQ ID NO: 27764 - protein, 9 aa, Artificial Sequence
  Description of Artificial Sequence: Synthetic peptide
  Seed: FERATIMAA
FMRATIMAI

SEQ ID NO: 27765 - protein, 9 aa, Artificial Sequence
  Description of Artificial Sequence: Synthetic peptide
  Seed: FERATIMAA
FLRATIMAI

SEQ ID NO: 27766 - protein, 9 aa, Artificial Sequence
  Description of Artificial Sequence: Synthetic peptide
  Seed: FERATIMAA
FMRATIMAH

SEQ ID NO: 27767 - protein, 9 aa, Artificial Sequence
  Description of Artificial Sequence: Synthetic peptide
  Seed: FERATIMAA
FLRATIMAL

SEQ ID NO: 27768 - protein, 9 aa, Artificial Sequence
  Description of Artificial Sequence: Synthetic peptide
  Seed: FERATIMAA
FLRATIMAM

SEQ ID NO: 27769 - protein, 9 aa, Artificial Sequence
  Description of Artificial Sequence: Synthetic peptide
  Seed: FERATIMAA
FLRATIMAF

SEQ ID NO: 27770 - protein, 9 aa, Artificial Sequence
  Description of Artificial Sequence: Synthetic peptide
  Seed: FERATIMAA
FLRATIMAW

SEQ ID NO: 27771 - protein, 9 aa, Artificial Sequence
  Description of Artificial Sequence: Synthetic peptide
  Seed: FERATIMAA
FLRATIMAY

SEQ ID NO: 27772 - protein, 9 aa, Artificial Sequence
  Description of Artificial Sequence: Synthetic peptide
  Seed: FERATIMAA
FLRATIMAV

SEQ ID NO: 27773 - protein, 9 aa, Artificial Sequence
  Description of Artificial Sequence: Synthetic peptide
  Seed: FERATIMAA
FKRATIMAA

SEQ ID NO: 27774 - protein, 9 aa, Artificial Sequence
  Description of Artificial Sequence: Synthetic peptide
  Seed: FERATIMAA
FKRATIMAG

SEQ ID NO: 27775 - protein, 9 aa, Artificial Sequence
  Description of Artificial Sequence: Synthetic peptide
  Seed: FERATIMAA
FKRATIMAH

SEQ ID NO: 27776 - protein, 9 aa, Artificial Sequence
  Description of Artificial Sequence: Synthetic peptide
  Seed: FERATIMAA
FKRATIMAI

SEQ ID NO: 27777 - protein, 9 aa, Artificial Sequence
  Description of Artificial Sequence: Synthetic peptide
  Seed: FERATIMAA
FKRATIMAL

SEQ ID NO: 27778 - protein, 9 aa, Artificial Sequence
  Description of Artificial Sequence: Synthetic peptide
  Seed: FERATIMAA
FKRATIMAM

SEQ ID NO: 27779 - protein, 9 aa, Artificial Sequence
  Description of Artificial Sequence: Synthetic peptide
  Seed: FERATIMAA
FKRATIMAF

SEQ ID NO: 27780 - protein, 9 aa, Artificial Sequence
  Description of Artificial Sequence: Synthetic peptide
  Seed: FERATIMAA
FKRATIMAW

SEQ ID NO: 27781 - protein, 9 aa, Artificial Sequence
  Description of Artificial Sequence: Synthetic peptide
  Seed: FERATIMAA
FKRATIMAY

SEQ ID NO: 27782 - protein, 9 aa, Artificial Sequence
  Description of Artificial Sequence: Synthetic peptide
  Seed: FERATIMAA
FKRATIMAV

SEQ ID NO: 27783 - protein, 9 aa, Artificial Sequence
  Description of Artificial Sequence: Synthetic peptide
  Seed: FERATIMAA
FMRATIMAA

SEQ ID NO: 27784 - protein, 9 aa, Artificial Sequence
  Description of Artificial Sequence: Synthetic peptide
  Seed: FERATIMAA
FMRATIMAQ

SEQ ID NO: 27785 - protein, 9 aa, Artificial Sequence
  Description of Artificial Sequence: Synthetic peptide
  Seed: FERATIMAA
FMRATIMAG

SEQ ID NO: 27786 - protein, 10 aa, Artificial Sequence
  Description of Artificial Sequence: Synthetic peptide
  Seed: FERATIMAAF
FERATIMAAV

SEQ ID NO: 27787 - protein, 10 aa, Artificial Sequence
  Description of Artificial Sequence: Synthetic peptide
  Seed: FERATIMAAF
FGRATIMAAI

SEQ ID NO: 27788 - protein, 9 aa, Artificial Sequence
  Description of Artificial Sequence: Synthetic peptide
  Seed: FERATVMAA
FHRATVMAW

SEQ ID NO: 27789 - protein, 9 aa, Artificial Sequence
  Description of Artificial Sequence: Synthetic peptide
  Seed: FERATVMAA
FRRATVMAY

SEQ ID NO: 27790 - protein, 9 aa, Artificial Sequence
  Description of Artificial Sequence: Synthetic peptide
  Seed: FERATVMAA
FARATVMAW

SEQ ID NO: 27791 - protein, 9 aa, Artificial Sequence
  Description of Artificial Sequence: Synthetic peptide
  Seed: FERATVMAA
FARATVMAY

SEQ ID NO: 27792 - protein, 9 aa, Artificial Sequence
  Description of Artificial Sequence: Synthetic peptide
  Seed: FERATVMAA
FARATVMAV

SEQ ID NO: 27793 - protein, 9 aa, Artificial Sequence
  Description of Artificial Sequence: Synthetic peptide
  Seed: FERATVMAA
FRRATVMAH

SEQ ID NO: 27794 - protein, 9 aa, Artificial Sequence
  Description of Artificial Sequence: Synthetic peptide
  Seed: FERATVMAA
FRRATVMAI

SEQ ID NO: 27795 - protein, 9 aa, Artificial Sequence
  Description of Artificial Sequence: Synthetic peptide
  Seed: FERATVMAA
FRRATVMAL

SEQ ID NO: 27796 - protein, 9 aa, Artificial Sequence
  Description of Artificial Sequence: Synthetic peptide
  Seed: FERATVMAA
FRRATVMAM

SEQ ID NO: 27797 - protein, 9 aa, Artificial Sequence
  Description of Artificial Sequence: Synthetic peptide
  Seed: FERATVMAA
FRRATVMAF

SEQ ID NO: 27798 - protein, 9 aa, Artificial Sequence
  Description of Artificial Sequence: Synthetic peptide
  Seed: FERATVMAA
FRRATVMAW

SEQ ID NO: 27799 - protein, 9 aa, Artificial Sequence
  Description of Artificial Sequence: Synthetic peptide
  Seed: FERATVMAA
FNRATVMAH

SEQ ID NO: 27800 - protein, 9 aa, Artificial Sequence
  Description of Artificial Sequence: Synthetic peptide
  Seed: FERATVMAA
FDRATVMAY

SEQ ID NO: 27801 - protein, 9 aa, Artificial Sequence
  Description of Artificial Sequence: Synthetic peptide
  Seed: FERATVMAA
FNRATVMAI

SEQ ID NO: 27802 - protein, 9 aa, Artificial Sequence
  Description of Artificial Sequence: Synthetic peptide
  Seed: FERATVMAA
FNRATVMAL

SEQ ID NO: 27803 - protein, 9 aa, Artificial Sequence
  Description of Artificial Sequence: Synthetic peptide
  Seed: FERATVMAA
FNRATVMAM

SEQ ID NO: 27804 - protein, 9 aa, Artificial Sequence
  Description of Artificial Sequence: Synthetic peptide
  Seed: FERATVMAA
FNRATVMAF

SEQ ID NO: 27805 - protein, 9 aa, Artificial Sequence
  Description of Artificial Sequence: Synthetic peptide
  Seed: FERATVMAA
FNRATVMAW

SEQ ID NO: 27806 - protein, 9 aa, Artificial Sequence
  Description of Artificial Sequence: Synthetic peptide
  Seed: FERATVMAA
FNRATVMAY

SEQ ID NO: 27807 - protein, 9 aa, Artificial Sequence
  Description of Artificial Sequence: Synthetic peptide
  Seed: FERATVMAA
FDRATVMAI

SEQ ID NO: 27808 - protein, 9 aa, Artificial Sequence
  Description of Artificial Sequence: Synthetic peptide
  Seed: FERATVMAA
FDRATVMAL

SEQ ID NO: 27809 - protein, 9 aa, Artificial Sequence
  Description of Artificial Sequence: Synthetic peptide
  Seed: FERATVMAA
FDRATVMAM

SEQ ID NO: 27810 - protein, 9 aa, Artificial Sequence
  Description of Artificial Sequence: Synthetic peptide
  Seed: FERATVMAA
FARATVMAF

SEQ ID NO: 27811 - protein, 9 aa, Artificial Sequence
  Description of Artificial Sequence: Synthetic peptide
  Seed: FERATVMAA
FARATVMAM

SEQ ID NO: 27812 - protein, 9 aa, Artificial Sequence
  Description of Artificial Sequence: Synthetic peptide
  Seed: FERATVMAA
FARATVMAL

SEQ ID NO: 27813 - protein, 9 aa, Artificial Sequence
  Description of Artificial Sequence: Synthetic peptide
  Seed: FERATVMAA
FARATVMAI

SEQ ID NO: 27814 - protein, 10 aa, Artificial Sequence
  Description of Artificial Sequence: Synthetic peptide
  Seed: FERATIMAAF
FWRATIMAAV

SEQ ID NO: 27815 - protein, 10 aa, Artificial Sequence
  Description of Artificial Sequence: Synthetic peptide
  Seed: FERATIMAAF
FYRATIMAAR

SEQ ID NO: 27816 - protein, 10 aa, Artificial Sequence
  Description of Artificial Sequence: Synthetic peptide
  Seed: FERATIMAAF
FYRATIMAAI

SEQ ID NO: 27817 - protein, 10 aa, Artificial Sequence
  Description of Artificial Sequence: Synthetic peptide
  Seed: FERATIMAAF
FYRATIMAAL

SEQ ID NO: 27818 - protein, 10 aa, Artificial Sequence
  Description of Artificial Sequence: Synthetic peptide
  Seed: FERATIMAAF
FYRATIMAAK

SEQ ID NO: 27819 - protein, 10 aa, Artificial Sequence
  Description of Artificial Sequence: Synthetic peptide
  Seed: FERATIMAAF
FYRATIMAAM

SEQ ID NO: 27820 - protein, 10 aa, Artificial Sequence
  Description of Artificial Sequence: Synthetic peptide
  Seed: FERATIMAAF
FYRATIMAAF

SEQ ID NO: 27821 - protein, 10 aa, Artificial Sequence
  Description of Artificial Sequence: Synthetic peptide
  Seed: FERATIMAAF
FYRATIMAAY

SEQ ID NO: 27822 - protein, 10 aa, Artificial Sequence
  Description of Artificial Sequence: Synthetic peptide
  Seed: FERATIMAAF
FYRATIMAAV

SEQ ID NO: 27823 - protein, 10 aa, Artificial Sequence
  Description of Artificial Sequence: Synthetic peptide
  Seed: FERATIMAAF
FVRATIMAAR

SEQ ID NO: 27824 - protein, 10 aa, Artificial Sequence
  Description of Artificial Sequence: Synthetic peptide
  Seed: FERATIMAAF
FVRATIMAAI

SEQ ID NO: 27825 - protein, 10 aa, Artificial Sequence
  Description of Artificial Sequence: Synthetic peptide
  Seed: FERATIMAAF
FVRATIMAAL

SEQ ID NO: 27826 - protein, 10 aa, Artificial Sequence
  Description of Artificial Sequence: Synthetic peptide
  Seed: FERATIMAAF
FVRATIMAAK

SEQ ID NO: 27827 - protein, 10 aa, Artificial Sequence
  Description of Artificial Sequence: Synthetic peptide
  Seed: FERATIMAAF
FVRATIMAAM

SEQ ID NO: 27828 - protein, 10 aa, Artificial Sequence
  Description of Artificial Sequence: Synthetic peptide
  Seed: FERATIMAAF
FVRATIMAAF

SEQ ID NO: 27829 - protein, 10 aa, Artificial Sequence
  Description of Artificial Sequence: Synthetic peptide
  Seed: FERATIMAAF
FVRATIMAAY

SEQ ID NO: 27830 - protein, 10 aa, Artificial Sequence
  Description of Artificial Sequence: Synthetic peptide
  Seed: FERATIMAAF
FVRATIMAAV

SEQ ID NO: 27831 - protein, 9 aa, Artificial Sequence
  Description of Artificial Sequence: Synthetic peptide
  Seed: FERATVMAA
FARATVMAA

SEQ ID NO: 27832 - protein, 9 aa, Artificial Sequence
  Description of Artificial Sequence: Synthetic peptide
  Seed: FERATVMAA
FARATVMAH

SEQ ID NO: 27833 - protein, 9 aa, Artificial Sequence
  Description of Artificial Sequence: Synthetic peptide
  Seed: FERATVMAA
FDRATVMAF

SEQ ID NO: 27834 - protein, 9 aa, Artificial Sequence
  Description of Artificial Sequence: Synthetic peptide
  Seed: FERATVMAA
FDRATVMAV

SEQ ID NO: 27835 - protein, 10 aa, Artificial Sequence
  Description of Artificial Sequence: Synthetic peptide
  Seed: FERATIMAAF
FGRATIMAAL

SEQ ID NO: 27836 - protein, 9 aa, Artificial Sequence
  Description of Artificial Sequence: Synthetic peptide
  Seed: FERATVMAA
FGRATVMAL

SEQ ID NO: 27837 - protein, 9 aa, Artificial Sequence
  Description of Artificial Sequence: Synthetic peptide
  Seed: FERATVMAA
FERATVMAL

SEQ ID NO: 27838 - protein, 9 aa, Artificial Sequence
  Description of Artificial Sequence: Synthetic peptide
  Seed: FERATVMAA
FERATVMAM

SEQ ID NO: 27839 - protein, 9 aa, Artificial Sequence
  Description of Artificial Sequence: Synthetic peptide
  Seed: FERATVMAA
FERATVMAF

SEQ ID NO: 27840 - protein, 9 aa, Artificial Sequence
  Description of Artificial Sequence: Synthetic peptide
  Seed: FERATVMAA
FERATVMAP

SEQ ID NO: 27841 - protein, 9 aa, Artificial Sequence
  Description of Artificial Sequence: Synthetic peptide
  Seed: FERATVMAA
FERATVMAS

SEQ ID NO: 27842 - protein, 9 aa, Artificial Sequence
  Description of Artificial Sequence: Synthetic peptide
  Seed: FERATVMAA
FERATVMAT

SEQ ID NO: 27843 - protein, 9 aa, Artificial Sequence
  Description of Artificial Sequence: Synthetic peptide
  Seed: FERATVMAA
FERATVMAW

SEQ ID NO: 27844 - protein, 9 aa, Artificial Sequence
  Description of Artificial Sequence: Synthetic peptide
  Seed: FERATVMAA
FERATVMAY

SEQ ID NO: 27845 - protein, 9 aa, Artificial Sequence
  Description of Artificial Sequence: Synthetic peptide
  Seed: FERATVMAA
FERATVMAV

SEQ ID NO: 27846 - protein, 9 aa, Artificial Sequence
  Description of Artificial Sequence: Synthetic peptide
  Seed: FERATVMAA
FGRATVMAM

SEQ ID NO: 27847 - protein, 9 aa, Artificial Sequence
  Description of Artificial Sequence: Synthetic peptide
  Seed: FERATVMAA
FCRATVMAM

SEQ ID NO: 27848 - protein, 9 aa, Artificial Sequence
  Description of Artificial Sequence: Synthetic peptide
  Seed: FERATVMAA
FGRATVMAF

SEQ ID NO: 27849 - protein, 9 aa, Artificial Sequence
  Description of Artificial Sequence: Synthetic peptide
  Seed: FERATVMAA
FGRATVMAW

SEQ ID NO: 27850 - protein, 9 aa, Artificial Sequence
  Description of Artificial Sequence: Synthetic peptide
  Seed: FERATVMAA
FGRATVMAY

SEQ ID NO: 27851 - protein, 9 aa, Artificial Sequence
  Description of Artificial Sequence: Synthetic peptide
  Seed: FERATVMAA
FHRATVMAA

SEQ ID NO: 27852 - protein, 9 aa, Artificial Sequence
  Description of Artificial Sequence: Synthetic peptide
  Seed: FERATVMAA
FHRATVMAH

SEQ ID NO: 27853 - protein, 9 aa, Artificial Sequence
  Description of Artificial Sequence: Synthetic peptide
  Seed: FERATVMAA
FHRATVMAI

SEQ ID NO: 27854 - protein, 9 aa, Artificial Sequence
  Description of Artificial Sequence: Synthetic peptide
  Seed: FERATVMAA
FHRATVMAL

SEQ ID NO: 27855 - protein, 9 aa, Artificial Sequence
  Description of Artificial Sequence: Synthetic peptide
  Seed: FERATVMAA
FHRATVMAM

SEQ ID NO: 27856 - protein, 9 aa, Artificial Sequence
  Description of Artificial Sequence: Synthetic peptide
  Seed: FERATVMAA
FHRATVMAF

SEQ ID NO: 27857 - protein, 9 aa, Artificial Sequence
  Description of Artificial Sequence: Synthetic peptide
  Seed: FERATVMAA
FERATVMAI

SEQ ID NO: 27858 - protein, 9 aa, Artificial Sequence
  Description of Artificial Sequence: Synthetic peptide
  Seed: FERATVMAA
FERATVMAH

SEQ ID NO: 27859 - protein, 9 aa, Artificial Sequence
  Description of Artificial Sequence: Synthetic peptide
  Seed: FERATVMAA
FERATVMAG

SEQ ID NO: 27860 - protein, 9 aa, Artificial Sequence
  Description of Artificial Sequence: Synthetic peptide
  Seed: FERATVMAA
FERATVMAC

SEQ ID NO: 27861 - protein, 9 aa, Artificial Sequence
  Description of Artificial Sequence: Synthetic peptide
  Seed: FERATVMAA
FCRATVMAF

SEQ ID NO: 27862 - protein, 9 aa, Artificial Sequence
  Description of Artificial Sequence: Synthetic peptide
  Seed: FERATVMAA
FCRATVMAY

SEQ ID NO: 27863 - protein, 9 aa, Artificial Sequence
  Description of Artificial Sequence: Synthetic peptide
  Seed: FERATVMAA
FQRATVMAA

SEQ ID NO: 27864 - protein, 9 aa, Artificial Sequence
  Description of Artificial Sequence: Synthetic peptide
  Seed: FERATVMAA
FQRATVMAN

SEQ ID NO: 27865 - protein, 9 aa, Artificial Sequence
  Description of Artificial Sequence: Synthetic peptide
  Seed: FERATVMAA
FQRATVMAC

SEQ ID NO: 27866 - protein, 9 aa, Artificial Sequence
  Description of Artificial Sequence: Synthetic peptide
  Seed: FERATVMAA
FQRATVMAQ

SEQ ID NO: 27867 - protein, 9 aa, Artificial Sequence
  Description of Artificial Sequence: Synthetic peptide
  Seed: FERATVMAA
FQRATVMAE

SEQ ID NO: 27868 - protein, 9 aa, Artificial Sequence
  Description of Artificial Sequence: Synthetic peptide
  Seed: FERATVMAA
FQRATVMAG

SEQ ID NO: 27869 - protein, 9 aa, Artificial Sequence
  Description of Artificial Sequence: Synthetic peptide
  Seed: FERATVMAA
FQRATVMAH

SEQ ID NO: 27870 - protein, 9 aa, Artificial Sequence
  Description of Artificial Sequence: Synthetic peptide
  Seed: FERATVMAA
FQRATVMAI

SEQ ID NO: 27871 - protein, 9 aa, Artificial Sequence
  Description of Artificial Sequence: Synthetic peptide
  Seed: FERATVMAA
FQRATVMAL

SEQ ID NO: 27872 - protein, 9 aa, Artificial Sequence
  Description of Artificial Sequence: Synthetic peptide
  Seed: FERATVMAA
FQRATVMAM

SEQ ID NO: 27873 - protein, 9 aa, Artificial Sequence
  Description of Artificial Sequence: Synthetic peptide
  Seed: FERATVMAA
FQRATVMAF

SEQ ID NO: 27874 - protein, 9 aa, Artificial Sequence
  Description of Artificial Sequence: Synthetic peptide
  Seed: FERATVMAA
FQRATVMAP

SEQ ID NO: 27875 - protein, 9 aa, Artificial Sequence
  Description of Artificial Sequence: Synthetic peptide
  Seed: FERATVMAA
FQRATVMAS

SEQ ID NO: 27876 - protein, 9 aa, Artificial Sequence
  Description of Artificial Sequence: Synthetic peptide
  Seed: FERATVMAA
FQRATVMAT

SEQ ID NO: 27877 - protein, 9 aa, Artificial Sequence
  Description of Artificial Sequence: Synthetic peptide
  Seed: FERATVMAA
FQRATVMAW

SEQ ID NO: 27878 - protein, 9 aa, Artificial Sequence
  Description of Artificial Sequence: Synthetic peptide
  Seed: FERATVMAA
FQRATVMAY

SEQ ID NO: 27879 - protein, 9 aa, Artificial Sequence
  Description of Artificial Sequence: Synthetic peptide
  Seed: FERATVMAA
FQRATVMAV

SEQ ID NO: 27880 - protein, 10 aa, Artificial Sequence
  Description of Artificial Sequence: Synthetic peptide
  Seed: FERATIMAAF
FWRATIMAAY

SEQ ID NO: 27881 - protein, 10 aa, Artificial Sequence
  Description of Artificial Sequence: Synthetic peptide
  Seed: FERATIMAAF
FWRATIMAAF

SEQ ID NO: 27882 - protein, 10 aa, Artificial Sequence
  Description of Artificial Sequence: Synthetic peptide
  Seed: FERATIMAAF
FWRATIMAAM

SEQ ID NO: 27883 - protein, 10 aa, Artificial Sequence
  Description of Artificial Sequence: Synthetic peptide
  Seed: FERATIMAAF
FLRATIMAAY

SEQ ID NO: 27884 - protein, 10 aa, Artificial Sequence
  Description of Artificial Sequence: Synthetic peptide
  Seed: FERATIMAAF
FIRATIMAAV

SEQ ID NO: 27885 - protein, 10 aa, Artificial Sequence
  Description of Artificial Sequence: Synthetic peptide
  Seed: FERATIMAAF
FLRATIMAAR

SEQ ID NO: 27886 - protein, 10 aa, Artificial Sequence
  Description of Artificial Sequence: Synthetic peptide
  Seed: FERATIMAAF
FLRATIMAAH

SEQ ID NO: 27887 - protein, 10 aa, Artificial Sequence
  Description of Artificial Sequence: Synthetic peptide
  Seed: FERATIMAAF
FLRATIMAAI

SEQ ID NO: 27888 - protein, 10 aa, Artificial Sequence
  Description of Artificial Sequence: Synthetic peptide
  Seed: FERATIMAAF
FLRATIMAAL

SEQ ID NO: 27889 - protein, 10 aa, Artificial Sequence
  Description of Artificial Sequence: Synthetic peptide
  Seed: FERATIMAAF
FLRATIMAAK

SEQ ID NO: 27890 - protein, 10 aa, Artificial Sequence
  Description of Artificial Sequence: Synthetic peptide
  Seed: FERATIMAAF
FLRATIMAAM

SEQ ID NO: 27891 - protein, 10 aa, Artificial Sequence
  Description of Artificial Sequence: Synthetic peptide
  Seed: FERATIMAAF
FLRATIMAAF

SEQ ID NO: 27892 - protein, 10 aa, Artificial Sequence
  Description of Artificial Sequence: Synthetic peptide
  Seed: FERATIMAAF
FLRATIMAAW

SEQ ID NO: 27893 - protein, 10 aa, Artificial Sequence
  Description of Artificial Sequence: Synthetic peptide
  Seed: FERATIMAAF
FLRATIMAAV

SEQ ID NO: 27894 - protein, 10 aa, Artificial Sequence
  Description of Artificial Sequence: Synthetic peptide
  Seed: FERATIMAAF
FWRATIMAAK

SEQ ID NO: 27895 - protein, 10 aa, Artificial Sequence
  Description of Artificial Sequence: Synthetic peptide
  Seed: FERATIMAAF
FKRATIMAAR

SEQ ID NO: 27896 - protein, 10 aa, Artificial Sequence
  Description of Artificial Sequence: Synthetic peptide
  Seed: FERATIMAAF
FKRATIMAAI

SEQ ID NO: 27897 - protein, 10 aa, Artificial Sequence
  Description of Artificial Sequence: Synthetic peptide
  Seed: FERATIMAAF
FKRATIMAAL

SEQ ID NO: 27898 - protein, 10 aa, Artificial Sequence
  Description of Artificial Sequence: Synthetic peptide
  Seed: FERATIMAAF
FKRATIMAAK

SEQ ID NO: 27899 - protein, 10 aa, Artificial Sequence
  Description of Artificial Sequence: Synthetic peptide
  Seed: FERATIMAAF
FKRATIMAAM

SEQ ID NO: 27900 - protein, 10 aa, Artificial Sequence
  Description of Artificial Sequence: Synthetic peptide
  Seed: FERATIMAAF
FKRATIMAAF

SEQ ID NO: 27901 - protein, 10 aa, Artificial Sequence
  Description of Artificial Sequence: Synthetic peptide
  Seed: FERATIMAAF
FKRATIMAAW

SEQ ID NO: 27902 - protein, 10 aa, Artificial Sequence
  Description of Artificial Sequence: Synthetic peptide
  Seed: FERATIMAAF
FKRATIMAAY

SEQ ID NO: 27903 - protein, 10 aa, Artificial Sequence
  Description of Artificial Sequence: Synthetic peptide
  Seed: FERATIMAAF
FKRATIMAAV

SEQ ID NO: 27904 - protein, 10 aa, Artificial Sequence
  Description of Artificial Sequence: Synthetic peptide
  Seed: FERATIMAAF
FIRATIMAAY

SEQ ID NO: 27905 - protein, 10 aa, Artificial Sequence
  Description of Artificial Sequence: Synthetic peptide
  Seed: FERATIMAAF
FIRATIMAAW

SEQ ID NO: 27906 - protein, 10 aa, Artificial Sequence
  Description of Artificial Sequence: Synthetic peptide
  Seed: FERATIMAAF
FIRATIMAAF

SEQ ID NO: 27907 - protein, 10 aa, Artificial Sequence
  Description of Artificial Sequence: Synthetic peptide
  Seed: FERATIMAAF
FIRATIMAAM

SEQ ID NO: 27908 - protein, 10 aa, Artificial Sequence
  Description of Artificial Sequence: Synthetic peptide
  Seed: FERATIMAAF
FGRATIMAAK

SEQ ID NO: 27909 - protein, 10 aa, Artificial Sequence
  Description of Artificial Sequence: Synthetic peptide
  Seed: FERATIMAAF
FGRATIMAAM

SEQ ID NO: 27910 - protein, 10 aa, Artificial Sequence
  Description of Artificial Sequence: Synthetic peptide
  Seed: FERATIMAAF
FGRATIMAAF

SEQ ID NO: 27911 - protein, 10 aa, Artificial Sequence
  Description of Artificial Sequence: Synthetic peptide
  Seed: FERATIMAAF
FGRATIMAAY

SEQ ID NO: 27912 - protein, 10 aa, Artificial Sequence
  Description of Artificial Sequence: Synthetic peptide
  Seed: FERATIMAAF
FGRATIMAAV

SEQ ID NO: 27913 - protein, 10 aa, Artificial Sequence
  Description of Artificial Sequence: Synthetic peptide
  Seed: FERATIMAAF
FHRATIMAAR

SEQ ID NO: 27914 - protein, 10 aa, Artificial Sequence
  Description of Artificial Sequence: Synthetic peptide
  Seed: FERATIMAAF
FHRATIMAAH

SEQ ID NO: 27915 - protein, 10 aa, Artificial Sequence
  Description of Artificial Sequence: Synthetic peptide
  Seed: FERATIMAAF
FHRATIMAAI

SEQ ID NO: 27916 - protein, 10 aa, Artificial Sequence
  Description of Artificial Sequence: Synthetic peptide
  Seed: FERATIMAAF
FHRATIMAAL

SEQ ID NO: 27917 - protein, 10 aa, Artificial Sequence
  Description of Artificial Sequence: Synthetic peptide
  Seed: FERATIMAAF
FHRATIMAAK

SEQ ID NO: 27918 - protein, 10 aa, Artificial Sequence
  Description of Artificial Sequence: Synthetic peptide
  Seed: FERATIMAAF
FHRATIMAAM

SEQ ID NO: 27919 - protein, 10 aa, Artificial Sequence
  Description of Artificial Sequence: Synthetic peptide
  Seed: FERATIMAAF
FHRATIMAAF

SEQ ID NO: 27920 - protein, 10 aa, Artificial Sequence
  Description of Artificial Sequence: Synthetic peptide
  Seed: FERATIMAAF
FHRATIMAAW

SEQ ID NO: 27921 - protein, 10 aa, Artificial Sequence
  Description of Artificial Sequence: Synthetic peptide
  Seed: FERATIMAAF
FHRATIMAAY

SEQ ID NO: 27922 - protein, 10 aa, Artificial Sequence
  Description of Artificial Sequence: Synthetic peptide
  Seed: FERATIMAAF
FHRATIMAAV

SEQ ID NO: 27923 - protein, 10 aa, Artificial Sequence
  Description of Artificial Sequence: Synthetic peptide
  Seed: FERATIMAAF
FIRATIMAAR

SEQ ID NO: 27924 - protein, 10 aa, Artificial Sequence
  Description of Artificial Sequence: Synthetic peptide
  Seed: FERATIMAAF
FIRATIMAAI

SEQ ID NO: 27925 - protein, 10 aa, Artificial Sequence
  Description of Artificial Sequence: Synthetic peptide
  Seed: FERATIMAAF
FIRATIMAAL

SEQ ID NO: 27926 - protein, 10 aa, Artificial Sequence
  Description of Artificial Sequence: Synthetic peptide
  Seed: FERATIMAAF
FIRATIMAAK

SEQ ID NO: 27927 - protein, 10 aa, Artificial Sequence
  Description of Artificial Sequence: Synthetic peptide
  Seed: FERATIMAAF
FMRATIMAAA

SEQ ID NO: 27928 - protein, 10 aa, Artificial Sequence
  Description of Artificial Sequence: Synthetic peptide
  Seed: FERATIMAAF
FMRATIMAAR

SEQ ID NO: 27929 - protein, 10 aa, Artificial Sequence
  Description of Artificial Sequence: Synthetic peptide
  Seed: FERATIMAAF
FMRATIMAAH

SEQ ID NO: 27930 - protein, 10 aa, Artificial Sequence
  Description of Artificial Sequence: Synthetic peptide
  Seed: FERATIMAAF
FPRATIMAAY

SEQ ID NO: 27931 - protein, 10 aa, Artificial Sequence
  Description of Artificial Sequence: Synthetic peptide
  Seed: FERATIMAAF
FSRATIMAAR

SEQ ID NO: 27932 - protein, 10 aa, Artificial Sequence
  Description of Artificial Sequence: Synthetic peptide
  Seed: FERATIMAAF
FSRATIMAAI

SEQ ID NO: 27933 - protein, 10 aa, Artificial Sequence
  Description of Artificial Sequence: Synthetic peptide
  Seed: FERATIMAAF
FSRATIMAAL

SEQ ID NO: 27934 - protein, 10 aa, Artificial Sequence
  Description of Artificial Sequence: Synthetic peptide
  Seed: FERATIMAAF
FSRATIMAAK

SEQ ID NO: 27935 - protein, 10 aa, Artificial Sequence
  Description of Artificial Sequence: Synthetic peptide
  Seed: FERATIMAAF
FSRATIMAAM

SEQ ID NO: 27936 - protein, 10 aa, Artificial Sequence
  Description of Artificial Sequence: Synthetic peptide
  Seed: FERATIMAAF
FSRATIMAAF

SEQ ID NO: 27937 - protein, 10 aa, Artificial Sequence
  Description of Artificial Sequence: Synthetic peptide
  Seed: FERATIMAAF
FSRATIMAAY

SEQ ID NO: 27938 - protein, 10 aa, Artificial Sequence
  Description of Artificial Sequence: Synthetic peptide
  Seed: FERATIMAAF
FSRATIMAAV

SEQ ID NO: 27939 - protein, 10 aa, Artificial Sequence
  Description of Artificial Sequence: Synthetic peptide
  Seed: FERATIMAAF
FTRATIMAAR

SEQ ID NO: 27940 - protein, 10 aa, Artificial Sequence
  Description of Artificial Sequence: Synthetic peptide
  Seed: FERATIMAAF
FTRATIMAAI

SEQ ID NO: 27941 - protein, 10 aa, Artificial Sequence
  Description of Artificial Sequence: Synthetic peptide
  Seed: FERATIMAAF
FTRATIMAAL

SEQ ID NO: 27942 - protein, 10 aa, Artificial Sequence
  Description of Artificial Sequence: Synthetic peptide
  Seed: FERATIMAAF
FTRATIMAAK

SEQ ID NO: 27943 - protein, 10 aa, Artificial Sequence
  Description of Artificial Sequence: Synthetic peptide
  Seed: FERATIMAAF
FTRATIMAAM

SEQ ID NO: 27944 - protein, 10 aa, Artificial Sequence
  Description of Artificial Sequence: Synthetic peptide
  Seed: FERATIMAAF
FTRATIMAAF

SEQ ID NO: 27945 - protein, 10 aa, Artificial Sequence
  Description of Artificial Sequence: Synthetic peptide
  Seed: FERATIMAAF
FTRATIMAAY

SEQ ID NO: 27946 - protein, 10 aa, Artificial Sequence
  Description of Artificial Sequence: Synthetic peptide
  Seed: FERATIMAAF
FTRATIMAAV

SEQ ID NO: 27947 - protein, 10 aa, Artificial Sequence
  Description of Artificial Sequence: Synthetic peptide
  Seed: FERATIMAAF
FWRATIMAAR

SEQ ID NO: 27948 - protein, 10 aa, Artificial Sequence
  Description of Artificial Sequence: Synthetic peptide
  Seed: FERATIMAAF
FWRATIMAAI

SEQ ID NO: 27949 - protein, 10 aa, Artificial Sequence
  Description of Artificial Sequence: Synthetic peptide
  Seed: FERATIMAAF
FWRATIMAAL

SEQ ID NO: 27950 - protein, 10 aa, Artificial Sequence
  Description of Artificial Sequence: Synthetic peptide
  Seed: FERATIMAAF
FPRATIMAAV

SEQ ID NO: 27951 - protein, 10 aa, Artificial Sequence
  Description of Artificial Sequence: Synthetic peptide
  Seed: FERATIMAAF
FPRATIMAAF

SEQ ID NO: 27952 - protein, 10 aa, Artificial Sequence
  Description of Artificial Sequence: Synthetic peptide
  Seed: FERATIMAAF
FMRATIMAAI

SEQ ID NO: 27953 - protein, 10 aa, Artificial Sequence
  Description of Artificial Sequence: Synthetic peptide
  Seed: FERATIMAAF
FPRATIMAAM

SEQ ID NO: 27954 - protein, 10 aa, Artificial Sequence
  Description of Artificial Sequence: Synthetic peptide
  Seed: FERATIMAAF
FMRATIMAAL

SEQ ID NO: 27955 - protein, 10 aa, Artificial Sequence
  Description of Artificial Sequence: Synthetic peptide
  Seed: FERATIMAAF
FMRATIMAAK

SEQ ID NO: 27956 - protein, 10 aa, Artificial Sequence
  Description of Artificial Sequence: Synthetic peptide
  Seed: FERATIMAAF
FMRATIMAAM

SEQ ID NO: 27957 - protein, 10 aa, Artificial Sequence
  Description of Artificial Sequence: Synthetic peptide
  Seed: FERATIMAAF
FMRATIMAAF

SEQ ID NO: 27958 - protein, 10 aa, Artificial Sequence
  Description of Artificial Sequence: Synthetic peptide
  Seed: FERATIMAAF
FMRATIMAAW

SEQ ID NO: 27959 - protein, 10 aa, Artificial Sequence
  Description of Artificial Sequence: Synthetic peptide
  Seed: FERATIMAAF
FMRATIMAAY

SEQ ID NO: 27960 - protein, 10 aa, Artificial Sequence
  Description of Artificial Sequence: Synthetic peptide
  Seed: FERATIMAAF
FMRATIMAAV

SEQ ID NO: 27961 - protein, 10 aa, Artificial Sequence
  Description of Artificial Sequence: Synthetic peptide
  Seed: FERATIMAAF
FFRATIMAAR

SEQ ID NO: 27962 - protein, 10 aa, Artificial Sequence
  Description of Artificial Sequence: Synthetic peptide
  Seed: FERATIMAAF
FFRATIMAAI

SEQ ID NO: 27963 - protein, 10 aa, Artificial Sequence
  Description of Artificial Sequence: Synthetic peptide
  Seed: FERATIMAAF
FFRATIMAAL

SEQ ID NO: 27964 - protein, 10 aa, Artificial Sequence
  Description of Artificial Sequence: Synthetic peptide
  Seed: FERATIMAAF
FFRATIMAAK

SEQ ID NO: 27965 - protein, 10 aa, Artificial Sequence
  Description of Artificial Sequence: Synthetic peptide
  Seed: FERATIMAAF
FFRATIMAAM

SEQ ID NO: 27966 - protein, 10 aa, Artificial Sequence
  Description of Artificial Sequence: Synthetic peptide
  Seed: FERATIMAAF
FFRATIMAAF

SEQ ID NO: 27967 - protein, 10 aa, Artificial Sequence
  Description of Artificial Sequence: Synthetic peptide
  Seed: FERATIMAAF
FFRATIMAAY

SEQ ID NO: 27968 - protein, 10 aa, Artificial Sequence
  Description of Artificial Sequence: Synthetic peptide
  Seed: FERATIMAAF
FFRATIMAAV

SEQ ID NO: 27969 - protein, 10 aa, Artificial Sequence
  Description of Artificial Sequence: Synthetic peptide
  Seed: FERATIMAAF
FPRATIMAAR

SEQ ID NO: 27970 - protein, 10 aa, Artificial Sequence
  Description of Artificial Sequence: Synthetic peptide
  Seed: FERATIMAAF
FPRATIMAAI

SEQ ID NO: 27971 - protein, 10 aa, Artificial Sequence
  Description of Artificial Sequence: Synthetic peptide
  Seed: FERATIMAAF
FPRATIMAAL

SEQ ID NO: 27972 - protein, 10 aa, Artificial Sequence
  Description of Artificial Sequence: Synthetic peptide
  Seed: FERATIMAAF
FPRATIMAAK

SEQ ID NO: 27973 - protein, 10 aa, Artificial Sequence
  Description of Artificial Sequence: Synthetic peptide
  Seed: FIRGTKVSPR
FQRGTKVSPR

SEQ ID NO: 27974 - protein, 10 aa, Artificial Sequence
  Description of Artificial Sequence: Synthetic peptide
  Seed: FIRGTKVSPR
FGRGTKVSPR

SEQ ID NO: 27975 - protein, 10 aa, Artificial Sequence
  Description of Artificial Sequence: Synthetic peptide
  Seed: FIRGTKVSPR
FIRGTKVSPK

SEQ ID NO: 27976 - protein, 9 aa, Artificial Sequence
  Description of Artificial Sequence: Synthetic peptide
  Seed: FQTAAQRAM
FYTAAQRAL

SEQ ID NO: 27977 - protein, 9 aa, Artificial Sequence
  Description of Artificial Sequence: Synthetic peptide
  Seed: FQTAAQRAM
FTTAAQRAH

SEQ ID NO: 27978 - protein, 9 aa, Artificial Sequence
  Description of Artificial Sequence: Synthetic peptide
  Seed: FQTAAQRAM
FTTAAQRAI

SEQ ID NO: 27979 - protein, 9 aa, Artificial Sequence
  Description of Artificial Sequence: Synthetic peptide
  Seed: FQTAAQRAM
FTTAAQRAL

SEQ ID NO: 27980 - protein, 9 aa, Artificial Sequence
  Description of Artificial Sequence: Synthetic peptide
  Seed: FQTAAQRAM
FTTAAQRAM

SEQ ID NO: 27981 - protein, 9 aa, Artificial Sequence
  Description of Artificial Sequence: Synthetic peptide
  Seed: FQTAAQRAM
FTTAAQRAF

SEQ ID NO: 27982 - protein, 9 aa, Artificial Sequence
  Description of Artificial Sequence: Synthetic peptide
  Seed: FQTAAQRAM
FTTAAQRAW

SEQ ID NO: 27983 - protein, 9 aa, Artificial Sequence
  Description of Artificial Sequence: Synthetic peptide
  Seed: FQTAAQRAM
FTTAAQRAY

SEQ ID NO: 27984 - protein, 9 aa, Artificial Sequence
  Description of Artificial Sequence: Synthetic peptide
  Seed: FQTAAQRAM
FTTAAQRAV

SEQ ID NO: 27985 - protein, 9 aa, Artificial Sequence
  Description of Artificial Sequence: Synthetic peptide
  Seed: FQTAAQRAM
FWTAAQRAF

SEQ ID NO: 27986 - protein, 9 aa, Artificial Sequence
  Description of Artificial Sequence: Synthetic peptide
  Seed: FQTAAQRAM
FYTAAQRAM

SEQ ID NO: 27987 - protein, 10 aa, Artificial Sequence
  Description of Artificial Sequence: Synthetic peptide
  Seed: FQTAAQRAMM
FATAAQRAMA

SEQ ID NO: 27988 - protein, 9 aa, Artificial Sequence
  Description of Artificial Sequence: Synthetic peptide
  Seed: FQTAAQRAM
FYTAAQRAF

SEQ ID NO: 27989 - protein, 9 aa, Artificial Sequence
  Description of Artificial Sequence: Synthetic peptide
  Seed: FQTAAQRAM
FYTAAQRAY

SEQ ID NO: 27990 - protein, 9 aa, Artificial Sequence
  Description of Artificial Sequence: Synthetic peptide
  Seed: FQTAAQRAM
FVTAAQRAH

SEQ ID NO: 27991 - protein, 9 aa, Artificial Sequence
  Description of Artificial Sequence: Synthetic peptide
  Seed: FQTAAQRAM
FVTAAQRAI

SEQ ID NO: 27992 - protein, 9 aa, Artificial Sequence
  Description of Artificial Sequence: Synthetic peptide
  Seed: FQTAAQRAM
FVTAAQRAL

SEQ ID NO: 27993 - protein, 9 aa, Artificial Sequence
  Description of Artificial Sequence: Synthetic peptide
  Seed: FQTAAQRAM
FVTAAQRAM

SEQ ID NO: 27994 - protein, 9 aa, Artificial Sequence
  Description of Artificial Sequence: Synthetic peptide
  Seed: FQTAAQRAM
FVTAAQRAF

SEQ ID NO: 27995 - protein, 9 aa, Artificial Sequence
  Description of Artificial Sequence: Synthetic peptide
  Seed: FQTAAQRAM
FVTAAQRAW

SEQ ID NO: 27996 - protein, 9 aa, Artificial Sequence
  Description of Artificial Sequence: Synthetic peptide
  Seed: FQTAAQRAM
FVTAAQRAY

SEQ ID NO: 27997 - protein, 9 aa, Artificial Sequence
  Description of Artificial Sequence: Synthetic peptide
  Seed: FQTAAQRAM
FTTAAQRAA

SEQ ID NO: 27998 - protein, 9 aa, Artificial Sequence
  Description of Artificial Sequence: Synthetic peptide
  Seed: FQTAAQRAM
FSTAAQRAV

SEQ ID NO: 27999 - protein, 9 aa, Artificial Sequence
  Description of Artificial Sequence: Synthetic peptide
  Seed: FQTAAQRAM
FSTAAQRAY

SEQ ID NO: 28000 - protein, 9 aa, Artificial Sequence
  Description of Artificial Sequence: Synthetic peptide
  Seed: FQTAAQRAM
FSTAAQRAW

SEQ ID NO: 28001 - protein, 9 aa, Artificial Sequence
  Description of Artificial Sequence: Synthetic peptide
  Seed: FQTAAQRAM
FMTAAQRAF

SEQ ID NO: 28002 - protein, 9 aa, Artificial Sequence
  Description of Artificial Sequence: Synthetic peptide
  Seed: FQTAAQRAM
FMTAAQRAT

SEQ ID NO: 28003 - protein, 9 aa, Artificial Sequence
  Description of Artificial Sequence: Synthetic peptide
  Seed: FQTAAQRAM
FMTAAQRAW

SEQ ID NO: 28004 - protein, 9 aa, Artificial Sequence
  Description of Artificial Sequence: Synthetic peptide
  Seed: FQTAAQRAM
FMTAAQRAY

SEQ ID NO: 28005 - protein, 9 aa, Artificial Sequence
  Description of Artificial Sequence: Synthetic peptide
  Seed: FQTAAQRAM
FMTAAQRAV

SEQ ID NO: 28006 - protein, 9 aa, Artificial Sequence
  Description of Artificial Sequence: Synthetic peptide
  Seed: FQTAAQRAM
FFTAAQRAL

SEQ ID NO: 28007 - protein, 9 aa, Artificial Sequence
  Description of Artificial Sequence: Synthetic peptide
  Seed: FQTAAQRAM
FFTAAQRAM

SEQ ID NO: 28008 - protein, 9 aa, Artificial Sequence
  Description of Artificial Sequence: Synthetic peptide
  Seed: FQTAAQRAM
FFTAAQRAF

SEQ ID NO: 28009 - protein, 9 aa, Artificial Sequence
  Description of Artificial Sequence: Synthetic peptide
  Seed: FQTAAQRAM
FFTAAQRAY

SEQ ID NO: 28010 - protein, 9 aa, Artificial Sequence
  Description of Artificial Sequence: Synthetic peptide
  Seed: FQTAAQRAM
FPTAAQRAL

SEQ ID NO: 28011 - protein, 9 aa, Artificial Sequence
  Description of Artificial Sequence: Synthetic peptide
  Seed: FQTAAQRAM
FPTAAQRAM

SEQ ID NO: 28012 - protein, 9 aa, Artificial Sequence
  Description of Artificial Sequence: Synthetic peptide
  Seed: FQTAAQRAM
FPTAAQRAF

SEQ ID NO: 28013 - protein, 9 aa, Artificial Sequence
  Description of Artificial Sequence: Synthetic peptide
  Seed: FQTAAQRAM
FPTAAQRAY

SEQ ID NO: 28014 - protein, 9 aa, Artificial Sequence
  Description of Artificial Sequence: Synthetic peptide
  Seed: FQTAAQRAM
FSTAAQRAA

SEQ ID NO: 28015 - protein, 9 aa, Artificial Sequence
  Description of Artificial Sequence: Synthetic peptide
  Seed: FQTAAQRAM
FSTAAQRAH

SEQ ID NO: 28016 - protein, 9 aa, Artificial Sequence
  Description of Artificial Sequence: Synthetic peptide
  Seed: FQTAAQRAM
FSTAAQRAI

SEQ ID NO: 28017 - protein, 9 aa, Artificial Sequence
  Description of Artificial Sequence: Synthetic peptide
  Seed: FQTAAQRAM
FSTAAQRAL

SEQ ID NO: 28018 - protein, 9 aa, Artificial Sequence
  Description of Artificial Sequence: Synthetic peptide
  Seed: FQTAAQRAM
FSTAAQRAM

SEQ ID NO: 28019 - protein, 9 aa, Artificial Sequence
  Description of Artificial Sequence: Synthetic peptide
  Seed: FQTAAQRAM
FSTAAQRAF

SEQ ID NO: 28020 - protein, 9 aa, Artificial Sequence
  Description of Artificial Sequence: Synthetic peptide
  Seed: FQTAAQRAM
FVTAAQRAV

SEQ ID NO: 28021 - protein, 10 aa, Artificial Sequence
  Description of Artificial Sequence: Synthetic peptide
  Seed: FQTAAQRAMM
FATAAQRAMI

SEQ ID NO: 28022 - protein, 10 aa, Artificial Sequence
  Description of Artificial Sequence: Synthetic peptide
  Seed: FQTAAQRAMM
FQTAAQRAMY

SEQ ID NO: 28023 - protein, 10 aa, Artificial Sequence
  Description of Artificial Sequence: Synthetic peptide
  Seed: FQTAAQRAMM
FCTAAQRAML

SEQ ID NO: 28024 - protein, 10 aa, Artificial Sequence
  Description of Artificial Sequence: Synthetic peptide
  Seed: FQTAAQRAMM
FCTAAQRAMM

SEQ ID NO: 28025 - protein, 10 aa, Artificial Sequence
  Description of Artificial Sequence: Synthetic peptide
  Seed: FQTAAQRAMM
FCTAAQRAMV

SEQ ID NO: 28026 - protein, 10 aa, Artificial Sequence
  Description of Artificial Sequence: Synthetic peptide
  Seed: FQTAAQRAMM
FQTAAQRAMA

SEQ ID NO: 28027 - protein, 10 aa, Artificial Sequence
  Description of Artificial Sequence: Synthetic peptide
  Seed: FQTAAQRAMM
FQTAAQRAMH

SEQ ID NO: 28028 - protein, 10 aa, Artificial Sequence
  Description of Artificial Sequence: Synthetic peptide
  Seed: FQTAAQRAMM
FQTAAQRAMI

SEQ ID NO: 28029 - protein, 10 aa, Artificial Sequence
  Description of Artificial Sequence: Synthetic peptide
  Seed: FQTAAQRAMM
FQTAAQRAML

SEQ ID NO: 28030 - protein, 10 aa, Artificial Sequence
  Description of Artificial Sequence: Synthetic peptide
  Seed: FQTAAQRAMM
FQTAAQRAMF

SEQ ID NO: 28031 - protein, 10 aa, Artificial Sequence
  Description of Artificial Sequence: Synthetic peptide
  Seed: FQTAAQRAMM
FQTAAQRAMW

SEQ ID NO: 28032 - protein, 10 aa, Artificial Sequence
  Description of Artificial Sequence: Synthetic peptide
  Seed: FQTAAQRAMM
FATAAQRAML

SEQ ID NO: 28033 - protein, 10 aa, Artificial Sequence
  Description of Artificial Sequence: Synthetic peptide
  Seed: FQTAAQRAMM
FETAAQRAMA

SEQ ID NO: 28034 - protein, 10 aa, Artificial Sequence
  Description of Artificial Sequence: Synthetic peptide
  Seed: FQTAAQRAMM
FETAAQRAMI

SEQ ID NO: 28035 - protein, 10 aa, Artificial Sequence
  Description of Artificial Sequence: Synthetic peptide
  Seed: FQTAAQRAMM
FETAAQRAML

SEQ ID NO: 28036 - protein, 10 aa, Artificial Sequence
  Description of Artificial Sequence: Synthetic peptide
  Seed: FQTAAQRAMM
FETAAQRAMM

SEQ ID NO: 28037 - protein, 10 aa, Artificial Sequence
  Description of Artificial Sequence: Synthetic peptide
  Seed: FQTAAQRAMM
FETAAQRAMF

SEQ ID NO: 28038 - protein, 10 aa, Artificial Sequence
  Description of Artificial Sequence: Synthetic peptide
  Seed: FQTAAQRAMM
FETAAQRAMY

SEQ ID NO: 28039 - protein, 10 aa, Artificial Sequence
  Description of Artificial Sequence: Synthetic peptide
  Seed: FQTAAQRAMM
FETAAQRAMV

SEQ ID NO: 28040 - protein, 10 aa, Artificial Sequence
  Description of Artificial Sequence: Synthetic peptide
  Seed: FQTAAQRAMM
FGTAAQRAMA

SEQ ID NO: 28041 - protein, 10 aa, Artificial Sequence
  Description of Artificial Sequence: Synthetic peptide
  Seed: FQTAAQRAMM
FGTAAQRAMI

SEQ ID NO: 28042 - protein, 10 aa, Artificial Sequence
  Description of Artificial Sequence: Synthetic peptide
  Seed: FQTAAQRAMM
FCTAAQRAMI

SEQ ID NO: 28043 - protein, 10 aa, Artificial Sequence
  Description of Artificial Sequence: Synthetic peptide
  Seed: FQTAAQRAMM
FCTAAQRAMA

SEQ ID NO: 28044 - protein, 10 aa, Artificial Sequence
  Description of Artificial Sequence: Synthetic peptide
  Seed: FQTAAQRAMM
FDTAAQRAMV

SEQ ID NO: 28045 - protein, 10 aa, Artificial Sequence
  Description of Artificial Sequence: Synthetic peptide
  Seed: FQTAAQRAMM
FDTAAQRAMM

SEQ ID NO: 28046 - protein, 10 aa, Artificial Sequence
  Description of Artificial Sequence: Synthetic peptide
  Seed: FQTAAQRAMM
FATAAQRAMM

SEQ ID NO: 28047 - protein, 10 aa, Artificial Sequence
  Description of Artificial Sequence: Synthetic peptide
  Seed: FQTAAQRAMM
FATAAQRAMF

SEQ ID NO: 28048 - protein, 10 aa, Artificial Sequence
  Description of Artificial Sequence: Synthetic peptide
  Seed: FQTAAQRAMM
FATAAQRAMY

SEQ ID NO: 28049 - protein, 10 aa, Artificial Sequence
  Description of Artificial Sequence: Synthetic peptide
  Seed: FQTAAQRAMM
FATAAQRAMV

SEQ ID NO: 28050 - protein, 10 aa, Artificial Sequence
  Description of Artificial Sequence: Synthetic peptide
  Seed: FQTAAQRAMM
FRTAAQRAMA

SEQ ID NO: 28051 - protein, 10 aa, Artificial Sequence
  Description of Artificial Sequence: Synthetic peptide
  Seed: FQTAAQRAMM
FRTAAQRAMI

SEQ ID NO: 28052 - protein, 10 aa, Artificial Sequence
  Description of Artificial Sequence: Synthetic peptide
  Seed: FQTAAQRAMM
FRTAAQRAML

SEQ ID NO: 28053 - protein, 10 aa, Artificial Sequence
  Description of Artificial Sequence: Synthetic peptide
  Seed: FQTAAQRAMM
FRTAAQRAMM

SEQ ID NO: 28054 - protein, 10 aa, Artificial Sequence
  Description of Artificial Sequence: Synthetic peptide
  Seed: FQTAAQRAMM
FRTAAQRAMF

SEQ ID NO: 28055 - protein, 10 aa, Artificial Sequence
  Description of Artificial Sequence: Synthetic peptide
  Seed: FQTAAQRAMM
FRTAAQRAMY

SEQ ID NO: 28056 - protein, 10 aa, Artificial Sequence
  Description of Artificial Sequence: Synthetic peptide
  Seed: FQTAAQRAMM
FRTAAQRAMV

SEQ ID NO: 28057 - protein, 10 aa, Artificial Sequence
  Description of Artificial Sequence: Synthetic peptide
  Seed: FQTAAQRAMM
FNTAAQRAMA

SEQ ID NO: 28058 - protein, 10 aa, Artificial Sequence
  Description of Artificial Sequence: Synthetic peptide
  Seed: FQTAAQRAMM
FNTAAQRAMI

SEQ ID NO: 28059 - protein, 10 aa, Artificial Sequence
  Description of Artificial Sequence: Synthetic peptide
  Seed: FQTAAQRAMM
FNTAAQRAML

SEQ ID NO: 28060 - protein, 10 aa, Artificial Sequence
  Description of Artificial Sequence: Synthetic peptide
  Seed: FQTAAQRAMM
FNTAAQRAMM

SEQ ID NO: 28061 - protein, 10 aa, Artificial Sequence
  Description of Artificial Sequence: Synthetic peptide
  Seed: FQTAAQRAMM
FNTAAQRAMV

SEQ ID NO: 28062 - protein, 10 aa, Artificial Sequence
  Description of Artificial Sequence: Synthetic peptide
  Seed: FQTAAQRAMM
FDTAAQRAMA

SEQ ID NO: 28063 - protein, 10 aa, Artificial Sequence
  Description of Artificial Sequence: Synthetic peptide
  Seed: FQTAAQRAMM
FDTAAQRAMI

SEQ ID NO: 28064 - protein, 10 aa, Artificial Sequence
  Description of Artificial Sequence: Synthetic peptide
  Seed: FQTAAQRAMM
FDTAAQRAML

SEQ ID NO: 28065 - protein, 9 aa, Artificial Sequence
  Description of Artificial Sequence: Synthetic peptide
  Seed: FQTAAQRAM
FMTAAQRAM

SEQ ID NO: 28066 - protein, 9 aa, Artificial Sequence
  Description of Artificial Sequence: Synthetic peptide
  Seed: FQTAAQRAM
FMTAAQRAL

SEQ ID NO: 28067 - protein, 9 aa, Artificial Sequence
  Description of Artificial Sequence: Synthetic peptide
  Seed: FQTAAQRAM
FMTAAQRAI

SEQ ID NO: 28068 - protein, 9 aa, Artificial Sequence
  Description of Artificial Sequence: Synthetic peptide
  Seed: FQTAAQRAM
FCTAAQRAL

SEQ ID NO: 28069 - protein, 9 aa, Artificial Sequence
  Description of Artificial Sequence: Synthetic peptide
  Seed: FQTAAQRAM
FRTAAQRAL

SEQ ID NO: 28070 - protein, 9 aa, Artificial Sequence
  Description of Artificial Sequence: Synthetic peptide
  Seed: FQTAAQRAM
FRTAAQRAM

SEQ ID NO: 28071 - protein, 9 aa, Artificial Sequence
  Description of Artificial Sequence: Synthetic peptide
  Seed: FQTAAQRAM
FRTAAQRAF

SEQ ID NO: 28072 - protein, 9 aa, Artificial Sequence
  Description of Artificial Sequence: Synthetic peptide
  Seed: FQTAAQRAM
FRTAAQRAY

SEQ ID NO: 28073 - protein, 9 aa, Artificial Sequence
  Description of Artificial Sequence: Synthetic peptide
  Seed: FQTAAQRAM
FRTAAQRAV

SEQ ID NO: 28074 - protein, 9 aa, Artificial Sequence
  Description of Artificial Sequence: Synthetic peptide
  Seed: FQTAAQRAM
FNTAAQRAL

SEQ ID NO: 28075 - protein, 9 aa, Artificial Sequence
  Description of Artificial Sequence: Synthetic peptide
  Seed: FQTAAQRAM
FNTAAQRAM

SEQ ID NO: 28076 - protein, 9 aa, Artificial Sequence
  Description of Artificial Sequence: Synthetic peptide
  Seed: FQTAAQRAM
FNTAAQRAF

SEQ ID NO: 28077 - protein, 9 aa, Artificial Sequence
  Description of Artificial Sequence: Synthetic peptide
  Seed: FQTAAQRAM
FNTAAQRAY

SEQ ID NO: 28078 - protein, 9 aa, Artificial Sequence
  Description of Artificial Sequence: Synthetic peptide
  Seed: FQTAAQRAM
FCTAAQRAM

SEQ ID NO: 28079 - protein, 9 aa, Artificial Sequence
  Description of Artificial Sequence: Synthetic peptide
  Seed: FQTAAQRAM
FMTAAQRAH

SEQ ID NO: 28080 - protein, 9 aa, Artificial Sequence
  Description of Artificial Sequence: Synthetic peptide
  Seed: FQTAAQRAM
FCTAAQRAF

SEQ ID NO: 28081 - protein, 9 aa, Artificial Sequence
  Description of Artificial Sequence: Synthetic peptide
  Seed: FQTAAQRAM
FCTAAQRAY

SEQ ID NO: 28082 - protein, 9 aa, Artificial Sequence
  Description of Artificial Sequence: Synthetic peptide
  Seed: FQTAAQRAM
FQTAAQRAA

SEQ ID NO: 28083 - protein, 9 aa, Artificial Sequence
  Description of Artificial Sequence: Synthetic peptide
  Seed: FQTAAQRAM
FQTAAQRAG

SEQ ID NO: 28084 - protein, 9 aa, Artificial Sequence
  Description of Artificial Sequence: Synthetic peptide
  Seed: FQTAAQRAM
FQTAAQRAH

SEQ ID NO: 28085 - protein, 9 aa, Artificial Sequence
  Description of Artificial Sequence: Synthetic peptide
  Seed: FQTAAQRAM
FQTAAQRAL

SEQ ID NO: 28086 - protein, 9 aa, Artificial Sequence
  Description of Artificial Sequence: Synthetic peptide
  Seed: FQTAAQRAM
FQTAAQRAF

SEQ ID NO: 28087 - protein, 9 aa, Artificial Sequence
  Description of Artificial Sequence: Synthetic peptide
  Seed: FQTAAQRAM
FQTAAQRAW

SEQ ID NO: 28088 - protein, 9 aa, Artificial Sequence
  Description of Artificial Sequence: Synthetic peptide
  Seed: FQTAAQRAM
FRTAAQRAI

SEQ ID NO: 28089 - protein, 9 aa, Artificial Sequence
  Description of Artificial Sequence: Synthetic peptide
  Seed: FQTAAQRAM
FRTAAQRAA

SEQ ID NO: 28090 - protein, 9 aa, Artificial Sequence
  Description of Artificial Sequence: Synthetic peptide
  Seed: FQTAAQRAM
FATAAQRAV

SEQ ID NO: 28091 - protein, 9 aa, Artificial Sequence
  Description of Artificial Sequence: Synthetic peptide
  Seed: FQTAAQRAM
FATAAQRAY

SEQ ID NO: 28092 - protein, 9 aa, Artificial Sequence
  Description of Artificial Sequence: Synthetic peptide
  Seed: FQTAAQRAM
FATAAQRAA

SEQ ID NO: 28093 - protein, 9 aa, Artificial Sequence
  Description of Artificial Sequence: Synthetic peptide
  Seed: FQTAAQRAM
FATAAQRAC

SEQ ID NO: 28094 - protein, 9 aa, Artificial Sequence
  Description of Artificial Sequence: Synthetic peptide
  Seed: FQTAAQRAM
FATAAQRAH

SEQ ID NO: 28095 - protein, 9 aa, Artificial Sequence
  Description of Artificial Sequence: Synthetic peptide
  Seed: FQTAAQRAM
FATAAQRAI

SEQ ID NO: 28096 - protein, 9 aa, Artificial Sequence
  Description of Artificial Sequence: Synthetic peptide
  Seed: FQTAAQRAM
FATAAQRAL

SEQ ID NO: 28097 - protein, 9 aa, Artificial Sequence
  Description of Artificial Sequence: Synthetic peptide
  Seed: FQTAAQRAM
FATAAQRAM

SEQ ID NO: 28098 - protein, 9 aa, Artificial Sequence
  Description of Artificial Sequence: Synthetic peptide
  Seed: FQTAAQRAM
FATAAQRAF

SEQ ID NO: 28099 - protein, 9 aa, Artificial Sequence
  Description of Artificial Sequence: Synthetic peptide
  Seed: FQTAAQRAM
FATAAQRAT

SEQ ID NO: 28100 - protein, 9 aa, Artificial Sequence
  Description of Artificial Sequence: Synthetic peptide
  Seed: FQTAAQRAM
FATAAQRAW

SEQ ID NO: 28101 - protein, 9 aa, Artificial Sequence
  Description of Artificial Sequence: Synthetic peptide
  Seed: FQTAAQRAM
FQTAAQRAY

SEQ ID NO: 28102 - protein, 9 aa, Artificial Sequence
  Description of Artificial Sequence: Synthetic peptide
  Seed: FQTAAQRAM
FQTAAQRAV

SEQ ID NO: 28103 - protein, 9 aa, Artificial Sequence
  Description of Artificial Sequence: Synthetic peptide
  Seed: FQTAAQRAM
FETAAQRAL

SEQ ID NO: 28104 - protein, 9 aa, Artificial Sequence
  Description of Artificial Sequence: Synthetic peptide
  Seed: FQTAAQRAM
FITAAQRAW

SEQ ID NO: 28105 - protein, 9 aa, Artificial Sequence
  Description of Artificial Sequence: Synthetic peptide
  Seed: FQTAAQRAM
FITAAQRAV

SEQ ID NO: 28106 - protein, 9 aa, Artificial Sequence
  Description of Artificial Sequence: Synthetic peptide
  Seed: FQTAAQRAM
FLTAAQRAA

SEQ ID NO: 28107 - protein, 9 aa, Artificial Sequence
  Description of Artificial Sequence: Synthetic peptide
  Seed: FQTAAQRAM
FLTAAQRAI

SEQ ID NO: 28108 - protein, 9 aa, Artificial Sequence
  Description of Artificial Sequence: Synthetic peptide
  Seed: FQTAAQRAM
FLTAAQRAL

SEQ ID NO: 28109 - protein, 9 aa, Artificial Sequence
  Description of Artificial Sequence: Synthetic peptide
  Seed: FQTAAQRAM
FLTAAQRAM

SEQ ID NO: 28110 - protein, 9 aa, Artificial Sequence
  Description of Artificial Sequence: Synthetic peptide
  Seed: FQTAAQRAM
FLTAAQRAF

SEQ ID NO: 28111 - protein, 9 aa, Artificial Sequence
  Description of Artificial Sequence: Synthetic peptide
  Seed: FQTAAQRAM
FLTAAQRAT

SEQ ID NO: 28112 - protein, 9 aa, Artificial Sequence
  Description of Artificial Sequence: Synthetic peptide
  Seed: FQTAAQRAM
FLTAAQRAW

SEQ ID NO: 28113 - protein, 9 aa, Artificial Sequence
  Description of Artificial Sequence: Synthetic peptide
  Seed: FQTAAQRAM
FLTAAQRAY

SEQ ID NO: 28114 - protein, 9 aa, Artificial Sequence
  Description of Artificial Sequence: Synthetic peptide
  Seed: FQTAAQRAM
FLTAAQRAV

SEQ ID NO: 28115 - protein, 9 aa, Artificial Sequence
  Description of Artificial Sequence: Synthetic peptide
  Seed: FQTAAQRAM
FKTAAQRAH

SEQ ID NO: 28116 - protein, 9 aa, Artificial Sequence
  Description of Artificial Sequence: Synthetic peptide
  Seed: FQTAAQRAM
FKTAAQRAI

SEQ ID NO: 28117 - protein, 9 aa, Artificial Sequence
  Description of Artificial Sequence: Synthetic peptide
  Seed: FQTAAQRAM
FKTAAQRAL

SEQ ID NO: 28118 - protein, 9 aa, Artificial Sequence
  Description of Artificial Sequence: Synthetic peptide
  Seed: FQTAAQRAM
FKTAAQRAM

SEQ ID NO: 28119 - protein, 9 aa, Artificial Sequence
  Description of Artificial Sequence: Synthetic peptide
  Seed: FQTAAQRAM
FKTAAQRAF

SEQ ID NO: 28120 - protein, 9 aa, Artificial Sequence
  Description of Artificial Sequence: Synthetic peptide
  Seed: FQTAAQRAM
FKTAAQRAW

SEQ ID NO: 28121 - protein, 9 aa, Artificial Sequence
  Description of Artificial Sequence: Synthetic peptide
  Seed: FQTAAQRAM
FKTAAQRAY

SEQ ID NO: 28122 - protein, 9 aa, Artificial Sequence
  Description of Artificial Sequence: Synthetic peptide
  Seed: FQTAAQRAM
FKTAAQRAV

SEQ ID NO: 28123 - protein, 9 aa, Artificial Sequence
  Description of Artificial Sequence: Synthetic peptide
  Seed: FQTAAQRAM
FMTAAQRAA

SEQ ID NO: 28124 - protein, 9 aa, Artificial Sequence
  Description of Artificial Sequence: Synthetic peptide
  Seed: FQTAAQRAM
FITAAQRAY

SEQ ID NO: 28125 - protein, 9 aa, Artificial Sequence
  Description of Artificial Sequence: Synthetic peptide
  Seed: FQTAAQRAM
FITAAQRAF

SEQ ID NO: 28126 - protein, 9 aa, Artificial Sequence
  Description of Artificial Sequence: Synthetic peptide
  Seed: FQTAAQRAM
FETAAQRAM

SEQ ID NO: 28127 - protein, 9 aa, Artificial Sequence
  Description of Artificial Sequence: Synthetic peptide
  Seed: FQTAAQRAM
FITAAQRAM

SEQ ID NO: 28128 - protein, 9 aa, Artificial Sequence
  Description of Artificial Sequence: Synthetic peptide
  Seed: FQTAAQRAM
FETAAQRAF

SEQ ID NO: 28129 - protein, 9 aa, Artificial Sequence
  Description of Artificial Sequence: Synthetic peptide
  Seed: FQTAAQRAM
FETAAQRAY

SEQ ID NO: 28130 - protein, 9 aa, Artificial Sequence
  Description of Artificial Sequence: Synthetic peptide
  Seed: FQTAAQRAM
FGTAAQRAI

SEQ ID NO: 28131 - protein, 9 aa, Artificial Sequence
  Description of Artificial Sequence: Synthetic peptide
  Seed: FQTAAQRAM
FGTAAQRAL

SEQ ID NO: 28132 - protein, 9 aa, Artificial Sequence
  Description of Artificial Sequence: Synthetic peptide
  Seed: FQTAAQRAM
FGTAAQRAM

SEQ ID NO: 28133 - protein, 9 aa, Artificial Sequence
  Description of Artificial Sequence: Synthetic peptide
  Seed: FQTAAQRAM
FGTAAQRAF

SEQ ID NO: 28134 - protein, 9 aa, Artificial Sequence
  Description of Artificial Sequence: Synthetic peptide
  Seed: FQTAAQRAM
FGTAAQRAY

SEQ ID NO: 28135 - protein, 9 aa, Artificial Sequence
  Description of Artificial Sequence: Synthetic peptide
  Seed: FQTAAQRAM
FGTAAQRAV

SEQ ID NO: 28136 - protein, 9 aa, Artificial Sequence
  Description of Artificial Sequence: Synthetic peptide
  Seed: FQTAAQRAM
FHTAAQRAA

SEQ ID NO: 28137 - protein, 9 aa, Artificial Sequence
  Description of Artificial Sequence: Synthetic peptide
  Seed: FQTAAQRAM
FHTAAQRAH

SEQ ID NO: 28138 - protein, 9 aa, Artificial Sequence
  Description of Artificial Sequence: Synthetic peptide
  Seed: FQTAAQRAM
FHTAAQRAI

SEQ ID NO: 28139 - protein, 9 aa, Artificial Sequence
  Description of Artificial Sequence: Synthetic peptide
  Seed: FQTAAQRAM
FHTAAQRAL

SEQ ID NO: 28140 - protein, 9 aa, Artificial Sequence
  Description of Artificial Sequence: Synthetic peptide
  Seed: FQTAAQRAM
FHTAAQRAM

SEQ ID NO: 28141 - protein, 9 aa, Artificial Sequence
  Description of Artificial Sequence: Synthetic peptide
  Seed: FQTAAQRAM
FHTAAQRAF

SEQ ID NO: 28142 - protein, 9 aa, Artificial Sequence
  Description of Artificial Sequence: Synthetic peptide
  Seed: FQTAAQRAM
FHTAAQRAY

SEQ ID NO: 28143 - protein, 9 aa, Artificial Sequence
  Description of Artificial Sequence: Synthetic peptide
  Seed: FQTAAQRAM
FHTAAQRAV

SEQ ID NO: 28144 - protein, 9 aa, Artificial Sequence
  Description of Artificial Sequence: Synthetic peptide
  Seed: FQTAAQRAM
FITAAQRAA

SEQ ID NO: 28145 - protein, 9 aa, Artificial Sequence
  Description of Artificial Sequence: Synthetic peptide
  Seed: FQTAAQRAM
FITAAQRAI

SEQ ID NO: 28146 - protein, 9 aa, Artificial Sequence
  Description of Artificial Sequence: Synthetic peptide
  Seed: FQTAAQRAM
FITAAQRAL

SEQ ID NO: 28147 - protein, 10 aa, Artificial Sequence
  Description of Artificial Sequence: Synthetic peptide
  Seed: FIRGTKVSPR
FIRGTKVSPM

SEQ ID NO: 28148 - protein, 10 aa, Artificial Sequence
  Description of Artificial Sequence: Synthetic peptide
  Seed: FIRGTRVVPR
FIRGTRVVPK

SEQ ID NO: 28149 - protein, 10 aa, Artificial Sequence
  Description of Artificial Sequence: Synthetic peptide
  Seed: FIRGTKVSPR
FVRGTKVSPM

SEQ ID NO: 28150 - protein, 10 aa, Artificial Sequence
  Description of Artificial Sequence: Synthetic peptide
  Seed: FIRGTKVSPR
FVRGTKVSPF

SEQ ID NO: 28151 - protein, 10 aa, Artificial Sequence
  Description of Artificial Sequence: Synthetic peptide
  Seed: FIRGTKVSPR
FVRGTKVSPY

SEQ ID NO: 28152 - protein, 10 aa, Artificial Sequence
  Description of Artificial Sequence: Synthetic peptide
  Seed: FIRGTRVVPR
FARGTRVVPR

SEQ ID NO: 28153 - protein, 10 aa, Artificial Sequence
  Description of Artificial Sequence: Synthetic peptide
  Seed: FIRGTRVVPR
FARGTRVVPK

SEQ ID NO: 28154 - protein, 10 aa, Artificial Sequence
  Description of Artificial Sequence: Synthetic peptide
  Seed: FIRGTRVVPR
FNRGTRVVPR

SEQ ID NO: 28155 - protein, 10 aa, Artificial Sequence
  Description of Artificial Sequence: Synthetic peptide
  Seed: FIRGTRVVPR
FQRGTRVVPR

SEQ ID NO: 28156 - protein, 10 aa, Artificial Sequence
  Description of Artificial Sequence: Synthetic peptide
  Seed: FIRGTRVVPR
FQRGTRVVPK

SEQ ID NO: 28157 - protein, 10 aa, Artificial Sequence
  Description of Artificial Sequence: Synthetic peptide
  Seed: FIRGTRVVPR
FGRGTRVVPR

SEQ ID NO: 28158 - protein, 10 aa, Artificial Sequence
  Description of Artificial Sequence: Synthetic peptide
  Seed: FIRGTRVVPR
FIRGTRVVPM

SEQ ID NO: 28159 - protein, 10 aa, Artificial Sequence
  Description of Artificial Sequence: Synthetic peptide
  Seed: FIRGTRVVPR
FIRGTRVVPY

SEQ ID NO: 28160 - protein, 10 aa, Artificial Sequence
  Description of Artificial Sequence: Synthetic peptide
  Seed: FIRGTRVVPR
FLRGTRVVPR

SEQ ID NO: 28161 - protein, 10 aa, Artificial Sequence
  Description of Artificial Sequence: Synthetic peptide
  Seed: FIRGTRVVPR
FLRGTRVVPK

SEQ ID NO: 28162 - protein, 10 aa, Artificial Sequence
  Description of Artificial Sequence: Synthetic peptide
  Seed: FIRGTRVVPR
FMRGTRVVPR

SEQ ID NO: 28163 - protein, 10 aa, Artificial Sequence
  Description of Artificial Sequence: Synthetic peptide
  Seed: FIRGTRVVPR
FMRGTRVVPK

SEQ ID NO: 28164 - protein, 10 aa, Artificial Sequence
  Description of Artificial Sequence: Synthetic peptide
  Seed: FIRGTRVVPR
FFRGTRVVPR

SEQ ID NO: 28165 - protein, 10 aa, Artificial Sequence
  Description of Artificial Sequence: Synthetic peptide
  Seed: FIRGTRVVPR
FFRGTRVVPK

SEQ ID NO: 28166 - protein, 10 aa, Artificial Sequence
  Description of Artificial Sequence: Synthetic peptide
  Seed: FIRGTRVVPR
FPRGTRVVPR

SEQ ID NO: 28167 - protein, 10 aa, Artificial Sequence
  Description of Artificial Sequence: Synthetic peptide
  Seed: FIRGTRVVPR
FSRGTRVVPR

SEQ ID NO: 28168 - protein, 10 aa, Artificial Sequence
  Description of Artificial Sequence: Synthetic peptide
  Seed: FIRGTKVSPR
FVRGTKVSPK

SEQ ID NO: 28169 - protein, 10 aa, Artificial Sequence
  Description of Artificial Sequence: Synthetic peptide
  Seed: FIRGTKVSPR
FVRGTKVSPR

SEQ ID NO: 28170 - protein, 10 aa, Artificial Sequence
  Description of Artificial Sequence: Synthetic peptide
  Seed: FIRGTKVSPR
FYRGTKVSPK

SEQ ID NO: 28171 - protein, 10 aa, Artificial Sequence
  Description of Artificial Sequence: Synthetic peptide
  Seed: FIRGTKVSPR
FYRGTKVSPR

SEQ ID NO: 28172 - protein, 10 aa, Artificial Sequence
  Description of Artificial Sequence: Synthetic peptide
  Seed: FIRGTKVSPR
FIRGTKVSPF

SEQ ID NO: 28173 - protein, 10 aa, Artificial Sequence
  Description of Artificial Sequence: Synthetic peptide
  Seed: FIRGTKVSPR
FIRGTKVSPY

SEQ ID NO: 28174 - protein, 10 aa, Artificial Sequence
  Description of Artificial Sequence: Synthetic peptide
  Seed: FIRGTKVSPR
FLRGTKVSPR

SEQ ID NO: 28175 - protein, 10 aa, Artificial Sequence
  Description of Artificial Sequence: Synthetic peptide
  Seed: FIRGTKVSPR
FLRGTKVSPK

SEQ ID NO: 28176 - protein, 10 aa, Artificial Sequence
  Description of Artificial Sequence: Synthetic peptide
  Seed: FIRGTKVSPR
FMRGTKVSPR

SEQ ID NO: 28177 - protein, 10 aa, Artificial Sequence
  Description of Artificial Sequence: Synthetic peptide
  Seed: FIRGTKVSPR
FMRGTKVSPK

SEQ ID NO: 28178 - protein, 10 aa, Artificial Sequence
  Description of Artificial Sequence: Synthetic peptide
  Seed: FIRGTKVSPR
FMRGTKVSPY

SEQ ID NO: 28179 - protein, 10 aa, Artificial Sequence
  Description of Artificial Sequence: Synthetic peptide
  Seed: FIRGTKVSPR
FFRGTKVSPR

SEQ ID NO: 28180 - protein, 10 aa, Artificial Sequence
  Description of Artificial Sequence: Synthetic peptide
  Seed: FIRGTKVSPR
FFRGTKVSPK

SEQ ID NO: 28181 - protein, 10 aa, Artificial Sequence
  Description of Artificial Sequence: Synthetic peptide
  Seed: FIRGTKVSPR
FSRGTKVSPR

SEQ ID NO: 28182 - protein, 10 aa, Artificial Sequence
  Description of Artificial Sequence: Synthetic peptide
  Seed: FIRGTKVSPR
FSRGTKVSPK

SEQ ID NO: 28183 - protein, 10 aa, Artificial Sequence
  Description of Artificial Sequence: Synthetic peptide
  Seed: FIRGTKVSPR
FSRGTKVSPY

SEQ ID NO: 28184 - protein, 10 aa, Artificial Sequence
  Description of Artificial Sequence: Synthetic peptide
  Seed: FIRGTKVSPR
FTRGTKVSPR

SEQ ID NO: 28185 - protein, 10 aa, Artificial Sequence
  Description of Artificial Sequence: Synthetic peptide
  Seed: FIRGTKVSPR
FTRGTKVSPK

SEQ ID NO: 28186 - protein, 10 aa, Artificial Sequence
  Description of Artificial Sequence: Synthetic peptide
  Seed: FIRGTKVSPR
FTRGTKVSPM

SEQ ID NO: 28187 - protein, 10 aa, Artificial Sequence
  Description of Artificial Sequence: Synthetic peptide
  Seed: FIRGTKVSPR
FTRGTKVSPF

SEQ ID NO: 28188 - protein, 10 aa, Artificial Sequence
  Description of Artificial Sequence: Synthetic peptide
  Seed: FIRGTKVSPR
FTRGTKVSPY

SEQ ID NO: 28189 - protein, 10 aa, Artificial Sequence
  Description of Artificial Sequence: Synthetic peptide
  Seed: FIRGTKVSPR
FWRGTKVSPR

SEQ ID NO: 28190 - protein, 10 aa, Artificial Sequence
  Description of Artificial Sequence: Synthetic peptide
  Seed: FIRGTKVSPR
FWRGTKVSPK

SEQ ID NO: 28191 - protein, 10 aa, Artificial Sequence
  Description of Artificial Sequence: Synthetic peptide
  Seed: FIRGTRVVPR
FSRGTRVVPK

SEQ ID NO: 28192 - protein, 10 aa, Artificial Sequence
  Description of Artificial Sequence: Synthetic peptide
  Seed: FIRGTRVVPR
FTRGTRVVPR

SEQ ID NO: 28193 - protein, 10 aa, Artificial Sequence
  Description of Artificial Sequence: Synthetic peptide
  Seed: FIRGTRVVPR
FTRGTRVVPK

SEQ ID NO: 28194 - protein, 10 aa, Artificial Sequence
  Description of Artificial Sequence: Synthetic peptide
  Seed: FIRGTRVVPR
FTRGTRVVPM

SEQ ID NO: 28195 - protein, 10 aa, Artificial Sequence
  Description of Artificial Sequence: Synthetic peptide
  Seed: FIRGTRVVPR
FTRGTRVVPY

SEQ ID NO: 28196 - protein, 10 aa, Artificial Sequence
  Description of Artificial Sequence: Synthetic peptide
  Seed: FIRGTRVVPR
FWRGTRVVPR

SEQ ID NO: 28197 - protein, 10 aa, Artificial Sequence
  Description of Artificial Sequence: Synthetic peptide
  Seed: FIRGTRVVPR
FWRGTRVVPK

SEQ ID NO: 28198 - protein, 10 aa, Artificial Sequence
  Description of Artificial Sequence: Synthetic peptide
  Seed: FIRGTRVVPR
FYRGTRVVPR

SEQ ID NO: 28199 - protein, 10 aa, Artificial Sequence
  Description of Artificial Sequence: Synthetic peptide
  Seed: FIRGTRVVPR
FYRGTRVVPK

SEQ ID NO: 28200 - protein, 10 aa, Artificial Sequence
  Description of Artificial Sequence: Synthetic peptide
  Seed: FIRGTRVVPR
FVRGTRVVPR

SEQ ID NO: 28201 - protein, 10 aa, Artificial Sequence
  Description of Artificial Sequence: Synthetic peptide
  Seed: FIRGTRVVPR
FVRGTRVVPK

SEQ ID NO: 28202 - protein, 10 aa, Artificial Sequence
  Description of Artificial Sequence: Synthetic peptide
  Seed: FIRGTRVVPR
FVRGTRVVPM

SEQ ID NO: 28203 - protein, 10 aa, Artificial Sequence
  Description of Artificial Sequence: Synthetic peptide
  Seed: FIRGTRVVPR
FVRGTRVVPF

SEQ ID NO: 28204 - protein, 10 aa, Artificial Sequence
  Description of Artificial Sequence: Synthetic peptide
  Seed: FIRGTRVVPR
FVRGTRVVPY

SEQ ID NO: 28205 - protein, 9 aa, Artificial Sequence
  Description of Artificial Sequence: Synthetic peptide
  Seed: GKWMRELVL
GGWMRELVY

SEQ ID NO: 28206 - protein, 9 aa, Artificial Sequence
  Description of Artificial Sequence: Synthetic peptide
  Seed: GKWMRELVL
GHWMRELVH

SEQ ID NO: 28207 - protein, 9 aa, Artificial Sequence
  Description of Artificial Sequence: Synthetic peptide
  Seed: ILKGKFQTA
ILKGKFQTF

SEQ ID NO: 28208 - protein, 11 aa, Artificial Sequence
  Description of Artificial Sequence: Synthetic peptide
  Seed: HSNLNDTTYQR
HTNLNDTTYQR

SEQ ID NO: 28209 - protein, 11 aa, Artificial Sequence
  Description of Artificial Sequence: Synthetic peptide
  Seed: HSNLNDTTYQR
HHNLNDTTYQR

SEQ ID NO: 28210 - protein, 11 aa, Artificial Sequence
  Description of Artificial Sequence: Synthetic peptide
  Seed: HSNLNDTTYQR
HINLNDTTYQR

SEQ ID NO: 28211 - protein, 11 aa, Artificial Sequence
  Description of Artificial Sequence: Synthetic peptide
  Seed: HSNLNDTTYQR
HLNLNDTTYQR

SEQ ID NO: 28212 - protein, 11 aa, Artificial Sequence
  Description of Artificial Sequence: Synthetic peptide
  Seed: HSNLNDTTYQR
HKNLNDTTYQR

SEQ ID NO: 28213 - protein, 11 aa, Artificial Sequence
  Description of Artificial Sequence: Synthetic peptide
  Seed: HSNLNDTTYQR
HMNLNDTTYQR

SEQ ID NO: 28214 - protein, 11 aa, Artificial Sequence
  Description of Artificial Sequence: Synthetic peptide
  Seed: HSNLNDTTYQR
HMNLNDTTYQK

SEQ ID NO: 28215 - protein, 11 aa, Artificial Sequence
  Description of Artificial Sequence: Synthetic peptide
  Seed: HSNLNDTTYQR
HFNLNDTTYQR

SEQ ID NO: 28216 - protein, 11 aa, Artificial Sequence
  Description of Artificial Sequence: Synthetic peptide
  Seed: HSNLNDTTYQR
HFNLNDTTYQK

SEQ ID NO: 28217 - protein, 11 aa, Artificial Sequence
  Description of Artificial Sequence: Synthetic peptide
  Seed: HSNLNDTTYQR
HPNLNDTTYQR

SEQ ID NO: 28218 - protein, 11 aa, Artificial Sequence
  Description of Artificial Sequence: Synthetic peptide
  Seed: HSNLNDTTYQR
HTNLNDTTYQK

SEQ ID NO: 28219 - protein, 10 aa, Artificial Sequence
  Description of Artificial Sequence: Synthetic peptide
  Seed: IASNENMETM
IASNENMETY

SEQ ID NO: 28220 - protein, 11 aa, Artificial Sequence
  Description of Artificial Sequence: Synthetic peptide
  Seed: HSNLNDTTYQR
HWNLNDTTYQR

SEQ ID NO: 28221 - protein, 11 aa, Artificial Sequence
  Description of Artificial Sequence: Synthetic peptide
  Seed: HSNLNDTTYQR
HYNLNDTTYQR

SEQ ID NO: 28222 - protein, 11 aa, Artificial Sequence
  Description of Artificial Sequence: Synthetic peptide
  Seed: HSNLNDTTYQR
HYNLNDTTYQK

SEQ ID NO: 28223 - protein, 11 aa, Artificial Sequence
  Description of Artificial Sequence: Synthetic peptide
  Seed: HSNLNDTTYQR
HVNLNDTTYQR

SEQ ID NO: 28224 - protein, 11 aa, Artificial Sequence
  Description of Artificial Sequence: Synthetic peptide
  Seed: HSNLNDTTYQR
HVNLNDTTYQK

SEQ ID NO: 28225 - protein, 10 aa, Artificial Sequence
  Description of Artificial Sequence: Synthetic peptide
  Seed: IASNENMDTM
IASNENMDTF

SEQ ID NO: 28226 - protein, 10 aa, Artificial Sequence
  Description of Artificial Sequence: Synthetic peptide
  Seed: IASNENMDTM
IASNENMDTY

SEQ ID NO: 28227 - protein, 10 aa, Artificial Sequence
  Description of Artificial Sequence: Synthetic peptide
  Seed: IASNENMETM
IASNENMETL

SEQ ID NO: 28228 - protein, 10 aa, Artificial Sequence
  Description of Artificial Sequence: Synthetic peptide
  Seed: IASNENMETM
IASNENMETF

SEQ ID NO: 28229 - protein, 11 aa, Artificial Sequence
  Description of Artificial Sequence: Synthetic peptide
  Seed: HSNLNDTTYQR
HGNLNDTTYQR

SEQ ID NO: 28230 - protein, 11 aa, Artificial Sequence
  Description of Artificial Sequence: Synthetic peptide
  Seed: HSNLNDTTYQR
HENLNDTTYQR

SEQ ID NO: 28231 - protein, 11 aa, Artificial Sequence
  Description of Artificial Sequence: Synthetic peptide
  Seed: HSNLNDTTYQR
HQNLNDTTYQR

SEQ ID NO: 28232 - protein, 11 aa, Artificial Sequence
  Description of Artificial Sequence: Synthetic peptide
  Seed: HSNLNDTTYQR
HCNLNDTTYQR

SEQ ID NO: 28233 - protein, 9 aa, Artificial Sequence
  Description of Artificial Sequence: Synthetic peptide
  Seed: HSNLNDTTY
HSNLNDTTW

SEQ ID NO: 28234 - protein, 9 aa, Artificial Sequence
  Description of Artificial Sequence: Synthetic peptide
  Seed: HSNLNDTTY
HSNLNDTTV

SEQ ID NO: 28235 - protein, 9 aa, Artificial Sequence
  Description of Artificial Sequence: Synthetic peptide
  Seed: HSNLNDTTY
HTNLNDTTI

SEQ ID NO: 28236 - protein, 9 aa, Artificial Sequence
  Description of Artificial Sequence: Synthetic peptide
  Seed: HSNLNDTTY
HTNLNDTTL

SEQ ID NO: 28237 - protein, 9 aa, Artificial Sequence
  Description of Artificial Sequence: Synthetic peptide
  Seed: HSNLNDTTY
HTNLNDTTM

SEQ ID NO: 28238 - protein, 9 aa, Artificial Sequence
  Description of Artificial Sequence: Synthetic peptide
  Seed: HSNLNDTTY
HTNLNDTTF

SEQ ID NO: 28239 - protein, 9 aa, Artificial Sequence
  Description of Artificial Sequence: Synthetic peptide
  Seed: HSNLNDTTY
HTNLNDTTW

SEQ ID NO: 28240 - protein, 9 aa, Artificial Sequence
  Description of Artificial Sequence: Synthetic peptide
  Seed: HSNLNDTTY
HTNLNDTTY

SEQ ID NO: 28241 - protein, 9 aa, Artificial Sequence
  Description of Artificial Sequence: Synthetic peptide
  Seed: HSNLNDTTY
HYNLNDTTF

SEQ ID NO: 28242 - protein, 9 aa, Artificial Sequence
  Description of Artificial Sequence: Synthetic peptide
  Seed: HSNLNDTTY
HVNLNDTTL

SEQ ID NO: 28243 - protein, 9 aa, Artificial Sequence
  Description of Artificial Sequence: Synthetic peptide
  Seed: HSNLNDTTY
HVNLNDTTM

SEQ ID NO: 28244 - protein, 9 aa, Artificial Sequence
  Description of Artificial Sequence: Synthetic peptide
  Seed: HSNLNDTTY
HVNLNDTTF

SEQ ID NO: 28245 - protein, 9 aa, Artificial Sequence
  Description of Artificial Sequence: Synthetic peptide
  Seed: HSNLNDTTY
HVNLNDTTW

SEQ ID NO: 28246 - protein, 9 aa, Artificial Sequence
  Description of Artificial Sequence: Synthetic peptide
  Seed: HSNLNDTTY
HVNLNDTTY

SEQ ID NO: 28247 - protein, 11 aa, Artificial Sequence
  Description of Artificial Sequence: Synthetic peptide
  Seed: HSNLNDTTYQR
HANLNDTTYQR

SEQ ID NO: 28248 - protein, 11 aa, Artificial Sequence
  Description of Artificial Sequence: Synthetic peptide
  Seed: HSNLNDTTYQR
HANLNDTTYQK

SEQ ID NO: 28249 - protein, 11 aa, Artificial Sequence
  Description of Artificial Sequence: Synthetic peptide
  Seed: HSNLNDTTYQR
HRNLNDTTYQR

SEQ ID NO: 28250 - protein, 11 aa, Artificial Sequence
  Description of Artificial Sequence: Synthetic peptide
  Seed: HSNLNDTTYQR
HNNLNDTTYQR

SEQ ID NO: 28251 - protein, 11 aa, Artificial Sequence
  Description of Artificial Sequence: Synthetic peptide
  Seed: HSNLNDTTYQR
HDNLNDTTYQR

SEQ ID NO: 28252 - protein, 10 aa, Artificial Sequence
  Description of Artificial Sequence: Synthetic peptide
  Seed: IASNENMETM
IASNENMETW

SEQ ID NO: 28253 - protein, 10 aa, Artificial Sequence
  Description of Artificial Sequence: Synthetic peptide
  Seed: IASNENMETM
IRSNENMETF

SEQ ID NO: 28254 - protein, 9 aa, Artificial Sequence
  Description of Artificial Sequence: Synthetic peptide
  Seed: HSNLNDTTY
HSNLNDTTM

SEQ ID NO: 28255 - protein, 10 aa, Artificial Sequence
  Description of Artificial Sequence: Synthetic peptide
  Seed: IASNENMETM
IMSNENMETW

SEQ ID NO: 28256 - protein, 10 aa, Artificial Sequence
  Description of Artificial Sequence: Synthetic peptide
  Seed: IASNENMETM
IISNENMETW

SEQ ID NO: 28257 - protein, 10 aa, Artificial Sequence
  Description of Artificial Sequence: Synthetic peptide
  Seed: IASNENMETM
IISNENMETY

SEQ ID NO: 28258 - protein, 10 aa, Artificial Sequence
  Description of Artificial Sequence: Synthetic peptide
  Seed: IASNENMETM
ILSNENMETF

SEQ ID NO: 28259 - protein, 10 aa, Artificial Sequence
  Description of Artificial Sequence: Synthetic peptide
  Seed: IASNENMETM
ILSNENMETW

SEQ ID NO: 28260 - protein, 10 aa, Artificial Sequence
  Description of Artificial Sequence: Synthetic peptide
  Seed: IASNENMETM
ILSNENMETY

SEQ ID NO: 28261 - protein, 10 aa, Artificial Sequence
  Description of Artificial Sequence: Synthetic peptide
  Seed: IASNENMETM
IKSNENMETF

SEQ ID NO: 28262 - protein, 10 aa, Artificial Sequence
  Description of Artificial Sequence: Synthetic peptide
  Seed: IASNENMETM
IKSNENMETW

SEQ ID NO: 28263 - protein, 10 aa, Artificial Sequence
  Description of Artificial Sequence: Synthetic peptide
  Seed: IASNENMETM
IKSNENMETY

SEQ ID NO: 28264 - protein, 10 aa, Artificial Sequence
  Description of Artificial Sequence: Synthetic peptide
  Seed: IASNENMETM
IMSNENMETF

SEQ ID NO: 28265 - protein, 10 aa, Artificial Sequence
  Description of Artificial Sequence: Synthetic peptide
  Seed: IASNENMETM
IMSNENMETY

SEQ ID NO: 28266 - protein, 10 aa, Artificial Sequence
  Description of Artificial Sequence: Synthetic peptide
  Seed: IASNENMETM
IRSNENMETW

SEQ ID NO: 28267 - protein, 10 aa, Artificial Sequence
  Description of Artificial Sequence: Synthetic peptide
  Seed: IASNENMETM
IFSNENMETF

SEQ ID NO: 28268 - protein, 10 aa, Artificial Sequence
  Description of Artificial Sequence: Synthetic peptide
  Seed: IASNENMETM
IFSNENMETW

SEQ ID NO: 28269 - protein, 10 aa, Artificial Sequence
  Description of Artificial Sequence: Synthetic peptide
  Seed: IASNENMETM
IFSNENMETY

SEQ ID NO: 28270 - protein, 10 aa, Artificial Sequence
  Description of Artificial Sequence: Synthetic peptide
  Seed: IASNENMETM
IPSNENMETF

SEQ ID NO: 28271 - protein, 10 aa, Artificial Sequence
  Description of Artificial Sequence: Synthetic peptide
  Seed: IASNENMETM
IPSNENMETW

SEQ ID NO: 28272 - protein, 10 aa, Artificial Sequence
  Description of Artificial Sequence: Synthetic peptide
  Seed: IASNENMETM
IPSNENMETY

SEQ ID NO: 28273 - protein, 10 aa, Artificial Sequence
  Description of Artificial Sequence: Synthetic peptide
  Seed: IASNENMETM
ISSNENMETI

SEQ ID NO: 28274 - protein, 10 aa, Artificial Sequence
  Description of Artificial Sequence: Synthetic peptide
  Seed: IASNENMETM
ISSNENMETL

SEQ ID NO: 28275 - protein, 10 aa, Artificial Sequence
  Description of Artificial Sequence: Synthetic peptide
  Seed: IASNENMETM
ISSNENMETM

SEQ ID NO: 28276 - protein, 10 aa, Artificial Sequence
  Description of Artificial Sequence: Synthetic peptide
  Seed: IASNENMETM
IISNENMETF

SEQ ID NO: 28277 - protein, 10 aa, Artificial Sequence
  Description of Artificial Sequence: Synthetic peptide
  Seed: IASNENMETM
IHSNENMETY

SEQ ID NO: 28278 - protein, 10 aa, Artificial Sequence
  Description of Artificial Sequence: Synthetic peptide
  Seed: IASNENMETM
IHSNENMETW

SEQ ID NO: 28279 - protein, 10 aa, Artificial Sequence
  Description of Artificial Sequence: Synthetic peptide
  Seed: IASNENMETM
IHSNENMETF

SEQ ID NO: 28280 - protein, 10 aa, Artificial Sequence
  Description of Artificial Sequence: Synthetic peptide
  Seed: IASNENMETM
IRSNENMETY

SEQ ID NO: 28281 - protein, 10 aa, Artificial Sequence
  Description of Artificial Sequence: Synthetic peptide
  Seed: IASNENMETM
INSNENMETF

SEQ ID NO: 28282 - protein, 10 aa, Artificial Sequence
  Description of Artificial Sequence: Synthetic peptide
  Seed: IASNENMETM
INSNENMETW

SEQ ID NO: 28283 - protein, 10 aa, Artificial Sequence
  Description of Artificial Sequence: Synthetic peptide
  Seed: IASNENMETM
INSNENMETY

SEQ ID NO: 28284 - protein, 10 aa, Artificial Sequence
  Description of Artificial Sequence: Synthetic peptide
  Seed: IASNENMETM
IDSNENMETF

SEQ ID NO: 28285 - protein, 10 aa, Artificial Sequence
  Description of Artificial Sequence: Synthetic peptide
  Seed: IASNENMETM
IDSNENMETW

SEQ ID NO: 28286 - protein, 10 aa, Artificial Sequence
  Description of Artificial Sequence: Synthetic peptide
  Seed: IASNENMETM
IDSNENMETY

SEQ ID NO: 28287 - protein, 10 aa, Artificial Sequence
  Description of Artificial Sequence: Synthetic peptide
  Seed: IASNENMETM
ICSNENMETF

SEQ ID NO: 28288 - protein, 10 aa, Artificial Sequence
  Description of Artificial Sequence: Synthetic peptide
  Seed: IASNENMETM
ICSNENMETW

SEQ ID NO: 28289 - protein, 10 aa, Artificial Sequence
  Description of Artificial Sequence: Synthetic peptide
  Seed: IASNENMETM
ICSNENMETY

SEQ ID NO: 28290 - protein, 10 aa, Artificial Sequence
  Description of Artificial Sequence: Synthetic peptide
  Seed: IASNENMETM
IQSNENMETF

SEQ ID NO: 28291 - protein, 10 aa, Artificial Sequence
  Description of Artificial Sequence: Synthetic peptide
  Seed: IASNENMETM
IQSNENMETW

SEQ ID NO: 28292 - protein, 10 aa, Artificial Sequence
  Description of Artificial Sequence: Synthetic peptide
  Seed: IASNENMETM
IQSNENMETY

SEQ ID NO: 28293 - protein, 10 aa, Artificial Sequence
  Description of Artificial Sequence: Synthetic peptide
  Seed: IASNENMETM
IESNENMETF

SEQ ID NO: 28294 - protein, 10 aa, Artificial Sequence
  Description of Artificial Sequence: Synthetic peptide
  Seed: IASNENMETM
IESNENMETW

SEQ ID NO: 28295 - protein, 10 aa, Artificial Sequence
  Description of Artificial Sequence: Synthetic peptide
  Seed: IASNENMETM
IESNENMETY

SEQ ID NO: 28296 - protein, 10 aa, Artificial Sequence
  Description of Artificial Sequence: Synthetic peptide
  Seed: IASNENMETM
IGSNENMETF

SEQ ID NO: 28297 - protein, 10 aa, Artificial Sequence
  Description of Artificial Sequence: Synthetic peptide
  Seed: IASNENMETM
IGSNENMETW

SEQ ID NO: 28298 - protein, 10 aa, Artificial Sequence
  Description of Artificial Sequence: Synthetic peptide
  Seed: IASNENMETM
IGSNENMETY

SEQ ID NO: 28299 - protein, 9 aa, Artificial Sequence
  Description of Artificial Sequence: Synthetic peptide
  Seed: HSNLNDTTY
HSNLNDTTF

SEQ ID NO: 28300 - protein, 9 aa, Artificial Sequence
  Description of Artificial Sequence: Synthetic peptide
  Seed: HSNLNDTTY
HSNLNDTTL

SEQ ID NO: 28301 - protein, 10 aa, Artificial Sequence
  Description of Artificial Sequence: Synthetic peptide
  Seed: IAYERMCNIL
IMYERMCNIY

SEQ ID NO: 28302 - protein, 9 aa, Artificial Sequence
  Description of Artificial Sequence: Synthetic peptide
  Seed: HSNLNDTTY
HCNLNDTTW

SEQ ID NO: 28303 - protein, 9 aa, Artificial Sequence
  Description of Artificial Sequence: Synthetic peptide
  Seed: HSNLNDTTY
HANLNDTTV

SEQ ID NO: 28304 - protein, 9 aa, Artificial Sequence
  Description of Artificial Sequence: Synthetic peptide
  Seed: HSNLNDTTY
HRNLNDTTM

SEQ ID NO: 28305 - protein, 9 aa, Artificial Sequence
  Description of Artificial Sequence: Synthetic peptide
  Seed: HSNLNDTTY
HRNLNDTTF

SEQ ID NO: 28306 - protein, 9 aa, Artificial Sequence
  Description of Artificial Sequence: Synthetic peptide
  Seed: HSNLNDTTY
HRNLNDTTY

SEQ ID NO: 28307 - protein, 9 aa, Artificial Sequence
  Description of Artificial Sequence: Synthetic peptide
  Seed: HSNLNDTTY
HNNLNDTTF

SEQ ID NO: 28308 - protein, 9 aa, Artificial Sequence
  Description of Artificial Sequence: Synthetic peptide
  Seed: HSNLNDTTY
HNNLNDTTW

SEQ ID NO: 28309 - protein, 9 aa, Artificial Sequence
  Description of Artificial Sequence: Synthetic peptide
  Seed: HSNLNDTTY
HNNLNDTTY

SEQ ID NO: 28310 - protein, 9 aa, Artificial Sequence
  Description of Artificial Sequence: Synthetic peptide
  Seed: HSNLNDTTY
HCNLNDTTM

SEQ ID NO: 28311 - protein, 9 aa, Artificial Sequence
  Description of Artificial Sequence: Synthetic peptide
  Seed: HSNLNDTTY
HCNLNDTTF

SEQ ID NO: 28312 - protein, 9 aa, Artificial Sequence
  Description of Artificial Sequence: Synthetic peptide
  Seed: HSNLNDTTY
HCNLNDTTY

SEQ ID NO: 28313 - protein, 9 aa, Artificial Sequence
  Description of Artificial Sequence: Synthetic peptide
  Seed: HSNLNDTTY
HENLNDTTF

SEQ ID NO: 28314 - protein, 9 aa, Artificial Sequence
  Description of Artificial Sequence: Synthetic peptide
  Seed: HSNLNDTTY
HQNLNDTTA

SEQ ID NO: 28315 - protein, 9 aa, Artificial Sequence
  Description of Artificial Sequence: Synthetic peptide
  Seed: HSNLNDTTY
HQNLNDTTH

SEQ ID NO: 28316 - protein, 9 aa, Artificial Sequence
  Description of Artificial Sequence: Synthetic peptide
  Seed: HSNLNDTTY
HQNLNDTTI

SEQ ID NO: 28317 - protein, 9 aa, Artificial Sequence
  Description of Artificial Sequence: Synthetic peptide
  Seed: HSNLNDTTY
HQNLNDTTL

SEQ ID NO: 28318 - protein, 9 aa, Artificial Sequence
  Description of Artificial Sequence: Synthetic peptide
  Seed: HSNLNDTTY
HQNLNDTTM

SEQ ID NO: 28319 - protein, 9 aa, Artificial Sequence
  Description of Artificial Sequence: Synthetic peptide
  Seed: HSNLNDTTY
HQNLNDTTF

SEQ ID NO: 28320 - protein, 9 aa, Artificial Sequence
  Description of Artificial Sequence: Synthetic peptide
  Seed: HSNLNDTTY
HQNLNDTTW

SEQ ID NO: 28321 - protein, 9 aa, Artificial Sequence
  Description of Artificial Sequence: Synthetic peptide
  Seed: HSNLNDTTY
HQNLNDTTY

SEQ ID NO: 28322 - protein, 9 aa, Artificial Sequence
  Description of Artificial Sequence: Synthetic peptide
  Seed: HSNLNDTTY
HQNLNDTTV

SEQ ID NO: 28323 - protein, 9 aa, Artificial Sequence
  Description of Artificial Sequence: Synthetic peptide
  Seed: HSNLNDTTY
HANLNDTTY

SEQ ID NO: 28324 - protein, 9 aa, Artificial Sequence
  Description of Artificial Sequence: Synthetic peptide
  Seed: HSNLNDTTY
HANLNDTTW

SEQ ID NO: 28325 - protein, 9 aa, Artificial Sequence
  Description of Artificial Sequence: Synthetic peptide
  Seed: HSNLNDTTY
HANLNDTTF

SEQ ID NO: 28326 - protein, 9 aa, Artificial Sequence
  Description of Artificial Sequence: Synthetic peptide
  Seed: HSNLNDTTY
HANLNDTTM

SEQ ID NO: 28327 - protein, 11 aa, Artificial Sequence
  Description of Artificial Sequence: Synthetic peptide
  Seed: HSNLNDATYQR
HINLNDATYQR

SEQ ID NO: 28328 - protein, 11 aa, Artificial Sequence
  Description of Artificial Sequence: Synthetic peptide
  Seed: HSNLNDATYQR
HINLNDATYQK

SEQ ID NO: 28329 - protein, 11 aa, Artificial Sequence
  Description of Artificial Sequence: Synthetic peptide
  Seed: HSNLNDATYQR
HLNLNDATYQR

SEQ ID NO: 28330 - protein, 11 aa, Artificial Sequence
  Description of Artificial Sequence: Synthetic peptide
  Seed: HSNLNDATYQR
HKNLNDATYQR

SEQ ID NO: 28331 - protein, 11 aa, Artificial Sequence
  Description of Artificial Sequence: Synthetic peptide
  Seed: HSNLNDATYQR
HMNLNDATYQR

SEQ ID NO: 28332 - protein, 11 aa, Artificial Sequence
  Description of Artificial Sequence: Synthetic peptide
  Seed: HSNLNDATYQR
HMNLNDATYQK

SEQ ID NO: 28333 - protein, 11 aa, Artificial Sequence
  Description of Artificial Sequence: Synthetic peptide
  Seed: HSNLNDATYQR
HFNLNDATYQR

SEQ ID NO: 28334 - protein, 11 aa, Artificial Sequence
  Description of Artificial Sequence: Synthetic peptide
  Seed: HSNLNDATYQR
HFNLNDATYQK

SEQ ID NO: 28335 - protein, 11 aa, Artificial Sequence
  Description of Artificial Sequence: Synthetic peptide
  Seed: HSNLNDATYQR
HPNLNDATYQR

SEQ ID NO: 28336 - protein, 11 aa, Artificial Sequence
  Description of Artificial Sequence: Synthetic peptide
  Seed: HSNLNDATYQR
HTNLNDATYQR

SEQ ID NO: 28337 - protein, 11 aa, Artificial Sequence
  Description of Artificial Sequence: Synthetic peptide
  Seed: HSNLNDATYQR
HTNLNDATYQK

SEQ ID NO: 28338 - protein, 11 aa, Artificial Sequence
  Description of Artificial Sequence: Synthetic peptide
  Seed: HSNLNDATYQR
HWNLNDATYQR

SEQ ID NO: 28339 - protein, 11 aa, Artificial Sequence
  Description of Artificial Sequence: Synthetic peptide
  Seed: HSNLNDATYQR
HYNLNDATYQR

SEQ ID NO: 28340 - protein, 11 aa, Artificial Sequence
  Description of Artificial Sequence: Synthetic peptide
  Seed: HSNLNDATYQR
HYNLNDATYQK

SEQ ID NO: 28341 - protein, 11 aa, Artificial Sequence
  Description of Artificial Sequence: Synthetic peptide
  Seed: HSNLNDATYQR
HVNLNDATYQR

SEQ ID NO: 28342 - protein, 11 aa, Artificial Sequence
  Description of Artificial Sequence: Synthetic peptide
  Seed: HSNLNDATYQR
HVNLNDATYQK

SEQ ID NO: 28343 - protein, 9 aa, Artificial Sequence
  Description of Artificial Sequence: Synthetic peptide
  Seed: HSNLNDTTY
HANLNDTTH

SEQ ID NO: 28344 - protein, 9 aa, Artificial Sequence
  Description of Artificial Sequence: Synthetic peptide
  Seed: HSNLNDTTY
HANLNDTTI

SEQ ID NO: 28345 - protein, 9 aa, Artificial Sequence
  Description of Artificial Sequence: Synthetic peptide
  Seed: HSNLNDTTY
HANLNDTTL

SEQ ID NO: 28346 - protein, 9 aa, Artificial Sequence
  Description of Artificial Sequence: Synthetic peptide
  Seed: HSNLNDTTY
HENLNDTTM

SEQ ID NO: 28347 - protein, 9 aa, Artificial Sequence
  Description of Artificial Sequence: Synthetic peptide
  Seed: HSNLNDTTY
HENLNDTTY

SEQ ID NO: 28348 - protein, 9 aa, Artificial Sequence
  Description of Artificial Sequence: Synthetic peptide
  Seed: HSNLNDTTY
HSNLNDTTI

SEQ ID NO: 28349 - protein, 9 aa, Artificial Sequence
  Description of Artificial Sequence: Synthetic peptide
  Seed: HSNLNDTTY
HPNLNDTTQ

SEQ ID NO: 28350 - protein, 9 aa, Artificial Sequence
  Description of Artificial Sequence: Synthetic peptide
  Seed: HSNLNDTTY
HMNLNDTTF

SEQ ID NO: 28351 - protein, 9 aa, Artificial Sequence
  Description of Artificial Sequence: Synthetic peptide
  Seed: HSNLNDTTY
HMNLNDTTW

SEQ ID NO: 28352 - protein, 9 aa, Artificial Sequence
  Description of Artificial Sequence: Synthetic peptide
  Seed: HSNLNDTTY
HMNLNDTTY

SEQ ID NO: 28353 - protein, 9 aa, Artificial Sequence
  Description of Artificial Sequence: Synthetic peptide
  Seed: HSNLNDTTY
HMNLNDTTV

SEQ ID NO: 28354 - protein, 9 aa, Artificial Sequence
  Description of Artificial Sequence: Synthetic peptide
  Seed: HSNLNDTTY
HFNLNDTTM

SEQ ID NO: 28355 - protein, 9 aa, Artificial Sequence
  Description of Artificial Sequence: Synthetic peptide
  Seed: HSNLNDTTY
HFNLNDTTF

SEQ ID NO: 28356 - protein, 9 aa, Artificial Sequence
  Description of Artificial Sequence: Synthetic peptide
  Seed: HSNLNDTTY
HFNLNDTTY

SEQ ID NO: 28357 - protein, 9 aa, Artificial Sequence
  Description of Artificial Sequence: Synthetic peptide
  Seed: HSNLNDTTY
HPNLNDTTA

SEQ ID NO: 28358 - protein, 9 aa, Artificial Sequence
  Description of Artificial Sequence: Synthetic peptide
  Seed: HSNLNDTTY
HPNLNDTTC

SEQ ID NO: 28359 - protein, 9 aa, Artificial Sequence
  Description of Artificial Sequence: Synthetic peptide
  Seed: HSNLNDTTY
HPNLNDTTH

SEQ ID NO: 28360 - protein, 9 aa, Artificial Sequence
  Description of Artificial Sequence: Synthetic peptide
  Seed: HSNLNDTTY
HGNLNDTTF

SEQ ID NO: 28361 - protein, 9 aa, Artificial Sequence
  Description of Artificial Sequence: Synthetic peptide
  Seed: HSNLNDTTY
HPNLNDTTI

SEQ ID NO: 28362 - protein, 9 aa, Artificial Sequence
  Description of Artificial Sequence: Synthetic peptide
  Seed: HSNLNDTTY
HPNLNDTTL

SEQ ID NO: 28363 - protein, 9 aa, Artificial Sequence
  Description of Artificial Sequence: Synthetic peptide
  Seed: HSNLNDTTY
HPNLNDTTM

SEQ ID NO: 28364 - protein, 9 aa, Artificial Sequence
  Description of Artificial Sequence: Synthetic peptide
  Seed: HSNLNDTTY
HPNLNDTTF

SEQ ID NO: 28365 - protein, 9 aa, Artificial Sequence
  Description of Artificial Sequence: Synthetic peptide
  Seed: HSNLNDTTY
HPNLNDTTS

SEQ ID NO: 28366 - protein, 9 aa, Artificial Sequence
  Description of Artificial Sequence: Synthetic peptide
  Seed: HSNLNDTTY
HPNLNDTTT

SEQ ID NO: 28367 - protein, 9 aa, Artificial Sequence
  Description of Artificial Sequence: Synthetic peptide
  Seed: HSNLNDTTY
HPNLNDTTW

SEQ ID NO: 28368 - protein, 9 aa, Artificial Sequence
  Description of Artificial Sequence: Synthetic peptide
  Seed: HSNLNDTTY
HPNLNDTTY

SEQ ID NO: 28369 - protein, 9 aa, Artificial Sequence
  Description of Artificial Sequence: Synthetic peptide
  Seed: HSNLNDTTY
HPNLNDTTV

SEQ ID NO: 28370 - protein, 9 aa, Artificial Sequence
  Description of Artificial Sequence: Synthetic peptide
  Seed: HSNLNDTTY
HMNLNDTTM

SEQ ID NO: 28371 - protein, 9 aa, Artificial Sequence
  Description of Artificial Sequence: Synthetic peptide
  Seed: HSNLNDTTY
HMNLNDTTL

SEQ ID NO: 28372 - protein, 9 aa, Artificial Sequence
  Description of Artificial Sequence: Synthetic peptide
  Seed: HSNLNDTTY
HMNLNDTTI

SEQ ID NO: 28373 - protein, 9 aa, Artificial Sequence
  Description of Artificial Sequence: Synthetic peptide
  Seed: HSNLNDTTY
HMNLNDTTH

SEQ ID NO: 28374 - protein, 9 aa, Artificial Sequence
  Description of Artificial Sequence: Synthetic peptide
  Seed: HSNLNDTTY
HGNLNDTTW

SEQ ID NO: 28375 - protein, 9 aa, Artificial Sequence
  Description of Artificial Sequence: Synthetic peptide
  Seed: HSNLNDTTY
HGNLNDTTY

SEQ ID NO: 28376 - protein, 9 aa, Artificial Sequence
  Description of Artificial Sequence: Synthetic peptide
  Seed: HSNLNDTTY
HHNLNDTTM

SEQ ID NO: 28377 - protein, 9 aa, Artificial Sequence
  Description of Artificial Sequence: Synthetic peptide
  Seed: HSNLNDTTY
HHNLNDTTF

SEQ ID NO: 28378 - protein, 9 aa, Artificial Sequence
  Description of Artificial Sequence: Synthetic peptide
  Seed: HSNLNDTTY
HHNLNDTTY

SEQ ID NO: 28379 - protein, 9 aa, Artificial Sequence
  Description of Artificial Sequence: Synthetic peptide
  Seed: HSNLNDTTY
HINLNDTTM

SEQ ID NO: 28380 - protein, 9 aa, Artificial Sequence
  Description of Artificial Sequence: Synthetic peptide
  Seed: HSNLNDTTY
HINLNDTTF

SEQ ID NO: 28381 - protein, 9 aa, Artificial Sequence
  Description of Artificial Sequence: Synthetic peptide
  Seed: HSNLNDTTY
HINLNDTTW

SEQ ID NO: 28382 - protein, 9 aa, Artificial Sequence
  Description of Artificial Sequence: Synthetic peptide
  Seed: HSNLNDTTY
HINLNDTTY

SEQ ID NO: 28383 - protein, 9 aa, Artificial Sequence
  Description of Artificial Sequence: Synthetic peptide
  Seed: HSNLNDTTY
HLNLNDTTM

SEQ ID NO: 28384 - protein, 9 aa, Artificial Sequence
  Description of Artificial Sequence: Synthetic peptide
  Seed: HSNLNDTTY
HLNLNDTTF

SEQ ID NO: 28385 - protein, 9 aa, Artificial Sequence
  Description of Artificial Sequence: Synthetic peptide
  Seed: HSNLNDTTY
HLNLNDTTW

SEQ ID NO: 28386 - protein, 9 aa, Artificial Sequence
  Description of Artificial Sequence: Synthetic peptide
  Seed: HSNLNDTTY
HLNLNDTTY

SEQ ID NO: 28387 - protein, 9 aa, Artificial Sequence
  Description of Artificial Sequence: Synthetic peptide
  Seed: HSNLNDTTY
HKNLNDTTI

SEQ ID NO: 28388 - protein, 9 aa, Artificial Sequence
  Description of Artificial Sequence: Synthetic peptide
  Seed: HSNLNDTTY
HKNLNDTTL

SEQ ID NO: 28389 - protein, 9 aa, Artificial Sequence
  Description of Artificial Sequence: Synthetic peptide
  Seed: HSNLNDTTY
HKNLNDTTM

SEQ ID NO: 28390 - protein, 9 aa, Artificial Sequence
  Description of Artificial Sequence: Synthetic peptide
  Seed: HSNLNDTTY
HKNLNDTTF

SEQ ID NO: 28391 - protein, 9 aa, Artificial Sequence
  Description of Artificial Sequence: Synthetic peptide
  Seed: HSNLNDTTY
HKNLNDTTW

SEQ ID NO: 28392 - protein, 9 aa, Artificial Sequence
  Description of Artificial Sequence: Synthetic peptide
  Seed: HSNLNDTTY
HKNLNDTTY

SEQ ID NO: 28393 - protein, 10 aa, Artificial Sequence
  Description of Artificial Sequence: Synthetic peptide
  Seed: IASNENMETM
ISSNENMETF

SEQ ID NO: 28394 - protein, 10 aa, Artificial Sequence
  Description of Artificial Sequence: Synthetic peptide
  Seed: IASNENMETM
ISSNENMETW

SEQ ID NO: 28395 - protein, 10 aa, Artificial Sequence
  Description of Artificial Sequence: Synthetic peptide
  Seed: IASNENMETM
ISSNENMETY

SEQ ID NO: 28396 - protein, 9 aa, Artificial Sequence
  Description of Artificial Sequence: Synthetic peptide
  Seed: IAYERMCNI
IVYERMCNT

SEQ ID NO: 28397 - protein, 9 aa, Artificial Sequence
  Description of Artificial Sequence: Synthetic peptide
  Seed: IAYERMCNI
IYYERMCNL

SEQ ID NO: 28398 - protein, 9 aa, Artificial Sequence
  Description of Artificial Sequence: Synthetic peptide
  Seed: IAYERMCNI
IYYERMCNM

SEQ ID NO: 28399 - protein, 9 aa, Artificial Sequence
  Description of Artificial Sequence: Synthetic peptide
  Seed: IAYERMCNI
IYYERMCNV

SEQ ID NO: 28400 - protein, 9 aa, Artificial Sequence
  Description of Artificial Sequence: Synthetic peptide
  Seed: IAYERMCNI
IVYERMCNA

SEQ ID NO: 28401 - protein, 9 aa, Artificial Sequence
  Description of Artificial Sequence: Synthetic peptide
  Seed: IAYERMCNI
IVYERMCNC

SEQ ID NO: 28402 - protein, 9 aa, Artificial Sequence
  Description of Artificial Sequence: Synthetic peptide
  Seed: IAYERMCNI
IVYERMCNI

SEQ ID NO: 28403 - protein, 9 aa, Artificial Sequence
  Description of Artificial Sequence: Synthetic peptide
  Seed: IAYERMCNI
IVYERMCNL

SEQ ID NO: 28404 - protein, 9 aa, Artificial Sequence
  Description of Artificial Sequence: Synthetic peptide
  Seed: IAYERMCNI
IVYERMCNM

SEQ ID NO: 28405 - protein, 9 aa, Artificial Sequence
  Description of Artificial Sequence: Synthetic peptide
  Seed: IAYERMCNI
IVYERMCNF

SEQ ID NO: 28406 - protein, 9 aa, Artificial Sequence
  Description of Artificial Sequence: Synthetic peptide
  Seed: IAYERMCNI
IVYERMCNW

SEQ ID NO: 28407 - protein, 10 aa, Artificial Sequence
  Description of Artificial Sequence: Synthetic peptide
  Seed: IAYERMCNIL
IRYERMCNIF

SEQ ID NO: 28408 - protein, 9 aa, Artificial Sequence
  Description of Artificial Sequence: Synthetic peptide
  Seed: IAYERMCNI
IVYERMCNY

SEQ ID NO: 28409 - protein, 9 aa, Artificial Sequence
  Description of Artificial Sequence: Synthetic peptide
  Seed: IAYERMCNI
IVYERMCNV

SEQ ID NO: 28410 - protein, 10 aa, Artificial Sequence
  Description of Artificial Sequence: Synthetic peptide
  Seed: IAYERMCNIL
IAYERMCNII

SEQ ID NO: 28411 - protein, 10 aa, Artificial Sequence
  Description of Artificial Sequence: Synthetic peptide
  Seed: IAYERMCNIL
IAYERMCNIM

SEQ ID NO: 28412 - protein, 10 aa, Artificial Sequence
  Description of Artificial Sequence: Synthetic peptide
  Seed: IAYERMCNIL
IAYERMCNIF

SEQ ID NO: 28413 - protein, 10 aa, Artificial Sequence
  Description of Artificial Sequence: Synthetic peptide
  Seed: IAYERMCNIL
IAYERMCNIW

SEQ ID NO: 28414 - protein, 10 aa, Artificial Sequence
  Description of Artificial Sequence: Synthetic peptide
  Seed: IAYERMCNIL
IAYERMCNIY

SEQ ID NO: 28415 - protein, 10 aa, Artificial Sequence
  Description of Artificial Sequence: Synthetic peptide
  Seed: IAYERMCNIL
IAYERMCNIV

SEQ ID NO: 28416 - protein, 10 aa, Artificial Sequence
  Description of Artificial Sequence: Synthetic peptide
  Seed: IAYERMCNIL
IRYERMCNII

SEQ ID NO: 28417 - protein, 9 aa, Artificial Sequence
  Description of Artificial Sequence: Synthetic peptide
  Seed: IAYERMCNI
IYYERMCNI

SEQ ID NO: 28418 - protein, 9 aa, Artificial Sequence
  Description of Artificial Sequence: Synthetic peptide
  Seed: IAYERMCNI
IWYERMCNV

SEQ ID NO: 28419 - protein, 9 aa, Artificial Sequence
  Description of Artificial Sequence: Synthetic peptide
  Seed: IAYERMCNI
ITYERMCNV

SEQ ID NO: 28420 - protein, 9 aa, Artificial Sequence
  Description of Artificial Sequence: Synthetic peptide
  Seed: IAYERMCNI
ITYERMCNY

SEQ ID NO: 28421 - protein, 9 aa, Artificial Sequence
  Description of Artificial Sequence: Synthetic peptide
  Seed: IAYERMCNI
IPYERMCNM

SEQ ID NO: 28422 - protein, 9 aa, Artificial Sequence
  Description of Artificial Sequence: Synthetic peptide
  Seed: IAYERMCNI
IPYERMCNY

SEQ ID NO: 28423 - protein, 9 aa, Artificial Sequence
  Description of Artificial Sequence: Synthetic peptide
  Seed: IAYERMCNI
IPYERMCNV

SEQ ID NO: 28424 - protein, 9 aa, Artificial Sequence
  Description of Artificial Sequence: Synthetic peptide
  Seed: IAYERMCNI
ISYERMCNA

SEQ ID NO: 28425 - protein, 9 aa, Artificial Sequence
  Description of Artificial Sequence: Synthetic peptide
  Seed: IAYERMCNI
ISYERMCNI

SEQ ID NO: 28426 - protein, 9 aa, Artificial Sequence
  Description of Artificial Sequence: Synthetic peptide
  Seed: IAYERMCNI
ISYERMCNL

SEQ ID NO: 28427 - protein, 9 aa, Artificial Sequence
  Description of Artificial Sequence: Synthetic peptide
  Seed: IAYERMCNI
ISYERMCNM

SEQ ID NO: 28428 - protein, 9 aa, Artificial Sequence
  Description of Artificial Sequence: Synthetic peptide
  Seed: IAYERMCNI
ISYERMCNF

SEQ ID NO: 28429 - protein, 9 aa, Artificial Sequence
  Description of Artificial Sequence: Synthetic peptide
  Seed: IAYERMCNI
ISYERMCNW

SEQ ID NO: 28430 - protein, 9 aa, Artificial Sequence
  Description of Artificial Sequence: Synthetic peptide
  Seed: IAYERMCNI
ISYERMCNY

SEQ ID NO: 28431 - protein, 9 aa, Artificial Sequence
  Description of Artificial Sequence: Synthetic peptide
  Seed: IAYERMCNI
ISYERMCNV

SEQ ID NO: 28432 - protein, 9 aa, Artificial Sequence
  Description of Artificial Sequence: Synthetic peptide
  Seed: IAYERMCNI
ITYERMCNA

SEQ ID NO: 28433 - protein, 9 aa, Artificial Sequence
  Description of Artificial Sequence: Synthetic peptide
  Seed: IAYERMCNI
ITYERMCNC

SEQ ID NO: 28434 - protein, 9 aa, Artificial Sequence
  Description of Artificial Sequence: Synthetic peptide
  Seed: IAYERMCNI
ITYERMCNI

SEQ ID NO: 28435 - protein, 9 aa, Artificial Sequence
  Description of Artificial Sequence: Synthetic peptide
  Seed: IAYERMCNI
ITYERMCNL

SEQ ID NO: 28436 - protein, 9 aa, Artificial Sequence
  Description of Artificial Sequence: Synthetic peptide
  Seed: IAYERMCNI
ITYERMCNM

SEQ ID NO: 28437 - protein, 9 aa, Artificial Sequence
  Description of Artificial Sequence: Synthetic peptide
  Seed: IAYERMCNI
ITYERMCNF

SEQ ID NO: 28438 - protein, 9 aa, Artificial Sequence
  Description of Artificial Sequence: Synthetic peptide
  Seed: IAYERMCNI
ITYERMCNT

SEQ ID NO: 28439 - protein, 9 aa, Artificial Sequence
  Description of Artificial Sequence: Synthetic peptide
  Seed: IAYERMCNI
ITYERMCNW

SEQ ID NO: 28440 - protein, 10 aa, Artificial Sequence
  Description of Artificial Sequence: Synthetic peptide
  Seed: IAYERMCNIL
IRYERMCNIL

SEQ ID NO: 28441 - protein, 10 aa, Artificial Sequence
  Description of Artificial Sequence: Synthetic peptide
  Seed: IAYERMCNIL
IRYERMCNIW

SEQ ID NO: 28442 - protein, 10 aa, Artificial Sequence
  Description of Artificial Sequence: Synthetic peptide
  Seed: IASNENMETM
ITSNENMETL

SEQ ID NO: 28443 - protein, 10 aa, Artificial Sequence
  Description of Artificial Sequence: Synthetic peptide
  Seed: IAYERMCNIL
ILYERMCNII

SEQ ID NO: 28444 - protein, 10 aa, Artificial Sequence
  Description of Artificial Sequence: Synthetic peptide
  Seed: IAYERMCNIL
IHYERMCNII

SEQ ID NO: 28445 - protein, 10 aa, Artificial Sequence
  Description of Artificial Sequence: Synthetic peptide
  Seed: IAYERMCNIL
IHYERMCNIL

SEQ ID NO: 28446 - protein, 10 aa, Artificial Sequence
  Description of Artificial Sequence: Synthetic peptide
  Seed: IAYERMCNIL
IHYERMCNIF

SEQ ID NO: 28447 - protein, 10 aa, Artificial Sequence
  Description of Artificial Sequence: Synthetic peptide
  Seed: IAYERMCNIL
IHYERMCNIW

SEQ ID NO: 28448 - protein, 10 aa, Artificial Sequence
  Description of Artificial Sequence: Synthetic peptide
  Seed: IAYERMCNIL
IIYERMCNII

SEQ ID NO: 28449 - protein, 10 aa, Artificial Sequence
  Description of Artificial Sequence: Synthetic peptide
  Seed: IAYERMCNIL
IIYERMCNIL

SEQ ID NO: 28450 - protein, 10 aa, Artificial Sequence
  Description of Artificial Sequence: Synthetic peptide
  Seed: IAYERMCNIL
IIYERMCNIF

SEQ ID NO: 28451 - protein, 10 aa, Artificial Sequence
  Description of Artificial Sequence: Synthetic peptide
  Seed: IAYERMCNIL
IIYERMCNIW

SEQ ID NO: 28452 - protein, 10 aa, Artificial Sequence
  Description of Artificial Sequence: Synthetic peptide
  Seed: IAYERMCNIL
IIYERMCNIY

SEQ ID NO: 28453 - protein, 10 aa, Artificial Sequence
  Description of Artificial Sequence: Synthetic peptide
  Seed: IAYERMCNIL
ILYERMCNIL

SEQ ID NO: 28454 - protein, 10 aa, Artificial Sequence
  Description of Artificial Sequence: Synthetic peptide
  Seed: IAYERMCNIL
INYERMCNII

SEQ ID NO: 28455 - protein, 10 aa, Artificial Sequence
  Description of Artificial Sequence: Synthetic peptide
  Seed: IAYERMCNIL
ILYERMCNIF

SEQ ID NO: 28456 - protein, 10 aa, Artificial Sequence
  Description of Artificial Sequence: Synthetic peptide
  Seed: IAYERMCNIL
ILYERMCNIW

SEQ ID NO: 28457 - protein, 10 aa, Artificial Sequence
  Description of Artificial Sequence: Synthetic peptide
  Seed: IAYERMCNIL
IKYERMCNII

SEQ ID NO: 28458 - protein, 10 aa, Artificial Sequence
  Description of Artificial Sequence: Synthetic peptide
  Seed: IAYERMCNIL
IKYERMCNIL

SEQ ID NO: 28459 - protein, 10 aa, Artificial Sequence
  Description of Artificial Sequence: Synthetic peptide
  Seed: IAYERMCNIL
IKYERMCNIF

SEQ ID NO: 28460 - protein, 10 aa, Artificial Sequence
  Description of Artificial Sequence: Synthetic peptide
  Seed: IAYERMCNIL
IKYERMCNIW

SEQ ID NO: 28461 - protein, 10 aa, Artificial Sequence
  Description of Artificial Sequence: Synthetic peptide
  Seed: IAYERMCNIL
IMYERMCNII

SEQ ID NO: 28462 - protein, 10 aa, Artificial Sequence
  Description of Artificial Sequence: Synthetic peptide
  Seed: IAYERMCNIL
IMYERMCNIL

SEQ ID NO: 28463 - protein, 10 aa, Artificial Sequence
  Description of Artificial Sequence: Synthetic peptide
  Seed: IAYERMCNIL
IMYERMCNIF

SEQ ID NO: 28464 - protein, 10 aa, Artificial Sequence
  Description of Artificial Sequence: Synthetic peptide
  Seed: IAYERMCNIL
IGYERMCNIW

SEQ ID NO: 28465 - protein, 10 aa, Artificial Sequence
  Description of Artificial Sequence: Synthetic peptide
  Seed: IAYERMCNIL
IGYERMCNIF

SEQ ID NO: 28466 - protein, 10 aa, Artificial Sequence
  Description of Artificial Sequence: Synthetic peptide
  Seed: IAYERMCNIL
IGYERMCNIL

SEQ ID NO: 28467 - protein, 10 aa, Artificial Sequence
  Description of Artificial Sequence: Synthetic peptide
  Seed: IAYERMCNIL
IGYERMCNII

SEQ ID NO: 28468 - protein, 10 aa, Artificial Sequence
  Description of Artificial Sequence: Synthetic peptide
  Seed: IAYERMCNIL
INYERMCNIL

SEQ ID NO: 28469 - protein, 10 aa, Artificial Sequence
  Description of Artificial Sequence: Synthetic peptide
  Seed: IAYERMCNIL
INYERMCNIF

SEQ ID NO: 28470 - protein, 10 aa, Artificial Sequence
  Description of Artificial Sequence: Synthetic peptide
  Seed: IAYERMCNIL
INYERMCNIW

SEQ ID NO: 28471 - protein, 10 aa, Artificial Sequence
  Description of Artificial Sequence: Synthetic peptide
  Seed: IAYERMCNIL
IDYERMCNII

SEQ ID NO: 28472 - protein, 10 aa, Artificial Sequence
  Description of Artificial Sequence: Synthetic peptide
  Seed: IAYERMCNIL
IDYERMCNIL

SEQ ID NO: 28473 - protein, 10 aa, Artificial Sequence
  Description of Artificial Sequence: Synthetic peptide
  Seed: IAYERMCNIL
IDYERMCNIF

SEQ ID NO: 28474 - protein, 10 aa, Artificial Sequence
  Description of Artificial Sequence: Synthetic peptide
  Seed: IAYERMCNIL
IDYERMCNIW

SEQ ID NO: 28475 - protein, 10 aa, Artificial Sequence
  Description of Artificial Sequence: Synthetic peptide
  Seed: IAYERMCNIL
ICYERMCNII

SEQ ID NO: 28476 - protein, 10 aa, Artificial Sequence
  Description of Artificial Sequence: Synthetic peptide
  Seed: IAYERMCNIL
ICYERMCNIL

SEQ ID NO: 28477 - protein, 10 aa, Artificial Sequence
  Description of Artificial Sequence: Synthetic peptide
  Seed: IAYERMCNIL
ICYERMCNIF

SEQ ID NO: 28478 - protein, 10 aa, Artificial Sequence
  Description of Artificial Sequence: Synthetic peptide
  Seed: IAYERMCNIL
ICYERMCNIW

SEQ ID NO: 28479 - protein, 10 aa, Artificial Sequence
  Description of Artificial Sequence: Synthetic peptide
  Seed: IAYERMCNIL
IQYERMCNII

SEQ ID NO: 28480 - protein, 10 aa, Artificial Sequence
  Description of Artificial Sequence: Synthetic peptide
  Seed: IAYERMCNIL
IQYERMCNIL

SEQ ID NO: 28481 - protein, 10 aa, Artificial Sequence
  Description of Artificial Sequence: Synthetic peptide
  Seed: IAYERMCNIL
IQYERMCNIF

SEQ ID NO: 28482 - protein, 10 aa, Artificial Sequence
  Description of Artificial Sequence: Synthetic peptide
  Seed: IAYERMCNIL
IQYERMCNIW

SEQ ID NO: 28483 - protein, 10 aa, Artificial Sequence
  Description of Artificial Sequence: Synthetic peptide
  Seed: IAYERMCNIL
IEYERMCNII

SEQ ID NO: 28484 - protein, 10 aa, Artificial Sequence
  Description of Artificial Sequence: Synthetic peptide
  Seed: IAYERMCNIL
IEYERMCNIL

SEQ ID NO: 28485 - protein, 10 aa, Artificial Sequence
  Description of Artificial Sequence: Synthetic peptide
  Seed: IAYERMCNIL
IEYERMCNIF

SEQ ID NO: 28486 - protein, 10 aa, Artificial Sequence
  Description of Artificial Sequence: Synthetic peptide
  Seed: IAYERMCNIL
IEYERMCNIW

SEQ ID NO: 28487 - protein, 9 aa, Artificial Sequence
  Description of Artificial Sequence: Synthetic peptide
  Seed: IAYERMCNI
IPYERMCNI

SEQ ID NO: 28488 - protein, 9 aa, Artificial Sequence
  Description of Artificial Sequence: Synthetic peptide
  Seed: IAYERMCNI
IFYERMCNV

SEQ ID NO: 28489 - protein, 9 aa, Artificial Sequence
  Description of Artificial Sequence: Synthetic peptide
  Seed: IAYERMCNI
IFYERMCNM

SEQ ID NO: 28490 - protein, 9 aa, Artificial Sequence
  Description of Artificial Sequence: Synthetic peptide
  Seed: IAYERMCNI
ICYERMCNW

SEQ ID NO: 28491 - protein, 9 aa, Artificial Sequence
  Description of Artificial Sequence: Synthetic peptide
  Seed: IAYERMCNI
IRYERMCNI

SEQ ID NO: 28492 - protein, 9 aa, Artificial Sequence
  Description of Artificial Sequence: Synthetic peptide
  Seed: IAYERMCNI
IRYERMCNL

SEQ ID NO: 28493 - protein, 9 aa, Artificial Sequence
  Description of Artificial Sequence: Synthetic peptide
  Seed: IAYERMCNI
IRYERMCNM

SEQ ID NO: 28494 - protein, 9 aa, Artificial Sequence
  Description of Artificial Sequence: Synthetic peptide
  Seed: IAYERMCNI
IRYERMCNF

SEQ ID NO: 28495 - protein, 9 aa, Artificial Sequence
  Description of Artificial Sequence: Synthetic peptide
  Seed: IAYERMCNI
IRYERMCNY

SEQ ID NO: 28496 - protein, 9 aa, Artificial Sequence
  Description of Artificial Sequence: Synthetic peptide
  Seed: IAYERMCNI
IRYERMCNV

SEQ ID NO: 28497 - protein, 9 aa, Artificial Sequence
  Description of Artificial Sequence: Synthetic peptide
  Seed: IAYERMCNI
INYERMCNW

SEQ ID NO: 28498 - protein, 9 aa, Artificial Sequence
  Description of Artificial Sequence: Synthetic peptide
  Seed: IAYERMCNI
INYERMCNY

SEQ ID NO: 28499 - protein, 9 aa, Artificial Sequence
  Description of Artificial Sequence: Synthetic peptide
  Seed: IAYERMCNI
ICYERMCNF

SEQ ID NO: 28500 - protein, 9 aa, Artificial Sequence
  Description of Artificial Sequence: Synthetic peptide
  Seed: IAYERMCNI
ICYERMCNY

SEQ ID NO: 28501 - protein, 9 aa, Artificial Sequence
  Description of Artificial Sequence: Synthetic peptide
  Seed: IAYERMCNI
IMYERMCNV

SEQ ID NO: 28502 - protein, 9 aa, Artificial Sequence
  Description of Artificial Sequence: Synthetic peptide
  Seed: IAYERMCNI
ICYERMCNV

SEQ ID NO: 28503 - protein, 9 aa, Artificial Sequence
  Description of Artificial Sequence: Synthetic peptide
  Seed: IAYERMCNI
IQYERMCNA

SEQ ID NO: 28504 - protein, 9 aa, Artificial Sequence
  Description of Artificial Sequence: Synthetic peptide
  Seed: IAYERMCNI
IQYERMCNC

SEQ ID NO: 28505 - protein, 9 aa, Artificial Sequence
  Description of Artificial Sequence: Synthetic peptide
  Seed: IAYERMCNI
IQYERMCNI

SEQ ID NO: 28506 - protein, 9 aa, Artificial Sequence
  Description of Artificial Sequence: Synthetic peptide
  Seed: IAYERMCNI
IQYERMCNL

SEQ ID NO: 28507 - protein, 9 aa, Artificial Sequence
  Description of Artificial Sequence: Synthetic peptide
  Seed: IAYERMCNI
IQYERMCNM

SEQ ID NO: 28508 - protein, 9 aa, Artificial Sequence
  Description of Artificial Sequence: Synthetic peptide
  Seed: IAYERMCNI
IQYERMCNF

SEQ ID NO: 28509 - protein, 9 aa, Artificial Sequence
  Description of Artificial Sequence: Synthetic peptide
  Seed: IAYERMCNI
IQYERMCNS

SEQ ID NO: 28510 - protein, 9 aa, Artificial Sequence
  Description of Artificial Sequence: Synthetic peptide
  Seed: IAYERMCNI
IQYERMCNT

SEQ ID NO: 28511 - protein, 9 aa, Artificial Sequence
  Description of Artificial Sequence: Synthetic peptide
  Seed: IAYERMCNI
IAYERMCNV

SEQ ID NO: 28512 - protein, 9 aa, Artificial Sequence
  Description of Artificial Sequence: Synthetic peptide
  Seed: IAYERMCNI
IAYERMCNY

SEQ ID NO: 28513 - protein, 9 aa, Artificial Sequence
  Description of Artificial Sequence: Synthetic peptide
  Seed: IAYERMCNI
IAYERMCNW

SEQ ID NO: 28514 - protein, 9 aa, Artificial Sequence
  Description of Artificial Sequence: Synthetic peptide
  Seed: IAYERMCNI
IAYERMCNT

SEQ ID NO: 28515 - protein, 10 aa, Artificial Sequence
  Description of Artificial Sequence: Synthetic peptide
  Seed: IASNENMETM
ITSNENMETM

SEQ ID NO: 28516 - protein, 10 aa, Artificial Sequence
  Description of Artificial Sequence: Synthetic peptide
  Seed: IASNENMETM
ITSNENMETF

SEQ ID NO: 28517 - protein, 10 aa, Artificial Sequence
  Description of Artificial Sequence: Synthetic peptide
  Seed: IASNENMETM
ITSNENMETW

SEQ ID NO: 28518 - protein, 10 aa, Artificial Sequence
  Description of Artificial Sequence: Synthetic peptide
  Seed: IASNENMETM
ITSNENMETY

SEQ ID NO: 28519 - protein, 10 aa, Artificial Sequence
  Description of Artificial Sequence: Synthetic peptide
  Seed: IASNENMETM
IWSNENMETF

SEQ ID NO: 28520 - protein, 10 aa, Artificial Sequence
  Description of Artificial Sequence: Synthetic peptide
  Seed: IASNENMETM
IWSNENMETW

SEQ ID NO: 28521 - protein, 10 aa, Artificial Sequence
  Description of Artificial Sequence: Synthetic peptide
  Seed: IASNENMETM
IWSNENMETY

SEQ ID NO: 28522 - protein, 10 aa, Artificial Sequence
  Description of Artificial Sequence: Synthetic peptide
  Seed: IASNENMETM
IYSNENMETF

SEQ ID NO: 28523 - protein, 10 aa, Artificial Sequence
  Description of Artificial Sequence: Synthetic peptide
  Seed: IASNENMETM
IYSNENMETW

SEQ ID NO: 28524 - protein, 10 aa, Artificial Sequence
  Description of Artificial Sequence: Synthetic peptide
  Seed: IASNENMETM
IYSNENMETY

SEQ ID NO: 28525 - protein, 10 aa, Artificial Sequence
  Description of Artificial Sequence: Synthetic peptide
  Seed: IASNENMETM
IVSNENMETF

SEQ ID NO: 28526 - protein, 10 aa, Artificial Sequence
  Description of Artificial Sequence: Synthetic peptide
  Seed: IASNENMETM
IVSNENMETW

SEQ ID NO: 28527 - protein, 10 aa, Artificial Sequence
  Description of Artificial Sequence: Synthetic peptide
  Seed: IASNENMETM
IVSNENMETY

SEQ ID NO: 28528 - protein, 9 aa, Artificial Sequence
  Description of Artificial Sequence: Synthetic peptide
  Seed: IAYERMCNI
IAYERMCNA

SEQ ID NO: 28529 - protein, 9 aa, Artificial Sequence
  Description of Artificial Sequence: Synthetic peptide
  Seed: IAYERMCNI
IAYERMCNC

SEQ ID NO: 28530 - protein, 9 aa, Artificial Sequence
  Description of Artificial Sequence: Synthetic peptide
  Seed: IAYERMCNI
IAYERMCNH

SEQ ID NO: 28531 - protein, 9 aa, Artificial Sequence
  Description of Artificial Sequence: Synthetic peptide
  Seed: IAYERMCNI
IAYERMCNL

SEQ ID NO: 28532 - protein, 9 aa, Artificial Sequence
  Description of Artificial Sequence: Synthetic peptide
  Seed: IAYERMCNI
IAYERMCNM

SEQ ID NO: 28533 - protein, 9 aa, Artificial Sequence
  Description of Artificial Sequence: Synthetic peptide
  Seed: IAYERMCNI
IAYERMCNF

SEQ ID NO: 28534 - protein, 9 aa, Artificial Sequence
  Description of Artificial Sequence: Synthetic peptide
  Seed: IAYERMCNI
IQYERMCNW

SEQ ID NO: 28535 - protein, 9 aa, Artificial Sequence
  Description of Artificial Sequence: Synthetic peptide
  Seed: IAYERMCNI
IQYERMCNY

SEQ ID NO: 28536 - protein, 9 aa, Artificial Sequence
  Description of Artificial Sequence: Synthetic peptide
  Seed: IAYERMCNI
IQYERMCNV

SEQ ID NO: 28537 - protein, 9 aa, Artificial Sequence
  Description of Artificial Sequence: Synthetic peptide
  Seed: IAYERMCNI
ILYERMCNL

SEQ ID NO: 28538 - protein, 9 aa, Artificial Sequence
  Description of Artificial Sequence: Synthetic peptide
  Seed: IAYERMCNI
ILYERMCNF

SEQ ID NO: 28539 - protein, 9 aa, Artificial Sequence
  Description of Artificial Sequence: Synthetic peptide
  Seed: IAYERMCNI
ILYERMCNP

SEQ ID NO: 28540 - protein, 9 aa, Artificial Sequence
  Description of Artificial Sequence: Synthetic peptide
  Seed: IAYERMCNI
ILYERMCNS

SEQ ID NO: 28541 - protein, 9 aa, Artificial Sequence
  Description of Artificial Sequence: Synthetic peptide
  Seed: IAYERMCNI
ILYERMCNT

SEQ ID NO: 28542 - protein, 9 aa, Artificial Sequence
  Description of Artificial Sequence: Synthetic peptide
  Seed: IAYERMCNI
ILYERMCNW

SEQ ID NO: 28543 - protein, 9 aa, Artificial Sequence
  Description of Artificial Sequence: Synthetic peptide
  Seed: IAYERMCNI
ILYERMCNY

SEQ ID NO: 28544 - protein, 9 aa, Artificial Sequence
  Description of Artificial Sequence: Synthetic peptide
  Seed: IAYERMCNI
ILYERMCNV

SEQ ID NO: 28545 - protein, 9 aa, Artificial Sequence
  Description of Artificial Sequence: Synthetic peptide
  Seed: IAYERMCNI
IMYERMCNA

SEQ ID NO: 28546 - protein, 9 aa, Artificial Sequence
  Description of Artificial Sequence: Synthetic peptide
  Seed: IAYERMCNI
IMYERMCNC

SEQ ID NO: 28547 - protein, 9 aa, Artificial Sequence
  Description of Artificial Sequence: Synthetic peptide
  Seed: IAYERMCNI
IMYERMCNG

SEQ ID NO: 28548 - protein, 9 aa, Artificial Sequence
  Description of Artificial Sequence: Synthetic peptide
  Seed: IAYERMCNI
IMYERMCNI

SEQ ID NO: 28549 - protein, 9 aa, Artificial Sequence
  Description of Artificial Sequence: Synthetic peptide
  Seed: IAYERMCNI
IMYERMCNL

SEQ ID NO: 28550 - protein, 9 aa, Artificial Sequence
  Description of Artificial Sequence: Synthetic peptide
  Seed: IAYERMCNI
IMYERMCNM

SEQ ID NO: 28551 - protein, 9 aa, Artificial Sequence
  Description of Artificial Sequence: Synthetic peptide
  Seed: IAYERMCNI
IMYERMCNF

SEQ ID NO: 28552 - protein, 9 aa, Artificial Sequence
  Description of Artificial Sequence: Synthetic peptide
  Seed: IAYERMCNI
IMYERMCNP

SEQ ID NO: 28553 - protein, 9 aa, Artificial Sequence
  Description of Artificial Sequence: Synthetic peptide
  Seed: IAYERMCNI
IMYERMCNS

SEQ ID NO: 28554 - protein, 9 aa, Artificial Sequence
  Description of Artificial Sequence: Synthetic peptide
  Seed: IAYERMCNI
IMYERMCNT

SEQ ID NO: 28555 - protein, 9 aa, Artificial Sequence
  Description of Artificial Sequence: Synthetic peptide
  Seed: IAYERMCNI
IMYERMCNW

SEQ ID NO: 28556 - protein, 9 aa, Artificial Sequence
  Description of Artificial Sequence: Synthetic peptide
  Seed: IAYERMCNI
IMYERMCNY

SEQ ID NO: 28557 - protein, 9 aa, Artificial Sequence
  Description of Artificial Sequence: Synthetic peptide
  Seed: IAYERMCNI
ILYERMCNM

SEQ ID NO: 28558 - protein, 9 aa, Artificial Sequence
  Description of Artificial Sequence: Synthetic peptide
  Seed: IAYERMCNI
ILYERMCNI

SEQ ID NO: 28559 - protein, 9 aa, Artificial Sequence
  Description of Artificial Sequence: Synthetic peptide
  Seed: IAYERMCNI
IGYERMCNI

SEQ ID NO: 28560 - protein, 9 aa, Artificial Sequence
  Description of Artificial Sequence: Synthetic peptide
  Seed: IAYERMCNI
ILYERMCNG

SEQ ID NO: 28561 - protein, 9 aa, Artificial Sequence
  Description of Artificial Sequence: Synthetic peptide
  Seed: IAYERMCNI
IGYERMCNL

SEQ ID NO: 28562 - protein, 9 aa, Artificial Sequence
  Description of Artificial Sequence: Synthetic peptide
  Seed: IAYERMCNI
IGYERMCNM

SEQ ID NO: 28563 - protein, 9 aa, Artificial Sequence
  Description of Artificial Sequence: Synthetic peptide
  Seed: IAYERMCNI
IGYERMCNF

SEQ ID NO: 28564 - protein, 9 aa, Artificial Sequence
  Description of Artificial Sequence: Synthetic peptide
  Seed: IAYERMCNI
IGYERMCNW

SEQ ID NO: 28565 - protein, 9 aa, Artificial Sequence
  Description of Artificial Sequence: Synthetic peptide
  Seed: IAYERMCNI
IGYERMCNY

SEQ ID NO: 28566 - protein, 9 aa, Artificial Sequence
  Description of Artificial Sequence: Synthetic peptide
  Seed: IAYERMCNI
IGYERMCNV

SEQ ID NO: 28567 - protein, 9 aa, Artificial Sequence
  Description of Artificial Sequence: Synthetic peptide
  Seed: IAYERMCNI
IIYERMCNA

SEQ ID NO: 28568 - protein, 9 aa, Artificial Sequence
  Description of Artificial Sequence: Synthetic peptide
  Seed: IAYERMCNI
IIYERMCNC

SEQ ID NO: 28569 - protein, 9 aa, Artificial Sequence
  Description of Artificial Sequence: Synthetic peptide
  Seed: IAYERMCNI
IIYERMCNI

SEQ ID NO: 28570 - protein, 9 aa, Artificial Sequence
  Description of Artificial Sequence: Synthetic peptide
  Seed: IAYERMCNI
IIYERMCNL

SEQ ID NO: 28571 - protein, 9 aa, Artificial Sequence
  Description of Artificial Sequence: Synthetic peptide
  Seed: IAYERMCNI
IIYERMCNM

SEQ ID NO: 28572 - protein, 9 aa, Artificial Sequence
  Description of Artificial Sequence: Synthetic peptide
  Seed: IAYERMCNI
IIYERMCNF

SEQ ID NO: 28573 - protein, 9 aa, Artificial Sequence
  Description of Artificial Sequence: Synthetic peptide
  Seed: IAYERMCNI
IIYERMCNS

SEQ ID NO: 28574 - protein, 9 aa, Artificial Sequence
  Description of Artificial Sequence: Synthetic peptide
  Seed: IAYERMCNI
IIYERMCNT

SEQ ID NO: 28575 - protein, 9 aa, Artificial Sequence
  Description of Artificial Sequence: Synthetic peptide
  Seed: IAYERMCNI
IIYERMCNW

SEQ ID NO: 28576 - protein, 9 aa, Artificial Sequence
  Description of Artificial Sequence: Synthetic peptide
  Seed: IAYERMCNI
IIYERMCNY

SEQ ID NO: 28577 - protein, 9 aa, Artificial Sequence
  Description of Artificial Sequence: Synthetic peptide
  Seed: IAYERMCNI
IIYERMCNV

SEQ ID NO: 28578 - protein, 9 aa, Artificial Sequence
  Description of Artificial Sequence: Synthetic peptide
  Seed: IAYERMCNI
ILYERMCNA

SEQ ID NO: 28579 - protein, 9 aa, Artificial Sequence
  Description of Artificial Sequence: Synthetic peptide
  Seed: IAYERMCNI
ILYERMCNC

SEQ ID NO: 28580 - protein, 11 aa, Artificial Sequence
  Description of Artificial Sequence: Synthetic peptide
  Seed: HSNLNDATYQR
HHNLNDATYQR

SEQ ID NO: 28581 - protein, 11 aa, Artificial Sequence
  Description of Artificial Sequence: Synthetic peptide
  Seed: HSNLNDATYQR
HGNLNDATYQR

SEQ ID NO: 28582 - protein, 11 aa, Artificial Sequence
  Description of Artificial Sequence: Synthetic peptide
  Seed: HSNLNDATYQR
HENLNDATYQR

SEQ ID NO: 28583 - protein, 9 aa, Artificial Sequence
  Description of Artificial Sequence: Synthetic peptide
  Seed: HSAAFEDLR
HFAAFEDLR

SEQ ID NO: 28584 - protein, 9 aa, Artificial Sequence
  Description of Artificial Sequence: Synthetic peptide
  Seed: HSAAFEDLR
HGAAFEDLK

SEQ ID NO: 28585 - protein, 9 aa, Artificial Sequence
  Description of Artificial Sequence: Synthetic peptide
  Seed: HSAAFEDLR
HIAAFEDLR

SEQ ID NO: 28586 - protein, 9 aa, Artificial Sequence
  Description of Artificial Sequence: Synthetic peptide
  Seed: HSAAFEDLR
HIAAFEDLK

SEQ ID NO: 28587 - protein, 9 aa, Artificial Sequence
  Description of Artificial Sequence: Synthetic peptide
  Seed: HSAAFEDLR
HIAAFEDLY

SEQ ID NO: 28588 - protein, 9 aa, Artificial Sequence
  Description of Artificial Sequence: Synthetic peptide
  Seed: HSAAFEDLR
HLAAFEDLR

SEQ ID NO: 28589 - protein, 9 aa, Artificial Sequence
  Description of Artificial Sequence: Synthetic peptide
  Seed: HSAAFEDLR
HLAAFEDLK

SEQ ID NO: 28590 - protein, 9 aa, Artificial Sequence
  Description of Artificial Sequence: Synthetic peptide
  Seed: HSAAFEDLR
HMAAFEDLR

SEQ ID NO: 28591 - protein, 9 aa, Artificial Sequence
  Description of Artificial Sequence: Synthetic peptide
  Seed: HSAAFEDLR
HMAAFEDLK

SEQ ID NO: 28592 - protein, 9 aa, Artificial Sequence
  Description of Artificial Sequence: Synthetic peptide
  Seed: HSAAFEDLR
HMAAFEDLY

SEQ ID NO: 28593 - protein, 9 aa, Artificial Sequence
  Description of Artificial Sequence: Synthetic peptide
  Seed: HSAAFEDLR
HFAAFEDLK

SEQ ID NO: 28594 - protein, 9 aa, Artificial Sequence
  Description of Artificial Sequence: Synthetic peptide
  Seed: HSAAFEDLR
HYAAFEDLR

SEQ ID NO: 28595 - protein, 9 aa, Artificial Sequence
  Description of Artificial Sequence: Synthetic peptide
  Seed: HSAAFEDLR
HPAAFEDLR

SEQ ID NO: 28596 - protein, 9 aa, Artificial Sequence
  Description of Artificial Sequence: Synthetic peptide
  Seed: HSAAFEDLR
HPAAFEDLK

SEQ ID NO: 28597 - protein, 9 aa, Artificial Sequence
  Description of Artificial Sequence: Synthetic peptide
  Seed: HSAAFEDLR
HSAAFEDLK

SEQ ID NO: 28598 - protein, 9 aa, Artificial Sequence
  Description of Artificial Sequence: Synthetic peptide
  Seed: HSAAFEDLR
HSAAFEDLY

SEQ ID NO: 28599 - protein, 9 aa, Artificial Sequence
  Description of Artificial Sequence: Synthetic peptide
  Seed: HSAAFEDLR
HTAAFEDLR

SEQ ID NO: 28600 - protein, 9 aa, Artificial Sequence
  Description of Artificial Sequence: Synthetic peptide
  Seed: HSAAFEDLR
HTAAFEDLH

SEQ ID NO: 28601 - protein, 9 aa, Artificial Sequence
  Description of Artificial Sequence: Synthetic peptide
  Seed: HSAAFEDLR
HTAAFEDLK

SEQ ID NO: 28602 - protein, 9 aa, Artificial Sequence
  Description of Artificial Sequence: Synthetic peptide
  Seed: HSAAFEDLR
HTAAFEDLY

SEQ ID NO: 28603 - protein, 9 aa, Artificial Sequence
  Description of Artificial Sequence: Synthetic peptide
  Seed: HSAAFEDLR
HWAAFEDLR

SEQ ID NO: 28604 - protein, 9 aa, Artificial Sequence
  Description of Artificial Sequence: Synthetic peptide
  Seed: HSAAFEDLR
HGAAFEDLR

SEQ ID NO: 28605 - protein, 9 aa, Artificial Sequence
  Description of Artificial Sequence: Synthetic peptide
  Seed: HSAAFEDLR
HQAAFEDLK

SEQ ID NO: 28606 - protein, 9 aa, Artificial Sequence
  Description of Artificial Sequence: Synthetic peptide
  Seed: HSAAFEDLR
HQAAFEDLR

SEQ ID NO: 28607 - protein, 9 aa, Artificial Sequence
  Description of Artificial Sequence: Synthetic peptide
  Seed: HSAAFEDLR
HCAAFEDLR

SEQ ID NO: 28608 - protein, 9 aa, Artificial Sequence
  Description of Artificial Sequence: Synthetic peptide
  Seed: HMMIWHSNL
HTMIWHSNF

SEQ ID NO: 28609 - protein, 9 aa, Artificial Sequence
  Description of Artificial Sequence: Synthetic peptide
  Seed: HMMIWHSNL
HTMIWHSNT

SEQ ID NO: 28610 - protein, 9 aa, Artificial Sequence
  Description of Artificial Sequence: Synthetic peptide
  Seed: HMMIWHSNL
HTMIWHSNW

SEQ ID NO: 28611 - protein, 9 aa, Artificial Sequence
  Description of Artificial Sequence: Synthetic peptide
  Seed: HMMIWHSNL
HTMIWHSNY

SEQ ID NO: 28612 - protein, 9 aa, Artificial Sequence
  Description of Artificial Sequence: Synthetic peptide
  Seed: HMMIWHSNL
HTMIWHSNV

SEQ ID NO: 28613 - protein, 9 aa, Artificial Sequence
  Description of Artificial Sequence: Synthetic peptide
  Seed: HMMIWHSNL
HYMIWHSNW

SEQ ID NO: 28614 - protein, 9 aa, Artificial Sequence
  Description of Artificial Sequence: Synthetic peptide
  Seed: HMMIWHSNL
HVMIWHSNA

SEQ ID NO: 28615 - protein, 9 aa, Artificial Sequence
  Description of Artificial Sequence: Synthetic peptide
  Seed: HMMIWHSNL
HVMIWHSNI

SEQ ID NO: 28616 - protein, 9 aa, Artificial Sequence
  Description of Artificial Sequence: Synthetic peptide
  Seed: HMMIWHSNL
HVMIWHSNL

SEQ ID NO: 28617 - protein, 9 aa, Artificial Sequence
  Description of Artificial Sequence: Synthetic peptide
  Seed: HMMIWHSNL
HVMIWHSNM

SEQ ID NO: 28618 - protein, 9 aa, Artificial Sequence
  Description of Artificial Sequence: Synthetic peptide
  Seed: HMMIWHSNL
HVMIWHSNF

SEQ ID NO: 28619 - protein, 9 aa, Artificial Sequence
  Description of Artificial Sequence: Synthetic peptide
  Seed: HMMIWHSNL
HVMIWHSNW

SEQ ID NO: 28620 - protein, 9 aa, Artificial Sequence
  Description of Artificial Sequence: Synthetic peptide
  Seed: HMMIWHSNL
HVMIWHSNY

SEQ ID NO: 28621 - protein, 9 aa, Artificial Sequence
  Description of Artificial Sequence: Synthetic peptide
  Seed: HMMIWHSNL
HVMIWHSNV

SEQ ID NO: 28622 - protein, 9 aa, Artificial Sequence
  Description of Artificial Sequence: Synthetic peptide
  Seed: HSAAFEDLR
HAAAFEDLR

SEQ ID NO: 28623 - protein, 9 aa, Artificial Sequence
  Description of Artificial Sequence: Synthetic peptide
  Seed: HSAAFEDLR
HAAAFEDLK

SEQ ID NO: 28624 - protein, 9 aa, Artificial Sequence
  Description of Artificial Sequence: Synthetic peptide
  Seed: HSAAFEDLR
HAAAFEDLY

SEQ ID NO: 28625 - protein, 9 aa, Artificial Sequence
  Description of Artificial Sequence: Synthetic peptide
  Seed: HSAAFEDLR
HNAAFEDLR

SEQ ID NO: 28626 - protein, 9 aa, Artificial Sequence
  Description of Artificial Sequence: Synthetic peptide
  Seed: HSAAFEDLR
HNAAFEDLK

SEQ ID NO: 28627 - protein, 9 aa, Artificial Sequence
  Description of Artificial Sequence: Synthetic peptide
  Seed: HSAAFEDLR
HWAAFEDLK

SEQ ID NO: 28628 - protein, 9 aa, Artificial Sequence
  Description of Artificial Sequence: Synthetic peptide
  Seed: HSAAFEDLR
HYAAFEDLK

SEQ ID NO: 28629 - protein, 11 aa, Artificial Sequence
  Description of Artificial Sequence: Synthetic peptide
  Seed: HSAAFEDLRLL
HDAAFEDLRLY

SEQ ID NO: 28630 - protein, 10 aa, Artificial Sequence
  Description of Artificial Sequence: Synthetic peptide
  Seed: HSAAFEDLRL
HVAAFEDLRY

SEQ ID NO: 28631 - protein, 10 aa, Artificial Sequence
  Description of Artificial Sequence: Synthetic peptide
  Seed: HSAAFEDLRL
HSAAFEDLRY

SEQ ID NO: 28632 - protein, 10 aa, Artificial Sequence
  Description of Artificial Sequence: Synthetic peptide
  Seed: HSAAFEDLRL
HTAAFEDLRF

SEQ ID NO: 28633 - protein, 10 aa, Artificial Sequence
  Description of Artificial Sequence: Synthetic peptide
  Seed: HSAAFEDLRL
HTAAFEDLRW

SEQ ID NO: 28634 - protein, 10 aa, Artificial Sequence
  Description of Artificial Sequence: Synthetic peptide
  Seed: HSAAFEDLRL
HTAAFEDLRY

SEQ ID NO: 28635 - protein, 10 aa, Artificial Sequence
  Description of Artificial Sequence: Synthetic peptide
  Seed: HSAAFEDLRL
HWAAFEDLRW

SEQ ID NO: 28636 - protein, 10 aa, Artificial Sequence
  Description of Artificial Sequence: Synthetic peptide
  Seed: HSAAFEDLRL
HYAAFEDLRW

SEQ ID NO: 28637 - protein, 10 aa, Artificial Sequence
  Description of Artificial Sequence: Synthetic peptide
  Seed: HSAAFEDLRL
HVAAFEDLRF

SEQ ID NO: 28638 - protein, 10 aa, Artificial Sequence
  Description of Artificial Sequence: Synthetic peptide
  Seed: HSAAFEDLRL
HVAAFEDLRW

SEQ ID NO: 28639 - protein, 11 aa, Artificial Sequence
  Description of Artificial Sequence: Synthetic peptide
  Seed: HSAAFEDLRLL
HAAAFEDLRLF

SEQ ID NO: 28640 - protein, 9 aa, Artificial Sequence
  Description of Artificial Sequence: Synthetic peptide
  Seed: HSAAFEDLR
HVAAFEDLR

SEQ ID NO: 28641 - protein, 11 aa, Artificial Sequence
  Description of Artificial Sequence: Synthetic peptide
  Seed: HSAAFEDLRLL
HAAAFEDLRLW

SEQ ID NO: 28642 - protein, 11 aa, Artificial Sequence
  Description of Artificial Sequence: Synthetic peptide
  Seed: HSAAFEDLRLL
HAAAFEDLRLY

SEQ ID NO: 28643 - protein, 11 aa, Artificial Sequence
  Description of Artificial Sequence: Synthetic peptide
  Seed: HSAAFEDLRLL
HRAAFEDLRLF

SEQ ID NO: 28644 - protein, 11 aa, Artificial Sequence
  Description of Artificial Sequence: Synthetic peptide
  Seed: HSAAFEDLRLL
HRAAFEDLRLW

SEQ ID NO: 28645 - protein, 11 aa, Artificial Sequence
  Description of Artificial Sequence: Synthetic peptide
  Seed: HSAAFEDLRLL
HRAAFEDLRLY

SEQ ID NO: 28646 - protein, 11 aa, Artificial Sequence
  Description of Artificial Sequence: Synthetic peptide
  Seed: HSAAFEDLRLL
HNAAFEDLRLF

SEQ ID NO: 28647 - protein, 11 aa, Artificial Sequence
  Description of Artificial Sequence: Synthetic peptide
  Seed: HSAAFEDLRLL
HNAAFEDLRLW

SEQ ID NO: 28648 - protein, 11 aa, Artificial Sequence
  Description of Artificial Sequence: Synthetic peptide
  Seed: HSAAFEDLRLL
HNAAFEDLRLY

SEQ ID NO: 28649 - protein, 11 aa, Artificial Sequence
  Description of Artificial Sequence: Synthetic peptide
  Seed: HSAAFEDLRLL
HDAAFEDLRLF

SEQ ID NO: 28650 - protein, 10 aa, Artificial Sequence
  Description of Artificial Sequence: Synthetic peptide
  Seed: HSAAFEDLRL
HSAAFEDLRW

SEQ ID NO: 28651 - protein, 10 aa, Artificial Sequence
  Description of Artificial Sequence: Synthetic peptide
  Seed: HSAAFEDLRL
HSAAFEDLRF

SEQ ID NO: 28652 - protein, 10 aa, Artificial Sequence
  Description of Artificial Sequence: Synthetic peptide
  Seed: HSAAFEDLRL
HSAAFEDLRM

SEQ ID NO: 28653 - protein, 9 aa, Artificial Sequence
  Description of Artificial Sequence: Synthetic peptide
  Seed: HSAAFEDLR
HVAAFEDLK

SEQ ID NO: 28654 - protein, 9 aa, Artificial Sequence
  Description of Artificial Sequence: Synthetic peptide
  Seed: HSAAFEDLR
HVAAFEDLY

SEQ ID NO: 28655 - protein, 10 aa, Artificial Sequence
  Description of Artificial Sequence: Synthetic peptide
  Seed: HSAAFEDLRL
HAAAFEDLRF

SEQ ID NO: 28656 - protein, 10 aa, Artificial Sequence
  Description of Artificial Sequence: Synthetic peptide
  Seed: HSAAFEDLRL
HAAAFEDLRW

SEQ ID NO: 28657 - protein, 10 aa, Artificial Sequence
  Description of Artificial Sequence: Synthetic peptide
  Seed: HSAAFEDLRL
HAAAFEDLRY

SEQ ID NO: 28658 - protein, 10 aa, Artificial Sequence
  Description of Artificial Sequence: Synthetic peptide
  Seed: HSAAFEDLRL
HRAAFEDLRW

SEQ ID NO: 28659 - protein, 10 aa, Artificial Sequence
  Description of Artificial Sequence: Synthetic peptide
  Seed: HSAAFEDLRL
HNAAFEDLRW

SEQ ID NO: 28660 - protein, 10 aa, Artificial Sequence
  Description of Artificial Sequence: Synthetic peptide
  Seed: HSAAFEDLRL
HDAAFEDLRW

SEQ ID NO: 28661 - protein, 10 aa, Artificial Sequence
  Description of Artificial Sequence: Synthetic peptide
  Seed: HSAAFEDLRL
HCAAFEDLRW

SEQ ID NO: 28662 - protein, 10 aa, Artificial Sequence
  Description of Artificial Sequence: Synthetic peptide
  Seed: HSAAFEDLRL
HQAAFEDLRW

SEQ ID NO: 28663 - protein, 10 aa, Artificial Sequence
  Description of Artificial Sequence: Synthetic peptide
  Seed: HSAAFEDLRL
HEAAFEDLRW

SEQ ID NO: 28664 - protein, 10 aa, Artificial Sequence
  Description of Artificial Sequence: Synthetic peptide
  Seed: HSAAFEDLRL
HGAAFEDLRW

SEQ ID NO: 28665 - protein, 10 aa, Artificial Sequence
  Description of Artificial Sequence: Synthetic peptide
  Seed: HSAAFEDLRL
HHAAFEDLRW

SEQ ID NO: 28666 - protein, 10 aa, Artificial Sequence
  Description of Artificial Sequence: Synthetic peptide
  Seed: HSAAFEDLRL
HIAAFEDLRW

SEQ ID NO: 28667 - protein, 10 aa, Artificial Sequence
  Description of Artificial Sequence: Synthetic peptide
  Seed: HSAAFEDLRL
HLAAFEDLRW

SEQ ID NO: 28668 - protein, 10 aa, Artificial Sequence
  Description of Artificial Sequence: Synthetic peptide
  Seed: HSAAFEDLRL
HKAAFEDLRW

SEQ ID NO: 28669 - protein, 10 aa, Artificial Sequence
  Description of Artificial Sequence: Synthetic peptide
  Seed: HSAAFEDLRL
HMAAFEDLRW

SEQ ID NO: 28670 - protein, 10 aa, Artificial Sequence
  Description of Artificial Sequence: Synthetic peptide
  Seed: HSAAFEDLRL
HFAAFEDLRW

SEQ ID NO: 28671 - protein, 10 aa, Artificial Sequence
  Description of Artificial Sequence: Synthetic peptide
  Seed: HSAAFEDLRL
HPAAFEDLRW

SEQ ID NO: 28672 - protein, 9 aa, Artificial Sequence
  Description of Artificial Sequence: Synthetic peptide
  Seed: HMMIWHSNL
HTMIWHSNM

SEQ ID NO: 28673 - protein, 9 aa, Artificial Sequence
  Description of Artificial Sequence: Synthetic peptide
  Seed: HMMIWHSNL
HTMIWHSNL

SEQ ID NO: 28674 - protein, 9 aa, Artificial Sequence
  Description of Artificial Sequence: Synthetic peptide
  Seed: HMMIWHSNL
HTMIWHSNI

SEQ ID NO: 28675 - protein, 9 aa, Artificial Sequence
  Description of Artificial Sequence: Synthetic peptide
  Seed: HMMIWHSNL
HNMIWHSNV

SEQ ID NO: 28676 - protein, 9 aa, Artificial Sequence
  Description of Artificial Sequence: Synthetic peptide
  Seed: HMMIWHSNL
HAMIWHSNI

SEQ ID NO: 28677 - protein, 9 aa, Artificial Sequence
  Description of Artificial Sequence: Synthetic peptide
  Seed: HMMIWHSNL
HAMIWHSNL

SEQ ID NO: 28678 - protein, 9 aa, Artificial Sequence
  Description of Artificial Sequence: Synthetic peptide
  Seed: HMMIWHSNL
HAMIWHSNM

SEQ ID NO: 28679 - protein, 9 aa, Artificial Sequence
  Description of Artificial Sequence: Synthetic peptide
  Seed: HMMIWHSNL
HAMIWHSNF

SEQ ID NO: 28680 - protein, 9 aa, Artificial Sequence
  Description of Artificial Sequence: Synthetic peptide
  Seed: HMMIWHSNL
HAMIWHSNW

SEQ ID NO: 28681 - protein, 9 aa, Artificial Sequence
  Description of Artificial Sequence: Synthetic peptide
  Seed: HMMIWHSNL
HAMIWHSNV

SEQ ID NO: 28682 - protein, 9 aa, Artificial Sequence
  Description of Artificial Sequence: Synthetic peptide
  Seed: HMMIWHSNL
HQMIWHSNA

SEQ ID NO: 28683 - protein, 9 aa, Artificial Sequence
  Description of Artificial Sequence: Synthetic peptide
  Seed: HMMIWHSNL
HTMIWHSNA

SEQ ID NO: 28684 - protein, 9 aa, Artificial Sequence
  Description of Artificial Sequence: Synthetic peptide
  Seed: HMMIWHSNL
HQMIWHSNI

SEQ ID NO: 28685 - protein, 9 aa, Artificial Sequence
  Description of Artificial Sequence: Synthetic peptide
  Seed: HMMIWHSNL
HQMIWHSNL

SEQ ID NO: 28686 - protein, 9 aa, Artificial Sequence
  Description of Artificial Sequence: Synthetic peptide
  Seed: HMMIWHSNL
HQMIWHSNM

SEQ ID NO: 28687 - protein, 9 aa, Artificial Sequence
  Description of Artificial Sequence: Synthetic peptide
  Seed: HMMIWHSNL
HQMIWHSNF

SEQ ID NO: 28688 - protein, 9 aa, Artificial Sequence
  Description of Artificial Sequence: Synthetic peptide
  Seed: HMMIWHSNL
HQMIWHSNW

SEQ ID NO: 28689 - protein, 9 aa, Artificial Sequence
  Description of Artificial Sequence: Synthetic peptide
  Seed: HMMIWHSNL
HQMIWHSNY

SEQ ID NO: 28690 - protein, 9 aa, Artificial Sequence
  Description of Artificial Sequence: Synthetic peptide
  Seed: HMMIWHSNL
HQMIWHSNV

SEQ ID NO: 28691 - protein, 9 aa, Artificial Sequence
  Description of Artificial Sequence: Synthetic peptide
  Seed: HMMIWHSNL
HGMIWHSNW

SEQ ID NO: 28692 - protein, 9 aa, Artificial Sequence
  Description of Artificial Sequence: Synthetic peptide
  Seed: HMMIWHSNL
HIMIWHSNA

SEQ ID NO: 28693 - protein, 9 aa, Artificial Sequence
  Description of Artificial Sequence: Synthetic peptide
  Seed: HLMIWHSNL
HSMIWHSNA

SEQ ID NO: 28694 - protein, 9 aa, Artificial Sequence
  Description of Artificial Sequence: Synthetic peptide
  Seed: HLMIWHSNL
HSMIWHSNI

SEQ ID NO: 28695 - protein, 9 aa, Artificial Sequence
  Description of Artificial Sequence: Synthetic peptide
  Seed: HLMIWHSNL
HSMIWHSNL

SEQ ID NO: 28696 - protein, 9 aa, Artificial Sequence
  Description of Artificial Sequence: Synthetic peptide
  Seed: HLMIWHSNL
HSMIWHSNM

SEQ ID NO: 28697 - protein, 9 aa, Artificial Sequence
  Description of Artificial Sequence: Synthetic peptide
  Seed: HLMIWHSNL
HSMIWHSNF

SEQ ID NO: 28698 - protein, 9 aa, Artificial Sequence
  Description of Artificial Sequence: Synthetic peptide
  Seed: HLMIWHSNL
HSMIWHSNW

SEQ ID NO: 28699 - protein, 9 aa, Artificial Sequence
  Description of Artificial Sequence: Synthetic peptide
  Seed: HLMIWHSNL
HSMIWHSNY

SEQ ID NO: 28700 - protein, 9 aa, Artificial Sequence
  Description of Artificial Sequence: Synthetic peptide
  Seed: HLMIWHSNL
HSMIWHSNV

SEQ ID NO: 28701 - protein, 9 aa, Artificial Sequence
  Description of Artificial Sequence: Synthetic peptide
  Seed: HMMIWHSNL
HIMIWHSNI

SEQ ID NO: 28702 - protein, 9 aa, Artificial Sequence
  Description of Artificial Sequence: Synthetic peptide
  Seed: HMMIWHSNL
HIMIWHSNM

SEQ ID NO: 28703 - protein, 9 aa, Artificial Sequence
  Description of Artificial Sequence: Synthetic peptide
  Seed: HMMIWHSNL
HFMIWHSNW

SEQ ID NO: 28704 - protein, 9 aa, Artificial Sequence
  Description of Artificial Sequence: Synthetic peptide
  Seed: HMMIWHSNL
HPMIWHSNC

SEQ ID NO: 28705 - protein, 9 aa, Artificial Sequence
  Description of Artificial Sequence: Synthetic peptide
  Seed: HMMIWHSNL
HPMIWHSNG

SEQ ID NO: 28706 - protein, 9 aa, Artificial Sequence
  Description of Artificial Sequence: Synthetic peptide
  Seed: HMMIWHSNL
HPMIWHSNI

SEQ ID NO: 28707 - protein, 9 aa, Artificial Sequence
  Description of Artificial Sequence: Synthetic peptide
  Seed: HMMIWHSNL
HPMIWHSNL

SEQ ID NO: 28708 - protein, 9 aa, Artificial Sequence
  Description of Artificial Sequence: Synthetic peptide
  Seed: HMMIWHSNL
HPMIWHSNM

SEQ ID NO: 28709 - protein, 9 aa, Artificial Sequence
  Description of Artificial Sequence: Synthetic peptide
  Seed: HMMIWHSNL
HPMIWHSNF

SEQ ID NO: 28710 - protein, 9 aa, Artificial Sequence
  Description of Artificial Sequence: Synthetic peptide
  Seed: HMMIWHSNL
HPMIWHSNS

SEQ ID NO: 28711 - protein, 9 aa, Artificial Sequence
  Description of Artificial Sequence: Synthetic peptide
  Seed: HMMIWHSNL
HPMIWHSNT

SEQ ID NO: 28712 - protein, 9 aa, Artificial Sequence
  Description of Artificial Sequence: Synthetic peptide
  Seed: HMMIWHSNL
HPMIWHSNW

SEQ ID NO: 28713 - protein, 9 aa, Artificial Sequence
  Description of Artificial Sequence: Synthetic peptide
  Seed: HMMIWHSNL
HPMIWHSNY

SEQ ID NO: 28714 - protein, 9 aa, Artificial Sequence
  Description of Artificial Sequence: Synthetic peptide
  Seed: HMMIWHSNL
HPMIWHSNV

SEQ ID NO: 28715 - protein, 9 aa, Artificial Sequence
  Description of Artificial Sequence: Synthetic peptide
  Seed: HMMIWHSNL
HPMIWHSNA

SEQ ID NO: 28716 - protein, 9 aa, Artificial Sequence
  Description of Artificial Sequence: Synthetic peptide
  Seed: HMMIWHSNL
HMMIWHSNV

SEQ ID NO: 28717 - protein, 9 aa, Artificial Sequence
  Description of Artificial Sequence: Synthetic peptide
  Seed: HMMIWHSNL
HIMIWHSNF

SEQ ID NO: 28718 - protein, 9 aa, Artificial Sequence
  Description of Artificial Sequence: Synthetic peptide
  Seed: HMMIWHSNL
HMMIWHSNY

SEQ ID NO: 28719 - protein, 9 aa, Artificial Sequence
  Description of Artificial Sequence: Synthetic peptide
  Seed: HMMIWHSNL
HIMIWHSNW

SEQ ID NO: 28720 - protein, 9 aa, Artificial Sequence
  Description of Artificial Sequence: Synthetic peptide
  Seed: HMMIWHSNL
HIMIWHSNV

SEQ ID NO: 28721 - protein, 9 aa, Artificial Sequence
  Description of Artificial Sequence: Synthetic peptide
  Seed: HMMIWHSNL
HLMIWHSNA

SEQ ID NO: 28722 - protein, 9 aa, Artificial Sequence
  Description of Artificial Sequence: Synthetic peptide
  Seed: HMMIWHSNL
HLMIWHSNC

SEQ ID NO: 28723 - protein, 9 aa, Artificial Sequence
  Description of Artificial Sequence: Synthetic peptide
  Seed: HMMIWHSNL
HLMIWHSNI

SEQ ID NO: 28724 - protein, 9 aa, Artificial Sequence
  Description of Artificial Sequence: Synthetic peptide
  Seed: HMMIWHSNL
HLMIWHSNM

SEQ ID NO: 28725 - protein, 9 aa, Artificial Sequence
  Description of Artificial Sequence: Synthetic peptide
  Seed: HMMIWHSNL
HLMIWHSNF

SEQ ID NO: 28726 - protein, 9 aa, Artificial Sequence
  Description of Artificial Sequence: Synthetic peptide
  Seed: HMMIWHSNL
HLMIWHSNT

SEQ ID NO: 28727 - protein, 9 aa, Artificial Sequence
  Description of Artificial Sequence: Synthetic peptide
  Seed: HMMIWHSNL
HLMIWHSNW

SEQ ID NO: 28728 - protein, 9 aa, Artificial Sequence
  Description of Artificial Sequence: Synthetic peptide
  Seed: HMMIWHSNL
HLMIWHSNY

SEQ ID NO: 28729 - protein, 9 aa, Artificial Sequence
  Description of Artificial Sequence: Synthetic peptide
  Seed: HMMIWHSNL
HLMIWHSNV

SEQ ID NO: 28730 - protein, 9 aa, Artificial Sequence
  Description of Artificial Sequence: Synthetic peptide
  Seed: HMMIWHSNL
HMMIWHSNA

SEQ ID NO: 28731 - protein, 9 aa, Artificial Sequence
  Description of Artificial Sequence: Synthetic peptide
  Seed: HMMIWHSNL
HMMIWHSNC

SEQ ID NO: 28732 - protein, 9 aa, Artificial Sequence
  Description of Artificial Sequence: Synthetic peptide
  Seed: HMMIWHSNL
HMMIWHSNI

SEQ ID NO: 28733 - protein, 9 aa, Artificial Sequence
  Description of Artificial Sequence: Synthetic peptide
  Seed: HMMIWHSNL
HMMIWHSNM

SEQ ID NO: 28734 - protein, 9 aa, Artificial Sequence
  Description of Artificial Sequence: Synthetic peptide
  Seed: HMMIWHSNL
HMMIWHSNF

SEQ ID NO: 28735 - protein, 9 aa, Artificial Sequence
  Description of Artificial Sequence: Synthetic peptide
  Seed: HMMIWHSNL
HMMIWHSNT

SEQ ID NO: 28736 - protein, 9 aa, Artificial Sequence
  Description of Artificial Sequence: Synthetic peptide
  Seed: HMMIWHSNL
HMMIWHSNW

SEQ ID NO: 28737 - protein, 11 aa, Artificial Sequence
  Description of Artificial Sequence: Synthetic peptide
  Seed: HSAAFEDLRLL
HDAAFEDLRLW

SEQ ID NO: 28738 - protein, 11 aa, Artificial Sequence
  Description of Artificial Sequence: Synthetic peptide
  Seed: HSAAFEDLRLL
HCAAFEDLRLF

SEQ ID NO: 28739 - protein, 11 aa, Artificial Sequence
  Description of Artificial Sequence: Synthetic peptide
  Seed: HSNLNDATYQR
HQNLNDATYQR

SEQ ID NO: 28740 - protein, 9 aa, Artificial Sequence
  Description of Artificial Sequence: Synthetic peptide
  Seed: HSNLNDATY
HKNLNDATI

SEQ ID NO: 28741 - protein, 9 aa, Artificial Sequence
  Description of Artificial Sequence: Synthetic peptide
  Seed: HSNLNDATY
HHNLNDATY

SEQ ID NO: 28742 - protein, 9 aa, Artificial Sequence
  Description of Artificial Sequence: Synthetic peptide
  Seed: HSNLNDATY
HINLNDATM

SEQ ID NO: 28743 - protein, 9 aa, Artificial Sequence
  Description of Artificial Sequence: Synthetic peptide
  Seed: HSNLNDATY
HINLNDATF

SEQ ID NO: 28744 - protein, 9 aa, Artificial Sequence
  Description of Artificial Sequence: Synthetic peptide
  Seed: HSNLNDATY
HINLNDATW

SEQ ID NO: 28745 - protein, 9 aa, Artificial Sequence
  Description of Artificial Sequence: Synthetic peptide
  Seed: HSNLNDATY
HINLNDATY

SEQ ID NO: 28746 - protein, 9 aa, Artificial Sequence
  Description of Artificial Sequence: Synthetic peptide
  Seed: HSNLNDATY
HLNLNDATM

SEQ ID NO: 28747 - protein, 9 aa, Artificial Sequence
  Description of Artificial Sequence: Synthetic peptide
  Seed: HSNLNDATY
HLNLNDATF

SEQ ID NO: 28748 - protein, 9 aa, Artificial Sequence
  Description of Artificial Sequence: Synthetic peptide
  Seed: HSNLNDATY
HLNLNDATW

SEQ ID NO: 28749 - protein, 9 aa, Artificial Sequence
  Description of Artificial Sequence: Synthetic peptide
  Seed: HSNLNDATY
HLNLNDATY

SEQ ID NO: 28750 - protein, 9 aa, Artificial Sequence
  Description of Artificial Sequence: Synthetic peptide
  Seed: HSNLNDATY
HKNLNDATL

SEQ ID NO: 28751 - protein, 9 aa, Artificial Sequence
  Description of Artificial Sequence: Synthetic peptide
  Seed: HSNLNDATY
HMNLNDATY

SEQ ID NO: 28752 - protein, 9 aa, Artificial Sequence
  Description of Artificial Sequence: Synthetic peptide
  Seed: HSNLNDATY
HKNLNDATM

SEQ ID NO: 28753 - protein, 9 aa, Artificial Sequence
  Description of Artificial Sequence: Synthetic peptide
  Seed: HSNLNDATY
HKNLNDATF

SEQ ID NO: 28754 - protein, 9 aa, Artificial Sequence
  Description of Artificial Sequence: Synthetic peptide
  Seed: HSNLNDATY
HKNLNDATW

SEQ ID NO: 28755 - protein, 9 aa, Artificial Sequence
  Description of Artificial Sequence: Synthetic peptide
  Seed: HSNLNDATY
HKNLNDATY

SEQ ID NO: 28756 - protein, 9 aa, Artificial Sequence
  Description of Artificial Sequence: Synthetic peptide
  Seed: HSNLNDATY
HMNLNDATH

SEQ ID NO: 28757 - protein, 9 aa, Artificial Sequence
  Description of Artificial Sequence: Synthetic peptide
  Seed: HSNLNDATY
HMNLNDATI

SEQ ID NO: 28758 - protein, 9 aa, Artificial Sequence
  Description of Artificial Sequence: Synthetic peptide
  Seed: HSNLNDATY
HMNLNDATL

SEQ ID NO: 28759 - protein, 9 aa, Artificial Sequence
  Description of Artificial Sequence: Synthetic peptide
  Seed: HSNLNDATY
HMNLNDATM

SEQ ID NO: 28760 - protein, 9 aa, Artificial Sequence
  Description of Artificial Sequence: Synthetic peptide
  Seed: HSNLNDATY
HMNLNDATF

SEQ ID NO: 28761 - protein, 9 aa, Artificial Sequence
  Description of Artificial Sequence: Synthetic peptide
  Seed: HSNLNDATY
HHNLNDATF

SEQ ID NO: 28762 - protein, 9 aa, Artificial Sequence
  Description of Artificial Sequence: Synthetic peptide
  Seed: HSNLNDATY
HHNLNDATM

SEQ ID NO: 28763 - protein, 9 aa, Artificial Sequence
  Description of Artificial Sequence: Synthetic peptide
  Seed: HSNLNDATY
HGNLNDATY

SEQ ID NO: 28764 - protein, 9 aa, Artificial Sequence
  Description of Artificial Sequence: Synthetic peptide
  Seed: HSNLNDATY
HGNLNDATW

SEQ ID NO: 28765 - protein, 9 aa, Artificial Sequence
  Description of Artificial Sequence: Synthetic peptide
  Seed: HSNLNDATY
HNNLNDATY

SEQ ID NO: 28766 - protein, 9 aa, Artificial Sequence
  Description of Artificial Sequence: Synthetic peptide
  Seed: HSNLNDATY
HCNLNDATM

SEQ ID NO: 28767 - protein, 9 aa, Artificial Sequence
  Description of Artificial Sequence: Synthetic peptide
  Seed: HSNLNDATY
HCNLNDATF

SEQ ID NO: 28768 - protein, 9 aa, Artificial Sequence
  Description of Artificial Sequence: Synthetic peptide
  Seed: HSNLNDATY
HCNLNDATW

SEQ ID NO: 28769 - protein, 9 aa, Artificial Sequence
  Description of Artificial Sequence: Synthetic peptide
  Seed: HSNLNDATY
HCNLNDATY

SEQ ID NO: 28770 - protein, 9 aa, Artificial Sequence
  Description of Artificial Sequence: Synthetic peptide
  Seed: HSNLNDATY
HQNLNDATA

SEQ ID NO: 28771 - protein, 9 aa, Artificial Sequence
  Description of Artificial Sequence: Synthetic peptide
  Seed: HSNLNDATY
HQNLNDATH

SEQ ID NO: 28772 - protein, 9 aa, Artificial Sequence
  Description of Artificial Sequence: Synthetic peptide
  Seed: HSNLNDATY
HQNLNDATI

SEQ ID NO: 28773 - protein, 9 aa, Artificial Sequence
  Description of Artificial Sequence: Synthetic peptide
  Seed: HSNLNDATY
HQNLNDATL

SEQ ID NO: 28774 - protein, 9 aa, Artificial Sequence
  Description of Artificial Sequence: Synthetic peptide
  Seed: HSNLNDATY
HQNLNDATM

SEQ ID NO: 28775 - protein, 9 aa, Artificial Sequence
  Description of Artificial Sequence: Synthetic peptide
  Seed: HSNLNDATY
HQNLNDATF

SEQ ID NO: 28776 - protein, 9 aa, Artificial Sequence
  Description of Artificial Sequence: Synthetic peptide
  Seed: HSNLNDATY
HQNLNDATW

SEQ ID NO: 28777 - protein, 9 aa, Artificial Sequence
  Description of Artificial Sequence: Synthetic peptide
  Seed: HSNLNDATY
HQNLNDATY

SEQ ID NO: 28778 - protein, 9 aa, Artificial Sequence
  Description of Artificial Sequence: Synthetic peptide
  Seed: HSNLNDATY
HQNLNDATV

SEQ ID NO: 28779 - protein, 9 aa, Artificial Sequence
  Description of Artificial Sequence: Synthetic peptide
  Seed: HSNLNDATY
HENLNDATM

SEQ ID NO: 28780 - protein, 9 aa, Artificial Sequence
  Description of Artificial Sequence: Synthetic peptide
  Seed: HSNLNDATY
HENLNDATF

SEQ ID NO: 28781 - protein, 9 aa, Artificial Sequence
  Description of Artificial Sequence: Synthetic peptide
  Seed: HSNLNDATY
HENLNDATY

SEQ ID NO: 28782 - protein, 9 aa, Artificial Sequence
  Description of Artificial Sequence: Synthetic peptide
  Seed: HSNLNDATY
HGNLNDATM

SEQ ID NO: 28783 - protein, 9 aa, Artificial Sequence
  Description of Artificial Sequence: Synthetic peptide
  Seed: HSNLNDATY
HGNLNDATF

SEQ ID NO: 28784 - protein, 9 aa, Artificial Sequence
  Description of Artificial Sequence: Synthetic peptide
  Seed: HSNLNDATY
HMNLNDATW

SEQ ID NO: 28785 - protein, 9 aa, Artificial Sequence
  Description of Artificial Sequence: Synthetic peptide
  Seed: HSNLNDATY
HMNLNDATV

SEQ ID NO: 28786 - protein, 11 aa, Artificial Sequence
  Description of Artificial Sequence: Synthetic peptide
  Seed: HSAAFEDLRLL
HCAAFEDLRLW

SEQ ID NO: 28787 - protein, 9 aa, Artificial Sequence
  Description of Artificial Sequence: Synthetic peptide
  Seed: HSNLNDATY
HVNLNDATL

SEQ ID NO: 28788 - protein, 9 aa, Artificial Sequence
  Description of Artificial Sequence: Synthetic peptide
  Seed: HSNLNDATY
HTNLNDATI

SEQ ID NO: 28789 - protein, 9 aa, Artificial Sequence
  Description of Artificial Sequence: Synthetic peptide
  Seed: HSNLNDATY
HTNLNDATL

SEQ ID NO: 28790 - protein, 9 aa, Artificial Sequence
  Description of Artificial Sequence: Synthetic peptide
  Seed: HSNLNDATY
HTNLNDATM

SEQ ID NO: 28791 - protein, 9 aa, Artificial Sequence
  Description of Artificial Sequence: Synthetic peptide
  Seed: HSNLNDATY
HTNLNDATF

SEQ ID NO: 28792 - protein, 9 aa, Artificial Sequence
  Description of Artificial Sequence: Synthetic peptide
  Seed: HSNLNDATY
HTNLNDATW

SEQ ID NO: 28793 - protein, 9 aa, Artificial Sequence
  Description of Artificial Sequence: Synthetic peptide
  Seed: HSNLNDATY
HTNLNDATY

SEQ ID NO: 28794 - protein, 9 aa, Artificial Sequence
  Description of Artificial Sequence: Synthetic peptide
  Seed: HSNLNDATY
HWNLNDATY

SEQ ID NO: 28795 - protein, 9 aa, Artificial Sequence
  Description of Artificial Sequence: Synthetic peptide
  Seed: HSNLNDATY
HYNLNDATF

SEQ ID NO: 28796 - protein, 9 aa, Artificial Sequence
  Description of Artificial Sequence: Synthetic peptide
  Seed: HSNLNDATY
HYNLNDATY

SEQ ID NO: 28797 - protein, 9 aa, Artificial Sequence
  Description of Artificial Sequence: Synthetic peptide
  Seed: HSNLNDATY
HVNLNDATM

SEQ ID NO: 28798 - protein, 9 aa, Artificial Sequence
  Description of Artificial Sequence: Synthetic peptide
  Seed: HSNLNDATY
HFNLNDATM

SEQ ID NO: 28799 - protein, 9 aa, Artificial Sequence
  Description of Artificial Sequence: Synthetic peptide
  Seed: HSNLNDATY
HVNLNDATF

SEQ ID NO: 28800 - protein, 9 aa, Artificial Sequence
  Description of Artificial Sequence: Synthetic peptide
  Seed: HSNLNDATY
HVNLNDATW

SEQ ID NO: 28801 - protein, 9 aa, Artificial Sequence
  Description of Artificial Sequence: Synthetic peptide
  Seed: HSNLNDATY
HVNLNDATY

SEQ ID NO: 28802 - protein, 11 aa, Artificial Sequence
  Description of Artificial Sequence: Synthetic peptide
  Seed: HSNLNDATYQR
HANLNDATYQR

SEQ ID NO: 28803 - protein, 11 aa, Artificial Sequence
  Description of Artificial Sequence: Synthetic peptide
  Seed: HSNLNDATYQR
HANLNDATYQK

SEQ ID NO: 28804 - protein, 11 aa, Artificial Sequence
  Description of Artificial Sequence: Synthetic peptide
  Seed: HSNLNDATYQR
HRNLNDATYQR

SEQ ID NO: 28805 - protein, 11 aa, Artificial Sequence
  Description of Artificial Sequence: Synthetic peptide
  Seed: HSNLNDATYQR
HNNLNDATYQR

SEQ ID NO: 28806 - protein, 11 aa, Artificial Sequence
  Description of Artificial Sequence: Synthetic peptide
  Seed: HSNLNDATYQR
HDNLNDATYQR

SEQ ID NO: 28807 - protein, 11 aa, Artificial Sequence
  Description of Artificial Sequence: Synthetic peptide
  Seed: HSNLNDATYQR
HCNLNDATYQR

SEQ ID NO: 28808 - protein, 9 aa, Artificial Sequence
  Description of Artificial Sequence: Synthetic peptide
  Seed: HSNLNDATY
HSNLNDATV

SEQ ID NO: 28809 - protein, 9 aa, Artificial Sequence
  Description of Artificial Sequence: Synthetic peptide
  Seed: HSNLNDATY
HSNLNDATW

SEQ ID NO: 28810 - protein, 9 aa, Artificial Sequence
  Description of Artificial Sequence: Synthetic peptide
  Seed: HSNLNDATY
HSNLNDATF

SEQ ID NO: 28811 - protein, 9 aa, Artificial Sequence
  Description of Artificial Sequence: Synthetic peptide
  Seed: HSNLNDATY
HSNLNDATM

SEQ ID NO: 28812 - protein, 9 aa, Artificial Sequence
  Description of Artificial Sequence: Synthetic peptide
  Seed: HSNLNDATY
HFNLNDATF

SEQ ID NO: 28813 - protein, 9 aa, Artificial Sequence
  Description of Artificial Sequence: Synthetic peptide
  Seed: HSNLNDATY
HFNLNDATW

SEQ ID NO: 28814 - protein, 9 aa, Artificial Sequence
  Description of Artificial Sequence: Synthetic peptide
  Seed: HSNLNDATY
HFNLNDATY

SEQ ID NO: 28815 - protein, 9 aa, Artificial Sequence
  Description of Artificial Sequence: Synthetic peptide
  Seed: HSNLNDATY
HPNLNDATA

SEQ ID NO: 28816 - protein, 9 aa, Artificial Sequence
  Description of Artificial Sequence: Synthetic peptide
  Seed: HSNLNDATY
HPNLNDATC

SEQ ID NO: 28817 - protein, 9 aa, Artificial Sequence
  Description of Artificial Sequence: Synthetic peptide
  Seed: HSNLNDATY
HPNLNDATQ

SEQ ID NO: 28818 - protein, 9 aa, Artificial Sequence
  Description of Artificial Sequence: Synthetic peptide
  Seed: HSNLNDATY
HPNLNDATE

SEQ ID NO: 28819 - protein, 9 aa, Artificial Sequence
  Description of Artificial Sequence: Synthetic peptide
  Seed: HSNLNDATY
HPNLNDATH

SEQ ID NO: 28820 - protein, 9 aa, Artificial Sequence
  Description of Artificial Sequence: Synthetic peptide
  Seed: HSNLNDATY
HPNLNDATI

SEQ ID NO: 28821 - protein, 9 aa, Artificial Sequence
  Description of Artificial Sequence: Synthetic peptide
  Seed: HSNLNDATY
HPNLNDATL

SEQ ID NO: 28822 - protein, 9 aa, Artificial Sequence
  Description of Artificial Sequence: Synthetic peptide
  Seed: HSNLNDATY
HPNLNDATM

SEQ ID NO: 28823 - protein, 9 aa, Artificial Sequence
  Description of Artificial Sequence: Synthetic peptide
  Seed: HSNLNDATY
HPNLNDATF

SEQ ID NO: 28824 - protein, 9 aa, Artificial Sequence
  Description of Artificial Sequence: Synthetic peptide
  Seed: HSNLNDATY
HPNLNDATS

SEQ ID NO: 28825 - protein, 9 aa, Artificial Sequence
  Description of Artificial Sequence: Synthetic peptide
  Seed: HSNLNDATY
HPNLNDATT

SEQ ID NO: 28826 - protein, 9 aa, Artificial Sequence
  Description of Artificial Sequence: Synthetic peptide
  Seed: HSNLNDATY
HPNLNDATW

SEQ ID NO: 28827 - protein, 9 aa, Artificial Sequence
  Description of Artificial Sequence: Synthetic peptide
  Seed: HSNLNDATY
HPNLNDATY

SEQ ID NO: 28828 - protein, 9 aa, Artificial Sequence
  Description of Artificial Sequence: Synthetic peptide
  Seed: HSNLNDATY
HPNLNDATV

SEQ ID NO: 28829 - protein, 9 aa, Artificial Sequence
  Description of Artificial Sequence: Synthetic peptide
  Seed: HSNLNDATY
HSNLNDATI

SEQ ID NO: 28830 - protein, 9 aa, Artificial Sequence
  Description of Artificial Sequence: Synthetic peptide
  Seed: HSNLNDATY
HSNLNDATL

SEQ ID NO: 28831 - protein, 9 aa, Artificial Sequence
  Description of Artificial Sequence: Synthetic peptide
  Seed: HSNLNDATY
HNNLNDATW

SEQ ID NO: 28832 - protein, 9 aa, Artificial Sequence
  Description of Artificial Sequence: Synthetic peptide
  Seed: HSNLNDATY
HNNLNDATF

SEQ ID NO: 28833 - protein, 9 aa, Artificial Sequence
  Description of Artificial Sequence: Synthetic peptide
  Seed: HSNLNDATY
HRNLNDATY

SEQ ID NO: 28834 - protein, 11 aa, Artificial Sequence
  Description of Artificial Sequence: Synthetic peptide
  Seed: HSAAFEDLRLL
HMAAFEDLRLW

SEQ ID NO: 28835 - protein, 11 aa, Artificial Sequence
  Description of Artificial Sequence: Synthetic peptide
  Seed: HSAAFEDLRLL
HMAAFEDLRLY

SEQ ID NO: 28836 - protein, 11 aa, Artificial Sequence
  Description of Artificial Sequence: Synthetic peptide
  Seed: HSAAFEDLRLL
HFAAFEDLRLF

SEQ ID NO: 28837 - protein, 11 aa, Artificial Sequence
  Description of Artificial Sequence: Synthetic peptide
  Seed: HSAAFEDLRLL
HFAAFEDLRLW

SEQ ID NO: 28838 - protein, 11 aa, Artificial Sequence
  Description of Artificial Sequence: Synthetic peptide
  Seed: HSAAFEDLRLL
HFAAFEDLRLY

SEQ ID NO: 28839 - protein, 11 aa, Artificial Sequence
  Description of Artificial Sequence: Synthetic peptide
  Seed: HSAAFEDLRLL
HPAAFEDLRLF

SEQ ID NO: 28840 - protein, 11 aa, Artificial Sequence
  Description of Artificial Sequence: Synthetic peptide
  Seed: HSAAFEDLRLL
HPAAFEDLRLW

SEQ ID NO: 28841 - protein, 11 aa, Artificial Sequence
  Description of Artificial Sequence: Synthetic peptide
  Seed: HSAAFEDLRLL
HPAAFEDLRLY

SEQ ID NO: 28842 - protein, 11 aa, Artificial Sequence
  Description of Artificial Sequence: Synthetic peptide
  Seed: HSAAFEDLRLL
HSAAFEDLRLM

SEQ ID NO: 28843 - protein, 11 aa, Artificial Sequence
  Description of Artificial Sequence: Synthetic peptide
  Seed: HSAAFEDLRLL
HSAAFEDLRLW

SEQ ID NO: 28844 - protein, 9 aa, Artificial Sequence
  Description of Artificial Sequence: Synthetic peptide
  Seed: HSNLNDATY
HRNLNDATF

SEQ ID NO: 28845 - protein, 11 aa, Artificial Sequence
  Description of Artificial Sequence: Synthetic peptide
  Seed: HSAAFEDLRLL
HSAAFEDLRLY

SEQ ID NO: 28846 - protein, 11 aa, Artificial Sequence
  Description of Artificial Sequence: Synthetic peptide
  Seed: HSAAFEDLRLL
HTAAFEDLRLL

SEQ ID NO: 28847 - protein, 11 aa, Artificial Sequence
  Description of Artificial Sequence: Synthetic peptide
  Seed: HSAAFEDLRLL
HTAAFEDLRLM

SEQ ID NO: 28848 - protein, 11 aa, Artificial Sequence
  Description of Artificial Sequence: Synthetic peptide
  Seed: HSAAFEDLRLL
HTAAFEDLRLF

SEQ ID NO: 28849 - protein, 11 aa, Artificial Sequence
  Description of Artificial Sequence: Synthetic peptide
  Seed: HSAAFEDLRLL
HTAAFEDLRLW

SEQ ID NO: 28850 - protein, 11 aa, Artificial Sequence
  Description of Artificial Sequence: Synthetic peptide
  Seed: HSAAFEDLRLL
HTAAFEDLRLY

SEQ ID NO: 28851 - protein, 11 aa, Artificial Sequence
  Description of Artificial Sequence: Synthetic peptide
  Seed: HSAAFEDLRLL
HWAAFEDLRLF

SEQ ID NO: 28852 - protein, 11 aa, Artificial Sequence
  Description of Artificial Sequence: Synthetic peptide
  Seed: HSAAFEDLRLL
HWAAFEDLRLW

SEQ ID NO: 28853 - protein, 11 aa, Artificial Sequence
  Description of Artificial Sequence: Synthetic peptide
  Seed: HSAAFEDLRLL
HWAAFEDLRLY

SEQ ID NO: 28854 - protein, 11 aa, Artificial Sequence
  Description of Artificial Sequence: Synthetic peptide
  Seed: HSAAFEDLRLL
HMAAFEDLRLF

SEQ ID NO: 28855 - protein, 11 aa, Artificial Sequence
  Description of Artificial Sequence: Synthetic peptide
  Seed: HSAAFEDLRLL
HKAAFEDLRLY

SEQ ID NO: 28856 - protein, 11 aa, Artificial Sequence
  Description of Artificial Sequence: Synthetic peptide
  Seed: HSAAFEDLRLL
HKAAFEDLRLW

SEQ ID NO: 28857 - protein, 11 aa, Artificial Sequence
  Description of Artificial Sequence: Synthetic peptide
  Seed: HSAAFEDLRLL
HKAAFEDLRLF

SEQ ID NO: 28858 - protein, 11 aa, Artificial Sequence
  Description of Artificial Sequence: Synthetic peptide
  Seed: HSAAFEDLRLL
HCAAFEDLRLY

SEQ ID NO: 28859 - protein, 11 aa, Artificial Sequence
  Description of Artificial Sequence: Synthetic peptide
  Seed: HSAAFEDLRLL
HQAAFEDLRLF

SEQ ID NO: 28860 - protein, 11 aa, Artificial Sequence
  Description of Artificial Sequence: Synthetic peptide
  Seed: HSAAFEDLRLL
HQAAFEDLRLW

SEQ ID NO: 28861 - protein, 11 aa, Artificial Sequence
  Description of Artificial Sequence: Synthetic peptide
  Seed: HSAAFEDLRLL
HQAAFEDLRLY

SEQ ID NO: 28862 - protein, 11 aa, Artificial Sequence
  Description of Artificial Sequence: Synthetic peptide
  Seed: HSAAFEDLRLL
HEAAFEDLRLF

SEQ ID NO: 28863 - protein, 11 aa, Artificial Sequence
  Description of Artificial Sequence: Synthetic peptide
  Seed: HSAAFEDLRLL
HEAAFEDLRLW

SEQ ID NO: 28864 - protein, 11 aa, Artificial Sequence
  Description of Artificial Sequence: Synthetic peptide
  Seed: HSAAFEDLRLL
HEAAFEDLRLY

SEQ ID NO: 28865 - protein, 11 aa, Artificial Sequence
  Description of Artificial Sequence: Synthetic peptide
  Seed: HSAAFEDLRLL
HGAAFEDLRLF

SEQ ID NO: 28866 - protein, 11 aa, Artificial Sequence
  Description of Artificial Sequence: Synthetic peptide
  Seed: HSAAFEDLRLL
HGAAFEDLRLW

SEQ ID NO: 28867 - protein, 11 aa, Artificial Sequence
  Description of Artificial Sequence: Synthetic peptide
  Seed: HSAAFEDLRLL
HGAAFEDLRLY

SEQ ID NO: 28868 - protein, 11 aa, Artificial Sequence
  Description of Artificial Sequence: Synthetic peptide
  Seed: HSAAFEDLRLL
HHAAFEDLRLF

SEQ ID NO: 28869 - protein, 11 aa, Artificial Sequence
  Description of Artificial Sequence: Synthetic peptide
  Seed: HSAAFEDLRLL
HHAAFEDLRLW

SEQ ID NO: 28870 - protein, 11 aa, Artificial Sequence
  Description of Artificial Sequence: Synthetic peptide
  Seed: HSAAFEDLRLL
HHAAFEDLRLY

SEQ ID NO: 28871 - protein, 11 aa, Artificial Sequence
  Description of Artificial Sequence: Synthetic peptide
  Seed: HSAAFEDLRLL
HIAAFEDLRLF

SEQ ID NO: 28872 - protein, 11 aa, Artificial Sequence
  Description of Artificial Sequence: Synthetic peptide
  Seed: HSAAFEDLRLL
HIAAFEDLRLW

SEQ ID NO: 28873 - protein, 11 aa, Artificial Sequence
  Description of Artificial Sequence: Synthetic peptide
  Seed: HSAAFEDLRLL
HIAAFEDLRLY

SEQ ID NO: 28874 - protein, 11 aa, Artificial Sequence
  Description of Artificial Sequence: Synthetic peptide
  Seed: HSAAFEDLRLL
HLAAFEDLRLF

SEQ ID NO: 28875 - protein, 11 aa, Artificial Sequence
  Description of Artificial Sequence: Synthetic peptide
  Seed: HSAAFEDLRLL
HLAAFEDLRLW

SEQ ID NO: 28876 - protein, 11 aa, Artificial Sequence
  Description of Artificial Sequence: Synthetic peptide
  Seed: HSAAFEDLRLL
HLAAFEDLRLY

SEQ ID NO: 28877 - protein, 11 aa, Artificial Sequence
  Description of Artificial Sequence: Synthetic peptide
  Seed: HSAAFEDLRLL
HYAAFEDLRLF

SEQ ID NO: 28878 - protein, 11 aa, Artificial Sequence
  Description of Artificial Sequence: Synthetic peptide
  Seed: HSAAFEDLRLL
HYAAFEDLRLW

SEQ ID NO: 28879 - protein, 11 aa, Artificial Sequence
  Description of Artificial Sequence: Synthetic peptide
  Seed: HSAAFEDLRLL
HYAAFEDLRLY

SEQ ID NO: 28880 - protein, 9 aa, Artificial Sequence
  Description of Artificial Sequence: Synthetic peptide
  Seed: HSNLNDATY
HANLNDATH

SEQ ID NO: 28881 - protein, 9 aa, Artificial Sequence
  Description of Artificial Sequence: Synthetic peptide
  Seed: HSNLNDATY
HANLNDATI

SEQ ID NO: 28882 - protein, 9 aa, Artificial Sequence
  Description of Artificial Sequence: Synthetic peptide
  Seed: HSNLNDATY
HANLNDATL

SEQ ID NO: 28883 - protein, 9 aa, Artificial Sequence
  Description of Artificial Sequence: Synthetic peptide
  Seed: HSNLNDATY
HANLNDATM

SEQ ID NO: 28884 - protein, 9 aa, Artificial Sequence
  Description of Artificial Sequence: Synthetic peptide
  Seed: HSNLNDATY
HANLNDATF

SEQ ID NO: 28885 - protein, 9 aa, Artificial Sequence
  Description of Artificial Sequence: Synthetic peptide
  Seed: HSNLNDATY
HANLNDATW

SEQ ID NO: 28886 - protein, 9 aa, Artificial Sequence
  Description of Artificial Sequence: Synthetic peptide
  Seed: HSNLNDATY
HANLNDATY

SEQ ID NO: 28887 - protein, 9 aa, Artificial Sequence
  Description of Artificial Sequence: Synthetic peptide
  Seed: HSNLNDATY
HANLNDATV

SEQ ID NO: 28888 - protein, 9 aa, Artificial Sequence
  Description of Artificial Sequence: Synthetic peptide
  Seed: HSNLNDATY
HRNLNDATM

SEQ ID NO: 28889 - protein, 11 aa, Artificial Sequence
  Description of Artificial Sequence: Synthetic peptide
  Seed: HSAAFEDLRLL
HVAAFEDLRLF

SEQ ID NO: 28890 - protein, 11 aa, Artificial Sequence
  Description of Artificial Sequence: Synthetic peptide
  Seed: HSAAFEDLRLL
HVAAFEDLRLW

SEQ ID NO: 28891 - protein, 11 aa, Artificial Sequence
  Description of Artificial Sequence: Synthetic peptide
  Seed: HSAAFEDLRLL
HVAAFEDLRLY

SEQ ID NO: 28892 - protein, 10 aa, Artificial Sequence
  Description of Artificial Sequence: Synthetic peptide
  Seed: IAYERMCNIL
IMYERMCNIW

SEQ ID NO: 28893 - protein, 10 aa, Artificial Sequence
  Description of Artificial Sequence: Synthetic peptide
  Seed: IAYERMCNIL
IFYERMCNII

SEQ ID NO: 28894 - protein, 9 aa, Artificial Sequence
  Description of Artificial Sequence: Synthetic peptide
  Seed: GKWMRELVL
GHWMRELVI

SEQ ID NO: 28895 - protein, 10 aa, Artificial Sequence
  Description of Artificial Sequence: Synthetic peptide
  Seed: IFSARSALIL
IHSARSALIM

SEQ ID NO: 28896 - protein, 10 aa, Artificial Sequence
  Description of Artificial Sequence: Synthetic peptide
  Seed: IFSARSALIL
IESARSALIY

SEQ ID NO: 28897 - protein, 10 aa, Artificial Sequence
  Description of Artificial Sequence: Synthetic peptide
  Seed: IFSARSALIL
IGSARSALII

SEQ ID NO: 28898 - protein, 10 aa, Artificial Sequence
  Description of Artificial Sequence: Synthetic peptide
  Seed: IFSARSALIL
IGSARSALIL

SEQ ID NO: 28899 - protein, 10 aa, Artificial Sequence
  Description of Artificial Sequence: Synthetic peptide
  Seed: IFSARSALIL
IGSARSALIM

SEQ ID NO: 28900 - protein, 10 aa, Artificial Sequence
  Description of Artificial Sequence: Synthetic peptide
  Seed: IFSARSALIL
IGSARSALIF

SEQ ID NO: 28901 - protein, 10 aa, Artificial Sequence
  Description of Artificial Sequence: Synthetic peptide
  Seed: IFSARSALIL
IGSARSALIW

SEQ ID NO: 28902 - protein, 10 aa, Artificial Sequence
  Description of Artificial Sequence: Synthetic peptide
  Seed: IFSARSALIL
IGSARSALIY

SEQ ID NO: 28903 - protein, 10 aa, Artificial Sequence
  Description of Artificial Sequence: Synthetic peptide
  Seed: IFSARSALIL
IHSARSALII

SEQ ID NO: 28904 - protein, 10 aa, Artificial Sequence
  Description of Artificial Sequence: Synthetic peptide
  Seed: IFSARSALIL
IHSARSALIL

SEQ ID NO: 28905 - protein, 10 aa, Artificial Sequence
  Description of Artificial Sequence: Synthetic peptide
  Seed: IFSARSALIL
IHSARSALIF

SEQ ID NO: 28906 - protein, 10 aa, Artificial Sequence
  Description of Artificial Sequence: Synthetic peptide
  Seed: IFSARSALIL
ILSARSALIM

SEQ ID NO: 28907 - protein, 10 aa, Artificial Sequence
  Description of Artificial Sequence: Synthetic peptide
  Seed: IFSARSALIL
IHSARSALIW

SEQ ID NO: 28908 - protein, 10 aa, Artificial Sequence
  Description of Artificial Sequence: Synthetic peptide
  Seed: IFSARSALIL
IHSARSALIY

SEQ ID NO: 28909 - protein, 10 aa, Artificial Sequence
  Description of Artificial Sequence: Synthetic peptide
  Seed: IFSARSALIL
IISARSALII

SEQ ID NO: 28910 - protein, 10 aa, Artificial Sequence
  Description of Artificial Sequence: Synthetic peptide
  Seed: IFSARSALIL
IISARSALIL

SEQ ID NO: 28911 - protein, 10 aa, Artificial Sequence
  Description of Artificial Sequence: Synthetic peptide
  Seed: IFSARSALIL
IISARSALIM

SEQ ID NO: 28912 - protein, 10 aa, Artificial Sequence
  Description of Artificial Sequence: Synthetic peptide
  Seed: IFSARSALIL
IISARSALIF

SEQ ID NO: 28913 - protein, 10 aa, Artificial Sequence
  Description of Artificial Sequence: Synthetic peptide
  Seed: IFSARSALIL
IISARSALIW

SEQ ID NO: 28914 - protein, 10 aa, Artificial Sequence
  Description of Artificial Sequence: Synthetic peptide
  Seed: IFSARSALIL
IISARSALIY

SEQ ID NO: 28915 - protein, 10 aa, Artificial Sequence
  Description of Artificial Sequence: Synthetic peptide
  Seed: IFSARSALIL
ILSARSALII

SEQ ID NO: 28916 - protein, 10 aa, Artificial Sequence
  Description of Artificial Sequence: Synthetic peptide
  Seed: IFSARSALIL
IESARSALIW

SEQ ID NO: 28917 - protein, 10 aa, Artificial Sequence
  Description of Artificial Sequence: Synthetic peptide
  Seed: IFSARSALIL
IESARSALIF

SEQ ID NO: 28918 - protein, 10 aa, Artificial Sequence
  Description of Artificial Sequence: Synthetic peptide
  Seed: IFSARSALIL
IESARSALIM

SEQ ID NO: 28919 - protein, 10 aa, Artificial Sequence
  Description of Artificial Sequence: Synthetic peptide
  Seed: IFSARSALIL
IESARSALIL

SEQ ID NO: 28920 - protein, 10 aa, Artificial Sequence
  Description of Artificial Sequence: Synthetic peptide
  Seed: IFSARSALIL
IDSARSALII

SEQ ID NO: 28921 - protein, 10 aa, Artificial Sequence
  Description of Artificial Sequence: Synthetic peptide
  Seed: IFSARSALIL
IDSARSALIL

SEQ ID NO: 28922 - protein, 10 aa, Artificial Sequence
  Description of Artificial Sequence: Synthetic peptide
  Seed: IFSARSALIL
IDSARSALIM

SEQ ID NO: 28923 - protein, 10 aa, Artificial Sequence
  Description of Artificial Sequence: Synthetic peptide
  Seed: IFSARSALIL
IDSARSALIF

SEQ ID NO: 28924 - protein, 10 aa, Artificial Sequence
  Description of Artificial Sequence: Synthetic peptide
  Seed: IFSARSALIL
IDSARSALIW

SEQ ID NO: 28925 - protein, 10 aa, Artificial Sequence
  Description of Artificial Sequence: Synthetic peptide
  Seed: IFSARSALIL
IDSARSALIY

SEQ ID NO: 28926 - protein, 10 aa, Artificial Sequence
  Description of Artificial Sequence: Synthetic peptide
  Seed: IFSARSALIL
ICSARSALII

SEQ ID NO: 28927 - protein, 10 aa, Artificial Sequence
  Description of Artificial Sequence: Synthetic peptide
  Seed: IFSARSALIL
ICSARSALIL

SEQ ID NO: 28928 - protein, 10 aa, Artificial Sequence
  Description of Artificial Sequence: Synthetic peptide
  Seed: IFSARSALIL
ICSARSALIM

SEQ ID NO: 28929 - protein, 10 aa, Artificial Sequence
  Description of Artificial Sequence: Synthetic peptide
  Seed: IFSARSALIL
ICSARSALIF

SEQ ID NO: 28930 - protein, 10 aa, Artificial Sequence
  Description of Artificial Sequence: Synthetic peptide
  Seed: IFSARSALIL
ICSARSALIW

SEQ ID NO: 28931 - protein, 10 aa, Artificial Sequence
  Description of Artificial Sequence: Synthetic peptide
  Seed: IFSARSALIL
ICSARSALIY

SEQ ID NO: 28932 - protein, 10 aa, Artificial Sequence
  Description of Artificial Sequence: Synthetic peptide
  Seed: IFSARSALIL
IQSARSALII

SEQ ID NO: 28933 - protein, 10 aa, Artificial Sequence
  Description of Artificial Sequence: Synthetic peptide
  Seed: IFSARSALIL
IQSARSALIL

SEQ ID NO: 28934 - protein, 10 aa, Artificial Sequence
  Description of Artificial Sequence: Synthetic peptide
  Seed: IFSARSALIL
IQSARSALIM

SEQ ID NO: 28935 - protein, 10 aa, Artificial Sequence
  Description of Artificial Sequence: Synthetic peptide
  Seed: IFSARSALIL
IQSARSALIF

SEQ ID NO: 28936 - protein, 10 aa, Artificial Sequence
  Description of Artificial Sequence: Synthetic peptide
  Seed: IFSARSALIL
IQSARSALIW

SEQ ID NO: 28937 - protein, 10 aa, Artificial Sequence
  Description of Artificial Sequence: Synthetic peptide
  Seed: IFSARSALIL
IQSARSALIY

SEQ ID NO: 28938 - protein, 10 aa, Artificial Sequence
  Description of Artificial Sequence: Synthetic peptide
  Seed: IFSARSALIL
IESARSALII

SEQ ID NO: 28939 - protein, 10 aa, Artificial Sequence
  Description of Artificial Sequence: Synthetic peptide
  Seed: IFSARSALIL
ILSARSALIL

SEQ ID NO: 28940 - protein, 10 aa, Artificial Sequence
  Description of Artificial Sequence: Synthetic peptide
  Seed: IFSARSALIL
ILSARSALIF

SEQ ID NO: 28941 - protein, 10 aa, Artificial Sequence
  Description of Artificial Sequence: Synthetic peptide
  Seed: IFSARSALIL
INSARSALIW

SEQ ID NO: 28942 - protein, 10 aa, Artificial Sequence
  Description of Artificial Sequence: Synthetic peptide
  Seed: IFSARSALIL
ITSARSALIM

SEQ ID NO: 28943 - protein, 10 aa, Artificial Sequence
  Description of Artificial Sequence: Synthetic peptide
  Seed: IFSARSALIL
IPSARSALIY

SEQ ID NO: 28944 - protein, 10 aa, Artificial Sequence
  Description of Artificial Sequence: Synthetic peptide
  Seed: IFSARSALIL
ISSARSALII

SEQ ID NO: 28945 - protein, 10 aa, Artificial Sequence
  Description of Artificial Sequence: Synthetic peptide
  Seed: IFSARSALIL
ISSARSALIL

SEQ ID NO: 28946 - protein, 10 aa, Artificial Sequence
  Description of Artificial Sequence: Synthetic peptide
  Seed: IFSARSALIL
ISSARSALIM

SEQ ID NO: 28947 - protein, 10 aa, Artificial Sequence
  Description of Artificial Sequence: Synthetic peptide
  Seed: IFSARSALIL
ISSARSALIF

SEQ ID NO: 28948 - protein, 10 aa, Artificial Sequence
  Description of Artificial Sequence: Synthetic peptide
  Seed: IFSARSALIL
ISSARSALIW

SEQ ID NO: 28949 - protein, 10 aa, Artificial Sequence
  Description of Artificial Sequence: Synthetic peptide
  Seed: IFSARSALIL
ISSARSALIY

SEQ ID NO: 28950 - protein, 10 aa, Artificial Sequence
  Description of Artificial Sequence: Synthetic peptide
  Seed: IFSARSALIL
ITSARSALII

SEQ ID NO: 28951 - protein, 10 aa, Artificial Sequence
  Description of Artificial Sequence: Synthetic peptide
  Seed: IFSARSALIL
ITSARSALIL

SEQ ID NO: 28952 - protein, 10 aa, Artificial Sequence
  Description of Artificial Sequence: Synthetic peptide
  Seed: IFSARSALIL
ITSARSALIF

SEQ ID NO: 28953 - protein, 10 aa, Artificial Sequence
  Description of Artificial Sequence: Synthetic peptide
  Seed: IFSARSALIL
ILSARSALIW

SEQ ID NO: 28954 - protein, 10 aa, Artificial Sequence
  Description of Artificial Sequence: Synthetic peptide
  Seed: IFSARSALIL
ITSARSALIW

SEQ ID NO: 28955 - protein, 10 aa, Artificial Sequence
  Description of Artificial Sequence: Synthetic peptide
  Seed: IFSARSALIL
ITSARSALIY

SEQ ID NO: 28956 - protein, 10 aa, Artificial Sequence
  Description of Artificial Sequence: Synthetic peptide
  Seed: IFSARSALIL
IWSARSALII

SEQ ID NO: 28957 - protein, 10 aa, Artificial Sequence
  Description of Artificial Sequence: Synthetic peptide
  Seed: IFSARSALIL
IWSARSALIL

SEQ ID NO: 28958 - protein, 10 aa, Artificial Sequence
  Description of Artificial Sequence: Synthetic peptide
  Seed: IFSARSALIL
IWSARSALIM

SEQ ID NO: 28959 - protein, 10 aa, Artificial Sequence
  Description of Artificial Sequence: Synthetic peptide
  Seed: IFSARSALIL
IWSARSALIF

SEQ ID NO: 28960 - protein, 10 aa, Artificial Sequence
  Description of Artificial Sequence: Synthetic peptide
  Seed: IFSARSALIL
IWSARSALIW

SEQ ID NO: 28961 - protein, 10 aa, Artificial Sequence
  Description of Artificial Sequence: Synthetic peptide
  Seed: IFSARSALIL
IWSARSALIY

SEQ ID NO: 28962 - protein, 10 aa, Artificial Sequence
  Description of Artificial Sequence: Synthetic peptide
  Seed: IFSARSALIL
IYSARSALII

SEQ ID NO: 28963 - protein, 10 aa, Artificial Sequence
  Description of Artificial Sequence: Synthetic peptide
  Seed: IFSARSALIL
IPSARSALIW

SEQ ID NO: 28964 - protein, 10 aa, Artificial Sequence
  Description of Artificial Sequence: Synthetic peptide
  Seed: IFSARSALIL
IPSARSALIF

SEQ ID NO: 28965 - protein, 10 aa, Artificial Sequence
  Description of Artificial Sequence: Synthetic peptide
  Seed: IFSARSALIL
IPSARSALIM

SEQ ID NO: 28966 - protein, 10 aa, Artificial Sequence
  Description of Artificial Sequence: Synthetic peptide
  Seed: IFSARSALIL
IPSARSALIL

SEQ ID NO: 28967 - protein, 10 aa, Artificial Sequence
  Description of Artificial Sequence: Synthetic peptide
  Seed: IFSARSALIL
ILSARSALIY

SEQ ID NO: 28968 - protein, 10 aa, Artificial Sequence
  Description of Artificial Sequence: Synthetic peptide
  Seed: IFSARSALIL
IKSARSALII

SEQ ID NO: 28969 - protein, 10 aa, Artificial Sequence
  Description of Artificial Sequence: Synthetic peptide
  Seed: IFSARSALIL
IKSARSALIL

SEQ ID NO: 28970 - protein, 10 aa, Artificial Sequence
  Description of Artificial Sequence: Synthetic peptide
  Seed: IFSARSALIL
IKSARSALIM

SEQ ID NO: 28971 - protein, 10 aa, Artificial Sequence
  Description of Artificial Sequence: Synthetic peptide
  Seed: IFSARSALIL
IKSARSALIF

SEQ ID NO: 28972 - protein, 10 aa, Artificial Sequence
  Description of Artificial Sequence: Synthetic peptide
  Seed: IFSARSALIL
IKSARSALIW

SEQ ID NO: 28973 - protein, 10 aa, Artificial Sequence
  Description of Artificial Sequence: Synthetic peptide
  Seed: IFSARSALIL
IKSARSALIY

SEQ ID NO: 28974 - protein, 10 aa, Artificial Sequence
  Description of Artificial Sequence: Synthetic peptide
  Seed: IFSARSALIL
IMSARSALII

SEQ ID NO: 28975 - protein, 10 aa, Artificial Sequence
  Description of Artificial Sequence: Synthetic peptide
  Seed: IFSARSALIL
IMSARSALIL

SEQ ID NO: 28976 - protein, 10 aa, Artificial Sequence
  Description of Artificial Sequence: Synthetic peptide
  Seed: IFSARSALIL
IMSARSALIM

SEQ ID NO: 28977 - protein, 10 aa, Artificial Sequence
  Description of Artificial Sequence: Synthetic peptide
  Seed: IFSARSALIL
IMSARSALIF

SEQ ID NO: 28978 - protein, 10 aa, Artificial Sequence
  Description of Artificial Sequence: Synthetic peptide
  Seed: IFSARSALIL
IMSARSALIW

SEQ ID NO: 28979 - protein, 10 aa, Artificial Sequence
  Description of Artificial Sequence: Synthetic peptide
  Seed: IFSARSALIL
IMSARSALIY

SEQ ID NO: 28980 - protein, 10 aa, Artificial Sequence
  Description of Artificial Sequence: Synthetic peptide
  Seed: IFSARSALIL
IFSARSALII

SEQ ID NO: 28981 - protein, 10 aa, Artificial Sequence
  Description of Artificial Sequence: Synthetic peptide
  Seed: IFSARSALIL
IFSARSALIM

SEQ ID NO: 28982 - protein, 10 aa, Artificial Sequence
  Description of Artificial Sequence: Synthetic peptide
  Seed: IFSARSALIL
IFSARSALIF

SEQ ID NO: 28983 - protein, 10 aa, Artificial Sequence
  Description of Artificial Sequence: Synthetic peptide
  Seed: IFSARSALIL
IFSARSALIW

SEQ ID NO: 28984 - protein, 10 aa, Artificial Sequence
  Description of Artificial Sequence: Synthetic peptide
  Seed: IFSARSALIL
IFSARSALIY

SEQ ID NO: 28985 - protein, 10 aa, Artificial Sequence
  Description of Artificial Sequence: Synthetic peptide
  Seed: IFSARSALIL
IPSARSALII

SEQ ID NO: 28986 - protein, 10 aa, Artificial Sequence
  Description of Artificial Sequence: Synthetic peptide
  Seed: IFSARSALIL
INSARSALIY

SEQ ID NO: 28987 - protein, 10 aa, Artificial Sequence
  Description of Artificial Sequence: Synthetic peptide
  Seed: IFSARSALIL
INSARSALIF

SEQ ID NO: 28988 - protein, 10 aa, Artificial Sequence
  Description of Artificial Sequence: Synthetic peptide
  Seed: IAYERMCNIL
IFYERMCNIL

SEQ ID NO: 28989 - protein, 8 aa, Artificial Sequence
  Description of Artificial Sequence: Synthetic peptide
  Seed: IFSARSAL
IYSARSAY

SEQ ID NO: 28990 - protein, 8 aa, Artificial Sequence
  Description of Artificial Sequence: Synthetic peptide
  Seed: IFSARSAL
IFSARSAV

SEQ ID NO: 28991 - protein, 8 aa, Artificial Sequence
  Description of Artificial Sequence: Synthetic peptide
  Seed: IFSARSAL
IWSARSAL

SEQ ID NO: 28992 - protein, 8 aa, Artificial Sequence
  Description of Artificial Sequence: Synthetic peptide
  Seed: IFSARSAL
IWSARSAM

SEQ ID NO: 28993 - protein, 8 aa, Artificial Sequence
  Description of Artificial Sequence: Synthetic peptide
  Seed: IFSARSAL
IWSARSAF

SEQ ID NO: 28994 - protein, 8 aa, Artificial Sequence
  Description of Artificial Sequence: Synthetic peptide
  Seed: IFSARSAL
IWSARSAY

SEQ ID NO: 28995 - protein, 8 aa, Artificial Sequence
  Description of Artificial Sequence: Synthetic peptide
  Seed: IFSARSAL
IYSARSAI

SEQ ID NO: 28996 - protein, 8 aa, Artificial Sequence
  Description of Artificial Sequence: Synthetic peptide
  Seed: IFSARSAL
IYSARSAL

SEQ ID NO: 28997 - protein, 8 aa, Artificial Sequence
  Description of Artificial Sequence: Synthetic peptide
  Seed: IFSARSAL
IYSARSAM

SEQ ID NO: 28998 - protein, 8 aa, Artificial Sequence
  Description of Artificial Sequence: Synthetic peptide
  Seed: IFSARSAL
IYSARSAF

SEQ ID NO: 28999 - protein, 8 aa, Artificial Sequence
  Description of Artificial Sequence: Synthetic peptide
  Seed: IFSARSAL
IYSARSAV

SEQ ID NO: 29000 - protein, 9 aa, Artificial Sequence
  Description of Artificial Sequence: Synthetic peptide
  Seed: IFSARSALI
IMSARSALL

SEQ ID NO: 29001 - protein, 9 aa, Artificial Sequence
  Description of Artificial Sequence: Synthetic peptide
  Seed: IFSARSALI
IASARSALM

SEQ ID NO: 29002 - protein, 9 aa, Artificial Sequence
  Description of Artificial Sequence: Synthetic peptide
  Seed: IFSARSALI
IASARSALF

SEQ ID NO: 29003 - protein, 9 aa, Artificial Sequence
  Description of Artificial Sequence: Synthetic peptide
  Seed: IFSARSALI
IASARSALY

SEQ ID NO: 29004 - protein, 9 aa, Artificial Sequence
  Description of Artificial Sequence: Synthetic peptide
  Seed: IFSARSALI
IQSARSALF

SEQ ID NO: 29005 - protein, 9 aa, Artificial Sequence
  Description of Artificial Sequence: Synthetic peptide
  Seed: IFSARSALI
IHSARSALL

SEQ ID NO: 29006 - protein, 9 aa, Artificial Sequence
  Description of Artificial Sequence: Synthetic peptide
  Seed: IFSARSALI
IHSARSALM

SEQ ID NO: 29007 - protein, 9 aa, Artificial Sequence
  Description of Artificial Sequence: Synthetic peptide
  Seed: IFSARSALI
IHSARSALF

SEQ ID NO: 29008 - protein, 9 aa, Artificial Sequence
  Description of Artificial Sequence: Synthetic peptide
  Seed: IFSARSALI
IHSARSALY

SEQ ID NO: 29009 - protein, 9 aa, Artificial Sequence
  Description of Artificial Sequence: Synthetic peptide
  Seed: IFSARSALI
ILSARSALF

SEQ ID NO: 29010 - protein, 8 aa, Artificial Sequence
  Description of Artificial Sequence: Synthetic peptide
  Seed: IFSARSAL
IFSARSAY

SEQ ID NO: 29011 - protein, 8 aa, Artificial Sequence
  Description of Artificial Sequence: Synthetic peptide
  Seed: IFSARSAL
IFSARSAF

SEQ ID NO: 29012 - protein, 8 aa, Artificial Sequence
  Description of Artificial Sequence: Synthetic peptide
  Seed: IFSARSAL
IFSARSAM

SEQ ID NO: 29013 - protein, 8 aa, Artificial Sequence
  Description of Artificial Sequence: Synthetic peptide
  Seed: IFSARSAL
IFSARSAI

SEQ ID NO: 29014 - protein, 11 aa, Artificial Sequence
  Description of Artificial Sequence: Synthetic peptide
  Seed: IFLARSALILR
ILLARSALILR

SEQ ID NO: 29015 - protein, 11 aa, Artificial Sequence
  Description of Artificial Sequence: Synthetic peptide
  Seed: IFLARSALILR
ILLARSALILK

SEQ ID NO: 29016 - protein, 11 aa, Artificial Sequence
  Description of Artificial Sequence: Synthetic peptide
  Seed: IFLARSALILR
IKLARSALILR

SEQ ID NO: 29017 - protein, 11 aa, Artificial Sequence
  Description of Artificial Sequence: Synthetic peptide
  Seed: IFLARSALILR
IMLARSALILR

SEQ ID NO: 29018 - protein, 11 aa, Artificial Sequence
  Description of Artificial Sequence: Synthetic peptide
  Seed: IFLARSALILR
IMLARSALILK

SEQ ID NO: 29019 - protein, 11 aa, Artificial Sequence
  Description of Artificial Sequence: Synthetic peptide
  Seed: IFLARSALILR
IFLARSALILK

SEQ ID NO: 29020 - protein, 11 aa, Artificial Sequence
  Description of Artificial Sequence: Synthetic peptide
  Seed: IFLARSALILR
IPLARSALILR

SEQ ID NO: 29021 - protein, 11 aa, Artificial Sequence
  Description of Artificial Sequence: Synthetic peptide
  Seed: IFLARSALILR
ISLARSALILR

SEQ ID NO: 29022 - protein, 11 aa, Artificial Sequence
  Description of Artificial Sequence: Synthetic peptide
  Seed: IFLARSALILR
ISLARSALILK

SEQ ID NO: 29023 - protein, 11 aa, Artificial Sequence
  Description of Artificial Sequence: Synthetic peptide
  Seed: IFLARSALILR
ITLARSALILR

SEQ ID NO: 29024 - protein, 11 aa, Artificial Sequence
  Description of Artificial Sequence: Synthetic peptide
  Seed: IFLARSALILR
ITLARSALILK

SEQ ID NO: 29025 - protein, 11 aa, Artificial Sequence
  Description of Artificial Sequence: Synthetic peptide
  Seed: IFLARSALILR
IWLARSALILR

SEQ ID NO: 29026 - protein, 11 aa, Artificial Sequence
  Description of Artificial Sequence: Synthetic peptide
  Seed: IFLARSALILR
IWLARSALILK

SEQ ID NO: 29027 - protein, 11 aa, Artificial Sequence
  Description of Artificial Sequence: Synthetic peptide
  Seed: IFLARSALILR
IYLARSALILR

SEQ ID NO: 29028 - protein, 11 aa, Artificial Sequence
  Description of Artificial Sequence: Synthetic peptide
  Seed: IFLARSALILR
IYLARSALILK

SEQ ID NO: 29029 - protein, 11 aa, Artificial Sequence
  Description of Artificial Sequence: Synthetic peptide
  Seed: IFLARSALILR
IVLARSALILR

SEQ ID NO: 29030 - protein, 11 aa, Artificial Sequence
  Description of Artificial Sequence: Synthetic peptide
  Seed: IFLARSALILR
IVLARSALILK

SEQ ID NO: 29031 - protein, 8 aa, Artificial Sequence
  Description of Artificial Sequence: Synthetic peptide
  Seed: IFSARSAL
IMSARSAM

SEQ ID NO: 29032 - protein, 8 aa, Artificial Sequence
  Description of Artificial Sequence: Synthetic peptide
  Seed: IFSARSAL
IMSARSAF

SEQ ID NO: 29033 - protein, 9 aa, Artificial Sequence
  Description of Artificial Sequence: Synthetic peptide
  Seed: IFSARSALI
ILSARSALY

SEQ ID NO: 29034 - protein, 9 aa, Artificial Sequence
  Description of Artificial Sequence: Synthetic peptide
  Seed: IFSARSALI
IMSARSALM

SEQ ID NO: 29035 - protein, 10 aa, Artificial Sequence
  Description of Artificial Sequence: Synthetic peptide
  Seed: IFSARSALIL
INSARSALIM

SEQ ID NO: 29036 - protein, 10 aa, Artificial Sequence
  Description of Artificial Sequence: Synthetic peptide
  Seed: IFSARSALIL
IASARSALIF

SEQ ID NO: 29037 - protein, 9 aa, Artificial Sequence
  Description of Artificial Sequence: Synthetic peptide
  Seed: IFSARSALI
IYSARSALF

SEQ ID NO: 29038 - protein, 9 aa, Artificial Sequence
  Description of Artificial Sequence: Synthetic peptide
  Seed: IFSARSALI
IYSARSALW

SEQ ID NO: 29039 - protein, 9 aa, Artificial Sequence
  Description of Artificial Sequence: Synthetic peptide
  Seed: IFSARSALI
IYSARSALY

SEQ ID NO: 29040 - protein, 9 aa, Artificial Sequence
  Description of Artificial Sequence: Synthetic peptide
  Seed: IFSARSALI
IYSARSALV

SEQ ID NO: 29041 - protein, 9 aa, Artificial Sequence
  Description of Artificial Sequence: Synthetic peptide
  Seed: IFSARSALI
IVSARSALM

SEQ ID NO: 29042 - protein, 9 aa, Artificial Sequence
  Description of Artificial Sequence: Synthetic peptide
  Seed: IFSARSALI
IVSARSALY

SEQ ID NO: 29043 - protein, 10 aa, Artificial Sequence
  Description of Artificial Sequence: Synthetic peptide
  Seed: IFSARSALIL
IASARSALII

SEQ ID NO: 29044 - protein, 10 aa, Artificial Sequence
  Description of Artificial Sequence: Synthetic peptide
  Seed: IFSARSALIL
IASARSALIL

SEQ ID NO: 29045 - protein, 10 aa, Artificial Sequence
  Description of Artificial Sequence: Synthetic peptide
  Seed: IFSARSALIL
IASARSALIM

SEQ ID NO: 29046 - protein, 10 aa, Artificial Sequence
  Description of Artificial Sequence: Synthetic peptide
  Seed: IFSARSALIL
IASARSALIW

SEQ ID NO: 29047 - protein, 9 aa, Artificial Sequence
  Description of Artificial Sequence: Synthetic peptide
  Seed: IFSARSALI
IMSARSALF

SEQ ID NO: 29048 - protein, 10 aa, Artificial Sequence
  Description of Artificial Sequence: Synthetic peptide
  Seed: IFSARSALIL
IASARSALIY

SEQ ID NO: 29049 - protein, 10 aa, Artificial Sequence
  Description of Artificial Sequence: Synthetic peptide
  Seed: IFSARSALIL
IRSARSALII

SEQ ID NO: 29050 - protein, 10 aa, Artificial Sequence
  Description of Artificial Sequence: Synthetic peptide
  Seed: IFSARSALIL
IRSARSALIL

SEQ ID NO: 29051 - protein, 10 aa, Artificial Sequence
  Description of Artificial Sequence: Synthetic peptide
  Seed: IFSARSALIL
IRSARSALIM

SEQ ID NO: 29052 - protein, 10 aa, Artificial Sequence
  Description of Artificial Sequence: Synthetic peptide
  Seed: IFSARSALIL
IRSARSALIF

SEQ ID NO: 29053 - protein, 10 aa, Artificial Sequence
  Description of Artificial Sequence: Synthetic peptide
  Seed: IFSARSALIL
IRSARSALIW

SEQ ID NO: 29054 - protein, 10 aa, Artificial Sequence
  Description of Artificial Sequence: Synthetic peptide
  Seed: IFSARSALIL
IRSARSALIY

SEQ ID NO: 29055 - protein, 10 aa, Artificial Sequence
  Description of Artificial Sequence: Synthetic peptide
  Seed: IFSARSALIL
INSARSALII

SEQ ID NO: 29056 - protein, 10 aa, Artificial Sequence
  Description of Artificial Sequence: Synthetic peptide
  Seed: IFSARSALIL
INSARSALIL

SEQ ID NO: 29057 - protein, 9 aa, Artificial Sequence
  Description of Artificial Sequence: Synthetic peptide
  Seed: IFSARSALI
IYSARSALM

SEQ ID NO: 29058 - protein, 9 aa, Artificial Sequence
  Description of Artificial Sequence: Synthetic peptide
  Seed: IFSARSALI
IYSARSALL

SEQ ID NO: 29059 - protein, 9 aa, Artificial Sequence
  Description of Artificial Sequence: Synthetic peptide
  Seed: IFSARSALI
IYSARSALI

SEQ ID NO: 29060 - protein, 9 aa, Artificial Sequence
  Description of Artificial Sequence: Synthetic peptide
  Seed: IFSARSALI
IYSARSALH

SEQ ID NO: 29061 - protein, 9 aa, Artificial Sequence
  Description of Artificial Sequence: Synthetic peptide
  Seed: IFSARSALI
IMSARSALW

SEQ ID NO: 29062 - protein, 9 aa, Artificial Sequence
  Description of Artificial Sequence: Synthetic peptide
  Seed: IFSARSALI
IMSARSALY

SEQ ID NO: 29063 - protein, 9 aa, Artificial Sequence
  Description of Artificial Sequence: Synthetic peptide
  Seed: IFSARSALI
IFSARSALH

SEQ ID NO: 29064 - protein, 9 aa, Artificial Sequence
  Description of Artificial Sequence: Synthetic peptide
  Seed: IFSARSALI
IFSARSALL

SEQ ID NO: 29065 - protein, 9 aa, Artificial Sequence
  Description of Artificial Sequence: Synthetic peptide
  Seed: IFSARSALI
IFSARSALM

SEQ ID NO: 29066 - protein, 9 aa, Artificial Sequence
  Description of Artificial Sequence: Synthetic peptide
  Seed: IFSARSALI
IFSARSALF

SEQ ID NO: 29067 - protein, 9 aa, Artificial Sequence
  Description of Artificial Sequence: Synthetic peptide
  Seed: IFSARSALI
IFSARSALW

SEQ ID NO: 29068 - protein, 9 aa, Artificial Sequence
  Description of Artificial Sequence: Synthetic peptide
  Seed: IFSARSALI
IFSARSALY

SEQ ID NO: 29069 - protein, 9 aa, Artificial Sequence
  Description of Artificial Sequence: Synthetic peptide
  Seed: IFSARSALI
IFSARSALV

SEQ ID NO: 29070 - protein, 9 aa, Artificial Sequence
  Description of Artificial Sequence: Synthetic peptide
  Seed: IFSARSALI
ISSARSALY

SEQ ID NO: 29071 - protein, 9 aa, Artificial Sequence
  Description of Artificial Sequence: Synthetic peptide
  Seed: IFSARSALI
ITSARSALY

SEQ ID NO: 29072 - protein, 9 aa, Artificial Sequence
  Description of Artificial Sequence: Synthetic peptide
  Seed: IFSARSALI
IWSARSALI

SEQ ID NO: 29073 - protein, 9 aa, Artificial Sequence
  Description of Artificial Sequence: Synthetic peptide
  Seed: IFSARSALI
IWSARSALL

SEQ ID NO: 29074 - protein, 9 aa, Artificial Sequence
  Description of Artificial Sequence: Synthetic peptide
  Seed: IFSARSALI
IWSARSALM

SEQ ID NO: 29075 - protein, 9 aa, Artificial Sequence
  Description of Artificial Sequence: Synthetic peptide
  Seed: IFSARSALI
IWSARSALF

SEQ ID NO: 29076 - protein, 9 aa, Artificial Sequence
  Description of Artificial Sequence: Synthetic peptide
  Seed: IFSARSALI
IWSARSALW

SEQ ID NO: 29077 - protein, 9 aa, Artificial Sequence
  Description of Artificial Sequence: Synthetic peptide
  Seed: IFSARSALI
IWSARSALY

SEQ ID NO: 29078 - protein, 9 aa, Artificial Sequence
  Description of Artificial Sequence: Synthetic peptide
  Seed: IFSARSALI
IWSARSALV

SEQ ID NO: 29079 - protein, 9 aa, Artificial Sequence
  Description of Artificial Sequence: Synthetic peptide
  Seed: IFSARSALI
IYSARSALA

SEQ ID NO: 29080 - protein, 10 aa, Artificial Sequence
  Description of Artificial Sequence: Synthetic peptide
  Seed: IFSARSALIL
IYSARSALIL

SEQ ID NO: 29081 - protein, 10 aa, Artificial Sequence
  Description of Artificial Sequence: Synthetic peptide
  Seed: IFSARSALIL
IYSARSALIM

SEQ ID NO: 29082 - protein, 10 aa, Artificial Sequence
  Description of Artificial Sequence: Synthetic peptide
  Seed: IFSARSALIL
IYSARSALIF

SEQ ID NO: 29083 - protein, 9 aa, Artificial Sequence
  Description of Artificial Sequence: Synthetic peptide
  Seed: IIRMMENAR
IVRMMENAV

SEQ ID NO: 29084 - protein, 9 aa, Artificial Sequence
  Description of Artificial Sequence: Synthetic peptide
  Seed: IIRMMENAR
ITRMMENAV

SEQ ID NO: 29085 - protein, 9 aa, Artificial Sequence
  Description of Artificial Sequence: Synthetic peptide
  Seed: IIRMMENAR
IWRMMENAR

SEQ ID NO: 29086 - protein, 9 aa, Artificial Sequence
  Description of Artificial Sequence: Synthetic peptide
  Seed: IIRMMENAR
IWRMMENAK

SEQ ID NO: 29087 - protein, 9 aa, Artificial Sequence
  Description of Artificial Sequence: Synthetic peptide
  Seed: IIRMMENAR
IYRMMENAA

SEQ ID NO: 29088 - protein, 9 aa, Artificial Sequence
  Description of Artificial Sequence: Synthetic peptide
  Seed: IIRMMENAR
IYRMMENAR

SEQ ID NO: 29089 - protein, 9 aa, Artificial Sequence
  Description of Artificial Sequence: Synthetic peptide
  Seed: IIRMMENAR
IYRMMENAK

SEQ ID NO: 29090 - protein, 9 aa, Artificial Sequence
  Description of Artificial Sequence: Synthetic peptide
  Seed: IIRMMENAR
IVRMMENAA

SEQ ID NO: 29091 - protein, 9 aa, Artificial Sequence
  Description of Artificial Sequence: Synthetic peptide
  Seed: IIRMMENAR
IVRMMENAR

SEQ ID NO: 29092 - protein, 9 aa, Artificial Sequence
  Description of Artificial Sequence: Synthetic peptide
  Seed: IIRMMENAR
IVRMMENAK

SEQ ID NO: 29093 - protein, 9 aa, Artificial Sequence
  Description of Artificial Sequence: Synthetic peptide
  Seed: IIRMMESAR
IARMMESAA

SEQ ID NO: 29094 - protein, 9 aa, Artificial Sequence
  Description of Artificial Sequence: Synthetic peptide
  Seed: IIRMMESAR
IMRMMESAR

SEQ ID NO: 29095 - protein, 9 aa, Artificial Sequence
  Description of Artificial Sequence: Synthetic peptide
  Seed: IIRMMESAR
IARMMESAR

SEQ ID NO: 29096 - protein, 9 aa, Artificial Sequence
  Description of Artificial Sequence: Synthetic peptide
  Seed: IIRMMESAR
IARMMESAK

SEQ ID NO: 29097 - protein, 9 aa, Artificial Sequence
  Description of Artificial Sequence: Synthetic peptide
  Seed: IIRMMESAR
INRMMESAR

SEQ ID NO: 29098 - protein, 9 aa, Artificial Sequence
  Description of Artificial Sequence: Synthetic peptide
  Seed: IIRMMESAR
INRMMESAK

SEQ ID NO: 29099 - protein, 9 aa, Artificial Sequence
  Description of Artificial Sequence: Synthetic peptide
  Seed: IIRMMESAR
IQRMMESAR

SEQ ID NO: 29100 - protein, 9 aa, Artificial Sequence
  Description of Artificial Sequence: Synthetic peptide
  Seed: IIRMMESAR
IQRMMESAK

SEQ ID NO: 29101 - protein, 9 aa, Artificial Sequence
  Description of Artificial Sequence: Synthetic peptide
  Seed: IIRMMESAR
IGRMMESAR

SEQ ID NO: 29102 - protein, 9 aa, Artificial Sequence
  Description of Artificial Sequence: Synthetic peptide
  Seed: IIRMMESAR
ILRMMESAR

SEQ ID NO: 29103 - protein, 9 aa, Artificial Sequence
  Description of Artificial Sequence: Synthetic peptide
  Seed: IIRMMENAR
ITRMMENAY

SEQ ID NO: 29104 - protein, 9 aa, Artificial Sequence
  Description of Artificial Sequence: Synthetic peptide
  Seed: IIRMMENAR
ITRMMENAS

SEQ ID NO: 29105 - protein, 9 aa, Artificial Sequence
  Description of Artificial Sequence: Synthetic peptide
  Seed: IIRMMENAR
ITRMMENAM

SEQ ID NO: 29106 - protein, 9 aa, Artificial Sequence
  Description of Artificial Sequence: Synthetic peptide
  Seed: IIRMMENAR
ITRMMENAK

SEQ ID NO: 29107 - protein, 9 aa, Artificial Sequence
  Description of Artificial Sequence: Synthetic peptide
  Seed: IIRMMENAR
IGRMMENAR

SEQ ID NO: 29108 - protein, 9 aa, Artificial Sequence
  Description of Artificial Sequence: Synthetic peptide
  Seed: IIRMMENAR
ILRMMENAR

SEQ ID NO: 29109 - protein, 9 aa, Artificial Sequence
  Description of Artificial Sequence: Synthetic peptide
  Seed: IIRMMENAR
ILRMMENAK

SEQ ID NO: 29110 - protein, 9 aa, Artificial Sequence
  Description of Artificial Sequence: Synthetic peptide
  Seed: IIRMMENAR
IMRMMENAR

SEQ ID NO: 29111 - protein, 9 aa, Artificial Sequence
  Description of Artificial Sequence: Synthetic peptide
  Seed: IIRMMENAR
IMRMMENAK

SEQ ID NO: 29112 - protein, 9 aa, Artificial Sequence
  Description of Artificial Sequence: Synthetic peptide
  Seed: IIRMMENAR
IFRMMENAR

SEQ ID NO: 29113 - protein, 9 aa, Artificial Sequence
  Description of Artificial Sequence: Synthetic peptide
  Seed: IIRMMENAR
IFRMMENAK

SEQ ID NO: 29114 - protein, 9 aa, Artificial Sequence
  Description of Artificial Sequence: Synthetic peptide
  Seed: IIRMMENAR
ISRMMENAA

SEQ ID NO: 29115 - protein, 9 aa, Artificial Sequence
  Description of Artificial Sequence: Synthetic peptide
  Seed: IIRMMENAR
ISRMMENAR

SEQ ID NO: 29116 - protein, 9 aa, Artificial Sequence
  Description of Artificial Sequence: Synthetic peptide
  Seed: IIRMMENAR
ISRMMENAI

SEQ ID NO: 29117 - protein, 9 aa, Artificial Sequence
  Description of Artificial Sequence: Synthetic peptide
  Seed: IIRMMENAR
ISRMMENAK

SEQ ID NO: 29118 - protein, 9 aa, Artificial Sequence
  Description of Artificial Sequence: Synthetic peptide
  Seed: IIRMMENAR
ISRMMENAS

SEQ ID NO: 29119 - protein, 9 aa, Artificial Sequence
  Description of Artificial Sequence: Synthetic peptide
  Seed: IIRMMENAR
ISRMMENAY

SEQ ID NO: 29120 - protein, 9 aa, Artificial Sequence
  Description of Artificial Sequence: Synthetic peptide
  Seed: IIRMMENAR
ISRMMENAV

SEQ ID NO: 29121 - protein, 9 aa, Artificial Sequence
  Description of Artificial Sequence: Synthetic peptide
  Seed: IIRMMENAR
ITRMMENAA

SEQ ID NO: 29122 - protein, 9 aa, Artificial Sequence
  Description of Artificial Sequence: Synthetic peptide
  Seed: IIRMMENAR
ITRMMENAR

SEQ ID NO: 29123 - protein, 9 aa, Artificial Sequence
  Description of Artificial Sequence: Synthetic peptide
  Seed: IIRMMENAR
ITRMMENAI

SEQ ID NO: 29124 - protein, 9 aa, Artificial Sequence
  Description of Artificial Sequence: Synthetic peptide
  Seed: IIRMMENAR
ITRMMENAL

SEQ ID NO: 29125 - protein, 9 aa, Artificial Sequence
  Description of Artificial Sequence: Synthetic peptide
  Seed: IIRMMESAR
ILRMMESAK

SEQ ID NO: 29126 - protein, 9 aa, Artificial Sequence
  Description of Artificial Sequence: Synthetic peptide
  Seed: IIRMMESAR
IMRMMESAK

SEQ ID NO: 29127 - protein, 10 aa, Artificial Sequence
  Description of Artificial Sequence: Synthetic peptide
  Seed: IFSARSALIL
IYSARSALIW

SEQ ID NO: 29128 - protein, 9 aa, Artificial Sequence
  Description of Artificial Sequence: Synthetic peptide
  Seed: ILKGKFQTA
IGKGKFQTV

SEQ ID NO: 29129 - protein, 9 aa, Artificial Sequence
  Description of Artificial Sequence: Synthetic peptide
  Seed: ILKGKFQTA
ICKGKFQTL

SEQ ID NO: 29130 - protein, 9 aa, Artificial Sequence
  Description of Artificial Sequence: Synthetic peptide
  Seed: ILKGKFQTA
ICKGKFQTM

SEQ ID NO: 29131 - protein, 9 aa, Artificial Sequence
  Description of Artificial Sequence: Synthetic peptide
  Seed: ILKGKFQTA
IQKGKFQTI

SEQ ID NO: 29132 - protein, 9 aa, Artificial Sequence
  Description of Artificial Sequence: Synthetic peptide
  Seed: ILKGKFQTA
IQKGKFQTL

SEQ ID NO: 29133 - protein, 9 aa, Artificial Sequence
  Description of Artificial Sequence: Synthetic peptide
  Seed: ILKGKFQTA
IQKGKFQTM

SEQ ID NO: 29134 - protein, 9 aa, Artificial Sequence
  Description of Artificial Sequence: Synthetic peptide
  Seed: ILKGKFQTA
IQKGKFQTV

SEQ ID NO: 29135 - protein, 9 aa, Artificial Sequence
  Description of Artificial Sequence: Synthetic peptide
  Seed: ILKGKFQTA
IGKGKFQTI

SEQ ID NO: 29136 - protein, 9 aa, Artificial Sequence
  Description of Artificial Sequence: Synthetic peptide
  Seed: ILKGKFQTA
IGKGKFQTL

SEQ ID NO: 29137 - protein, 9 aa, Artificial Sequence
  Description of Artificial Sequence: Synthetic peptide
  Seed: ILKGKFQTA
IGKGKFQTM

SEQ ID NO: 29138 - protein, 9 aa, Artificial Sequence
  Description of Artificial Sequence: Synthetic peptide
  Seed: ILKGKFQTA
IIKGKFQTA

SEQ ID NO: 29139 - protein, 9 aa, Artificial Sequence
  Description of Artificial Sequence: Synthetic peptide
  Seed: IIRMMESAR
IFRMMESAR

SEQ ID NO: 29140 - protein, 9 aa, Artificial Sequence
  Description of Artificial Sequence: Synthetic peptide
  Seed: ILKGKFQTA
IIKGKFQTC

SEQ ID NO: 29141 - protein, 9 aa, Artificial Sequence
  Description of Artificial Sequence: Synthetic peptide
  Seed: ILKGKFQTA
IIKGKFQTI

SEQ ID NO: 29142 - protein, 9 aa, Artificial Sequence
  Description of Artificial Sequence: Synthetic peptide
  Seed: ILKGKFQTA
IIKGKFQTL

SEQ ID NO: 29143 - protein, 9 aa, Artificial Sequence
  Description of Artificial Sequence: Synthetic peptide
  Seed: ILKGKFQTA
IIKGKFQTM

SEQ ID NO: 29144 - protein, 9 aa, Artificial Sequence
  Description of Artificial Sequence: Synthetic peptide
  Seed: ILKGKFQTA
IIKGKFQTF

SEQ ID NO: 29145 - protein, 9 aa, Artificial Sequence
  Description of Artificial Sequence: Synthetic peptide
  Seed: ILKGKFQTA
IIKGKFQTV

SEQ ID NO: 29146 - protein, 9 aa, Artificial Sequence
  Description of Artificial Sequence: Synthetic peptide
  Seed: ILKGKFQTA
ILKGKFQTC

SEQ ID NO: 29147 - protein, 9 aa, Artificial Sequence
  Description of Artificial Sequence: Synthetic peptide
  Seed: ILKGKFQTA
ILKGKFQTI

SEQ ID NO: 29148 - protein, 9 aa, Artificial Sequence
  Description of Artificial Sequence: Synthetic peptide
  Seed: ILKGKFQTA
ILKGKFQTL

SEQ ID NO: 29149 - protein, 9 aa, Artificial Sequence
  Description of Artificial Sequence: Synthetic peptide
  Seed: ILKGKFQTA
INKGKFQTV

SEQ ID NO: 29150 - protein, 9 aa, Artificial Sequence
  Description of Artificial Sequence: Synthetic peptide
  Seed: ILKGKFQTA
INKGKFQTM

SEQ ID NO: 29151 - protein, 9 aa, Artificial Sequence
  Description of Artificial Sequence: Synthetic peptide
  Seed: ILKGKFQTA
INKGKFQTL

SEQ ID NO: 29152 - protein, 9 aa, Artificial Sequence
  Description of Artificial Sequence: Synthetic peptide
  Seed: ILKGKFQTA
INKGKFQTI

SEQ ID NO: 29153 - protein, 9 aa, Artificial Sequence
  Description of Artificial Sequence: Synthetic peptide
  Seed: IIRMMESAR
IFRMMESAK

SEQ ID NO: 29154 - protein, 9 aa, Artificial Sequence
  Description of Artificial Sequence: Synthetic peptide
  Seed: IIRMMESAR
ISRMMESAR

SEQ ID NO: 29155 - protein, 9 aa, Artificial Sequence
  Description of Artificial Sequence: Synthetic peptide
  Seed: IIRMMESAR
ISRMMESAK

SEQ ID NO: 29156 - protein, 9 aa, Artificial Sequence
  Description of Artificial Sequence: Synthetic peptide
  Seed: IIRMMESAR
ITRMMESAR

SEQ ID NO: 29157 - protein, 9 aa, Artificial Sequence
  Description of Artificial Sequence: Synthetic peptide
  Seed: IIRMMESAR
ITRMMESAK

SEQ ID NO: 29158 - protein, 9 aa, Artificial Sequence
  Description of Artificial Sequence: Synthetic peptide
  Seed: IIRMMESAR
IWRMMESAR

SEQ ID NO: 29159 - protein, 9 aa, Artificial Sequence
  Description of Artificial Sequence: Synthetic peptide
  Seed: IIRMMESAR
IWRMMESAK

SEQ ID NO: 29160 - protein, 9 aa, Artificial Sequence
  Description of Artificial Sequence: Synthetic peptide
  Seed: IIRMMESAR
IYRMMESAR

SEQ ID NO: 29161 - protein, 9 aa, Artificial Sequence
  Description of Artificial Sequence: Synthetic peptide
  Seed: IIRMMESAR
IYRMMESAK

SEQ ID NO: 29162 - protein, 9 aa, Artificial Sequence
  Description of Artificial Sequence: Synthetic peptide
  Seed: IIRMMESAR
IVRMMESAR

SEQ ID NO: 29163 - protein, 9 aa, Artificial Sequence
  Description of Artificial Sequence: Synthetic peptide
  Seed: IIRMMESAR
IVRMMESAK

SEQ ID NO: 29164 - protein, 9 aa, Artificial Sequence
  Description of Artificial Sequence: Synthetic peptide
  Seed: ILKGKFQTA
IAKGKFQTA

SEQ ID NO: 29165 - protein, 9 aa, Artificial Sequence
  Description of Artificial Sequence: Synthetic peptide
  Seed: ILKGKFQTA
IAKGKFQTI

SEQ ID NO: 29166 - protein, 9 aa, Artificial Sequence
  Description of Artificial Sequence: Synthetic peptide
  Seed: ILKGKFQTA
IAKGKFQTL

SEQ ID NO: 29167 - protein, 9 aa, Artificial Sequence
  Description of Artificial Sequence: Synthetic peptide
  Seed: ILKGKFQTA
IAKGKFQTM

SEQ ID NO: 29168 - protein, 9 aa, Artificial Sequence
  Description of Artificial Sequence: Synthetic peptide
  Seed: ILKGKFQTA
IAKGKFQTF

SEQ ID NO: 29169 - protein, 9 aa, Artificial Sequence
  Description of Artificial Sequence: Synthetic peptide
  Seed: ILKGKFQTA
IAKGKFQTV

SEQ ID NO: 29170 - protein, 9 aa, Artificial Sequence
  Description of Artificial Sequence: Synthetic peptide
  Seed: ILKGKFQTA
IRKGKFQTL

SEQ ID NO: 29171 - protein, 9 aa, Artificial Sequence
  Description of Artificial Sequence: Synthetic peptide
  Seed: ILKGKFQTA
IRKGKFQTM

SEQ ID NO: 29172 - protein, 9 aa, Artificial Sequence
  Description of Artificial Sequence: Synthetic peptide
  Seed: IIRMMENAR
IQRMMENAR

SEQ ID NO: 29173 - protein, 9 aa, Artificial Sequence
  Description of Artificial Sequence: Synthetic peptide
  Seed: IIRMMENAR
INRMMENAR

SEQ ID NO: 29174 - protein, 9 aa, Artificial Sequence
  Description of Artificial Sequence: Synthetic peptide
  Seed: IIRMMENAR
IARMMENAR

SEQ ID NO: 29175 - protein, 11 aa, Artificial Sequence
  Description of Artificial Sequence: Synthetic peptide
  Seed: IFSARSALILR
IYSARSALILR

SEQ ID NO: 29176 - protein, 11 aa, Artificial Sequence
  Description of Artificial Sequence: Synthetic peptide
  Seed: IFSARSALILR
IMSARSALILK

SEQ ID NO: 29177 - protein, 11 aa, Artificial Sequence
  Description of Artificial Sequence: Synthetic peptide
  Seed: IFSARSALILR
IFSARSALILK

SEQ ID NO: 29178 - protein, 11 aa, Artificial Sequence
  Description of Artificial Sequence: Synthetic peptide
  Seed: IFSARSALILR
IPSARSALILR

SEQ ID NO: 29179 - protein, 11 aa, Artificial Sequence
  Description of Artificial Sequence: Synthetic peptide
  Seed: IFSARSALILR
ISSARSALILR

SEQ ID NO: 29180 - protein, 11 aa, Artificial Sequence
  Description of Artificial Sequence: Synthetic peptide
  Seed: IFSARSALILR
ISSARSALILK

SEQ ID NO: 29181 - protein, 11 aa, Artificial Sequence
  Description of Artificial Sequence: Synthetic peptide
  Seed: IFSARSALILR
ITSARSALILR

SEQ ID NO: 29182 - protein, 11 aa, Artificial Sequence
  Description of Artificial Sequence: Synthetic peptide
  Seed: IFSARSALILR
ITSARSALILK

SEQ ID NO: 29183 - protein, 11 aa, Artificial Sequence
  Description of Artificial Sequence: Synthetic peptide
  Seed: IFSARSALILR
IWSARSALILR

SEQ ID NO: 29184 - protein, 11 aa, Artificial Sequence
  Description of Artificial Sequence: Synthetic peptide
  Seed: IFSARSALILR
IWSARSALILK

SEQ ID NO: 29185 - protein, 11 aa, Artificial Sequence
  Description of Artificial Sequence: Synthetic peptide
  Seed: IFSARSALILR
IYSARSALILK

SEQ ID NO: 29186 - protein, 9 aa, Artificial Sequence
  Description of Artificial Sequence: Synthetic peptide
  Seed: IIRMMEGAK
IVRMMEGAK

SEQ ID NO: 29187 - protein, 11 aa, Artificial Sequence
  Description of Artificial Sequence: Synthetic peptide
  Seed: IFSARSALILR
IVSARSALILR

SEQ ID NO: 29188 - protein, 11 aa, Artificial Sequence
  Description of Artificial Sequence: Synthetic peptide
  Seed: IFSARSALILR
IVSARSALILK

SEQ ID NO: 29189 - protein, 10 aa, Artificial Sequence
  Description of Artificial Sequence: Synthetic peptide
  Seed: IGTMVMELIR
IATMVMELIR

SEQ ID NO: 29190 - protein, 10 aa, Artificial Sequence
  Description of Artificial Sequence: Synthetic peptide
  Seed: IGTMVMELIR
IATMVMELIK

SEQ ID NO: 29191 - protein, 10 aa, Artificial Sequence
  Description of Artificial Sequence: Synthetic peptide
  Seed: IGTMVMELIR
IRTMVMELIR

SEQ ID NO: 29192 - protein, 10 aa, Artificial Sequence
  Description of Artificial Sequence: Synthetic peptide
  Seed: IGTMVMELIR
IRTMVMELIK

SEQ ID NO: 29193 - protein, 10 aa, Artificial Sequence
  Description of Artificial Sequence: Synthetic peptide
  Seed: IGTMVMELIR
INTMVMELIR

SEQ ID NO: 29194 - protein, 10 aa, Artificial Sequence
  Description of Artificial Sequence: Synthetic peptide
  Seed: IGTMVMELIR
IDTMVMELIR

SEQ ID NO: 29195 - protein, 10 aa, Artificial Sequence
  Description of Artificial Sequence: Synthetic peptide
  Seed: IGTMVMELIR
ICTMVMELIR

SEQ ID NO: 29196 - protein, 11 aa, Artificial Sequence
  Description of Artificial Sequence: Synthetic peptide
  Seed: IFSARSALILR
IMSARSALILR

SEQ ID NO: 29197 - protein, 11 aa, Artificial Sequence
  Description of Artificial Sequence: Synthetic peptide
  Seed: IFSARSALILR
IKSARSALILR

SEQ ID NO: 29198 - protein, 11 aa, Artificial Sequence
  Description of Artificial Sequence: Synthetic peptide
  Seed: IFSARSALILR
ILSARSALILK

SEQ ID NO: 29199 - protein, 11 aa, Artificial Sequence
  Description of Artificial Sequence: Synthetic peptide
  Seed: IFSARSALILR
ILSARSALILR

SEQ ID NO: 29200 - protein, 10 aa, Artificial Sequence
  Description of Artificial Sequence: Synthetic peptide
  Seed: IFSARSALIL
IYSARSALIY

SEQ ID NO: 29201 - protein, 10 aa, Artificial Sequence
  Description of Artificial Sequence: Synthetic peptide
  Seed: IFSARSALIL
IVSARSALII

SEQ ID NO: 29202 - protein, 10 aa, Artificial Sequence
  Description of Artificial Sequence: Synthetic peptide
  Seed: IFSARSALIL
IVSARSALIL

SEQ ID NO: 29203 - protein, 10 aa, Artificial Sequence
  Description of Artificial Sequence: Synthetic peptide
  Seed: IFSARSALIL
IVSARSALIM

SEQ ID NO: 29204 - protein, 10 aa, Artificial Sequence
  Description of Artificial Sequence: Synthetic peptide
  Seed: IFSARSALIL
IVSARSALIF

SEQ ID NO: 29205 - protein, 10 aa, Artificial Sequence
  Description of Artificial Sequence: Synthetic peptide
  Seed: IFSARSALIL
IVSARSALIW

SEQ ID NO: 29206 - protein, 10 aa, Artificial Sequence
  Description of Artificial Sequence: Synthetic peptide
  Seed: IFSARSALIL
IVSARSALIY

SEQ ID NO: 29207 - protein, 11 aa, Artificial Sequence
  Description of Artificial Sequence: Synthetic peptide
  Seed: IFSARSALILR
IASARSALILR

SEQ ID NO: 29208 - protein, 11 aa, Artificial Sequence
  Description of Artificial Sequence: Synthetic peptide
  Seed: IFSARSALILR
IRSARSALILR

SEQ ID NO: 29209 - protein, 11 aa, Artificial Sequence
  Description of Artificial Sequence: Synthetic peptide
  Seed: IFSARSALILR
INSARSALILR

SEQ ID NO: 29210 - protein, 11 aa, Artificial Sequence
  Description of Artificial Sequence: Synthetic peptide
  Seed: IFSARSALILR
IDSARSALILR

SEQ ID NO: 29211 - protein, 11 aa, Artificial Sequence
  Description of Artificial Sequence: Synthetic peptide
  Seed: IFSARSALILR
ICSARSALILR

SEQ ID NO: 29212 - protein, 11 aa, Artificial Sequence
  Description of Artificial Sequence: Synthetic peptide
  Seed: IFSARSALILR
IQSARSALILR

SEQ ID NO: 29213 - protein, 11 aa, Artificial Sequence
  Description of Artificial Sequence: Synthetic peptide
  Seed: IFSARSALILR
IQSARSALILK

SEQ ID NO: 29214 - protein, 11 aa, Artificial Sequence
  Description of Artificial Sequence: Synthetic peptide
  Seed: IFSARSALILR
IESARSALILR

SEQ ID NO: 29215 - protein, 11 aa, Artificial Sequence
  Description of Artificial Sequence: Synthetic peptide
  Seed: IFSARSALILR
IGSARSALILR

SEQ ID NO: 29216 - protein, 11 aa, Artificial Sequence
  Description of Artificial Sequence: Synthetic peptide
  Seed: IFSARSALILR
IHSARSALILR

SEQ ID NO: 29217 - protein, 11 aa, Artificial Sequence
  Description of Artificial Sequence: Synthetic peptide
  Seed: IFSARSALILR
IISARSALILR

SEQ ID NO: 29218 - protein, 11 aa, Artificial Sequence
  Description of Artificial Sequence: Synthetic peptide
  Seed: IFSARSALILR
IISARSALILK

SEQ ID NO: 29219 - protein, 10 aa, Artificial Sequence
  Description of Artificial Sequence: Synthetic peptide
  Seed: IGTMVMELIR
IQTMVMELIR

SEQ ID NO: 29220 - protein, 10 aa, Artificial Sequence
  Description of Artificial Sequence: Synthetic peptide
  Seed: IGTMVMELIR
IQTMVMELIK

SEQ ID NO: 29221 - protein, 10 aa, Artificial Sequence
  Description of Artificial Sequence: Synthetic peptide
  Seed: IGTMVMELIR
IETMVMELIR

SEQ ID NO: 29222 - protein, 10 aa, Artificial Sequence
  Description of Artificial Sequence: Synthetic peptide
  Seed: IGTMVMELIR
IVTMVMELIK

SEQ ID NO: 29223 - protein, 9 aa, Artificial Sequence
  Description of Artificial Sequence: Synthetic peptide
  Seed: IIRMMEGAK
INRMMEGAK

SEQ ID NO: 29224 - protein, 9 aa, Artificial Sequence
  Description of Artificial Sequence: Synthetic peptide
  Seed: IIRMMEGAK
IQRMMEGAK

SEQ ID NO: 29225 - protein, 9 aa, Artificial Sequence
  Description of Artificial Sequence: Synthetic peptide
  Seed: IIRMMEGAK
IGRMMEGAK

SEQ ID NO: 29226 - protein, 9 aa, Artificial Sequence
  Description of Artificial Sequence: Synthetic peptide
  Seed: IIRMMEGAK
ILRMMEGAK

SEQ ID NO: 29227 - protein, 9 aa, Artificial Sequence
  Description of Artificial Sequence: Synthetic peptide
  Seed: IIRMMEGAK
IMRMMEGAK

SEQ ID NO: 29228 - protein, 9 aa, Artificial Sequence
  Description of Artificial Sequence: Synthetic peptide
  Seed: IIRMMEGAK
IFRMMEGAK

SEQ ID NO: 29229 - protein, 9 aa, Artificial Sequence
  Description of Artificial Sequence: Synthetic peptide
  Seed: IIRMMEGAK
ISRMMEGAA

SEQ ID NO: 29230 - protein, 9 aa, Artificial Sequence
  Description of Artificial Sequence: Synthetic peptide
  Seed: IIRMMEGAK
ISRMMEGAR

SEQ ID NO: 29231 - protein, 9 aa, Artificial Sequence
  Description of Artificial Sequence: Synthetic peptide
  Seed: IIRMMEGAK
ISRMMEGAK

SEQ ID NO: 29232 - protein, 9 aa, Artificial Sequence
  Description of Artificial Sequence: Synthetic peptide
  Seed: IIRMMEGAK
ISRMMEGAV

SEQ ID NO: 29233 - protein, 9 aa, Artificial Sequence
  Description of Artificial Sequence: Synthetic peptide
  Seed: IIRMMEGAK
ITRMMEGAA

SEQ ID NO: 29234 - protein, 9 aa, Artificial Sequence
  Description of Artificial Sequence: Synthetic peptide
  Seed: IIRMMEGAK
ITRMMEGAI

SEQ ID NO: 29235 - protein, 9 aa, Artificial Sequence
  Description of Artificial Sequence: Synthetic peptide
  Seed: IIRMMEGAK
ITRMMEGAK

SEQ ID NO: 29236 - protein, 9 aa, Artificial Sequence
  Description of Artificial Sequence: Synthetic peptide
  Seed: IIRMMEGAK
ITRMMEGAS

SEQ ID NO: 29237 - protein, 9 aa, Artificial Sequence
  Description of Artificial Sequence: Synthetic peptide
  Seed: IIRMMEGAK
ITRMMEGAY

SEQ ID NO: 29238 - protein, 9 aa, Artificial Sequence
  Description of Artificial Sequence: Synthetic peptide
  Seed: IIRMMEGAK
ITRMMEGAV

SEQ ID NO: 29239 - protein, 9 aa, Artificial Sequence
  Description of Artificial Sequence: Synthetic peptide
  Seed: IIRMMEGAK
IWRMMEGAK

SEQ ID NO: 29240 - protein, 9 aa, Artificial Sequence
  Description of Artificial Sequence: Synthetic peptide
  Seed: IIRMMEGAK
IYRMMEGAK

SEQ ID NO: 29241 - protein, 9 aa, Artificial Sequence
  Description of Artificial Sequence: Synthetic peptide
  Seed: IIRMMEGAK
IVRMMEGAA

SEQ ID NO: 29242 - protein, 9 aa, Artificial Sequence
  Description of Artificial Sequence: Synthetic peptide
  Seed: IIRMMEGAK
IARMMEGAK

SEQ ID NO: 29243 - protein, 10 aa, Artificial Sequence
  Description of Artificial Sequence: Synthetic peptide
  Seed: IGTMVMELIR
IVTMVMELIR

SEQ ID NO: 29244 - protein, 10 aa, Artificial Sequence
  Description of Artificial Sequence: Synthetic peptide
  Seed: IGTMVMELIR
IETMVMELIK

SEQ ID NO: 29245 - protein, 10 aa, Artificial Sequence
  Description of Artificial Sequence: Synthetic peptide
  Seed: IGTMVMELIR
IYTMVMELIK

SEQ ID NO: 29246 - protein, 10 aa, Artificial Sequence
  Description of Artificial Sequence: Synthetic peptide
  Seed: IGTMVMELIR
IGTMVMELIK

SEQ ID NO: 29247 - protein, 10 aa, Artificial Sequence
  Description of Artificial Sequence: Synthetic peptide
  Seed: IGTMVMELIR
IHTMVMELIR

SEQ ID NO: 29248 - protein, 10 aa, Artificial Sequence
  Description of Artificial Sequence: Synthetic peptide
  Seed: IGTMVMELIR
IITMVMELIR

SEQ ID NO: 29249 - protein, 10 aa, Artificial Sequence
  Description of Artificial Sequence: Synthetic peptide
  Seed: IGTMVMELIR
IITMVMELIK

SEQ ID NO: 29250 - protein, 10 aa, Artificial Sequence
  Description of Artificial Sequence: Synthetic peptide
  Seed: IGTMVMELIR
ILTMVMELIR

SEQ ID NO: 29251 - protein, 10 aa, Artificial Sequence
  Description of Artificial Sequence: Synthetic peptide
  Seed: IGTMVMELIR
ILTMVMELIK

SEQ ID NO: 29252 - protein, 10 aa, Artificial Sequence
  Description of Artificial Sequence: Synthetic peptide
  Seed: IGTMVMELIR
IKTMVMELIR

SEQ ID NO: 29253 - protein, 10 aa, Artificial Sequence
  Description of Artificial Sequence: Synthetic peptide
  Seed: IGTMVMELIR
IMTMVMELIR

SEQ ID NO: 29254 - protein, 10 aa, Artificial Sequence
  Description of Artificial Sequence: Synthetic peptide
  Seed: IGTMVMELIR
IMTMVMELIK

SEQ ID NO: 29255 - protein, 10 aa, Artificial Sequence
  Description of Artificial Sequence: Synthetic peptide
  Seed: IGTMVMELIR
IFTMVMELIR

SEQ ID NO: 29256 - protein, 10 aa, Artificial Sequence
  Description of Artificial Sequence: Synthetic peptide
  Seed: IGTMVMELIR
IFTMVMELIK

SEQ ID NO: 29257 - protein, 10 aa, Artificial Sequence
  Description of Artificial Sequence: Synthetic peptide
  Seed: IGTMVMELIR
IPTMVMELIR

SEQ ID NO: 29258 - protein, 10 aa, Artificial Sequence
  Description of Artificial Sequence: Synthetic peptide
  Seed: IGTMVMELIR
ISTMVMELIR

SEQ ID NO: 29259 - protein, 10 aa, Artificial Sequence
  Description of Artificial Sequence: Synthetic peptide
  Seed: IGTMVMELIR
ISTMVMELIK

SEQ ID NO: 29260 - protein, 10 aa, Artificial Sequence
  Description of Artificial Sequence: Synthetic peptide
  Seed: IGTMVMELIR
ITTMVMELIR

SEQ ID NO: 29261 - protein, 10 aa, Artificial Sequence
  Description of Artificial Sequence: Synthetic peptide
  Seed: IGTMVMELIR
ITTMVMELIK

SEQ ID NO: 29262 - protein, 10 aa, Artificial Sequence
  Description of Artificial Sequence: Synthetic peptide
  Seed: IGTMVMELIR
IWTMVMELIR

SEQ ID NO: 29263 - protein, 10 aa, Artificial Sequence
  Description of Artificial Sequence: Synthetic peptide
  Seed: IGTMVMELIR
IWTMVMELIK

SEQ ID NO: 29264 - protein, 10 aa, Artificial Sequence
  Description of Artificial Sequence: Synthetic peptide
  Seed: IGTMVMELIR
IYTMVMELIR

SEQ ID NO: 29265 - protein, 11 aa, Artificial Sequence
  Description of Artificial Sequence: Synthetic peptide
  Seed: IFLARSALILR
IILARSALILK

SEQ ID NO: 29266 - protein, 11 aa, Artificial Sequence
  Description of Artificial Sequence: Synthetic peptide
  Seed: IFLARSALILR
IILARSALILR

SEQ ID NO: 29267 - protein, 11 aa, Artificial Sequence
  Description of Artificial Sequence: Synthetic peptide
  Seed: IFLARSALILR
IHLARSALILR

SEQ ID NO: 29268 - protein, 9 aa, Artificial Sequence
  Description of Artificial Sequence: Synthetic peptide
  Seed: IERMVLSAF
IERMVLSAP

SEQ ID NO: 29269 - protein, 9 aa, Artificial Sequence
  Description of Artificial Sequence: Synthetic peptide
  Seed: IERMVLSAF
IQRMVLSAY

SEQ ID NO: 29270 - protein, 9 aa, Artificial Sequence
  Description of Artificial Sequence: Synthetic peptide
  Seed: IERMVLSAF
IQRMVLSAV

SEQ ID NO: 29271 - protein, 9 aa, Artificial Sequence
  Description of Artificial Sequence: Synthetic peptide
  Seed: IERMVLSAF
IERMVLSAA

SEQ ID NO: 29272 - protein, 9 aa, Artificial Sequence
  Description of Artificial Sequence: Synthetic peptide
  Seed: IERMVLSAF
IERMVLSAC

SEQ ID NO: 29273 - protein, 9 aa, Artificial Sequence
  Description of Artificial Sequence: Synthetic peptide
  Seed: IERMVLSAF
IERMVLSAG

SEQ ID NO: 29274 - protein, 9 aa, Artificial Sequence
  Description of Artificial Sequence: Synthetic peptide
  Seed: IERMVLSAF
IERMVLSAH

SEQ ID NO: 29275 - protein, 9 aa, Artificial Sequence
  Description of Artificial Sequence: Synthetic peptide
  Seed: IERMVLSAF
IERMVLSAI

SEQ ID NO: 29276 - protein, 9 aa, Artificial Sequence
  Description of Artificial Sequence: Synthetic peptide
  Seed: IERMVLSAF
IERMVLSAL

SEQ ID NO: 29277 - protein, 9 aa, Artificial Sequence
  Description of Artificial Sequence: Synthetic peptide
  Seed: IERMVLSAF
IERMVLSAM

SEQ ID NO: 29278 - protein, 9 aa, Artificial Sequence
  Description of Artificial Sequence: Synthetic peptide
  Seed: IERMVLSAF
IERMVLSAS

SEQ ID NO: 29279 - protein, 9 aa, Artificial Sequence
  Description of Artificial Sequence: Synthetic peptide
  Seed: IERMVLSAF
IHRMVLSAM

SEQ ID NO: 29280 - protein, 9 aa, Artificial Sequence
  Description of Artificial Sequence: Synthetic peptide
  Seed: IERMVLSAF
IERMVLSAT

SEQ ID NO: 29281 - protein, 9 aa, Artificial Sequence
  Description of Artificial Sequence: Synthetic peptide
  Seed: IERMVLSAF
IERMVLSAW

SEQ ID NO: 29282 - protein, 9 aa, Artificial Sequence
  Description of Artificial Sequence: Synthetic peptide
  Seed: IERMVLSAF
IERMVLSAY

SEQ ID NO: 29283 - protein, 9 aa, Artificial Sequence
  Description of Artificial Sequence: Synthetic peptide
  Seed: IERMVLSAF
IERMVLSAV

SEQ ID NO: 29284 - protein, 9 aa, Artificial Sequence
  Description of Artificial Sequence: Synthetic peptide
  Seed: IERMVLSAF
IGRMVLSAM

SEQ ID NO: 29285 - protein, 9 aa, Artificial Sequence
  Description of Artificial Sequence: Synthetic peptide
  Seed: IERMVLSAF
IGRMVLSAF

SEQ ID NO: 29286 - protein, 9 aa, Artificial Sequence
  Description of Artificial Sequence: Synthetic peptide
  Seed: IERMVLSAF
IGRMVLSAY

SEQ ID NO: 29287 - protein, 9 aa, Artificial Sequence
  Description of Artificial Sequence: Synthetic peptide
  Seed: IERMVLSAF
IHRMVLSAH

SEQ ID NO: 29288 - protein, 9 aa, Artificial Sequence
  Description of Artificial Sequence: Synthetic peptide
  Seed: IERMVLSAF
IHRMVLSAI

SEQ ID NO: 29289 - protein, 9 aa, Artificial Sequence
  Description of Artificial Sequence: Synthetic peptide
  Seed: IERMVLSAF
IQRMVLSAW

SEQ ID NO: 29290 - protein, 9 aa, Artificial Sequence
  Description of Artificial Sequence: Synthetic peptide
  Seed: IERMVLSAF
IQRMVLSAT

SEQ ID NO: 29291 - protein, 9 aa, Artificial Sequence
  Description of Artificial Sequence: Synthetic peptide
  Seed: IERMVLSAF
IQRMVLSAS

SEQ ID NO: 29292 - protein, 9 aa, Artificial Sequence
  Description of Artificial Sequence: Synthetic peptide
  Seed: IERMVLSAF
IQRMVLSAP

SEQ ID NO: 29293 - protein, 9 aa, Artificial Sequence
  Description of Artificial Sequence: Synthetic peptide
  Seed: IERMVLSAF
INRMVLSAY

SEQ ID NO: 29294 - protein, 9 aa, Artificial Sequence
  Description of Artificial Sequence: Synthetic peptide
  Seed: IERMVLSAF
IDRMVLSAI

SEQ ID NO: 29295 - protein, 9 aa, Artificial Sequence
  Description of Artificial Sequence: Synthetic peptide
  Seed: IERMVLSAF
IDRMVLSAL

SEQ ID NO: 29296 - protein, 9 aa, Artificial Sequence
  Description of Artificial Sequence: Synthetic peptide
  Seed: IERMVLSAF
IDRMVLSAM

SEQ ID NO: 29297 - protein, 9 aa, Artificial Sequence
  Description of Artificial Sequence: Synthetic peptide
  Seed: IERMVLSAF
IDRMVLSAF

SEQ ID NO: 29298 - protein, 9 aa, Artificial Sequence
  Description of Artificial Sequence: Synthetic peptide
  Seed: IERMVLSAF
IDRMVLSAY

SEQ ID NO: 29299 - protein, 9 aa, Artificial Sequence
  Description of Artificial Sequence: Synthetic peptide
  Seed: IERMVLSAF
IDRMVLSAV

SEQ ID NO: 29300 - protein, 9 aa, Artificial Sequence
  Description of Artificial Sequence: Synthetic peptide
  Seed: IERMVLSAF
ICRMVLSAF

SEQ ID NO: 29301 - protein, 9 aa, Artificial Sequence
  Description of Artificial Sequence: Synthetic peptide
  Seed: IERMVLSAF
ICRMVLSAY

SEQ ID NO: 29302 - protein, 9 aa, Artificial Sequence
  Description of Artificial Sequence: Synthetic peptide
  Seed: IERMVLSAF
IQRMVLSAA

SEQ ID NO: 29303 - protein, 9 aa, Artificial Sequence
  Description of Artificial Sequence: Synthetic peptide
  Seed: IERMVLSAF
IQRMVLSAN

SEQ ID NO: 29304 - protein, 9 aa, Artificial Sequence
  Description of Artificial Sequence: Synthetic peptide
  Seed: IERMVLSAF
IQRMVLSAC

SEQ ID NO: 29305 - protein, 9 aa, Artificial Sequence
  Description of Artificial Sequence: Synthetic peptide
  Seed: IERMVLSAF
IQRMVLSAQ

SEQ ID NO: 29306 - protein, 9 aa, Artificial Sequence
  Description of Artificial Sequence: Synthetic peptide
  Seed: IERMVLSAF
IQRMVLSAG

SEQ ID NO: 29307 - protein, 9 aa, Artificial Sequence
  Description of Artificial Sequence: Synthetic peptide
  Seed: IERMVLSAF
IQRMVLSAH

SEQ ID NO: 29308 - protein, 9 aa, Artificial Sequence
  Description of Artificial Sequence: Synthetic peptide
  Seed: IERMVLSAF
IQRMVLSAI

SEQ ID NO: 29309 - protein, 9 aa, Artificial Sequence
  Description of Artificial Sequence: Synthetic peptide
  Seed: IERMVLSAF
IQRMVLSAL

SEQ ID NO: 29310 - protein, 9 aa, Artificial Sequence
  Description of Artificial Sequence: Synthetic peptide
  Seed: IERMVLSAF
IQRMVLSAM

SEQ ID NO: 29311 - protein, 9 aa, Artificial Sequence
  Description of Artificial Sequence: Synthetic peptide
  Seed: IERMVLSAF
IQRMVLSAF

SEQ ID NO: 29312 - protein, 9 aa, Artificial Sequence
  Description of Artificial Sequence: Synthetic peptide
  Seed: IERMVLSAF
IHRMVLSAL

SEQ ID NO: 29313 - protein, 9 aa, Artificial Sequence
  Description of Artificial Sequence: Synthetic peptide
  Seed: IERMVLSAF
IHRMVLSAF

SEQ ID NO: 29314 - protein, 9 aa, Artificial Sequence
  Description of Artificial Sequence: Synthetic peptide
  Seed: IERMVLSAF
ISRMVLSAW

SEQ ID NO: 29315 - protein, 9 aa, Artificial Sequence
  Description of Artificial Sequence: Synthetic peptide
  Seed: IERMVLSAF
IMRMVLSAW

SEQ ID NO: 29316 - protein, 9 aa, Artificial Sequence
  Description of Artificial Sequence: Synthetic peptide
  Seed: IERMVLSAF
IKRMVLSAY

SEQ ID NO: 29317 - protein, 9 aa, Artificial Sequence
  Description of Artificial Sequence: Synthetic peptide
  Seed: IERMVLSAF
IKRMVLSAV

SEQ ID NO: 29318 - protein, 9 aa, Artificial Sequence
  Description of Artificial Sequence: Synthetic peptide
  Seed: IERMVLSAF
IMRMVLSAA

SEQ ID NO: 29319 - protein, 9 aa, Artificial Sequence
  Description of Artificial Sequence: Synthetic peptide
  Seed: IERMVLSAF
IMRMVLSAG

SEQ ID NO: 29320 - protein, 9 aa, Artificial Sequence
  Description of Artificial Sequence: Synthetic peptide
  Seed: IERMVLSAF
IMRMVLSAH

SEQ ID NO: 29321 - protein, 9 aa, Artificial Sequence
  Description of Artificial Sequence: Synthetic peptide
  Seed: IERMVLSAF
IMRMVLSAI

SEQ ID NO: 29322 - protein, 9 aa, Artificial Sequence
  Description of Artificial Sequence: Synthetic peptide
  Seed: IERMVLSAF
IMRMVLSAL

SEQ ID NO: 29323 - protein, 9 aa, Artificial Sequence
  Description of Artificial Sequence: Synthetic peptide
  Seed: IERMVLSAF
IMRMVLSAM

SEQ ID NO: 29324 - protein, 9 aa, Artificial Sequence
  Description of Artificial Sequence: Synthetic peptide
  Seed: IERMVLSAF
IMRMVLSAF

SEQ ID NO: 29325 - protein, 9 aa, Artificial Sequence
  Description of Artificial Sequence: Synthetic peptide
  Seed: IERMVLSAF
IMRMVLSAY

SEQ ID NO: 29326 - protein, 9 aa, Artificial Sequence
  Description of Artificial Sequence: Synthetic peptide
  Seed: IERMVLSAF
IHRMVLSAW

SEQ ID NO: 29327 - protein, 9 aa, Artificial Sequence
  Description of Artificial Sequence: Synthetic peptide
  Seed: IERMVLSAF
IMRMVLSAV

SEQ ID NO: 29328 - protein, 9 aa, Artificial Sequence
  Description of Artificial Sequence: Synthetic peptide
  Seed: IERMVLSAF
IFRMVLSAM

SEQ ID NO: 29329 - protein, 9 aa, Artificial Sequence
  Description of Artificial Sequence: Synthetic peptide
  Seed: IERMVLSAF
IFRMVLSAF

SEQ ID NO: 29330 - protein, 9 aa, Artificial Sequence
  Description of Artificial Sequence: Synthetic peptide
  Seed: IERMVLSAF
IFRMVLSAY

SEQ ID NO: 29331 - protein, 9 aa, Artificial Sequence
  Description of Artificial Sequence: Synthetic peptide
  Seed: IERMVLSAF
IPRMVLSAF

SEQ ID NO: 29332 - protein, 9 aa, Artificial Sequence
  Description of Artificial Sequence: Synthetic peptide
  Seed: IERMVLSAF
IPRMVLSAY

SEQ ID NO: 29333 - protein, 9 aa, Artificial Sequence
  Description of Artificial Sequence: Synthetic peptide
  Seed: IERMVLSAF
ISRMVLSAI

SEQ ID NO: 29334 - protein, 9 aa, Artificial Sequence
  Description of Artificial Sequence: Synthetic peptide
  Seed: IERMVLSAF
ISRMVLSAL

SEQ ID NO: 29335 - protein, 9 aa, Artificial Sequence
  Description of Artificial Sequence: Synthetic peptide
  Seed: IERMVLSAF
ISRMVLSAM

SEQ ID NO: 29336 - protein, 9 aa, Artificial Sequence
  Description of Artificial Sequence: Synthetic peptide
  Seed: IERMVLSAF
IKRMVLSAW

SEQ ID NO: 29337 - protein, 9 aa, Artificial Sequence
  Description of Artificial Sequence: Synthetic peptide
  Seed: IERMVLSAF
IKRMVLSAF

SEQ ID NO: 29338 - protein, 9 aa, Artificial Sequence
  Description of Artificial Sequence: Synthetic peptide
  Seed: IERMVLSAF
IKRMVLSAM

SEQ ID NO: 29339 - protein, 9 aa, Artificial Sequence
  Description of Artificial Sequence: Synthetic peptide
  Seed: IERMVLSAF
IKRMVLSAL

SEQ ID NO: 29340 - protein, 9 aa, Artificial Sequence
  Description of Artificial Sequence: Synthetic peptide
  Seed: IERMVLSAF
IHRMVLSAY

SEQ ID NO: 29341 - protein, 9 aa, Artificial Sequence
  Description of Artificial Sequence: Synthetic peptide
  Seed: IERMVLSAF
IHRMVLSAV

SEQ ID NO: 29342 - protein, 9 aa, Artificial Sequence
  Description of Artificial Sequence: Synthetic peptide
  Seed: IERMVLSAF
IIRMVLSAI

SEQ ID NO: 29343 - protein, 9 aa, Artificial Sequence
  Description of Artificial Sequence: Synthetic peptide
  Seed: IERMVLSAF
IIRMVLSAL

SEQ ID NO: 29344 - protein, 9 aa, Artificial Sequence
  Description of Artificial Sequence: Synthetic peptide
  Seed: IERMVLSAF
IIRMVLSAM

SEQ ID NO: 29345 - protein, 9 aa, Artificial Sequence
  Description of Artificial Sequence: Synthetic peptide
  Seed: IERMVLSAF
IIRMVLSAF

SEQ ID NO: 29346 - protein, 9 aa, Artificial Sequence
  Description of Artificial Sequence: Synthetic peptide
  Seed: IERMVLSAF
IIRMVLSAW

SEQ ID NO: 29347 - protein, 9 aa, Artificial Sequence
  Description of Artificial Sequence: Synthetic peptide
  Seed: IERMVLSAF
IIRMVLSAY

SEQ ID NO: 29348 - protein, 9 aa, Artificial Sequence
  Description of Artificial Sequence: Synthetic peptide
  Seed: IERMVLSAF
ILRMVLSAH

SEQ ID NO: 29349 - protein, 9 aa, Artificial Sequence
  Description of Artificial Sequence: Synthetic peptide
  Seed: IERMVLSAF
ILRMVLSAI

SEQ ID NO: 29350 - protein, 9 aa, Artificial Sequence
  Description of Artificial Sequence: Synthetic peptide
  Seed: IERMVLSAF
ILRMVLSAL

SEQ ID NO: 29351 - protein, 9 aa, Artificial Sequence
  Description of Artificial Sequence: Synthetic peptide
  Seed: IERMVLSAF
ILRMVLSAM

SEQ ID NO: 29352 - protein, 9 aa, Artificial Sequence
  Description of Artificial Sequence: Synthetic peptide
  Seed: IERMVLSAF
ILRMVLSAF

SEQ ID NO: 29353 - protein, 9 aa, Artificial Sequence
  Description of Artificial Sequence: Synthetic peptide
  Seed: IERMVLSAF
ILRMVLSAW

SEQ ID NO: 29354 - protein, 9 aa, Artificial Sequence
  Description of Artificial Sequence: Synthetic peptide
  Seed: IERMVLSAF
ILRMVLSAY

SEQ ID NO: 29355 - protein, 9 aa, Artificial Sequence
  Description of Artificial Sequence: Synthetic peptide
  Seed: IERMVLSAF
ILRMVLSAV

SEQ ID NO: 29356 - protein, 9 aa, Artificial Sequence
  Description of Artificial Sequence: Synthetic peptide
  Seed: IERMVLSAF
IKRMVLSAA

SEQ ID NO: 29357 - protein, 9 aa, Artificial Sequence
  Description of Artificial Sequence: Synthetic peptide
  Seed: IERMVLSAF
IKRMVLSAH

SEQ ID NO: 29358 - protein, 9 aa, Artificial Sequence
  Description of Artificial Sequence: Synthetic peptide
  Seed: IERMVLSAF
IKRMVLSAI

SEQ ID NO: 29359 - protein, 9 aa, Artificial Sequence
  Description of Artificial Sequence: Synthetic peptide
  Seed: IERMVLSAF
INRMVLSAF

SEQ ID NO: 29360 - protein, 9 aa, Artificial Sequence
  Description of Artificial Sequence: Synthetic peptide
  Seed: IERMVLSAF
INRMVLSAM

SEQ ID NO: 29361 - protein, 9 aa, Artificial Sequence
  Description of Artificial Sequence: Synthetic peptide
  Seed: IERMVLSAF
INRMVLSAL

SEQ ID NO: 29362 - protein, 10 aa, Artificial Sequence
  Description of Artificial Sequence: Synthetic peptide
  Seed: IAYERMCNIL
IVYERMCNIF

SEQ ID NO: 29363 - protein, 10 aa, Artificial Sequence
  Description of Artificial Sequence: Synthetic peptide
  Seed: IAYERMCNIL
IYYERMCNII

SEQ ID NO: 29364 - protein, 10 aa, Artificial Sequence
  Description of Artificial Sequence: Synthetic peptide
  Seed: IAYERMCNIL
IYYERMCNIL

SEQ ID NO: 29365 - protein, 10 aa, Artificial Sequence
  Description of Artificial Sequence: Synthetic peptide
  Seed: IAYERMCNIL
IYYERMCNIM

SEQ ID NO: 29366 - protein, 10 aa, Artificial Sequence
  Description of Artificial Sequence: Synthetic peptide
  Seed: IAYERMCNIL
IYYERMCNIF

SEQ ID NO: 29367 - protein, 10 aa, Artificial Sequence
  Description of Artificial Sequence: Synthetic peptide
  Seed: IAYERMCNIL
IYYERMCNIW

SEQ ID NO: 29368 - protein, 10 aa, Artificial Sequence
  Description of Artificial Sequence: Synthetic peptide
  Seed: IAYERMCNIL
IYYERMCNIY

SEQ ID NO: 29369 - protein, 10 aa, Artificial Sequence
  Description of Artificial Sequence: Synthetic peptide
  Seed: IAYERMCNIL
IYYERMCNIV

SEQ ID NO: 29370 - protein, 10 aa, Artificial Sequence
  Description of Artificial Sequence: Synthetic peptide
  Seed: IAYERMCNIL
IVYERMCNII

SEQ ID NO: 29371 - protein, 10 aa, Artificial Sequence
  Description of Artificial Sequence: Synthetic peptide
  Seed: IAYERMCNIL
IVYERMCNIL

SEQ ID NO: 29372 - protein, 10 aa, Artificial Sequence
  Description of Artificial Sequence: Synthetic peptide
  Seed: IAYERMCNIL
IVYERMCNIW

SEQ ID NO: 29373 - protein, 9 aa, Artificial Sequence
  Description of Artificial Sequence: Synthetic peptide
  Seed: IERMVLSAF
IRRMVLSAY

SEQ ID NO: 29374 - protein, 10 aa, Artificial Sequence
  Description of Artificial Sequence: Synthetic peptide
  Seed: IAYERMCNIL
IVYERMCNIY

SEQ ID NO: 29375 - protein, 11 aa, Artificial Sequence
  Description of Artificial Sequence: Synthetic peptide
  Seed: IAYERMCNILK
IAYERMCNILR

SEQ ID NO: 29376 - protein, 11 aa, Artificial Sequence
  Description of Artificial Sequence: Synthetic peptide
  Seed: IAYERMCNILK
IRYERMCNILR

SEQ ID NO: 29377 - protein, 11 aa, Artificial Sequence
  Description of Artificial Sequence: Synthetic peptide
  Seed: IAYERMCNILK
IRYERMCNILK

SEQ ID NO: 29378 - protein, 11 aa, Artificial Sequence
  Description of Artificial Sequence: Synthetic peptide
  Seed: IAYERMCNILK
INYERMCNILR

SEQ ID NO: 29379 - protein, 11 aa, Artificial Sequence
  Description of Artificial Sequence: Synthetic peptide
  Seed: IAYERMCNILK
ICYERMCNILR

SEQ ID NO: 29380 - protein, 11 aa, Artificial Sequence
  Description of Artificial Sequence: Synthetic peptide
  Seed: IAYERMCNILK
IQYERMCNILR

SEQ ID NO: 29381 - protein, 11 aa, Artificial Sequence
  Description of Artificial Sequence: Synthetic peptide
  Seed: IAYERMCNILK
IQYERMCNILK

SEQ ID NO: 29382 - protein, 11 aa, Artificial Sequence
  Description of Artificial Sequence: Synthetic peptide
  Seed: IAYERMCNILK
IGYERMCNILR

SEQ ID NO: 29383 - protein, 10 aa, Artificial Sequence
  Description of Artificial Sequence: Synthetic peptide
  Seed: IAYERMCNIL
IWYERMCNIW

SEQ ID NO: 29384 - protein, 10 aa, Artificial Sequence
  Description of Artificial Sequence: Synthetic peptide
  Seed: IAYERMCNIL
IWYERMCNIF

SEQ ID NO: 29385 - protein, 10 aa, Artificial Sequence
  Description of Artificial Sequence: Synthetic peptide
  Seed: IAYERMCNIL
IWYERMCNIM

SEQ ID NO: 29386 - protein, 10 aa, Artificial Sequence
  Description of Artificial Sequence: Synthetic peptide
  Seed: IAYERMCNIL
IWYERMCNIL

SEQ ID NO: 29387 - protein, 10 aa, Artificial Sequence
  Description of Artificial Sequence: Synthetic peptide
  Seed: IAYERMCNIL
IFYERMCNIF

SEQ ID NO: 29388 - protein, 10 aa, Artificial Sequence
  Description of Artificial Sequence: Synthetic peptide
  Seed: IAYERMCNIL
IFYERMCNIW

SEQ ID NO: 29389 - protein, 10 aa, Artificial Sequence
  Description of Artificial Sequence: Synthetic peptide
  Seed: IAYERMCNIL
IPYERMCNII

SEQ ID NO: 29390 - protein, 10 aa, Artificial Sequence
  Description of Artificial Sequence: Synthetic peptide
  Seed: IAYERMCNIL
IPYERMCNIL

SEQ ID NO: 29391 - protein, 10 aa, Artificial Sequence
  Description of Artificial Sequence: Synthetic peptide
  Seed: IAYERMCNIL
IPYERMCNIF

SEQ ID NO: 29392 - protein, 10 aa, Artificial Sequence
  Description of Artificial Sequence: Synthetic peptide
  Seed: IAYERMCNIL
IPYERMCNIW

SEQ ID NO: 29393 - protein, 10 aa, Artificial Sequence
  Description of Artificial Sequence: Synthetic peptide
  Seed: IAYERMCNIL
ISYERMCNII

SEQ ID NO: 29394 - protein, 10 aa, Artificial Sequence
  Description of Artificial Sequence: Synthetic peptide
  Seed: IAYERMCNIL
ISYERMCNIL

SEQ ID NO: 29395 - protein, 10 aa, Artificial Sequence
  Description of Artificial Sequence: Synthetic peptide
  Seed: IAYERMCNIL
ISYERMCNIM

SEQ ID NO: 29396 - protein, 10 aa, Artificial Sequence
  Description of Artificial Sequence: Synthetic peptide
  Seed: IAYERMCNIL
ISYERMCNIF

SEQ ID NO: 29397 - protein, 10 aa, Artificial Sequence
  Description of Artificial Sequence: Synthetic peptide
  Seed: IAYERMCNIL
ISYERMCNIW

SEQ ID NO: 29398 - protein, 10 aa, Artificial Sequence
  Description of Artificial Sequence: Synthetic peptide
  Seed: IAYERMCNIL
ISYERMCNIY

SEQ ID NO: 29399 - protein, 10 aa, Artificial Sequence
  Description of Artificial Sequence: Synthetic peptide
  Seed: IAYERMCNIL
ITYERMCNII

SEQ ID NO: 29400 - protein, 10 aa, Artificial Sequence
  Description of Artificial Sequence: Synthetic peptide
  Seed: IAYERMCNIL
ITYERMCNIL

SEQ ID NO: 29401 - protein, 10 aa, Artificial Sequence
  Description of Artificial Sequence: Synthetic peptide
  Seed: IAYERMCNIL
ITYERMCNIM

SEQ ID NO: 29402 - protein, 10 aa, Artificial Sequence
  Description of Artificial Sequence: Synthetic peptide
  Seed: IAYERMCNIL
ITYERMCNIF

SEQ ID NO: 29403 - protein, 10 aa, Artificial Sequence
  Description of Artificial Sequence: Synthetic peptide
  Seed: IAYERMCNIL
ITYERMCNIW

SEQ ID NO: 29404 - protein, 10 aa, Artificial Sequence
  Description of Artificial Sequence: Synthetic peptide
  Seed: IAYERMCNIL
ITYERMCNIY

SEQ ID NO: 29405 - protein, 10 aa, Artificial Sequence
  Description of Artificial Sequence: Synthetic peptide
  Seed: IAYERMCNIL
IWYERMCNII

SEQ ID NO: 29406 - protein, 11 aa, Artificial Sequence
  Description of Artificial Sequence: Synthetic peptide
  Seed: IAYERMCNILK
IHYERMCNILR

SEQ ID NO: 29407 - protein, 11 aa, Artificial Sequence
  Description of Artificial Sequence: Synthetic peptide
  Seed: IAYERMCNILK
IIYERMCNILR

SEQ ID NO: 29408 - protein, 11 aa, Artificial Sequence
  Description of Artificial Sequence: Synthetic peptide
  Seed: IAYERMCNILK
IIYERMCNILK

SEQ ID NO: 29409 - protein, 11 aa, Artificial Sequence
  Description of Artificial Sequence: Synthetic peptide
  Seed: IAYERMCNILK
IVYERMCNILY

SEQ ID NO: 29410 - protein, 8 aa, Artificial Sequence
  Description of Artificial Sequence: Synthetic peptide
  Seed: IEDLIFLA
IEDLIFLV

SEQ ID NO: 29411 - protein, 8 aa, Artificial Sequence
  Description of Artificial Sequence: Synthetic peptide
  Seed: IEDLIFSA
IEDLIFSI

SEQ ID NO: 29412 - protein, 8 aa, Artificial Sequence
  Description of Artificial Sequence: Synthetic peptide
  Seed: IEDLIFSA
IEDLIFSV

SEQ ID NO: 29413 - protein, 8 aa, Artificial Sequence
  Description of Artificial Sequence: Synthetic peptide
  Seed: IERMVLSA
IDRMVLSL

SEQ ID NO: 29414 - protein, 8 aa, Artificial Sequence
  Description of Artificial Sequence: Synthetic peptide
  Seed: IERMVLSA
IERMVLSI

SEQ ID NO: 29415 - protein, 8 aa, Artificial Sequence
  Description of Artificial Sequence: Synthetic peptide
  Seed: IERMVLSA
IERMVLSL

SEQ ID NO: 29416 - protein, 8 aa, Artificial Sequence
  Description of Artificial Sequence: Synthetic peptide
  Seed: IERMVLSA
IERMVLSM

SEQ ID NO: 29417 - protein, 8 aa, Artificial Sequence
  Description of Artificial Sequence: Synthetic peptide
  Seed: IERMVLSA
IERMVLSF

SEQ ID NO: 29418 - protein, 8 aa, Artificial Sequence
  Description of Artificial Sequence: Synthetic peptide
  Seed: IERMVLSA
IERMVLSV

SEQ ID NO: 29419 - protein, 9 aa, Artificial Sequence
  Description of Artificial Sequence: Synthetic peptide
  Seed: IERMVLSAF
IARMVLSAH

SEQ ID NO: 29420 - protein, 9 aa, Artificial Sequence
  Description of Artificial Sequence: Synthetic peptide
  Seed: IERMVLSAF
IARMVLSAI

SEQ ID NO: 29421 - protein, 9 aa, Artificial Sequence
  Description of Artificial Sequence: Synthetic peptide
  Seed: IERMVLSAF
IARMVLSAL

SEQ ID NO: 29422 - protein, 9 aa, Artificial Sequence
  Description of Artificial Sequence: Synthetic peptide
  Seed: IERMVLSAF
IARMVLSAM

SEQ ID NO: 29423 - protein, 9 aa, Artificial Sequence
  Description of Artificial Sequence: Synthetic peptide
  Seed: IERMVLSAF
IARMVLSAF

SEQ ID NO: 29424 - protein, 9 aa, Artificial Sequence
  Description of Artificial Sequence: Synthetic peptide
  Seed: IERMVLSAF
IARMVLSAW

SEQ ID NO: 29425 - protein, 9 aa, Artificial Sequence
  Description of Artificial Sequence: Synthetic peptide
  Seed: IERMVLSAF
IARMVLSAY

SEQ ID NO: 29426 - protein, 9 aa, Artificial Sequence
  Description of Artificial Sequence: Synthetic peptide
  Seed: IERMVLSAF
IRRMVLSAL

SEQ ID NO: 29427 - protein, 9 aa, Artificial Sequence
  Description of Artificial Sequence: Synthetic peptide
  Seed: IERMVLSAF
IRRMVLSAM

SEQ ID NO: 29428 - protein, 9 aa, Artificial Sequence
  Description of Artificial Sequence: Synthetic peptide
  Seed: IERMVLSAF
IRRMVLSAF

SEQ ID NO: 29429 - protein, 8 aa, Artificial Sequence
  Description of Artificial Sequence: Synthetic peptide
  Seed: IEDLIFLA
IEDLIFLI

SEQ ID NO: 29430 - protein, 11 aa, Artificial Sequence
  Description of Artificial Sequence: Synthetic peptide
  Seed: IAYERMCNILK
IVYERMCNILK

SEQ ID NO: 29431 - protein, 11 aa, Artificial Sequence
  Description of Artificial Sequence: Synthetic peptide
  Seed: IAYERMCNILK
ILYERMCNILR

SEQ ID NO: 29432 - protein, 11 aa, Artificial Sequence
  Description of Artificial Sequence: Synthetic peptide
  Seed: IAYERMCNILK
IVYERMCNILR

SEQ ID NO: 29433 - protein, 11 aa, Artificial Sequence
  Description of Artificial Sequence: Synthetic peptide
  Seed: IAYERMCNILK
ILYERMCNILK

SEQ ID NO: 29434 - protein, 11 aa, Artificial Sequence
  Description of Artificial Sequence: Synthetic peptide
  Seed: IAYERMCNILK
ILYERMCNILY

SEQ ID NO: 29435 - protein, 11 aa, Artificial Sequence
  Description of Artificial Sequence: Synthetic peptide
  Seed: IAYERMCNILK
IKYERMCNILR

SEQ ID NO: 29436 - protein, 11 aa, Artificial Sequence
  Description of Artificial Sequence: Synthetic peptide
  Seed: IAYERMCNILK
IMYERMCNILR

SEQ ID NO: 29437 - protein, 11 aa, Artificial Sequence
  Description of Artificial Sequence: Synthetic peptide
  Seed: IAYERMCNILK
IMYERMCNILK

SEQ ID NO: 29438 - protein, 11 aa, Artificial Sequence
  Description of Artificial Sequence: Synthetic peptide
  Seed: IAYERMCNILK
IMYERMCNILY

SEQ ID NO: 29439 - protein, 11 aa, Artificial Sequence
  Description of Artificial Sequence: Synthetic peptide
  Seed: IAYERMCNILK
IFYERMCNILR

SEQ ID NO: 29440 - protein, 11 aa, Artificial Sequence
  Description of Artificial Sequence: Synthetic peptide
  Seed: IAYERMCNILK
IFYERMCNILK

SEQ ID NO: 29441 - protein, 11 aa, Artificial Sequence
  Description of Artificial Sequence: Synthetic peptide
  Seed: IAYERMCNILK
ISYERMCNILA

SEQ ID NO: 29442 - protein, 11 aa, Artificial Sequence
  Description of Artificial Sequence: Synthetic peptide
  Seed: IAYERMCNILK
ISYERMCNILR

SEQ ID NO: 29443 - protein, 11 aa, Artificial Sequence
  Description of Artificial Sequence: Synthetic peptide
  Seed: IAYERMCNILK
ISYERMCNILK

SEQ ID NO: 29444 - protein, 11 aa, Artificial Sequence
  Description of Artificial Sequence: Synthetic peptide
  Seed: IAYERMCNILK
ITYERMCNILA

SEQ ID NO: 29445 - protein, 11 aa, Artificial Sequence
  Description of Artificial Sequence: Synthetic peptide
  Seed: IAYERMCNILK
ITYERMCNILR

SEQ ID NO: 29446 - protein, 11 aa, Artificial Sequence
  Description of Artificial Sequence: Synthetic peptide
  Seed: IAYERMCNILK
ITYERMCNILK

SEQ ID NO: 29447 - protein, 11 aa, Artificial Sequence
  Description of Artificial Sequence: Synthetic peptide
  Seed: IAYERMCNILK
ITYERMCNILY

SEQ ID NO: 29448 - protein, 11 aa, Artificial Sequence
  Description of Artificial Sequence: Synthetic peptide
  Seed: IAYERMCNILK
IWYERMCNILR

SEQ ID NO: 29449 - protein, 11 aa, Artificial Sequence
  Description of Artificial Sequence: Synthetic peptide
  Seed: IAYERMCNILK
IWYERMCNILK

SEQ ID NO: 29450 - protein, 11 aa, Artificial Sequence
  Description of Artificial Sequence: Synthetic peptide
  Seed: IAYERMCNILK
IYYERMCNILR

SEQ ID NO: 29451 - protein, 11 aa, Artificial Sequence
  Description of Artificial Sequence: Synthetic peptide
  Seed: IAYERMCNILK
IYYERMCNILK

SEQ ID NO: 29452 - protein, 9 aa, Artificial Sequence
  Description of Artificial Sequence: Synthetic peptide
  Seed: IERMVLSAF
ISRMVLSAF

SEQ ID NO: 29453 - protein, 9 aa, Artificial Sequence
  Description of Artificial Sequence: Synthetic peptide
  Seed: IERMVLSAF
ISRMVLSAY

SEQ ID NO: 29454 - protein, 11 aa, Artificial Sequence
  Description of Artificial Sequence: Synthetic peptide
  Seed: IFLARSALILR
IGLARSALILR

SEQ ID NO: 29455 - protein, 10 aa, Artificial Sequence
  Description of Artificial Sequence: Synthetic peptide
  Seed: IFLARSALIL
IILARSALIL

SEQ ID NO: 29456 - protein, 10 aa, Artificial Sequence
  Description of Artificial Sequence: Synthetic peptide
  Seed: IFLARSALIL
IELARSALIL

SEQ ID NO: 29457 - protein, 10 aa, Artificial Sequence
  Description of Artificial Sequence: Synthetic peptide
  Seed: IFLARSALIL
IELARSALIV

SEQ ID NO: 29458 - protein, 10 aa, Artificial Sequence
  Description of Artificial Sequence: Synthetic peptide
  Seed: IFLARSALIL
IGLARSALII

SEQ ID NO: 29459 - protein, 10 aa, Artificial Sequence
  Description of Artificial Sequence: Synthetic peptide
  Seed: IFLARSALIL
IGLARSALIL

SEQ ID NO: 29460 - protein, 10 aa, Artificial Sequence
  Description of Artificial Sequence: Synthetic peptide
  Seed: IFLARSALIL
IGLARSALIV

SEQ ID NO: 29461 - protein, 10 aa, Artificial Sequence
  Description of Artificial Sequence: Synthetic peptide
  Seed: IFLARSALIL
IHLARSALII

SEQ ID NO: 29462 - protein, 10 aa, Artificial Sequence
  Description of Artificial Sequence: Synthetic peptide
  Seed: IFLARSALIL
IHLARSALIL

SEQ ID NO: 29463 - protein, 10 aa, Artificial Sequence
  Description of Artificial Sequence: Synthetic peptide
  Seed: IFLARSALIL
IHLARSALIV

SEQ ID NO: 29464 - protein, 10 aa, Artificial Sequence
  Description of Artificial Sequence: Synthetic peptide
  Seed: IFLARSALIL
IILARSALII

SEQ ID NO: 29465 - protein, 10 aa, Artificial Sequence
  Description of Artificial Sequence: Synthetic peptide
  Seed: IFLARSALIL
IILARSALIV

SEQ ID NO: 29466 - protein, 10 aa, Artificial Sequence
  Description of Artificial Sequence: Synthetic peptide
  Seed: IFLARSALIL
IMLARSALIL

SEQ ID NO: 29467 - protein, 10 aa, Artificial Sequence
  Description of Artificial Sequence: Synthetic peptide
  Seed: IFLARSALIL
ILLARSALIA

SEQ ID NO: 29468 - protein, 10 aa, Artificial Sequence
  Description of Artificial Sequence: Synthetic peptide
  Seed: IFLARSALIL
ILLARSALII

SEQ ID NO: 29469 - protein, 10 aa, Artificial Sequence
  Description of Artificial Sequence: Synthetic peptide
  Seed: IFLARSALIL
ILLARSALIL

SEQ ID NO: 29470 - protein, 10 aa, Artificial Sequence
  Description of Artificial Sequence: Synthetic peptide
  Seed: IFLARSALIL
ILLARSALIF

SEQ ID NO: 29471 - protein, 10 aa, Artificial Sequence
  Description of Artificial Sequence: Synthetic peptide
  Seed: IFLARSALIL
ILLARSALIV

SEQ ID NO: 29472 - protein, 10 aa, Artificial Sequence
  Description of Artificial Sequence: Synthetic peptide
  Seed: IFLARSALIL
IKLARSALII

SEQ ID NO: 29473 - protein, 10 aa, Artificial Sequence
  Description of Artificial Sequence: Synthetic peptide
  Seed: IFLARSALIL
IKLARSALIL

SEQ ID NO: 29474 - protein, 10 aa, Artificial Sequence
  Description of Artificial Sequence: Synthetic peptide
  Seed: IFLARSALIL
IKLARSALIV

SEQ ID NO: 29475 - protein, 10 aa, Artificial Sequence
  Description of Artificial Sequence: Synthetic peptide
  Seed: IFLARSALIL
IMLARSALIA

SEQ ID NO: 29476 - protein, 10 aa, Artificial Sequence
  Description of Artificial Sequence: Synthetic peptide
  Seed: IFLARSALIL
IELARSALII

SEQ ID NO: 29477 - protein, 10 aa, Artificial Sequence
  Description of Artificial Sequence: Synthetic peptide
  Seed: IFLARSALIL
IQLARSALIV

SEQ ID NO: 29478 - protein, 10 aa, Artificial Sequence
  Description of Artificial Sequence: Synthetic peptide
  Seed: IFLARSALIL
IQLARSALIF

SEQ ID NO: 29479 - protein, 10 aa, Artificial Sequence
  Description of Artificial Sequence: Synthetic peptide
  Seed: IFLARSALIL
IQLARSALIL

SEQ ID NO: 29480 - protein, 9 aa, Artificial Sequence
  Description of Artificial Sequence: Synthetic peptide
  Seed: IFLARSALI
IYLARSALY

SEQ ID NO: 29481 - protein, 9 aa, Artificial Sequence
  Description of Artificial Sequence: Synthetic peptide
  Seed: IFLARSALI
IYLARSALV

SEQ ID NO: 29482 - protein, 9 aa, Artificial Sequence
  Description of Artificial Sequence: Synthetic peptide
  Seed: IFLARSALI
IVLARSALF

SEQ ID NO: 29483 - protein, 10 aa, Artificial Sequence
  Description of Artificial Sequence: Synthetic peptide
  Seed: IFLARSALIL
IALARSALII

SEQ ID NO: 29484 - protein, 10 aa, Artificial Sequence
  Description of Artificial Sequence: Synthetic peptide
  Seed: IFLARSALIL
IALARSALIL

SEQ ID NO: 29485 - protein, 10 aa, Artificial Sequence
  Description of Artificial Sequence: Synthetic peptide
  Seed: IFLARSALIL
IALARSALIV

SEQ ID NO: 29486 - protein, 10 aa, Artificial Sequence
  Description of Artificial Sequence: Synthetic peptide
  Seed: IFLARSALIL
IRLARSALII

SEQ ID NO: 29487 - protein, 10 aa, Artificial Sequence
  Description of Artificial Sequence: Synthetic peptide
  Seed: IFLARSALIL
IRLARSALIL

SEQ ID NO: 29488 - protein, 10 aa, Artificial Sequence
  Description of Artificial Sequence: Synthetic peptide
  Seed: IFLARSALIL
IRLARSALIV

SEQ ID NO: 29489 - protein, 10 aa, Artificial Sequence
  Description of Artificial Sequence: Synthetic peptide
  Seed: IFLARSALIL
INLARSALII

SEQ ID NO: 29490 - protein, 10 aa, Artificial Sequence
  Description of Artificial Sequence: Synthetic peptide
  Seed: IFLARSALIL
INLARSALIL

SEQ ID NO: 29491 - protein, 10 aa, Artificial Sequence
  Description of Artificial Sequence: Synthetic peptide
  Seed: IFLARSALIL
INLARSALIV

SEQ ID NO: 29492 - protein, 10 aa, Artificial Sequence
  Description of Artificial Sequence: Synthetic peptide
  Seed: IFLARSALIL
IDLARSALII

SEQ ID NO: 29493 - protein, 10 aa, Artificial Sequence
  Description of Artificial Sequence: Synthetic peptide
  Seed: IFLARSALIL
IDLARSALIL

SEQ ID NO: 29494 - protein, 10 aa, Artificial Sequence
  Description of Artificial Sequence: Synthetic peptide
  Seed: IFLARSALIL
IDLARSALIV

SEQ ID NO: 29495 - protein, 10 aa, Artificial Sequence
  Description of Artificial Sequence: Synthetic peptide
  Seed: IFLARSALIL
ICLARSALII

SEQ ID NO: 29496 - protein, 10 aa, Artificial Sequence
  Description of Artificial Sequence: Synthetic peptide
  Seed: IFLARSALIL
ICLARSALIL

SEQ ID NO: 29497 - protein, 10 aa, Artificial Sequence
  Description of Artificial Sequence: Synthetic peptide
  Seed: IFLARSALIL
ICLARSALIV

SEQ ID NO: 29498 - protein, 10 aa, Artificial Sequence
  Description of Artificial Sequence: Synthetic peptide
  Seed: IFLARSALIL
IQLARSALII

SEQ ID NO: 29499 - protein, 10 aa, Artificial Sequence
  Description of Artificial Sequence: Synthetic peptide
  Seed: IFLARSALIL
IMLARSALII

SEQ ID NO: 29500 - protein, 10 aa, Artificial Sequence
  Description of Artificial Sequence: Synthetic peptide
  Seed: IFLARSALIL
IMLARSALIF

SEQ ID NO: 29501 - protein, 9 aa, Artificial Sequence
  Description of Artificial Sequence: Synthetic peptide
  Seed: IERMVLSAF
ITRMVLSAL

SEQ ID NO: 29502 - protein, 10 aa, Artificial Sequence
  Description of Artificial Sequence: Synthetic peptide
  Seed: IFLARSALIL
IVLARSALIL

SEQ ID NO: 29503 - protein, 10 aa, Artificial Sequence
  Description of Artificial Sequence: Synthetic peptide
  Seed: IFLARSALIL
IYLARSALIA

SEQ ID NO: 29504 - protein, 10 aa, Artificial Sequence
  Description of Artificial Sequence: Synthetic peptide
  Seed: IFLARSALIL
IYLARSALII

SEQ ID NO: 29505 - protein, 10 aa, Artificial Sequence
  Description of Artificial Sequence: Synthetic peptide
  Seed: IFLARSALIL
IYLARSALIL

SEQ ID NO: 29506 - protein, 10 aa, Artificial Sequence
  Description of Artificial Sequence: Synthetic peptide
  Seed: IFLARSALIL
IYLARSALIM

SEQ ID NO: 29507 - protein, 10 aa, Artificial Sequence
  Description of Artificial Sequence: Synthetic peptide
  Seed: IFLARSALIL
IYLARSALIF

SEQ ID NO: 29508 - protein, 10 aa, Artificial Sequence
  Description of Artificial Sequence: Synthetic peptide
  Seed: IFLARSALIL
IYLARSALIW

SEQ ID NO: 29509 - protein, 10 aa, Artificial Sequence
  Description of Artificial Sequence: Synthetic peptide
  Seed: IFLARSALIL
IYLARSALIY

SEQ ID NO: 29510 - protein, 10 aa, Artificial Sequence
  Description of Artificial Sequence: Synthetic peptide
  Seed: IFLARSALIL
IYLARSALIV

SEQ ID NO: 29511 - protein, 10 aa, Artificial Sequence
  Description of Artificial Sequence: Synthetic peptide
  Seed: IFLARSALIL
IVLARSALII

SEQ ID NO: 29512 - protein, 10 aa, Artificial Sequence
  Description of Artificial Sequence: Synthetic peptide
  Seed: IFLARSALIL
IVLARSALIV

SEQ ID NO: 29513 - protein, 10 aa, Artificial Sequence
  Description of Artificial Sequence: Synthetic peptide
  Seed: IFLARSALIL
IMLARSALIW

SEQ ID NO: 29514 - protein, 11 aa, Artificial Sequence
  Description of Artificial Sequence: Synthetic peptide
  Seed: IFLARSALILR
IALARSALILR

SEQ ID NO: 29515 - protein, 11 aa, Artificial Sequence
  Description of Artificial Sequence: Synthetic peptide
  Seed: IFLARSALILR
IRLARSALILR

SEQ ID NO: 29516 - protein, 11 aa, Artificial Sequence
  Description of Artificial Sequence: Synthetic peptide
  Seed: IFLARSALILR
IRLARSALILK

SEQ ID NO: 29517 - protein, 11 aa, Artificial Sequence
  Description of Artificial Sequence: Synthetic peptide
  Seed: IFLARSALILR
INLARSALILR

SEQ ID NO: 29518 - protein, 11 aa, Artificial Sequence
  Description of Artificial Sequence: Synthetic peptide
  Seed: IFLARSALILR
IDLARSALILR

SEQ ID NO: 29519 - protein, 11 aa, Artificial Sequence
  Description of Artificial Sequence: Synthetic peptide
  Seed: IFLARSALILR
ICLARSALILR

SEQ ID NO: 29520 - protein, 11 aa, Artificial Sequence
  Description of Artificial Sequence: Synthetic peptide
  Seed: IFLARSALILR
IQLARSALILR

SEQ ID NO: 29521 - protein, 11 aa, Artificial Sequence
  Description of Artificial Sequence: Synthetic peptide
  Seed: IFLARSALILR
IQLARSALILK

SEQ ID NO: 29522 - protein, 11 aa, Artificial Sequence
  Description of Artificial Sequence: Synthetic peptide
  Seed: IFLARSALILR
IELARSALILR

SEQ ID NO: 29523 - protein, 10 aa, Artificial Sequence
  Description of Artificial Sequence: Synthetic peptide
  Seed: IFLARSALIL
IWLARSALIV

SEQ ID NO: 29524 - protein, 10 aa, Artificial Sequence
  Description of Artificial Sequence: Synthetic peptide
  Seed: IFLARSALIL
IWLARSALIW

SEQ ID NO: 29525 - protein, 10 aa, Artificial Sequence
  Description of Artificial Sequence: Synthetic peptide
  Seed: IFLARSALIL
IWLARSALIF

SEQ ID NO: 29526 - protein, 10 aa, Artificial Sequence
  Description of Artificial Sequence: Synthetic peptide
  Seed: IFLARSALIL
IWLARSALIM

SEQ ID NO: 29527 - protein, 10 aa, Artificial Sequence
  Description of Artificial Sequence: Synthetic peptide
  Seed: IFLARSALIL
IMLARSALIV

SEQ ID NO: 29528 - protein, 10 aa, Artificial Sequence
  Description of Artificial Sequence: Synthetic peptide
  Seed: IFLARSALIL
IFLARSALIA

SEQ ID NO: 29529 - protein, 10 aa, Artificial Sequence
  Description of Artificial Sequence: Synthetic peptide
  Seed: IFLARSALIL
IFLARSALII

SEQ ID NO: 29530 - protein, 10 aa, Artificial Sequence
  Description of Artificial Sequence: Synthetic peptide
  Seed: IFLARSALIL
IFLARSALIM

SEQ ID NO: 29531 - protein, 10 aa, Artificial Sequence
  Description of Artificial Sequence: Synthetic peptide
  Seed: IFLARSALIL
IFLARSALIF

SEQ ID NO: 29532 - protein, 10 aa, Artificial Sequence
  Description of Artificial Sequence: Synthetic peptide
  Seed: IFLARSALIL
IFLARSALIW

SEQ ID NO: 29533 - protein, 10 aa, Artificial Sequence
  Description of Artificial Sequence: Synthetic peptide
  Seed: IFLARSALIL
IFLARSALIY

SEQ ID NO: 29534 - protein, 10 aa, Artificial Sequence
  Description of Artificial Sequence: Synthetic peptide
  Seed: IFLARSALIL
IFLARSALIV

SEQ ID NO: 29535 - protein, 10 aa, Artificial Sequence
  Description of Artificial Sequence: Synthetic peptide
  Seed: IFLARSALIL
IPLARSALII

SEQ ID NO: 29536 - protein, 10 aa, Artificial Sequence
  Description of Artificial Sequence: Synthetic peptide
  Seed: IFLARSALIL
IPLARSALIL

SEQ ID NO: 29537 - protein, 10 aa, Artificial Sequence
  Description of Artificial Sequence: Synthetic peptide
  Seed: IFLARSALIL
IPLARSALIV

SEQ ID NO: 29538 - protein, 10 aa, Artificial Sequence
  Description of Artificial Sequence: Synthetic peptide
  Seed: IFLARSALIL
ISLARSALII

SEQ ID NO: 29539 - protein, 10 aa, Artificial Sequence
  Description of Artificial Sequence: Synthetic peptide
  Seed: IFLARSALIL
ISLARSALIL

SEQ ID NO: 29540 - protein, 10 aa, Artificial Sequence
  Description of Artificial Sequence: Synthetic peptide
  Seed: IFLARSALIL
ISLARSALIV

SEQ ID NO: 29541 - protein, 10 aa, Artificial Sequence
  Description of Artificial Sequence: Synthetic peptide
  Seed: IFLARSALIL
ITLARSALII

SEQ ID NO: 29542 - protein, 10 aa, Artificial Sequence
  Description of Artificial Sequence: Synthetic peptide
  Seed: IFLARSALIL
ITLARSALIL

SEQ ID NO: 29543 - protein, 10 aa, Artificial Sequence
  Description of Artificial Sequence: Synthetic peptide
  Seed: IFLARSALIL
ITLARSALIV

SEQ ID NO: 29544 - protein, 10 aa, Artificial Sequence
  Description of Artificial Sequence: Synthetic peptide
  Seed: IFLARSALIL
IWLARSALII

SEQ ID NO: 29545 - protein, 10 aa, Artificial Sequence
  Description of Artificial Sequence: Synthetic peptide
  Seed: IFLARSALIL
IWLARSALIL

SEQ ID NO: 29546 - protein, 9 aa, Artificial Sequence
  Description of Artificial Sequence: Synthetic peptide
  Seed: IFLARSALI
IYLARSALW

SEQ ID NO: 29547 - protein, 9 aa, Artificial Sequence
  Description of Artificial Sequence: Synthetic peptide
  Seed: IFLARSALI
IYLARSALF

SEQ ID NO: 29548 - protein, 9 aa, Artificial Sequence
  Description of Artificial Sequence: Synthetic peptide
  Seed: IFLARSALI
IYLARSALM

SEQ ID NO: 29549 - protein, 8 aa, Artificial Sequence
  Description of Artificial Sequence: Synthetic peptide
  Seed: IFLARSAL
IFLARSAF

SEQ ID NO: 29550 - protein, 8 aa, Artificial Sequence
  Description of Artificial Sequence: Synthetic peptide
  Seed: IFLARSAL
ILLARSAF

SEQ ID NO: 29551 - protein, 8 aa, Artificial Sequence
  Description of Artificial Sequence: Synthetic peptide
  Seed: IFLARSAL
ILLARSAV

SEQ ID NO: 29552 - protein, 8 aa, Artificial Sequence
  Description of Artificial Sequence: Synthetic peptide
  Seed: IFLARSAL
IMLARSAI

SEQ ID NO: 29553 - protein, 8 aa, Artificial Sequence
  Description of Artificial Sequence: Synthetic peptide
  Seed: IFLARSAL
IMLARSAL

SEQ ID NO: 29554 - protein, 8 aa, Artificial Sequence
  Description of Artificial Sequence: Synthetic peptide
  Seed: IFLARSAL
IMLARSAM

SEQ ID NO: 29555 - protein, 8 aa, Artificial Sequence
  Description of Artificial Sequence: Synthetic peptide
  Seed: IFLARSAL
IMLARSAF

SEQ ID NO: 29556 - protein, 8 aa, Artificial Sequence
  Description of Artificial Sequence: Synthetic peptide
  Seed: IFLARSAL
IMLARSAV

SEQ ID NO: 29557 - protein, 8 aa, Artificial Sequence
  Description of Artificial Sequence: Synthetic peptide
  Seed: IFLARSAL
IFLARSAI

SEQ ID NO: 29558 - protein, 8 aa, Artificial Sequence
  Description of Artificial Sequence: Synthetic peptide
  Seed: IFLARSAL
IFLARSAM

SEQ ID NO: 29559 - protein, 8 aa, Artificial Sequence
  Description of Artificial Sequence: Synthetic peptide
  Seed: IFLARSAL
IFLARSAY

SEQ ID NO: 29560 - protein, 9 aa, Artificial Sequence
  Description of Artificial Sequence: Synthetic peptide
  Seed: IFLARSALI
IYLARSALL

SEQ ID NO: 29561 - protein, 8 aa, Artificial Sequence
  Description of Artificial Sequence: Synthetic peptide
  Seed: IFLARSAL
IFLARSAV

SEQ ID NO: 29562 - protein, 8 aa, Artificial Sequence
  Description of Artificial Sequence: Synthetic peptide
  Seed: IFLARSAL
IPLARSAI

SEQ ID NO: 29563 - protein, 8 aa, Artificial Sequence
  Description of Artificial Sequence: Synthetic peptide
  Seed: IFLARSAL
IPLARSAL

SEQ ID NO: 29564 - protein, 8 aa, Artificial Sequence
  Description of Artificial Sequence: Synthetic peptide
  Seed: IFLARSAL
IPLARSAM

SEQ ID NO: 29565 - protein, 8 aa, Artificial Sequence
  Description of Artificial Sequence: Synthetic peptide
  Seed: IFLARSAL
IPLARSAF

SEQ ID NO: 29566 - protein, 8 aa, Artificial Sequence
  Description of Artificial Sequence: Synthetic peptide
  Seed: IFLARSAL
IPLARSAV

SEQ ID NO: 29567 - protein, 8 aa, Artificial Sequence
  Description of Artificial Sequence: Synthetic peptide
  Seed: IFLARSAL
IWLARSAL

SEQ ID NO: 29568 - protein, 8 aa, Artificial Sequence
  Description of Artificial Sequence: Synthetic peptide
  Seed: IFLARSAL
IWLARSAM

SEQ ID NO: 29569 - protein, 8 aa, Artificial Sequence
  Description of Artificial Sequence: Synthetic peptide
  Seed: IFLARSAL
IWLARSAF

SEQ ID NO: 29570 - protein, 8 aa, Artificial Sequence
  Description of Artificial Sequence: Synthetic peptide
  Seed: IFLARSAL
ILLARSAM

SEQ ID NO: 29571 - protein, 8 aa, Artificial Sequence
  Description of Artificial Sequence: Synthetic peptide
  Seed: IFLARSAL
ILLARSAL

SEQ ID NO: 29572 - protein, 8 aa, Artificial Sequence
  Description of Artificial Sequence: Synthetic peptide
  Seed: IFLARSAL
ILLARSAI

SEQ ID NO: 29573 - protein, 8 aa, Artificial Sequence
  Description of Artificial Sequence: Synthetic peptide
  Seed: IFLARSAL
IILARSAM

SEQ ID NO: 29574 - protein, 9 aa, Artificial Sequence
  Description of Artificial Sequence: Synthetic peptide
  Seed: IERMVLSAF
ITRMVLSAM

SEQ ID NO: 29575 - protein, 9 aa, Artificial Sequence
  Description of Artificial Sequence: Synthetic peptide
  Seed: IERMVLSAF
ITRMVLSAF

SEQ ID NO: 29576 - protein, 9 aa, Artificial Sequence
  Description of Artificial Sequence: Synthetic peptide
  Seed: IERMVLSAF
ITRMVLSAY

SEQ ID NO: 29577 - protein, 9 aa, Artificial Sequence
  Description of Artificial Sequence: Synthetic peptide
  Seed: IERMVLSAF
IWRMVLSAM

SEQ ID NO: 29578 - protein, 9 aa, Artificial Sequence
  Description of Artificial Sequence: Synthetic peptide
  Seed: IERMVLSAF
IWRMVLSAF

SEQ ID NO: 29579 - protein, 9 aa, Artificial Sequence
  Description of Artificial Sequence: Synthetic peptide
  Seed: IERMVLSAF
IWRMVLSAY

SEQ ID NO: 29580 - protein, 9 aa, Artificial Sequence
  Description of Artificial Sequence: Synthetic peptide
  Seed: IERMVLSAF
IYRMVLSAM

SEQ ID NO: 29581 - protein, 9 aa, Artificial Sequence
  Description of Artificial Sequence: Synthetic peptide
  Seed: IERMVLSAF
IYRMVLSAF

SEQ ID NO: 29582 - protein, 9 aa, Artificial Sequence
  Description of Artificial Sequence: Synthetic peptide
  Seed: IERMVLSAF
IYRMVLSAY

SEQ ID NO: 29583 - protein, 9 aa, Artificial Sequence
  Description of Artificial Sequence: Synthetic peptide
  Seed: IERMVLSAF
IVRMVLSAI

SEQ ID NO: 29584 - protein, 9 aa, Artificial Sequence
  Description of Artificial Sequence: Synthetic peptide
  Seed: IERMVLSAF
IVRMVLSAL

SEQ ID NO: 29585 - protein, 9 aa, Artificial Sequence
  Description of Artificial Sequence: Synthetic peptide
  Seed: IERMVLSAF
IVRMVLSAM

SEQ ID NO: 29586 - protein, 9 aa, Artificial Sequence
  Description of Artificial Sequence: Synthetic peptide
  Seed: IERMVLSAF
IVRMVLSAF

SEQ ID NO: 29587 - protein, 9 aa, Artificial Sequence
  Description of Artificial Sequence: Synthetic peptide
  Seed: IERMVLSAF
IVRMVLSAW

SEQ ID NO: 29588 - protein, 9 aa, Artificial Sequence
  Description of Artificial Sequence: Synthetic peptide
  Seed: IERMVLSAF
IVRMVLSAY

SEQ ID NO: 29589 - protein, 8 aa, Artificial Sequence
  Description of Artificial Sequence: Synthetic peptide
  Seed: IFLARSAL
IALARSAL

SEQ ID NO: 29590 - protein, 8 aa, Artificial Sequence
  Description of Artificial Sequence: Synthetic peptide
  Seed: IFLARSAL
IALARSAM

SEQ ID NO: 29591 - protein, 8 aa, Artificial Sequence
  Description of Artificial Sequence: Synthetic peptide
  Seed: IFLARSAL
IQLARSAL

SEQ ID NO: 29592 - protein, 8 aa, Artificial Sequence
  Description of Artificial Sequence: Synthetic peptide
  Seed: IFLARSAL
IILARSAL

SEQ ID NO: 29593 - protein, 8 aa, Artificial Sequence
  Description of Artificial Sequence: Synthetic peptide
  Seed: IFLARSAL
IWLARSAY

SEQ ID NO: 29594 - protein, 8 aa, Artificial Sequence
  Description of Artificial Sequence: Synthetic peptide
  Seed: IFLARSAL
IYLARSAI

SEQ ID NO: 29595 - protein, 8 aa, Artificial Sequence
  Description of Artificial Sequence: Synthetic peptide
  Seed: IFLARSAL
IYLARSAL

SEQ ID NO: 29596 - protein, 9 aa, Artificial Sequence
  Description of Artificial Sequence: Synthetic peptide
  Seed: IFLARSALI
IMLARSALW

SEQ ID NO: 29597 - protein, 9 aa, Artificial Sequence
  Description of Artificial Sequence: Synthetic peptide
  Seed: IFLARSALI
IFLARSALL

SEQ ID NO: 29598 - protein, 9 aa, Artificial Sequence
  Description of Artificial Sequence: Synthetic peptide
  Seed: IFLARSALI
IFLARSALM

SEQ ID NO: 29599 - protein, 9 aa, Artificial Sequence
  Description of Artificial Sequence: Synthetic peptide
  Seed: IFLARSALI
IFLARSALF

SEQ ID NO: 29600 - protein, 9 aa, Artificial Sequence
  Description of Artificial Sequence: Synthetic peptide
  Seed: IFLARSALI
IFLARSALW

SEQ ID NO: 29601 - protein, 9 aa, Artificial Sequence
  Description of Artificial Sequence: Synthetic peptide
  Seed: IFLARSALI
IFLARSALY

SEQ ID NO: 29602 - protein, 9 aa, Artificial Sequence
  Description of Artificial Sequence: Synthetic peptide
  Seed: IFLARSALI
ISLARSALF

SEQ ID NO: 29603 - protein, 9 aa, Artificial Sequence
  Description of Artificial Sequence: Synthetic peptide
  Seed: IFLARSALI
ISLARSALY

SEQ ID NO: 29604 - protein, 9 aa, Artificial Sequence
  Description of Artificial Sequence: Synthetic peptide
  Seed: IFLARSALI
ITLARSALF

SEQ ID NO: 29605 - protein, 9 aa, Artificial Sequence
  Description of Artificial Sequence: Synthetic peptide
  Seed: IFLARSALI
IWLARSALI

SEQ ID NO: 29606 - protein, 9 aa, Artificial Sequence
  Description of Artificial Sequence: Synthetic peptide
  Seed: IFLARSALI
IWLARSALL

SEQ ID NO: 29607 - protein, 9 aa, Artificial Sequence
  Description of Artificial Sequence: Synthetic peptide
  Seed: IFLARSALI
IWLARSALM

SEQ ID NO: 29608 - protein, 9 aa, Artificial Sequence
  Description of Artificial Sequence: Synthetic peptide
  Seed: IFLARSALI
IWLARSALF

SEQ ID NO: 29609 - protein, 9 aa, Artificial Sequence
  Description of Artificial Sequence: Synthetic peptide
  Seed: IFLARSALI
IWLARSALW

SEQ ID NO: 29610 - protein, 9 aa, Artificial Sequence
  Description of Artificial Sequence: Synthetic peptide
  Seed: IFLARSALI
IWLARSALY

SEQ ID NO: 29611 - protein, 9 aa, Artificial Sequence
  Description of Artificial Sequence: Synthetic peptide
  Seed: IFLARSALI
IWLARSALV

SEQ ID NO: 29612 - protein, 9 aa, Artificial Sequence
  Description of Artificial Sequence: Synthetic peptide
  Seed: IFLARSALI
IYLARSALA

SEQ ID NO: 29613 - protein, 9 aa, Artificial Sequence
  Description of Artificial Sequence: Synthetic peptide
  Seed: IFLARSALI
IYLARSALH

SEQ ID NO: 29614 - protein, 9 aa, Artificial Sequence
  Description of Artificial Sequence: Synthetic peptide
  Seed: IFLARSALI
IYLARSALI

SEQ ID NO: 29615 - protein, 9 aa, Artificial Sequence
  Description of Artificial Sequence: Synthetic peptide
  Seed: IFLARSALI
IMLARSALY

SEQ ID NO: 29616 - protein, 9 aa, Artificial Sequence
  Description of Artificial Sequence: Synthetic peptide
  Seed: IFLARSALI
IMLARSALF

SEQ ID NO: 29617 - protein, 8 aa, Artificial Sequence
  Description of Artificial Sequence: Synthetic peptide
  Seed: IFLARSAL
IYLARSAM

SEQ ID NO: 29618 - protein, 9 aa, Artificial Sequence
  Description of Artificial Sequence: Synthetic peptide
  Seed: IFLARSALI
IMLARSALM

SEQ ID NO: 29619 - protein, 8 aa, Artificial Sequence
  Description of Artificial Sequence: Synthetic peptide
  Seed: IFLARSAL
IYLARSAF

SEQ ID NO: 29620 - protein, 8 aa, Artificial Sequence
  Description of Artificial Sequence: Synthetic peptide
  Seed: IFLARSAL
IYLARSAY

SEQ ID NO: 29621 - protein, 8 aa, Artificial Sequence
  Description of Artificial Sequence: Synthetic peptide
  Seed: IFLARSAL
IYLARSAV

SEQ ID NO: 29622 - protein, 8 aa, Artificial Sequence
  Description of Artificial Sequence: Synthetic peptide
  Seed: IFLARSAL
IVLARSAL

SEQ ID NO: 29623 - protein, 9 aa, Artificial Sequence
  Description of Artificial Sequence: Synthetic peptide
  Seed: IFLARSALI
IALARSALM

SEQ ID NO: 29624 - protein, 9 aa, Artificial Sequence
  Description of Artificial Sequence: Synthetic peptide
  Seed: IFLARSALI
IALARSALF

SEQ ID NO: 29625 - protein, 9 aa, Artificial Sequence
  Description of Artificial Sequence: Synthetic peptide
  Seed: IFLARSALI
IALARSALY

SEQ ID NO: 29626 - protein, 9 aa, Artificial Sequence
  Description of Artificial Sequence: Synthetic peptide
  Seed: IFLARSALI
IRLARSALM

SEQ ID NO: 29627 - protein, 9 aa, Artificial Sequence
  Description of Artificial Sequence: Synthetic peptide
  Seed: IFLARSALI
IQLARSALF

SEQ ID NO: 29628 - protein, 9 aa, Artificial Sequence
  Description of Artificial Sequence: Synthetic peptide
  Seed: IFLARSALI
IQLARSALW

SEQ ID NO: 29629 - protein, 9 aa, Artificial Sequence
  Description of Artificial Sequence: Synthetic peptide
  Seed: IFLARSALI
IHLARSALL

SEQ ID NO: 29630 - protein, 9 aa, Artificial Sequence
  Description of Artificial Sequence: Synthetic peptide
  Seed: IFLARSALI
IHLARSALM

SEQ ID NO: 29631 - protein, 9 aa, Artificial Sequence
  Description of Artificial Sequence: Synthetic peptide
  Seed: IFLARSALI
IHLARSALF

SEQ ID NO: 29632 - protein, 9 aa, Artificial Sequence
  Description of Artificial Sequence: Synthetic peptide
  Seed: IFLARSALI
IHLARSALW

SEQ ID NO: 29633 - protein, 9 aa, Artificial Sequence
  Description of Artificial Sequence: Synthetic peptide
  Seed: IFLARSALI
IHLARSALY

SEQ ID NO: 29634 - protein, 9 aa, Artificial Sequence
  Description of Artificial Sequence: Synthetic peptide
  Seed: IFLARSALI
IILARSALF

SEQ ID NO: 29635 - protein, 9 aa, Artificial Sequence
  Description of Artificial Sequence: Synthetic peptide
  Seed: IFLARSALI
ILLARSALF

SEQ ID NO: 29636 - protein, 9 aa, Artificial Sequence
  Description of Artificial Sequence: Synthetic peptide
  Seed: IFLARSALI
ILLARSALW

SEQ ID NO: 29637 - protein, 9 aa, Artificial Sequence
  Description of Artificial Sequence: Synthetic peptide
  Seed: IFLARSALI
IMLARSALL

SEQ ID NO: 29638 - protein, 9 aa, Artificial Sequence
  Description of Artificial Sequence: Synthetic peptide
  Seed: GQISVQPTF
GIISVQPTL

SEQ ID NO: 29639 - protein, 9 aa, Artificial Sequence
  Description of Artificial Sequence: Synthetic peptide
  Seed: GQISVQPTF
GEISVQPTY

SEQ ID NO: 29640 - protein, 9 aa, Artificial Sequence
  Description of Artificial Sequence: Synthetic peptide
  Seed: GQISVQPTF
GEISVQPTV

SEQ ID NO: 29641 - protein, 9 aa, Artificial Sequence
  Description of Artificial Sequence: Synthetic peptide
  Seed: GQISVQPTF
GGISVQPTF

SEQ ID NO: 29642 - protein, 9 aa, Artificial Sequence
  Description of Artificial Sequence: Synthetic peptide
  Seed: GQISVQPTF
GGISVQPTY

SEQ ID NO: 29643 - protein, 9 aa, Artificial Sequence
  Description of Artificial Sequence: Synthetic peptide
  Seed: GQISVQPTF
GHISVQPTM

SEQ ID NO: 29644 - protein, 9 aa, Artificial Sequence
  Description of Artificial Sequence: Synthetic peptide
  Seed: GQISVQPTF
GHISVQPTY

SEQ ID NO: 29645 - protein, 9 aa, Artificial Sequence
  Description of Artificial Sequence: Synthetic peptide
  Seed: GQISVQPTF
GIISVQPTA

SEQ ID NO: 29646 - protein, 9 aa, Artificial Sequence
  Description of Artificial Sequence: Synthetic peptide
  Seed: GQISVQPTF
GIISVQPTI

SEQ ID NO: 29647 - protein, 9 aa, Artificial Sequence
  Description of Artificial Sequence: Synthetic peptide
  Seed: GQISVQPTF
GIISVQPTM

SEQ ID NO: 29648 - protein, 9 aa, Artificial Sequence
  Description of Artificial Sequence: Synthetic peptide
  Seed: GQISVQPTF
GLISVQPTV

SEQ ID NO: 29649 - protein, 9 aa, Artificial Sequence
  Description of Artificial Sequence: Synthetic peptide
  Seed: GQISVQPTF
GIISVQPTF

SEQ ID NO: 29650 - protein, 9 aa, Artificial Sequence
  Description of Artificial Sequence: Synthetic peptide
  Seed: GQISVQPTF
GIISVQPTY

SEQ ID NO: 29651 - protein, 9 aa, Artificial Sequence
  Description of Artificial Sequence: Synthetic peptide
  Seed: GQISVQPTF
GIISVQPTV

SEQ ID NO: 29652 - protein, 9 aa, Artificial Sequence
  Description of Artificial Sequence: Synthetic peptide
  Seed: GQISVQPTF
GLISVQPTA

SEQ ID NO: 29653 - protein, 9 aa, Artificial Sequence
  Description of Artificial Sequence: Synthetic peptide
  Seed: GQISVQPTF
GLISVQPTI

SEQ ID NO: 29654 - protein, 9 aa, Artificial Sequence
  Description of Artificial Sequence: Synthetic peptide
  Seed: GQISVQPTF
GLISVQPTL

SEQ ID NO: 29655 - protein, 9 aa, Artificial Sequence
  Description of Artificial Sequence: Synthetic peptide
  Seed: GQISVQPTF
GLISVQPTM

SEQ ID NO: 29656 - protein, 9 aa, Artificial Sequence
  Description of Artificial Sequence: Synthetic peptide
  Seed: GQISVQPTF
GLISVQPTF

SEQ ID NO: 29657 - protein, 9 aa, Artificial Sequence
  Description of Artificial Sequence: Synthetic peptide
  Seed: GQISVQPTF
GLISVQPTW

SEQ ID NO: 29658 - protein, 9 aa, Artificial Sequence
  Description of Artificial Sequence: Synthetic peptide
  Seed: GQISVQPTF
GEISVQPTF

SEQ ID NO: 29659 - protein, 9 aa, Artificial Sequence
  Description of Artificial Sequence: Synthetic peptide
  Seed: GQISVQPTF
GEISVQPTM

SEQ ID NO: 29660 - protein, 9 aa, Artificial Sequence
  Description of Artificial Sequence: Synthetic peptide
  Seed: GQISVQPTF
GEISVQPTL

SEQ ID NO: 29661 - protein, 9 aa, Artificial Sequence
  Description of Artificial Sequence: Synthetic peptide
  Seed: GQISVQPTF
GEISVQPTI

SEQ ID NO: 29662 - protein, 9 aa, Artificial Sequence
  Description of Artificial Sequence: Synthetic peptide
  Seed: GQISVQPTF
GRISVQPTM

SEQ ID NO: 29663 - protein, 9 aa, Artificial Sequence
  Description of Artificial Sequence: Synthetic peptide
  Seed: GQISVQPTF
GRISVQPTF

SEQ ID NO: 29664 - protein, 9 aa, Artificial Sequence
  Description of Artificial Sequence: Synthetic peptide
  Seed: GQISVQPTF
GRISVQPTT

SEQ ID NO: 29665 - protein, 9 aa, Artificial Sequence
  Description of Artificial Sequence: Synthetic peptide
  Seed: GQISVQPTF
GRISVQPTW

SEQ ID NO: 29666 - protein, 9 aa, Artificial Sequence
  Description of Artificial Sequence: Synthetic peptide
  Seed: GQISVQPTF
GRISVQPTY

SEQ ID NO: 29667 - protein, 9 aa, Artificial Sequence
  Description of Artificial Sequence: Synthetic peptide
  Seed: GQISVQPTF
GRISVQPTV

SEQ ID NO: 29668 - protein, 9 aa, Artificial Sequence
  Description of Artificial Sequence: Synthetic peptide
  Seed: GQISVQPTF
GNISVQPTF

SEQ ID NO: 29669 - protein, 9 aa, Artificial Sequence
  Description of Artificial Sequence: Synthetic peptide
  Seed: GQISVQPTF
GNISVQPTY

SEQ ID NO: 29670 - protein, 9 aa, Artificial Sequence
  Description of Artificial Sequence: Synthetic peptide
  Seed: GQISVQPTF
GCISVQPTY

SEQ ID NO: 29671 - protein, 9 aa, Artificial Sequence
  Description of Artificial Sequence: Synthetic peptide
  Seed: GQISVQPTF
GQISVQPTA

SEQ ID NO: 29672 - protein, 9 aa, Artificial Sequence
  Description of Artificial Sequence: Synthetic peptide
  Seed: GQISVQPTF
GQISVQPTC

SEQ ID NO: 29673 - protein, 9 aa, Artificial Sequence
  Description of Artificial Sequence: Synthetic peptide
  Seed: GQISVQPTF
GQISVQPTH

SEQ ID NO: 29674 - protein, 9 aa, Artificial Sequence
  Description of Artificial Sequence: Synthetic peptide
  Seed: GQISVQPTF
GQISVQPTI

SEQ ID NO: 29675 - protein, 9 aa, Artificial Sequence
  Description of Artificial Sequence: Synthetic peptide
  Seed: GQISVQPTF
GQISVQPTL

SEQ ID NO: 29676 - protein, 9 aa, Artificial Sequence
  Description of Artificial Sequence: Synthetic peptide
  Seed: GQISVQPTF
GQISVQPTM

SEQ ID NO: 29677 - protein, 9 aa, Artificial Sequence
  Description of Artificial Sequence: Synthetic peptide
  Seed: GQISVQPTF
GQISVQPTT

SEQ ID NO: 29678 - protein, 9 aa, Artificial Sequence
  Description of Artificial Sequence: Synthetic peptide
  Seed: GQISVQPTF
GQISVQPTW

SEQ ID NO: 29679 - protein, 9 aa, Artificial Sequence
  Description of Artificial Sequence: Synthetic peptide
  Seed: GQISVQPTF
GQISVQPTY

SEQ ID NO: 29680 - protein, 9 aa, Artificial Sequence
  Description of Artificial Sequence: Synthetic peptide
  Seed: GQISVQPTF
GQISVQPTV

SEQ ID NO: 29681 - protein, 9 aa, Artificial Sequence
  Description of Artificial Sequence: Synthetic peptide
  Seed: GQISVQPTF
GLISVQPTY

SEQ ID NO: 29682 - protein, 9 aa, Artificial Sequence
  Description of Artificial Sequence: Synthetic peptide
  Seed: GQISVQPTF
GKISVQPTI

SEQ ID NO: 29683 - protein, 9 aa, Artificial Sequence
  Description of Artificial Sequence: Synthetic peptide
  Seed: GQISVQPTF
GRISVQPTI

SEQ ID NO: 29684 - protein, 9 aa, Artificial Sequence
  Description of Artificial Sequence: Synthetic peptide
  Seed: GQISVQPTF
GWISVQPTF

SEQ ID NO: 29685 - protein, 9 aa, Artificial Sequence
  Description of Artificial Sequence: Synthetic peptide
  Seed: GQISVQPTF
GTISVQPTI

SEQ ID NO: 29686 - protein, 9 aa, Artificial Sequence
  Description of Artificial Sequence: Synthetic peptide
  Seed: GQISVQPTF
GTISVQPTL

SEQ ID NO: 29687 - protein, 9 aa, Artificial Sequence
  Description of Artificial Sequence: Synthetic peptide
  Seed: GQISVQPTF
GTISVQPTM

SEQ ID NO: 29688 - protein, 9 aa, Artificial Sequence
  Description of Artificial Sequence: Synthetic peptide
  Seed: GQISVQPTF
GTISVQPTF

SEQ ID NO: 29689 - protein, 9 aa, Artificial Sequence
  Description of Artificial Sequence: Synthetic peptide
  Seed: GQISVQPTF
GTISVQPTY

SEQ ID NO: 29690 - protein, 9 aa, Artificial Sequence
  Description of Artificial Sequence: Synthetic peptide
  Seed: GQISVQPTF
GTISVQPTV

SEQ ID NO: 29691 - protein, 9 aa, Artificial Sequence
  Description of Artificial Sequence: Synthetic peptide
  Seed: GQISVQPTF
GWISVQPTI

SEQ ID NO: 29692 - protein, 9 aa, Artificial Sequence
  Description of Artificial Sequence: Synthetic peptide
  Seed: GQISVQPTF
GWISVQPTL

SEQ ID NO: 29693 - protein, 9 aa, Artificial Sequence
  Description of Artificial Sequence: Synthetic peptide
  Seed: GQISVQPTF
GWISVQPTM

SEQ ID NO: 29694 - protein, 9 aa, Artificial Sequence
  Description of Artificial Sequence: Synthetic peptide
  Seed: GQISVQPTF
GWISVQPTW

SEQ ID NO: 29695 - protein, 9 aa, Artificial Sequence
  Description of Artificial Sequence: Synthetic peptide
  Seed: GQISVQPTF
GKISVQPTL

SEQ ID NO: 29696 - protein, 9 aa, Artificial Sequence
  Description of Artificial Sequence: Synthetic peptide
  Seed: GQISVQPTF
GWISVQPTV

SEQ ID NO: 29697 - protein, 9 aa, Artificial Sequence
  Description of Artificial Sequence: Synthetic peptide
  Seed: GQISVQPTF
GYISVQPTI

SEQ ID NO: 29698 - protein, 9 aa, Artificial Sequence
  Description of Artificial Sequence: Synthetic peptide
  Seed: GQISVQPTF
GYISVQPTL

SEQ ID NO: 29699 - protein, 9 aa, Artificial Sequence
  Description of Artificial Sequence: Synthetic peptide
  Seed: GQISVQPTF
GYISVQPTM

SEQ ID NO: 29700 - protein, 9 aa, Artificial Sequence
  Description of Artificial Sequence: Synthetic peptide
  Seed: GQISVQPTF
GYISVQPTF

SEQ ID NO: 29701 - protein, 9 aa, Artificial Sequence
  Description of Artificial Sequence: Synthetic peptide
  Seed: GQISVQPTF
GYISVQPTW

SEQ ID NO: 29702 - protein, 9 aa, Artificial Sequence
  Description of Artificial Sequence: Synthetic peptide
  Seed: GQISVQPTF
GYISVQPTY

SEQ ID NO: 29703 - protein, 9 aa, Artificial Sequence
  Description of Artificial Sequence: Synthetic peptide
  Seed: GQISVQPTF
GYISVQPTV

SEQ ID NO: 29704 - protein, 9 aa, Artificial Sequence
  Description of Artificial Sequence: Synthetic peptide
  Seed: GQISVQPTF
GVISVQPTA

SEQ ID NO: 29705 - protein, 9 aa, Artificial Sequence
  Description of Artificial Sequence: Synthetic peptide
  Seed: GQISVQPTF
GTISVQPTA

SEQ ID NO: 29706 - protein, 9 aa, Artificial Sequence
  Description of Artificial Sequence: Synthetic peptide
  Seed: GQISVQPTF
GSISVQPTV

SEQ ID NO: 29707 - protein, 9 aa, Artificial Sequence
  Description of Artificial Sequence: Synthetic peptide
  Seed: GQISVQPTF
GSISVQPTY

SEQ ID NO: 29708 - protein, 9 aa, Artificial Sequence
  Description of Artificial Sequence: Synthetic peptide
  Seed: GQISVQPTF
GSISVQPTF

SEQ ID NO: 29709 - protein, 9 aa, Artificial Sequence
  Description of Artificial Sequence: Synthetic peptide
  Seed: GQISVQPTF
GKISVQPTM

SEQ ID NO: 29710 - protein, 9 aa, Artificial Sequence
  Description of Artificial Sequence: Synthetic peptide
  Seed: GQISVQPTF
GKISVQPTF

SEQ ID NO: 29711 - protein, 9 aa, Artificial Sequence
  Description of Artificial Sequence: Synthetic peptide
  Seed: GQISVQPTF
GKISVQPTY

SEQ ID NO: 29712 - protein, 9 aa, Artificial Sequence
  Description of Artificial Sequence: Synthetic peptide
  Seed: GQISVQPTF
GMISVQPTA

SEQ ID NO: 29713 - protein, 9 aa, Artificial Sequence
  Description of Artificial Sequence: Synthetic peptide
  Seed: GQISVQPTF
GMISVQPTH

SEQ ID NO: 29714 - protein, 9 aa, Artificial Sequence
  Description of Artificial Sequence: Synthetic peptide
  Seed: GQISVQPTF
GMISVQPTI

SEQ ID NO: 29715 - protein, 9 aa, Artificial Sequence
  Description of Artificial Sequence: Synthetic peptide
  Seed: GQISVQPTF
GMISVQPTL

SEQ ID NO: 29716 - protein, 9 aa, Artificial Sequence
  Description of Artificial Sequence: Synthetic peptide
  Seed: GQISVQPTF
GMISVQPTM

SEQ ID NO: 29717 - protein, 9 aa, Artificial Sequence
  Description of Artificial Sequence: Synthetic peptide
  Seed: GQISVQPTF
GMISVQPTF

SEQ ID NO: 29718 - protein, 9 aa, Artificial Sequence
  Description of Artificial Sequence: Synthetic peptide
  Seed: GQISVQPTF
GMISVQPTW

SEQ ID NO: 29719 - protein, 9 aa, Artificial Sequence
  Description of Artificial Sequence: Synthetic peptide
  Seed: GQISVQPTF
GMISVQPTY

SEQ ID NO: 29720 - protein, 9 aa, Artificial Sequence
  Description of Artificial Sequence: Synthetic peptide
  Seed: GQISVQPTF
GMISVQPTV

SEQ ID NO: 29721 - protein, 9 aa, Artificial Sequence
  Description of Artificial Sequence: Synthetic peptide
  Seed: GQISVQPTF
GFISVQPTI

SEQ ID NO: 29722 - protein, 9 aa, Artificial Sequence
  Description of Artificial Sequence: Synthetic peptide
  Seed: GQISVQPTF
GFISVQPTL

SEQ ID NO: 29723 - protein, 9 aa, Artificial Sequence
  Description of Artificial Sequence: Synthetic peptide
  Seed: GQISVQPTF
GFISVQPTM

SEQ ID NO: 29724 - protein, 9 aa, Artificial Sequence
  Description of Artificial Sequence: Synthetic peptide
  Seed: GQISVQPTF
GFISVQPTF

SEQ ID NO: 29725 - protein, 9 aa, Artificial Sequence
  Description of Artificial Sequence: Synthetic peptide
  Seed: GQISVQPTF
GFISVQPTW

SEQ ID NO: 29726 - protein, 9 aa, Artificial Sequence
  Description of Artificial Sequence: Synthetic peptide
  Seed: GQISVQPTF
GFISVQPTY

SEQ ID NO: 29727 - protein, 9 aa, Artificial Sequence
  Description of Artificial Sequence: Synthetic peptide
  Seed: GQISVQPTF
GSISVQPTM

SEQ ID NO: 29728 - protein, 9 aa, Artificial Sequence
  Description of Artificial Sequence: Synthetic peptide
  Seed: GQISVQPTF
GRISVQPTL

SEQ ID NO: 29729 - protein, 9 aa, Artificial Sequence
  Description of Artificial Sequence: Synthetic peptide
  Seed: GQISVQPTF
GRISVQPTC

SEQ ID NO: 29730 - protein, 9 aa, Artificial Sequence
  Description of Artificial Sequence: Synthetic peptide
  Seed: GQISIQPTF
GVISIQPTF

SEQ ID NO: 29731 - protein, 9 aa, Artificial Sequence
  Description of Artificial Sequence: Synthetic peptide
  Seed: GQISIQPTF
GYISIQPTM

SEQ ID NO: 29732 - protein, 9 aa, Artificial Sequence
  Description of Artificial Sequence: Synthetic peptide
  Seed: GQISIQPTF
GYISIQPTF

SEQ ID NO: 29733 - protein, 9 aa, Artificial Sequence
  Description of Artificial Sequence: Synthetic peptide
  Seed: GQISIQPTF
GYISIQPTW

SEQ ID NO: 29734 - protein, 9 aa, Artificial Sequence
  Description of Artificial Sequence: Synthetic peptide
  Seed: GQISIQPTF
GYISIQPTY

SEQ ID NO: 29735 - protein, 9 aa, Artificial Sequence
  Description of Artificial Sequence: Synthetic peptide
  Seed: GQISIQPTF
GYISIQPTV

SEQ ID NO: 29736 - protein, 9 aa, Artificial Sequence
  Description of Artificial Sequence: Synthetic peptide
  Seed: GQISIQPTF
GVISIQPTA

SEQ ID NO: 29737 - protein, 9 aa, Artificial Sequence
  Description of Artificial Sequence: Synthetic peptide
  Seed: GQISIQPTF
GVISIQPTI

SEQ ID NO: 29738 - protein, 9 aa, Artificial Sequence
  Description of Artificial Sequence: Synthetic peptide
  Seed: GQISIQPTF
GVISIQPTL

SEQ ID NO: 29739 - protein, 9 aa, Artificial Sequence
  Description of Artificial Sequence: Synthetic peptide
  Seed: GQISIQPTF
GVISIQPTM

SEQ ID NO: 29740 - protein, 9 aa, Artificial Sequence
  Description of Artificial Sequence: Synthetic peptide
  Seed: GQISIQPTF
GVISIQPTY

SEQ ID NO: 29741 - protein, 10 aa, Artificial Sequence
  Description of Artificial Sequence: Synthetic peptide
  Seed: GQISIQPTFS
GQISIQPTFH

SEQ ID NO: 29742 - protein, 9 aa, Artificial Sequence
  Description of Artificial Sequence: Synthetic peptide
  Seed: GQISIQPTF
GVISIQPTV

SEQ ID NO: 29743 - protein, 10 aa, Artificial Sequence
  Description of Artificial Sequence: Synthetic peptide
  Seed: GQISIQPTFS
GRISIQPTFY

SEQ ID NO: 29744 - protein, 10 aa, Artificial Sequence
  Description of Artificial Sequence: Synthetic peptide
  Seed: GQISIQPTFS
GQISIQPTFA

SEQ ID NO: 29745 - protein, 10 aa, Artificial Sequence
  Description of Artificial Sequence: Synthetic peptide
  Seed: GQISIQPTFS
GQISIQPTFR

SEQ ID NO: 29746 - protein, 10 aa, Artificial Sequence
  Description of Artificial Sequence: Synthetic peptide
  Seed: GQISIQPTFS
GQISIQPTFN

SEQ ID NO: 29747 - protein, 10 aa, Artificial Sequence
  Description of Artificial Sequence: Synthetic peptide
  Seed: GQISIQPTFS
GQISIQPTFD

SEQ ID NO: 29748 - protein, 10 aa, Artificial Sequence
  Description of Artificial Sequence: Synthetic peptide
  Seed: GQISIQPTFS
GQISIQPTFC

SEQ ID NO: 29749 - protein, 10 aa, Artificial Sequence
  Description of Artificial Sequence: Synthetic peptide
  Seed: GQISIQPTFS
GQISIQPTFQ

SEQ ID NO: 29750 - protein, 10 aa, Artificial Sequence
  Description of Artificial Sequence: Synthetic peptide
  Seed: GQISIQPTFS
GQISIQPTFE

SEQ ID NO: 29751 - protein, 9 aa, Artificial Sequence
  Description of Artificial Sequence: Synthetic peptide
  Seed: GQISIQPTF
GYISIQPTL

SEQ ID NO: 29752 - protein, 9 aa, Artificial Sequence
  Description of Artificial Sequence: Synthetic peptide
  Seed: GQISIQPTF
GYISIQPTI

SEQ ID NO: 29753 - protein, 9 aa, Artificial Sequence
  Description of Artificial Sequence: Synthetic peptide
  Seed: GQISIQPTF
GWISIQPTV

SEQ ID NO: 29754 - protein, 9 aa, Artificial Sequence
  Description of Artificial Sequence: Synthetic peptide
  Seed: GQISIQPTF
GWISIQPTW

SEQ ID NO: 29755 - protein, 9 aa, Artificial Sequence
  Description of Artificial Sequence: Synthetic peptide
  Seed: GQISIQPTF
GFISIQPTM

SEQ ID NO: 29756 - protein, 9 aa, Artificial Sequence
  Description of Artificial Sequence: Synthetic peptide
  Seed: GQISIQPTF
GFISIQPTF

SEQ ID NO: 29757 - protein, 9 aa, Artificial Sequence
  Description of Artificial Sequence: Synthetic peptide
  Seed: GQISIQPTF
GFISIQPTW

SEQ ID NO: 29758 - protein, 9 aa, Artificial Sequence
  Description of Artificial Sequence: Synthetic peptide
  Seed: GQISIQPTF
GFISIQPTY

SEQ ID NO: 29759 - protein, 9 aa, Artificial Sequence
  Description of Artificial Sequence: Synthetic peptide
  Seed: GQISIQPTF
GSISIQPTM

SEQ ID NO: 29760 - protein, 9 aa, Artificial Sequence
  Description of Artificial Sequence: Synthetic peptide
  Seed: GQISIQPTF
GSISIQPTF

SEQ ID NO: 29761 - protein, 9 aa, Artificial Sequence
  Description of Artificial Sequence: Synthetic peptide
  Seed: GQISIQPTF
GSISIQPTY

SEQ ID NO: 29762 - protein, 9 aa, Artificial Sequence
  Description of Artificial Sequence: Synthetic peptide
  Seed: GQISIQPTF
GSISIQPTV

SEQ ID NO: 29763 - protein, 9 aa, Artificial Sequence
  Description of Artificial Sequence: Synthetic peptide
  Seed: GQISIQPTF
GTISIQPTA

SEQ ID NO: 29764 - protein, 9 aa, Artificial Sequence
  Description of Artificial Sequence: Synthetic peptide
  Seed: GQISIQPTF
GTISIQPTI

SEQ ID NO: 29765 - protein, 9 aa, Artificial Sequence
  Description of Artificial Sequence: Synthetic peptide
  Seed: GQISIQPTF
GTISIQPTL

SEQ ID NO: 29766 - protein, 9 aa, Artificial Sequence
  Description of Artificial Sequence: Synthetic peptide
  Seed: GQISIQPTF
GTISIQPTM

SEQ ID NO: 29767 - protein, 9 aa, Artificial Sequence
  Description of Artificial Sequence: Synthetic peptide
  Seed: GQISIQPTF
GTISIQPTF

SEQ ID NO: 29768 - protein, 9 aa, Artificial Sequence
  Description of Artificial Sequence: Synthetic peptide
  Seed: GQISIQPTF
GTISIQPTY

SEQ ID NO: 29769 - protein, 9 aa, Artificial Sequence
  Description of Artificial Sequence: Synthetic peptide
  Seed: GQISIQPTF
GTISIQPTV

SEQ ID NO: 29770 - protein, 9 aa, Artificial Sequence
  Description of Artificial Sequence: Synthetic peptide
  Seed: GQISIQPTF
GWISIQPTI

SEQ ID NO: 29771 - protein, 9 aa, Artificial Sequence
  Description of Artificial Sequence: Synthetic peptide
  Seed: GQISIQPTF
GWISIQPTL

SEQ ID NO: 29772 - protein, 9 aa, Artificial Sequence
  Description of Artificial Sequence: Synthetic peptide
  Seed: GQISIQPTF
GWISIQPTM

SEQ ID NO: 29773 - protein, 9 aa, Artificial Sequence
  Description of Artificial Sequence: Synthetic peptide
  Seed: GQISIQPTF
GWISIQPTF

SEQ ID NO: 29774 - protein, 10 aa, Artificial Sequence
  Description of Artificial Sequence: Synthetic peptide
  Seed: GQISIQPTFS
GQISIQPTFG

SEQ ID NO: 29775 - protein, 10 aa, Artificial Sequence
  Description of Artificial Sequence: Synthetic peptide
  Seed: GQISIQPTFS
GQISIQPTFI

SEQ ID NO: 29776 - protein, 9 aa, Artificial Sequence
  Description of Artificial Sequence: Synthetic peptide
  Seed: GQISVQPTF
GRISVQPTA

SEQ ID NO: 29777 - protein, 11 aa, Artificial Sequence
  Description of Artificial Sequence: Synthetic peptide
  Seed: GQISIQPTFSV
GMISIQPTFSM

SEQ ID NO: 29778 - protein, 11 aa, Artificial Sequence
  Description of Artificial Sequence: Synthetic peptide
  Seed: GQISIQPTFSV
GIISIQPTFSV

SEQ ID NO: 29779 - protein, 11 aa, Artificial Sequence
  Description of Artificial Sequence: Synthetic peptide
  Seed: GQISIQPTFSV
GLISIQPTFSA

SEQ ID NO: 29780 - protein, 11 aa, Artificial Sequence
  Description of Artificial Sequence: Synthetic peptide
  Seed: GQISIQPTFSV
GLISIQPTFSI

SEQ ID NO: 29781 - protein, 11 aa, Artificial Sequence
  Description of Artificial Sequence: Synthetic peptide
  Seed: GQISIQPTFSV
GLISIQPTFSL

SEQ ID NO: 29782 - protein, 11 aa, Artificial Sequence
  Description of Artificial Sequence: Synthetic peptide
  Seed: GQISIQPTFSV
GLISIQPTFSM

SEQ ID NO: 29783 - protein, 11 aa, Artificial Sequence
  Description of Artificial Sequence: Synthetic peptide
  Seed: GQISIQPTFSV
GLISIQPTFSV

SEQ ID NO: 29784 - protein, 11 aa, Artificial Sequence
  Description of Artificial Sequence: Synthetic peptide
  Seed: GQISIQPTFSV
GMISIQPTFSA

SEQ ID NO: 29785 - protein, 11 aa, Artificial Sequence
  Description of Artificial Sequence: Synthetic peptide
  Seed: GQISIQPTFSV
GMISIQPTFSI

SEQ ID NO: 29786 - protein, 11 aa, Artificial Sequence
  Description of Artificial Sequence: Synthetic peptide
  Seed: GQISIQPTFSV
GMISIQPTFSL

SEQ ID NO: 29787 - protein, 11 aa, Artificial Sequence
  Description of Artificial Sequence: Synthetic peptide
  Seed: GQISIQPTFSV
GMISIQPTFSV

SEQ ID NO: 29788 - protein, 10 aa, Artificial Sequence
  Description of Artificial Sequence: Synthetic peptide
  Seed: GQISIQPTFS
GQISIQPTFL

SEQ ID NO: 29789 - protein, 11 aa, Artificial Sequence
  Description of Artificial Sequence: Synthetic peptide
  Seed: GQISIQPTFSV
GFISIQPTFSV

SEQ ID NO: 29790 - protein, 11 aa, Artificial Sequence
  Description of Artificial Sequence: Synthetic peptide
  Seed: GQISIQPTFSV
GSISIQPTFSV

SEQ ID NO: 29791 - protein, 11 aa, Artificial Sequence
  Description of Artificial Sequence: Synthetic peptide
  Seed: GQISIQPTFSV
GTISIQPTFSV

SEQ ID NO: 29792 - protein, 11 aa, Artificial Sequence
  Description of Artificial Sequence: Synthetic peptide
  Seed: GQISIQPTFSV
GYISIQPTFSV

SEQ ID NO: 29793 - protein, 11 aa, Artificial Sequence
  Description of Artificial Sequence: Synthetic peptide
  Seed: GQISIQPTFSV
GVISIQPTFSV

SEQ ID NO: 29794 - protein, 9 aa, Artificial Sequence
  Description of Artificial Sequence: Synthetic peptide
  Seed: GQISVQPTF
GAISVQPTM

SEQ ID NO: 29795 - protein, 9 aa, Artificial Sequence
  Description of Artificial Sequence: Synthetic peptide
  Seed: GQISVQPTF
GAISVQPTF

SEQ ID NO: 29796 - protein, 9 aa, Artificial Sequence
  Description of Artificial Sequence: Synthetic peptide
  Seed: GQISVQPTF
GAISVQPTY

SEQ ID NO: 29797 - protein, 9 aa, Artificial Sequence
  Description of Artificial Sequence: Synthetic peptide
  Seed: GQISVQPTF
GAISVQPTV

SEQ ID NO: 29798 - protein, 11 aa, Artificial Sequence
  Description of Artificial Sequence: Synthetic peptide
  Seed: GQISIQPTFSV
GIISIQPTFSL

SEQ ID NO: 29799 - protein, 11 aa, Artificial Sequence
  Description of Artificial Sequence: Synthetic peptide
  Seed: GQISIQPTFSV
GIISIQPTFSI

SEQ ID NO: 29800 - protein, 11 aa, Artificial Sequence
  Description of Artificial Sequence: Synthetic peptide
  Seed: GQISIQPTFSV
GQISIQPTFSM

SEQ ID NO: 29801 - protein, 11 aa, Artificial Sequence
  Description of Artificial Sequence: Synthetic peptide
  Seed: GQISIQPTFSV
GQISIQPTFSL

SEQ ID NO: 29802 - protein, 10 aa, Artificial Sequence
  Description of Artificial Sequence: Synthetic peptide
  Seed: GQISIQPTFS
GQISIQPTFK

SEQ ID NO: 29803 - protein, 10 aa, Artificial Sequence
  Description of Artificial Sequence: Synthetic peptide
  Seed: GQISIQPTFS
GQISIQPTFM

SEQ ID NO: 29804 - protein, 10 aa, Artificial Sequence
  Description of Artificial Sequence: Synthetic peptide
  Seed: GQISIQPTFS
GQISIQPTFF

SEQ ID NO: 29805 - protein, 10 aa, Artificial Sequence
  Description of Artificial Sequence: Synthetic peptide
  Seed: GQISIQPTFS
GQISIQPTFP

SEQ ID NO: 29806 - protein, 10 aa, Artificial Sequence
  Description of Artificial Sequence: Synthetic peptide
  Seed: GQISIQPTFS
GQISIQPTFT

SEQ ID NO: 29807 - protein, 10 aa, Artificial Sequence
  Description of Artificial Sequence: Synthetic peptide
  Seed: GQISIQPTFS
GQISIQPTFW

SEQ ID NO: 29808 - protein, 10 aa, Artificial Sequence
  Description of Artificial Sequence: Synthetic peptide
  Seed: GQISIQPTFS
GQISIQPTFY

SEQ ID NO: 29809 - protein, 10 aa, Artificial Sequence
  Description of Artificial Sequence: Synthetic peptide
  Seed: GQISIQPTFS
GQISIQPTFV

SEQ ID NO: 29810 - protein, 10 aa, Artificial Sequence
  Description of Artificial Sequence: Synthetic peptide
  Seed: GQISIQPTFS
GHISIQPTFF

SEQ ID NO: 29811 - protein, 10 aa, Artificial Sequence
  Description of Artificial Sequence: Synthetic peptide
  Seed: GQISIQPTFS
GHISIQPTFY

SEQ ID NO: 29812 - protein, 10 aa, Artificial Sequence
  Description of Artificial Sequence: Synthetic peptide
  Seed: GQISIQPTFS
GKISIQPTFM

SEQ ID NO: 29813 - protein, 10 aa, Artificial Sequence
  Description of Artificial Sequence: Synthetic peptide
  Seed: GQISIQPTFS
GKISIQPTFF

SEQ ID NO: 29814 - protein, 10 aa, Artificial Sequence
  Description of Artificial Sequence: Synthetic peptide
  Seed: GQISIQPTFS
GKISIQPTFY

SEQ ID NO: 29815 - protein, 10 aa, Artificial Sequence
  Description of Artificial Sequence: Synthetic peptide
  Seed: GQISIQPTFS
GMISIQPTFM

SEQ ID NO: 29816 - protein, 10 aa, Artificial Sequence
  Description of Artificial Sequence: Synthetic peptide
  Seed: GQISIQPTFS
GMISIQPTFF

SEQ ID NO: 29817 - protein, 10 aa, Artificial Sequence
  Description of Artificial Sequence: Synthetic peptide
  Seed: GQISIQPTFS
GMISIQPTFY

SEQ ID NO: 29818 - protein, 11 aa, Artificial Sequence
  Description of Artificial Sequence: Synthetic peptide
  Seed: GQISIQPTFSV
GAISIQPTFSV

SEQ ID NO: 29819 - protein, 11 aa, Artificial Sequence
  Description of Artificial Sequence: Synthetic peptide
  Seed: GQISIQPTFSV
GQISIQPTFSA

SEQ ID NO: 29820 - protein, 11 aa, Artificial Sequence
  Description of Artificial Sequence: Synthetic peptide
  Seed: GQISIQPTFSV
GQISIQPTFSI

SEQ ID NO: 29821 - protein, 9 aa, Artificial Sequence
  Description of Artificial Sequence: Synthetic peptide
  Seed: GQISVQPTF
GVISVQPTI

SEQ ID NO: 29822 - protein, 9 aa, Artificial Sequence
  Description of Artificial Sequence: Synthetic peptide
  Seed: GQISVQPTF
GVISVQPTL

SEQ ID NO: 29823 - protein, 9 aa, Artificial Sequence
  Description of Artificial Sequence: Synthetic peptide
  Seed: GQISVQPTF
GVISVQPTM

SEQ ID NO: 29824 - protein, 10 aa, Artificial Sequence
  Description of Artificial Sequence: Synthetic peptide
  Seed: GRLIQNSITI
GNLIQNSITF

SEQ ID NO: 29825 - protein, 10 aa, Artificial Sequence
  Description of Artificial Sequence: Synthetic peptide
  Seed: GRLIQNSITI
GALIQNSITF

SEQ ID NO: 29826 - protein, 10 aa, Artificial Sequence
  Description of Artificial Sequence: Synthetic peptide
  Seed: GRLIQNSITI
GALIQNSITY

SEQ ID NO: 29827 - protein, 10 aa, Artificial Sequence
  Description of Artificial Sequence: Synthetic peptide
  Seed: GRLIQNSITI
GRLIQNSITR

SEQ ID NO: 29828 - protein, 10 aa, Artificial Sequence
  Description of Artificial Sequence: Synthetic peptide
  Seed: GRLIQNSITI
GRLIQNSITL

SEQ ID NO: 29829 - protein, 10 aa, Artificial Sequence
  Description of Artificial Sequence: Synthetic peptide
  Seed: GRLIQNSITI
GRLIQNSITK

SEQ ID NO: 29830 - protein, 10 aa, Artificial Sequence
  Description of Artificial Sequence: Synthetic peptide
  Seed: GRLIQNSITI
GRLIQNSITF

SEQ ID NO: 29831 - protein, 10 aa, Artificial Sequence
  Description of Artificial Sequence: Synthetic peptide
  Seed: GRLIQNSITI
GRLIQNSITY

SEQ ID NO: 29832 - protein, 10 aa, Artificial Sequence
  Description of Artificial Sequence: Synthetic peptide
  Seed: GRLIQNSITI
GRLIQNSITV

SEQ ID NO: 29833 - protein, 10 aa, Artificial Sequence
  Description of Artificial Sequence: Synthetic peptide
  Seed: GRLIQNSITI
GNLIQNSITY

SEQ ID NO: 29834 - protein, 10 aa, Artificial Sequence
  Description of Artificial Sequence: Synthetic peptide
  Seed: GRLIQNSITI
GELIQNSITY

SEQ ID NO: 29835 - protein, 10 aa, Artificial Sequence
  Description of Artificial Sequence: Synthetic peptide
  Seed: GRLIQNSITI
GDLIQNSITF

SEQ ID NO: 29836 - protein, 10 aa, Artificial Sequence
  Description of Artificial Sequence: Synthetic peptide
  Seed: GRLIQNSITI
GDLIQNSITY

SEQ ID NO: 29837 - protein, 10 aa, Artificial Sequence
  Description of Artificial Sequence: Synthetic peptide
  Seed: GRLIQNSITI
GCLIQNSITM

SEQ ID NO: 29838 - protein, 10 aa, Artificial Sequence
  Description of Artificial Sequence: Synthetic peptide
  Seed: GRLIQNSITI
GCLIQNSITF

SEQ ID NO: 29839 - protein, 10 aa, Artificial Sequence
  Description of Artificial Sequence: Synthetic peptide
  Seed: GRLIQNSITI
GCLIQNSITY

SEQ ID NO: 29840 - protein, 10 aa, Artificial Sequence
  Description of Artificial Sequence: Synthetic peptide
  Seed: GRLIQNSITI
GQLIQNSITL

SEQ ID NO: 29841 - protein, 10 aa, Artificial Sequence
  Description of Artificial Sequence: Synthetic peptide
  Seed: GRLIQNSITI
GQLIQNSITM

SEQ ID NO: 29842 - protein, 10 aa, Artificial Sequence
  Description of Artificial Sequence: Synthetic peptide
  Seed: GRLIQNSITI
GQLIQNSITF

SEQ ID NO: 29843 - protein, 10 aa, Artificial Sequence
  Description of Artificial Sequence: Synthetic peptide
  Seed: GRLIQNSITI
GQLIQNSITY

SEQ ID NO: 29844 - protein, 10 aa, Artificial Sequence
  Description of Artificial Sequence: Synthetic peptide
  Seed: GRLIQNSITI
GALIQNSITM

SEQ ID NO: 29845 - protein, 10 aa, Artificial Sequence
  Description of Artificial Sequence: Synthetic peptide
  Seed: GRKTRIAYER
GRKTRIAYEV

SEQ ID NO: 29846 - protein, 10 aa, Artificial Sequence
  Description of Artificial Sequence: Synthetic peptide
  Seed: GRKTRIAYER
GRKTRIAYEY

SEQ ID NO: 29847 - protein, 10 aa, Artificial Sequence
  Description of Artificial Sequence: Synthetic peptide
  Seed: GRKTRIAYER
GRKTRIAYEF

SEQ ID NO: 29848 - protein, 11 aa, Artificial Sequence
  Description of Artificial Sequence: Synthetic peptide
  Seed: GRFYIQMCTEL
GFFYIQMCTEW

SEQ ID NO: 29849 - protein, 11 aa, Artificial Sequence
  Description of Artificial Sequence: Synthetic peptide
  Seed: GRFYIQMCTEL
GPFYIQMCTEF

SEQ ID NO: 29850 - protein, 11 aa, Artificial Sequence
  Description of Artificial Sequence: Synthetic peptide
  Seed: GRFYIQMCTEL
GPFYIQMCTEW

SEQ ID NO: 29851 - protein, 11 aa, Artificial Sequence
  Description of Artificial Sequence: Synthetic peptide
  Seed: GRFYIQMCTEL
GSFYIQMCTEF

SEQ ID NO: 29852 - protein, 11 aa, Artificial Sequence
  Description of Artificial Sequence: Synthetic peptide
  Seed: GRFYIQMCTEL
GSFYIQMCTEW

SEQ ID NO: 29853 - protein, 11 aa, Artificial Sequence
  Description of Artificial Sequence: Synthetic peptide
  Seed: GRFYIQMCTEL
GTFYIQMCTEF

SEQ ID NO: 29854 - protein, 11 aa, Artificial Sequence
  Description of Artificial Sequence: Synthetic peptide
  Seed: GRFYIQMCTEL
GTFYIQMCTEW

SEQ ID NO: 29855 - protein, 11 aa, Artificial Sequence
  Description of Artificial Sequence: Synthetic peptide
  Seed: GRFYIQMCTEL
GWFYIQMCTEF

SEQ ID NO: 29856 - protein, 11 aa, Artificial Sequence
  Description of Artificial Sequence: Synthetic peptide
  Seed: GRFYIQMCTEL
GWFYIQMCTEW

SEQ ID NO: 29857 - protein, 11 aa, Artificial Sequence
  Description of Artificial Sequence: Synthetic peptide
  Seed: GRFYIQMCTEL
GYFYIQMCTEI

SEQ ID NO: 29858 - protein, 11 aa, Artificial Sequence
  Description of Artificial Sequence: Synthetic peptide
  Seed: GRFYIQMCTEL
GYFYIQMCTEL

SEQ ID NO: 29859 - protein, 11 aa, Artificial Sequence
  Description of Artificial Sequence: Synthetic peptide
  Seed: GRFYIQMCTEL
GYFYIQMCTEF

SEQ ID NO: 29860 - protein, 11 aa, Artificial Sequence
  Description of Artificial Sequence: Synthetic peptide
  Seed: GRFYIQMCTEL
GYFYIQMCTEW

SEQ ID NO: 29861 - protein, 11 aa, Artificial Sequence
  Description of Artificial Sequence: Synthetic peptide
  Seed: GRFYIQMCTEL
GVFYIQMCTEF

SEQ ID NO: 29862 - protein, 11 aa, Artificial Sequence
  Description of Artificial Sequence: Synthetic peptide
  Seed: GRFYIQMCTEL
GVFYIQMCTEW

SEQ ID NO: 29863 - protein, 10 aa, Artificial Sequence
  Description of Artificial Sequence: Synthetic peptide
  Seed: GRKTRIAYER
GRKTRIAYEI

SEQ ID NO: 29864 - protein, 10 aa, Artificial Sequence
  Description of Artificial Sequence: Synthetic peptide
  Seed: GRKTRIAYER
GRKTRIAYEL

SEQ ID NO: 29865 - protein, 10 aa, Artificial Sequence
  Description of Artificial Sequence: Synthetic peptide
  Seed: GRKTRIAYER
GRKTRIAYEK

SEQ ID NO: 29866 - protein, 10 aa, Artificial Sequence
  Description of Artificial Sequence: Synthetic peptide
  Seed: GRKTRIAYER
GRKTRIAYEM

SEQ ID NO: 29867 - protein, 10 aa, Artificial Sequence
  Description of Artificial Sequence: Synthetic peptide
  Seed: GRLIQNSITI
GELIQNSITF

SEQ ID NO: 29868 - protein, 10 aa, Artificial Sequence
  Description of Artificial Sequence: Synthetic peptide
  Seed: GRLIQNSITI
GGLIQNSITF

SEQ ID NO: 29869 - protein, 9 aa, Artificial Sequence
  Description of Artificial Sequence: Synthetic peptide
  Seed: GQISVQPTF
GVISVQPTF

SEQ ID NO: 29870 - protein, 10 aa, Artificial Sequence
  Description of Artificial Sequence: Synthetic peptide
  Seed: GRLIQNSITI
GWLIQNSITA

SEQ ID NO: 29871 - protein, 10 aa, Artificial Sequence
  Description of Artificial Sequence: Synthetic peptide
  Seed: GRLIQNSITI
GPLIQNSITV

SEQ ID NO: 29872 - protein, 10 aa, Artificial Sequence
  Description of Artificial Sequence: Synthetic peptide
  Seed: GRLIQNSITI
GSLIQNSITA

SEQ ID NO: 29873 - protein, 10 aa, Artificial Sequence
  Description of Artificial Sequence: Synthetic peptide
  Seed: GRLIQNSITI
GSLIQNSITI

SEQ ID NO: 29874 - protein, 10 aa, Artificial Sequence
  Description of Artificial Sequence: Synthetic peptide
  Seed: GRLIQNSITI
GSLIQNSITL

SEQ ID NO: 29875 - protein, 10 aa, Artificial Sequence
  Description of Artificial Sequence: Synthetic peptide
  Seed: GRLIQNSITI
GSLIQNSITV

SEQ ID NO: 29876 - protein, 10 aa, Artificial Sequence
  Description of Artificial Sequence: Synthetic peptide
  Seed: GRLIQNSITI
GTLIQNSITA

SEQ ID NO: 29877 - protein, 10 aa, Artificial Sequence
  Description of Artificial Sequence: Synthetic peptide
  Seed: GRLIQNSITI
GTLIQNSITI

SEQ ID NO: 29878 - protein, 10 aa, Artificial Sequence
  Description of Artificial Sequence: Synthetic peptide
  Seed: GRLIQNSITI
GTLIQNSITL

SEQ ID NO: 29879 - protein, 10 aa, Artificial Sequence
  Description of Artificial Sequence: Synthetic peptide
  Seed: GRLIQNSITI
GTLIQNSITV

SEQ ID NO: 29880 - protein, 10 aa, Artificial Sequence
  Description of Artificial Sequence: Synthetic peptide
  Seed: GRLIQNSITI
GWLIQNSITI

SEQ ID NO: 29881 - protein, 10 aa, Artificial Sequence
  Description of Artificial Sequence: Synthetic peptide
  Seed: GRLIQNSITI
GGLIQNSITY

SEQ ID NO: 29882 - protein, 10 aa, Artificial Sequence
  Description of Artificial Sequence: Synthetic peptide
  Seed: GRLIQNSITI
GWLIQNSITL

SEQ ID NO: 29883 - protein, 10 aa, Artificial Sequence
  Description of Artificial Sequence: Synthetic peptide
  Seed: GRLIQNSITI
GWLIQNSITV

SEQ ID NO: 29884 - protein, 10 aa, Artificial Sequence
  Description of Artificial Sequence: Synthetic peptide
  Seed: GRLIQNSITI
GYLIQNSITA

SEQ ID NO: 29885 - protein, 10 aa, Artificial Sequence
  Description of Artificial Sequence: Synthetic peptide
  Seed: GRLIQNSITI
GYLIQNSITI

SEQ ID NO: 29886 - protein, 10 aa, Artificial Sequence
  Description of Artificial Sequence: Synthetic peptide
  Seed: GRLIQNSITI
GYLIQNSITL

SEQ ID NO: 29887 - protein, 10 aa, Artificial Sequence
  Description of Artificial Sequence: Synthetic peptide
  Seed: GRLIQNSITI
GYLIQNSITM

SEQ ID NO: 29888 - protein, 10 aa, Artificial Sequence
  Description of Artificial Sequence: Synthetic peptide
  Seed: GRLIQNSITI
GYLIQNSITV

SEQ ID NO: 29889 - protein, 10 aa, Artificial Sequence
  Description of Artificial Sequence: Synthetic peptide
  Seed: GRLIQNSITI
GVLIQNSITA

SEQ ID NO: 29890 - protein, 10 aa, Artificial Sequence
  Description of Artificial Sequence: Synthetic peptide
  Seed: GRLIQNSITI
GVLIQNSITI

SEQ ID NO: 29891 - protein, 10 aa, Artificial Sequence
  Description of Artificial Sequence: Synthetic peptide
  Seed: GRLIQNSITI
GPLIQNSITL

SEQ ID NO: 29892 - protein, 10 aa, Artificial Sequence
  Description of Artificial Sequence: Synthetic peptide
  Seed: GRLIQNSITI
GPLIQNSITI

SEQ ID NO: 29893 - protein, 10 aa, Artificial Sequence
  Description of Artificial Sequence: Synthetic peptide
  Seed: GRLIQNSITI
GPLIQNSITA

SEQ ID NO: 29894 - protein, 10 aa, Artificial Sequence
  Description of Artificial Sequence: Synthetic peptide
  Seed: GRLIQNSITI
GFLIQNSITV

SEQ ID NO: 29895 - protein, 10 aa, Artificial Sequence
  Description of Artificial Sequence: Synthetic peptide
  Seed: GRLIQNSITI
GHLIQNSITM

SEQ ID NO: 29896 - protein, 10 aa, Artificial Sequence
  Description of Artificial Sequence: Synthetic peptide
  Seed: GRLIQNSITI
GHLIQNSITF

SEQ ID NO: 29897 - protein, 10 aa, Artificial Sequence
  Description of Artificial Sequence: Synthetic peptide
  Seed: GRLIQNSITI
GHLIQNSITY

SEQ ID NO: 29898 - protein, 10 aa, Artificial Sequence
  Description of Artificial Sequence: Synthetic peptide
  Seed: GRLIQNSITI
GILIQNSITM

SEQ ID NO: 29899 - protein, 10 aa, Artificial Sequence
  Description of Artificial Sequence: Synthetic peptide
  Seed: GRLIQNSITI
GILIQNSITF

SEQ ID NO: 29900 - protein, 10 aa, Artificial Sequence
  Description of Artificial Sequence: Synthetic peptide
  Seed: GRLIQNSITI
GILIQNSITY

SEQ ID NO: 29901 - protein, 10 aa, Artificial Sequence
  Description of Artificial Sequence: Synthetic peptide
  Seed: GRLIQNSITI
GLLIQNSITM

SEQ ID NO: 29902 - protein, 10 aa, Artificial Sequence
  Description of Artificial Sequence: Synthetic peptide
  Seed: GRLIQNSITI
GLLIQNSITF

SEQ ID NO: 29903 - protein, 10 aa, Artificial Sequence
  Description of Artificial Sequence: Synthetic peptide
  Seed: GRLIQNSITI
GLLIQNSITY

SEQ ID NO: 29904 - protein, 10 aa, Artificial Sequence
  Description of Artificial Sequence: Synthetic peptide
  Seed: GRLIQNSITI
GKLIQNSITM

SEQ ID NO: 29905 - protein, 10 aa, Artificial Sequence
  Description of Artificial Sequence: Synthetic peptide
  Seed: GRLIQNSITI
GKLIQNSITF

SEQ ID NO: 29906 - protein, 10 aa, Artificial Sequence
  Description of Artificial Sequence: Synthetic peptide
  Seed: GRLIQNSITI
GKLIQNSITY

SEQ ID NO: 29907 - protein, 10 aa, Artificial Sequence
  Description of Artificial Sequence: Synthetic peptide
  Seed: GRLIQNSITI
GMLIQNSITL

SEQ ID NO: 29908 - protein, 10 aa, Artificial Sequence
  Description of Artificial Sequence: Synthetic peptide
  Seed: GRLIQNSITI
GMLIQNSITM

SEQ ID NO: 29909 - protein, 10 aa, Artificial Sequence
  Description of Artificial Sequence: Synthetic peptide
  Seed: GRLIQNSITI
GMLIQNSITF

SEQ ID NO: 29910 - protein, 10 aa, Artificial Sequence
  Description of Artificial Sequence: Synthetic peptide
  Seed: GRLIQNSITI
GMLIQNSITY

SEQ ID NO: 29911 - protein, 10 aa, Artificial Sequence
  Description of Artificial Sequence: Synthetic peptide
  Seed: GRLIQNSITI
GFLIQNSITI

SEQ ID NO: 29912 - protein, 10 aa, Artificial Sequence
  Description of Artificial Sequence: Synthetic peptide
  Seed: GRLIQNSITI
GFLIQNSITL

SEQ ID NO: 29913 - protein, 10 aa, Artificial Sequence
  Description of Artificial Sequence: Synthetic peptide
  Seed: GRLIQNSITI
GFLIQNSITM

SEQ ID NO: 29914 - protein, 11 aa, Artificial Sequence
  Description of Artificial Sequence: Synthetic peptide
  Seed: GRFYIQMCTEL
GFFYIQMCTEF

SEQ ID NO: 29915 - protein, 11 aa, Artificial Sequence
  Description of Artificial Sequence: Synthetic peptide
  Seed: GRFYIQMCTEL
GMFYIQMCTEW

SEQ ID NO: 29916 - protein, 11 aa, Artificial Sequence
  Description of Artificial Sequence: Synthetic peptide
  Seed: GRFYIQMCTEL
GMFYIQMCTEF

SEQ ID NO: 29917 - protein, 11 aa, Artificial Sequence
  Description of Artificial Sequence: Synthetic peptide
  Seed: GQISVQPTFSV
GQISVQPTFSA

SEQ ID NO: 29918 - protein, 10 aa, Artificial Sequence
  Description of Artificial Sequence: Synthetic peptide
  Seed: GQISVQPTFS
GHISVQPTFF

SEQ ID NO: 29919 - protein, 10 aa, Artificial Sequence
  Description of Artificial Sequence: Synthetic peptide
  Seed: GQISVQPTFS
GHISVQPTFY

SEQ ID NO: 29920 - protein, 10 aa, Artificial Sequence
  Description of Artificial Sequence: Synthetic peptide
  Seed: GQISVQPTFS
GKISVQPTFM

SEQ ID NO: 29921 - protein, 10 aa, Artificial Sequence
  Description of Artificial Sequence: Synthetic peptide
  Seed: GQISVQPTFS
GKISVQPTFF

SEQ ID NO: 29922 - protein, 10 aa, Artificial Sequence
  Description of Artificial Sequence: Synthetic peptide
  Seed: GQISVQPTFS
GKISVQPTFY

SEQ ID NO: 29923 - protein, 10 aa, Artificial Sequence
  Description of Artificial Sequence: Synthetic peptide
  Seed: GQISVQPTFS
GMISVQPTFM

SEQ ID NO: 29924 - protein, 10 aa, Artificial Sequence
  Description of Artificial Sequence: Synthetic peptide
  Seed: GQISVQPTFS
GMISVQPTFF

SEQ ID NO: 29925 - protein, 10 aa, Artificial Sequence
  Description of Artificial Sequence: Synthetic peptide
  Seed: GQISVQPTFS
GMISVQPTFY

SEQ ID NO: 29926 - protein, 11 aa, Artificial Sequence
  Description of Artificial Sequence: Synthetic peptide
  Seed: GQISVQPTFSV
GAISVQPTFSV

SEQ ID NO: 29927 - protein, 11 aa, Artificial Sequence
  Description of Artificial Sequence: Synthetic peptide
  Seed: GQISVQPTFSV
GQISVQPTFSI

SEQ ID NO: 29928 - protein, 11 aa, Artificial Sequence
  Description of Artificial Sequence: Synthetic peptide
  Seed: GRFYIQMCTEL
GKFYIQMCTEW

SEQ ID NO: 29929 - protein, 11 aa, Artificial Sequence
  Description of Artificial Sequence: Synthetic peptide
  Seed: GQISVQPTFSV
GQISVQPTFSL

SEQ ID NO: 29930 - protein, 11 aa, Artificial Sequence
  Description of Artificial Sequence: Synthetic peptide
  Seed: GQISVQPTFSV
GQISVQPTFSM

SEQ ID NO: 29931 - protein, 11 aa, Artificial Sequence
  Description of Artificial Sequence: Synthetic peptide
  Seed: GQISVQPTFSV
GIISVQPTFSI

SEQ ID NO: 29932 - protein, 11 aa, Artificial Sequence
  Description of Artificial Sequence: Synthetic peptide
  Seed: GQISVQPTFSV
GIISVQPTFSL

SEQ ID NO: 29933 - protein, 11 aa, Artificial Sequence
  Description of Artificial Sequence: Synthetic peptide
  Seed: GQISVQPTFSV
GIISVQPTFSV

SEQ ID NO: 29934 - protein, 11 aa, Artificial Sequence
  Description of Artificial Sequence: Synthetic peptide
  Seed: GQISVQPTFSV
GLISVQPTFSA

SEQ ID NO: 29935 - protein, 11 aa, Artificial Sequence
  Description of Artificial Sequence: Synthetic peptide
  Seed: GQISVQPTFSV
GLISVQPTFSI

SEQ ID NO: 29936 - protein, 11 aa, Artificial Sequence
  Description of Artificial Sequence: Synthetic peptide
  Seed: GQISVQPTFSV
GLISVQPTFSL

SEQ ID NO: 29937 - protein, 11 aa, Artificial Sequence
  Description of Artificial Sequence: Synthetic peptide
  Seed: GQISVQPTFSV
GLISVQPTFSM

SEQ ID NO: 29938 - protein, 10 aa, Artificial Sequence
  Description of Artificial Sequence: Synthetic peptide
  Seed: GQISVQPTFS
GEISVQPTFY

SEQ ID NO: 29939 - protein, 10 aa, Artificial Sequence
  Description of Artificial Sequence: Synthetic peptide
  Seed: GQISVQPTFS
GQISVQPTFV

SEQ ID NO: 29940 - protein, 10 aa, Artificial Sequence
  Description of Artificial Sequence: Synthetic peptide
  Seed: GQISVQPTFS
GQISVQPTFY

SEQ ID NO: 29941 - protein, 10 aa, Artificial Sequence
  Description of Artificial Sequence: Synthetic peptide
  Seed: GQISVQPTFS
GQISVQPTFW

SEQ ID NO: 29942 - protein, 9 aa, Artificial Sequence
  Description of Artificial Sequence: Synthetic peptide
  Seed: GQISVQPTF
GVISVQPTY

SEQ ID NO: 29943 - protein, 9 aa, Artificial Sequence
  Description of Artificial Sequence: Synthetic peptide
  Seed: GQISVQPTF
GVISVQPTV

SEQ ID NO: 29944 - protein, 10 aa, Artificial Sequence
  Description of Artificial Sequence: Synthetic peptide
  Seed: GQISVQPTFS
GRISVQPTFY

SEQ ID NO: 29945 - protein, 10 aa, Artificial Sequence
  Description of Artificial Sequence: Synthetic peptide
  Seed: GQISVQPTFS
GQISVQPTFA

SEQ ID NO: 29946 - protein, 10 aa, Artificial Sequence
  Description of Artificial Sequence: Synthetic peptide
  Seed: GQISVQPTFS
GQISVQPTFR

SEQ ID NO: 29947 - protein, 10 aa, Artificial Sequence
  Description of Artificial Sequence: Synthetic peptide
  Seed: GQISVQPTFS
GQISVQPTFN

SEQ ID NO: 29948 - protein, 10 aa, Artificial Sequence
  Description of Artificial Sequence: Synthetic peptide
  Seed: GQISVQPTFS
GQISVQPTFD

SEQ ID NO: 29949 - protein, 10 aa, Artificial Sequence
  Description of Artificial Sequence: Synthetic peptide
  Seed: GQISVQPTFS
GQISVQPTFC

SEQ ID NO: 29950 - protein, 10 aa, Artificial Sequence
  Description of Artificial Sequence: Synthetic peptide
  Seed: GQISVQPTFS
GQISVQPTFQ

SEQ ID NO: 29951 - protein, 10 aa, Artificial Sequence
  Description of Artificial Sequence: Synthetic peptide
  Seed: GQISVQPTFS
GQISVQPTFE

SEQ ID NO: 29952 - protein, 10 aa, Artificial Sequence
  Description of Artificial Sequence: Synthetic peptide
  Seed: GQISVQPTFS
GQISVQPTFG

SEQ ID NO: 29953 - protein, 10 aa, Artificial Sequence
  Description of Artificial Sequence: Synthetic peptide
  Seed: GQISVQPTFS
GQISVQPTFH

SEQ ID NO: 29954 - protein, 10 aa, Artificial Sequence
  Description of Artificial Sequence: Synthetic peptide
  Seed: GQISVQPTFS
GQISVQPTFI

SEQ ID NO: 29955 - protein, 10 aa, Artificial Sequence
  Description of Artificial Sequence: Synthetic peptide
  Seed: GQISVQPTFS
GQISVQPTFL

SEQ ID NO: 29956 - protein, 10 aa, Artificial Sequence
  Description of Artificial Sequence: Synthetic peptide
  Seed: GQISVQPTFS
GQISVQPTFK

SEQ ID NO: 29957 - protein, 10 aa, Artificial Sequence
  Description of Artificial Sequence: Synthetic peptide
  Seed: GQISVQPTFS
GQISVQPTFM

SEQ ID NO: 29958 - protein, 10 aa, Artificial Sequence
  Description of Artificial Sequence: Synthetic peptide
  Seed: GQISVQPTFS
GQISVQPTFF

SEQ ID NO: 29959 - protein, 10 aa, Artificial Sequence
  Description of Artificial Sequence: Synthetic peptide
  Seed: GQISVQPTFS
GQISVQPTFP

SEQ ID NO: 29960 - protein, 10 aa, Artificial Sequence
  Description of Artificial Sequence: Synthetic peptide
  Seed: GQISVQPTFS
GQISVQPTFT

SEQ ID NO: 29961 - protein, 11 aa, Artificial Sequence
  Description of Artificial Sequence: Synthetic peptide
  Seed: GQISVQPTFSV
GLISVQPTFSV

SEQ ID NO: 29962 - protein, 11 aa, Artificial Sequence
  Description of Artificial Sequence: Synthetic peptide
  Seed: GQISVQPTFSV
GMISVQPTFSA

SEQ ID NO: 29963 - protein, 11 aa, Artificial Sequence
  Description of Artificial Sequence: Synthetic peptide
  Seed: GQISVQPTFSV
GMISVQPTFSI

SEQ ID NO: 29964 - protein, 9 aa, Artificial Sequence
  Description of Artificial Sequence: Synthetic peptide
  Seed: GRFYIQMCT
GQFYIQMCI

SEQ ID NO: 29965 - protein, 9 aa, Artificial Sequence
  Description of Artificial Sequence: Synthetic peptide
  Seed: GRFYIQMCT
GQFYIQMCM

SEQ ID NO: 29966 - protein, 9 aa, Artificial Sequence
  Description of Artificial Sequence: Synthetic peptide
  Seed: GRFYIQMCT
GQFYIQMCF

SEQ ID NO: 29967 - protein, 9 aa, Artificial Sequence
  Description of Artificial Sequence: Synthetic peptide
  Seed: GRFYIQMCT
GQFYIQMCV

SEQ ID NO: 29968 - protein, 9 aa, Artificial Sequence
  Description of Artificial Sequence: Synthetic peptide
  Seed: GRFYIQMCT
GKFYIQMCL

SEQ ID NO: 29969 - protein, 11 aa, Artificial Sequence
  Description of Artificial Sequence: Synthetic peptide
  Seed: GRFYIQMCTEL
GRFYIQMCTEA

SEQ ID NO: 29970 - protein, 11 aa, Artificial Sequence
  Description of Artificial Sequence: Synthetic peptide
  Seed: GRFYIQMCTEL
GRFYIQMCTER

SEQ ID NO: 29971 - protein, 11 aa, Artificial Sequence
  Description of Artificial Sequence: Synthetic peptide
  Seed: GRFYIQMCTEL
GRFYIQMCTEK

SEQ ID NO: 29972 - protein, 11 aa, Artificial Sequence
  Description of Artificial Sequence: Synthetic peptide
  Seed: GRFYIQMCTEL
GRFYIQMCTEM

SEQ ID NO: 29973 - protein, 11 aa, Artificial Sequence
  Description of Artificial Sequence: Synthetic peptide
  Seed: GRFYIQMCTEL
GRFYIQMCTEY

SEQ ID NO: 29974 - protein, 11 aa, Artificial Sequence
  Description of Artificial Sequence: Synthetic peptide
  Seed: GRFYIQMCTEL
GRFYIQMCTEV

SEQ ID NO: 29975 - protein, 11 aa, Artificial Sequence
  Description of Artificial Sequence: Synthetic peptide
  Seed: GRFYIQMCTEL
GHFYIQMCTEF

SEQ ID NO: 29976 - protein, 11 aa, Artificial Sequence
  Description of Artificial Sequence: Synthetic peptide
  Seed: GRFYIQMCTEL
GHFYIQMCTEW

SEQ ID NO: 29977 - protein, 11 aa, Artificial Sequence
  Description of Artificial Sequence: Synthetic peptide
  Seed: GRFYIQMCTEL
GIFYIQMCTEF

SEQ ID NO: 29978 - protein, 11 aa, Artificial Sequence
  Description of Artificial Sequence: Synthetic peptide
  Seed: GRFYIQMCTEL
GIFYIQMCTEW

SEQ ID NO: 29979 - protein, 11 aa, Artificial Sequence
  Description of Artificial Sequence: Synthetic peptide
  Seed: GRFYIQMCTEL
GLFYIQMCTEF

SEQ ID NO: 29980 - protein, 11 aa, Artificial Sequence
  Description of Artificial Sequence: Synthetic peptide
  Seed: GRFYIQMCTEL
GLFYIQMCTEW

SEQ ID NO: 29981 - protein, 11 aa, Artificial Sequence
  Description of Artificial Sequence: Synthetic peptide
  Seed: GRFYIQMCTEL
GKFYIQMCTEF

SEQ ID NO: 29982 - protein, 9 aa, Artificial Sequence
  Description of Artificial Sequence: Synthetic peptide
  Seed: GRFYIQMCT
GQFYIQMCL

SEQ ID NO: 29983 - protein, 9 aa, Artificial Sequence
  Description of Artificial Sequence: Synthetic peptide
  Seed: GRFYIQMCT
GRFYIQMCV

SEQ ID NO: 29984 - protein, 11 aa, Artificial Sequence
  Description of Artificial Sequence: Synthetic peptide
  Seed: GQISVQPTFSV
GMISVQPTFSL

SEQ ID NO: 29985 - protein, 9 aa, Artificial Sequence
  Description of Artificial Sequence: Synthetic peptide
  Seed: GRFYIQMCT
GRFYIQMCY

SEQ ID NO: 29986 - protein, 11 aa, Artificial Sequence
  Description of Artificial Sequence: Synthetic peptide
  Seed: GQISVQPTFSV
GMISVQPTFSM

SEQ ID NO: 29987 - protein, 11 aa, Artificial Sequence
  Description of Artificial Sequence: Synthetic peptide
  Seed: GQISVQPTFSV
GMISVQPTFSV

SEQ ID NO: 29988 - protein, 11 aa, Artificial Sequence
  Description of Artificial Sequence: Synthetic peptide
  Seed: GQISVQPTFSV
GFISVQPTFSV

SEQ ID NO: 29989 - protein, 11 aa, Artificial Sequence
  Description of Artificial Sequence: Synthetic peptide
  Seed: GQISVQPTFSV
GSISVQPTFSV

SEQ ID NO: 29990 - protein, 11 aa, Artificial Sequence
  Description of Artificial Sequence: Synthetic peptide
  Seed: GQISVQPTFSV
GTISVQPTFSV

SEQ ID NO: 29991 - protein, 11 aa, Artificial Sequence
  Description of Artificial Sequence: Synthetic peptide
  Seed: GQISVQPTFSV
GVISVQPTFSV

SEQ ID NO: 29992 - protein, 9 aa, Artificial Sequence
  Description of Artificial Sequence: Synthetic peptide
  Seed: GRFYIQMCT
GRFYIQMCA

SEQ ID NO: 29993 - protein, 9 aa, Artificial Sequence
  Description of Artificial Sequence: Synthetic peptide
  Seed: GRFYIQMCT
GRFYIQMCR

SEQ ID NO: 29994 - protein, 9 aa, Artificial Sequence
  Description of Artificial Sequence: Synthetic peptide
  Seed: GRFYIQMCT
GRFYIQMCC

SEQ ID NO: 29995 - protein, 9 aa, Artificial Sequence
  Description of Artificial Sequence: Synthetic peptide
  Seed: GRFYIQMCT
GRFYIQMCQ

SEQ ID NO: 29996 - protein, 9 aa, Artificial Sequence
  Description of Artificial Sequence: Synthetic peptide
  Seed: GRFYIQMCT
GRFYIQMCG

SEQ ID NO: 29997 - protein, 9 aa, Artificial Sequence
  Description of Artificial Sequence: Synthetic peptide
  Seed: GRFYIQMCT
GRFYIQMCH

SEQ ID NO: 29998 - protein, 9 aa, Artificial Sequence
  Description of Artificial Sequence: Synthetic peptide
  Seed: GRFYIQMCT
GRFYIQMCI

SEQ ID NO: 29999 - protein, 9 aa, Artificial Sequence
  Description of Artificial Sequence: Synthetic peptide
  Seed: GRFYIQMCT
GRFYIQMCL

SEQ ID NO: 30000 - protein, 9 aa, Artificial Sequence
  Description of Artificial Sequence: Synthetic peptide
  Seed: GRFYIQMCT
GRFYIQMCK

SEQ ID NO: 30001 - protein, 9 aa, Artificial Sequence
  Description of Artificial Sequence: Synthetic peptide
  Seed: GRFYIQMCT
GRFYIQMCM

SEQ ID NO: 30002 - protein, 9 aa, Artificial Sequence
  Description of Artificial Sequence: Synthetic peptide
  Seed: GRFYIQMCT
GRFYIQMCF

SEQ ID NO: 30003 - protein, 9 aa, Artificial Sequence
  Description of Artificial Sequence: Synthetic peptide
  Seed: GRFYIQMCT
GRFYIQMCS

SEQ ID NO: 30004 - protein, 9 aa, Artificial Sequence
  Description of Artificial Sequence: Synthetic peptide
  Seed: GRFYIQMCT
GRFYIQMCW

SEQ ID NO: 30005 - protein, 9 aa, Artificial Sequence
  Description of Artificial Sequence: Synthetic peptide
  Seed: GQISIQPTF
GFISIQPTL

SEQ ID NO: 30006 - protein, 9 aa, Artificial Sequence
  Description of Artificial Sequence: Synthetic peptide
  Seed: GQISIQPTF
GFISIQPTI

SEQ ID NO: 30007 - protein, 9 aa, Artificial Sequence
  Description of Artificial Sequence: Synthetic peptide
  Seed: GQISIQPTF
GMISIQPTV

SEQ ID NO: 30008 - protein, 9 aa, Artificial Sequence
  Description of Artificial Sequence: Synthetic peptide
  Seed: GKWVRELIL
GHWVRELIY

SEQ ID NO: 30009 - protein, 9 aa, Artificial Sequence
  Description of Artificial Sequence: Synthetic peptide
  Seed: GKWVRELIL
GQWVRELIW

SEQ ID NO: 30010 - protein, 9 aa, Artificial Sequence
  Description of Artificial Sequence: Synthetic peptide
  Seed: GKWVRELIL
GQWVRELIY

SEQ ID NO: 30011 - protein, 9 aa, Artificial Sequence
  Description of Artificial Sequence: Synthetic peptide
  Seed: GKWVRELIL
GQWVRELIV

SEQ ID NO: 30012 - protein, 9 aa, Artificial Sequence
  Description of Artificial Sequence: Synthetic peptide
  Seed: GKWVRELIL
GEWVRELIM

SEQ ID NO: 30013 - protein, 9 aa, Artificial Sequence
  Description of Artificial Sequence: Synthetic peptide
  Seed: GKWVRELIL
GEWVRELIF

SEQ ID NO: 30014 - protein, 9 aa, Artificial Sequence
  Description of Artificial Sequence: Synthetic peptide
  Seed: GKWVRELIL
GEWVRELIY

SEQ ID NO: 30015 - protein, 9 aa, Artificial Sequence
  Description of Artificial Sequence: Synthetic peptide
  Seed: GKWVRELIL
GGWVRELIY

SEQ ID NO: 30016 - protein, 9 aa, Artificial Sequence
  Description of Artificial Sequence: Synthetic peptide
  Seed: GKWVRELIL
GHWVRELIM

SEQ ID NO: 30017 - protein, 9 aa, Artificial Sequence
  Description of Artificial Sequence: Synthetic peptide
  Seed: GKWVRELIL
GHWVRELIF

SEQ ID NO: 30018 - protein, 9 aa, Artificial Sequence
  Description of Artificial Sequence: Synthetic peptide
  Seed: GKWVRELIL
GIWVRELIF

SEQ ID NO: 30019 - protein, 9 aa, Artificial Sequence
  Description of Artificial Sequence: Synthetic peptide
  Seed: GKWVRELIL
GSWVRELIF

SEQ ID NO: 30020 - protein, 9 aa, Artificial Sequence
  Description of Artificial Sequence: Synthetic peptide
  Seed: GKWVRELIL
GIWVRELIY

SEQ ID NO: 30021 - protein, 9 aa, Artificial Sequence
  Description of Artificial Sequence: Synthetic peptide
  Seed: GKWVRELIL
GLWVRELIF

SEQ ID NO: 30022 - protein, 9 aa, Artificial Sequence
  Description of Artificial Sequence: Synthetic peptide
  Seed: GKWVRELIL
GLWVRELIY

SEQ ID NO: 30023 - protein, 9 aa, Artificial Sequence
  Description of Artificial Sequence: Synthetic peptide
  Seed: GKWVRELIL
GKWVRELIM

SEQ ID NO: 30024 - protein, 9 aa, Artificial Sequence
  Description of Artificial Sequence: Synthetic peptide
  Seed: GKWVRELIL
GKWVRELIF

SEQ ID NO: 30025 - protein, 9 aa, Artificial Sequence
  Description of Artificial Sequence: Synthetic peptide
  Seed: GKWVRELIL
GKWVRELIY

SEQ ID NO: 30026 - protein, 9 aa, Artificial Sequence
  Description of Artificial Sequence: Synthetic peptide
  Seed: GKWVRELIL
GMWVRELIL

SEQ ID NO: 30027 - protein, 9 aa, Artificial Sequence
  Description of Artificial Sequence: Synthetic peptide
  Seed: GKWVRELIL
GMWVRELIM

SEQ ID NO: 30028 - protein, 9 aa, Artificial Sequence
  Description of Artificial Sequence: Synthetic peptide
  Seed: GKWVRELIL
GMWVRELIF

SEQ ID NO: 30029 - protein, 9 aa, Artificial Sequence
  Description of Artificial Sequence: Synthetic peptide
  Seed: GKWVRELIL
GQWVRELIF

SEQ ID NO: 30030 - protein, 9 aa, Artificial Sequence
  Description of Artificial Sequence: Synthetic peptide
  Seed: GKWVRELIL
GQWVRELIM

SEQ ID NO: 30031 - protein, 9 aa, Artificial Sequence
  Description of Artificial Sequence: Synthetic peptide
  Seed: GKWVRELIL
GQWVRELIL

SEQ ID NO: 30032 - protein, 9 aa, Artificial Sequence
  Description of Artificial Sequence: Synthetic peptide
  Seed: GKWVRELIL
GQWVRELII

SEQ ID NO: 30033 - protein, 10 aa, Artificial Sequence
  Description of Artificial Sequence: Synthetic peptide
  Seed: GKWMRELVLY
GVWMRELVLY

SEQ ID NO: 30034 - protein, 9 aa, Artificial Sequence
  Description of Artificial Sequence: Synthetic peptide
  Seed: GKWVRELIL
GAWVRELIM

SEQ ID NO: 30035 - protein, 9 aa, Artificial Sequence
  Description of Artificial Sequence: Synthetic peptide
  Seed: GKWVRELIL
GAWVRELIF

SEQ ID NO: 30036 - protein, 9 aa, Artificial Sequence
  Description of Artificial Sequence: Synthetic peptide
  Seed: GKWVRELIL
GAWVRELIY

SEQ ID NO: 30037 - protein, 9 aa, Artificial Sequence
  Description of Artificial Sequence: Synthetic peptide
  Seed: GKWVRELIL
GRWVRELIA

SEQ ID NO: 30038 - protein, 9 aa, Artificial Sequence
  Description of Artificial Sequence: Synthetic peptide
  Seed: GKWVRELIL
GRWVRELIC

SEQ ID NO: 30039 - protein, 9 aa, Artificial Sequence
  Description of Artificial Sequence: Synthetic peptide
  Seed: GKWVRELIL
GRWVRELIG

SEQ ID NO: 30040 - protein, 9 aa, Artificial Sequence
  Description of Artificial Sequence: Synthetic peptide
  Seed: GKWVRELIL
GRWVRELII

SEQ ID NO: 30041 - protein, 9 aa, Artificial Sequence
  Description of Artificial Sequence: Synthetic peptide
  Seed: GKWVRELIL
GRWVRELIL

SEQ ID NO: 30042 - protein, 9 aa, Artificial Sequence
  Description of Artificial Sequence: Synthetic peptide
  Seed: GKWVRELIL
GRWVRELIM

SEQ ID NO: 30043 - protein, 9 aa, Artificial Sequence
  Description of Artificial Sequence: Synthetic peptide
  Seed: GKWVRELIL
GRWVRELIF

SEQ ID NO: 30044 - protein, 9 aa, Artificial Sequence
  Description of Artificial Sequence: Synthetic peptide
  Seed: GKWVRELIL
GRWVRELIS

SEQ ID NO: 30045 - protein, 9 aa, Artificial Sequence
  Description of Artificial Sequence: Synthetic peptide
  Seed: GKWVRELIL
GRWVRELIT

SEQ ID NO: 30046 - protein, 9 aa, Artificial Sequence
  Description of Artificial Sequence: Synthetic peptide
  Seed: GKWVRELIL
GRWVRELIW

SEQ ID NO: 30047 - protein, 9 aa, Artificial Sequence
  Description of Artificial Sequence: Synthetic peptide
  Seed: GKWVRELIL
GRWVRELIY

SEQ ID NO: 30048 - protein, 9 aa, Artificial Sequence
  Description of Artificial Sequence: Synthetic peptide
  Seed: GKWVRELIL
GRWVRELIV

SEQ ID NO: 30049 - protein, 9 aa, Artificial Sequence
  Description of Artificial Sequence: Synthetic peptide
  Seed: GKWVRELIL
GNWVRELIF

SEQ ID NO: 30050 - protein, 9 aa, Artificial Sequence
  Description of Artificial Sequence: Synthetic peptide
  Seed: GKWVRELIL
GNWVRELIY

SEQ ID NO: 30051 - protein, 9 aa, Artificial Sequence
  Description of Artificial Sequence: Synthetic peptide
  Seed: GKWVRELIL
GQWVRELIH

SEQ ID NO: 30052 - protein, 9 aa, Artificial Sequence
  Description of Artificial Sequence: Synthetic peptide
  Seed: GKWVRELIL
GMWVRELIY

SEQ ID NO: 30053 - protein, 9 aa, Artificial Sequence
  Description of Artificial Sequence: Synthetic peptide
  Seed: GKWVRELIL
GSWVRELIY

SEQ ID NO: 30054 - protein, 9 aa, Artificial Sequence
  Description of Artificial Sequence: Synthetic peptide
  Seed: GMDPRMCSL
GQDPRMCSI

SEQ ID NO: 30055 - protein, 10 aa, Artificial Sequence
  Description of Artificial Sequence: Synthetic peptide
  Seed: GLAVASGYDF
GMAVASGYDF

SEQ ID NO: 30056 - protein, 10 aa, Artificial Sequence
  Description of Artificial Sequence: Synthetic peptide
  Seed: GLAVASGHDF
GVAVASGHDY

SEQ ID NO: 30057 - protein, 10 aa, Artificial Sequence
  Description of Artificial Sequence: Synthetic peptide
  Seed: GLAVASGYDF
GAAVASGYDY

SEQ ID NO: 30058 - protein, 10 aa, Artificial Sequence
  Description of Artificial Sequence: Synthetic peptide
  Seed: GLAVASGYDF
GQAVASGYDM

SEQ ID NO: 30059 - protein, 10 aa, Artificial Sequence
  Description of Artificial Sequence: Synthetic peptide
  Seed: GLAVASGYDF
GQAVASGYDF

SEQ ID NO: 30060 - protein, 10 aa, Artificial Sequence
  Description of Artificial Sequence: Synthetic peptide
  Seed: GLAVASGYDF
GQAVASGYDY

SEQ ID NO: 30061 - protein, 10 aa, Artificial Sequence
  Description of Artificial Sequence: Synthetic peptide
  Seed: GLAVASGYDF
GIAVASGYDF

SEQ ID NO: 30062 - protein, 10 aa, Artificial Sequence
  Description of Artificial Sequence: Synthetic peptide
  Seed: GLAVASGYDF
GIAVASGYDY

SEQ ID NO: 30063 - protein, 10 aa, Artificial Sequence
  Description of Artificial Sequence: Synthetic peptide
  Seed: GLAVASGYDF
GLAVASGYDY

SEQ ID NO: 30064 - protein, 10 aa, Artificial Sequence
  Description of Artificial Sequence: Synthetic peptide
  Seed: GLAVASGYDF
GMAVASGYDM

SEQ ID NO: 30065 - protein, 10 aa, Artificial Sequence
  Description of Artificial Sequence: Synthetic peptide
  Seed: GLAVASGYDF
GMAVASGYDY

SEQ ID NO: 30066 - protein, 9 aa, Artificial Sequence
  Description of Artificial Sequence: Synthetic peptide
  Seed: GKWVRELIL
GTWVRELIF

SEQ ID NO: 30067 - protein, 10 aa, Artificial Sequence
  Description of Artificial Sequence: Synthetic peptide
  Seed: GLAVASGYDF
GSAVASGYDY

SEQ ID NO: 30068 - protein, 10 aa, Artificial Sequence
  Description of Artificial Sequence: Synthetic peptide
  Seed: GLAVASGYDF
GTAVASGYDY

SEQ ID NO: 30069 - protein, 10 aa, Artificial Sequence
  Description of Artificial Sequence: Synthetic peptide
  Seed: GLAVASGYDF
GVAVASGYDF

SEQ ID NO: 30070 - protein, 10 aa, Artificial Sequence
  Description of Artificial Sequence: Synthetic peptide
  Seed: GLAVASGYDF
GVAVASGYDY

SEQ ID NO: 30071 - protein, 9 aa, Artificial Sequence
  Description of Artificial Sequence: Synthetic peptide
  Seed: GMDPRMCSL
GADPRMCSI

SEQ ID NO: 30072 - protein, 9 aa, Artificial Sequence
  Description of Artificial Sequence: Synthetic peptide
  Seed: GMDPRMCSL
GADPRMCSL

SEQ ID NO: 30073 - protein, 9 aa, Artificial Sequence
  Description of Artificial Sequence: Synthetic peptide
  Seed: GMDPRMCSL
GADPRMCSM

SEQ ID NO: 30074 - protein, 9 aa, Artificial Sequence
  Description of Artificial Sequence: Synthetic peptide
  Seed: GMDPRMCSL
GADPRMCSF

SEQ ID NO: 30075 - protein, 10 aa, Artificial Sequence
  Description of Artificial Sequence: Synthetic peptide
  Seed: GLAVASGHDF
GVAVASGHDF

SEQ ID NO: 30076 - protein, 10 aa, Artificial Sequence
  Description of Artificial Sequence: Synthetic peptide
  Seed: GLAVASGHDF
GTAVASGHDY

SEQ ID NO: 30077 - protein, 10 aa, Artificial Sequence
  Description of Artificial Sequence: Synthetic peptide
  Seed: GLAVASGHDF
GSAVASGHDY

SEQ ID NO: 30078 - protein, 10 aa, Artificial Sequence
  Description of Artificial Sequence: Synthetic peptide
  Seed: GLAVASGHDF
GMAVASGHDY

SEQ ID NO: 30079 - protein, 9 aa, Artificial Sequence
  Description of Artificial Sequence: Synthetic peptide
  Seed: GKWVRELIL
GTWVRELIY

SEQ ID NO: 30080 - protein, 9 aa, Artificial Sequence
  Description of Artificial Sequence: Synthetic peptide
  Seed: GKWVRELIL
GVWVRELIF

SEQ ID NO: 30081 - protein, 9 aa, Artificial Sequence
  Description of Artificial Sequence: Synthetic peptide
  Seed: GKWVRELIL
GVWVRELIY

SEQ ID NO: 30082 - protein, 10 aa, Artificial Sequence
  Description of Artificial Sequence: Synthetic peptide
  Seed: GKWVRELILY
GQWVRELILM

SEQ ID NO: 30083 - protein, 10 aa, Artificial Sequence
  Description of Artificial Sequence: Synthetic peptide
  Seed: GKWVRELILY
GQWVRELILF

SEQ ID NO: 30084 - protein, 10 aa, Artificial Sequence
  Description of Artificial Sequence: Synthetic peptide
  Seed: GKWVRELILY
GQWVRELILY

SEQ ID NO: 30085 - protein, 10 aa, Artificial Sequence
  Description of Artificial Sequence: Synthetic peptide
  Seed: GKWVRELILY
GHWVRELILY

SEQ ID NO: 30086 - protein, 10 aa, Artificial Sequence
  Description of Artificial Sequence: Synthetic peptide
  Seed: GKWVRELILY
GKWVRELILF

SEQ ID NO: 30087 - protein, 10 aa, Artificial Sequence
  Description of Artificial Sequence: Synthetic peptide
  Seed: GKWVRELILY
GMWVRELILF

SEQ ID NO: 30088 - protein, 10 aa, Artificial Sequence
  Description of Artificial Sequence: Synthetic peptide
  Seed: GKWVRELILY
GMWVRELILY

SEQ ID NO: 30089 - protein, 10 aa, Artificial Sequence
  Description of Artificial Sequence: Synthetic peptide
  Seed: GLAVASGHDF
GAAVASGHDY

SEQ ID NO: 30090 - protein, 10 aa, Artificial Sequence
  Description of Artificial Sequence: Synthetic peptide
  Seed: GLAVASGHDF
GQAVASGHDM

SEQ ID NO: 30091 - protein, 10 aa, Artificial Sequence
  Description of Artificial Sequence: Synthetic peptide
  Seed: GLAVASGHDF
GQAVASGHDF

SEQ ID NO: 30092 - protein, 10 aa, Artificial Sequence
  Description of Artificial Sequence: Synthetic peptide
  Seed: GLAVASGHDF
GQAVASGHDY

SEQ ID NO: 30093 - protein, 10 aa, Artificial Sequence
  Description of Artificial Sequence: Synthetic peptide
  Seed: GLAVASGHDF
GIAVASGHDF

SEQ ID NO: 30094 - protein, 10 aa, Artificial Sequence
  Description of Artificial Sequence: Synthetic peptide
  Seed: GLAVASGHDF
GIAVASGHDY

SEQ ID NO: 30095 - protein, 10 aa, Artificial Sequence
  Description of Artificial Sequence: Synthetic peptide
  Seed: GLAVASGHDF
GLAVASGHDY

SEQ ID NO: 30096 - protein, 10 aa, Artificial Sequence
  Description of Artificial Sequence: Synthetic peptide
  Seed: GLAVASGHDF
GMAVASGHDM

SEQ ID NO: 30097 - protein, 10 aa, Artificial Sequence
  Description of Artificial Sequence: Synthetic peptide
  Seed: GLAVASGHDF
GMAVASGHDF

SEQ ID NO: 30098 - protein, 10 aa, Artificial Sequence
  Description of Artificial Sequence: Synthetic peptide
  Seed: GKWMRELVLY
GYWMRELVLY

SEQ ID NO: 30099 - protein, 10 aa, Artificial Sequence
  Description of Artificial Sequence: Synthetic peptide
  Seed: GKWMRELVLY
GYWMRELVLF

SEQ ID NO: 30100 - protein, 10 aa, Artificial Sequence
  Description of Artificial Sequence: Synthetic peptide
  Seed: GKWMRELVLY
GWWMRELVLY

SEQ ID NO: 30101 - protein, 9 aa, Artificial Sequence
  Description of Artificial Sequence: Synthetic peptide
  Seed: GKWMRELVL
GSWMRELVY

SEQ ID NO: 30102 - protein, 9 aa, Artificial Sequence
  Description of Artificial Sequence: Synthetic peptide
  Seed: GKWMRELVL
GMWMRELVF

SEQ ID NO: 30103 - protein, 9 aa, Artificial Sequence
  Description of Artificial Sequence: Synthetic peptide
  Seed: GKWMRELVL
GMWMRELVW

SEQ ID NO: 30104 - protein, 9 aa, Artificial Sequence
  Description of Artificial Sequence: Synthetic peptide
  Seed: GKWMRELVL
GMWMRELVY

SEQ ID NO: 30105 - protein, 9 aa, Artificial Sequence
  Description of Artificial Sequence: Synthetic peptide
  Seed: GKWMRELVL
GMWMRELVV

SEQ ID NO: 30106 - protein, 9 aa, Artificial Sequence
  Description of Artificial Sequence: Synthetic peptide
  Seed: GKWMRELVL
GFWMRELVF

SEQ ID NO: 30107 - protein, 9 aa, Artificial Sequence
  Description of Artificial Sequence: Synthetic peptide
  Seed: GKWMRELVL
GFWMRELVY

SEQ ID NO: 30108 - protein, 9 aa, Artificial Sequence
  Description of Artificial Sequence: Synthetic peptide
  Seed: GKWMRELVL
GPWMRELVY

SEQ ID NO: 30109 - protein, 9 aa, Artificial Sequence
  Description of Artificial Sequence: Synthetic peptide
  Seed: GKWMRELVL
GSWMRELVM

SEQ ID NO: 30110 - protein, 9 aa, Artificial Sequence
  Description of Artificial Sequence: Synthetic peptide
  Seed: GKWMRELVL
GSWMRELVF

SEQ ID NO: 30111 - protein, 9 aa, Artificial Sequence
  Description of Artificial Sequence: Synthetic peptide
  Seed: GKWMRELVL
GTWMRELVM

SEQ ID NO: 30112 - protein, 10 aa, Artificial Sequence
  Description of Artificial Sequence: Synthetic peptide
  Seed: GKWMRELVLY
GTWMRELVLY

SEQ ID NO: 30113 - protein, 9 aa, Artificial Sequence
  Description of Artificial Sequence: Synthetic peptide
  Seed: GKWMRELVL
GTWMRELVF

SEQ ID NO: 30114 - protein, 9 aa, Artificial Sequence
  Description of Artificial Sequence: Synthetic peptide
  Seed: GKWMRELVL
GTWMRELVY

SEQ ID NO: 30115 - protein, 9 aa, Artificial Sequence
  Description of Artificial Sequence: Synthetic peptide
  Seed: GKWMRELVL
GYWMRELVM

SEQ ID NO: 30116 - protein, 9 aa, Artificial Sequence
  Description of Artificial Sequence: Synthetic peptide
  Seed: GKWMRELVL
GYWMRELVF

SEQ ID NO: 30117 - protein, 9 aa, Artificial Sequence
  Description of Artificial Sequence: Synthetic peptide
  Seed: GKWMRELVL
GYWMRELVY

SEQ ID NO: 30118 - protein, 9 aa, Artificial Sequence
  Description of Artificial Sequence: Synthetic peptide
  Seed: GKWMRELVL
GVWMRELVM

SEQ ID NO: 30119 - protein, 9 aa, Artificial Sequence
  Description of Artificial Sequence: Synthetic peptide
  Seed: GKWMRELVL
GVWMRELVF

SEQ ID NO: 30120 - protein, 9 aa, Artificial Sequence
  Description of Artificial Sequence: Synthetic peptide
  Seed: GKWMRELVL
GVWMRELVY

SEQ ID NO: 30121 - protein, 10 aa, Artificial Sequence
  Description of Artificial Sequence: Synthetic peptide
  Seed: GKWMRELVLY
GAWMRELVLF

SEQ ID NO: 30122 - protein, 9 aa, Artificial Sequence
  Description of Artificial Sequence: Synthetic peptide
  Seed: GKWMRELVL
GMWMRELVM

SEQ ID NO: 30123 - protein, 9 aa, Artificial Sequence
  Description of Artificial Sequence: Synthetic peptide
  Seed: GKWMRELVL
GMWMRELVL

SEQ ID NO: 30124 - protein, 9 aa, Artificial Sequence
  Description of Artificial Sequence: Synthetic peptide
  Seed: GKWMRELVL
GMWMRELVI

SEQ ID NO: 30125 - protein, 9 aa, Artificial Sequence
  Description of Artificial Sequence: Synthetic peptide
  Seed: GKWMRELVL
GMWMRELVH

SEQ ID NO: 30126 - protein, 9 aa, Artificial Sequence
  Description of Artificial Sequence: Synthetic peptide
  Seed: GKWMRELVL
GHWMRELVL

SEQ ID NO: 30127 - protein, 9 aa, Artificial Sequence
  Description of Artificial Sequence: Synthetic peptide
  Seed: GKWMRELVL
GHWMRELVM

SEQ ID NO: 30128 - protein, 9 aa, Artificial Sequence
  Description of Artificial Sequence: Synthetic peptide
  Seed: GKWMRELVL
GHWMRELVF

SEQ ID NO: 30129 - protein, 9 aa, Artificial Sequence
  Description of Artificial Sequence: Synthetic peptide
  Seed: GKWMRELVL
GHWMRELVY

SEQ ID NO: 30130 - protein, 9 aa, Artificial Sequence
  Description of Artificial Sequence: Synthetic peptide
  Seed: GKWMRELVL
GHWMRELVV

SEQ ID NO: 30131 - protein, 9 aa, Artificial Sequence
  Description of Artificial Sequence: Synthetic peptide
  Seed: GKWMRELVL
GIWMRELVM

SEQ ID NO: 30132 - protein, 9 aa, Artificial Sequence
  Description of Artificial Sequence: Synthetic peptide
  Seed: GKWMRELVL
GIWMRELVF

SEQ ID NO: 30133 - protein, 9 aa, Artificial Sequence
  Description of Artificial Sequence: Synthetic peptide
  Seed: GKWMRELVL
GIWMRELVY

SEQ ID NO: 30134 - protein, 9 aa, Artificial Sequence
  Description of Artificial Sequence: Synthetic peptide
  Seed: GKWMRELVL
GLWMRELVM

SEQ ID NO: 30135 - protein, 9 aa, Artificial Sequence
  Description of Artificial Sequence: Synthetic peptide
  Seed: GKWMRELVL
GLWMRELVF

SEQ ID NO: 30136 - protein, 9 aa, Artificial Sequence
  Description of Artificial Sequence: Synthetic peptide
  Seed: GKWMRELVL
GLWMRELVY

SEQ ID NO: 30137 - protein, 9 aa, Artificial Sequence
  Description of Artificial Sequence: Synthetic peptide
  Seed: GKWMRELVL
GKWMRELVH

SEQ ID NO: 30138 - protein, 9 aa, Artificial Sequence
  Description of Artificial Sequence: Synthetic peptide
  Seed: GKWMRELVL
GKWMRELVI

SEQ ID NO: 30139 - protein, 9 aa, Artificial Sequence
  Description of Artificial Sequence: Synthetic peptide
  Seed: GKWMRELVL
GKWMRELVM

SEQ ID NO: 30140 - protein, 9 aa, Artificial Sequence
  Description of Artificial Sequence: Synthetic peptide
  Seed: GKWMRELVL
GKWMRELVF

SEQ ID NO: 30141 - protein, 9 aa, Artificial Sequence
  Description of Artificial Sequence: Synthetic peptide
  Seed: GKWMRELVL
GKWMRELVW

SEQ ID NO: 30142 - protein, 9 aa, Artificial Sequence
  Description of Artificial Sequence: Synthetic peptide
  Seed: GKWMRELVL
GKWMRELVY

SEQ ID NO: 30143 - protein, 9 aa, Artificial Sequence
  Description of Artificial Sequence: Synthetic peptide
  Seed: GKWMRELVL
GKWMRELVV

SEQ ID NO: 30144 - protein, 9 aa, Artificial Sequence
  Description of Artificial Sequence: Synthetic peptide
  Seed: GKWMRELVL
GMWMRELVA

SEQ ID NO: 30145 - protein, 10 aa, Artificial Sequence
  Description of Artificial Sequence: Synthetic peptide
  Seed: GKWMRELVLY
GAWMRELVLY

SEQ ID NO: 30146 - protein, 10 aa, Artificial Sequence
  Description of Artificial Sequence: Synthetic peptide
  Seed: GKWMRELVLY
GRWMRELVLA

SEQ ID NO: 30147 - protein, 10 aa, Artificial Sequence
  Description of Artificial Sequence: Synthetic peptide
  Seed: GKWMRELVLY
GRWMRELVLR

SEQ ID NO: 30148 - protein, 10 aa, Artificial Sequence
  Description of Artificial Sequence: Synthetic peptide
  Seed: GKWMRELVLY
GQWMRELVLL

SEQ ID NO: 30149 - protein, 10 aa, Artificial Sequence
  Description of Artificial Sequence: Synthetic peptide
  Seed: GKWMRELVLY
GQWMRELVLF

SEQ ID NO: 30150 - protein, 10 aa, Artificial Sequence
  Description of Artificial Sequence: Synthetic peptide
  Seed: GKWMRELVLY
GQWMRELVLY

SEQ ID NO: 30151 - protein, 10 aa, Artificial Sequence
  Description of Artificial Sequence: Synthetic peptide
  Seed: GKWMRELVLY
GEWMRELVLF

SEQ ID NO: 30152 - protein, 10 aa, Artificial Sequence
  Description of Artificial Sequence: Synthetic peptide
  Seed: GKWMRELVLY
GEWMRELVLY

SEQ ID NO: 30153 - protein, 10 aa, Artificial Sequence
  Description of Artificial Sequence: Synthetic peptide
  Seed: GKWMRELVLY
GGWMRELVLY

SEQ ID NO: 30154 - protein, 10 aa, Artificial Sequence
  Description of Artificial Sequence: Synthetic peptide
  Seed: GKWMRELVLY
GHWMRELVLF

SEQ ID NO: 30155 - protein, 10 aa, Artificial Sequence
  Description of Artificial Sequence: Synthetic peptide
  Seed: GKWMRELVLY
GHWMRELVLY

SEQ ID NO: 30156 - protein, 10 aa, Artificial Sequence
  Description of Artificial Sequence: Synthetic peptide
  Seed: GKWMRELVLY
GIWMRELVLY

SEQ ID NO: 30157 - protein, 10 aa, Artificial Sequence
  Description of Artificial Sequence: Synthetic peptide
  Seed: GKWMRELVLY
GLWMRELVLY

SEQ ID NO: 30158 - protein, 10 aa, Artificial Sequence
  Description of Artificial Sequence: Synthetic peptide
  Seed: GKWMRELVLY
GKWMRELVLL

SEQ ID NO: 30159 - protein, 10 aa, Artificial Sequence
  Description of Artificial Sequence: Synthetic peptide
  Seed: GKWMRELVLY
GKWMRELVLM

SEQ ID NO: 30160 - protein, 10 aa, Artificial Sequence
  Description of Artificial Sequence: Synthetic peptide
  Seed: GKWMRELVLY
GKWMRELVLF

SEQ ID NO: 30161 - protein, 10 aa, Artificial Sequence
  Description of Artificial Sequence: Synthetic peptide
  Seed: GKWMRELVLY
GMWMRELVLM

SEQ ID NO: 30162 - protein, 10 aa, Artificial Sequence
  Description of Artificial Sequence: Synthetic peptide
  Seed: GKWMRELVLY
GMWMRELVLF

SEQ ID NO: 30163 - protein, 10 aa, Artificial Sequence
  Description of Artificial Sequence: Synthetic peptide
  Seed: GKWMRELVLY
GMWMRELVLY

SEQ ID NO: 30164 - protein, 10 aa, Artificial Sequence
  Description of Artificial Sequence: Synthetic peptide
  Seed: GKWMRELVLY
GFWMRELVLF

SEQ ID NO: 30165 - protein, 10 aa, Artificial Sequence
  Description of Artificial Sequence: Synthetic peptide
  Seed: GKWMRELVLY
GFWMRELVLY

SEQ ID NO: 30166 - protein, 10 aa, Artificial Sequence
  Description of Artificial Sequence: Synthetic peptide
  Seed: GKWMRELVLY
GPWMRELVLY

SEQ ID NO: 30167 - protein, 10 aa, Artificial Sequence
  Description of Artificial Sequence: Synthetic peptide
  Seed: GKWMRELVLY
GSWMRELVLY

SEQ ID NO: 30168 - protein, 10 aa, Artificial Sequence
  Description of Artificial Sequence: Synthetic peptide
  Seed: GKWMRELVLY
GQWMRELVLM

SEQ ID NO: 30169 - protein, 10 aa, Artificial Sequence
  Description of Artificial Sequence: Synthetic peptide
  Seed: GKWMRELVLY
GQWMRELVLI

SEQ ID NO: 30170 - protein, 10 aa, Artificial Sequence
  Description of Artificial Sequence: Synthetic peptide
  Seed: GKWMRELVLY
GRWMRELVLN

SEQ ID NO: 30171 - protein, 10 aa, Artificial Sequence
  Description of Artificial Sequence: Synthetic peptide
  Seed: GKWMRELVLY
GCWMRELVLY

SEQ ID NO: 30172 - protein, 10 aa, Artificial Sequence
  Description of Artificial Sequence: Synthetic peptide
  Seed: GKWMRELVLY
GRWMRELVLD

SEQ ID NO: 30173 - protein, 10 aa, Artificial Sequence
  Description of Artificial Sequence: Synthetic peptide
  Seed: GKWMRELVLY
GRWMRELVLC

SEQ ID NO: 30174 - protein, 10 aa, Artificial Sequence
  Description of Artificial Sequence: Synthetic peptide
  Seed: GKWMRELVLY
GRWMRELVLQ

SEQ ID NO: 30175 - protein, 10 aa, Artificial Sequence
  Description of Artificial Sequence: Synthetic peptide
  Seed: GKWMRELVLY
GRWMRELVLE

SEQ ID NO: 30176 - protein, 10 aa, Artificial Sequence
  Description of Artificial Sequence: Synthetic peptide
  Seed: GKWMRELVLY
GRWMRELVLG

SEQ ID NO: 30177 - protein, 10 aa, Artificial Sequence
  Description of Artificial Sequence: Synthetic peptide
  Seed: GKWMRELVLY
GRWMRELVLH

SEQ ID NO: 30178 - protein, 10 aa, Artificial Sequence
  Description of Artificial Sequence: Synthetic peptide
  Seed: GKWMRELVLY
GRWMRELVLI

SEQ ID NO: 30179 - protein, 10 aa, Artificial Sequence
  Description of Artificial Sequence: Synthetic peptide
  Seed: GKWMRELVLY
GRWMRELVLL

SEQ ID NO: 30180 - protein, 10 aa, Artificial Sequence
  Description of Artificial Sequence: Synthetic peptide
  Seed: GKWMRELVLY
GRWMRELVLK

SEQ ID NO: 30181 - protein, 10 aa, Artificial Sequence
  Description of Artificial Sequence: Synthetic peptide
  Seed: GKWMRELVLY
GRWMRELVLM

SEQ ID NO: 30182 - protein, 10 aa, Artificial Sequence
  Description of Artificial Sequence: Synthetic peptide
  Seed: GKWMRELVLY
GRWMRELVLF

SEQ ID NO: 30183 - protein, 10 aa, Artificial Sequence
  Description of Artificial Sequence: Synthetic peptide
  Seed: GKWMRELVLY
GRWMRELVLP

SEQ ID NO: 30184 - protein, 10 aa, Artificial Sequence
  Description of Artificial Sequence: Synthetic peptide
  Seed: GKWMRELVLY
GRWMRELVLS

SEQ ID NO: 30185 - protein, 10 aa, Artificial Sequence
  Description of Artificial Sequence: Synthetic peptide
  Seed: GKWMRELVLY
GRWMRELVLT

SEQ ID NO: 30186 - protein, 10 aa, Artificial Sequence
  Description of Artificial Sequence: Synthetic peptide
  Seed: GKWMRELVLY
GRWMRELVLW

SEQ ID NO: 30187 - protein, 10 aa, Artificial Sequence
  Description of Artificial Sequence: Synthetic peptide
  Seed: GKWMRELVLY
GRWMRELVLV

SEQ ID NO: 30188 - protein, 10 aa, Artificial Sequence
  Description of Artificial Sequence: Synthetic peptide
  Seed: GKWMRELVLY
GNWMRELVLY

SEQ ID NO: 30189 - protein, 10 aa, Artificial Sequence
  Description of Artificial Sequence: Synthetic peptide
  Seed: GKWMRELVLY
GDWMRELVLY

SEQ ID NO: 30190 - protein, 9 aa, Artificial Sequence
  Description of Artificial Sequence: Synthetic peptide
  Seed: GMDPRMCSL
GADPRMCSV

SEQ ID NO: 30191 - protein, 9 aa, Artificial Sequence
  Description of Artificial Sequence: Synthetic peptide
  Seed: GMDPRMCSL
GQDPRMCSL

SEQ ID NO: 30192 - protein, 9 aa, Artificial Sequence
  Description of Artificial Sequence: Synthetic peptide
  Seed: GQISIQPTF
GMISIQPTY

SEQ ID NO: 30193 - protein, 9 aa, Artificial Sequence
  Description of Artificial Sequence: Synthetic peptide
  Seed: GQISIQPTF
GRISIQPTF

SEQ ID NO: 30194 - protein, 9 aa, Artificial Sequence
  Description of Artificial Sequence: Synthetic peptide
  Seed: GQISIQPTF
GAISIQPTF

SEQ ID NO: 30195 - protein, 9 aa, Artificial Sequence
  Description of Artificial Sequence: Synthetic peptide
  Seed: GQISIQPTF
GAISIQPTY

SEQ ID NO: 30196 - protein, 9 aa, Artificial Sequence
  Description of Artificial Sequence: Synthetic peptide
  Seed: GQISIQPTF
GAISIQPTV

SEQ ID NO: 30197 - protein, 9 aa, Artificial Sequence
  Description of Artificial Sequence: Synthetic peptide
  Seed: GQISIQPTF
GRISIQPTA

SEQ ID NO: 30198 - protein, 9 aa, Artificial Sequence
  Description of Artificial Sequence: Synthetic peptide
  Seed: GQISIQPTF
GRISIQPTC

SEQ ID NO: 30199 - protein, 9 aa, Artificial Sequence
  Description of Artificial Sequence: Synthetic peptide
  Seed: GQISIQPTF
GRISIQPTG

SEQ ID NO: 30200 - protein, 9 aa, Artificial Sequence
  Description of Artificial Sequence: Synthetic peptide
  Seed: GQISIQPTF
GRISIQPTI

SEQ ID NO: 30201 - protein, 9 aa, Artificial Sequence
  Description of Artificial Sequence: Synthetic peptide
  Seed: GQISIQPTF
GRISIQPTL

SEQ ID NO: 30202 - protein, 9 aa, Artificial Sequence
  Description of Artificial Sequence: Synthetic peptide
  Seed: GQISIQPTF
GRISIQPTM

SEQ ID NO: 30203 - protein, 9 aa, Artificial Sequence
  Description of Artificial Sequence: Synthetic peptide
  Seed: GQISIQPTF
GRISIQPTS

SEQ ID NO: 30204 - protein, 9 aa, Artificial Sequence
  Description of Artificial Sequence: Synthetic peptide
  Seed: GQISIQPTF
GQISIQPTI

SEQ ID NO: 30205 - protein, 9 aa, Artificial Sequence
  Description of Artificial Sequence: Synthetic peptide
  Seed: GQISIQPTF
GRISIQPTT

SEQ ID NO: 30206 - protein, 9 aa, Artificial Sequence
  Description of Artificial Sequence: Synthetic peptide
  Seed: GQISIQPTF
GRISIQPTW

SEQ ID NO: 30207 - protein, 9 aa, Artificial Sequence
  Description of Artificial Sequence: Synthetic peptide
  Seed: GQISIQPTF
GRISIQPTY

SEQ ID NO: 30208 - protein, 9 aa, Artificial Sequence
  Description of Artificial Sequence: Synthetic peptide
  Seed: GQISIQPTF
GRISIQPTV

SEQ ID NO: 30209 - protein, 9 aa, Artificial Sequence
  Description of Artificial Sequence: Synthetic peptide
  Seed: GQISIQPTF
GNISIQPTF

SEQ ID NO: 30210 - protein, 9 aa, Artificial Sequence
  Description of Artificial Sequence: Synthetic peptide
  Seed: GQISIQPTF
GNISIQPTY

SEQ ID NO: 30211 - protein, 9 aa, Artificial Sequence
  Description of Artificial Sequence: Synthetic peptide
  Seed: GQISIQPTF
GCISIQPTY

SEQ ID NO: 30212 - protein, 9 aa, Artificial Sequence
  Description of Artificial Sequence: Synthetic peptide
  Seed: GQISIQPTF
GQISIQPTA

SEQ ID NO: 30213 - protein, 9 aa, Artificial Sequence
  Description of Artificial Sequence: Synthetic peptide
  Seed: GQISIQPTF
GQISIQPTC

SEQ ID NO: 30214 - protein, 9 aa, Artificial Sequence
  Description of Artificial Sequence: Synthetic peptide
  Seed: GQISIQPTF
GAISIQPTM

SEQ ID NO: 30215 - protein, 10 aa, Artificial Sequence
  Description of Artificial Sequence: Synthetic peptide
  Seed: GPIYKRVDGK
GVIYKRVDGK

SEQ ID NO: 30216 - protein, 10 aa, Artificial Sequence
  Description of Artificial Sequence: Synthetic peptide
  Seed: GPIYKRVDGK
GYIYKRVDGK

SEQ ID NO: 30217 - protein, 10 aa, Artificial Sequence
  Description of Artificial Sequence: Synthetic peptide
  Seed: GPIYKRVDGK
GWIYKRVDGK

SEQ ID NO: 30218 - protein, 10 aa, Artificial Sequence
  Description of Artificial Sequence: Synthetic peptide
  Seed: GPAVSSGYDF
GPAVSSGYDL

SEQ ID NO: 30219 - protein, 10 aa, Artificial Sequence
  Description of Artificial Sequence: Synthetic peptide
  Seed: GPAVSSGYDF
GPAVSSGYDM

SEQ ID NO: 30220 - protein, 10 aa, Artificial Sequence
  Description of Artificial Sequence: Synthetic peptide
  Seed: GPIYKRVDGK
GAIYKRVDGK

SEQ ID NO: 30221 - protein, 10 aa, Artificial Sequence
  Description of Artificial Sequence: Synthetic peptide
  Seed: GPIYKRVDGK
GRIYKRVDGK

SEQ ID NO: 30222 - protein, 10 aa, Artificial Sequence
  Description of Artificial Sequence: Synthetic peptide
  Seed: GPIYKRVDGK
GNIYKRVDGK

SEQ ID NO: 30223 - protein, 10 aa, Artificial Sequence
  Description of Artificial Sequence: Synthetic peptide
  Seed: GPIYKRVDGK
GDIYKRVDGK

SEQ ID NO: 30224 - protein, 10 aa, Artificial Sequence
  Description of Artificial Sequence: Synthetic peptide
  Seed: GPIYKRVDGK
GCIYKRVDGK

SEQ ID NO: 30225 - protein, 10 aa, Artificial Sequence
  Description of Artificial Sequence: Synthetic peptide
  Seed: GPIYKRVDGK
GQIYKRVDGK

SEQ ID NO: 30226 - protein, 10 aa, Artificial Sequence
  Description of Artificial Sequence: Synthetic peptide
  Seed: GPIYKRVDGK
GEIYKRVDGK

SEQ ID NO: 30227 - protein, 10 aa, Artificial Sequence
  Description of Artificial Sequence: Synthetic peptide
  Seed: GPIYKRVDGK
GGIYKRVDGK

SEQ ID NO: 30228 - protein, 10 aa, Artificial Sequence
  Description of Artificial Sequence: Synthetic peptide
  Seed: GPIYKRVDGK
GHIYKRVDGK

SEQ ID NO: 30229 - protein, 10 aa, Artificial Sequence
  Description of Artificial Sequence: Synthetic peptide
  Seed: GPIYKRVDGK
GIIYKRVDGK

SEQ ID NO: 30230 - protein, 10 aa, Artificial Sequence
  Description of Artificial Sequence: Synthetic peptide
  Seed: GPIYKRVDGK
GLIYKRVDGK

SEQ ID NO: 30231 - protein, 10 aa, Artificial Sequence
  Description of Artificial Sequence: Synthetic peptide
  Seed: GPIYKRVDGK
GKIYKRVDGK

SEQ ID NO: 30232 - protein, 10 aa, Artificial Sequence
  Description of Artificial Sequence: Synthetic peptide
  Seed: GPIYKRVDGK
GMIYKRVDGK

SEQ ID NO: 30233 - protein, 10 aa, Artificial Sequence
  Description of Artificial Sequence: Synthetic peptide
  Seed: GPIYKRVDGK
GFIYKRVDGK

SEQ ID NO: 30234 - protein, 10 aa, Artificial Sequence
  Description of Artificial Sequence: Synthetic peptide
  Seed: GPIYKRVDGK
GSIYKRVDGK

SEQ ID NO: 30235 - protein, 10 aa, Artificial Sequence
  Description of Artificial Sequence: Synthetic peptide
  Seed: GPIYKRVDGK
GTIYKRVDGK

SEQ ID NO: 30236 - protein, 9 aa, Artificial Sequence
  Description of Artificial Sequence: Synthetic peptide
  Seed: GQISIQPTF
GQISIQPTH

SEQ ID NO: 30237 - protein, 9 aa, Artificial Sequence
  Description of Artificial Sequence: Synthetic peptide
  Seed: GQISIQPTF
GQISIQPTL

SEQ ID NO: 30238 - protein, 9 aa, Artificial Sequence
  Description of Artificial Sequence: Synthetic peptide
  Seed: GMDPRMCSL
GQDPRMCSV

SEQ ID NO: 30239 - protein, 9 aa, Artificial Sequence
  Description of Artificial Sequence: Synthetic peptide
  Seed: GQISIQPTF
GKISIQPTL

SEQ ID NO: 30240 - protein, 9 aa, Artificial Sequence
  Description of Artificial Sequence: Synthetic peptide
  Seed: GQISIQPTF
GLISIQPTA

SEQ ID NO: 30241 - protein, 9 aa, Artificial Sequence
  Description of Artificial Sequence: Synthetic peptide
  Seed: GQISIQPTF
GLISIQPTI

SEQ ID NO: 30242 - protein, 9 aa, Artificial Sequence
  Description of Artificial Sequence: Synthetic peptide
  Seed: GQISIQPTF
GLISIQPTL

SEQ ID NO: 30243 - protein, 9 aa, Artificial Sequence
  Description of Artificial Sequence: Synthetic peptide
  Seed: GQISIQPTF
GLISIQPTM

SEQ ID NO: 30244 - protein, 9 aa, Artificial Sequence
  Description of Artificial Sequence: Synthetic peptide
  Seed: GQISIQPTF
GLISIQPTF

SEQ ID NO: 30245 - protein, 9 aa, Artificial Sequence
  Description of Artificial Sequence: Synthetic peptide
  Seed: GQISIQPTF
GLISIQPTW

SEQ ID NO: 30246 - protein, 9 aa, Artificial Sequence
  Description of Artificial Sequence: Synthetic peptide
  Seed: GQISIQPTF
GLISIQPTY

SEQ ID NO: 30247 - protein, 9 aa, Artificial Sequence
  Description of Artificial Sequence: Synthetic peptide
  Seed: GQISIQPTF
GLISIQPTV

SEQ ID NO: 30248 - protein, 9 aa, Artificial Sequence
  Description of Artificial Sequence: Synthetic peptide
  Seed: GQISIQPTF
GKISIQPTI

SEQ ID NO: 30249 - protein, 9 aa, Artificial Sequence
  Description of Artificial Sequence: Synthetic peptide
  Seed: GQISIQPTF
GKISIQPTM

SEQ ID NO: 30250 - protein, 9 aa, Artificial Sequence
  Description of Artificial Sequence: Synthetic peptide
  Seed: GQISIQPTF
GQISIQPTM

SEQ ID NO: 30251 - protein, 9 aa, Artificial Sequence
  Description of Artificial Sequence: Synthetic peptide
  Seed: GQISIQPTF
GKISIQPTF

SEQ ID NO: 30252 - protein, 9 aa, Artificial Sequence
  Description of Artificial Sequence: Synthetic peptide
  Seed: GQISIQPTF
GKISIQPTY

SEQ ID NO: 30253 - protein, 9 aa, Artificial Sequence
  Description of Artificial Sequence: Synthetic peptide
  Seed: GQISIQPTF
GMISIQPTA

SEQ ID NO: 30254 - protein, 9 aa, Artificial Sequence
  Description of Artificial Sequence: Synthetic peptide
  Seed: GQISIQPTF
GMISIQPTH

SEQ ID NO: 30255 - protein, 9 aa, Artificial Sequence
  Description of Artificial Sequence: Synthetic peptide
  Seed: GQISIQPTF
GMISIQPTI

SEQ ID NO: 30256 - protein, 9 aa, Artificial Sequence
  Description of Artificial Sequence: Synthetic peptide
  Seed: GQISIQPTF
GMISIQPTL

SEQ ID NO: 30257 - protein, 9 aa, Artificial Sequence
  Description of Artificial Sequence: Synthetic peptide
  Seed: GQISIQPTF
GMISIQPTM

SEQ ID NO: 30258 - protein, 9 aa, Artificial Sequence
  Description of Artificial Sequence: Synthetic peptide
  Seed: GQISIQPTF
GMISIQPTF

SEQ ID NO: 30259 - protein, 9 aa, Artificial Sequence
  Description of Artificial Sequence: Synthetic peptide
  Seed: GQISIQPTF
GMISIQPTW

SEQ ID NO: 30260 - protein, 9 aa, Artificial Sequence
  Description of Artificial Sequence: Synthetic peptide
  Seed: GQISIQPTF
GIISIQPTV

SEQ ID NO: 30261 - protein, 9 aa, Artificial Sequence
  Description of Artificial Sequence: Synthetic peptide
  Seed: GQISIQPTF
GIISIQPTY

SEQ ID NO: 30262 - protein, 9 aa, Artificial Sequence
  Description of Artificial Sequence: Synthetic peptide
  Seed: GQISIQPTF
GIISIQPTF

SEQ ID NO: 30263 - protein, 9 aa, Artificial Sequence
  Description of Artificial Sequence: Synthetic peptide
  Seed: GQISIQPTF
GIISIQPTM

SEQ ID NO: 30264 - protein, 9 aa, Artificial Sequence
  Description of Artificial Sequence: Synthetic peptide
  Seed: GQISIQPTF
GQISIQPTT

SEQ ID NO: 30265 - protein, 9 aa, Artificial Sequence
  Description of Artificial Sequence: Synthetic peptide
  Seed: GQISIQPTF
GQISIQPTW

SEQ ID NO: 30266 - protein, 9 aa, Artificial Sequence
  Description of Artificial Sequence: Synthetic peptide
  Seed: GQISIQPTF
GQISIQPTY

SEQ ID NO: 30267 - protein, 9 aa, Artificial Sequence
  Description of Artificial Sequence: Synthetic peptide
  Seed: GQISIQPTF
GQISIQPTV

SEQ ID NO: 30268 - protein, 9 aa, Artificial Sequence
  Description of Artificial Sequence: Synthetic peptide
  Seed: GQISIQPTF
GEISIQPTI

SEQ ID NO: 30269 - protein, 9 aa, Artificial Sequence
  Description of Artificial Sequence: Synthetic peptide
  Seed: GQISIQPTF
GEISIQPTL

SEQ ID NO: 30270 - protein, 9 aa, Artificial Sequence
  Description of Artificial Sequence: Synthetic peptide
  Seed: GQISIQPTF
GEISIQPTM

SEQ ID NO: 30271 - protein, 9 aa, Artificial Sequence
  Description of Artificial Sequence: Synthetic peptide
  Seed: GQISIQPTF
GEISIQPTF

SEQ ID NO: 30272 - protein, 9 aa, Artificial Sequence
  Description of Artificial Sequence: Synthetic peptide
  Seed: GQISIQPTF
GEISIQPTW

SEQ ID NO: 30273 - protein, 9 aa, Artificial Sequence
  Description of Artificial Sequence: Synthetic peptide
  Seed: GQISIQPTF
GEISIQPTY

SEQ ID NO: 30274 - protein, 9 aa, Artificial Sequence
  Description of Artificial Sequence: Synthetic peptide
  Seed: GQISIQPTF
GEISIQPTV

SEQ ID NO: 30275 - protein, 9 aa, Artificial Sequence
  Description of Artificial Sequence: Synthetic peptide
  Seed: GQISIQPTF
GGISIQPTF

SEQ ID NO: 30276 - protein, 9 aa, Artificial Sequence
  Description of Artificial Sequence: Synthetic peptide
  Seed: GQISIQPTF
GGISIQPTY

SEQ ID NO: 30277 - protein, 9 aa, Artificial Sequence
  Description of Artificial Sequence: Synthetic peptide
  Seed: GQISIQPTF
GHISIQPTM

SEQ ID NO: 30278 - protein, 9 aa, Artificial Sequence
  Description of Artificial Sequence: Synthetic peptide
  Seed: GQISIQPTF
GHISIQPTF

SEQ ID NO: 30279 - protein, 9 aa, Artificial Sequence
  Description of Artificial Sequence: Synthetic peptide
  Seed: GQISIQPTF
GHISIQPTY

SEQ ID NO: 30280 - protein, 9 aa, Artificial Sequence
  Description of Artificial Sequence: Synthetic peptide
  Seed: GQISIQPTF
GIISIQPTA

SEQ ID NO: 30281 - protein, 9 aa, Artificial Sequence
  Description of Artificial Sequence: Synthetic peptide
  Seed: GQISIQPTF
GIISIQPTI

SEQ ID NO: 30282 - protein, 9 aa, Artificial Sequence
  Description of Artificial Sequence: Synthetic peptide
  Seed: GQISIQPTF
GIISIQPTL

SEQ ID NO: 30283 - protein, 10 aa, Artificial Sequence
  Description of Artificial Sequence: Synthetic peptide
  Seed: GMDPRMCSLM
GLDPRMCSLL

SEQ ID NO: 30284 - protein, 9 aa, Artificial Sequence
  Description of Artificial Sequence: Synthetic peptide
  Seed: GMDPRMCSL
GTDPRMCSM

SEQ ID NO: 30285 - protein, 9 aa, Artificial Sequence
  Description of Artificial Sequence: Synthetic peptide
  Seed: GMDPRMCSL
GTDPRMCSF

SEQ ID NO: 30286 - protein, 9 aa, Artificial Sequence
  Description of Artificial Sequence: Synthetic peptide
  Seed: GMDPRMCSL
GTDPRMCSV

SEQ ID NO: 30287 - protein, 9 aa, Artificial Sequence
  Description of Artificial Sequence: Synthetic peptide
  Seed: GMDPRMCSL
GVDPRMCSI

SEQ ID NO: 30288 - protein, 9 aa, Artificial Sequence
  Description of Artificial Sequence: Synthetic peptide
  Seed: GMDPRMCSL
GVDPRMCSL

SEQ ID NO: 30289 - protein, 9 aa, Artificial Sequence
  Description of Artificial Sequence: Synthetic peptide
  Seed: GMDPRMCSL
GVDPRMCSV

SEQ ID NO: 30290 - protein, 10 aa, Artificial Sequence
  Description of Artificial Sequence: Synthetic peptide
  Seed: GMDPRMCSLM
GIDPRMCSLV

SEQ ID NO: 30291 - protein, 10 aa, Artificial Sequence
  Description of Artificial Sequence: Synthetic peptide
  Seed: GMDPRMCSLM
GLDPRMCSLA

SEQ ID NO: 30292 - protein, 10 aa, Artificial Sequence
  Description of Artificial Sequence: Synthetic peptide
  Seed: GMDPRMCSLM
GLDPRMCSLI

SEQ ID NO: 30293 - protein, 10 aa, Artificial Sequence
  Description of Artificial Sequence: Synthetic peptide
  Seed: GMDPRMCSLM
GLDPRMCSLM

SEQ ID NO: 30294 - protein, 10 aa, Artificial Sequence
  Description of Artificial Sequence: Synthetic peptide
  Seed: GMDPRMCSLM
GLDPRMCSLV

SEQ ID NO: 30295 - protein, 10 aa, Artificial Sequence
  Description of Artificial Sequence: Synthetic peptide
  Seed: GMDPRMCSLM
GMDPRMCSLA

SEQ ID NO: 30296 - protein, 10 aa, Artificial Sequence
  Description of Artificial Sequence: Synthetic peptide
  Seed: GMDPRMCSLM
GMDPRMCSLI

SEQ ID NO: 30297 - protein, 10 aa, Artificial Sequence
  Description of Artificial Sequence: Synthetic peptide
  Seed: GMDPRMCSLM
GMDPRMCSLL

SEQ ID NO: 30298 - protein, 10 aa, Artificial Sequence
  Description of Artificial Sequence: Synthetic peptide
  Seed: GMDPRMCSLM
GMDPRMCSLV

SEQ ID NO: 30299 - protein, 11 aa, Artificial Sequence
  Description of Artificial Sequence: Synthetic peptide
  Seed: GNAEIEDLIFL
GAAEIEDLIFL

SEQ ID NO: 30300 - protein, 11 aa, Artificial Sequence
  Description of Artificial Sequence: Synthetic peptide
  Seed: GNAEIEDLIFL
GAAEIEDLIFM

SEQ ID NO: 30301 - protein, 11 aa, Artificial Sequence
  Description of Artificial Sequence: Synthetic peptide
  Seed: GNAEIEDLIFL
GRAEIEDLIFL

SEQ ID NO: 30302 - protein, 11 aa, Artificial Sequence
  Description of Artificial Sequence: Synthetic peptide
  Seed: GNAEIEDLIFL
GRAEIEDLIFM

SEQ ID NO: 30303 - protein, 9 aa, Artificial Sequence
  Description of Artificial Sequence: Synthetic peptide
  Seed: GMDPRMCSL
GTDPRMCSL

SEQ ID NO: 30304 - protein, 9 aa, Artificial Sequence
  Description of Artificial Sequence: Synthetic peptide
  Seed: GMDPRMCSL
GTDPRMCSI

SEQ ID NO: 30305 - protein, 9 aa, Artificial Sequence
  Description of Artificial Sequence: Synthetic peptide
  Seed: GMDPRMCSL
GSDPRMCSV

SEQ ID NO: 30306 - protein, 9 aa, Artificial Sequence
  Description of Artificial Sequence: Synthetic peptide
  Seed: GMDPRMCSL
GSDPRMCSF

SEQ ID NO: 30307 - protein, 9 aa, Artificial Sequence
  Description of Artificial Sequence: Synthetic peptide
  Seed: GMDPRMCSL
GIDPRMCSI

SEQ ID NO: 30308 - protein, 9 aa, Artificial Sequence
  Description of Artificial Sequence: Synthetic peptide
  Seed: GMDPRMCSL
GIDPRMCSL

SEQ ID NO: 30309 - protein, 9 aa, Artificial Sequence
  Description of Artificial Sequence: Synthetic peptide
  Seed: GMDPRMCSL
GIDPRMCSV

SEQ ID NO: 30310 - protein, 9 aa, Artificial Sequence
  Description of Artificial Sequence: Synthetic peptide
  Seed: GMDPRMCSL
GLDPRMCSA

SEQ ID NO: 30311 - protein, 9 aa, Artificial Sequence
  Description of Artificial Sequence: Synthetic peptide
  Seed: GMDPRMCSL
GLDPRMCSC

SEQ ID NO: 30312 - protein, 9 aa, Artificial Sequence
  Description of Artificial Sequence: Synthetic peptide
  Seed: GMDPRMCSL
GLDPRMCSI

SEQ ID NO: 30313 - protein, 9 aa, Artificial Sequence
  Description of Artificial Sequence: Synthetic peptide
  Seed: GMDPRMCSL
GLDPRMCSL

SEQ ID NO: 30314 - protein, 9 aa, Artificial Sequence
  Description of Artificial Sequence: Synthetic peptide
  Seed: GMDPRMCSL
GLDPRMCSM

SEQ ID NO: 30315 - protein, 9 aa, Artificial Sequence
  Description of Artificial Sequence: Synthetic peptide
  Seed: GMDPRMCSL
GLDPRMCST

SEQ ID NO: 30316 - protein, 9 aa, Artificial Sequence
  Description of Artificial Sequence: Synthetic peptide
  Seed: GMDPRMCSL
GMDPRMCSA

SEQ ID NO: 30317 - protein, 9 aa, Artificial Sequence
  Description of Artificial Sequence: Synthetic peptide
  Seed: GMDPRMCSL
GMDPRMCSC

SEQ ID NO: 30318 - protein, 9 aa, Artificial Sequence
  Description of Artificial Sequence: Synthetic peptide
  Seed: GMDPRMCSL
GMDPRMCSI

SEQ ID NO: 30319 - protein, 9 aa, Artificial Sequence
  Description of Artificial Sequence: Synthetic peptide
  Seed: GMDPRMCSL
GMDPRMCSM

SEQ ID NO: 30320 - protein, 9 aa, Artificial Sequence
  Description of Artificial Sequence: Synthetic peptide
  Seed: GMDPRMCSL
GMDPRMCST

SEQ ID NO: 30321 - protein, 9 aa, Artificial Sequence
  Description of Artificial Sequence: Synthetic peptide
  Seed: GMDPRMCSL
GSDPRMCSI

SEQ ID NO: 30322 - protein, 9 aa, Artificial Sequence
  Description of Artificial Sequence: Synthetic peptide
  Seed: GMDPRMCSL
GSDPRMCSL

SEQ ID NO: 30323 - protein, 9 aa, Artificial Sequence
  Description of Artificial Sequence: Synthetic peptide
  Seed: GMDPRMCSL
GSDPRMCSM

SEQ ID NO: 30324 - protein, 11 aa, Artificial Sequence
  Description of Artificial Sequence: Synthetic peptide
  Seed: GNAEIEDLIFL
GNAEIEDLIFM

SEQ ID NO: 30325 - protein, 11 aa, Artificial Sequence
  Description of Artificial Sequence: Synthetic peptide
  Seed: GNAEIEDLIFL
GDAEIEDLIFL

SEQ ID NO: 30326 - protein, 11 aa, Artificial Sequence
  Description of Artificial Sequence: Synthetic peptide
  Seed: GNAEIEDLIFL
GDAEIEDLIFM

SEQ ID NO: 30327 - protein, 11 aa, Artificial Sequence
  Description of Artificial Sequence: Synthetic peptide
  Seed: GNAEIEDLIFL
GPAEIEDLIFM

SEQ ID NO: 30328 - protein, 11 aa, Artificial Sequence
  Description of Artificial Sequence: Synthetic peptide
  Seed: GNAEIEDLIFL
GSAEIEDLIFM

SEQ ID NO: 30329 - protein, 11 aa, Artificial Sequence
  Description of Artificial Sequence: Synthetic peptide
  Seed: GNAEIEDLIFL
GTAEIEDLIFL

SEQ ID NO: 30330 - protein, 11 aa, Artificial Sequence
  Description of Artificial Sequence: Synthetic peptide
  Seed: GNAEIEDLIFL
GTAEIEDLIFM

SEQ ID NO: 30331 - protein, 11 aa, Artificial Sequence
  Description of Artificial Sequence: Synthetic peptide
  Seed: GNAEIEDLIFL
GWAEIEDLIFL

SEQ ID NO: 30332 - protein, 11 aa, Artificial Sequence
  Description of Artificial Sequence: Synthetic peptide
  Seed: GNAEIEDLIFL
GWAEIEDLIFM

SEQ ID NO: 30333 - protein, 11 aa, Artificial Sequence
  Description of Artificial Sequence: Synthetic peptide
  Seed: GNAEIEDLIFL
GYAEIEDLIFL

SEQ ID NO: 30334 - protein, 11 aa, Artificial Sequence
  Description of Artificial Sequence: Synthetic peptide
  Seed: GNAEIEDLIFL
GYAEIEDLIFM

SEQ ID NO: 30335 - protein, 11 aa, Artificial Sequence
  Description of Artificial Sequence: Synthetic peptide
  Seed: GNAEIEDLIFL
GVAEIEDLIFL

SEQ ID NO: 30336 - protein, 11 aa, Artificial Sequence
  Description of Artificial Sequence: Synthetic peptide
  Seed: GNAEIEDLIFL
GVAEIEDLIFM

SEQ ID NO: 30337 - protein, 11 aa, Artificial Sequence
  Description of Artificial Sequence: Synthetic peptide
  Seed: GNAEIEDLIFL
GSAEIEDLIFL

SEQ ID NO: 30338 - protein, 11 aa, Artificial Sequence
  Description of Artificial Sequence: Synthetic peptide
  Seed: GNAEIEDLIFL
GPAEIEDLIFL

SEQ ID NO: 30339 - protein, 11 aa, Artificial Sequence
  Description of Artificial Sequence: Synthetic peptide
  Seed: GNAEIEDLIFL
GCAEIEDLIFL

SEQ ID NO: 30340 - protein, 11 aa, Artificial Sequence
  Description of Artificial Sequence: Synthetic peptide
  Seed: GNAEIEDLIFL
GFAEIEDLIFM

SEQ ID NO: 30341 - protein, 11 aa, Artificial Sequence
  Description of Artificial Sequence: Synthetic peptide
  Seed: GNAEIEDLIFL
GCAEIEDLIFM

SEQ ID NO: 30342 - protein, 11 aa, Artificial Sequence
  Description of Artificial Sequence: Synthetic peptide
  Seed: GNAEIEDLIFL
GQAEIEDLIFL

SEQ ID NO: 30343 - protein, 11 aa, Artificial Sequence
  Description of Artificial Sequence: Synthetic peptide
  Seed: GNAEIEDLIFL
GQAEIEDLIFM

SEQ ID NO: 30344 - protein, 11 aa, Artificial Sequence
  Description of Artificial Sequence: Synthetic peptide
  Seed: GNAEIEDLIFL
GEAEIEDLIFL

SEQ ID NO: 30345 - protein, 11 aa, Artificial Sequence
  Description of Artificial Sequence: Synthetic peptide
  Seed: GNAEIEDLIFL
GEAEIEDLIFM

SEQ ID NO: 30346 - protein, 11 aa, Artificial Sequence
  Description of Artificial Sequence: Synthetic peptide
  Seed: GNAEIEDLIFL
GEAEIEDLIFF

SEQ ID NO: 30347 - protein, 11 aa, Artificial Sequence
  Description of Artificial Sequence: Synthetic peptide
  Seed: GNAEIEDLIFL
GGAEIEDLIFL

SEQ ID NO: 30348 - protein, 11 aa, Artificial Sequence
  Description of Artificial Sequence: Synthetic peptide
  Seed: GNAEIEDLIFL
GGAEIEDLIFM

SEQ ID NO: 30349 - protein, 11 aa, Artificial Sequence
  Description of Artificial Sequence: Synthetic peptide
  Seed: GNAEIEDLIFL
GHAEIEDLIFL

SEQ ID NO: 30350 - protein, 11 aa, Artificial Sequence
  Description of Artificial Sequence: Synthetic peptide
  Seed: GNAEIEDLIFL
GHAEIEDLIFM

SEQ ID NO: 30351 - protein, 11 aa, Artificial Sequence
  Description of Artificial Sequence: Synthetic peptide
  Seed: GNAEIEDLIFL
GIAEIEDLIFL

SEQ ID NO: 30352 - protein, 11 aa, Artificial Sequence
  Description of Artificial Sequence: Synthetic peptide
  Seed: GNAEIEDLIFL
GIAEIEDLIFM

SEQ ID NO: 30353 - protein, 11 aa, Artificial Sequence
  Description of Artificial Sequence: Synthetic peptide
  Seed: GNAEIEDLIFL
GLAEIEDLIFL

SEQ ID NO: 30354 - protein, 11 aa, Artificial Sequence
  Description of Artificial Sequence: Synthetic peptide
  Seed: GNAEIEDLIFL
GLAEIEDLIFM

SEQ ID NO: 30355 - protein, 11 aa, Artificial Sequence
  Description of Artificial Sequence: Synthetic peptide
  Seed: GNAEIEDLIFL
GKAEIEDLIFL

SEQ ID NO: 30356 - protein, 11 aa, Artificial Sequence
  Description of Artificial Sequence: Synthetic peptide
  Seed: GNAEIEDLIFL
GKAEIEDLIFM

SEQ ID NO: 30357 - protein, 11 aa, Artificial Sequence
  Description of Artificial Sequence: Synthetic peptide
  Seed: GNAEIEDLIFL
GMAEIEDLIFL

SEQ ID NO: 30358 - protein, 11 aa, Artificial Sequence
  Description of Artificial Sequence: Synthetic peptide
  Seed: GNAEIEDLIFL
GMAEIEDLIFM

SEQ ID NO: 30359 - protein, 11 aa, Artificial Sequence
  Description of Artificial Sequence: Synthetic peptide
  Seed: GNAEIEDLIFL
GFAEIEDLIFL

SEQ ID NO: 30360 - protein, 10 aa, Artificial Sequence
  Description of Artificial Sequence: Synthetic peptide
  Seed: GRLIQNSITI
GVLIQNSITL

SEQ ID NO: 30361 - protein, 10 aa, Artificial Sequence
  Description of Artificial Sequence: Synthetic peptide
  Seed: GRLIQNSITI
GVLIQNSITV

SEQ ID NO: 30362 - protein, 10 aa, Artificial Sequence
  Description of Artificial Sequence: Synthetic peptide
  Seed: GRLIQNSLTI
GALIQNSLTA

SEQ ID NO: 30363 - protein, 9 aa, Artificial Sequence
  Description of Artificial Sequence: Synthetic peptide
  Seed: GVFELSDEK
GTFELSDEY

SEQ ID NO: 30364 - protein, 9 aa, Artificial Sequence
  Description of Artificial Sequence: Synthetic peptide
  Seed: GVFELSDEK
GIFELSDEK

SEQ ID NO: 30365 - protein, 9 aa, Artificial Sequence
  Description of Artificial Sequence: Synthetic peptide
  Seed: GVFELSDEK
GLFELSDER

SEQ ID NO: 30366 - protein, 9 aa, Artificial Sequence
  Description of Artificial Sequence: Synthetic peptide
  Seed: GVFELSDEK
GLFELSDEK

SEQ ID NO: 30367 - protein, 9 aa, Artificial Sequence
  Description of Artificial Sequence: Synthetic peptide
  Seed: GVFELSDEK
GMFELSDER

SEQ ID NO: 30368 - protein, 9 aa, Artificial Sequence
  Description of Artificial Sequence: Synthetic peptide
  Seed: GVFELSDEK
GMFELSDEK

SEQ ID NO: 30369 - protein, 9 aa, Artificial Sequence
  Description of Artificial Sequence: Synthetic peptide
  Seed: GVFELSDEK
GSFELSDER

SEQ ID NO: 30370 - protein, 9 aa, Artificial Sequence
  Description of Artificial Sequence: Synthetic peptide
  Seed: GVFELSDEK
GSFELSDEK

SEQ ID NO: 30371 - protein, 9 aa, Artificial Sequence
  Description of Artificial Sequence: Synthetic peptide
  Seed: GVFELSDEK
GTFELSDER

SEQ ID NO: 30372 - protein, 9 aa, Artificial Sequence
  Description of Artificial Sequence: Synthetic peptide
  Seed: GVFELSDEK
GTFELSDEK

SEQ ID NO: 30373 - protein, 9 aa, Artificial Sequence
  Description of Artificial Sequence: Synthetic peptide
  Seed: GVFELSDEK
GIFELSDER

SEQ ID NO: 30374 - protein, 9 aa, Artificial Sequence
  Description of Artificial Sequence: Synthetic peptide
  Seed: GVFELSDEK
GQFELSDEK

SEQ ID NO: 30375 - protein, 9 aa, Artificial Sequence
  Description of Artificial Sequence: Synthetic peptide
  Seed: GVFELSDEK
GAFELSDEK

SEQ ID NO: 30376 - protein, 9 aa, Artificial Sequence
  Description of Artificial Sequence: Synthetic peptide
  Seed: GVFELSDEK
GAFELSDER

SEQ ID NO: 30377 - protein, 9 aa, Artificial Sequence
  Description of Artificial Sequence: Synthetic peptide
  Seed: GTMVMELIR
GLMVMELIR

SEQ ID NO: 30378 - protein, 9 aa, Artificial Sequence
  Description of Artificial Sequence: Synthetic peptide
  Seed: GTMVMELIR
GLMVMELIK

SEQ ID NO: 30379 - protein, 9 aa, Artificial Sequence
  Description of Artificial Sequence: Synthetic peptide
  Seed: GTMVMELIR
GMMVMELIR

SEQ ID NO: 30380 - protein, 9 aa, Artificial Sequence
  Description of Artificial Sequence: Synthetic peptide
  Seed: GTMVMELIR
GMMVMELIK

SEQ ID NO: 30381 - protein, 9 aa, Artificial Sequence
  Description of Artificial Sequence: Synthetic peptide
  Seed: GTMVMELIR
GMMVMELIY

SEQ ID NO: 30382 - protein, 9 aa, Artificial Sequence
  Description of Artificial Sequence: Synthetic peptide
  Seed: GTMVMELIR
GFMVMELIR

SEQ ID NO: 30383 - protein, 9 aa, Artificial Sequence
  Description of Artificial Sequence: Synthetic peptide
  Seed: GTMVMELIR
GFMVMELIK

SEQ ID NO: 30384 - protein, 9 aa, Artificial Sequence
  Description of Artificial Sequence: Synthetic peptide
  Seed: GTMVMELIR
GSMVMELIR

SEQ ID NO: 30385 - protein, 9 aa, Artificial Sequence
  Description of Artificial Sequence: Synthetic peptide
  Seed: GTMVMELIR
GSMVMELIK

SEQ ID NO: 30386 - protein, 9 aa, Artificial Sequence
  Description of Artificial Sequence: Synthetic peptide
  Seed: GTMVMELIR
GSMVMELIY

SEQ ID NO: 30387 - protein, 9 aa, Artificial Sequence
  Description of Artificial Sequence: Synthetic peptide
  Seed: GTMVMELIR
GTMVMELIK

SEQ ID NO: 30388 - protein, 9 aa, Artificial Sequence
  Description of Artificial Sequence: Synthetic peptide
  Seed: GTMVMELIR
GTMVMELIY

SEQ ID NO: 30389 - protein, 9 aa, Artificial Sequence
  Description of Artificial Sequence: Synthetic peptide
  Seed: GTMVMELIR
GWMVMELIR

SEQ ID NO: 30390 - protein, 9 aa, Artificial Sequence
  Description of Artificial Sequence: Synthetic peptide
  Seed: GTMVMELIR
GWMVMELIK

SEQ ID NO: 30391 - protein, 9 aa, Artificial Sequence
  Description of Artificial Sequence: Synthetic peptide
  Seed: GTMVMELIR
GYMVMELIR

SEQ ID NO: 30392 - protein, 9 aa, Artificial Sequence
  Description of Artificial Sequence: Synthetic peptide
  Seed: GTMVMELIR
GYMVMELIK

SEQ ID NO: 30393 - protein, 9 aa, Artificial Sequence
  Description of Artificial Sequence: Synthetic peptide
  Seed: GTMVMELIR
GVMVMELIR

SEQ ID NO: 30394 - protein, 9 aa, Artificial Sequence
  Description of Artificial Sequence: Synthetic peptide
  Seed: GTMVMELIR
GVMVMELIK

SEQ ID NO: 30395 - protein, 9 aa, Artificial Sequence
  Description of Artificial Sequence: Synthetic peptide
  Seed: GTMVMELIR
GVMVMELIY

SEQ ID NO: 30396 - protein, 11 aa, Artificial Sequence
  Description of Artificial Sequence: Synthetic peptide
  Seed: GYSLVGIDPFR
GVSLVGIDPFR

SEQ ID NO: 30397 - protein, 11 aa, Artificial Sequence
  Description of Artificial Sequence: Synthetic peptide
  Seed: GYSLVGIDPFR
GGSLVGIDPFR

SEQ ID NO: 30398 - protein, 11 aa, Artificial Sequence
  Description of Artificial Sequence: Synthetic peptide
  Seed: GYSLVGIDPFR
GISLVGIDPFR

SEQ ID NO: 30399 - protein, 11 aa, Artificial Sequence
  Description of Artificial Sequence: Synthetic peptide
  Seed: GYSLVGIDPFR
GLSLVGIDPFR

SEQ ID NO: 30400 - protein, 11 aa, Artificial Sequence
  Description of Artificial Sequence: Synthetic peptide
  Seed: GYSLVGIDPFR
GKSLVGIDPFR

SEQ ID NO: 30401 - protein, 11 aa, Artificial Sequence
  Description of Artificial Sequence: Synthetic peptide
  Seed: GYSLVGIDPFR
GMSLVGIDPFR

SEQ ID NO: 30402 - protein, 11 aa, Artificial Sequence
  Description of Artificial Sequence: Synthetic peptide
  Seed: GYSLVGIDPFR
GFSLVGIDPFR

SEQ ID NO: 30403 - protein, 11 aa, Artificial Sequence
  Description of Artificial Sequence: Synthetic peptide
  Seed: GYSLVGIDPFR
GSSLVGIDPFR

SEQ ID NO: 30404 - protein, 11 aa, Artificial Sequence
  Description of Artificial Sequence: Synthetic peptide
  Seed: GYSLVGIDPFR
GTSLVGIDPFR

SEQ ID NO: 30405 - protein, 11 aa, Artificial Sequence
  Description of Artificial Sequence: Synthetic peptide
  Seed: GYSLVGIDPFR
GWSLVGIDPFR

SEQ ID NO: 30406 - protein, 10 aa, Artificial Sequence
  Description of Artificial Sequence: Synthetic peptide
  Seed: HDFEREGYSL
HEFEREGYSA

SEQ ID NO: 30407 - protein, 10 aa, Artificial Sequence
  Description of Artificial Sequence: Synthetic peptide
  Seed: HDFEREGYSL
HEFEREGYSC

SEQ ID NO: 30408 - protein, 10 aa, Artificial Sequence
  Description of Artificial Sequence: Synthetic peptide
  Seed: HDFEREGYSL
HEFEREGYSI

SEQ ID NO: 30409 - protein, 10 aa, Artificial Sequence
  Description of Artificial Sequence: Synthetic peptide
  Seed: HDFEREGYSL
HEFEREGYSL

SEQ ID NO: 30410 - protein, 10 aa, Artificial Sequence
  Description of Artificial Sequence: Synthetic peptide
  Seed: HDFEREGYSL
HEFEREGYSM

SEQ ID NO: 30411 - protein, 10 aa, Artificial Sequence
  Description of Artificial Sequence: Synthetic peptide
  Seed: HDFEREGYSL
HEFEREGYSF

SEQ ID NO: 30412 - protein, 10 aa, Artificial Sequence
  Description of Artificial Sequence: Synthetic peptide
  Seed: HDFEREGYSL
HEFEREGYST

SEQ ID NO: 30413 - protein, 10 aa, Artificial Sequence
  Description of Artificial Sequence: Synthetic peptide
  Seed: HDFEREGYSL
HEFEREGYSV

SEQ ID NO: 30414 - protein, 11 aa, Artificial Sequence
  Description of Artificial Sequence: Synthetic peptide
  Seed: GYSLVGIDPFR
GQSLVGIDPFR

SEQ ID NO: 30415 - protein, 11 aa, Artificial Sequence
  Description of Artificial Sequence: Synthetic peptide
  Seed: GYSLVGIDPFR
GNSLVGIDPFR

SEQ ID NO: 30416 - protein, 11 aa, Artificial Sequence
  Description of Artificial Sequence: Synthetic peptide
  Seed: GYSLVGIDPFR
GRSLVGIDPFR

SEQ ID NO: 30417 - protein, 11 aa, Artificial Sequence
  Description of Artificial Sequence: Synthetic peptide
  Seed: GYSLVGIDPFR
GASLVGIDPFR

SEQ ID NO: 30418 - protein, 10 aa, Artificial Sequence
  Description of Artificial Sequence: Synthetic peptide
  Seed: GYSLVGIDPF
GFSLVGIDPF

SEQ ID NO: 30419 - protein, 10 aa, Artificial Sequence
  Description of Artificial Sequence: Synthetic peptide
  Seed: GYSLVGIDPF
GWSLVGIDPF

SEQ ID NO: 30420 - protein, 10 aa, Artificial Sequence
  Description of Artificial Sequence: Synthetic peptide
  Seed: GYSLVGIDPF
GWSLVGIDPW

SEQ ID NO: 30421 - protein, 10 aa, Artificial Sequence
  Description of Artificial Sequence: Synthetic peptide
  Seed: GYSLVGIDPF
GYSLVGIDPI

SEQ ID NO: 30422 - protein, 10 aa, Artificial Sequence
  Description of Artificial Sequence: Synthetic peptide
  Seed: GYSLVGIDPF
GYSLVGIDPL

SEQ ID NO: 30423 - protein, 10 aa, Artificial Sequence
  Description of Artificial Sequence: Synthetic peptide
  Seed: GYSLVGIDPF
GYSLVGIDPM

SEQ ID NO: 30424 - protein, 10 aa, Artificial Sequence
  Description of Artificial Sequence: Synthetic peptide
  Seed: GYSLVGIDPF
GYSLVGIDPW

SEQ ID NO: 30425 - protein, 9 aa, Artificial Sequence
  Description of Artificial Sequence: Synthetic peptide
  Seed: GTMVMELIR
GIMVMELIK

SEQ ID NO: 30426 - protein, 9 aa, Artificial Sequence
  Description of Artificial Sequence: Synthetic peptide
  Seed: GTMVMELIR
GIMVMELIR

SEQ ID NO: 30427 - protein, 9 aa, Artificial Sequence
  Description of Artificial Sequence: Synthetic peptide
  Seed: GTMVMELIR
GGMVMELIR

SEQ ID NO: 30428 - protein, 9 aa, Artificial Sequence
  Description of Artificial Sequence: Synthetic peptide
  Seed: GTKRSYEQM
GGKRSYEQK

SEQ ID NO: 30429 - protein, 10 aa, Artificial Sequence
  Description of Artificial Sequence: Synthetic peptide
  Seed: GRTSDMRAEI
GRTSDMRAEL

SEQ ID NO: 30430 - protein, 10 aa, Artificial Sequence
  Description of Artificial Sequence: Synthetic peptide
  Seed: GRTSDMRAEI
GRTSDMRAEM

SEQ ID NO: 30431 - protein, 10 aa, Artificial Sequence
  Description of Artificial Sequence: Synthetic peptide
  Seed: GRTSDMRAEI
GRTSDMRAEF

SEQ ID NO: 30432 - protein, 10 aa, Artificial Sequence
  Description of Artificial Sequence: Synthetic peptide
  Seed: GRTSDMRTEI
GRTSDMRTEL

SEQ ID NO: 30433 - protein, 10 aa, Artificial Sequence
  Description of Artificial Sequence: Synthetic peptide
  Seed: GRTSDMRTEI
GRTSDMRTEM

SEQ ID NO: 30434 - protein, 10 aa, Artificial Sequence
  Description of Artificial Sequence: Synthetic peptide
  Seed: GRTSDMRTEI
GRTSDMRTEF

SEQ ID NO: 30435 - protein, 9 aa, Artificial Sequence
  Description of Artificial Sequence: Synthetic peptide
  Seed: GTKRSYEQM
GAKRSYEQA

SEQ ID NO: 30436 - protein, 9 aa, Artificial Sequence
  Description of Artificial Sequence: Synthetic peptide
  Seed: GTKRSYEQM
GAKRSYEQK

SEQ ID NO: 30437 - protein, 9 aa, Artificial Sequence
  Description of Artificial Sequence: Synthetic peptide
  Seed: GTKRSYEQM
GQKRSYEQK

SEQ ID NO: 30438 - protein, 9 aa, Artificial Sequence
  Description of Artificial Sequence: Synthetic peptide
  Seed: GTKRSYEQM
GIKRSYEQA

SEQ ID NO: 30439 - protein, 9 aa, Artificial Sequence
  Description of Artificial Sequence: Synthetic peptide
  Seed: GTMVMELIR
GQMVMELIK

SEQ ID NO: 30440 - protein, 9 aa, Artificial Sequence
  Description of Artificial Sequence: Synthetic peptide
  Seed: GTKRSYEQM
GIKRSYEQK

SEQ ID NO: 30441 - protein, 9 aa, Artificial Sequence
  Description of Artificial Sequence: Synthetic peptide
  Seed: GTKRSYEQM
GLKRSYEQK

SEQ ID NO: 30442 - protein, 9 aa, Artificial Sequence
  Description of Artificial Sequence: Synthetic peptide
  Seed: GTKRSYEQM
GMKRSYEQA

SEQ ID NO: 30443 - protein, 9 aa, Artificial Sequence
  Description of Artificial Sequence: Synthetic peptide
  Seed: GTKRSYEQM
GMKRSYEQK

SEQ ID NO: 30444 - protein, 9 aa, Artificial Sequence
  Description of Artificial Sequence: Synthetic peptide
  Seed: GTKRSYEQM
GFKRSYEQK

SEQ ID NO: 30445 - protein, 9 aa, Artificial Sequence
  Description of Artificial Sequence: Synthetic peptide
  Seed: GTKRSYEQM
GSKRSYEQA

SEQ ID NO: 30446 - protein, 9 aa, Artificial Sequence
  Description of Artificial Sequence: Synthetic peptide
  Seed: GTKRSYEQM
GSKRSYEQR

SEQ ID NO: 30447 - protein, 9 aa, Artificial Sequence
  Description of Artificial Sequence: Synthetic peptide
  Seed: GTKRSYEQM
GSKRSYEQI

SEQ ID NO: 30448 - protein, 9 aa, Artificial Sequence
  Description of Artificial Sequence: Synthetic peptide
  Seed: GTKRSYEQM
GSKRSYEQL

SEQ ID NO: 30449 - protein, 10 aa, Artificial Sequence
  Description of Artificial Sequence: Synthetic peptide
  Seed: GRRTRIAYER
GVRTRIAYEY

SEQ ID NO: 30450 - protein, 10 aa, Artificial Sequence
  Description of Artificial Sequence: Synthetic peptide
  Seed: GRRTRIAYER
GVRTRIAYEF

SEQ ID NO: 30451 - protein, 10 aa, Artificial Sequence
  Description of Artificial Sequence: Synthetic peptide
  Seed: GRRTRIAYER
GVRTRIAYEM

SEQ ID NO: 30452 - protein, 10 aa, Artificial Sequence
  Description of Artificial Sequence: Synthetic peptide
  Seed: GRRTRIAYER
GVRTRIAYEK

SEQ ID NO: 30453 - protein, 10 aa, Artificial Sequence
  Description of Artificial Sequence: Synthetic peptide
  Seed: GRRTRIAYER
GTRTRIAYEF

SEQ ID NO: 30454 - protein, 10 aa, Artificial Sequence
  Description of Artificial Sequence: Synthetic peptide
  Seed: GRRTRIAYER
GTRTRIAYEY

SEQ ID NO: 30455 - protein, 10 aa, Artificial Sequence
  Description of Artificial Sequence: Synthetic peptide
  Seed: GRRTRIAYER
GWRTRIAYER

SEQ ID NO: 30456 - protein, 10 aa, Artificial Sequence
  Description of Artificial Sequence: Synthetic peptide
  Seed: GRRTRIAYER
GWRTRIAYEI

SEQ ID NO: 30457 - protein, 10 aa, Artificial Sequence
  Description of Artificial Sequence: Synthetic peptide
  Seed: GRRTRIAYER
GWRTRIAYEL

SEQ ID NO: 30458 - protein, 10 aa, Artificial Sequence
  Description of Artificial Sequence: Synthetic peptide
  Seed: GRRTRIAYER
GWRTRIAYEK

SEQ ID NO: 30459 - protein, 10 aa, Artificial Sequence
  Description of Artificial Sequence: Synthetic peptide
  Seed: GRRTRIAYER
GWRTRIAYEM

SEQ ID NO: 30460 - protein, 10 aa, Artificial Sequence
  Description of Artificial Sequence: Synthetic peptide
  Seed: GRRTRIAYER
GWRTRIAYEF

SEQ ID NO: 30461 - protein, 10 aa, Artificial Sequence
  Description of Artificial Sequence: Synthetic peptide
  Seed: GRRTRIAYER
GWRTRIAYEY

SEQ ID NO: 30462 - protein, 10 aa, Artificial Sequence
  Description of Artificial Sequence: Synthetic peptide
  Seed: GRRTRIAYER
GYRTRIAYER

SEQ ID NO: 30463 - protein, 10 aa, Artificial Sequence
  Description of Artificial Sequence: Synthetic peptide
  Seed: GRRTRIAYER
GYRTRIAYEI

SEQ ID NO: 30464 - protein, 10 aa, Artificial Sequence
  Description of Artificial Sequence: Synthetic peptide
  Seed: GRRTRIAYER
GYRTRIAYEL

SEQ ID NO: 30465 - protein, 10 aa, Artificial Sequence
  Description of Artificial Sequence: Synthetic peptide
  Seed: GRRTRIAYER
GYRTRIAYEK

SEQ ID NO: 30466 - protein, 10 aa, Artificial Sequence
  Description of Artificial Sequence: Synthetic peptide
  Seed: GRRTRIAYER
GYRTRIAYEM

SEQ ID NO: 30467 - protein, 10 aa, Artificial Sequence
  Description of Artificial Sequence: Synthetic peptide
  Seed: GRRTRIAYER
GYRTRIAYEF

SEQ ID NO: 30468 - protein, 10 aa, Artificial Sequence
  Description of Artificial Sequence: Synthetic peptide
  Seed: GRRTRIAYER
GYRTRIAYEY

SEQ ID NO: 30469 - protein, 10 aa, Artificial Sequence
  Description of Artificial Sequence: Synthetic peptide
  Seed: GRRTRIAYER
GVRTRIAYER

SEQ ID NO: 30470 - protein, 10 aa, Artificial Sequence
  Description of Artificial Sequence: Synthetic peptide
  Seed: GRRTRIAYER
GVRTRIAYEI

SEQ ID NO: 30471 - protein, 10 aa, Artificial Sequence
  Description of Artificial Sequence: Synthetic peptide
  Seed: GRRTRIAYER
GVRTRIAYEL

SEQ ID NO: 30472 - protein, 9 aa, Artificial Sequence
  Description of Artificial Sequence: Synthetic peptide
  Seed: GTKRSYEQM
GSKRSYEQK

SEQ ID NO: 30473 - protein, 9 aa, Artificial Sequence
  Description of Artificial Sequence: Synthetic peptide
  Seed: GTKRSYEQM
GSKRSYEQM

SEQ ID NO: 30474 - protein, 9 aa, Artificial Sequence
  Description of Artificial Sequence: Synthetic peptide
  Seed: GTKRSYEQM
GSKRSYEQV

SEQ ID NO: 30475 - protein, 9 aa, Artificial Sequence
  Description of Artificial Sequence: Synthetic peptide
  Seed: GTKVSPRGK
GFKVSPRGK

SEQ ID NO: 30476 - protein, 9 aa, Artificial Sequence
  Description of Artificial Sequence: Synthetic peptide
  Seed: GTKVSPRGK
GSKVSPRGI

SEQ ID NO: 30477 - protein, 9 aa, Artificial Sequence
  Description of Artificial Sequence: Synthetic peptide
  Seed: GTKVSPRGK
GSKVSPRGL

SEQ ID NO: 30478 - protein, 9 aa, Artificial Sequence
  Description of Artificial Sequence: Synthetic peptide
  Seed: GTKVSPRGK
GSKVSPRGK

SEQ ID NO: 30479 - protein, 9 aa, Artificial Sequence
  Description of Artificial Sequence: Synthetic peptide
  Seed: GTKVSPRGK
GSKVSPRGV

SEQ ID NO: 30480 - protein, 9 aa, Artificial Sequence
  Description of Artificial Sequence: Synthetic peptide
  Seed: GTKVSPRGK
GTKVSPRGA

SEQ ID NO: 30481 - protein, 9 aa, Artificial Sequence
  Description of Artificial Sequence: Synthetic peptide
  Seed: GTKVSPRGK
GTKVSPRGI

SEQ ID NO: 30482 - protein, 9 aa, Artificial Sequence
  Description of Artificial Sequence: Synthetic peptide
  Seed: GTKVSPRGK
GTKVSPRGL

SEQ ID NO: 30483 - protein, 9 aa, Artificial Sequence
  Description of Artificial Sequence: Synthetic peptide
  Seed: GTKVSPRGK
GTKVSPRGM

SEQ ID NO: 30484 - protein, 9 aa, Artificial Sequence
  Description of Artificial Sequence: Synthetic peptide
  Seed: GTKVSPRGK
GTKVSPRGS

SEQ ID NO: 30485 - protein, 9 aa, Artificial Sequence
  Description of Artificial Sequence: Synthetic peptide
  Seed: GTKVSPRGK
GTKVSPRGV

SEQ ID NO: 30486 - protein, 9 aa, Artificial Sequence
  Description of Artificial Sequence: Synthetic peptide
  Seed: GTKVSPRGK
GYKVSPRGK

SEQ ID NO: 30487 - protein, 9 aa, Artificial Sequence
  Description of Artificial Sequence: Synthetic peptide
  Seed: GTKVSPRGK
GVKVSPRGA

SEQ ID NO: 30488 - protein, 9 aa, Artificial Sequence
  Description of Artificial Sequence: Synthetic peptide
  Seed: GTKVSPRGK
GVKVSPRGI

SEQ ID NO: 30489 - protein, 9 aa, Artificial Sequence
  Description of Artificial Sequence: Synthetic peptide
  Seed: GTKVSPRGK
GVKVSPRGK

SEQ ID NO: 30490 - protein, 9 aa, Artificial Sequence
  Description of Artificial Sequence: Synthetic peptide
  Seed: GTKVSPRGK
GVKVSPRGV

SEQ ID NO: 30491 - protein, 9 aa, Artificial Sequence
  Description of Artificial Sequence: Synthetic peptide
  Seed: GTMVMELIR
GAMVMELIR

SEQ ID NO: 30492 - protein, 9 aa, Artificial Sequence
  Description of Artificial Sequence: Synthetic peptide
  Seed: GTMVMELIR
GAMVMELIK

SEQ ID NO: 30493 - protein, 9 aa, Artificial Sequence
  Description of Artificial Sequence: Synthetic peptide
  Seed: GTMVMELIR
GNMVMELIR

SEQ ID NO: 30494 - protein, 9 aa, Artificial Sequence
  Description of Artificial Sequence: Synthetic peptide
  Seed: GTMVMELIR
GQMVMELIR

SEQ ID NO: 30495 - protein, 9 aa, Artificial Sequence
  Description of Artificial Sequence: Synthetic peptide
  Seed: GTKVSPRGK
GSKVSPRGA

SEQ ID NO: 30496 - protein, 9 aa, Artificial Sequence
  Description of Artificial Sequence: Synthetic peptide
  Seed: GTKVSPRGK
GMKVSPRGK

SEQ ID NO: 30497 - protein, 9 aa, Artificial Sequence
  Description of Artificial Sequence: Synthetic peptide
  Seed: GTKRSYEQM
GTKRSYEQA

SEQ ID NO: 30498 - protein, 9 aa, Artificial Sequence
  Description of Artificial Sequence: Synthetic peptide
  Seed: GTKVSPRGK
GLKVSPRGK

SEQ ID NO: 30499 - protein, 9 aa, Artificial Sequence
  Description of Artificial Sequence: Synthetic peptide
  Seed: GTKRSYEQM
GTKRSYEQR

SEQ ID NO: 30500 - protein, 9 aa, Artificial Sequence
  Description of Artificial Sequence: Synthetic peptide
  Seed: GTKRSYEQM
GTKRSYEQI

SEQ ID NO: 30501 - protein, 9 aa, Artificial Sequence
  Description of Artificial Sequence: Synthetic peptide
  Seed: GTKRSYEQM
GTKRSYEQL

SEQ ID NO: 30502 - protein, 9 aa, Artificial Sequence
  Description of Artificial Sequence: Synthetic peptide
  Seed: GTKRSYEQM
GTKRSYEQK

SEQ ID NO: 30503 - protein, 9 aa, Artificial Sequence
  Description of Artificial Sequence: Synthetic peptide
  Seed: GTKRSYEQM
GTKRSYEQS

SEQ ID NO: 30504 - protein, 9 aa, Artificial Sequence
  Description of Artificial Sequence: Synthetic peptide
  Seed: GTKRSYEQM
GTKRSYEQY

SEQ ID NO: 30505 - protein, 9 aa, Artificial Sequence
  Description of Artificial Sequence: Synthetic peptide
  Seed: GTKRSYEQM
GTKRSYEQV

SEQ ID NO: 30506 - protein, 9 aa, Artificial Sequence
  Description of Artificial Sequence: Synthetic peptide
  Seed: GTKRSYEQM
GWKRSYEQK

SEQ ID NO: 30507 - protein, 9 aa, Artificial Sequence
  Description of Artificial Sequence: Synthetic peptide
  Seed: GTKRSYEQM
GYKRSYEQK

SEQ ID NO: 30508 - protein, 9 aa, Artificial Sequence
  Description of Artificial Sequence: Synthetic peptide
  Seed: GTKRSYEQM
GVKRSYEQA

SEQ ID NO: 30509 - protein, 9 aa, Artificial Sequence
  Description of Artificial Sequence: Synthetic peptide
  Seed: GTKRSYEQM
GVKRSYEQI

SEQ ID NO: 30510 - protein, 9 aa, Artificial Sequence
  Description of Artificial Sequence: Synthetic peptide
  Seed: GTKRSYEQM
GVKRSYEQK

SEQ ID NO: 30511 - protein, 9 aa, Artificial Sequence
  Description of Artificial Sequence: Synthetic peptide
  Seed: GTKRSYEQM
GVKRSYEQV

SEQ ID NO: 30512 - protein, 9 aa, Artificial Sequence
  Description of Artificial Sequence: Synthetic peptide
  Seed: GTKVSPRGK
GAKVSPRGA

SEQ ID NO: 30513 - protein, 9 aa, Artificial Sequence
  Description of Artificial Sequence: Synthetic peptide
  Seed: GTKVSPRGK
GAKVSPRGK

SEQ ID NO: 30514 - protein, 9 aa, Artificial Sequence
  Description of Artificial Sequence: Synthetic peptide
  Seed: GTKVSPRGK
GQKVSPRGK

SEQ ID NO: 30515 - protein, 9 aa, Artificial Sequence
  Description of Artificial Sequence: Synthetic peptide
  Seed: GTKVSPRGK
GGKVSPRGK

SEQ ID NO: 30516 - protein, 9 aa, Artificial Sequence
  Description of Artificial Sequence: Synthetic peptide
  Seed: GTKVSPRGK
GIKVSPRGA

SEQ ID NO: 30517 - protein, 9 aa, Artificial Sequence
  Description of Artificial Sequence: Synthetic peptide
  Seed: GTKVSPRGK
GIKVSPRGK

SEQ ID NO: 30518 - protein, 10 aa, Artificial Sequence
  Description of Artificial Sequence: Synthetic peptide
  Seed: GRRTRIAYER
GTRTRIAYEK

SEQ ID NO: 30519 - protein, 9 aa, Artificial Sequence
  Description of Artificial Sequence: Synthetic peptide
  Seed: HKSQLVWMA
HRSQLVWMV

SEQ ID NO: 30520 - protein, 10 aa, Artificial Sequence
  Description of Artificial Sequence: Synthetic peptide
  Seed: HKSCLPACVY
HTSCLPACVY

SEQ ID NO: 30521 - protein, 10 aa, Artificial Sequence
  Description of Artificial Sequence: Synthetic peptide
  Seed: HKSCLPACVY
HWSCLPACVY

SEQ ID NO: 30522 - protein, 10 aa, Artificial Sequence
  Description of Artificial Sequence: Synthetic peptide
  Seed: HKSCLPACVY
HYSCLPACVF

SEQ ID NO: 30523 - protein, 10 aa, Artificial Sequence
  Description of Artificial Sequence: Synthetic peptide
  Seed: HKSCLPACVY
HYSCLPACVY

SEQ ID NO: 30524 - protein, 10 aa, Artificial Sequence
  Description of Artificial Sequence: Synthetic peptide
  Seed: HKSCLPACVY
HVSCLPACVM

SEQ ID NO: 30525 - protein, 10 aa, Artificial Sequence
  Description of Artificial Sequence: Synthetic peptide
  Seed: HKSCLPACVY
HVSCLPACVF

SEQ ID NO: 30526 - protein, 10 aa, Artificial Sequence
  Description of Artificial Sequence: Synthetic peptide
  Seed: HKSCLPACVY
HVSCLPACVY

SEQ ID NO: 30527 - protein, 9 aa, Artificial Sequence
  Description of Artificial Sequence: Synthetic peptide
  Seed: HKSQLVWMA
HRSQLVWMA

SEQ ID NO: 30528 - protein, 9 aa, Artificial Sequence
  Description of Artificial Sequence: Synthetic peptide
  Seed: HKSQLVWMA
HRSQLVWML

SEQ ID NO: 30529 - protein, 9 aa, Artificial Sequence
  Description of Artificial Sequence: Synthetic peptide
  Seed: HKSQLVWMA
HQSQLVWMA

SEQ ID NO: 30530 - protein, 9 aa, Artificial Sequence
  Description of Artificial Sequence: Synthetic peptide
  Seed: HKSQLVWMA
HHSQLVWMA

SEQ ID NO: 30531 - protein, 9 aa, Artificial Sequence
  Description of Artificial Sequence: Synthetic peptide
  Seed: HKSQLVWMA
HHSQLVWMI

SEQ ID NO: 30532 - protein, 9 aa, Artificial Sequence
  Description of Artificial Sequence: Synthetic peptide
  Seed: HKSQLVWMA
HHSQLVWML

SEQ ID NO: 30533 - protein, 9 aa, Artificial Sequence
  Description of Artificial Sequence: Synthetic peptide
  Seed: HKSQLVWMA
HHSQLVWMT

SEQ ID NO: 30534 - protein, 9 aa, Artificial Sequence
  Description of Artificial Sequence: Synthetic peptide
  Seed: HKSQLVWMA
HHSQLVWMV

SEQ ID NO: 30535 - protein, 10 aa, Artificial Sequence
  Description of Artificial Sequence: Synthetic peptide
  Seed: HKSCLPACVY
HTSCLPACVF

SEQ ID NO: 30536 - protein, 10 aa, Artificial Sequence
  Description of Artificial Sequence: Synthetic peptide
  Seed: HKSCLPACVY
HSSCLPACVY

SEQ ID NO: 30537 - protein, 10 aa, Artificial Sequence
  Description of Artificial Sequence: Synthetic peptide
  Seed: HKSCLPACVY
HSSCLPACVF

SEQ ID NO: 30538 - protein, 10 aa, Artificial Sequence
  Description of Artificial Sequence: Synthetic peptide
  Seed: HKSCLPACVY
HPSCLPACVY

SEQ ID NO: 30539 - protein, 10 aa, Artificial Sequence
  Description of Artificial Sequence: Synthetic peptide
  Seed: HKSCLPACVY
HESCLPACVY

SEQ ID NO: 30540 - protein, 10 aa, Artificial Sequence
  Description of Artificial Sequence: Synthetic peptide
  Seed: HKSCLPACVY
HGSCLPACVY

SEQ ID NO: 30541 - protein, 10 aa, Artificial Sequence
  Description of Artificial Sequence: Synthetic peptide
  Seed: HKSCLPACVY
HHSCLPACVM

SEQ ID NO: 30542 - protein, 10 aa, Artificial Sequence
  Description of Artificial Sequence: Synthetic peptide
  Seed: HKSCLPACVY
HHSCLPACVF

SEQ ID NO: 30543 - protein, 10 aa, Artificial Sequence
  Description of Artificial Sequence: Synthetic peptide
  Seed: HKSCLPACVY
HHSCLPACVY

SEQ ID NO: 30544 - protein, 10 aa, Artificial Sequence
  Description of Artificial Sequence: Synthetic peptide
  Seed: HKSCLPACVY
HISCLPACVF

SEQ ID NO: 30545 - protein, 10 aa, Artificial Sequence
  Description of Artificial Sequence: Synthetic peptide
  Seed: HKSCLPACVY
HISCLPACVY

SEQ ID NO: 30546 - protein, 10 aa, Artificial Sequence
  Description of Artificial Sequence: Synthetic peptide
  Seed: HKSCLPACVY
HLSCLPACVM

SEQ ID NO: 30547 - protein, 10 aa, Artificial Sequence
  Description of Artificial Sequence: Synthetic peptide
  Seed: HKSCLPACVY
HLSCLPACVF

SEQ ID NO: 30548 - protein, 10 aa, Artificial Sequence
  Description of Artificial Sequence: Synthetic peptide
  Seed: HKSCLPACVY
HLSCLPACVY

SEQ ID NO: 30549 - protein, 10 aa, Artificial Sequence
  Description of Artificial Sequence: Synthetic peptide
  Seed: HKSCLPACVY
HKSCLPACVL

SEQ ID NO: 30550 - protein, 10 aa, Artificial Sequence
  Description of Artificial Sequence: Synthetic peptide
  Seed: HKSCLPACVY
HKSCLPACVM

SEQ ID NO: 30551 - protein, 10 aa, Artificial Sequence
  Description of Artificial Sequence: Synthetic peptide
  Seed: HKSCLPACVY
HKSCLPACVF

SEQ ID NO: 30552 - protein, 10 aa, Artificial Sequence
  Description of Artificial Sequence: Synthetic peptide
  Seed: HKSCLPACVY
HMSCLPACVL

SEQ ID NO: 30553 - protein, 10 aa, Artificial Sequence
  Description of Artificial Sequence: Synthetic peptide
  Seed: HKSCLPACVY
HMSCLPACVM

SEQ ID NO: 30554 - protein, 10 aa, Artificial Sequence
  Description of Artificial Sequence: Synthetic peptide
  Seed: HKSCLPACVY
HMSCLPACVF

SEQ ID NO: 30555 - protein, 10 aa, Artificial Sequence
  Description of Artificial Sequence: Synthetic peptide
  Seed: HKSCLPACVY
HMSCLPACVY

SEQ ID NO: 30556 - protein, 10 aa, Artificial Sequence
  Description of Artificial Sequence: Synthetic peptide
  Seed: HKSCLPACVY
HFSCLPACVF

SEQ ID NO: 30557 - protein, 10 aa, Artificial Sequence
  Description of Artificial Sequence: Synthetic peptide
  Seed: HKSCLPACVY
HFSCLPACVY

SEQ ID NO: 30558 - protein, 10 aa, Artificial Sequence
  Description of Artificial Sequence: Synthetic peptide
  Seed: HKSCLPACVY
HESCLPACVF

SEQ ID NO: 30559 - protein, 10 aa, Artificial Sequence
  Description of Artificial Sequence: Synthetic peptide
  Seed: HKSCLPACVY
HESCLPACVM

SEQ ID NO: 30560 - protein, 10 aa, Artificial Sequence
  Description of Artificial Sequence: Synthetic peptide
  Seed: HKSCLPACVY
HQSCLPACVY

SEQ ID NO: 30561 - protein, 10 aa, Artificial Sequence
  Description of Artificial Sequence: Synthetic peptide
  Seed: HKSCLPACVY
HQSCLPACVW

SEQ ID NO: 30562 - protein, 10 aa, Artificial Sequence
  Description of Artificial Sequence: Synthetic peptide
  Seed: HKSCLPACVY
HASCLPACVF

SEQ ID NO: 30563 - protein, 10 aa, Artificial Sequence
  Description of Artificial Sequence: Synthetic peptide
  Seed: HKSCLPACVY
HASCLPACVY

SEQ ID NO: 30564 - protein, 10 aa, Artificial Sequence
  Description of Artificial Sequence: Synthetic peptide
  Seed: HKSCLPACVY
HRSCLPACVM

SEQ ID NO: 30565 - protein, 10 aa, Artificial Sequence
  Description of Artificial Sequence: Synthetic peptide
  Seed: HKSCLPACVY
HRSCLPACVF

SEQ ID NO: 30566 - protein, 10 aa, Artificial Sequence
  Description of Artificial Sequence: Synthetic peptide
  Seed: HKSCLPACVY
HRSCLPACVY

SEQ ID NO: 30567 - protein, 10 aa, Artificial Sequence
  Description of Artificial Sequence: Synthetic peptide
  Seed: HKSCLPACVY
HNSCLPACVF

SEQ ID NO: 30568 - protein, 10 aa, Artificial Sequence
  Description of Artificial Sequence: Synthetic peptide
  Seed: HKSCLPACVY
HNSCLPACVY

SEQ ID NO: 30569 - protein, 10 aa, Artificial Sequence
  Description of Artificial Sequence: Synthetic peptide
  Seed: HKSCLPACVY
HDSCLPACVY

SEQ ID NO: 30570 - protein, 10 aa, Artificial Sequence
  Description of Artificial Sequence: Synthetic peptide
  Seed: HKSCLPACVY
HCSCLPACVY

SEQ ID NO: 30571 - protein, 10 aa, Artificial Sequence
  Description of Artificial Sequence: Synthetic peptide
  Seed: HKSCLPACVY
HQSCLPACVH

SEQ ID NO: 30572 - protein, 10 aa, Artificial Sequence
  Description of Artificial Sequence: Synthetic peptide
  Seed: HKSCLPACVY
HQSCLPACVI

SEQ ID NO: 30573 - protein, 10 aa, Artificial Sequence
  Description of Artificial Sequence: Synthetic peptide
  Seed: HKSCLPACVY
HQSCLPACVL

SEQ ID NO: 30574 - protein, 10 aa, Artificial Sequence
  Description of Artificial Sequence: Synthetic peptide
  Seed: HKSCLPACVY
HQSCLPACVM

SEQ ID NO: 30575 - protein, 10 aa, Artificial Sequence
  Description of Artificial Sequence: Synthetic peptide
  Seed: HKSCLPACVY
HQSCLPACVF

SEQ ID NO: 30576 - protein, 10 aa, Artificial Sequence
  Description of Artificial Sequence: Synthetic peptide
  Seed: GRRTRIAYER
GTRTRIAYEM

SEQ ID NO: 30577 - protein, 10 aa, Artificial Sequence
  Description of Artificial Sequence: Synthetic peptide
  Seed: GRRTRIAYER
GTRTRIAYEL

SEQ ID NO: 30578 - protein, 10 aa, Artificial Sequence
  Description of Artificial Sequence: Synthetic peptide
  Seed: GRLIQNSLTI
GALIQNSLTI

SEQ ID NO: 30579 - protein, 10 aa, Artificial Sequence
  Description of Artificial Sequence: Synthetic peptide
  Seed: GRMIGGIGRF
GLMIGGIGRF

SEQ ID NO: 30580 - protein, 10 aa, Artificial Sequence
  Description of Artificial Sequence: Synthetic peptide
  Seed: GRMIGGIGRF
GQMIGGIGRY

SEQ ID NO: 30581 - protein, 10 aa, Artificial Sequence
  Description of Artificial Sequence: Synthetic peptide
  Seed: GRMIGGIGRF
GEMIGGIGRF

SEQ ID NO: 30582 - protein, 10 aa, Artificial Sequence
  Description of Artificial Sequence: Synthetic peptide
  Seed: GRMIGGIGRF
GEMIGGIGRY

SEQ ID NO: 30583 - protein, 10 aa, Artificial Sequence
  Description of Artificial Sequence: Synthetic peptide
  Seed: GRMIGGIGRF
GGMIGGIGRF

SEQ ID NO: 30584 - protein, 10 aa, Artificial Sequence
  Description of Artificial Sequence: Synthetic peptide
  Seed: GRMIGGIGRF
GGMIGGIGRY

SEQ ID NO: 30585 - protein, 10 aa, Artificial Sequence
  Description of Artificial Sequence: Synthetic peptide
  Seed: GRMIGGIGRF
GHMIGGIGRF

SEQ ID NO: 30586 - protein, 10 aa, Artificial Sequence
  Description of Artificial Sequence: Synthetic peptide
  Seed: GRMIGGIGRF
GHMIGGIGRY

SEQ ID NO: 30587 - protein, 10 aa, Artificial Sequence
  Description of Artificial Sequence: Synthetic peptide
  Seed: GRMIGGIGRF
GIMIGGIGRF

SEQ ID NO: 30588 - protein, 10 aa, Artificial Sequence
  Description of Artificial Sequence: Synthetic peptide
  Seed: GRMIGGIGRF
GIMIGGIGRY

SEQ ID NO: 30589 - protein, 10 aa, Artificial Sequence
  Description of Artificial Sequence: Synthetic peptide
  Seed: GRMIGGIGRF
GLMIGGIGRY

SEQ ID NO: 30590 - protein, 10 aa, Artificial Sequence
  Description of Artificial Sequence: Synthetic peptide
  Seed: GRMIGGIGRF
GSMIGGIGRF

SEQ ID NO: 30591 - protein, 10 aa, Artificial Sequence
  Description of Artificial Sequence: Synthetic peptide
  Seed: GRMIGGIGRF
GKMIGGIGRM

SEQ ID NO: 30592 - protein, 10 aa, Artificial Sequence
  Description of Artificial Sequence: Synthetic peptide
  Seed: GRMIGGIGRF
GKMIGGIGRY

SEQ ID NO: 30593 - protein, 10 aa, Artificial Sequence
  Description of Artificial Sequence: Synthetic peptide
  Seed: GRMIGGIGRF
GMMIGGIGRM

SEQ ID NO: 30594 - protein, 10 aa, Artificial Sequence
  Description of Artificial Sequence: Synthetic peptide
  Seed: GRMIGGIGRF
GMMIGGIGRF

SEQ ID NO: 30595 - protein, 10 aa, Artificial Sequence
  Description of Artificial Sequence: Synthetic peptide
  Seed: GRMIGGIGRF
GMMIGGIGRY

SEQ ID NO: 30596 - protein, 10 aa, Artificial Sequence
  Description of Artificial Sequence: Synthetic peptide
  Seed: GRMIGGIGRF
GFMIGGIGRF

SEQ ID NO: 30597 - protein, 10 aa, Artificial Sequence
  Description of Artificial Sequence: Synthetic peptide
  Seed: GRMIGGIGRF
GFMIGGIGRY

SEQ ID NO: 30598 - protein, 10 aa, Artificial Sequence
  Description of Artificial Sequence: Synthetic peptide
  Seed: GRMIGGIGRF
GPMIGGIGRF

SEQ ID NO: 30599 - protein, 10 aa, Artificial Sequence
  Description of Artificial Sequence: Synthetic peptide
  Seed: GRMIGGIGRF
GQMIGGIGRF

SEQ ID NO: 30600 - protein, 10 aa, Artificial Sequence
  Description of Artificial Sequence: Synthetic peptide
  Seed: GRMIGGIGRF
GQMIGGIGRM

SEQ ID NO: 30601 - protein, 10 aa, Artificial Sequence
  Description of Artificial Sequence: Synthetic peptide
  Seed: GRMIGGIGRF
GQMIGGIGRL

SEQ ID NO: 30602 - protein, 10 aa, Artificial Sequence
  Description of Artificial Sequence: Synthetic peptide
  Seed: GRMIGGIGRF
GCMIGGIGRY

SEQ ID NO: 30603 - protein, 9 aa, Artificial Sequence
  Description of Artificial Sequence: Synthetic peptide
  Seed: GRMIGGIGR
GRMIGGIGY

SEQ ID NO: 30604 - protein, 9 aa, Artificial Sequence
  Description of Artificial Sequence: Synthetic peptide
  Seed: GRMIGGIGR
GRMIGGIGV

SEQ ID NO: 30605 - protein, 10 aa, Artificial Sequence
  Description of Artificial Sequence: Synthetic peptide
  Seed: GRMIGGIGRF
GAMIGGIGRF

SEQ ID NO: 30606 - protein, 10 aa, Artificial Sequence
  Description of Artificial Sequence: Synthetic peptide
  Seed: GRMIGGIGRF
GAMIGGIGRY

SEQ ID NO: 30607 - protein, 10 aa, Artificial Sequence
  Description of Artificial Sequence: Synthetic peptide
  Seed: GRMIGGIGRF
GRMIGGIGRA

SEQ ID NO: 30608 - protein, 10 aa, Artificial Sequence
  Description of Artificial Sequence: Synthetic peptide
  Seed: GRMIGGIGRF
GRMIGGIGRR

SEQ ID NO: 30609 - protein, 10 aa, Artificial Sequence
  Description of Artificial Sequence: Synthetic peptide
  Seed: GRMIGGIGRF
GRMIGGIGRH

SEQ ID NO: 30610 - protein, 10 aa, Artificial Sequence
  Description of Artificial Sequence: Synthetic peptide
  Seed: GRMIGGIGRF
GRMIGGIGRI

SEQ ID NO: 30611 - protein, 10 aa, Artificial Sequence
  Description of Artificial Sequence: Synthetic peptide
  Seed: GRMIGGIGRF
GRMIGGIGRL

SEQ ID NO: 30612 - protein, 10 aa, Artificial Sequence
  Description of Artificial Sequence: Synthetic peptide
  Seed: GRMIGGIGRF
GRMIGGIGRK

SEQ ID NO: 30613 - protein, 10 aa, Artificial Sequence
  Description of Artificial Sequence: Synthetic peptide
  Seed: GRMIGGIGRF
GRMIGGIGRM

SEQ ID NO: 30614 - protein, 10 aa, Artificial Sequence
  Description of Artificial Sequence: Synthetic peptide
  Seed: GRMIGGIGRF
GRMIGGIGRW

SEQ ID NO: 30615 - protein, 10 aa, Artificial Sequence
  Description of Artificial Sequence: Synthetic peptide
  Seed: GRMIGGIGRF
GRMIGGIGRY

SEQ ID NO: 30616 - protein, 10 aa, Artificial Sequence
  Description of Artificial Sequence: Synthetic peptide
  Seed: GRMIGGIGRF
GRMIGGIGRV

SEQ ID NO: 30617 - protein, 10 aa, Artificial Sequence
  Description of Artificial Sequence: Synthetic peptide
  Seed: GRMIGGIGRF
GNMIGGIGRF

SEQ ID NO: 30618 - protein, 10 aa, Artificial Sequence
  Description of Artificial Sequence: Synthetic peptide
  Seed: GRMIGGIGRF
GNMIGGIGRY

SEQ ID NO: 30619 - protein, 10 aa, Artificial Sequence
  Description of Artificial Sequence: Synthetic peptide
  Seed: GRMIGGIGRF
GDMIGGIGRF

SEQ ID NO: 30620 - protein, 10 aa, Artificial Sequence
  Description of Artificial Sequence: Synthetic peptide
  Seed: GRMIGGIGRF
GDMIGGIGRY

SEQ ID NO: 30621 - protein, 10 aa, Artificial Sequence
  Description of Artificial Sequence: Synthetic peptide
  Seed: GRMIGGIGRF
GCMIGGIGRF

SEQ ID NO: 30622 - protein, 10 aa, Artificial Sequence
  Description of Artificial Sequence: Synthetic peptide
  Seed: GRMIGGIGRF
GPMIGGIGRY

SEQ ID NO: 30623 - protein, 10 aa, Artificial Sequence
  Description of Artificial Sequence: Synthetic peptide
  Seed: GRMIGGIGRF
GSMIGGIGRY

SEQ ID NO: 30624 - protein, 10 aa, Artificial Sequence
  Description of Artificial Sequence: Synthetic peptide
  Seed: GRMVGGIGRF
GAMVGGIGRY

SEQ ID NO: 30625 - protein, 9 aa, Artificial Sequence
  Description of Artificial Sequence: Synthetic peptide
  Seed: GRMVGGIGR
GRMVGGIGA

SEQ ID NO: 30626 - protein, 11 aa, Artificial Sequence
  Description of Artificial Sequence: Synthetic peptide
  Seed: GRMIGGIGRFY
GKMIGGIGRFF

SEQ ID NO: 30627 - protein, 11 aa, Artificial Sequence
  Description of Artificial Sequence: Synthetic peptide
  Seed: GRMIGGIGRFY
GMMIGGIGRFF

SEQ ID NO: 30628 - protein, 11 aa, Artificial Sequence
  Description of Artificial Sequence: Synthetic peptide
  Seed: GRMIGGIGRFY
GMMIGGIGRFY

SEQ ID NO: 30629 - protein, 11 aa, Artificial Sequence
  Description of Artificial Sequence: Synthetic peptide
  Seed: GRMIGGIGRFY
GFMIGGIGRFY

SEQ ID NO: 30630 - protein, 11 aa, Artificial Sequence
  Description of Artificial Sequence: Synthetic peptide
  Seed: GRMIGGIGRFY
GSMIGGIGRFY

SEQ ID NO: 30631 - protein, 11 aa, Artificial Sequence
  Description of Artificial Sequence: Synthetic peptide
  Seed: GRMIGGIGRFY
GTMIGGIGRFY

SEQ ID NO: 30632 - protein, 11 aa, Artificial Sequence
  Description of Artificial Sequence: Synthetic peptide
  Seed: GRMIGGIGRFY
GYMIGGIGRFY

SEQ ID NO: 30633 - protein, 11 aa, Artificial Sequence
  Description of Artificial Sequence: Synthetic peptide
  Seed: GRMIGGIGRFY
GVMIGGIGRFY

SEQ ID NO: 30634 - protein, 9 aa, Artificial Sequence
  Description of Artificial Sequence: Synthetic peptide
  Seed: GRMVGGIGR
GRMVGGIGH

SEQ ID NO: 30635 - protein, 10 aa, Artificial Sequence
  Description of Artificial Sequence: Synthetic peptide
  Seed: GRMIGGIGRF
GTMIGGIGRF

SEQ ID NO: 30636 - protein, 9 aa, Artificial Sequence
  Description of Artificial Sequence: Synthetic peptide
  Seed: GRMVGGIGR
GRMVGGIGI

SEQ ID NO: 30637 - protein, 9 aa, Artificial Sequence
  Description of Artificial Sequence: Synthetic peptide
  Seed: GRMVGGIGR
GRMVGGIGL

SEQ ID NO: 30638 - protein, 9 aa, Artificial Sequence
  Description of Artificial Sequence: Synthetic peptide
  Seed: GRMVGGIGR
GRMVGGIGK

SEQ ID NO: 30639 - protein, 9 aa, Artificial Sequence
  Description of Artificial Sequence: Synthetic peptide
  Seed: GRMVGGIGR
GRMVGGIGM

SEQ ID NO: 30640 - protein, 9 aa, Artificial Sequence
  Description of Artificial Sequence: Synthetic peptide
  Seed: GRMVGGIGR
GRMVGGIGF

SEQ ID NO: 30641 - protein, 9 aa, Artificial Sequence
  Description of Artificial Sequence: Synthetic peptide
  Seed: GRMVGGIGR
GRMVGGIGW

SEQ ID NO: 30642 - protein, 9 aa, Artificial Sequence
  Description of Artificial Sequence: Synthetic peptide
  Seed: GRMVGGIGR
GRMVGGIGY

SEQ ID NO: 30643 - protein, 9 aa, Artificial Sequence
  Description of Artificial Sequence: Synthetic peptide
  Seed: GRMVGGIGR
GRMVGGIGV

SEQ ID NO: 30644 - protein, 11 aa, Artificial Sequence
  Description of Artificial Sequence: Synthetic peptide
  Seed: GRMIGGIGRFY
GLMIGGIGRFY

SEQ ID NO: 30645 - protein, 11 aa, Artificial Sequence
  Description of Artificial Sequence: Synthetic peptide
  Seed: GRMIGGIGRFY
GIMIGGIGRFY

SEQ ID NO: 30646 - protein, 11 aa, Artificial Sequence
  Description of Artificial Sequence: Synthetic peptide
  Seed: GRMIGGIGRFY
GHMIGGIGRFY

SEQ ID NO: 30647 - protein, 11 aa, Artificial Sequence
  Description of Artificial Sequence: Synthetic peptide
  Seed: GRMIGGIGRFY
GQMIGGIGRFY

SEQ ID NO: 30648 - protein, 10 aa, Artificial Sequence
  Description of Artificial Sequence: Synthetic peptide
  Seed: GRMIGGIGRF
GTMIGGIGRY

SEQ ID NO: 30649 - protein, 10 aa, Artificial Sequence
  Description of Artificial Sequence: Synthetic peptide
  Seed: GRMIGGIGRF
GWMIGGIGRF

SEQ ID NO: 30650 - protein, 10 aa, Artificial Sequence
  Description of Artificial Sequence: Synthetic peptide
  Seed: GRMIGGIGRF
GWMIGGIGRY

SEQ ID NO: 30651 - protein, 10 aa, Artificial Sequence
  Description of Artificial Sequence: Synthetic peptide
  Seed: GRMIGGIGRF
GYMIGGIGRF

SEQ ID NO: 30652 - protein, 10 aa, Artificial Sequence
  Description of Artificial Sequence: Synthetic peptide
  Seed: GRMIGGIGRF
GYMIGGIGRY

SEQ ID NO: 30653 - protein, 10 aa, Artificial Sequence
  Description of Artificial Sequence: Synthetic peptide
  Seed: GRMIGGIGRF
GVMIGGIGRF

SEQ ID NO: 30654 - protein, 10 aa, Artificial Sequence
  Description of Artificial Sequence: Synthetic peptide
  Seed: GRMIGGIGRF
GVMIGGIGRY

SEQ ID NO: 30655 - protein, 11 aa, Artificial Sequence
  Description of Artificial Sequence: Synthetic peptide
  Seed: GRMIGGIGRFY
GAMIGGIGRFY

SEQ ID NO: 30656 - protein, 11 aa, Artificial Sequence
  Description of Artificial Sequence: Synthetic peptide
  Seed: GRMIGGIGRFY
GRMIGGIGRFA

SEQ ID NO: 30657 - protein, 11 aa, Artificial Sequence
  Description of Artificial Sequence: Synthetic peptide
  Seed: GRMIGGIGRFY
GRMIGGIGRFR

SEQ ID NO: 30658 - protein, 11 aa, Artificial Sequence
  Description of Artificial Sequence: Synthetic peptide
  Seed: GRMIGGIGRFY
GRMIGGIGRFI

SEQ ID NO: 30659 - protein, 11 aa, Artificial Sequence
  Description of Artificial Sequence: Synthetic peptide
  Seed: GRMIGGIGRFY
GRMIGGIGRFL

SEQ ID NO: 30660 - protein, 11 aa, Artificial Sequence
  Description of Artificial Sequence: Synthetic peptide
  Seed: GRMIGGIGRFY
GRMIGGIGRFK

SEQ ID NO: 30661 - protein, 11 aa, Artificial Sequence
  Description of Artificial Sequence: Synthetic peptide
  Seed: GRMIGGIGRFY
GRMIGGIGRFM

SEQ ID NO: 30662 - protein, 11 aa, Artificial Sequence
  Description of Artificial Sequence: Synthetic peptide
  Seed: GRMIGGIGRFY
GRMIGGIGRFF

SEQ ID NO: 30663 - protein, 11 aa, Artificial Sequence
  Description of Artificial Sequence: Synthetic peptide
  Seed: GRMIGGIGRFY
GRMIGGIGRFW

SEQ ID NO: 30664 - protein, 11 aa, Artificial Sequence
  Description of Artificial Sequence: Synthetic peptide
  Seed: GRMIGGIGRFY
GRMIGGIGRFV

SEQ ID NO: 30665 - protein, 11 aa, Artificial Sequence
  Description of Artificial Sequence: Synthetic peptide
  Seed: GRMIGGIGRFY
GQMIGGIGRFM

SEQ ID NO: 30666 - protein, 11 aa, Artificial Sequence
  Description of Artificial Sequence: Synthetic peptide
  Seed: GRMIGGIGRFY
GQMIGGIGRFF

SEQ ID NO: 30667 - protein, 9 aa, Artificial Sequence
  Description of Artificial Sequence: Synthetic peptide
  Seed: GRMIGGIGR
GRMIGGIGW

SEQ ID NO: 30668 - protein, 9 aa, Artificial Sequence
  Description of Artificial Sequence: Synthetic peptide
  Seed: GRMIGGIGR
GRMIGGIGF

SEQ ID NO: 30669 - protein, 9 aa, Artificial Sequence
  Description of Artificial Sequence: Synthetic peptide
  Seed: GRMIGGIGR
GRMIGGIGM

SEQ ID NO: 30670 - protein, 10 aa, Artificial Sequence
  Description of Artificial Sequence: Synthetic peptide
  Seed: GRLIQNSLTI
GGLIQNSLTI

SEQ ID NO: 30671 - protein, 10 aa, Artificial Sequence
  Description of Artificial Sequence: Synthetic peptide
  Seed: GRLIQNSLTI
GQLIQNSLTA

SEQ ID NO: 30672 - protein, 10 aa, Artificial Sequence
  Description of Artificial Sequence: Synthetic peptide
  Seed: GRLIQNSLTI
GQLIQNSLTI

SEQ ID NO: 30673 - protein, 10 aa, Artificial Sequence
  Description of Artificial Sequence: Synthetic peptide
  Seed: GRLIQNSLTI
GQLIQNSLTL

SEQ ID NO: 30674 - protein, 10 aa, Artificial Sequence
  Description of Artificial Sequence: Synthetic peptide
  Seed: GRLIQNSLTI
GQLIQNSLTV

SEQ ID NO: 30675 - protein, 10 aa, Artificial Sequence
  Description of Artificial Sequence: Synthetic peptide
  Seed: GRLIQNSLTI
GELIQNSLTA

SEQ ID NO: 30676 - protein, 10 aa, Artificial Sequence
  Description of Artificial Sequence: Synthetic peptide
  Seed: GRLIQNSLTI
GELIQNSLTI

SEQ ID NO: 30677 - protein, 10 aa, Artificial Sequence
  Description of Artificial Sequence: Synthetic peptide
  Seed: GRLIQNSLTI
GELIQNSLTL

SEQ ID NO: 30678 - protein, 10 aa, Artificial Sequence
  Description of Artificial Sequence: Synthetic peptide
  Seed: GRLIQNSLTI
GELIQNSLTV

SEQ ID NO: 30679 - protein, 10 aa, Artificial Sequence
  Description of Artificial Sequence: Synthetic peptide
  Seed: GRLIQNSLTI
GGLIQNSLTA

SEQ ID NO: 30680 - protein, 10 aa, Artificial Sequence
  Description of Artificial Sequence: Synthetic peptide
  Seed: GRLIQNSLTI
GGLIQNSLTL

SEQ ID NO: 30681 - protein, 9 aa, Artificial Sequence
  Description of Artificial Sequence: Synthetic peptide
  Seed: GRMIGGIGR
GRMIGGIGK

SEQ ID NO: 30682 - protein, 10 aa, Artificial Sequence
  Description of Artificial Sequence: Synthetic peptide
  Seed: GRLIQNSLTI
GGLIQNSLTV

SEQ ID NO: 30683 - protein, 10 aa, Artificial Sequence
  Description of Artificial Sequence: Synthetic peptide
  Seed: GRLIQNSLTI
GHLIQNSLTA

SEQ ID NO: 30684 - protein, 10 aa, Artificial Sequence
  Description of Artificial Sequence: Synthetic peptide
  Seed: GRLIQNSLTI
GHLIQNSLTI

SEQ ID NO: 30685 - protein, 10 aa, Artificial Sequence
  Description of Artificial Sequence: Synthetic peptide
  Seed: GRLIQNSLTI
GHLIQNSLTL

SEQ ID NO: 30686 - protein, 10 aa, Artificial Sequence
  Description of Artificial Sequence: Synthetic peptide
  Seed: GRLIQNSLTI
GHLIQNSLTV

SEQ ID NO: 30687 - protein, 10 aa, Artificial Sequence
  Description of Artificial Sequence: Synthetic peptide
  Seed: GRLIQNSLTI
GILIQNSLTA

SEQ ID NO: 30688 - protein, 10 aa, Artificial Sequence
  Description of Artificial Sequence: Synthetic peptide
  Seed: GRLIQNSLTI
GILIQNSLTI

SEQ ID NO: 30689 - protein, 10 aa, Artificial Sequence
  Description of Artificial Sequence: Synthetic peptide
  Seed: GRLIQNSLTI
GILIQNSLTL

SEQ ID NO: 30690 - protein, 10 aa, Artificial Sequence
  Description of Artificial Sequence: Synthetic peptide
  Seed: GRLIQNSLTI
GILIQNSLTV

SEQ ID NO: 30691 - protein, 10 aa, Artificial Sequence
  Description of Artificial Sequence: Synthetic peptide
  Seed: GRLIQNSLTI
GCLIQNSLTV

SEQ ID NO: 30692 - protein, 10 aa, Artificial Sequence
  Description of Artificial Sequence: Synthetic peptide
  Seed: GRLIQNSLTI
GCLIQNSLTL

SEQ ID NO: 30693 - protein, 10 aa, Artificial Sequence
  Description of Artificial Sequence: Synthetic peptide
  Seed: GRLIQNSLTI
GCLIQNSLTI

SEQ ID NO: 30694 - protein, 10 aa, Artificial Sequence
  Description of Artificial Sequence: Synthetic peptide
  Seed: GRLIQNSLTI
GCLIQNSLTA

SEQ ID NO: 30695 - protein, 10 aa, Artificial Sequence
  Description of Artificial Sequence: Synthetic peptide
  Seed: GRLIQNSLTI
GALIQNSLTL

SEQ ID NO: 30696 - protein, 10 aa, Artificial Sequence
  Description of Artificial Sequence: Synthetic peptide
  Seed: GRLIQNSLTI
GALIQNSLTV

SEQ ID NO: 30697 - protein, 10 aa, Artificial Sequence
  Description of Artificial Sequence: Synthetic peptide
  Seed: GRLIQNSLTI
GRLIQNSLTA

SEQ ID NO: 30698 - protein, 10 aa, Artificial Sequence
  Description of Artificial Sequence: Synthetic peptide
  Seed: GRLIQNSLTI
GRLIQNSLTR

SEQ ID NO: 30699 - protein, 10 aa, Artificial Sequence
  Description of Artificial Sequence: Synthetic peptide
  Seed: GRLIQNSLTI
GRLIQNSLTL

SEQ ID NO: 30700 - protein, 10 aa, Artificial Sequence
  Description of Artificial Sequence: Synthetic peptide
  Seed: GRLIQNSLTI
GRLIQNSLTK

SEQ ID NO: 30701 - protein, 10 aa, Artificial Sequence
  Description of Artificial Sequence: Synthetic peptide
  Seed: GRLIQNSLTI
GRLIQNSLTM

SEQ ID NO: 30702 - protein, 10 aa, Artificial Sequence
  Description of Artificial Sequence: Synthetic peptide
  Seed: GRLIQNSLTI
GRLIQNSLTF

SEQ ID NO: 30703 - protein, 10 aa, Artificial Sequence
  Description of Artificial Sequence: Synthetic peptide
  Seed: GRLIQNSLTI
GRLIQNSLTW

SEQ ID NO: 30704 - protein, 10 aa, Artificial Sequence
  Description of Artificial Sequence: Synthetic peptide
  Seed: GRLIQNSLTI
GRLIQNSLTY

SEQ ID NO: 30705 - protein, 10 aa, Artificial Sequence
  Description of Artificial Sequence: Synthetic peptide
  Seed: GRLIQNSLTI
GNLIQNSLTA

SEQ ID NO: 30706 - protein, 10 aa, Artificial Sequence
  Description of Artificial Sequence: Synthetic peptide
  Seed: GRLIQNSLTI
GNLIQNSLTI

SEQ ID NO: 30707 - protein, 10 aa, Artificial Sequence
  Description of Artificial Sequence: Synthetic peptide
  Seed: GRLIQNSLTI
GNLIQNSLTL

SEQ ID NO: 30708 - protein, 10 aa, Artificial Sequence
  Description of Artificial Sequence: Synthetic peptide
  Seed: GRLIQNSLTI
GNLIQNSLTV

SEQ ID NO: 30709 - protein, 10 aa, Artificial Sequence
  Description of Artificial Sequence: Synthetic peptide
  Seed: GRLIQNSLTI
GDLIQNSLTA

SEQ ID NO: 30710 - protein, 10 aa, Artificial Sequence
  Description of Artificial Sequence: Synthetic peptide
  Seed: GRLIQNSLTI
GDLIQNSLTI

SEQ ID NO: 30711 - protein, 10 aa, Artificial Sequence
  Description of Artificial Sequence: Synthetic peptide
  Seed: GRLIQNSLTI
GDLIQNSLTL

SEQ ID NO: 30712 - protein, 10 aa, Artificial Sequence
  Description of Artificial Sequence: Synthetic peptide
  Seed: GRLIQNSLTI
GDLIQNSLTV

SEQ ID NO: 30713 - protein, 10 aa, Artificial Sequence
  Description of Artificial Sequence: Synthetic peptide
  Seed: GRLIQNSLTI
GLLIQNSLTA

SEQ ID NO: 30714 - protein, 10 aa, Artificial Sequence
  Description of Artificial Sequence: Synthetic peptide
  Seed: GRLIQNSLTI
GLLIQNSLTI

SEQ ID NO: 30715 - protein, 10 aa, Artificial Sequence
  Description of Artificial Sequence: Synthetic peptide
  Seed: GRLIQNSLTI
GLLIQNSLTL

SEQ ID NO: 30716 - protein, 10 aa, Artificial Sequence
  Description of Artificial Sequence: Synthetic peptide
  Seed: GRLIQNSLTI
GTLIQNSLTA

SEQ ID NO: 30717 - protein, 10 aa, Artificial Sequence
  Description of Artificial Sequence: Synthetic peptide
  Seed: GRLIQNSLTI
GTLIQNSLTL

SEQ ID NO: 30718 - protein, 10 aa, Artificial Sequence
  Description of Artificial Sequence: Synthetic peptide
  Seed: GRLIQNSLTI
GTLIQNSLTV

SEQ ID NO: 30719 - protein, 10 aa, Artificial Sequence
  Description of Artificial Sequence: Synthetic peptide
  Seed: GRLIQNSLTI
GWLIQNSLTA

SEQ ID NO: 30720 - protein, 10 aa, Artificial Sequence
  Description of Artificial Sequence: Synthetic peptide
  Seed: GRLIQNSLTI
GWLIQNSLTI

SEQ ID NO: 30721 - protein, 10 aa, Artificial Sequence
  Description of Artificial Sequence: Synthetic peptide
  Seed: GRLIQNSLTI
GWLIQNSLTL

SEQ ID NO: 30722 - protein, 10 aa, Artificial Sequence
  Description of Artificial Sequence: Synthetic peptide
  Seed: GRLIQNSLTI
GWLIQNSLTV

SEQ ID NO: 30723 - protein, 10 aa, Artificial Sequence
  Description of Artificial Sequence: Synthetic peptide
  Seed: GRLIQNSLTI
GYLIQNSLTA

SEQ ID NO: 30724 - protein, 10 aa, Artificial Sequence
  Description of Artificial Sequence: Synthetic peptide
  Seed: GRLIQNSLTI
GYLIQNSLTI

SEQ ID NO: 30725 - protein, 10 aa, Artificial Sequence
  Description of Artificial Sequence: Synthetic peptide
  Seed: GRLIQNSLTI
GYLIQNSLTL

SEQ ID NO: 30726 - protein, 10 aa, Artificial Sequence
  Description of Artificial Sequence: Synthetic peptide
  Seed: GRLIQNSLTI
GYLIQNSLTM

SEQ ID NO: 30727 - protein, 10 aa, Artificial Sequence
  Description of Artificial Sequence: Synthetic peptide
  Seed: GRLIQNSLTI
GYLIQNSLTV

SEQ ID NO: 30728 - protein, 10 aa, Artificial Sequence
  Description of Artificial Sequence: Synthetic peptide
  Seed: GRLIQNSLTI
GVLIQNSLTA

SEQ ID NO: 30729 - protein, 10 aa, Artificial Sequence
  Description of Artificial Sequence: Synthetic peptide
  Seed: GRLIQNSLTI
GVLIQNSLTI

SEQ ID NO: 30730 - protein, 10 aa, Artificial Sequence
  Description of Artificial Sequence: Synthetic peptide
  Seed: GRLIQNSLTI
GVLIQNSLTL

SEQ ID NO: 30731 - protein, 10 aa, Artificial Sequence
  Description of Artificial Sequence: Synthetic peptide
  Seed: GRLIQNSLTI
GVLIQNSLTV

SEQ ID NO: 30732 - protein, 9 aa, Artificial Sequence
  Description of Artificial Sequence: Synthetic peptide
  Seed: GRMIGGIGR
GRMIGGIGA

SEQ ID NO: 30733 - protein, 9 aa, Artificial Sequence
  Description of Artificial Sequence: Synthetic peptide
  Seed: GRMIGGIGR
GRMIGGIGH

SEQ ID NO: 30734 - protein, 9 aa, Artificial Sequence
  Description of Artificial Sequence: Synthetic peptide
  Seed: GRMIGGIGR
GRMIGGIGI

SEQ ID NO: 30735 - protein, 9 aa, Artificial Sequence
  Description of Artificial Sequence: Synthetic peptide
  Seed: GRMIGGIGR
GRMIGGIGL

SEQ ID NO: 30736 - protein, 10 aa, Artificial Sequence
  Description of Artificial Sequence: Synthetic peptide
  Seed: GRLIQNSLTI
GTLIQNSLTI

SEQ ID NO: 30737 - protein, 10 aa, Artificial Sequence
  Description of Artificial Sequence: Synthetic peptide
  Seed: GRLIQNSLTI
GSLIQNSLTV

SEQ ID NO: 30738 - protein, 10 aa, Artificial Sequence
  Description of Artificial Sequence: Synthetic peptide
  Seed: GRLIQNSLTI
GLLIQNSLTV

SEQ ID NO: 30739 - protein, 10 aa, Artificial Sequence
  Description of Artificial Sequence: Synthetic peptide
  Seed: GRLIQNSLTI
GSLIQNSLTL

SEQ ID NO: 30740 - protein, 10 aa, Artificial Sequence
  Description of Artificial Sequence: Synthetic peptide
  Seed: GRLIQNSLTI
GKLIQNSLTA

SEQ ID NO: 30741 - protein, 10 aa, Artificial Sequence
  Description of Artificial Sequence: Synthetic peptide
  Seed: GRLIQNSLTI
GKLIQNSLTI

SEQ ID NO: 30742 - protein, 10 aa, Artificial Sequence
  Description of Artificial Sequence: Synthetic peptide
  Seed: GRLIQNSLTI
GKLIQNSLTL

SEQ ID NO: 30743 - protein, 10 aa, Artificial Sequence
  Description of Artificial Sequence: Synthetic peptide
  Seed: GRLIQNSLTI
GKLIQNSLTV

SEQ ID NO: 30744 - protein, 10 aa, Artificial Sequence
  Description of Artificial Sequence: Synthetic peptide
  Seed: GRLIQNSLTI
GMLIQNSLTA

SEQ ID NO: 30745 - protein, 10 aa, Artificial Sequence
  Description of Artificial Sequence: Synthetic peptide
  Seed: GRLIQNSLTI
GMLIQNSLTI

SEQ ID NO: 30746 - protein, 10 aa, Artificial Sequence
  Description of Artificial Sequence: Synthetic peptide
  Seed: GRLIQNSLTI
GMLIQNSLTL

SEQ ID NO: 30747 - protein, 10 aa, Artificial Sequence
  Description of Artificial Sequence: Synthetic peptide
  Seed: GRLIQNSLTI
GMLIQNSLTV

SEQ ID NO: 30748 - protein, 10 aa, Artificial Sequence
  Description of Artificial Sequence: Synthetic peptide
  Seed: GRLIQNSLTI
GFLIQNSLTA

SEQ ID NO: 30749 - protein, 10 aa, Artificial Sequence
  Description of Artificial Sequence: Synthetic peptide
  Seed: GRLIQNSLTI
GFLIQNSLTI

SEQ ID NO: 30750 - protein, 10 aa, Artificial Sequence
  Description of Artificial Sequence: Synthetic peptide
  Seed: GRLIQNSLTI
GFLIQNSLTL

SEQ ID NO: 30751 - protein, 10 aa, Artificial Sequence
  Description of Artificial Sequence: Synthetic peptide
  Seed: GRLIQNSLTI
GFLIQNSLTM

SEQ ID NO: 30752 - protein, 10 aa, Artificial Sequence
  Description of Artificial Sequence: Synthetic peptide
  Seed: GRLIQNSLTI
GFLIQNSLTV

SEQ ID NO: 30753 - protein, 10 aa, Artificial Sequence
  Description of Artificial Sequence: Synthetic peptide
  Seed: GRLIQNSLTI
GPLIQNSLTA

SEQ ID NO: 30754 - protein, 10 aa, Artificial Sequence
  Description of Artificial Sequence: Synthetic peptide
  Seed: GRLIQNSLTI
GPLIQNSLTI

SEQ ID NO: 30755 - protein, 10 aa, Artificial Sequence
  Description of Artificial Sequence: Synthetic peptide
  Seed: GRLIQNSLTI
GPLIQNSLTL

SEQ ID NO: 30756 - protein, 10 aa, Artificial Sequence
  Description of Artificial Sequence: Synthetic peptide
  Seed: GRLIQNSLTI
GPLIQNSLTV

SEQ ID NO: 30757 - protein, 10 aa, Artificial Sequence
  Description of Artificial Sequence: Synthetic peptide
  Seed: GRLIQNSLTI
GSLIQNSLTA

SEQ ID NO: 30758 - protein, 10 aa, Artificial Sequence
  Description of Artificial Sequence: Synthetic peptide
  Seed: GRLIQNSLTI
GSLIQNSLTI

SEQ ID NO: 30759 - protein, 10 aa, Artificial Sequence
  Description of Artificial Sequence: Synthetic peptide
  Seed: GRMVGGIGRF
GAMVGGIGRF

SEQ ID NO: 30760 - protein, 10 aa, Artificial Sequence
  Description of Artificial Sequence: Synthetic peptide
  Seed: GRMVGGIGRF
GRMVGGIGRA

SEQ ID NO: 30761 - protein, 10 aa, Artificial Sequence
  Description of Artificial Sequence: Synthetic peptide
  Seed: GRRTRIAYER
GTRTRIAYEI

SEQ ID NO: 30762 - protein, 10 aa, Artificial Sequence
  Description of Artificial Sequence: Synthetic peptide
  Seed: GRRTRIAYER
GHRTRIAYER

SEQ ID NO: 30763 - protein, 10 aa, Artificial Sequence
  Description of Artificial Sequence: Synthetic peptide
  Seed: GRRTRIAYER
GERTRIAYEF

SEQ ID NO: 30764 - protein, 10 aa, Artificial Sequence
  Description of Artificial Sequence: Synthetic peptide
  Seed: GRRTRIAYER
GERTRIAYEY

SEQ ID NO: 30765 - protein, 10 aa, Artificial Sequence
  Description of Artificial Sequence: Synthetic peptide
  Seed: GRRTRIAYER
GGRTRIAYER

SEQ ID NO: 30766 - protein, 10 aa, Artificial Sequence
  Description of Artificial Sequence: Synthetic peptide
  Seed: GRRTRIAYER
GGRTRIAYEI

SEQ ID NO: 30767 - protein, 10 aa, Artificial Sequence
  Description of Artificial Sequence: Synthetic peptide
  Seed: GRRTRIAYER
GGRTRIAYEL

SEQ ID NO: 30768 - protein, 10 aa, Artificial Sequence
  Description of Artificial Sequence: Synthetic peptide
  Seed: GRRTRIAYER
GGRTRIAYEK

SEQ ID NO: 30769 - protein, 10 aa, Artificial Sequence
  Description of Artificial Sequence: Synthetic peptide
  Seed: GRRTRIAYER
GGRTRIAYEM

SEQ ID NO: 30770 - protein, 10 aa, Artificial Sequence
  Description of Artificial Sequence: Synthetic peptide
  Seed: GRRTRIAYER
GGRTRIAYEF

SEQ ID NO: 30771 - protein, 10 aa, Artificial Sequence
  Description of Artificial Sequence: Synthetic peptide
  Seed: GRRTRIAYER
GGRTRIAYEY

SEQ ID NO: 30772 - protein, 10 aa, Artificial Sequence
  Description of Artificial Sequence: Synthetic peptide
  Seed: GRRTRIAYER
GHRTRIAYEI

SEQ ID NO: 30773 - protein, 10 aa, Artificial Sequence
  Description of Artificial Sequence: Synthetic peptide
  Seed: GRRTRIAYER
GIRTRIAYEF

SEQ ID NO: 30774 - protein, 10 aa, Artificial Sequence
  Description of Artificial Sequence: Synthetic peptide
  Seed: GRRTRIAYER
GHRTRIAYEL

SEQ ID NO: 30775 - protein, 10 aa, Artificial Sequence
  Description of Artificial Sequence: Synthetic peptide
  Seed: GRRTRIAYER
GHRTRIAYEK

SEQ ID NO: 30776 - protein, 10 aa, Artificial Sequence
  Description of Artificial Sequence: Synthetic peptide
  Seed: GRRTRIAYER
GHRTRIAYEM

SEQ ID NO: 30777 - protein, 10 aa, Artificial Sequence
  Description of Artificial Sequence: Synthetic peptide
  Seed: GRRTRIAYER
GHRTRIAYEF

SEQ ID NO: 30778 - protein, 10 aa, Artificial Sequence
  Description of Artificial Sequence: Synthetic peptide
  Seed: GRRTRIAYER
GHRTRIAYEY

SEQ ID NO: 30779 - protein, 10 aa, Artificial Sequence
  Description of Artificial Sequence: Synthetic peptide
  Seed: GRRTRIAYER
GIRTRIAYER

SEQ ID NO: 30780 - protein, 10 aa, Artificial Sequence
  Description of Artificial Sequence: Synthetic peptide
  Seed: GRRTRIAYER
GIRTRIAYEI

SEQ ID NO: 30781 - protein, 10 aa, Artificial Sequence
  Description of Artificial Sequence: Synthetic peptide
  Seed: GRRTRIAYER
GIRTRIAYEL

SEQ ID NO: 30782 - protein, 10 aa, Artificial Sequence
  Description of Artificial Sequence: Synthetic peptide
  Seed: GRRTRIAYER
GIRTRIAYEK

SEQ ID NO: 30783 - protein, 10 aa, Artificial Sequence
  Description of Artificial Sequence: Synthetic peptide
  Seed: GRRTRIAYER
GERTRIAYEM

SEQ ID NO: 30784 - protein, 10 aa, Artificial Sequence
  Description of Artificial Sequence: Synthetic peptide
  Seed: GRRTRIAYER
GERTRIAYEK

SEQ ID NO: 30785 - protein, 10 aa, Artificial Sequence
  Description of Artificial Sequence: Synthetic peptide
  Seed: GRRTRIAYER
GERTRIAYEL

SEQ ID NO: 30786 - protein, 10 aa, Artificial Sequence
  Description of Artificial Sequence: Synthetic peptide
  Seed: GRRTRIAYER
GERTRIAYEI

SEQ ID NO: 30787 - protein, 10 aa, Artificial Sequence
  Description of Artificial Sequence: Synthetic peptide
  Seed: GRRTRIAYER
GDRTRIAYEK

SEQ ID NO: 30788 - protein, 10 aa, Artificial Sequence
  Description of Artificial Sequence: Synthetic peptide
  Seed: GRRTRIAYER
GDRTRIAYEM

SEQ ID NO: 30789 - protein, 10 aa, Artificial Sequence
  Description of Artificial Sequence: Synthetic peptide
  Seed: GRRTRIAYER
GDRTRIAYEF

SEQ ID NO: 30790 - protein, 10 aa, Artificial Sequence
  Description of Artificial Sequence: Synthetic peptide
  Seed: GRRTRIAYER
GDRTRIAYEY

SEQ ID NO: 30791 - protein, 10 aa, Artificial Sequence
  Description of Artificial Sequence: Synthetic peptide
  Seed: GRRTRIAYER
GCRTRIAYER

SEQ ID NO: 30792 - protein, 10 aa, Artificial Sequence
  Description of Artificial Sequence: Synthetic peptide
  Seed: GRRTRIAYER
GCRTRIAYEI

SEQ ID NO: 30793 - protein, 10 aa, Artificial Sequence
  Description of Artificial Sequence: Synthetic peptide
  Seed: GRRTRIAYER
GCRTRIAYEL

SEQ ID NO: 30794 - protein, 10 aa, Artificial Sequence
  Description of Artificial Sequence: Synthetic peptide
  Seed: GRRTRIAYER
GCRTRIAYEK

SEQ ID NO: 30795 - protein, 10 aa, Artificial Sequence
  Description of Artificial Sequence: Synthetic peptide
  Seed: GRRTRIAYER
GCRTRIAYEM

SEQ ID NO: 30796 - protein, 10 aa, Artificial Sequence
  Description of Artificial Sequence: Synthetic peptide
  Seed: GRRTRIAYER
GCRTRIAYEF

SEQ ID NO: 30797 - protein, 10 aa, Artificial Sequence
  Description of Artificial Sequence: Synthetic peptide
  Seed: GRRTRIAYER
GCRTRIAYEY

SEQ ID NO: 30798 - protein, 10 aa, Artificial Sequence
  Description of Artificial Sequence: Synthetic peptide
  Seed: GRRTRIAYER
GQRTRIAYER

SEQ ID NO: 30799 - protein, 10 aa, Artificial Sequence
  Description of Artificial Sequence: Synthetic peptide
  Seed: GRRTRIAYER
GQRTRIAYEI

SEQ ID NO: 30800 - protein, 10 aa, Artificial Sequence
  Description of Artificial Sequence: Synthetic peptide
  Seed: GRRTRIAYER
GQRTRIAYEL

SEQ ID NO: 30801 - protein, 10 aa, Artificial Sequence
  Description of Artificial Sequence: Synthetic peptide
  Seed: GRRTRIAYER
GQRTRIAYEK

SEQ ID NO: 30802 - protein, 10 aa, Artificial Sequence
  Description of Artificial Sequence: Synthetic peptide
  Seed: GRRTRIAYER
GQRTRIAYEM

SEQ ID NO: 30803 - protein, 10 aa, Artificial Sequence
  Description of Artificial Sequence: Synthetic peptide
  Seed: GRRTRIAYER
GQRTRIAYEF

SEQ ID NO: 30804 - protein, 10 aa, Artificial Sequence
  Description of Artificial Sequence: Synthetic peptide
  Seed: GRRTRIAYER
GQRTRIAYEY

SEQ ID NO: 30805 - protein, 10 aa, Artificial Sequence
  Description of Artificial Sequence: Synthetic peptide
  Seed: GRRTRIAYER
GERTRIAYER

SEQ ID NO: 30806 - protein, 10 aa, Artificial Sequence
  Description of Artificial Sequence: Synthetic peptide
  Seed: GRRTRIAYER
GIRTRIAYEM

SEQ ID NO: 30807 - protein, 10 aa, Artificial Sequence
  Description of Artificial Sequence: Synthetic peptide
  Seed: GRRTRIAYER
GIRTRIAYEY

SEQ ID NO: 30808 - protein, 10 aa, Artificial Sequence
  Description of Artificial Sequence: Synthetic peptide
  Seed: GRMVGGIGRF
GRMVGGIGRR

SEQ ID NO: 30809 - protein, 10 aa, Artificial Sequence
  Description of Artificial Sequence: Synthetic peptide
  Seed: GRRTRIAYER
GPRTRIAYEM

SEQ ID NO: 30810 - protein, 10 aa, Artificial Sequence
  Description of Artificial Sequence: Synthetic peptide
  Seed: GRRTRIAYER
GFRTRIAYEL

SEQ ID NO: 30811 - protein, 10 aa, Artificial Sequence
  Description of Artificial Sequence: Synthetic peptide
  Seed: GRRTRIAYER
GFRTRIAYEK

SEQ ID NO: 30812 - protein, 10 aa, Artificial Sequence
  Description of Artificial Sequence: Synthetic peptide
  Seed: GRRTRIAYER
GFRTRIAYEM

SEQ ID NO: 30813 - protein, 10 aa, Artificial Sequence
  Description of Artificial Sequence: Synthetic peptide
  Seed: GRRTRIAYER
GFRTRIAYEF

SEQ ID NO: 30814 - protein, 10 aa, Artificial Sequence
  Description of Artificial Sequence: Synthetic peptide
  Seed: GRRTRIAYER
GFRTRIAYEY

SEQ ID NO: 30815 - protein, 10 aa, Artificial Sequence
  Description of Artificial Sequence: Synthetic peptide
  Seed: GRRTRIAYER
GPRTRIAYER

SEQ ID NO: 30816 - protein, 10 aa, Artificial Sequence
  Description of Artificial Sequence: Synthetic peptide
  Seed: GRRTRIAYER
GPRTRIAYEI

SEQ ID NO: 30817 - protein, 10 aa, Artificial Sequence
  Description of Artificial Sequence: Synthetic peptide
  Seed: GRRTRIAYER
GPRTRIAYEL

SEQ ID NO: 30818 - protein, 10 aa, Artificial Sequence
  Description of Artificial Sequence: Synthetic peptide
  Seed: GRRTRIAYER
GPRTRIAYEK

SEQ ID NO: 30819 - protein, 10 aa, Artificial Sequence
  Description of Artificial Sequence: Synthetic peptide
  Seed: GRRTRIAYER
GPRTRIAYEF

SEQ ID NO: 30820 - protein, 10 aa, Artificial Sequence
  Description of Artificial Sequence: Synthetic peptide
  Seed: GRRTRIAYER
GLRTRIAYER

SEQ ID NO: 30821 - protein, 10 aa, Artificial Sequence
  Description of Artificial Sequence: Synthetic peptide
  Seed: GRRTRIAYER
GPRTRIAYEY

SEQ ID NO: 30822 - protein, 10 aa, Artificial Sequence
  Description of Artificial Sequence: Synthetic peptide
  Seed: GRRTRIAYER
GSRTRIAYER

SEQ ID NO: 30823 - protein, 10 aa, Artificial Sequence
  Description of Artificial Sequence: Synthetic peptide
  Seed: GRRTRIAYER
GSRTRIAYEI

SEQ ID NO: 30824 - protein, 10 aa, Artificial Sequence
  Description of Artificial Sequence: Synthetic peptide
  Seed: GRRTRIAYER
GSRTRIAYEL

SEQ ID NO: 30825 - protein, 10 aa, Artificial Sequence
  Description of Artificial Sequence: Synthetic peptide
  Seed: GRRTRIAYER
GSRTRIAYEK

SEQ ID NO: 30826 - protein, 10 aa, Artificial Sequence
  Description of Artificial Sequence: Synthetic peptide
  Seed: GRRTRIAYER
GSRTRIAYEM

SEQ ID NO: 30827 - protein, 10 aa, Artificial Sequence
  Description of Artificial Sequence: Synthetic peptide
  Seed: GRRTRIAYER
GSRTRIAYEF

SEQ ID NO: 30828 - protein, 10 aa, Artificial Sequence
  Description of Artificial Sequence: Synthetic peptide
  Seed: GRRTRIAYER
GSRTRIAYEY

SEQ ID NO: 30829 - protein, 10 aa, Artificial Sequence
  Description of Artificial Sequence: Synthetic peptide
  Seed: GRRTRIAYER
GTRTRIAYER

SEQ ID NO: 30830 - protein, 10 aa, Artificial Sequence
  Description of Artificial Sequence: Synthetic peptide
  Seed: GRRTRIAYER
GFRTRIAYEI

SEQ ID NO: 30831 - protein, 10 aa, Artificial Sequence
  Description of Artificial Sequence: Synthetic peptide
  Seed: GRRTRIAYER
GFRTRIAYER

SEQ ID NO: 30832 - protein, 10 aa, Artificial Sequence
  Description of Artificial Sequence: Synthetic peptide
  Seed: GRRTRIAYER
GMRTRIAYEV

SEQ ID NO: 30833 - protein, 10 aa, Artificial Sequence
  Description of Artificial Sequence: Synthetic peptide
  Seed: GRRTRIAYER
GMRTRIAYEY

SEQ ID NO: 30834 - protein, 10 aa, Artificial Sequence
  Description of Artificial Sequence: Synthetic peptide
  Seed: GRRTRIAYER
GLRTRIAYEI

SEQ ID NO: 30835 - protein, 10 aa, Artificial Sequence
  Description of Artificial Sequence: Synthetic peptide
  Seed: GRRTRIAYER
GLRTRIAYEL

SEQ ID NO: 30836 - protein, 10 aa, Artificial Sequence
  Description of Artificial Sequence: Synthetic peptide
  Seed: GRRTRIAYER
GLRTRIAYEK

SEQ ID NO: 30837 - protein, 10 aa, Artificial Sequence
  Description of Artificial Sequence: Synthetic peptide
  Seed: GRRTRIAYER
GLRTRIAYEM

SEQ ID NO: 30838 - protein, 10 aa, Artificial Sequence
  Description of Artificial Sequence: Synthetic peptide
  Seed: GRRTRIAYER
GLRTRIAYEF

SEQ ID NO: 30839 - protein, 10 aa, Artificial Sequence
  Description of Artificial Sequence: Synthetic peptide
  Seed: GRRTRIAYER
GLRTRIAYEY

SEQ ID NO: 30840 - protein, 10 aa, Artificial Sequence
  Description of Artificial Sequence: Synthetic peptide
  Seed: GRRTRIAYER
GKRTRIAYER

SEQ ID NO: 30841 - protein, 10 aa, Artificial Sequence
  Description of Artificial Sequence: Synthetic peptide
  Seed: GRRTRIAYER
GKRTRIAYEI

SEQ ID NO: 30842 - protein, 10 aa, Artificial Sequence
  Description of Artificial Sequence: Synthetic peptide
  Seed: GRRTRIAYER
GKRTRIAYEL

SEQ ID NO: 30843 - protein, 10 aa, Artificial Sequence
  Description of Artificial Sequence: Synthetic peptide
  Seed: GRRTRIAYER
GKRTRIAYEK

SEQ ID NO: 30844 - protein, 10 aa, Artificial Sequence
  Description of Artificial Sequence: Synthetic peptide
  Seed: GRRTRIAYER
GKRTRIAYEM

SEQ ID NO: 30845 - protein, 10 aa, Artificial Sequence
  Description of Artificial Sequence: Synthetic peptide
  Seed: GRRTRIAYER
GKRTRIAYEF

SEQ ID NO: 30846 - protein, 10 aa, Artificial Sequence
  Description of Artificial Sequence: Synthetic peptide
  Seed: GRRTRIAYER
GKRTRIAYEY

SEQ ID NO: 30847 - protein, 10 aa, Artificial Sequence
  Description of Artificial Sequence: Synthetic peptide
  Seed: GRRTRIAYER
GMRTRIAYER

SEQ ID NO: 30848 - protein, 10 aa, Artificial Sequence
  Description of Artificial Sequence: Synthetic peptide
  Seed: GRRTRIAYER
GMRTRIAYEI

SEQ ID NO: 30849 - protein, 10 aa, Artificial Sequence
  Description of Artificial Sequence: Synthetic peptide
  Seed: GRRTRIAYER
GMRTRIAYEL

SEQ ID NO: 30850 - protein, 10 aa, Artificial Sequence
  Description of Artificial Sequence: Synthetic peptide
  Seed: GRRTRIAYER
GMRTRIAYEK

SEQ ID NO: 30851 - protein, 10 aa, Artificial Sequence
  Description of Artificial Sequence: Synthetic peptide
  Seed: GRRTRIAYER
GMRTRIAYEM

SEQ ID NO: 30852 - protein, 10 aa, Artificial Sequence
  Description of Artificial Sequence: Synthetic peptide
  Seed: GRRTRIAYER
GMRTRIAYEF

SEQ ID NO: 30853 - protein, 10 aa, Artificial Sequence
  Description of Artificial Sequence: Synthetic peptide
  Seed: GRRTRIAYER
GDRTRIAYEL

SEQ ID NO: 30854 - protein, 10 aa, Artificial Sequence
  Description of Artificial Sequence: Synthetic peptide
  Seed: GRRTRIAYER
GDRTRIAYEI

SEQ ID NO: 30855 - protein, 10 aa, Artificial Sequence
  Description of Artificial Sequence: Synthetic peptide
  Seed: GRRTRIAYER
GDRTRIAYER

SEQ ID NO: 30856 - protein, 10 aa, Artificial Sequence
  Description of Artificial Sequence: Synthetic peptide
  Seed: GRMVGGIGRF
GMMVGGIGRF

SEQ ID NO: 30857 - protein, 10 aa, Artificial Sequence
  Description of Artificial Sequence: Synthetic peptide
  Seed: GRMVGGIGRF
GHMVGGIGRY

SEQ ID NO: 30858 - protein, 10 aa, Artificial Sequence
  Description of Artificial Sequence: Synthetic peptide
  Seed: GRMVGGIGRF
GIMVGGIGRF

SEQ ID NO: 30859 - protein, 10 aa, Artificial Sequence
  Description of Artificial Sequence: Synthetic peptide
  Seed: GRMVGGIGRF
GIMVGGIGRY

SEQ ID NO: 30860 - protein, 10 aa, Artificial Sequence
  Description of Artificial Sequence: Synthetic peptide
  Seed: GRMVGGIGRF
GLMVGGIGRF

SEQ ID NO: 30861 - protein, 10 aa, Artificial Sequence
  Description of Artificial Sequence: Synthetic peptide
  Seed: GRMVGGIGRF
GLMVGGIGRY

SEQ ID NO: 30862 - protein, 10 aa, Artificial Sequence
  Description of Artificial Sequence: Synthetic peptide
  Seed: GRMVGGIGRF
GKMVGGIGRM

SEQ ID NO: 30863 - protein, 10 aa, Artificial Sequence
  Description of Artificial Sequence: Synthetic peptide
  Seed: GRMVGGIGRF
GKMVGGIGRY

SEQ ID NO: 30864 - protein, 10 aa, Artificial Sequence
  Description of Artificial Sequence: Synthetic peptide
  Seed: GRMVGGIGRF
GMMVGGIGRM

SEQ ID NO: 30865 - protein, 10 aa, Artificial Sequence
  Description of Artificial Sequence: Synthetic peptide
  Seed: GRMVGGIGRF
GMMVGGIGRY

SEQ ID NO: 30866 - protein, 10 aa, Artificial Sequence
  Description of Artificial Sequence: Synthetic peptide
  Seed: GRRTRIAYER
GNRTRIAYEY

SEQ ID NO: 30867 - protein, 10 aa, Artificial Sequence
  Description of Artificial Sequence: Synthetic peptide
  Seed: GRMVGGIGRF
GFMVGGIGRF

SEQ ID NO: 30868 - protein, 10 aa, Artificial Sequence
  Description of Artificial Sequence: Synthetic peptide
  Seed: GRMVGGIGRF
GFMVGGIGRY

SEQ ID NO: 30869 - protein, 10 aa, Artificial Sequence
  Description of Artificial Sequence: Synthetic peptide
  Seed: GRMVGGIGRF
GPMVGGIGRF

SEQ ID NO: 30870 - protein, 10 aa, Artificial Sequence
  Description of Artificial Sequence: Synthetic peptide
  Seed: GRMVGGIGRF
GPMVGGIGRY

SEQ ID NO: 30871 - protein, 10 aa, Artificial Sequence
  Description of Artificial Sequence: Synthetic peptide
  Seed: GRMVGGIGRF
GSMVGGIGRF

SEQ ID NO: 30872 - protein, 10 aa, Artificial Sequence
  Description of Artificial Sequence: Synthetic peptide
  Seed: GRMVGGIGRF
GSMVGGIGRY

SEQ ID NO: 30873 - protein, 10 aa, Artificial Sequence
  Description of Artificial Sequence: Synthetic peptide
  Seed: GRMVGGIGRF
GTMVGGIGRF

SEQ ID NO: 30874 - protein, 10 aa, Artificial Sequence
  Description of Artificial Sequence: Synthetic peptide
  Seed: GRMVGGIGRF
GTMVGGIGRY

SEQ ID NO: 30875 - protein, 10 aa, Artificial Sequence
  Description of Artificial Sequence: Synthetic peptide
  Seed: GRMVGGIGRF
GWMVGGIGRF

SEQ ID NO: 30876 - protein, 10 aa, Artificial Sequence
  Description of Artificial Sequence: Synthetic peptide
  Seed: GRMVGGIGRF
GHMVGGIGRF

SEQ ID NO: 30877 - protein, 10 aa, Artificial Sequence
  Description of Artificial Sequence: Synthetic peptide
  Seed: GRMVGGIGRF
GGMVGGIGRY

SEQ ID NO: 30878 - protein, 10 aa, Artificial Sequence
  Description of Artificial Sequence: Synthetic peptide
  Seed: GRMVGGIGRF
GEMVGGIGRY

SEQ ID NO: 30879 - protein, 10 aa, Artificial Sequence
  Description of Artificial Sequence: Synthetic peptide
  Seed: GRMVGGIGRF
GRMVGGIGRH

SEQ ID NO: 30880 - protein, 10 aa, Artificial Sequence
  Description of Artificial Sequence: Synthetic peptide
  Seed: GRMVGGIGRF
GRMVGGIGRI

SEQ ID NO: 30881 - protein, 10 aa, Artificial Sequence
  Description of Artificial Sequence: Synthetic peptide
  Seed: GRMVGGIGRF
GRMVGGIGRL

SEQ ID NO: 30882 - protein, 10 aa, Artificial Sequence
  Description of Artificial Sequence: Synthetic peptide
  Seed: GRMVGGIGRF
GRMVGGIGRK

SEQ ID NO: 30883 - protein, 10 aa, Artificial Sequence
  Description of Artificial Sequence: Synthetic peptide
  Seed: GRMVGGIGRF
GRMVGGIGRM

SEQ ID NO: 30884 - protein, 10 aa, Artificial Sequence
  Description of Artificial Sequence: Synthetic peptide
  Seed: GRMVGGIGRF
GRMVGGIGRW

SEQ ID NO: 30885 - protein, 10 aa, Artificial Sequence
  Description of Artificial Sequence: Synthetic peptide
  Seed: GRMVGGIGRF
GRMVGGIGRY

SEQ ID NO: 30886 - protein, 10 aa, Artificial Sequence
  Description of Artificial Sequence: Synthetic peptide
  Seed: GRMVGGIGRF
GRMVGGIGRV

SEQ ID NO: 30887 - protein, 10 aa, Artificial Sequence
  Description of Artificial Sequence: Synthetic peptide
  Seed: GRMVGGIGRF
GNMVGGIGRF

SEQ ID NO: 30888 - protein, 10 aa, Artificial Sequence
  Description of Artificial Sequence: Synthetic peptide
  Seed: GRMVGGIGRF
GNMVGGIGRY

SEQ ID NO: 30889 - protein, 10 aa, Artificial Sequence
  Description of Artificial Sequence: Synthetic peptide
  Seed: GRMVGGIGRF
GDMVGGIGRF

SEQ ID NO: 30890 - protein, 10 aa, Artificial Sequence
  Description of Artificial Sequence: Synthetic peptide
  Seed: GRMVGGIGRF
GDMVGGIGRY

SEQ ID NO: 30891 - protein, 10 aa, Artificial Sequence
  Description of Artificial Sequence: Synthetic peptide
  Seed: GRMVGGIGRF
GCMVGGIGRF

SEQ ID NO: 30892 - protein, 10 aa, Artificial Sequence
  Description of Artificial Sequence: Synthetic peptide
  Seed: GRMVGGIGRF
GCMVGGIGRY

SEQ ID NO: 30893 - protein, 10 aa, Artificial Sequence
  Description of Artificial Sequence: Synthetic peptide
  Seed: GRMVGGIGRF
GQMVGGIGRL

SEQ ID NO: 30894 - protein, 10 aa, Artificial Sequence
  Description of Artificial Sequence: Synthetic peptide
  Seed: GRMVGGIGRF
GQMVGGIGRM

SEQ ID NO: 30895 - protein, 10 aa, Artificial Sequence
  Description of Artificial Sequence: Synthetic peptide
  Seed: GRMVGGIGRF
GQMVGGIGRF

SEQ ID NO: 30896 - protein, 10 aa, Artificial Sequence
  Description of Artificial Sequence: Synthetic peptide
  Seed: GRMVGGIGRF
GQMVGGIGRY

SEQ ID NO: 30897 - protein, 10 aa, Artificial Sequence
  Description of Artificial Sequence: Synthetic peptide
  Seed: GRMVGGIGRF
GEMVGGIGRF

SEQ ID NO: 30898 - protein, 10 aa, Artificial Sequence
  Description of Artificial Sequence: Synthetic peptide
  Seed: GRMVGGIGRF
GWMVGGIGRY

SEQ ID NO: 30899 - protein, 10 aa, Artificial Sequence
  Description of Artificial Sequence: Synthetic peptide
  Seed: GRMVGGIGRF
GYMVGGIGRF

SEQ ID NO: 30900 - protein, 10 aa, Artificial Sequence
  Description of Artificial Sequence: Synthetic peptide
  Seed: GRMVGGIGRF
GYMVGGIGRY

SEQ ID NO: 30901 - protein, 11 aa, Artificial Sequence
  Description of Artificial Sequence: Synthetic peptide
  Seed: GRMVGGIGRFY
GVMVGGIGRFY

SEQ ID NO: 30902 - protein, 10 aa, Artificial Sequence
  Description of Artificial Sequence: Synthetic peptide
  Seed: GRRTRIAYER
GARTRIAYEI

SEQ ID NO: 30903 - protein, 10 aa, Artificial Sequence
  Description of Artificial Sequence: Synthetic peptide
  Seed: GRRTRIAYER
GARTRIAYEL

SEQ ID NO: 30904 - protein, 10 aa, Artificial Sequence
  Description of Artificial Sequence: Synthetic peptide
  Seed: GRRTRIAYER
GARTRIAYEK

SEQ ID NO: 30905 - protein, 10 aa, Artificial Sequence
  Description of Artificial Sequence: Synthetic peptide
  Seed: GRRTRIAYER
GARTRIAYEM

SEQ ID NO: 30906 - protein, 10 aa, Artificial Sequence
  Description of Artificial Sequence: Synthetic peptide
  Seed: GRRTRIAYER
GARTRIAYEF

SEQ ID NO: 30907 - protein, 10 aa, Artificial Sequence
  Description of Artificial Sequence: Synthetic peptide
  Seed: GRRTRIAYER
GARTRIAYEY

SEQ ID NO: 30908 - protein, 10 aa, Artificial Sequence
  Description of Artificial Sequence: Synthetic peptide
  Seed: GRRTRIAYER
GRRTRIAYEI

SEQ ID NO: 30909 - protein, 10 aa, Artificial Sequence
  Description of Artificial Sequence: Synthetic peptide
  Seed: GRRTRIAYER
GRRTRIAYEL

SEQ ID NO: 30910 - protein, 10 aa, Artificial Sequence
  Description of Artificial Sequence: Synthetic peptide
  Seed: GRRTRIAYER
GRRTRIAYEK

SEQ ID NO: 30911 - protein, 10 aa, Artificial Sequence
  Description of Artificial Sequence: Synthetic peptide
  Seed: GRRTRIAYER
GRRTRIAYEM

SEQ ID NO: 30912 - protein, 10 aa, Artificial Sequence
  Description of Artificial Sequence: Synthetic peptide
  Seed: GRRTRIAYER
GRRTRIAYEF

SEQ ID NO: 30913 - protein, 10 aa, Artificial Sequence
  Description of Artificial Sequence: Synthetic peptide
  Seed: GRRTRIAYER
GRRTRIAYEY

SEQ ID NO: 30914 - protein, 10 aa, Artificial Sequence
  Description of Artificial Sequence: Synthetic peptide
  Seed: GRRTRIAYER
GRRTRIAYEV

SEQ ID NO: 30915 - protein, 10 aa, Artificial Sequence
  Description of Artificial Sequence: Synthetic peptide
  Seed: GRRTRIAYER
GNRTRIAYER

SEQ ID NO: 30916 - protein, 10 aa, Artificial Sequence
  Description of Artificial Sequence: Synthetic peptide
  Seed: GRRTRIAYER
GNRTRIAYEI

SEQ ID NO: 30917 - protein, 10 aa, Artificial Sequence
  Description of Artificial Sequence: Synthetic peptide
  Seed: GRRTRIAYER
GNRTRIAYEL

SEQ ID NO: 30918 - protein, 10 aa, Artificial Sequence
  Description of Artificial Sequence: Synthetic peptide
  Seed: GRRTRIAYER
GNRTRIAYEK

SEQ ID NO: 30919 - protein, 10 aa, Artificial Sequence
  Description of Artificial Sequence: Synthetic peptide
  Seed: GRRTRIAYER
GNRTRIAYEM

SEQ ID NO: 30920 - protein, 10 aa, Artificial Sequence
  Description of Artificial Sequence: Synthetic peptide
  Seed: GRRTRIAYER
GNRTRIAYEF

SEQ ID NO: 30921 - protein, 10 aa, Artificial Sequence
  Description of Artificial Sequence: Synthetic peptide
  Seed: GRRTRIAYER
GARTRIAYER

SEQ ID NO: 30922 - protein, 11 aa, Artificial Sequence
  Description of Artificial Sequence: Synthetic peptide
  Seed: GRMVGGIGRFY
GYMVGGIGRFY

SEQ ID NO: 30923 - protein, 10 aa, Artificial Sequence
  Description of Artificial Sequence: Synthetic peptide
  Seed: GRMVGGIGRF
GVMVGGIGRF

SEQ ID NO: 30924 - protein, 11 aa, Artificial Sequence
  Description of Artificial Sequence: Synthetic peptide
  Seed: GRMVGGIGRFY
GTMVGGIGRFY

SEQ ID NO: 30925 - protein, 10 aa, Artificial Sequence
  Description of Artificial Sequence: Synthetic peptide
  Seed: GRMVGGIGRF
GVMVGGIGRY

SEQ ID NO: 30926 - protein, 11 aa, Artificial Sequence
  Description of Artificial Sequence: Synthetic peptide
  Seed: GRMVGGIGRFY
GAMVGGIGRFY

SEQ ID NO: 30927 - protein, 11 aa, Artificial Sequence
  Description of Artificial Sequence: Synthetic peptide
  Seed: GRMVGGIGRFY
GRMVGGIGRFA

SEQ ID NO: 30928 - protein, 11 aa, Artificial Sequence
  Description of Artificial Sequence: Synthetic peptide
  Seed: GRMVGGIGRFY
GRMVGGIGRFR

SEQ ID NO: 30929 - protein, 11 aa, Artificial Sequence
  Description of Artificial Sequence: Synthetic peptide
  Seed: GRMVGGIGRFY
GRMVGGIGRFI

SEQ ID NO: 30930 - protein, 11 aa, Artificial Sequence
  Description of Artificial Sequence: Synthetic peptide
  Seed: GRMVGGIGRFY
GRMVGGIGRFL

SEQ ID NO: 30931 - protein, 11 aa, Artificial Sequence
  Description of Artificial Sequence: Synthetic peptide
  Seed: GRMVGGIGRFY
GRMVGGIGRFK

SEQ ID NO: 30932 - protein, 11 aa, Artificial Sequence
  Description of Artificial Sequence: Synthetic peptide
  Seed: GRMVGGIGRFY
GRMVGGIGRFM

SEQ ID NO: 30933 - protein, 11 aa, Artificial Sequence
  Description of Artificial Sequence: Synthetic peptide
  Seed: GRMVGGIGRFY
GRMVGGIGRFF

SEQ ID NO: 30934 - protein, 11 aa, Artificial Sequence
  Description of Artificial Sequence: Synthetic peptide
  Seed: GRMVGGIGRFY
GRMVGGIGRFW

SEQ ID NO: 30935 - protein, 11 aa, Artificial Sequence
  Description of Artificial Sequence: Synthetic peptide
  Seed: GRMVGGIGRFY
GRMVGGIGRFV

SEQ ID NO: 30936 - protein, 11 aa, Artificial Sequence
  Description of Artificial Sequence: Synthetic peptide
  Seed: GRMVGGIGRFY
GQMVGGIGRFM

SEQ ID NO: 30937 - protein, 11 aa, Artificial Sequence
  Description of Artificial Sequence: Synthetic peptide
  Seed: GRMVGGIGRFY
GQMVGGIGRFF

SEQ ID NO: 30938 - protein, 11 aa, Artificial Sequence
  Description of Artificial Sequence: Synthetic peptide
  Seed: GRMVGGIGRFY
GQMVGGIGRFY

SEQ ID NO: 30939 - protein, 11 aa, Artificial Sequence
  Description of Artificial Sequence: Synthetic peptide
  Seed: GRMVGGIGRFY
GLMVGGIGRFY

SEQ ID NO: 30940 - protein, 11 aa, Artificial Sequence
  Description of Artificial Sequence: Synthetic peptide
  Seed: GRMVGGIGRFY
GMMVGGIGRFF

SEQ ID NO: 30941 - protein, 11 aa, Artificial Sequence
  Description of Artificial Sequence: Synthetic peptide
  Seed: GRMVGGIGRFY
GMMVGGIGRFY

SEQ ID NO: 30942 - protein, 11 aa, Artificial Sequence
  Description of Artificial Sequence: Synthetic peptide
  Seed: GRMVGGIGRFY
GSMVGGIGRFY

SEQ ID NO: 30943 - protein, 9 aa, Artificial Sequence
  Description of Artificial Sequence: Synthetic peptide
  Seed: FERATIMAA
FQRATIMAG

SEQ ID NO: 30944 - protein, 9 aa, Artificial Sequence
  Description of Artificial Sequence: Synthetic peptide
  Seed: FERATIMAA
FQRATIMAE

SEQ ID NO: 30945 - protein, 9 aa, Artificial Sequence
  Description of Artificial Sequence: Synthetic peptide
  Seed: FERATIMAA
FQRATIMAQ

SEQ ID NO: 30946 - protein, 9 aa, Artificial Sequence
  Description of Artificial Sequence: Synthetic peptide
  Seed: ATRGLTHMM
ASRGLTHMC

SEQ ID NO: 30947 - protein, 9 aa, Artificial Sequence
  Description of Artificial Sequence: Synthetic peptide
  Seed: ATRGLTHMM
APRGLTHMP

SEQ ID NO: 30948 - protein, 9 aa, Artificial Sequence
  Description of Artificial Sequence: Synthetic peptide
  Seed: ATRGLTHMM
APRGLTHMS

SEQ ID NO: 30949 - protein, 9 aa, Artificial Sequence
  Description of Artificial Sequence: Synthetic peptide
  Seed: ATRGLTHMM
APRGLTHMT

SEQ ID NO: 30950 - protein, 9 aa, Artificial Sequence
  Description of Artificial Sequence: Synthetic peptide
  Seed: ATRGLTHMM
APRGLTHMW

SEQ ID NO: 30951 - protein, 9 aa, Artificial Sequence
  Description of Artificial Sequence: Synthetic peptide
  Seed: ATRGLTHMM
APRGLTHMY

SEQ ID NO: 30952 - protein, 9 aa, Artificial Sequence
  Description of Artificial Sequence: Synthetic peptide
  Seed: ATRGLTHMM
APRGLTHMV

SEQ ID NO: 30953 - protein, 9 aa, Artificial Sequence
  Description of Artificial Sequence: Synthetic peptide
  Seed: ATRGLTHMM
ASRGLTHMA

SEQ ID NO: 30954 - protein, 9 aa, Artificial Sequence
  Description of Artificial Sequence: Synthetic peptide
  Seed: ATRGLTHMM
ASRGLTHMR

SEQ ID NO: 30955 - protein, 9 aa, Artificial Sequence
  Description of Artificial Sequence: Synthetic peptide
  Seed: ATRGLTHMM
ASRGLTHMN

SEQ ID NO: 30956 - protein, 9 aa, Artificial Sequence
  Description of Artificial Sequence: Synthetic peptide
  Seed: ATRGLTHMM
ASRGLTHMQ

SEQ ID NO: 30957 - protein, 9 aa, Artificial Sequence
  Description of Artificial Sequence: Synthetic peptide
  Seed: ATRGLTHMM
ASRGLTHMT

SEQ ID NO: 30958 - protein, 9 aa, Artificial Sequence
  Description of Artificial Sequence: Synthetic peptide
  Seed: ATRGLTHMM
ASRGLTHME

SEQ ID NO: 30959 - protein, 9 aa, Artificial Sequence
  Description of Artificial Sequence: Synthetic peptide
  Seed: ATRGLTHMM
ASRGLTHMG

SEQ ID NO: 30960 - protein, 9 aa, Artificial Sequence
  Description of Artificial Sequence: Synthetic peptide
  Seed: ATRGLTHMM
ASRGLTHMH

SEQ ID NO: 30961 - protein, 9 aa, Artificial Sequence
  Description of Artificial Sequence: Synthetic peptide
  Seed: ATRGLTHMM
ASRGLTHMI

SEQ ID NO: 30962 - protein, 9 aa, Artificial Sequence
  Description of Artificial Sequence: Synthetic peptide
  Seed: ATRGLTHMM
ASRGLTHML

SEQ ID NO: 30963 - protein, 9 aa, Artificial Sequence
  Description of Artificial Sequence: Synthetic peptide
  Seed: ATRGLTHMM
ASRGLTHMK

SEQ ID NO: 30964 - protein, 9 aa, Artificial Sequence
  Description of Artificial Sequence: Synthetic peptide
  Seed: ATRGLTHMM
ASRGLTHMM

SEQ ID NO: 30965 - protein, 9 aa, Artificial Sequence
  Description of Artificial Sequence: Synthetic peptide
  Seed: ATRGLTHMM
ASRGLTHMF

SEQ ID NO: 30966 - protein, 9 aa, Artificial Sequence
  Description of Artificial Sequence: Synthetic peptide
  Seed: ATRGLTHMM
ASRGLTHMP

SEQ ID NO: 30967 - protein, 9 aa, Artificial Sequence
  Description of Artificial Sequence: Synthetic peptide
  Seed: ATRGLTHMM
APRGLTHMF

SEQ ID NO: 30968 - protein, 9 aa, Artificial Sequence
  Description of Artificial Sequence: Synthetic peptide
  Seed: ATRGLTHMM
APRGLTHMM

SEQ ID NO: 30969 - protein, 9 aa, Artificial Sequence
  Description of Artificial Sequence: Synthetic peptide
  Seed: ATRGLTHMM
APRGLTHML

SEQ ID NO: 30970 - protein, 9 aa, Artificial Sequence
  Description of Artificial Sequence: Synthetic peptide
  Seed: ATRGLTHMM
APRGLTHMI

SEQ ID NO: 30971 - protein, 9 aa, Artificial Sequence
  Description of Artificial Sequence: Synthetic peptide
  Seed: ATRGLTHMM
AMRGLTHMM

SEQ ID NO: 30972 - protein, 9 aa, Artificial Sequence
  Description of Artificial Sequence: Synthetic peptide
  Seed: ATRGLTHMM
AMRGLTHMF

SEQ ID NO: 30973 - protein, 9 aa, Artificial Sequence
  Description of Artificial Sequence: Synthetic peptide
  Seed: ATRGLTHMM
AMRGLTHMS

SEQ ID NO: 30974 - protein, 9 aa, Artificial Sequence
  Description of Artificial Sequence: Synthetic peptide
  Seed: ATRGLTHMM
AMRGLTHMW

SEQ ID NO: 30975 - protein, 9 aa, Artificial Sequence
  Description of Artificial Sequence: Synthetic peptide
  Seed: ATRGLTHMM
AMRGLTHMY

SEQ ID NO: 30976 - protein, 9 aa, Artificial Sequence
  Description of Artificial Sequence: Synthetic peptide
  Seed: ATRGLTHMM
AMRGLTHMV

SEQ ID NO: 30977 - protein, 9 aa, Artificial Sequence
  Description of Artificial Sequence: Synthetic peptide
  Seed: ATRGLTHMM
AFRGLTHMA

SEQ ID NO: 30978 - protein, 9 aa, Artificial Sequence
  Description of Artificial Sequence: Synthetic peptide
  Seed: ATRGLTHMM
AFRGLTHMR

SEQ ID NO: 30979 - protein, 9 aa, Artificial Sequence
  Description of Artificial Sequence: Synthetic peptide
  Seed: ATRGLTHMM
AFRGLTHMG

SEQ ID NO: 30980 - protein, 9 aa, Artificial Sequence
  Description of Artificial Sequence: Synthetic peptide
  Seed: ATRGLTHMM
AFRGLTHMI

SEQ ID NO: 30981 - protein, 9 aa, Artificial Sequence
  Description of Artificial Sequence: Synthetic peptide
  Seed: ATRGLTHMM
AFRGLTHML

SEQ ID NO: 30982 - protein, 9 aa, Artificial Sequence
  Description of Artificial Sequence: Synthetic peptide
  Seed: ATRGLTHMM
AFRGLTHMK

SEQ ID NO: 30983 - protein, 9 aa, Artificial Sequence
  Description of Artificial Sequence: Synthetic peptide
  Seed: ATRGLTHMM
AFRGLTHMM

SEQ ID NO: 30984 - protein, 9 aa, Artificial Sequence
  Description of Artificial Sequence: Synthetic peptide
  Seed: ATRGLTHMM
AFRGLTHMS

SEQ ID NO: 30985 - protein, 9 aa, Artificial Sequence
  Description of Artificial Sequence: Synthetic peptide
  Seed: ATRGLTHMM
AFRGLTHMV

SEQ ID NO: 30986 - protein, 9 aa, Artificial Sequence
  Description of Artificial Sequence: Synthetic peptide
  Seed: ATRGLTHMM
APRGLTHMA

SEQ ID NO: 30987 - protein, 9 aa, Artificial Sequence
  Description of Artificial Sequence: Synthetic peptide
  Seed: ATRGLTHMM
APRGLTHMC

SEQ ID NO: 30988 - protein, 9 aa, Artificial Sequence
  Description of Artificial Sequence: Synthetic peptide
  Seed: ATRGLTHMM
APRGLTHME

SEQ ID NO: 30989 - protein, 9 aa, Artificial Sequence
  Description of Artificial Sequence: Synthetic peptide
  Seed: ATRGLTHMM
APRGLTHMG

SEQ ID NO: 30990 - protein, 9 aa, Artificial Sequence
  Description of Artificial Sequence: Synthetic peptide
  Seed: ATRGLTHMM
ASRGLTHMS

SEQ ID NO: 30991 - protein, 9 aa, Artificial Sequence
  Description of Artificial Sequence: Synthetic peptide
  Seed: ATRGLTHMM
ASRGLTHMW

SEQ ID NO: 30992 - protein, 9 aa, Artificial Sequence
  Description of Artificial Sequence: Synthetic peptide
  Seed: ATRGLTHMM
AMRGLTHML

SEQ ID NO: 30993 - protein, 9 aa, Artificial Sequence
  Description of Artificial Sequence: Synthetic peptide
  Seed: ATRGLTHMM
AYRGLTHMS

SEQ ID NO: 30994 - protein, 9 aa, Artificial Sequence
  Description of Artificial Sequence: Synthetic peptide
  Seed: ATRGLTHMM
AWRGLTHMM

SEQ ID NO: 30995 - protein, 9 aa, Artificial Sequence
  Description of Artificial Sequence: Synthetic peptide
  Seed: ATRGLTHMM
AWRGLTHMV

SEQ ID NO: 30996 - protein, 9 aa, Artificial Sequence
  Description of Artificial Sequence: Synthetic peptide
  Seed: ATRGLTHMM
AYRGLTHMA

SEQ ID NO: 30997 - protein, 9 aa, Artificial Sequence
  Description of Artificial Sequence: Synthetic peptide
  Seed: ATRGLTHMM
AYRGLTHMR

SEQ ID NO: 30998 - protein, 9 aa, Artificial Sequence
  Description of Artificial Sequence: Synthetic peptide
  Seed: ATRGLTHMM
AYRGLTHMG

SEQ ID NO: 30999 - protein, 9 aa, Artificial Sequence
  Description of Artificial Sequence: Synthetic peptide
  Seed: ATRGLTHMM
AYRGLTHMI

SEQ ID NO: 31000 - protein, 9 aa, Artificial Sequence
  Description of Artificial Sequence: Synthetic peptide
  Seed: ATRGLTHMM
AYRGLTHML

SEQ ID NO: 31001 - protein, 9 aa, Artificial Sequence
  Description of Artificial Sequence: Synthetic peptide
  Seed: ATRGLTHMM
AYRGLTHMK

SEQ ID NO: 31002 - protein, 9 aa, Artificial Sequence
  Description of Artificial Sequence: Synthetic peptide
  Seed: ATRGLTHMM
AYRGLTHMM

SEQ ID NO: 31003 - protein, 9 aa, Artificial Sequence
  Description of Artificial Sequence: Synthetic peptide
  Seed: ATRGLTHMM
AYRGLTHMV

SEQ ID NO: 31004 - protein, 9 aa, Artificial Sequence
  Description of Artificial Sequence: Synthetic peptide
  Seed: ATRGLTHMM
ASRGLTHMY

SEQ ID NO: 31005 - protein, 9 aa, Artificial Sequence
  Description of Artificial Sequence: Synthetic peptide
  Seed: ATRGLTHMM
AVRGLTHMA

SEQ ID NO: 31006 - protein, 9 aa, Artificial Sequence
  Description of Artificial Sequence: Synthetic peptide
  Seed: ATRGLTHMM
AVRGLTHMR

SEQ ID NO: 31007 - protein, 9 aa, Artificial Sequence
  Description of Artificial Sequence: Synthetic peptide
  Seed: ATRGLTHMM
AVRGLTHMN

SEQ ID NO: 31008 - protein, 9 aa, Artificial Sequence
  Description of Artificial Sequence: Synthetic peptide
  Seed: ATRGLTHMM
AVRGLTHMC

SEQ ID NO: 31009 - protein, 9 aa, Artificial Sequence
  Description of Artificial Sequence: Synthetic peptide
  Seed: ATRGLTHMM
AVRGLTHMG

SEQ ID NO: 31010 - protein, 9 aa, Artificial Sequence
  Description of Artificial Sequence: Synthetic peptide
  Seed: ATRGLTHMM
AVRGLTHMI

SEQ ID NO: 31011 - protein, 9 aa, Artificial Sequence
  Description of Artificial Sequence: Synthetic peptide
  Seed: ATRGLTHMM
AVRGLTHML

SEQ ID NO: 31012 - protein, 9 aa, Artificial Sequence
  Description of Artificial Sequence: Synthetic peptide
  Seed: ATRGLTHMM
AVRGLTHMK

SEQ ID NO: 31013 - protein, 9 aa, Artificial Sequence
  Description of Artificial Sequence: Synthetic peptide
  Seed: ATRGLTHMM
AVRGLTHMM

SEQ ID NO: 31014 - protein, 9 aa, Artificial Sequence
  Description of Artificial Sequence: Synthetic peptide
  Seed: ATRGLTHMM
AWRGLTHMK

SEQ ID NO: 31015 - protein, 9 aa, Artificial Sequence
  Description of Artificial Sequence: Synthetic peptide
  Seed: ATRGLTHMM
AWRGLTHML

SEQ ID NO: 31016 - protein, 9 aa, Artificial Sequence
  Description of Artificial Sequence: Synthetic peptide
  Seed: ATRGLTHMM
AWRGLTHMI

SEQ ID NO: 31017 - protein, 9 aa, Artificial Sequence
  Description of Artificial Sequence: Synthetic peptide
  Seed: ATRGLTHMM
AWRGLTHMA

SEQ ID NO: 31018 - protein, 9 aa, Artificial Sequence
  Description of Artificial Sequence: Synthetic peptide
  Seed: ATRGLTHMM
ASRGLTHMV

SEQ ID NO: 31019 - protein, 9 aa, Artificial Sequence
  Description of Artificial Sequence: Synthetic peptide
  Seed: ATRGLTHMM
ATRGLTHMA

SEQ ID NO: 31020 - protein, 9 aa, Artificial Sequence
  Description of Artificial Sequence: Synthetic peptide
  Seed: ATRGLTHMM
ATRGLTHMR

SEQ ID NO: 31021 - protein, 9 aa, Artificial Sequence
  Description of Artificial Sequence: Synthetic peptide
  Seed: ATRGLTHMM
ATRGLTHMN

SEQ ID NO: 31022 - protein, 9 aa, Artificial Sequence
  Description of Artificial Sequence: Synthetic peptide
  Seed: ATRGLTHMM
ATRGLTHMC

SEQ ID NO: 31023 - protein, 9 aa, Artificial Sequence
  Description of Artificial Sequence: Synthetic peptide
  Seed: ATRGLTHMM
ATRGLTHMQ

SEQ ID NO: 31024 - protein, 9 aa, Artificial Sequence
  Description of Artificial Sequence: Synthetic peptide
  Seed: ATRGLTHMM
ATRGLTHME

SEQ ID NO: 31025 - protein, 9 aa, Artificial Sequence
  Description of Artificial Sequence: Synthetic peptide
  Seed: ATRGLTHMM
ATRGLTHMG

SEQ ID NO: 31026 - protein, 9 aa, Artificial Sequence
  Description of Artificial Sequence: Synthetic peptide
  Seed: ATRGLTHMM
ATRGLTHMH

SEQ ID NO: 31027 - protein, 9 aa, Artificial Sequence
  Description of Artificial Sequence: Synthetic peptide
  Seed: ATRGLTHMM
ATRGLTHMI

SEQ ID NO: 31028 - protein, 9 aa, Artificial Sequence
  Description of Artificial Sequence: Synthetic peptide
  Seed: ATRGLTHMM
ATRGLTHML

SEQ ID NO: 31029 - protein, 9 aa, Artificial Sequence
  Description of Artificial Sequence: Synthetic peptide
  Seed: ATRGLTHMM
ATRGLTHMK

SEQ ID NO: 31030 - protein, 9 aa, Artificial Sequence
  Description of Artificial Sequence: Synthetic peptide
  Seed: ATRGLTHMM
ATRGLTHMF

SEQ ID NO: 31031 - protein, 9 aa, Artificial Sequence
  Description of Artificial Sequence: Synthetic peptide
  Seed: ATRGLTHMM
ATRGLTHMP

SEQ ID NO: 31032 - protein, 9 aa, Artificial Sequence
  Description of Artificial Sequence: Synthetic peptide
  Seed: ATRGLTHMM
ATRGLTHMS

SEQ ID NO: 31033 - protein, 9 aa, Artificial Sequence
  Description of Artificial Sequence: Synthetic peptide
  Seed: ATRGLTHMM
ATRGLTHMT

SEQ ID NO: 31034 - protein, 9 aa, Artificial Sequence
  Description of Artificial Sequence: Synthetic peptide
  Seed: ATRGLTHMM
ATRGLTHMW

SEQ ID NO: 31035 - protein, 9 aa, Artificial Sequence
  Description of Artificial Sequence: Synthetic peptide
  Seed: ATRGLTHMM
ATRGLTHMY

SEQ ID NO: 31036 - protein, 9 aa, Artificial Sequence
  Description of Artificial Sequence: Synthetic peptide
  Seed: ATRGLTHMM
ATRGLTHMV

SEQ ID NO: 31037 - protein, 9 aa, Artificial Sequence
  Description of Artificial Sequence: Synthetic peptide
  Seed: ATRGLTHMM
AMRGLTHMK

SEQ ID NO: 31038 - protein, 9 aa, Artificial Sequence
  Description of Artificial Sequence: Synthetic peptide
  Seed: ATRGLTHMM
AMRGLTHMI

SEQ ID NO: 31039 - protein, 9 aa, Artificial Sequence
  Description of Artificial Sequence: Synthetic peptide
  Seed: ATYQRTRAL
ALYQRTRAW

SEQ ID NO: 31040 - protein, 9 aa, Artificial Sequence
  Description of Artificial Sequence: Synthetic peptide
  Seed: ATNPIVPSF
AVNPIVPSI

SEQ ID NO: 31041 - protein, 9 aa, Artificial Sequence
  Description of Artificial Sequence: Synthetic peptide
  Seed: ATNPIVPSF
AWNPIVPSY

SEQ ID NO: 31042 - protein, 9 aa, Artificial Sequence
  Description of Artificial Sequence: Synthetic peptide
  Seed: ATNPIVPSF
AWNPIVPSV

SEQ ID NO: 31043 - protein, 9 aa, Artificial Sequence
  Description of Artificial Sequence: Synthetic peptide
  Seed: ATNPIVPSF
AYNPIVPSI

SEQ ID NO: 31044 - protein, 9 aa, Artificial Sequence
  Description of Artificial Sequence: Synthetic peptide
  Seed: ATNPIVPSF
AYNPIVPSL

SEQ ID NO: 31045 - protein, 9 aa, Artificial Sequence
  Description of Artificial Sequence: Synthetic peptide
  Seed: ATNPIVPSF
AYNPIVPSM

SEQ ID NO: 31046 - protein, 9 aa, Artificial Sequence
  Description of Artificial Sequence: Synthetic peptide
  Seed: ATNPIVPSF
AYNPIVPSF

SEQ ID NO: 31047 - protein, 9 aa, Artificial Sequence
  Description of Artificial Sequence: Synthetic peptide
  Seed: ATNPIVPSF
AYNPIVPSW

SEQ ID NO: 31048 - protein, 9 aa, Artificial Sequence
  Description of Artificial Sequence: Synthetic peptide
  Seed: ATNPIVPSF
AYNPIVPSY

SEQ ID NO: 31049 - protein, 9 aa, Artificial Sequence
  Description of Artificial Sequence: Synthetic peptide
  Seed: ATNPIVPSF
AYNPIVPSV

SEQ ID NO: 31050 - protein, 9 aa, Artificial Sequence
  Description of Artificial Sequence: Synthetic peptide
  Seed: ATNPIVPSF
AVNPIVPSL

SEQ ID NO: 31051 - protein, 9 aa, Artificial Sequence
  Description of Artificial Sequence: Synthetic peptide
  Seed: ATRGLTHMM
AARGLTHMK

SEQ ID NO: 31052 - protein, 9 aa, Artificial Sequence
  Description of Artificial Sequence: Synthetic peptide
  Seed: ATNPIVPSF
AVNPIVPSM

SEQ ID NO: 31053 - protein, 9 aa, Artificial Sequence
  Description of Artificial Sequence: Synthetic peptide
  Seed: ATNPIVPSF
AVNPIVPSF

SEQ ID NO: 31054 - protein, 9 aa, Artificial Sequence
  Description of Artificial Sequence: Synthetic peptide
  Seed: ATNPIVPSF
AVNPIVPSW

SEQ ID NO: 31055 - protein, 9 aa, Artificial Sequence
  Description of Artificial Sequence: Synthetic peptide
  Seed: ATNPIVPSF
AVNPIVPSY

SEQ ID NO: 31056 - protein, 9 aa, Artificial Sequence
  Description of Artificial Sequence: Synthetic peptide
  Seed: ATNPIVPSF
AVNPIVPSV

SEQ ID NO: 31057 - protein, 9 aa, Artificial Sequence
  Description of Artificial Sequence: Synthetic peptide
  Seed: ATRGLTHMM
AARGLTHMA

SEQ ID NO: 31058 - protein, 9 aa, Artificial Sequence
  Description of Artificial Sequence: Synthetic peptide
  Seed: ATRGLTHMM
AARGLTHMR

SEQ ID NO: 31059 - protein, 9 aa, Artificial Sequence
  Description of Artificial Sequence: Synthetic peptide
  Seed: ATRGLTHMM
AARGLTHMG

SEQ ID NO: 31060 - protein, 9 aa, Artificial Sequence
  Description of Artificial Sequence: Synthetic peptide
  Seed: ATRGLTHMM
AARGLTHMI

SEQ ID NO: 31061 - protein, 9 aa, Artificial Sequence
  Description of Artificial Sequence: Synthetic peptide
  Seed: ATNPIVPSF
AWNPIVPSW

SEQ ID NO: 31062 - protein, 9 aa, Artificial Sequence
  Description of Artificial Sequence: Synthetic peptide
  Seed: ATNPIVPSF
AWNPIVPSF

SEQ ID NO: 31063 - protein, 9 aa, Artificial Sequence
  Description of Artificial Sequence: Synthetic peptide
  Seed: ATNPIVPSF
AWNPIVPSM

SEQ ID NO: 31064 - protein, 9 aa, Artificial Sequence
  Description of Artificial Sequence: Synthetic peptide
  Seed: ATNPIVPSF
AWNPIVPSL

SEQ ID NO: 31065 - protein, 9 aa, Artificial Sequence
  Description of Artificial Sequence: Synthetic peptide
  Seed: ATNPIVPSF
AFNPIVPSM

SEQ ID NO: 31066 - protein, 9 aa, Artificial Sequence
  Description of Artificial Sequence: Synthetic peptide
  Seed: ATNPIVPSF
AFNPIVPSF

SEQ ID NO: 31067 - protein, 9 aa, Artificial Sequence
  Description of Artificial Sequence: Synthetic peptide
  Seed: ATNPIVPSF
AFNPIVPSW

SEQ ID NO: 31068 - protein, 9 aa, Artificial Sequence
  Description of Artificial Sequence: Synthetic peptide
  Seed: ATNPIVPSF
AFNPIVPSY

SEQ ID NO: 31069 - protein, 9 aa, Artificial Sequence
  Description of Artificial Sequence: Synthetic peptide
  Seed: ATNPIVPSF
AFNPIVPSV

SEQ ID NO: 31070 - protein, 9 aa, Artificial Sequence
  Description of Artificial Sequence: Synthetic peptide
  Seed: ATNPIVPSF
ASNPIVPSI

SEQ ID NO: 31071 - protein, 9 aa, Artificial Sequence
  Description of Artificial Sequence: Synthetic peptide
  Seed: ATNPIVPSF
ASNPIVPSL

SEQ ID NO: 31072 - protein, 9 aa, Artificial Sequence
  Description of Artificial Sequence: Synthetic peptide
  Seed: ATNPIVPSF
ASNPIVPSM

SEQ ID NO: 31073 - protein, 9 aa, Artificial Sequence
  Description of Artificial Sequence: Synthetic peptide
  Seed: ATNPIVPSF
ASNPIVPSF

SEQ ID NO: 31074 - protein, 9 aa, Artificial Sequence
  Description of Artificial Sequence: Synthetic peptide
  Seed: ATNPIVPSF
ASNPIVPSW

SEQ ID NO: 31075 - protein, 9 aa, Artificial Sequence
  Description of Artificial Sequence: Synthetic peptide
  Seed: ATNPIVPSF
ASNPIVPSY

SEQ ID NO: 31076 - protein, 9 aa, Artificial Sequence
  Description of Artificial Sequence: Synthetic peptide
  Seed: ATNPIVPSF
ASNPIVPSV

SEQ ID NO: 31077 - protein, 9 aa, Artificial Sequence
  Description of Artificial Sequence: Synthetic peptide
  Seed: ATNPIVPSF
ATNPIVPSI

SEQ ID NO: 31078 - protein, 9 aa, Artificial Sequence
  Description of Artificial Sequence: Synthetic peptide
  Seed: ATNPIVPSF
ATNPIVPSM

SEQ ID NO: 31079 - protein, 9 aa, Artificial Sequence
  Description of Artificial Sequence: Synthetic peptide
  Seed: ATNPIVPSF
ATNPIVPSW

SEQ ID NO: 31080 - protein, 9 aa, Artificial Sequence
  Description of Artificial Sequence: Synthetic peptide
  Seed: ATNPIVPSF
ATNPIVPSY

SEQ ID NO: 31081 - protein, 9 aa, Artificial Sequence
  Description of Artificial Sequence: Synthetic peptide
  Seed: ATNPIVPSF
ATNPIVPSV

SEQ ID NO: 31082 - protein, 9 aa, Artificial Sequence
  Description of Artificial Sequence: Synthetic peptide
  Seed: ATNPIVPSF
AWNPIVPSI

SEQ ID NO: 31083 - protein, 9 aa, Artificial Sequence
  Description of Artificial Sequence: Synthetic peptide
  Seed: ATRGLTHMM
AARGLTHML

SEQ ID NO: 31084 - protein, 9 aa, Artificial Sequence
  Description of Artificial Sequence: Synthetic peptide
  Seed: ATRGLTHMM
AARGLTHMM

SEQ ID NO: 31085 - protein, 9 aa, Artificial Sequence
  Description of Artificial Sequence: Synthetic peptide
  Seed: ATRGLTHMM
AMRGLTHMG

SEQ ID NO: 31086 - protein, 9 aa, Artificial Sequence
  Description of Artificial Sequence: Synthetic peptide
  Seed: ATRGLTHMM
AIRGLTHMV

SEQ ID NO: 31087 - protein, 9 aa, Artificial Sequence
  Description of Artificial Sequence: Synthetic peptide
  Seed: ATRGLTHMM
AIRGLTHMG

SEQ ID NO: 31088 - protein, 9 aa, Artificial Sequence
  Description of Artificial Sequence: Synthetic peptide
  Seed: ATRGLTHMM
AIRGLTHMI

SEQ ID NO: 31089 - protein, 9 aa, Artificial Sequence
  Description of Artificial Sequence: Synthetic peptide
  Seed: ATRGLTHMM
AIRGLTHML

SEQ ID NO: 31090 - protein, 9 aa, Artificial Sequence
  Description of Artificial Sequence: Synthetic peptide
  Seed: ATRGLTHMM
AIRGLTHMK

SEQ ID NO: 31091 - protein, 9 aa, Artificial Sequence
  Description of Artificial Sequence: Synthetic peptide
  Seed: ATRGLTHMM
AIRGLTHMM

SEQ ID NO: 31092 - protein, 9 aa, Artificial Sequence
  Description of Artificial Sequence: Synthetic peptide
  Seed: ATRGLTHMM
AIRGLTHMF

SEQ ID NO: 31093 - protein, 9 aa, Artificial Sequence
  Description of Artificial Sequence: Synthetic peptide
  Seed: ATRGLTHMM
AIRGLTHMS

SEQ ID NO: 31094 - protein, 9 aa, Artificial Sequence
  Description of Artificial Sequence: Synthetic peptide
  Seed: ATRGLTHMM
AIRGLTHMW

SEQ ID NO: 31095 - protein, 9 aa, Artificial Sequence
  Description of Artificial Sequence: Synthetic peptide
  Seed: ATRGLTHMM
AIRGLTHMY

SEQ ID NO: 31096 - protein, 9 aa, Artificial Sequence
  Description of Artificial Sequence: Synthetic peptide
  Seed: ATRGLTHMM
ALRGLTHMA

SEQ ID NO: 31097 - protein, 9 aa, Artificial Sequence
  Description of Artificial Sequence: Synthetic peptide
  Seed: ATRGLTHMM
AARGLTHMF

SEQ ID NO: 31098 - protein, 9 aa, Artificial Sequence
  Description of Artificial Sequence: Synthetic peptide
  Seed: ATRGLTHMM
ALRGLTHMI

SEQ ID NO: 31099 - protein, 9 aa, Artificial Sequence
  Description of Artificial Sequence: Synthetic peptide
  Seed: ATRGLTHMM
ALRGLTHML

SEQ ID NO: 31100 - protein, 9 aa, Artificial Sequence
  Description of Artificial Sequence: Synthetic peptide
  Seed: ATRGLTHMM
ALRGLTHMK

SEQ ID NO: 31101 - protein, 9 aa, Artificial Sequence
  Description of Artificial Sequence: Synthetic peptide
  Seed: ATRGLTHMM
ALRGLTHMM

SEQ ID NO: 31102 - protein, 9 aa, Artificial Sequence
  Description of Artificial Sequence: Synthetic peptide
  Seed: ATRGLTHMM
ALRGLTHMW

SEQ ID NO: 31103 - protein, 9 aa, Artificial Sequence
  Description of Artificial Sequence: Synthetic peptide
  Seed: ATRGLTHMM
ALRGLTHMV

SEQ ID NO: 31104 - protein, 9 aa, Artificial Sequence
  Description of Artificial Sequence: Synthetic peptide
  Seed: ATRGLTHMM
AKRGLTHMK

SEQ ID NO: 31105 - protein, 9 aa, Artificial Sequence
  Description of Artificial Sequence: Synthetic peptide
  Seed: ATRGLTHMM
AMRGLTHMA

SEQ ID NO: 31106 - protein, 9 aa, Artificial Sequence
  Description of Artificial Sequence: Synthetic peptide
  Seed: ATRGLTHMM
AMRGLTHMR

SEQ ID NO: 31107 - protein, 9 aa, Artificial Sequence
  Description of Artificial Sequence: Synthetic peptide
  Seed: ATRGLTHMM
AIRGLTHMA

SEQ ID NO: 31108 - protein, 9 aa, Artificial Sequence
  Description of Artificial Sequence: Synthetic peptide
  Seed: ATRGLTHMM
AHRGLTHMK

SEQ ID NO: 31109 - protein, 9 aa, Artificial Sequence
  Description of Artificial Sequence: Synthetic peptide
  Seed: ATRGLTHMM
AGRGLTHMV

SEQ ID NO: 31110 - protein, 9 aa, Artificial Sequence
  Description of Artificial Sequence: Synthetic peptide
  Seed: ATRGLTHMM
AGRGLTHMW

SEQ ID NO: 31111 - protein, 9 aa, Artificial Sequence
  Description of Artificial Sequence: Synthetic peptide
  Seed: ATRGLTHMM
AARGLTHMS

SEQ ID NO: 31112 - protein, 9 aa, Artificial Sequence
  Description of Artificial Sequence: Synthetic peptide
  Seed: ATRGLTHMM
AARGLTHMW

SEQ ID NO: 31113 - protein, 9 aa, Artificial Sequence
  Description of Artificial Sequence: Synthetic peptide
  Seed: ATRGLTHMM
AARGLTHMY

SEQ ID NO: 31114 - protein, 9 aa, Artificial Sequence
  Description of Artificial Sequence: Synthetic peptide
  Seed: ATRGLTHMM
AARGLTHMV

SEQ ID NO: 31115 - protein, 9 aa, Artificial Sequence
  Description of Artificial Sequence: Synthetic peptide
  Seed: ATRGLTHMM
ANRGLTHMA

SEQ ID NO: 31116 - protein, 9 aa, Artificial Sequence
  Description of Artificial Sequence: Synthetic peptide
  Seed: ATRGLTHMM
ANRGLTHMI

SEQ ID NO: 31117 - protein, 9 aa, Artificial Sequence
  Description of Artificial Sequence: Synthetic peptide
  Seed: ATRGLTHMM
ANRGLTHMK

SEQ ID NO: 31118 - protein, 9 aa, Artificial Sequence
  Description of Artificial Sequence: Synthetic peptide
  Seed: ATRGLTHMM
ANRGLTHMV

SEQ ID NO: 31119 - protein, 9 aa, Artificial Sequence
  Description of Artificial Sequence: Synthetic peptide
  Seed: ATRGLTHMM
ACRGLTHMK

SEQ ID NO: 31120 - protein, 9 aa, Artificial Sequence
  Description of Artificial Sequence: Synthetic peptide
  Seed: ATRGLTHMM
AQRGLTHMA

SEQ ID NO: 31121 - protein, 9 aa, Artificial Sequence
  Description of Artificial Sequence: Synthetic peptide
  Seed: ATRGLTHMM
AQRGLTHMR

SEQ ID NO: 31122 - protein, 9 aa, Artificial Sequence
  Description of Artificial Sequence: Synthetic peptide
  Seed: ATRGLTHMM
AQRGLTHMI

SEQ ID NO: 31123 - protein, 9 aa, Artificial Sequence
  Description of Artificial Sequence: Synthetic peptide
  Seed: ATRGLTHMM
AQRGLTHMK

SEQ ID NO: 31124 - protein, 9 aa, Artificial Sequence
  Description of Artificial Sequence: Synthetic peptide
  Seed: ATRGLTHMM
AQRGLTHMM

SEQ ID NO: 31125 - protein, 9 aa, Artificial Sequence
  Description of Artificial Sequence: Synthetic peptide
  Seed: ATRGLTHMM
AQRGLTHMV

SEQ ID NO: 31126 - protein, 9 aa, Artificial Sequence
  Description of Artificial Sequence: Synthetic peptide
  Seed: ATRGLTHMM
AGRGLTHMA

SEQ ID NO: 31127 - protein, 9 aa, Artificial Sequence
  Description of Artificial Sequence: Synthetic peptide
  Seed: ATRGLTHMM
AGRGLTHMR

SEQ ID NO: 31128 - protein, 9 aa, Artificial Sequence
  Description of Artificial Sequence: Synthetic peptide
  Seed: ATRGLTHMM
AGRGLTHMI

SEQ ID NO: 31129 - protein, 9 aa, Artificial Sequence
  Description of Artificial Sequence: Synthetic peptide
  Seed: ATRGLTHMM
AGRGLTHMK

SEQ ID NO: 31130 - protein, 9 aa, Artificial Sequence
  Description of Artificial Sequence: Synthetic peptide
  Seed: ATRGLTHMM
AVRGLTHMF

SEQ ID NO: 31131 - protein, 9 aa, Artificial Sequence
  Description of Artificial Sequence: Synthetic peptide
  Seed: ATRGLTHMM
AVRGLTHMP

SEQ ID NO: 31132 - protein, 9 aa, Artificial Sequence
  Description of Artificial Sequence: Synthetic peptide
  Seed: ATRGLTHMM
AVRGLTHMS

SEQ ID NO: 31133 - protein, 9 aa, Artificial Sequence
  Description of Artificial Sequence: Synthetic peptide
  Seed: ATYQRTRAL
AAYQRTRAF

SEQ ID NO: 31134 - protein, 11 aa, Artificial Sequence
  Description of Artificial Sequence: Synthetic peptide
  Seed: ATRGLTHMMIW
AVRGLTHMMIW

SEQ ID NO: 31135 - protein, 9 aa, Artificial Sequence
  Description of Artificial Sequence: Synthetic peptide
  Seed: ATYQRTRAL
AAYQRTRAA

SEQ ID NO: 31136 - protein, 9 aa, Artificial Sequence
  Description of Artificial Sequence: Synthetic peptide
  Seed: ATYQRTRAL
AAYQRTRAR

SEQ ID NO: 31137 - protein, 9 aa, Artificial Sequence
  Description of Artificial Sequence: Synthetic peptide
  Seed: ATYQRTRAL
AAYQRTRAC

SEQ ID NO: 31138 - protein, 9 aa, Artificial Sequence
  Description of Artificial Sequence: Synthetic peptide
  Seed: ATYQRTRAL
AAYQRTRAH

SEQ ID NO: 31139 - protein, 9 aa, Artificial Sequence
  Description of Artificial Sequence: Synthetic peptide
  Seed: ATYQRTRAL
AAYQRTRAI

SEQ ID NO: 31140 - protein, 9 aa, Artificial Sequence
  Description of Artificial Sequence: Synthetic peptide
  Seed: ATYQRTRAL
AAYQRTRAL

SEQ ID NO: 31141 - protein, 9 aa, Artificial Sequence
  Description of Artificial Sequence: Synthetic peptide
  Seed: ATYQRTRAL
AAYQRTRAK

SEQ ID NO: 31142 - protein, 9 aa, Artificial Sequence
  Description of Artificial Sequence: Synthetic peptide
  Seed: ATYQRTRAL
AAYQRTRAM

SEQ ID NO: 31143 - protein, 9 aa, Artificial Sequence
  Description of Artificial Sequence: Synthetic peptide
  Seed: ATYQRTRAL
AAYQRTRAS

SEQ ID NO: 31144 - protein, 9 aa, Artificial Sequence
  Description of Artificial Sequence: Synthetic peptide
  Seed: ATYQRTRAL
ACYQRTRAK

SEQ ID NO: 31145 - protein, 9 aa, Artificial Sequence
  Description of Artificial Sequence: Synthetic peptide
  Seed: ATYQRTRAL
AAYQRTRAT

SEQ ID NO: 31146 - protein, 9 aa, Artificial Sequence
  Description of Artificial Sequence: Synthetic peptide
  Seed: ATYQRTRAL
AAYQRTRAW

SEQ ID NO: 31147 - protein, 9 aa, Artificial Sequence
  Description of Artificial Sequence: Synthetic peptide
  Seed: ATYQRTRAL
AAYQRTRAY

SEQ ID NO: 31148 - protein, 9 aa, Artificial Sequence
  Description of Artificial Sequence: Synthetic peptide
  Seed: ATYQRTRAL
AAYQRTRAV

SEQ ID NO: 31149 - protein, 9 aa, Artificial Sequence
  Description of Artificial Sequence: Synthetic peptide
  Seed: ATYQRTRAL
ANYQRTRAL

SEQ ID NO: 31150 - protein, 9 aa, Artificial Sequence
  Description of Artificial Sequence: Synthetic peptide
  Seed: ATYQRTRAL
ANYQRTRAK

SEQ ID NO: 31151 - protein, 9 aa, Artificial Sequence
  Description of Artificial Sequence: Synthetic peptide
  Seed: ATYQRTRAL
ANYQRTRAM

SEQ ID NO: 31152 - protein, 9 aa, Artificial Sequence
  Description of Artificial Sequence: Synthetic peptide
  Seed: ATYQRTRAL
ANYQRTRAF

SEQ ID NO: 31153 - protein, 9 aa, Artificial Sequence
  Description of Artificial Sequence: Synthetic peptide
  Seed: ATYQRTRAL
ANYQRTRAY

SEQ ID NO: 31154 - protein, 11 aa, Artificial Sequence
  Description of Artificial Sequence: Synthetic peptide
  Seed: ATRGLTHMMIW
ATRGLTHMMIY

SEQ ID NO: 31155 - protein, 11 aa, Artificial Sequence
  Description of Artificial Sequence: Synthetic peptide
  Seed: ATRGLTHMMIW
ATRGLTHMMIF

SEQ ID NO: 31156 - protein, 11 aa, Artificial Sequence
  Description of Artificial Sequence: Synthetic peptide
  Seed: ATRGLTHMMIW
ATRGLTHMMIM

SEQ ID NO: 31157 - protein, 11 aa, Artificial Sequence
  Description of Artificial Sequence: Synthetic peptide
  Seed: ATRGLTHMMIW
ASRGLTHMMIY

SEQ ID NO: 31158 - protein, 10 aa, Artificial Sequence
  Description of Artificial Sequence: Synthetic peptide
  Seed: ATRGLTHMMI
AYRGLTHMMV

SEQ ID NO: 31159 - protein, 10 aa, Artificial Sequence
  Description of Artificial Sequence: Synthetic peptide
  Seed: ATRGLTHMMI
AVRGLTHMMA

SEQ ID NO: 31160 - protein, 10 aa, Artificial Sequence
  Description of Artificial Sequence: Synthetic peptide
  Seed: ATRGLTHMMI
AVRGLTHMMR

SEQ ID NO: 31161 - protein, 10 aa, Artificial Sequence
  Description of Artificial Sequence: Synthetic peptide
  Seed: ATRGLTHMMI
AVRGLTHMMG

SEQ ID NO: 31162 - protein, 10 aa, Artificial Sequence
  Description of Artificial Sequence: Synthetic peptide
  Seed: ATRGLTHMMI
AVRGLTHMMI

SEQ ID NO: 31163 - protein, 10 aa, Artificial Sequence
  Description of Artificial Sequence: Synthetic peptide
  Seed: ATRGLTHMMI
AVRGLTHMML

SEQ ID NO: 31164 - protein, 10 aa, Artificial Sequence
  Description of Artificial Sequence: Synthetic peptide
  Seed: ATRGLTHMMI
AVRGLTHMMK

SEQ ID NO: 31165 - protein, 10 aa, Artificial Sequence
  Description of Artificial Sequence: Synthetic peptide
  Seed: ATRGLTHMMI
AVRGLTHMMM

SEQ ID NO: 31166 - protein, 10 aa, Artificial Sequence
  Description of Artificial Sequence: Synthetic peptide
  Seed: ATRGLTHMMI
AVRGLTHMMF

SEQ ID NO: 31167 - protein, 10 aa, Artificial Sequence
  Description of Artificial Sequence: Synthetic peptide
  Seed: ATRGLTHMMI
AVRGLTHMMS

SEQ ID NO: 31168 - protein, 10 aa, Artificial Sequence
  Description of Artificial Sequence: Synthetic peptide
  Seed: ATRGLTHMMI
AVRGLTHMMT

SEQ ID NO: 31169 - protein, 10 aa, Artificial Sequence
  Description of Artificial Sequence: Synthetic peptide
  Seed: ATRGLTHMMI
AVRGLTHMMY

SEQ ID NO: 31170 - protein, 10 aa, Artificial Sequence
  Description of Artificial Sequence: Synthetic peptide
  Seed: ATRGLTHMMI
AVRGLTHMMV

SEQ ID NO: 31171 - protein, 11 aa, Artificial Sequence
  Description of Artificial Sequence: Synthetic peptide
  Seed: ATRGLTHMMIW
AARGLTHMMIF

SEQ ID NO: 31172 - protein, 11 aa, Artificial Sequence
  Description of Artificial Sequence: Synthetic peptide
  Seed: ATRGLTHMMIW
AARGLTHMMIW

SEQ ID NO: 31173 - protein, 11 aa, Artificial Sequence
  Description of Artificial Sequence: Synthetic peptide
  Seed: ATRGLTHMMIW
AARGLTHMMIY

SEQ ID NO: 31174 - protein, 11 aa, Artificial Sequence
  Description of Artificial Sequence: Synthetic peptide
  Seed: ATRGLTHMMIW
ASRGLTHMMIM

SEQ ID NO: 31175 - protein, 11 aa, Artificial Sequence
  Description of Artificial Sequence: Synthetic peptide
  Seed: ATRGLTHMMIW
ASRGLTHMMIF

SEQ ID NO: 31176 - protein, 11 aa, Artificial Sequence
  Description of Artificial Sequence: Synthetic peptide
  Seed: ATRGLTHMMIW
ASRGLTHMMIW

SEQ ID NO: 31177 - protein, 9 aa, Artificial Sequence
  Description of Artificial Sequence: Synthetic peptide
  Seed: ATYQRTRAL
ACYQRTRAL

SEQ ID NO: 31178 - protein, 9 aa, Artificial Sequence
  Description of Artificial Sequence: Synthetic peptide
  Seed: ATYQRTRAL
ACYQRTRAM

SEQ ID NO: 31179 - protein, 9 aa, Artificial Sequence
  Description of Artificial Sequence: Synthetic peptide
  Seed: ATRGLTHMM
AVRGLTHMT

SEQ ID NO: 31180 - protein, 9 aa, Artificial Sequence
  Description of Artificial Sequence: Synthetic peptide
  Seed: ATYQRTRAL
AIYQRTRAF

SEQ ID NO: 31181 - protein, 9 aa, Artificial Sequence
  Description of Artificial Sequence: Synthetic peptide
  Seed: ATYQRTRAL
AHYQRTRAK

SEQ ID NO: 31182 - protein, 9 aa, Artificial Sequence
  Description of Artificial Sequence: Synthetic peptide
  Seed: ATYQRTRAL
AHYQRTRAY

SEQ ID NO: 31183 - protein, 9 aa, Artificial Sequence
  Description of Artificial Sequence: Synthetic peptide
  Seed: ATYQRTRAL
AIYQRTRAA

SEQ ID NO: 31184 - protein, 9 aa, Artificial Sequence
  Description of Artificial Sequence: Synthetic peptide
  Seed: ATYQRTRAL
AIYQRTRAR

SEQ ID NO: 31185 - protein, 9 aa, Artificial Sequence
  Description of Artificial Sequence: Synthetic peptide
  Seed: ATYQRTRAL
AIYQRTRAH

SEQ ID NO: 31186 - protein, 9 aa, Artificial Sequence
  Description of Artificial Sequence: Synthetic peptide
  Seed: ATYQRTRAL
AIYQRTRAI

SEQ ID NO: 31187 - protein, 9 aa, Artificial Sequence
  Description of Artificial Sequence: Synthetic peptide
  Seed: ATYQRTRAL
AIYQRTRAL

SEQ ID NO: 31188 - protein, 9 aa, Artificial Sequence
  Description of Artificial Sequence: Synthetic peptide
  Seed: ATYQRTRAL
AIYQRTRAK

SEQ ID NO: 31189 - protein, 9 aa, Artificial Sequence
  Description of Artificial Sequence: Synthetic peptide
  Seed: ATYQRTRAL
AIYQRTRAM

SEQ ID NO: 31190 - protein, 9 aa, Artificial Sequence
  Description of Artificial Sequence: Synthetic peptide
  Seed: ATYQRTRAL
AIYQRTRAW

SEQ ID NO: 31191 - protein, 9 aa, Artificial Sequence
  Description of Artificial Sequence: Synthetic peptide
  Seed: ATYQRTRAL
ACYQRTRAF

SEQ ID NO: 31192 - protein, 9 aa, Artificial Sequence
  Description of Artificial Sequence: Synthetic peptide
  Seed: ATYQRTRAL
AIYQRTRAY

SEQ ID NO: 31193 - protein, 9 aa, Artificial Sequence
  Description of Artificial Sequence: Synthetic peptide
  Seed: ATYQRTRAL
AIYQRTRAV

SEQ ID NO: 31194 - protein, 9 aa, Artificial Sequence
  Description of Artificial Sequence: Synthetic peptide
  Seed: ATYQRTRAL
ALYQRTRAA

SEQ ID NO: 31195 - protein, 9 aa, Artificial Sequence
  Description of Artificial Sequence: Synthetic peptide
  Seed: ATYQRTRAL
ALYQRTRAR

SEQ ID NO: 31196 - protein, 9 aa, Artificial Sequence
  Description of Artificial Sequence: Synthetic peptide
  Seed: ATYQRTRAL
ALYQRTRAH

SEQ ID NO: 31197 - protein, 9 aa, Artificial Sequence
  Description of Artificial Sequence: Synthetic peptide
  Seed: ATYQRTRAL
ALYQRTRAI

SEQ ID NO: 31198 - protein, 9 aa, Artificial Sequence
  Description of Artificial Sequence: Synthetic peptide
  Seed: ATYQRTRAL
ALYQRTRAL

SEQ ID NO: 31199 - protein, 9 aa, Artificial Sequence
  Description of Artificial Sequence: Synthetic peptide
  Seed: ATYQRTRAL
ALYQRTRAK

SEQ ID NO: 31200 - protein, 9 aa, Artificial Sequence
  Description of Artificial Sequence: Synthetic peptide
  Seed: ATYQRTRAL
ALYQRTRAM

SEQ ID NO: 31201 - protein, 9 aa, Artificial Sequence
  Description of Artificial Sequence: Synthetic peptide
  Seed: ATYQRTRAL
AGYQRTRAV

SEQ ID NO: 31202 - protein, 9 aa, Artificial Sequence
  Description of Artificial Sequence: Synthetic peptide
  Seed: ATYQRTRAL
AGYQRTRAY

SEQ ID NO: 31203 - protein, 9 aa, Artificial Sequence
  Description of Artificial Sequence: Synthetic peptide
  Seed: ATYQRTRAL
AGYQRTRAF

SEQ ID NO: 31204 - protein, 9 aa, Artificial Sequence
  Description of Artificial Sequence: Synthetic peptide
  Seed: ATYQRTRAL
AGYQRTRAM

SEQ ID NO: 31205 - protein, 9 aa, Artificial Sequence
  Description of Artificial Sequence: Synthetic peptide
  Seed: ATYQRTRAL
ACYQRTRAY

SEQ ID NO: 31206 - protein, 9 aa, Artificial Sequence
  Description of Artificial Sequence: Synthetic peptide
  Seed: ATYQRTRAL
AQYQRTRAA

SEQ ID NO: 31207 - protein, 9 aa, Artificial Sequence
  Description of Artificial Sequence: Synthetic peptide
  Seed: ATYQRTRAL
AQYQRTRAC

SEQ ID NO: 31208 - protein, 9 aa, Artificial Sequence
  Description of Artificial Sequence: Synthetic peptide
  Seed: ATYQRTRAL
AQYQRTRAH

SEQ ID NO: 31209 - protein, 9 aa, Artificial Sequence
  Description of Artificial Sequence: Synthetic peptide
  Seed: ATYQRTRAL
AQYQRTRAI

SEQ ID NO: 31210 - protein, 9 aa, Artificial Sequence
  Description of Artificial Sequence: Synthetic peptide
  Seed: ATYQRTRAL
AQYQRTRAL

SEQ ID NO: 31211 - protein, 9 aa, Artificial Sequence
  Description of Artificial Sequence: Synthetic peptide
  Seed: ATYQRTRAL
AQYQRTRAK

SEQ ID NO: 31212 - protein, 9 aa, Artificial Sequence
  Description of Artificial Sequence: Synthetic peptide
  Seed: ATYQRTRAL
AQYQRTRAM

SEQ ID NO: 31213 - protein, 9 aa, Artificial Sequence
  Description of Artificial Sequence: Synthetic peptide
  Seed: ATYQRTRAL
AQYQRTRAF

SEQ ID NO: 31214 - protein, 9 aa, Artificial Sequence
  Description of Artificial Sequence: Synthetic peptide
  Seed: ATYQRTRAL
AQYQRTRAW

SEQ ID NO: 31215 - protein, 9 aa, Artificial Sequence
  Description of Artificial Sequence: Synthetic peptide
  Seed: ATYQRTRAL
AQYQRTRAY

SEQ ID NO: 31216 - protein, 9 aa, Artificial Sequence
  Description of Artificial Sequence: Synthetic peptide
  Seed: ATYQRTRAL
AQYQRTRAV

SEQ ID NO: 31217 - protein, 9 aa, Artificial Sequence
  Description of Artificial Sequence: Synthetic peptide
  Seed: ATYQRTRAL
AEYQRTRAM

SEQ ID NO: 31218 - protein, 9 aa, Artificial Sequence
  Description of Artificial Sequence: Synthetic peptide
  Seed: ATYQRTRAL
AEYQRTRAF

SEQ ID NO: 31219 - protein, 9 aa, Artificial Sequence
  Description of Artificial Sequence: Synthetic peptide
  Seed: ATYQRTRAL
AEYQRTRAY

SEQ ID NO: 31220 - protein, 9 aa, Artificial Sequence
  Description of Artificial Sequence: Synthetic peptide
  Seed: ATYQRTRAL
AGYQRTRAA

SEQ ID NO: 31221 - protein, 9 aa, Artificial Sequence
  Description of Artificial Sequence: Synthetic peptide
  Seed: ATYQRTRAL
AGYQRTRAI

SEQ ID NO: 31222 - protein, 9 aa, Artificial Sequence
  Description of Artificial Sequence: Synthetic peptide
  Seed: ATYQRTRAL
AGYQRTRAL

SEQ ID NO: 31223 - protein, 9 aa, Artificial Sequence
  Description of Artificial Sequence: Synthetic peptide
  Seed: ATYQRTRAL
AGYQRTRAK

SEQ ID NO: 31224 - protein, 10 aa, Artificial Sequence
  Description of Artificial Sequence: Synthetic peptide
  Seed: ATRGLTHMMI
AYRGLTHMMS

SEQ ID NO: 31225 - protein, 10 aa, Artificial Sequence
  Description of Artificial Sequence: Synthetic peptide
  Seed: ATRGLTHMMI
AYRGLTHMMM

SEQ ID NO: 31226 - protein, 10 aa, Artificial Sequence
  Description of Artificial Sequence: Synthetic peptide
  Seed: ATRGLTHMMI
AYRGLTHMMK

SEQ ID NO: 31227 - protein, 10 aa, Artificial Sequence
  Description of Artificial Sequence: Synthetic peptide
  Seed: ATRGLTHMMI
ALRGLTHMMA

SEQ ID NO: 31228 - protein, 10 aa, Artificial Sequence
  Description of Artificial Sequence: Synthetic peptide
  Seed: ATRGLTHMMI
AIRGLTHMMA

SEQ ID NO: 31229 - protein, 10 aa, Artificial Sequence
  Description of Artificial Sequence: Synthetic peptide
  Seed: ATRGLTHMMI
AIRGLTHMMG

SEQ ID NO: 31230 - protein, 10 aa, Artificial Sequence
  Description of Artificial Sequence: Synthetic peptide
  Seed: ATRGLTHMMI
AIRGLTHMMI

SEQ ID NO: 31231 - protein, 10 aa, Artificial Sequence
  Description of Artificial Sequence: Synthetic peptide
  Seed: ATRGLTHMMI
AIRGLTHMML

SEQ ID NO: 31232 - protein, 10 aa, Artificial Sequence
  Description of Artificial Sequence: Synthetic peptide
  Seed: ATRGLTHMMI
AIRGLTHMMK

SEQ ID NO: 31233 - protein, 10 aa, Artificial Sequence
  Description of Artificial Sequence: Synthetic peptide
  Seed: ATRGLTHMMI
AIRGLTHMMM

SEQ ID NO: 31234 - protein, 10 aa, Artificial Sequence
  Description of Artificial Sequence: Synthetic peptide
  Seed: ATRGLTHMMI
AIRGLTHMMS

SEQ ID NO: 31235 - protein, 10 aa, Artificial Sequence
  Description of Artificial Sequence: Synthetic peptide
  Seed: ATRGLTHMMI
AIRGLTHMMY

SEQ ID NO: 31236 - protein, 10 aa, Artificial Sequence
  Description of Artificial Sequence: Synthetic peptide
  Seed: ATRGLTHMMI
AIRGLTHMMV

SEQ ID NO: 31237 - protein, 10 aa, Artificial Sequence
  Description of Artificial Sequence: Synthetic peptide
  Seed: ATRGLTHMMI
ALRGLTHMMK

SEQ ID NO: 31238 - protein, 10 aa, Artificial Sequence
  Description of Artificial Sequence: Synthetic peptide
  Seed: ATRGLTHMMI
AYRGLTHMML

SEQ ID NO: 31239 - protein, 10 aa, Artificial Sequence
  Description of Artificial Sequence: Synthetic peptide
  Seed: ATRGLTHMMI
AMRGLTHMMA

SEQ ID NO: 31240 - protein, 10 aa, Artificial Sequence
  Description of Artificial Sequence: Synthetic peptide
  Seed: ATRGLTHMMI
AMRGLTHMMR

SEQ ID NO: 31241 - protein, 10 aa, Artificial Sequence
  Description of Artificial Sequence: Synthetic peptide
  Seed: ATRGLTHMMI
AMRGLTHMMG

SEQ ID NO: 31242 - protein, 10 aa, Artificial Sequence
  Description of Artificial Sequence: Synthetic peptide
  Seed: ATRGLTHMMI
AMRGLTHMMI

SEQ ID NO: 31243 - protein, 10 aa, Artificial Sequence
  Description of Artificial Sequence: Synthetic peptide
  Seed: ATRGLTHMMI
AMRGLTHMML

SEQ ID NO: 31244 - protein, 10 aa, Artificial Sequence
  Description of Artificial Sequence: Synthetic peptide
  Seed: ATRGLTHMMI
AMRGLTHMMK

SEQ ID NO: 31245 - protein, 10 aa, Artificial Sequence
  Description of Artificial Sequence: Synthetic peptide
  Seed: ATRGLTHMMI
AMRGLTHMMM

SEQ ID NO: 31246 - protein, 10 aa, Artificial Sequence
  Description of Artificial Sequence: Synthetic peptide
  Seed: ATRGLTHMMI
AMRGLTHMMS

SEQ ID NO: 31247 - protein, 10 aa, Artificial Sequence
  Description of Artificial Sequence: Synthetic peptide
  Seed: ATRGLTHMMI
AMRGLTHMMY

SEQ ID NO: 31248 - protein, 10 aa, Artificial Sequence
  Description of Artificial Sequence: Synthetic peptide
  Seed: ATRGLTHMMI
AHRGLTHMMK

SEQ ID NO: 31249 - protein, 10 aa, Artificial Sequence
  Description of Artificial Sequence: Synthetic peptide
  Seed: ATRGLTHMMI
AGRGLTHMMV

SEQ ID NO: 31250 - protein, 10 aa, Artificial Sequence
  Description of Artificial Sequence: Synthetic peptide
  Seed: ATRGLTHMMI
AGRGLTHMMK

SEQ ID NO: 31251 - protein, 10 aa, Artificial Sequence
  Description of Artificial Sequence: Synthetic peptide
  Seed: ATRGLTHMMI
AGRGLTHMMA

SEQ ID NO: 31252 - protein, 9 aa, Artificial Sequence
  Description of Artificial Sequence: Synthetic peptide
  Seed: ATRGLTHMM
AVRGLTHMW

SEQ ID NO: 31253 - protein, 9 aa, Artificial Sequence
  Description of Artificial Sequence: Synthetic peptide
  Seed: ATRGLTHMM
AVRGLTHMY

SEQ ID NO: 31254 - protein, 9 aa, Artificial Sequence
  Description of Artificial Sequence: Synthetic peptide
  Seed: ATRGLTHMM
AVRGLTHMV

SEQ ID NO: 31255 - protein, 10 aa, Artificial Sequence
  Description of Artificial Sequence: Synthetic peptide
  Seed: ATRGLTHMMI
AARGLTHMMA

SEQ ID NO: 31256 - protein, 10 aa, Artificial Sequence
  Description of Artificial Sequence: Synthetic peptide
  Seed: ATRGLTHMMI
AARGLTHMMR

SEQ ID NO: 31257 - protein, 10 aa, Artificial Sequence
  Description of Artificial Sequence: Synthetic peptide
  Seed: ATRGLTHMMI
AARGLTHMMI

SEQ ID NO: 31258 - protein, 10 aa, Artificial Sequence
  Description of Artificial Sequence: Synthetic peptide
  Seed: ATRGLTHMMI
AARGLTHMML

SEQ ID NO: 31259 - protein, 10 aa, Artificial Sequence
  Description of Artificial Sequence: Synthetic peptide
  Seed: ATRGLTHMMI
AARGLTHMMK

SEQ ID NO: 31260 - protein, 10 aa, Artificial Sequence
  Description of Artificial Sequence: Synthetic peptide
  Seed: ATRGLTHMMI
AARGLTHMMM

SEQ ID NO: 31261 - protein, 10 aa, Artificial Sequence
  Description of Artificial Sequence: Synthetic peptide
  Seed: ATRGLTHMMI
AARGLTHMMS

SEQ ID NO: 31262 - protein, 10 aa, Artificial Sequence
  Description of Artificial Sequence: Synthetic peptide
  Seed: ATRGLTHMMI
AARGLTHMMY

SEQ ID NO: 31263 - protein, 10 aa, Artificial Sequence
  Description of Artificial Sequence: Synthetic peptide
  Seed: ATRGLTHMMI
AARGLTHMMV

SEQ ID NO: 31264 - protein, 10 aa, Artificial Sequence
  Description of Artificial Sequence: Synthetic peptide
  Seed: ATRGLTHMMI
ANRGLTHMMA

SEQ ID NO: 31265 - protein, 10 aa, Artificial Sequence
  Description of Artificial Sequence: Synthetic peptide
  Seed: ATRGLTHMMI
ANRGLTHMMK

SEQ ID NO: 31266 - protein, 10 aa, Artificial Sequence
  Description of Artificial Sequence: Synthetic peptide
  Seed: ATRGLTHMMI
ACRGLTHMMK

SEQ ID NO: 31267 - protein, 10 aa, Artificial Sequence
  Description of Artificial Sequence: Synthetic peptide
  Seed: ATRGLTHMMI
AQRGLTHMMA

SEQ ID NO: 31268 - protein, 10 aa, Artificial Sequence
  Description of Artificial Sequence: Synthetic peptide
  Seed: ATRGLTHMMI
AQRGLTHMMI

SEQ ID NO: 31269 - protein, 10 aa, Artificial Sequence
  Description of Artificial Sequence: Synthetic peptide
  Seed: ATRGLTHMMI
AQRGLTHMMK

SEQ ID NO: 31270 - protein, 10 aa, Artificial Sequence
  Description of Artificial Sequence: Synthetic peptide
  Seed: ATRGLTHMMI
AQRGLTHMMV

SEQ ID NO: 31271 - protein, 10 aa, Artificial Sequence
  Description of Artificial Sequence: Synthetic peptide
  Seed: ATRGLTHMMI
AMRGLTHMMV

SEQ ID NO: 31272 - protein, 10 aa, Artificial Sequence
  Description of Artificial Sequence: Synthetic peptide
  Seed: ATRGLTHMMI
AFRGLTHMMA

SEQ ID NO: 31273 - protein, 10 aa, Artificial Sequence
  Description of Artificial Sequence: Synthetic peptide
  Seed: ATRGLTHMMI
AFRGLTHMMI

SEQ ID NO: 31274 - protein, 10 aa, Artificial Sequence
  Description of Artificial Sequence: Synthetic peptide
  Seed: ATRGLTHMMI
ATRGLTHMMQ

SEQ ID NO: 31275 - protein, 10 aa, Artificial Sequence
  Description of Artificial Sequence: Synthetic peptide
  Seed: ATRGLTHMMI
ATRGLTHMMG

SEQ ID NO: 31276 - protein, 10 aa, Artificial Sequence
  Description of Artificial Sequence: Synthetic peptide
  Seed: ATRGLTHMMI
ATRGLTHMMH

SEQ ID NO: 31277 - protein, 10 aa, Artificial Sequence
  Description of Artificial Sequence: Synthetic peptide
  Seed: ATRGLTHMMI
ATRGLTHMML

SEQ ID NO: 31278 - protein, 10 aa, Artificial Sequence
  Description of Artificial Sequence: Synthetic peptide
  Seed: ATRGLTHMMI
ATRGLTHMMK

SEQ ID NO: 31279 - protein, 10 aa, Artificial Sequence
  Description of Artificial Sequence: Synthetic peptide
  Seed: ATRGLTHMMI
ATRGLTHMMM

SEQ ID NO: 31280 - protein, 10 aa, Artificial Sequence
  Description of Artificial Sequence: Synthetic peptide
  Seed: ATRGLTHMMI
ATRGLTHMMF

SEQ ID NO: 31281 - protein, 10 aa, Artificial Sequence
  Description of Artificial Sequence: Synthetic peptide
  Seed: ATRGLTHMMI
ATRGLTHMMP

SEQ ID NO: 31282 - protein, 10 aa, Artificial Sequence
  Description of Artificial Sequence: Synthetic peptide
  Seed: ATRGLTHMMI
ATRGLTHMMS

SEQ ID NO: 31283 - protein, 10 aa, Artificial Sequence
  Description of Artificial Sequence: Synthetic peptide
  Seed: ATRGLTHMMI
ATRGLTHMMT

SEQ ID NO: 31284 - protein, 10 aa, Artificial Sequence
  Description of Artificial Sequence: Synthetic peptide
  Seed: ATRGLTHMMI
ATRGLTHMMY

SEQ ID NO: 31285 - protein, 10 aa, Artificial Sequence
  Description of Artificial Sequence: Synthetic peptide
  Seed: ATRGLTHMMI
ATRGLTHMMV

SEQ ID NO: 31286 - protein, 10 aa, Artificial Sequence
  Description of Artificial Sequence: Synthetic peptide
  Seed: ATRGLTHMMI
AWRGLTHMMA

SEQ ID NO: 31287 - protein, 10 aa, Artificial Sequence
  Description of Artificial Sequence: Synthetic peptide
  Seed: ATRGLTHMMI
AWRGLTHMMI

SEQ ID NO: 31288 - protein, 10 aa, Artificial Sequence
  Description of Artificial Sequence: Synthetic peptide
  Seed: ATRGLTHMMI
AWRGLTHMMK

SEQ ID NO: 31289 - protein, 10 aa, Artificial Sequence
  Description of Artificial Sequence: Synthetic peptide
  Seed: ATRGLTHMMI
AWRGLTHMMV

SEQ ID NO: 31290 - protein, 10 aa, Artificial Sequence
  Description of Artificial Sequence: Synthetic peptide
  Seed: ATRGLTHMMI
AYRGLTHMMA

SEQ ID NO: 31291 - protein, 10 aa, Artificial Sequence
  Description of Artificial Sequence: Synthetic peptide
  Seed: ATRGLTHMMI
AYRGLTHMMR

SEQ ID NO: 31292 - protein, 10 aa, Artificial Sequence
  Description of Artificial Sequence: Synthetic peptide
  Seed: ATRGLTHMMI
AYRGLTHMMG

SEQ ID NO: 31293 - protein, 10 aa, Artificial Sequence
  Description of Artificial Sequence: Synthetic peptide
  Seed: ATRGLTHMMI
AYRGLTHMMI

SEQ ID NO: 31294 - protein, 10 aa, Artificial Sequence
  Description of Artificial Sequence: Synthetic peptide
  Seed: ATRGLTHMMI
ATRGLTHMME

SEQ ID NO: 31295 - protein, 10 aa, Artificial Sequence
  Description of Artificial Sequence: Synthetic peptide
  Seed: ATRGLTHMMI
ATRGLTHMMC

SEQ ID NO: 31296 - protein, 10 aa, Artificial Sequence
  Description of Artificial Sequence: Synthetic peptide
  Seed: ATRGLTHMMI
AFRGLTHMMK

SEQ ID NO: 31297 - protein, 10 aa, Artificial Sequence
  Description of Artificial Sequence: Synthetic peptide
  Seed: ATRGLTHMMI
ATRGLTHMMN

SEQ ID NO: 31298 - protein, 10 aa, Artificial Sequence
  Description of Artificial Sequence: Synthetic peptide
  Seed: ATRGLTHMMI
AFRGLTHMMV

SEQ ID NO: 31299 - protein, 10 aa, Artificial Sequence
  Description of Artificial Sequence: Synthetic peptide
  Seed: ATRGLTHMMI
ASRGLTHMMA

SEQ ID NO: 31300 - protein, 10 aa, Artificial Sequence
  Description of Artificial Sequence: Synthetic peptide
  Seed: ATRGLTHMMI
ASRGLTHMMR

SEQ ID NO: 31301 - protein, 10 aa, Artificial Sequence
  Description of Artificial Sequence: Synthetic peptide
  Seed: ATRGLTHMMI
ASRGLTHMMC

SEQ ID NO: 31302 - protein, 10 aa, Artificial Sequence
  Description of Artificial Sequence: Synthetic peptide
  Seed: ATRGLTHMMI
ASRGLTHMMQ

SEQ ID NO: 31303 - protein, 10 aa, Artificial Sequence
  Description of Artificial Sequence: Synthetic peptide
  Seed: ATRGLTHMMI
ASRGLTHMMG

SEQ ID NO: 31304 - protein, 10 aa, Artificial Sequence
  Description of Artificial Sequence: Synthetic peptide
  Seed: ATRGLTHMMI
ASRGLTHMMH

SEQ ID NO: 31305 - protein, 10 aa, Artificial Sequence
  Description of Artificial Sequence: Synthetic peptide
  Seed: ATRGLTHMMI
ASRGLTHMMI

SEQ ID NO: 31306 - protein, 10 aa, Artificial Sequence
  Description of Artificial Sequence: Synthetic peptide
  Seed: ATRGLTHMMI
ASRGLTHMML

SEQ ID NO: 31307 - protein, 10 aa, Artificial Sequence
  Description of Artificial Sequence: Synthetic peptide
  Seed: ATRGLTHMMI
ASRGLTHMMK

SEQ ID NO: 31308 - protein, 10 aa, Artificial Sequence
  Description of Artificial Sequence: Synthetic peptide
  Seed: ATRGLTHMMI
ASRGLTHMMM

SEQ ID NO: 31309 - protein, 10 aa, Artificial Sequence
  Description of Artificial Sequence: Synthetic peptide
  Seed: ATRGLTHMMI
ASRGLTHMMF

SEQ ID NO: 31310 - protein, 10 aa, Artificial Sequence
  Description of Artificial Sequence: Synthetic peptide
  Seed: ATRGLTHMMI
ASRGLTHMMP

SEQ ID NO: 31311 - protein, 10 aa, Artificial Sequence
  Description of Artificial Sequence: Synthetic peptide
  Seed: ATRGLTHMMI
ASRGLTHMMS

SEQ ID NO: 31312 - protein, 10 aa, Artificial Sequence
  Description of Artificial Sequence: Synthetic peptide
  Seed: ATRGLTHMMI
ASRGLTHMMT

SEQ ID NO: 31313 - protein, 10 aa, Artificial Sequence
  Description of Artificial Sequence: Synthetic peptide
  Seed: ATRGLTHMMI
ASRGLTHMMY

SEQ ID NO: 31314 - protein, 10 aa, Artificial Sequence
  Description of Artificial Sequence: Synthetic peptide
  Seed: ATRGLTHMMI
ASRGLTHMMV

SEQ ID NO: 31315 - protein, 10 aa, Artificial Sequence
  Description of Artificial Sequence: Synthetic peptide
  Seed: ATRGLTHMMI
ATRGLTHMMA

SEQ ID NO: 31316 - protein, 10 aa, Artificial Sequence
  Description of Artificial Sequence: Synthetic peptide
  Seed: ATRGLTHMMI
ATRGLTHMMR

SEQ ID NO: 31317 - protein, 9 aa, Artificial Sequence
  Description of Artificial Sequence: Synthetic peptide
  Seed: ATNPIVPSF
AFNPIVPSL

SEQ ID NO: 31318 - protein, 9 aa, Artificial Sequence
  Description of Artificial Sequence: Synthetic peptide
  Seed: ATNPIVPSF
AFNPIVPSI

SEQ ID NO: 31319 - protein, 9 aa, Artificial Sequence
  Description of Artificial Sequence: Synthetic peptide
  Seed: ATNPIVPSF
AMNPIVPSV

SEQ ID NO: 31320 - protein, 10 aa, Artificial Sequence
  Description of Artificial Sequence: Synthetic peptide
  Seed: ATAGLTHLMI
APAGLTHLMT

SEQ ID NO: 31321 - protein, 10 aa, Artificial Sequence
  Description of Artificial Sequence: Synthetic peptide
  Seed: ATAGLTHLMI
APAGLTHLMA

SEQ ID NO: 31322 - protein, 10 aa, Artificial Sequence
  Description of Artificial Sequence: Synthetic peptide
  Seed: ATAGLTHLMI
APAGLTHLMC

SEQ ID NO: 31323 - protein, 10 aa, Artificial Sequence
  Description of Artificial Sequence: Synthetic peptide
  Seed: ATAGLTHLMI
APAGLTHLMG

SEQ ID NO: 31324 - protein, 10 aa, Artificial Sequence
  Description of Artificial Sequence: Synthetic peptide
  Seed: ATAGLTHLMI
APAGLTHLMH

SEQ ID NO: 31325 - protein, 10 aa, Artificial Sequence
  Description of Artificial Sequence: Synthetic peptide
  Seed: ATAGLTHLMI
APAGLTHLML

SEQ ID NO: 31326 - protein, 10 aa, Artificial Sequence
  Description of Artificial Sequence: Synthetic peptide
  Seed: ATAGLTHLMI
APAGLTHLMM

SEQ ID NO: 31327 - protein, 10 aa, Artificial Sequence
  Description of Artificial Sequence: Synthetic peptide
  Seed: ATAGLTHLMI
APAGLTHLMF

SEQ ID NO: 31328 - protein, 10 aa, Artificial Sequence
  Description of Artificial Sequence: Synthetic peptide
  Seed: ATAGLTHLMI
APAGLTHLMS

SEQ ID NO: 31329 - protein, 10 aa, Artificial Sequence
  Description of Artificial Sequence: Synthetic peptide
  Seed: ATAGLTHLMI
APAGLTHLMW

SEQ ID NO: 31330 - protein, 9 aa, Artificial Sequence
  Description of Artificial Sequence: Synthetic peptide
  Seed: ATAGLTHMM
AAAGLTHMW

SEQ ID NO: 31331 - protein, 10 aa, Artificial Sequence
  Description of Artificial Sequence: Synthetic peptide
  Seed: ATAGLTHLMI
APAGLTHLMY

SEQ ID NO: 31332 - protein, 10 aa, Artificial Sequence
  Description of Artificial Sequence: Synthetic peptide
  Seed: ATAGLTHLMI
APAGLTHLMV

SEQ ID NO: 31333 - protein, 9 aa, Artificial Sequence
  Description of Artificial Sequence: Synthetic peptide
  Seed: ATAGLTHMM
AAAGLTHMA

SEQ ID NO: 31334 - protein, 9 aa, Artificial Sequence
  Description of Artificial Sequence: Synthetic peptide
  Seed: ATAGLTHMM
AAAGLTHMR

SEQ ID NO: 31335 - protein, 9 aa, Artificial Sequence
  Description of Artificial Sequence: Synthetic peptide
  Seed: ATAGLTHMM
AAAGLTHMI

SEQ ID NO: 31336 - protein, 9 aa, Artificial Sequence
  Description of Artificial Sequence: Synthetic peptide
  Seed: ATAGLTHMM
AAAGLTHML

SEQ ID NO: 31337 - protein, 9 aa, Artificial Sequence
  Description of Artificial Sequence: Synthetic peptide
  Seed: ATAGLTHMM
AAAGLTHMM

SEQ ID NO: 31338 - protein, 9 aa, Artificial Sequence
  Description of Artificial Sequence: Synthetic peptide
  Seed: ATAGLTHLM
AVAGLTHLY

SEQ ID NO: 31339 - protein, 9 aa, Artificial Sequence
  Description of Artificial Sequence: Synthetic peptide
  Seed: ATAGLTHLM
AVAGLTHLW

SEQ ID NO: 31340 - protein, 9 aa, Artificial Sequence
  Description of Artificial Sequence: Synthetic peptide
  Seed: ATAGLTHLM
AVAGLTHLF

SEQ ID NO: 31341 - protein, 9 aa, Artificial Sequence
  Description of Artificial Sequence: Synthetic peptide
  Seed: ATAGLTHLM
ATAGLTHLY

SEQ ID NO: 31342 - protein, 9 aa, Artificial Sequence
  Description of Artificial Sequence: Synthetic peptide
  Seed: ATAGLTHLM
AAAGLTHLA

SEQ ID NO: 31343 - protein, 9 aa, Artificial Sequence
  Description of Artificial Sequence: Synthetic peptide
  Seed: ATAGLTHLM
AAAGLTHLF

SEQ ID NO: 31344 - protein, 9 aa, Artificial Sequence
  Description of Artificial Sequence: Synthetic peptide
  Seed: ATAGLTHLM
AAAGLTHLW

SEQ ID NO: 31345 - protein, 9 aa, Artificial Sequence
  Description of Artificial Sequence: Synthetic peptide
  Seed: ATAGLTHLM
AAAGLTHLY

SEQ ID NO: 31346 - protein, 9 aa, Artificial Sequence
  Description of Artificial Sequence: Synthetic peptide
  Seed: ATAGLTHLM
AIAGLTHLY

SEQ ID NO: 31347 - protein, 9 aa, Artificial Sequence
  Description of Artificial Sequence: Synthetic peptide
  Seed: ATAGLTHLM
AMAGLTHLY

SEQ ID NO: 31348 - protein, 9 aa, Artificial Sequence
  Description of Artificial Sequence: Synthetic peptide
  Seed: ATAGLTHLM
APAGLTHLA

SEQ ID NO: 31349 - protein, 9 aa, Artificial Sequence
  Description of Artificial Sequence: Synthetic peptide
  Seed: ATAGLTHLM
APAGLTHLC

SEQ ID NO: 31350 - protein, 9 aa, Artificial Sequence
  Description of Artificial Sequence: Synthetic peptide
  Seed: ATAGLTHLM
APAGLTHLH

SEQ ID NO: 31351 - protein, 9 aa, Artificial Sequence
  Description of Artificial Sequence: Synthetic peptide
  Seed: ATAGLTHLM
APAGLTHLI

SEQ ID NO: 31352 - protein, 9 aa, Artificial Sequence
  Description of Artificial Sequence: Synthetic peptide
  Seed: ATAGLTHLM
APAGLTHLL

SEQ ID NO: 31353 - protein, 9 aa, Artificial Sequence
  Description of Artificial Sequence: Synthetic peptide
  Seed: ATAGLTHLM
APAGLTHLF

SEQ ID NO: 31354 - protein, 9 aa, Artificial Sequence
  Description of Artificial Sequence: Synthetic peptide
  Seed: ATAGLTHLM
APAGLTHLT

SEQ ID NO: 31355 - protein, 9 aa, Artificial Sequence
  Description of Artificial Sequence: Synthetic peptide
  Seed: ATAGLTHLM
APAGLTHLW

SEQ ID NO: 31356 - protein, 9 aa, Artificial Sequence
  Description of Artificial Sequence: Synthetic peptide
  Seed: ATAGLTHLM
APAGLTHLY

SEQ ID NO: 31357 - protein, 9 aa, Artificial Sequence
  Description of Artificial Sequence: Synthetic peptide
  Seed: ATAGLTHLM
APAGLTHLV

SEQ ID NO: 31358 - protein, 9 aa, Artificial Sequence
  Description of Artificial Sequence: Synthetic peptide
  Seed: ATAGLTHLM
ASAGLTHLY

SEQ ID NO: 31359 - protein, 9 aa, Artificial Sequence
  Description of Artificial Sequence: Synthetic peptide
  Seed: ATAGLTHMM
AAAGLTHMF

SEQ ID NO: 31360 - protein, 9 aa, Artificial Sequence
  Description of Artificial Sequence: Synthetic peptide
  Seed: ATAGLTHMM
AAAGLTHMY

SEQ ID NO: 31361 - protein, 9 aa, Artificial Sequence
  Description of Artificial Sequence: Synthetic peptide
  Seed: ATAGLTHMM
AMAGLTHMF

SEQ ID NO: 31362 - protein, 9 aa, Artificial Sequence
  Description of Artificial Sequence: Synthetic peptide
  Seed: ATAGLTHMM
ALAGLTHMF

SEQ ID NO: 31363 - protein, 9 aa, Artificial Sequence
  Description of Artificial Sequence: Synthetic peptide
  Seed: ATAGLTHMM
AIAGLTHMW

SEQ ID NO: 31364 - protein, 9 aa, Artificial Sequence
  Description of Artificial Sequence: Synthetic peptide
  Seed: ATAGLTHMM
AIAGLTHMY

SEQ ID NO: 31365 - protein, 9 aa, Artificial Sequence
  Description of Artificial Sequence: Synthetic peptide
  Seed: ATAGLTHMM
AIAGLTHMV

SEQ ID NO: 31366 - protein, 9 aa, Artificial Sequence
  Description of Artificial Sequence: Synthetic peptide
  Seed: ATAGLTHMM
ALAGLTHMA

SEQ ID NO: 31367 - protein, 9 aa, Artificial Sequence
  Description of Artificial Sequence: Synthetic peptide
  Seed: ATAGLTHMM
ALAGLTHMC

SEQ ID NO: 31368 - protein, 9 aa, Artificial Sequence
  Description of Artificial Sequence: Synthetic peptide
  Seed: ATAGLTHMM
ALAGLTHMG

SEQ ID NO: 31369 - protein, 9 aa, Artificial Sequence
  Description of Artificial Sequence: Synthetic peptide
  Seed: ATAGLTHMM
ALAGLTHMI

SEQ ID NO: 31370 - protein, 9 aa, Artificial Sequence
  Description of Artificial Sequence: Synthetic peptide
  Seed: ATAGLTHMM
ALAGLTHML

SEQ ID NO: 31371 - protein, 9 aa, Artificial Sequence
  Description of Artificial Sequence: Synthetic peptide
  Seed: ATAGLTHMM
ALAGLTHMM

SEQ ID NO: 31372 - protein, 9 aa, Artificial Sequence
  Description of Artificial Sequence: Synthetic peptide
  Seed: ATAGLTHMM
ALAGLTHMS

SEQ ID NO: 31373 - protein, 9 aa, Artificial Sequence
  Description of Artificial Sequence: Synthetic peptide
  Seed: ATAGLTHMM
AAAGLTHMV

SEQ ID NO: 31374 - protein, 9 aa, Artificial Sequence
  Description of Artificial Sequence: Synthetic peptide
  Seed: ATAGLTHMM
ALAGLTHMT

SEQ ID NO: 31375 - protein, 9 aa, Artificial Sequence
  Description of Artificial Sequence: Synthetic peptide
  Seed: ATAGLTHMM
ALAGLTHMW

SEQ ID NO: 31376 - protein, 9 aa, Artificial Sequence
  Description of Artificial Sequence: Synthetic peptide
  Seed: ATAGLTHMM
ALAGLTHMY

SEQ ID NO: 31377 - protein, 9 aa, Artificial Sequence
  Description of Artificial Sequence: Synthetic peptide
  Seed: ATAGLTHMM
ALAGLTHMV

SEQ ID NO: 31378 - protein, 9 aa, Artificial Sequence
  Description of Artificial Sequence: Synthetic peptide
  Seed: ATAGLTHMM
AMAGLTHMA

SEQ ID NO: 31379 - protein, 9 aa, Artificial Sequence
  Description of Artificial Sequence: Synthetic peptide
  Seed: ATAGLTHMM
AMAGLTHMC

SEQ ID NO: 31380 - protein, 9 aa, Artificial Sequence
  Description of Artificial Sequence: Synthetic peptide
  Seed: ATAGLTHMM
AMAGLTHMG

SEQ ID NO: 31381 - protein, 9 aa, Artificial Sequence
  Description of Artificial Sequence: Synthetic peptide
  Seed: ATAGLTHMM
AMAGLTHMI

SEQ ID NO: 31382 - protein, 9 aa, Artificial Sequence
  Description of Artificial Sequence: Synthetic peptide
  Seed: ATAGLTHMM
AMAGLTHML

SEQ ID NO: 31383 - protein, 9 aa, Artificial Sequence
  Description of Artificial Sequence: Synthetic peptide
  Seed: ATAGLTHMM
AIAGLTHMF

SEQ ID NO: 31384 - protein, 9 aa, Artificial Sequence
  Description of Artificial Sequence: Synthetic peptide
  Seed: ATAGLTHMM
AIAGLTHMM

SEQ ID NO: 31385 - protein, 9 aa, Artificial Sequence
  Description of Artificial Sequence: Synthetic peptide
  Seed: ATAGLTHMM
AIAGLTHML

SEQ ID NO: 31386 - protein, 9 aa, Artificial Sequence
  Description of Artificial Sequence: Synthetic peptide
  Seed: ATAGLTHMM
AIAGLTHMI

SEQ ID NO: 31387 - protein, 9 aa, Artificial Sequence
  Description of Artificial Sequence: Synthetic peptide
  Seed: ATAGLTHMM
ANAGLTHMF

SEQ ID NO: 31388 - protein, 9 aa, Artificial Sequence
  Description of Artificial Sequence: Synthetic peptide
  Seed: ATAGLTHMM
ANAGLTHMY

SEQ ID NO: 31389 - protein, 9 aa, Artificial Sequence
  Description of Artificial Sequence: Synthetic peptide
  Seed: ATAGLTHMM
ANAGLTHMV

SEQ ID NO: 31390 - protein, 9 aa, Artificial Sequence
  Description of Artificial Sequence: Synthetic peptide
  Seed: ATAGLTHMM
ACAGLTHMY

SEQ ID NO: 31391 - protein, 9 aa, Artificial Sequence
  Description of Artificial Sequence: Synthetic peptide
  Seed: ATAGLTHMM
AQAGLTHMA

SEQ ID NO: 31392 - protein, 9 aa, Artificial Sequence
  Description of Artificial Sequence: Synthetic peptide
  Seed: ATAGLTHMM
AQAGLTHMC

SEQ ID NO: 31393 - protein, 9 aa, Artificial Sequence
  Description of Artificial Sequence: Synthetic peptide
  Seed: ATAGLTHMM
AQAGLTHMI

SEQ ID NO: 31394 - protein, 9 aa, Artificial Sequence
  Description of Artificial Sequence: Synthetic peptide
  Seed: ATAGLTHMM
AQAGLTHML

SEQ ID NO: 31395 - protein, 9 aa, Artificial Sequence
  Description of Artificial Sequence: Synthetic peptide
  Seed: ATAGLTHMM
AQAGLTHMM

SEQ ID NO: 31396 - protein, 9 aa, Artificial Sequence
  Description of Artificial Sequence: Synthetic peptide
  Seed: ATAGLTHMM
AQAGLTHMF

SEQ ID NO: 31397 - protein, 9 aa, Artificial Sequence
  Description of Artificial Sequence: Synthetic peptide
  Seed: ATAGLTHMM
AQAGLTHMT

SEQ ID NO: 31398 - protein, 9 aa, Artificial Sequence
  Description of Artificial Sequence: Synthetic peptide
  Seed: ATAGLTHMM
AQAGLTHMY

SEQ ID NO: 31399 - protein, 9 aa, Artificial Sequence
  Description of Artificial Sequence: Synthetic peptide
  Seed: ATAGLTHMM
AQAGLTHMV

SEQ ID NO: 31400 - protein, 9 aa, Artificial Sequence
  Description of Artificial Sequence: Synthetic peptide
  Seed: ATAGLTHMM
AGAGLTHMW

SEQ ID NO: 31401 - protein, 9 aa, Artificial Sequence
  Description of Artificial Sequence: Synthetic peptide
  Seed: ATAGLTHMM
AGAGLTHMY

SEQ ID NO: 31402 - protein, 9 aa, Artificial Sequence
  Description of Artificial Sequence: Synthetic peptide
  Seed: ATAGLTHMM
AGAGLTHMV

SEQ ID NO: 31403 - protein, 9 aa, Artificial Sequence
  Description of Artificial Sequence: Synthetic peptide
  Seed: ATAGLTHMM
AHAGLTHMY

SEQ ID NO: 31404 - protein, 9 aa, Artificial Sequence
  Description of Artificial Sequence: Synthetic peptide
  Seed: ATAGLTHMM
AIAGLTHMA

SEQ ID NO: 31405 - protein, 9 aa, Artificial Sequence
  Description of Artificial Sequence: Synthetic peptide
  Seed: ATAGLTHMM
AIAGLTHMR

SEQ ID NO: 31406 - protein, 11 aa, Artificial Sequence
  Description of Artificial Sequence: Synthetic peptide
  Seed: ATAGLTHIMIW
AVAGLTHIMIW

SEQ ID NO: 31407 - protein, 11 aa, Artificial Sequence
  Description of Artificial Sequence: Synthetic peptide
  Seed: ATAGLTHIMIW
ATAGLTHIMIY

SEQ ID NO: 31408 - protein, 11 aa, Artificial Sequence
  Description of Artificial Sequence: Synthetic peptide
  Seed: ATAGLTHIMIW
ATAGLTHIMIF

SEQ ID NO: 31409 - protein, 9 aa, Artificial Sequence
  Description of Artificial Sequence: Synthetic peptide
  Seed: ATAGLTHIM
AMAGLTHIA

SEQ ID NO: 31410 - protein, 9 aa, Artificial Sequence
  Description of Artificial Sequence: Synthetic peptide
  Seed: ATAGLTHIM
AIAGLTHIV

SEQ ID NO: 31411 - protein, 9 aa, Artificial Sequence
  Description of Artificial Sequence: Synthetic peptide
  Seed: ATAGLTHIM
ALAGLTHIA

SEQ ID NO: 31412 - protein, 9 aa, Artificial Sequence
  Description of Artificial Sequence: Synthetic peptide
  Seed: ATAGLTHIM
ALAGLTHII

SEQ ID NO: 31413 - protein, 9 aa, Artificial Sequence
  Description of Artificial Sequence: Synthetic peptide
  Seed: ATAGLTHIM
ALAGLTHIL

SEQ ID NO: 31414 - protein, 9 aa, Artificial Sequence
  Description of Artificial Sequence: Synthetic peptide
  Seed: ATAGLTHIM
ALAGLTHIM

SEQ ID NO: 31415 - protein, 9 aa, Artificial Sequence
  Description of Artificial Sequence: Synthetic peptide
  Seed: ATAGLTHIM
ALAGLTHIF

SEQ ID NO: 31416 - protein, 9 aa, Artificial Sequence
  Description of Artificial Sequence: Synthetic peptide
  Seed: ATAGLTHIM
ALAGLTHIW

SEQ ID NO: 31417 - protein, 9 aa, Artificial Sequence
  Description of Artificial Sequence: Synthetic peptide
  Seed: ATAGLTHIM
ALAGLTHIY

SEQ ID NO: 31418 - protein, 9 aa, Artificial Sequence
  Description of Artificial Sequence: Synthetic peptide
  Seed: ATAGLTHIM
ALAGLTHIV

SEQ ID NO: 31419 - protein, 9 aa, Artificial Sequence
  Description of Artificial Sequence: Synthetic peptide
  Seed: ATAGLTHIM
AMAGLTHIH

SEQ ID NO: 31420 - protein, 11 aa, Artificial Sequence
  Description of Artificial Sequence: Synthetic peptide
  Seed: ATAGLTHIMIW
ATAGLTHIMIM

SEQ ID NO: 31421 - protein, 9 aa, Artificial Sequence
  Description of Artificial Sequence: Synthetic peptide
  Seed: ATAGLTHIM
AMAGLTHII

SEQ ID NO: 31422 - protein, 9 aa, Artificial Sequence
  Description of Artificial Sequence: Synthetic peptide
  Seed: ATAGLTHIM
AMAGLTHIL

SEQ ID NO: 31423 - protein, 9 aa, Artificial Sequence
  Description of Artificial Sequence: Synthetic peptide
  Seed: ATAGLTHIM
AMAGLTHIM

SEQ ID NO: 31424 - protein, 9 aa, Artificial Sequence
  Description of Artificial Sequence: Synthetic peptide
  Seed: ATAGLTHIM
AMAGLTHIF

SEQ ID NO: 31425 - protein, 9 aa, Artificial Sequence
  Description of Artificial Sequence: Synthetic peptide
  Seed: ATAGLTHIM
AMAGLTHIW

SEQ ID NO: 31426 - protein, 9 aa, Artificial Sequence
  Description of Artificial Sequence: Synthetic peptide
  Seed: ATAGLTHIM
AMAGLTHIY

SEQ ID NO: 31427 - protein, 9 aa, Artificial Sequence
  Description of Artificial Sequence: Synthetic peptide
  Seed: ATAGLTHIM
AMAGLTHIV

SEQ ID NO: 31428 - protein, 9 aa, Artificial Sequence
  Description of Artificial Sequence: Synthetic peptide
  Seed: ATAGLTHIM
AFAGLTHIY

SEQ ID NO: 31429 - protein, 9 aa, Artificial Sequence
  Description of Artificial Sequence: Synthetic peptide
  Seed: ATAGLTHIM
ASAGLTHII

SEQ ID NO: 31430 - protein, 9 aa, Artificial Sequence
  Description of Artificial Sequence: Synthetic peptide
  Seed: ATAGLTHIM
AIAGLTHIY

SEQ ID NO: 31431 - protein, 9 aa, Artificial Sequence
  Description of Artificial Sequence: Synthetic peptide
  Seed: ATAGLTHIM
AIAGLTHIW

SEQ ID NO: 31432 - protein, 9 aa, Artificial Sequence
  Description of Artificial Sequence: Synthetic peptide
  Seed: ATAGLTHIM
AIAGLTHIF

SEQ ID NO: 31433 - protein, 9 aa, Artificial Sequence
  Description of Artificial Sequence: Synthetic peptide
  Seed: ATAGLTHIM
AIAGLTHIM

SEQ ID NO: 31434 - protein, 9 aa, Artificial Sequence
  Description of Artificial Sequence: Synthetic peptide
  Seed: ATAGLTHIM
AAAGLTHIV

SEQ ID NO: 31435 - protein, 9 aa, Artificial Sequence
  Description of Artificial Sequence: Synthetic peptide
  Seed: ATAGLTHIM
ACAGLTHIY

SEQ ID NO: 31436 - protein, 9 aa, Artificial Sequence
  Description of Artificial Sequence: Synthetic peptide
  Seed: ATAGLTHIM
AQAGLTHIA

SEQ ID NO: 31437 - protein, 9 aa, Artificial Sequence
  Description of Artificial Sequence: Synthetic peptide
  Seed: ATAGLTHIM
AQAGLTHIH

SEQ ID NO: 31438 - protein, 9 aa, Artificial Sequence
  Description of Artificial Sequence: Synthetic peptide
  Seed: ATAGLTHIM
AQAGLTHII

SEQ ID NO: 31439 - protein, 9 aa, Artificial Sequence
  Description of Artificial Sequence: Synthetic peptide
  Seed: ATAGLTHIM
AQAGLTHIL

SEQ ID NO: 31440 - protein, 9 aa, Artificial Sequence
  Description of Artificial Sequence: Synthetic peptide
  Seed: ATAGLTHIM
AQAGLTHIM

SEQ ID NO: 31441 - protein, 9 aa, Artificial Sequence
  Description of Artificial Sequence: Synthetic peptide
  Seed: ATAGLTHIM
AQAGLTHIF

SEQ ID NO: 31442 - protein, 9 aa, Artificial Sequence
  Description of Artificial Sequence: Synthetic peptide
  Seed: ATAGLTHIM
AQAGLTHIT

SEQ ID NO: 31443 - protein, 9 aa, Artificial Sequence
  Description of Artificial Sequence: Synthetic peptide
  Seed: ATAGLTHIM
AQAGLTHIW

SEQ ID NO: 31444 - protein, 9 aa, Artificial Sequence
  Description of Artificial Sequence: Synthetic peptide
  Seed: ATAGLTHIM
AQAGLTHIY

SEQ ID NO: 31445 - protein, 9 aa, Artificial Sequence
  Description of Artificial Sequence: Synthetic peptide
  Seed: ATAGLTHIM
AQAGLTHIV

SEQ ID NO: 31446 - protein, 9 aa, Artificial Sequence
  Description of Artificial Sequence: Synthetic peptide
  Seed: ATAGLTHIM
AGAGLTHIM

SEQ ID NO: 31447 - protein, 9 aa, Artificial Sequence
  Description of Artificial Sequence: Synthetic peptide
  Seed: ATAGLTHIM
AGAGLTHIF

SEQ ID NO: 31448 - protein, 9 aa, Artificial Sequence
  Description of Artificial Sequence: Synthetic peptide
  Seed: ATAGLTHIM
AGAGLTHIW

SEQ ID NO: 31449 - protein, 9 aa, Artificial Sequence
  Description of Artificial Sequence: Synthetic peptide
  Seed: ATAGLTHIM
AGAGLTHIY

SEQ ID NO: 31450 - protein, 9 aa, Artificial Sequence
  Description of Artificial Sequence: Synthetic peptide
  Seed: ATAGLTHIM
AIAGLTHIA

SEQ ID NO: 31451 - protein, 9 aa, Artificial Sequence
  Description of Artificial Sequence: Synthetic peptide
  Seed: ATAGLTHIM
AIAGLTHII

SEQ ID NO: 31452 - protein, 9 aa, Artificial Sequence
  Description of Artificial Sequence: Synthetic peptide
  Seed: ATAGLTHIM
AIAGLTHIL

SEQ ID NO: 31453 - protein, 9 aa, Artificial Sequence
  Description of Artificial Sequence: Synthetic peptide
  Seed: ATAGLTHIM
ASAGLTHIL

SEQ ID NO: 31454 - protein, 9 aa, Artificial Sequence
  Description of Artificial Sequence: Synthetic peptide
  Seed: ATAGLTHIM
ASAGLTHIM

SEQ ID NO: 31455 - protein, 9 aa, Artificial Sequence
  Description of Artificial Sequence: Synthetic peptide
  Seed: ATAGLTHIM
ASAGLTHIF

SEQ ID NO: 31456 - protein, 10 aa, Artificial Sequence
  Description of Artificial Sequence: Synthetic peptide
  Seed: ATAGLTHIMI
AIAGLTHIMV

SEQ ID NO: 31457 - protein, 10 aa, Artificial Sequence
  Description of Artificial Sequence: Synthetic peptide
  Seed: ATAGLTHIMI
ATAGLTHIMA

SEQ ID NO: 31458 - protein, 10 aa, Artificial Sequence
  Description of Artificial Sequence: Synthetic peptide
  Seed: ATAGLTHIMI
ATAGLTHIML

SEQ ID NO: 31459 - protein, 10 aa, Artificial Sequence
  Description of Artificial Sequence: Synthetic peptide
  Seed: ATAGLTHIMI
ATAGLTHIMM

SEQ ID NO: 31460 - protein, 10 aa, Artificial Sequence
  Description of Artificial Sequence: Synthetic peptide
  Seed: ATAGLTHIMI
ATAGLTHIMV

SEQ ID NO: 31461 - protein, 10 aa, Artificial Sequence
  Description of Artificial Sequence: Synthetic peptide
  Seed: ATAGLTHIMI
AVAGLTHIMI

SEQ ID NO: 31462 - protein, 10 aa, Artificial Sequence
  Description of Artificial Sequence: Synthetic peptide
  Seed: ATAGLTHIMI
AVAGLTHIMV

SEQ ID NO: 31463 - protein, 11 aa, Artificial Sequence
  Description of Artificial Sequence: Synthetic peptide
  Seed: ATAGLTHIMIW
AAAGLTHIMIF

SEQ ID NO: 31464 - protein, 11 aa, Artificial Sequence
  Description of Artificial Sequence: Synthetic peptide
  Seed: ATAGLTHIMIW
AAAGLTHIMIW

SEQ ID NO: 31465 - protein, 11 aa, Artificial Sequence
  Description of Artificial Sequence: Synthetic peptide
  Seed: ATAGLTHIMIW
AAAGLTHIMIY

SEQ ID NO: 31466 - protein, 11 aa, Artificial Sequence
  Description of Artificial Sequence: Synthetic peptide
  Seed: ATAGLTHIMIW
ARAGLTHIMIW

SEQ ID NO: 31467 - protein, 11 aa, Artificial Sequence
  Description of Artificial Sequence: Synthetic peptide
  Seed: ATAGLTHIMIW
AGAGLTHIMIW

SEQ ID NO: 31468 - protein, 11 aa, Artificial Sequence
  Description of Artificial Sequence: Synthetic peptide
  Seed: ATAGLTHIMIW
AIAGLTHIMIW

SEQ ID NO: 31469 - protein, 11 aa, Artificial Sequence
  Description of Artificial Sequence: Synthetic peptide
  Seed: ATAGLTHIMIW
AKAGLTHIMIW

SEQ ID NO: 31470 - protein, 11 aa, Artificial Sequence
  Description of Artificial Sequence: Synthetic peptide
  Seed: ATAGLTHIMIW
AMAGLTHIMIW

SEQ ID NO: 31471 - protein, 11 aa, Artificial Sequence
  Description of Artificial Sequence: Synthetic peptide
  Seed: ATAGLTHIMIW
ASAGLTHIMIL

SEQ ID NO: 31472 - protein, 11 aa, Artificial Sequence
  Description of Artificial Sequence: Synthetic peptide
  Seed: ATAGLTHIMIW
ASAGLTHIMIM

SEQ ID NO: 31473 - protein, 11 aa, Artificial Sequence
  Description of Artificial Sequence: Synthetic peptide
  Seed: ATAGLTHIMIW
ASAGLTHIMIF

SEQ ID NO: 31474 - protein, 11 aa, Artificial Sequence
  Description of Artificial Sequence: Synthetic peptide
  Seed: ATAGLTHIMIW
ASAGLTHIMIW

SEQ ID NO: 31475 - protein, 11 aa, Artificial Sequence
  Description of Artificial Sequence: Synthetic peptide
  Seed: ATAGLTHIMIW
ASAGLTHIMIY

SEQ ID NO: 31476 - protein, 10 aa, Artificial Sequence
  Description of Artificial Sequence: Synthetic peptide
  Seed: ATAGLTHIMI
ASAGLTHIMV

SEQ ID NO: 31477 - protein, 10 aa, Artificial Sequence
  Description of Artificial Sequence: Synthetic peptide
  Seed: ATAGLTHIMI
AAAGLTHIMV

SEQ ID NO: 31478 - protein, 9 aa, Artificial Sequence
  Description of Artificial Sequence: Synthetic peptide
  Seed: ATAGLTHIM
ASAGLTHIW

SEQ ID NO: 31479 - protein, 9 aa, Artificial Sequence
  Description of Artificial Sequence: Synthetic peptide
  Seed: ATAGLTHIM
AVAGLTHIV

SEQ ID NO: 31480 - protein, 9 aa, Artificial Sequence
  Description of Artificial Sequence: Synthetic peptide
  Seed: ATAGLTHIM
ASAGLTHIY

SEQ ID NO: 31481 - protein, 9 aa, Artificial Sequence
  Description of Artificial Sequence: Synthetic peptide
  Seed: ATAGLTHIM
ASAGLTHIV

SEQ ID NO: 31482 - protein, 9 aa, Artificial Sequence
  Description of Artificial Sequence: Synthetic peptide
  Seed: ATAGLTHIM
ATAGLTHIA

SEQ ID NO: 31483 - protein, 9 aa, Artificial Sequence
  Description of Artificial Sequence: Synthetic peptide
  Seed: ATAGLTHIM
ATAGLTHIR

SEQ ID NO: 31484 - protein, 9 aa, Artificial Sequence
  Description of Artificial Sequence: Synthetic peptide
  Seed: ATAGLTHIM
ATAGLTHII

SEQ ID NO: 31485 - protein, 9 aa, Artificial Sequence
  Description of Artificial Sequence: Synthetic peptide
  Seed: ATAGLTHIM
ATAGLTHIL

SEQ ID NO: 31486 - protein, 9 aa, Artificial Sequence
  Description of Artificial Sequence: Synthetic peptide
  Seed: ATAGLTHIM
ATAGLTHIK

SEQ ID NO: 31487 - protein, 9 aa, Artificial Sequence
  Description of Artificial Sequence: Synthetic peptide
  Seed: ATAGLTHIM
ATAGLTHIF

SEQ ID NO: 31488 - protein, 9 aa, Artificial Sequence
  Description of Artificial Sequence: Synthetic peptide
  Seed: ATAGLTHIM
ATAGLTHIW

SEQ ID NO: 31489 - protein, 9 aa, Artificial Sequence
  Description of Artificial Sequence: Synthetic peptide
  Seed: ATAGLTHIM
ATAGLTHIY

SEQ ID NO: 31490 - protein, 9 aa, Artificial Sequence
  Description of Artificial Sequence: Synthetic peptide
  Seed: ATAGLTHIM
ATAGLTHIV

SEQ ID NO: 31491 - protein, 9 aa, Artificial Sequence
  Description of Artificial Sequence: Synthetic peptide
  Seed: ATAGLTHIM
AVAGLTHIA

SEQ ID NO: 31492 - protein, 9 aa, Artificial Sequence
  Description of Artificial Sequence: Synthetic peptide
  Seed: ATAGLTHIM
AVAGLTHIR

SEQ ID NO: 31493 - protein, 9 aa, Artificial Sequence
  Description of Artificial Sequence: Synthetic peptide
  Seed: ATAGLTHIM
AVAGLTHII

SEQ ID NO: 31494 - protein, 9 aa, Artificial Sequence
  Description of Artificial Sequence: Synthetic peptide
  Seed: ATAGLTHIM
AVAGLTHIL

SEQ ID NO: 31495 - protein, 9 aa, Artificial Sequence
  Description of Artificial Sequence: Synthetic peptide
  Seed: ATAGLTHIM
AVAGLTHIM

SEQ ID NO: 31496 - protein, 9 aa, Artificial Sequence
  Description of Artificial Sequence: Synthetic peptide
  Seed: ATAGLTHIM
AVAGLTHIF

SEQ ID NO: 31497 - protein, 9 aa, Artificial Sequence
  Description of Artificial Sequence: Synthetic peptide
  Seed: ATAGLTHIM
AVAGLTHIW

SEQ ID NO: 31498 - protein, 9 aa, Artificial Sequence
  Description of Artificial Sequence: Synthetic peptide
  Seed: ATAGLTHIM
AVAGLTHIY

SEQ ID NO: 31499 - protein, 9 aa, Artificial Sequence
  Description of Artificial Sequence: Synthetic peptide
  Seed: ATAGLTHMM
AMAGLTHMM

SEQ ID NO: 31500 - protein, 9 aa, Artificial Sequence
  Description of Artificial Sequence: Synthetic peptide
  Seed: ATAGLTHMM
AMAGLTHMP

SEQ ID NO: 31501 - protein, 9 aa, Artificial Sequence
  Description of Artificial Sequence: Synthetic peptide
  Seed: ATNPIVPSF
AMNPIVPSY

SEQ ID NO: 31502 - protein, 9 aa, Artificial Sequence
  Description of Artificial Sequence: Synthetic peptide
  Seed: ATNPIVPSF
AANPIVPSV

SEQ ID NO: 31503 - protein, 10 aa, Artificial Sequence
  Description of Artificial Sequence: Synthetic peptide
  Seed: ATEIRASVGR
AVEIRASVGR

SEQ ID NO: 31504 - protein, 9 aa, Artificial Sequence
  Description of Artificial Sequence: Synthetic peptide
  Seed: ATNPIVPSF
AANPIVPSA

SEQ ID NO: 31505 - protein, 9 aa, Artificial Sequence
  Description of Artificial Sequence: Synthetic peptide
  Seed: ATNPIVPSF
AANPIVPSH

SEQ ID NO: 31506 - protein, 9 aa, Artificial Sequence
  Description of Artificial Sequence: Synthetic peptide
  Seed: ATNPIVPSF
AANPIVPSI

SEQ ID NO: 31507 - protein, 9 aa, Artificial Sequence
  Description of Artificial Sequence: Synthetic peptide
  Seed: ATNPIVPSF
AANPIVPSL

SEQ ID NO: 31508 - protein, 9 aa, Artificial Sequence
  Description of Artificial Sequence: Synthetic peptide
  Seed: ATNPIVPSF
AANPIVPSM

SEQ ID NO: 31509 - protein, 9 aa, Artificial Sequence
  Description of Artificial Sequence: Synthetic peptide
  Seed: ATNPIVPSF
AANPIVPSW

SEQ ID NO: 31510 - protein, 9 aa, Artificial Sequence
  Description of Artificial Sequence: Synthetic peptide
  Seed: ATNPIVPSF
AANPIVPSY

SEQ ID NO: 31511 - protein, 9 aa, Artificial Sequence
  Description of Artificial Sequence: Synthetic peptide
  Seed: ATNPIVPSF
ARNPIVPSM

SEQ ID NO: 31512 - protein, 9 aa, Artificial Sequence
  Description of Artificial Sequence: Synthetic peptide
  Seed: ATNPIVPSF
AQNPIVPSI

SEQ ID NO: 31513 - protein, 9 aa, Artificial Sequence
  Description of Artificial Sequence: Synthetic peptide
  Seed: ATNPIVPSF
ARNPIVPSF

SEQ ID NO: 31514 - protein, 9 aa, Artificial Sequence
  Description of Artificial Sequence: Synthetic peptide
  Seed: ATNPIVPSF
ARNPIVPSY

SEQ ID NO: 31515 - protein, 9 aa, Artificial Sequence
  Description of Artificial Sequence: Synthetic peptide
  Seed: ATNPIVPSF
ANNPIVPSF

SEQ ID NO: 31516 - protein, 9 aa, Artificial Sequence
  Description of Artificial Sequence: Synthetic peptide
  Seed: ATNPIVPSF
ANNPIVPSW

SEQ ID NO: 31517 - protein, 9 aa, Artificial Sequence
  Description of Artificial Sequence: Synthetic peptide
  Seed: ATNPIVPSF
ANNPIVPSY

SEQ ID NO: 31518 - protein, 9 aa, Artificial Sequence
  Description of Artificial Sequence: Synthetic peptide
  Seed: ATNPIVPSF
ACNPIVPSM

SEQ ID NO: 31519 - protein, 9 aa, Artificial Sequence
  Description of Artificial Sequence: Synthetic peptide
  Seed: ATNPIVPSF
ACNPIVPSW

SEQ ID NO: 31520 - protein, 9 aa, Artificial Sequence
  Description of Artificial Sequence: Synthetic peptide
  Seed: ATNPIVPSF
ACNPIVPSY

SEQ ID NO: 31521 - protein, 9 aa, Artificial Sequence
  Description of Artificial Sequence: Synthetic peptide
  Seed: ATNPIVPSF
AQNPIVPSA

SEQ ID NO: 31522 - protein, 10 aa, Artificial Sequence
  Description of Artificial Sequence: Synthetic peptide
  Seed: ATEIRASVGR
AYEIRASVGK

SEQ ID NO: 31523 - protein, 10 aa, Artificial Sequence
  Description of Artificial Sequence: Synthetic peptide
  Seed: ATEIRASVGR
AYEIRASVGR

SEQ ID NO: 31524 - protein, 10 aa, Artificial Sequence
  Description of Artificial Sequence: Synthetic peptide
  Seed: ATEIRASVGR
AWEIRASVGR

SEQ ID NO: 31525 - protein, 10 aa, Artificial Sequence
  Description of Artificial Sequence: Synthetic peptide
  Seed: ATEIRASVGK
AFEIRASVGR

SEQ ID NO: 31526 - protein, 10 aa, Artificial Sequence
  Description of Artificial Sequence: Synthetic peptide
  Seed: ATEIRASVGK
AFEIRASVGK

SEQ ID NO: 31527 - protein, 10 aa, Artificial Sequence
  Description of Artificial Sequence: Synthetic peptide
  Seed: ATEIRASVGK
ASEIRASVGR

SEQ ID NO: 31528 - protein, 10 aa, Artificial Sequence
  Description of Artificial Sequence: Synthetic peptide
  Seed: ATEIRASVGR
AAEIRASVGR

SEQ ID NO: 31529 - protein, 10 aa, Artificial Sequence
  Description of Artificial Sequence: Synthetic peptide
  Seed: ATEIRASVGR
AQEIRASVGR

SEQ ID NO: 31530 - protein, 10 aa, Artificial Sequence
  Description of Artificial Sequence: Synthetic peptide
  Seed: ATEIRASVGR
AGEIRASVGR

SEQ ID NO: 31531 - protein, 10 aa, Artificial Sequence
  Description of Artificial Sequence: Synthetic peptide
  Seed: ATEIRASVGR
AIEIRASVGR

SEQ ID NO: 31532 - protein, 10 aa, Artificial Sequence
  Description of Artificial Sequence: Synthetic peptide
  Seed: ATEIRASVGR
ALEIRASVGR

SEQ ID NO: 31533 - protein, 10 aa, Artificial Sequence
  Description of Artificial Sequence: Synthetic peptide
  Seed: ATEIRASVGR
AMEIRASVGR

SEQ ID NO: 31534 - protein, 10 aa, Artificial Sequence
  Description of Artificial Sequence: Synthetic peptide
  Seed: ATEIRASVGR
AMEIRASVGK

SEQ ID NO: 31535 - protein, 9 aa, Artificial Sequence
  Description of Artificial Sequence: Synthetic peptide
  Seed: ATNPIVPSF
AQNPIVPSH

SEQ ID NO: 31536 - protein, 9 aa, Artificial Sequence
  Description of Artificial Sequence: Synthetic peptide
  Seed: ATNPIVPSF
AQNPIVPSL

SEQ ID NO: 31537 - protein, 9 aa, Artificial Sequence
  Description of Artificial Sequence: Synthetic peptide
  Seed: ATAGLTHMM
AMAGLTHMS

SEQ ID NO: 31538 - protein, 9 aa, Artificial Sequence
  Description of Artificial Sequence: Synthetic peptide
  Seed: ATNPIVPSF
AKNPIVPSL

SEQ ID NO: 31539 - protein, 9 aa, Artificial Sequence
  Description of Artificial Sequence: Synthetic peptide
  Seed: ATNPIVPSF
ALNPIVPSI

SEQ ID NO: 31540 - protein, 9 aa, Artificial Sequence
  Description of Artificial Sequence: Synthetic peptide
  Seed: ATNPIVPSF
ALNPIVPSL

SEQ ID NO: 31541 - protein, 9 aa, Artificial Sequence
  Description of Artificial Sequence: Synthetic peptide
  Seed: ATNPIVPSF
ALNPIVPSM

SEQ ID NO: 31542 - protein, 9 aa, Artificial Sequence
  Description of Artificial Sequence: Synthetic peptide
  Seed: ATNPIVPSF
ALNPIVPSF

SEQ ID NO: 31543 - protein, 9 aa, Artificial Sequence
  Description of Artificial Sequence: Synthetic peptide
  Seed: ATNPIVPSF
ALNPIVPSW

SEQ ID NO: 31544 - protein, 9 aa, Artificial Sequence
  Description of Artificial Sequence: Synthetic peptide
  Seed: ATNPIVPSF
ALNPIVPSY

SEQ ID NO: 31545 - protein, 9 aa, Artificial Sequence
  Description of Artificial Sequence: Synthetic peptide
  Seed: ATNPIVPSF
ALNPIVPSV

SEQ ID NO: 31546 - protein, 9 aa, Artificial Sequence
  Description of Artificial Sequence: Synthetic peptide
  Seed: ATNPIVPSF
AKNPIVPSH

SEQ ID NO: 31547 - protein, 9 aa, Artificial Sequence
  Description of Artificial Sequence: Synthetic peptide
  Seed: ATNPIVPSF
AKNPIVPSI

SEQ ID NO: 31548 - protein, 9 aa, Artificial Sequence
  Description of Artificial Sequence: Synthetic peptide
  Seed: ATNPIVPSF
AKNPIVPSM

SEQ ID NO: 31549 - protein, 9 aa, Artificial Sequence
  Description of Artificial Sequence: Synthetic peptide
  Seed: ATNPIVPSF
AQNPIVPSM

SEQ ID NO: 31550 - protein, 9 aa, Artificial Sequence
  Description of Artificial Sequence: Synthetic peptide
  Seed: ATNPIVPSF
AKNPIVPSF

SEQ ID NO: 31551 - protein, 9 aa, Artificial Sequence
  Description of Artificial Sequence: Synthetic peptide
  Seed: ATNPIVPSF
AKNPIVPSW

SEQ ID NO: 31552 - protein, 9 aa, Artificial Sequence
  Description of Artificial Sequence: Synthetic peptide
  Seed: ATNPIVPSF
AKNPIVPSY

SEQ ID NO: 31553 - protein, 9 aa, Artificial Sequence
  Description of Artificial Sequence: Synthetic peptide
  Seed: ATNPIVPSF
AMNPIVPSH

SEQ ID NO: 31554 - protein, 9 aa, Artificial Sequence
  Description of Artificial Sequence: Synthetic peptide
  Seed: ATNPIVPSF
AMNPIVPSI

SEQ ID NO: 31555 - protein, 9 aa, Artificial Sequence
  Description of Artificial Sequence: Synthetic peptide
  Seed: ATNPIVPSF
AMNPIVPSL

SEQ ID NO: 31556 - protein, 9 aa, Artificial Sequence
  Description of Artificial Sequence: Synthetic peptide
  Seed: ATNPIVPSF
AMNPIVPSM

SEQ ID NO: 31557 - protein, 9 aa, Artificial Sequence
  Description of Artificial Sequence: Synthetic peptide
  Seed: ATNPIVPSF
AMNPIVPSF

SEQ ID NO: 31558 - protein, 9 aa, Artificial Sequence
  Description of Artificial Sequence: Synthetic peptide
  Seed: ATNPIVPSF
AMNPIVPSW

SEQ ID NO: 31559 - protein, 9 aa, Artificial Sequence
  Description of Artificial Sequence: Synthetic peptide
  Seed: ATNPIVPSF
AINPIVPSV

SEQ ID NO: 31560 - protein, 9 aa, Artificial Sequence
  Description of Artificial Sequence: Synthetic peptide
  Seed: ATNPIVPSF
AINPIVPSY

SEQ ID NO: 31561 - protein, 9 aa, Artificial Sequence
  Description of Artificial Sequence: Synthetic peptide
  Seed: ATNPIVPSF
AINPIVPSW

SEQ ID NO: 31562 - protein, 9 aa, Artificial Sequence
  Description of Artificial Sequence: Synthetic peptide
  Seed: ATNPIVPSF
AINPIVPSF

SEQ ID NO: 31563 - protein, 9 aa, Artificial Sequence
  Description of Artificial Sequence: Synthetic peptide
  Seed: ATNPIVPSF
AQNPIVPSF

SEQ ID NO: 31564 - protein, 9 aa, Artificial Sequence
  Description of Artificial Sequence: Synthetic peptide
  Seed: ATNPIVPSF
AQNPIVPSW

SEQ ID NO: 31565 - protein, 9 aa, Artificial Sequence
  Description of Artificial Sequence: Synthetic peptide
  Seed: ATNPIVPSF
AQNPIVPSY

SEQ ID NO: 31566 - protein, 9 aa, Artificial Sequence
  Description of Artificial Sequence: Synthetic peptide
  Seed: ATNPIVPSF
AQNPIVPSV

SEQ ID NO: 31567 - protein, 9 aa, Artificial Sequence
  Description of Artificial Sequence: Synthetic peptide
  Seed: ATNPIVPSF
AENPIVPSM

SEQ ID NO: 31568 - protein, 9 aa, Artificial Sequence
  Description of Artificial Sequence: Synthetic peptide
  Seed: ATNPIVPSF
AENPIVPSF

SEQ ID NO: 31569 - protein, 9 aa, Artificial Sequence
  Description of Artificial Sequence: Synthetic peptide
  Seed: ATNPIVPSF
AENPIVPSY

SEQ ID NO: 31570 - protein, 9 aa, Artificial Sequence
  Description of Artificial Sequence: Synthetic peptide
  Seed: ATNPIVPSF
AGNPIVPSL

SEQ ID NO: 31571 - protein, 9 aa, Artificial Sequence
  Description of Artificial Sequence: Synthetic peptide
  Seed: ATNPIVPSF
AGNPIVPSM

SEQ ID NO: 31572 - protein, 9 aa, Artificial Sequence
  Description of Artificial Sequence: Synthetic peptide
  Seed: ATNPIVPSF
AGNPIVPSF

SEQ ID NO: 31573 - protein, 9 aa, Artificial Sequence
  Description of Artificial Sequence: Synthetic peptide
  Seed: ATNPIVPSF
AGNPIVPSW

SEQ ID NO: 31574 - protein, 9 aa, Artificial Sequence
  Description of Artificial Sequence: Synthetic peptide
  Seed: ATNPIVPSF
AGNPIVPSY

SEQ ID NO: 31575 - protein, 9 aa, Artificial Sequence
  Description of Artificial Sequence: Synthetic peptide
  Seed: ATNPIVPSF
AHNPIVPSL

SEQ ID NO: 31576 - protein, 9 aa, Artificial Sequence
  Description of Artificial Sequence: Synthetic peptide
  Seed: ATNPIVPSF
AHNPIVPSM

SEQ ID NO: 31577 - protein, 9 aa, Artificial Sequence
  Description of Artificial Sequence: Synthetic peptide
  Seed: ATNPIVPSF
AHNPIVPSF

SEQ ID NO: 31578 - protein, 9 aa, Artificial Sequence
  Description of Artificial Sequence: Synthetic peptide
  Seed: ATNPIVPSF
AHNPIVPSY

SEQ ID NO: 31579 - protein, 9 aa, Artificial Sequence
  Description of Artificial Sequence: Synthetic peptide
  Seed: ATNPIVPSF
AINPIVPSI

SEQ ID NO: 31580 - protein, 9 aa, Artificial Sequence
  Description of Artificial Sequence: Synthetic peptide
  Seed: ATNPIVPSF
AINPIVPSL

SEQ ID NO: 31581 - protein, 9 aa, Artificial Sequence
  Description of Artificial Sequence: Synthetic peptide
  Seed: ATNPIVPSF
AINPIVPSM

SEQ ID NO: 31582 - protein, 9 aa, Artificial Sequence
  Description of Artificial Sequence: Synthetic peptide
  Seed: ATAGLTHMM
AVAGLTHMR

SEQ ID NO: 31583 - protein, 9 aa, Artificial Sequence
  Description of Artificial Sequence: Synthetic peptide
  Seed: ATAGLTHMM
ATAGLTHMW

SEQ ID NO: 31584 - protein, 9 aa, Artificial Sequence
  Description of Artificial Sequence: Synthetic peptide
  Seed: ATAGLTHMM
ATAGLTHMY

SEQ ID NO: 31585 - protein, 9 aa, Artificial Sequence
  Description of Artificial Sequence: Synthetic peptide
  Seed: ATAGLTHMM
ATAGLTHMV

SEQ ID NO: 31586 - protein, 9 aa, Artificial Sequence
  Description of Artificial Sequence: Synthetic peptide
  Seed: ATAGLTHMM
AWAGLTHMF

SEQ ID NO: 31587 - protein, 9 aa, Artificial Sequence
  Description of Artificial Sequence: Synthetic peptide
  Seed: ATAGLTHMM
AWAGLTHMY

SEQ ID NO: 31588 - protein, 9 aa, Artificial Sequence
  Description of Artificial Sequence: Synthetic peptide
  Seed: ATAGLTHMM
AYAGLTHMM

SEQ ID NO: 31589 - protein, 9 aa, Artificial Sequence
  Description of Artificial Sequence: Synthetic peptide
  Seed: ATAGLTHMM
AYAGLTHMF

SEQ ID NO: 31590 - protein, 9 aa, Artificial Sequence
  Description of Artificial Sequence: Synthetic peptide
  Seed: ATAGLTHMM
AYAGLTHMY

SEQ ID NO: 31591 - protein, 9 aa, Artificial Sequence
  Description of Artificial Sequence: Synthetic peptide
  Seed: ATAGLTHMM
AVAGLTHMA

SEQ ID NO: 31592 - protein, 9 aa, Artificial Sequence
  Description of Artificial Sequence: Synthetic peptide
  Seed: ATAGLTHMM
AVAGLTHMI

SEQ ID NO: 31593 - protein, 9 aa, Artificial Sequence
  Description of Artificial Sequence: Synthetic peptide
  Seed: ATAGLTHMM
AVAGLTHML

SEQ ID NO: 31594 - protein, 9 aa, Artificial Sequence
  Description of Artificial Sequence: Synthetic peptide
  Seed: ATAGLTHMM
AVAGLTHMK

SEQ ID NO: 31595 - protein, 9 aa, Artificial Sequence
  Description of Artificial Sequence: Synthetic peptide
  Seed: ATAGLTHMM
AVAGLTHMM

SEQ ID NO: 31596 - protein, 9 aa, Artificial Sequence
  Description of Artificial Sequence: Synthetic peptide
  Seed: ATAGLTHMM
AVAGLTHMF

SEQ ID NO: 31597 - protein, 9 aa, Artificial Sequence
  Description of Artificial Sequence: Synthetic peptide
  Seed: ATAGLTHMM
AVAGLTHMW

SEQ ID NO: 31598 - protein, 9 aa, Artificial Sequence
  Description of Artificial Sequence: Synthetic peptide
  Seed: ATAGLTHMM
AVAGLTHMY

SEQ ID NO: 31599 - protein, 9 aa, Artificial Sequence
  Description of Artificial Sequence: Synthetic peptide
  Seed: ATAGLTHMM
AVAGLTHMV

SEQ ID NO: 31600 - protein, 10 aa, Artificial Sequence
  Description of Artificial Sequence: Synthetic peptide
  Seed: ATAGLTHMMI
AAAGLTHMMV

SEQ ID NO: 31601 - protein, 10 aa, Artificial Sequence
  Description of Artificial Sequence: Synthetic peptide
  Seed: ATAGLTHMMI
AQAGLTHMMA

SEQ ID NO: 31602 - protein, 9 aa, Artificial Sequence
  Description of Artificial Sequence: Synthetic peptide
  Seed: ATAGLTHMM
ATAGLTHMT

SEQ ID NO: 31603 - protein, 9 aa, Artificial Sequence
  Description of Artificial Sequence: Synthetic peptide
  Seed: ATAGLTHMM
ATAGLTHMF

SEQ ID NO: 31604 - protein, 9 aa, Artificial Sequence
  Description of Artificial Sequence: Synthetic peptide
  Seed: ATAGLTHMM
ATAGLTHMK

SEQ ID NO: 31605 - protein, 9 aa, Artificial Sequence
  Description of Artificial Sequence: Synthetic peptide
  Seed: ATAGLTHMM
ATAGLTHML

SEQ ID NO: 31606 - protein, 9 aa, Artificial Sequence
  Description of Artificial Sequence: Synthetic peptide
  Seed: ATAGLTHMM
AMAGLTHMT

SEQ ID NO: 31607 - protein, 9 aa, Artificial Sequence
  Description of Artificial Sequence: Synthetic peptide
  Seed: ATAGLTHMM
AMAGLTHMW

SEQ ID NO: 31608 - protein, 9 aa, Artificial Sequence
  Description of Artificial Sequence: Synthetic peptide
  Seed: ATAGLTHMM
AMAGLTHMY

SEQ ID NO: 31609 - protein, 9 aa, Artificial Sequence
  Description of Artificial Sequence: Synthetic peptide
  Seed: ATAGLTHMM
AMAGLTHMV

SEQ ID NO: 31610 - protein, 9 aa, Artificial Sequence
  Description of Artificial Sequence: Synthetic peptide
  Seed: ATAGLTHMM
AFAGLTHML

SEQ ID NO: 31611 - protein, 9 aa, Artificial Sequence
  Description of Artificial Sequence: Synthetic peptide
  Seed: ATAGLTHMM
AFAGLTHMF

SEQ ID NO: 31612 - protein, 9 aa, Artificial Sequence
  Description of Artificial Sequence: Synthetic peptide
  Seed: ATAGLTHMM
AFAGLTHMY

SEQ ID NO: 31613 - protein, 9 aa, Artificial Sequence
  Description of Artificial Sequence: Synthetic peptide
  Seed: ATAGLTHMM
AFAGLTHMV

SEQ ID NO: 31614 - protein, 9 aa, Artificial Sequence
  Description of Artificial Sequence: Synthetic peptide
  Seed: ATAGLTHMM
ASAGLTHMA

SEQ ID NO: 31615 - protein, 9 aa, Artificial Sequence
  Description of Artificial Sequence: Synthetic peptide
  Seed: ATAGLTHMM
ASAGLTHMI

SEQ ID NO: 31616 - protein, 9 aa, Artificial Sequence
  Description of Artificial Sequence: Synthetic peptide
  Seed: ATAGLTHMM
ASAGLTHML

SEQ ID NO: 31617 - protein, 9 aa, Artificial Sequence
  Description of Artificial Sequence: Synthetic peptide
  Seed: ATAGLTHMM
ASAGLTHMM

SEQ ID NO: 31618 - protein, 9 aa, Artificial Sequence
  Description of Artificial Sequence: Synthetic peptide
  Seed: ATAGLTHMM
ASAGLTHMF

SEQ ID NO: 31619 - protein, 9 aa, Artificial Sequence
  Description of Artificial Sequence: Synthetic peptide
  Seed: ATAGLTHMM
ASAGLTHMW

SEQ ID NO: 31620 - protein, 9 aa, Artificial Sequence
  Description of Artificial Sequence: Synthetic peptide
  Seed: ATAGLTHMM
ASAGLTHMY

SEQ ID NO: 31621 - protein, 9 aa, Artificial Sequence
  Description of Artificial Sequence: Synthetic peptide
  Seed: ATAGLTHMM
ASAGLTHMV

SEQ ID NO: 31622 - protein, 9 aa, Artificial Sequence
  Description of Artificial Sequence: Synthetic peptide
  Seed: ATAGLTHMM
ATAGLTHMA

SEQ ID NO: 31623 - protein, 9 aa, Artificial Sequence
  Description of Artificial Sequence: Synthetic peptide
  Seed: ATAGLTHMM
ATAGLTHMR

SEQ ID NO: 31624 - protein, 9 aa, Artificial Sequence
  Description of Artificial Sequence: Synthetic peptide
  Seed: ATAGLTHMM
ATAGLTHMI

SEQ ID NO: 31625 - protein, 10 aa, Artificial Sequence
  Description of Artificial Sequence: Synthetic peptide
  Seed: ATAGLTHMMI
AQAGLTHMMI

SEQ ID NO: 31626 - protein, 10 aa, Artificial Sequence
  Description of Artificial Sequence: Synthetic peptide
  Seed: ATAGLTHMMI
AQAGLTHMML

SEQ ID NO: 31627 - protein, 10 aa, Artificial Sequence
  Description of Artificial Sequence: Synthetic peptide
  Seed: ATAGLTHMMI
AQAGLTHMMM

SEQ ID NO: 31628 - protein, 11 aa, Artificial Sequence
  Description of Artificial Sequence: Synthetic peptide
  Seed: ATAGLTHMMIW
AAAGLTHMMIF

SEQ ID NO: 31629 - protein, 11 aa, Artificial Sequence
  Description of Artificial Sequence: Synthetic peptide
  Seed: ATAGLTHMMIW
AAAGLTHMMIY

SEQ ID NO: 31630 - protein, 11 aa, Artificial Sequence
  Description of Artificial Sequence: Synthetic peptide
  Seed: ATAGLTHMMIW
ARAGLTHMMIW

SEQ ID NO: 31631 - protein, 11 aa, Artificial Sequence
  Description of Artificial Sequence: Synthetic peptide
  Seed: ATAGLTHMMIW
AGAGLTHMMIW

SEQ ID NO: 31632 - protein, 11 aa, Artificial Sequence
  Description of Artificial Sequence: Synthetic peptide
  Seed: ATAGLTHMMIW
AIAGLTHMMIW

SEQ ID NO: 31633 - protein, 11 aa, Artificial Sequence
  Description of Artificial Sequence: Synthetic peptide
  Seed: ATAGLTHMMIW
AKAGLTHMMIW

SEQ ID NO: 31634 - protein, 11 aa, Artificial Sequence
  Description of Artificial Sequence: Synthetic peptide
  Seed: ATAGLTHMMIW
AMAGLTHMMIW

SEQ ID NO: 31635 - protein, 11 aa, Artificial Sequence
  Description of Artificial Sequence: Synthetic peptide
  Seed: ATAGLTHMMIW
ASAGLTHMMIL

SEQ ID NO: 31636 - protein, 11 aa, Artificial Sequence
  Description of Artificial Sequence: Synthetic peptide
  Seed: ATAGLTHMMIW
ASAGLTHMMIM

SEQ ID NO: 31637 - protein, 11 aa, Artificial Sequence
  Description of Artificial Sequence: Synthetic peptide
  Seed: ATAGLTHMMIW
ASAGLTHMMIF

SEQ ID NO: 31638 - protein, 11 aa, Artificial Sequence
  Description of Artificial Sequence: Synthetic peptide
  Seed: ATAGLTHMMIW
ASAGLTHMMIW

SEQ ID NO: 31639 - protein, 11 aa, Artificial Sequence
  Description of Artificial Sequence: Synthetic peptide
  Seed: ATAGLTHMMIW
ASAGLTHMMIY

SEQ ID NO: 31640 - protein, 11 aa, Artificial Sequence
  Description of Artificial Sequence: Synthetic peptide
  Seed: ATAGLTHMMIW
ATAGLTHMMIM

SEQ ID NO: 31641 - protein, 11 aa, Artificial Sequence
  Description of Artificial Sequence: Synthetic peptide
  Seed: ATAGLTHMMIW
ATAGLTHMMIF

SEQ ID NO: 31642 - protein, 11 aa, Artificial Sequence
  Description of Artificial Sequence: Synthetic peptide
  Seed: ATAGLTHMMIW
ATAGLTHMMIY

SEQ ID NO: 31643 - protein, 11 aa, Artificial Sequence
  Description of Artificial Sequence: Synthetic peptide
  Seed: ATAGLTHMMIW
AVAGLTHMMIW

SEQ ID NO: 31644 - protein, 11 aa, Artificial Sequence
  Description of Artificial Sequence: Synthetic peptide
  Seed: ATAGLTHMMIW
AAAGLTHMMIW

SEQ ID NO: 31645 - protein, 10 aa, Artificial Sequence
  Description of Artificial Sequence: Synthetic peptide
  Seed: ATAGLTHMMI
AVAGLTHMMV

SEQ ID NO: 31646 - protein, 10 aa, Artificial Sequence
  Description of Artificial Sequence: Synthetic peptide
  Seed: ATAGLTHMMI
AQAGLTHMMV

SEQ ID NO: 31647 - protein, 10 aa, Artificial Sequence
  Description of Artificial Sequence: Synthetic peptide
  Seed: ATAGLTHMMI
AVAGLTHMML

SEQ ID NO: 31648 - protein, 10 aa, Artificial Sequence
  Description of Artificial Sequence: Synthetic peptide
  Seed: ATAGLTHMMI
AIAGLTHMMI

SEQ ID NO: 31649 - protein, 10 aa, Artificial Sequence
  Description of Artificial Sequence: Synthetic peptide
  Seed: ATAGLTHMMI
AIAGLTHMML

SEQ ID NO: 31650 - protein, 10 aa, Artificial Sequence
  Description of Artificial Sequence: Synthetic peptide
  Seed: ATAGLTHMMI
AIAGLTHMMV

SEQ ID NO: 31651 - protein, 10 aa, Artificial Sequence
  Description of Artificial Sequence: Synthetic peptide
  Seed: ATAGLTHMMI
ALAGLTHMMA

SEQ ID NO: 31652 - protein, 10 aa, Artificial Sequence
  Description of Artificial Sequence: Synthetic peptide
  Seed: ATAGLTHMMI
ALAGLTHMMI

SEQ ID NO: 31653 - protein, 10 aa, Artificial Sequence
  Description of Artificial Sequence: Synthetic peptide
  Seed: ATAGLTHMMI
ALAGLTHMML

SEQ ID NO: 31654 - protein, 10 aa, Artificial Sequence
  Description of Artificial Sequence: Synthetic peptide
  Seed: ATAGLTHMMI
ALAGLTHMMM

SEQ ID NO: 31655 - protein, 10 aa, Artificial Sequence
  Description of Artificial Sequence: Synthetic peptide
  Seed: ATAGLTHMMI
ALAGLTHMMV

SEQ ID NO: 31656 - protein, 10 aa, Artificial Sequence
  Description of Artificial Sequence: Synthetic peptide
  Seed: ATAGLTHMMI
AMAGLTHMMA

SEQ ID NO: 31657 - protein, 10 aa, Artificial Sequence
  Description of Artificial Sequence: Synthetic peptide
  Seed: ATAGLTHMMI
AMAGLTHMMI

SEQ ID NO: 31658 - protein, 10 aa, Artificial Sequence
  Description of Artificial Sequence: Synthetic peptide
  Seed: ATAGLTHMMI
AMAGLTHMML

SEQ ID NO: 31659 - protein, 10 aa, Artificial Sequence
  Description of Artificial Sequence: Synthetic peptide
  Seed: ATAGLTHMMI
AMAGLTHMMM

SEQ ID NO: 31660 - protein, 10 aa, Artificial Sequence
  Description of Artificial Sequence: Synthetic peptide
  Seed: ATAGLTHMMI
AMAGLTHMMV

SEQ ID NO: 31661 - protein, 10 aa, Artificial Sequence
  Description of Artificial Sequence: Synthetic peptide
  Seed: ATAGLTHMMI
ASAGLTHMMV

SEQ ID NO: 31662 - protein, 10 aa, Artificial Sequence
  Description of Artificial Sequence: Synthetic peptide
  Seed: ATAGLTHMMI
ATAGLTHMMA

SEQ ID NO: 31663 - protein, 10 aa, Artificial Sequence
  Description of Artificial Sequence: Synthetic peptide
  Seed: ATAGLTHMMI
ATAGLTHMML

SEQ ID NO: 31664 - protein, 10 aa, Artificial Sequence
  Description of Artificial Sequence: Synthetic peptide
  Seed: ATAGLTHMMI
ATAGLTHMMM

SEQ ID NO: 31665 - protein, 10 aa, Artificial Sequence
  Description of Artificial Sequence: Synthetic peptide
  Seed: ATAGLTHMMI
ATAGLTHMMV

SEQ ID NO: 31666 - protein, 10 aa, Artificial Sequence
  Description of Artificial Sequence: Synthetic peptide
  Seed: ATAGLTHMMI
AVAGLTHMMI

SEQ ID NO: 31667 - protein, 9 aa, Artificial Sequence
  Description of Artificial Sequence: Synthetic peptide
  Seed: ATYQRTRAL
ALYQRTRAF

SEQ ID NO: 31668 - protein, 9 aa, Artificial Sequence
  Description of Artificial Sequence: Synthetic peptide
  Seed: ATYQRTRAL
ALYQRTRAY

SEQ ID NO: 31669 - protein, 9 aa, Artificial Sequence
  Description of Artificial Sequence: Synthetic peptide
  Seed: FERATIMAA
FQRATIMAC

SEQ ID NO: 31670 - protein, 9 aa, Artificial Sequence
  Description of Artificial Sequence: Synthetic peptide
  Seed: AYERMCNIL
AYERMCNIY

SEQ ID NO: 31671 - protein, 9 aa, Artificial Sequence
  Description of Artificial Sequence: Synthetic peptide
  Seed: AYERMCNIL
AFERMCNIW

SEQ ID NO: 31672 - protein, 9 aa, Artificial Sequence
  Description of Artificial Sequence: Synthetic peptide
  Seed: AYERMCNIL
AFERMCNIY

SEQ ID NO: 31673 - protein, 9 aa, Artificial Sequence
  Description of Artificial Sequence: Synthetic peptide
  Seed: AYERMCNIL
AWERMCNII

SEQ ID NO: 31674 - protein, 9 aa, Artificial Sequence
  Description of Artificial Sequence: Synthetic peptide
  Seed: AYERMCNIL
AWERMCNIF

SEQ ID NO: 31675 - protein, 9 aa, Artificial Sequence
  Description of Artificial Sequence: Synthetic peptide
  Seed: AYERMCNIL
AWERMCNIW

SEQ ID NO: 31676 - protein, 9 aa, Artificial Sequence
  Description of Artificial Sequence: Synthetic peptide
  Seed: AYERMCNIL
AYERMCNII

SEQ ID NO: 31677 - protein, 9 aa, Artificial Sequence
  Description of Artificial Sequence: Synthetic peptide
  Seed: AYERMCNIL
AYERMCNIM

SEQ ID NO: 31678 - protein, 9 aa, Artificial Sequence
  Description of Artificial Sequence: Synthetic peptide
  Seed: AYERMCNIL
AYERMCNIF

SEQ ID NO: 31679 - protein, 9 aa, Artificial Sequence
  Description of Artificial Sequence: Synthetic peptide
  Seed: AYERMCNIL
AYERMCNIW

SEQ ID NO: 31680 - protein, 10 aa, Artificial Sequence
  Description of Artificial Sequence: Synthetic peptide
  Seed: AYERMCNILK
AAERMCNILA

SEQ ID NO: 31681 - protein, 10 aa, Artificial Sequence
  Description of Artificial Sequence: Synthetic peptide
  Seed: AYERMCNILK
AGERMCNILR

SEQ ID NO: 31682 - protein, 10 aa, Artificial Sequence
  Description of Artificial Sequence: Synthetic peptide
  Seed: AYERMCNILK
AAERMCNILR

SEQ ID NO: 31683 - protein, 10 aa, Artificial Sequence
  Description of Artificial Sequence: Synthetic peptide
  Seed: AYERMCNILK
AAERMCNILI

SEQ ID NO: 31684 - protein, 10 aa, Artificial Sequence
  Description of Artificial Sequence: Synthetic peptide
  Seed: AYERMCNILK
AAERMCNILK

SEQ ID NO: 31685 - protein, 10 aa, Artificial Sequence
  Description of Artificial Sequence: Synthetic peptide
  Seed: AYERMCNILK
AAERMCNILV

SEQ ID NO: 31686 - protein, 10 aa, Artificial Sequence
  Description of Artificial Sequence: Synthetic peptide
  Seed: AYERMCNILK
ANERMCNILR

SEQ ID NO: 31687 - protein, 10 aa, Artificial Sequence
  Description of Artificial Sequence: Synthetic peptide
  Seed: AYERMCNILK
ANERMCNILK

SEQ ID NO: 31688 - protein, 10 aa, Artificial Sequence
  Description of Artificial Sequence: Synthetic peptide
  Seed: AYERMCNILK
AQERMCNILA

SEQ ID NO: 31689 - protein, 10 aa, Artificial Sequence
  Description of Artificial Sequence: Synthetic peptide
  Seed: AYERMCNILK
AQERMCNILR

SEQ ID NO: 31690 - protein, 10 aa, Artificial Sequence
  Description of Artificial Sequence: Synthetic peptide
  Seed: AYERMCNILK
AQERMCNILK

SEQ ID NO: 31691 - protein, 9 aa, Artificial Sequence
  Description of Artificial Sequence: Synthetic peptide
  Seed: AYERMCNIL
AFERMCNIF

SEQ ID NO: 31692 - protein, 9 aa, Artificial Sequence
  Description of Artificial Sequence: Synthetic peptide
  Seed: AYERMCNIL
AFERMCNIM

SEQ ID NO: 31693 - protein, 10 aa, Artificial Sequence
  Description of Artificial Sequence: Synthetic peptide
  Seed: AVSSGYDFEK
AVSSGYDFEY

SEQ ID NO: 31694 - protein, 10 aa, Artificial Sequence
  Description of Artificial Sequence: Synthetic peptide
  Seed: AVSSGYDFEK
AVSSGYDFER

SEQ ID NO: 31695 - protein, 10 aa, Artificial Sequence
  Description of Artificial Sequence: Synthetic peptide
  Seed: AVSSGYDFEK
AKSSGYDFER

SEQ ID NO: 31696 - protein, 10 aa, Artificial Sequence
  Description of Artificial Sequence: Synthetic peptide
  Seed: AVSSGYDFEK
AKSSGYDFEK

SEQ ID NO: 31697 - protein, 10 aa, Artificial Sequence
  Description of Artificial Sequence: Synthetic peptide
  Seed: AVSSGYDFEK
AMSSGYDFER

SEQ ID NO: 31698 - protein, 10 aa, Artificial Sequence
  Description of Artificial Sequence: Synthetic peptide
  Seed: AVSSGYDFEK
AMSSGYDFEK

SEQ ID NO: 31699 - protein, 10 aa, Artificial Sequence
  Description of Artificial Sequence: Synthetic peptide
  Seed: AVSSGYDFEK
AMSSGYDFEY

SEQ ID NO: 31700 - protein, 10 aa, Artificial Sequence
  Description of Artificial Sequence: Synthetic peptide
  Seed: AVSSGYDFEK
AFSSGYDFER

SEQ ID NO: 31701 - protein, 10 aa, Artificial Sequence
  Description of Artificial Sequence: Synthetic peptide
  Seed: AVSSGYDFEK
AFSSGYDFEK

SEQ ID NO: 31702 - protein, 10 aa, Artificial Sequence
  Description of Artificial Sequence: Synthetic peptide
  Seed: AVSSGYDFEK
APSSGYDFER

SEQ ID NO: 31703 - protein, 10 aa, Artificial Sequence
  Description of Artificial Sequence: Synthetic peptide
  Seed: AVSSGYDFEK
APSSGYDFEK

SEQ ID NO: 31704 - protein, 10 aa, Artificial Sequence
  Description of Artificial Sequence: Synthetic peptide
  Seed: AVSSGYDFEK
ASSSGYDFER

SEQ ID NO: 31705 - protein, 10 aa, Artificial Sequence
  Description of Artificial Sequence: Synthetic peptide
  Seed: AVSSGYDFEK
ASSSGYDFEK

SEQ ID NO: 31706 - protein, 10 aa, Artificial Sequence
  Description of Artificial Sequence: Synthetic peptide
  Seed: AVSSGYDFEK
ASSSGYDFEY

SEQ ID NO: 31707 - protein, 10 aa, Artificial Sequence
  Description of Artificial Sequence: Synthetic peptide
  Seed: AVSSGYDFEK
ATSSGYDFER

SEQ ID NO: 31708 - protein, 10 aa, Artificial Sequence
  Description of Artificial Sequence: Synthetic peptide
  Seed: AVSSGYDFEK
ATSSGYDFEK

SEQ ID NO: 31709 - protein, 10 aa, Artificial Sequence
  Description of Artificial Sequence: Synthetic peptide
  Seed: AVSSGYDFEK
ATSSGYDFEY

SEQ ID NO: 31710 - protein, 10 aa, Artificial Sequence
  Description of Artificial Sequence: Synthetic peptide
  Seed: AVSSGYDFEK
AWSSGYDFER

SEQ ID NO: 31711 - protein, 10 aa, Artificial Sequence
  Description of Artificial Sequence: Synthetic peptide
  Seed: AVSSGYDFEK
AWSSGYDFEK

SEQ ID NO: 31712 - protein, 10 aa, Artificial Sequence
  Description of Artificial Sequence: Synthetic peptide
  Seed: AVSSGYDFEK
AYSSGYDFER

SEQ ID NO: 31713 - protein, 10 aa, Artificial Sequence
  Description of Artificial Sequence: Synthetic peptide
  Seed: AVSSGYDFEK
AYSSGYDFEK

SEQ ID NO: 31714 - protein, 10 aa, Artificial Sequence
  Description of Artificial Sequence: Synthetic peptide
  Seed: AYERMCNILK
AGERMCNILA

SEQ ID NO: 31715 - protein, 10 aa, Artificial Sequence
  Description of Artificial Sequence: Synthetic peptide
  Seed: AYERMCNILK
AGERMCNILK

SEQ ID NO: 31716 - protein, 10 aa, Artificial Sequence
  Description of Artificial Sequence: Synthetic peptide
  Seed: AVSSGYDFEK
ALSSGYDFEK

SEQ ID NO: 31717 - protein, 10 aa, Artificial Sequence
  Description of Artificial Sequence: Synthetic peptide
  Seed: AYERMCNILK
ATERMCNILM

SEQ ID NO: 31718 - protein, 10 aa, Artificial Sequence
  Description of Artificial Sequence: Synthetic peptide
  Seed: AYERMCNILK
ASERMCNILT

SEQ ID NO: 31719 - protein, 10 aa, Artificial Sequence
  Description of Artificial Sequence: Synthetic peptide
  Seed: AYERMCNILK
ASERMCNILY

SEQ ID NO: 31720 - protein, 10 aa, Artificial Sequence
  Description of Artificial Sequence: Synthetic peptide
  Seed: AYERMCNILK
ASERMCNILV

SEQ ID NO: 31721 - protein, 10 aa, Artificial Sequence
  Description of Artificial Sequence: Synthetic peptide
  Seed: AYERMCNILK
ATERMCNILA

SEQ ID NO: 31722 - protein, 10 aa, Artificial Sequence
  Description of Artificial Sequence: Synthetic peptide
  Seed: AYERMCNILK
ATERMCNILR

SEQ ID NO: 31723 - protein, 10 aa, Artificial Sequence
  Description of Artificial Sequence: Synthetic peptide
  Seed: AYERMCNILK
ATERMCNILG

SEQ ID NO: 31724 - protein, 10 aa, Artificial Sequence
  Description of Artificial Sequence: Synthetic peptide
  Seed: AYERMCNILK
ATERMCNILI

SEQ ID NO: 31725 - protein, 10 aa, Artificial Sequence
  Description of Artificial Sequence: Synthetic peptide
  Seed: AYERMCNILK
ATERMCNILL

SEQ ID NO: 31726 - protein, 10 aa, Artificial Sequence
  Description of Artificial Sequence: Synthetic peptide
  Seed: AYERMCNILK
ATERMCNILS

SEQ ID NO: 31727 - protein, 10 aa, Artificial Sequence
  Description of Artificial Sequence: Synthetic peptide
  Seed: AYERMCNILK
AHERMCNILR

SEQ ID NO: 31728 - protein, 10 aa, Artificial Sequence
  Description of Artificial Sequence: Synthetic peptide
  Seed: AYERMCNILK
ATERMCNILT

SEQ ID NO: 31729 - protein, 10 aa, Artificial Sequence
  Description of Artificial Sequence: Synthetic peptide
  Seed: AYERMCNILK
ATERMCNILY

SEQ ID NO: 31730 - protein, 10 aa, Artificial Sequence
  Description of Artificial Sequence: Synthetic peptide
  Seed: AYERMCNILK
ATERMCNILV

SEQ ID NO: 31731 - protein, 10 aa, Artificial Sequence
  Description of Artificial Sequence: Synthetic peptide
  Seed: AYERMCNILK
AWERMCNILR

SEQ ID NO: 31732 - protein, 10 aa, Artificial Sequence
  Description of Artificial Sequence: Synthetic peptide
  Seed: AYERMCNILK
AWERMCNILK

SEQ ID NO: 31733 - protein, 10 aa, Artificial Sequence
  Description of Artificial Sequence: Synthetic peptide
  Seed: AYERMCNILK
AYERMCNILA

SEQ ID NO: 31734 - protein, 10 aa, Artificial Sequence
  Description of Artificial Sequence: Synthetic peptide
  Seed: AYERMCNILK
AYERMCNILR

SEQ ID NO: 31735 - protein, 10 aa, Artificial Sequence
  Description of Artificial Sequence: Synthetic peptide
  Seed: AYERMCNILK
AYERMCNILI

SEQ ID NO: 31736 - protein, 10 aa, Artificial Sequence
  Description of Artificial Sequence: Synthetic peptide
  Seed: AYERMCNILK
AYERMCNILV

SEQ ID NO: 31737 - protein, 10 aa, Artificial Sequence
  Description of Artificial Sequence: Synthetic peptide
  Seed: AYERMCNILK
ASERMCNILS

SEQ ID NO: 31738 - protein, 10 aa, Artificial Sequence
  Description of Artificial Sequence: Synthetic peptide
  Seed: AYERMCNILK
ASERMCNILM

SEQ ID NO: 31739 - protein, 10 aa, Artificial Sequence
  Description of Artificial Sequence: Synthetic peptide
  Seed: AYERMCNILK
ASERMCNILK

SEQ ID NO: 31740 - protein, 10 aa, Artificial Sequence
  Description of Artificial Sequence: Synthetic peptide
  Seed: AYERMCNILK
ASERMCNILL

SEQ ID NO: 31741 - protein, 10 aa, Artificial Sequence
  Description of Artificial Sequence: Synthetic peptide
  Seed: AYERMCNILK
AHERMCNILK

SEQ ID NO: 31742 - protein, 10 aa, Artificial Sequence
  Description of Artificial Sequence: Synthetic peptide
  Seed: AYERMCNILK
AIERMCNILA

SEQ ID NO: 31743 - protein, 10 aa, Artificial Sequence
  Description of Artificial Sequence: Synthetic peptide
  Seed: AYERMCNILK
AIERMCNILR

SEQ ID NO: 31744 - protein, 10 aa, Artificial Sequence
  Description of Artificial Sequence: Synthetic peptide
  Seed: AYERMCNILK
AIERMCNILI

SEQ ID NO: 31745 - protein, 10 aa, Artificial Sequence
  Description of Artificial Sequence: Synthetic peptide
  Seed: AYERMCNILK
AIERMCNILK

SEQ ID NO: 31746 - protein, 10 aa, Artificial Sequence
  Description of Artificial Sequence: Synthetic peptide
  Seed: AYERMCNILK
AIERMCNILV

SEQ ID NO: 31747 - protein, 10 aa, Artificial Sequence
  Description of Artificial Sequence: Synthetic peptide
  Seed: AYERMCNILK
ALERMCNILR

SEQ ID NO: 31748 - protein, 10 aa, Artificial Sequence
  Description of Artificial Sequence: Synthetic peptide
  Seed: AYERMCNILK
ALERMCNILK

SEQ ID NO: 31749 - protein, 10 aa, Artificial Sequence
  Description of Artificial Sequence: Synthetic peptide
  Seed: AYERMCNILK
AMERMCNILA

SEQ ID NO: 31750 - protein, 10 aa, Artificial Sequence
  Description of Artificial Sequence: Synthetic peptide
  Seed: AYERMCNILK
AMERMCNILR

SEQ ID NO: 31751 - protein, 10 aa, Artificial Sequence
  Description of Artificial Sequence: Synthetic peptide
  Seed: AYERMCNILK
AMERMCNILI

SEQ ID NO: 31752 - protein, 10 aa, Artificial Sequence
  Description of Artificial Sequence: Synthetic peptide
  Seed: AYERMCNILK
AMERMCNILK

SEQ ID NO: 31753 - protein, 10 aa, Artificial Sequence
  Description of Artificial Sequence: Synthetic peptide
  Seed: AYERMCNILK
AMERMCNILV

SEQ ID NO: 31754 - protein, 10 aa, Artificial Sequence
  Description of Artificial Sequence: Synthetic peptide
  Seed: AYERMCNILK
AFERMCNILA

SEQ ID NO: 31755 - protein, 10 aa, Artificial Sequence
  Description of Artificial Sequence: Synthetic peptide
  Seed: AYERMCNILK
AFERMCNILR

SEQ ID NO: 31756 - protein, 10 aa, Artificial Sequence
  Description of Artificial Sequence: Synthetic peptide
  Seed: AYERMCNILK
AFERMCNILK

SEQ ID NO: 31757 - protein, 10 aa, Artificial Sequence
  Description of Artificial Sequence: Synthetic peptide
  Seed: AYERMCNILK
ASERMCNILA

SEQ ID NO: 31758 - protein, 10 aa, Artificial Sequence
  Description of Artificial Sequence: Synthetic peptide
  Seed: AYERMCNILK
ASERMCNILR

SEQ ID NO: 31759 - protein, 10 aa, Artificial Sequence
  Description of Artificial Sequence: Synthetic peptide
  Seed: AYERMCNILK
ASERMCNILI

SEQ ID NO: 31760 - protein, 10 aa, Artificial Sequence
  Description of Artificial Sequence: Synthetic peptide
  Seed: AVSSGYDFEK
ALSSGYDFEY

SEQ ID NO: 31761 - protein, 10 aa, Artificial Sequence
  Description of Artificial Sequence: Synthetic peptide
  Seed: AVSSGYDFEK
ALSSGYDFER

SEQ ID NO: 31762 - protein, 9 aa, Artificial Sequence
  Description of Artificial Sequence: Synthetic peptide
  Seed: ATYQRTRAL
ALYQRTRAV

SEQ ID NO: 31763 - protein, 9 aa, Artificial Sequence
  Description of Artificial Sequence: Synthetic peptide
  Seed: AVKGVGTMV
AMKGVGTMV

SEQ ID NO: 31764 - protein, 9 aa, Artificial Sequence
  Description of Artificial Sequence: Synthetic peptide
  Seed: AVKGVGTMV
ALKGVGTMA

SEQ ID NO: 31765 - protein, 9 aa, Artificial Sequence
  Description of Artificial Sequence: Synthetic peptide
  Seed: AVKGVGTMV
ALKGVGTMI

SEQ ID NO: 31766 - protein, 9 aa, Artificial Sequence
  Description of Artificial Sequence: Synthetic peptide
  Seed: AVKGVGTMV
ALKGVGTML

SEQ ID NO: 31767 - protein, 9 aa, Artificial Sequence
  Description of Artificial Sequence: Synthetic peptide
  Seed: AVKGVGTMV
ALKGVGTMM

SEQ ID NO: 31768 - protein, 9 aa, Artificial Sequence
  Description of Artificial Sequence: Synthetic peptide
  Seed: AVKGVGTMV
ALKGVGTMV

SEQ ID NO: 31769 - protein, 9 aa, Artificial Sequence
  Description of Artificial Sequence: Synthetic peptide
  Seed: AVKGVGTMV
AMKGVGTMA

SEQ ID NO: 31770 - protein, 9 aa, Artificial Sequence
  Description of Artificial Sequence: Synthetic peptide
  Seed: AVKGVGTMV
AMKGVGTMI

SEQ ID NO: 31771 - protein, 9 aa, Artificial Sequence
  Description of Artificial Sequence: Synthetic peptide
  Seed: AVKGVGTMV
AMKGVGTML

SEQ ID NO: 31772 - protein, 9 aa, Artificial Sequence
  Description of Artificial Sequence: Synthetic peptide
  Seed: AVKGVGTMV
AMKGVGTMM

SEQ ID NO: 31773 - protein, 10 aa, Artificial Sequence
  Description of Artificial Sequence: Synthetic peptide
  Seed: AVKGVGTMVM
AEKGVGTMVY

SEQ ID NO: 31774 - protein, 10 aa, Artificial Sequence
  Description of Artificial Sequence: Synthetic peptide
  Seed: AVKGVGTMVM
AAKGVGTMVF

SEQ ID NO: 31775 - protein, 10 aa, Artificial Sequence
  Description of Artificial Sequence: Synthetic peptide
  Seed: AVKGVGTMVM
AAKGVGTMVY

SEQ ID NO: 31776 - protein, 10 aa, Artificial Sequence
  Description of Artificial Sequence: Synthetic peptide
  Seed: AVKGVGTMVM
AQKGVGTMVH

SEQ ID NO: 31777 - protein, 10 aa, Artificial Sequence
  Description of Artificial Sequence: Synthetic peptide
  Seed: AVKGVGTMVM
AQKGVGTMVI

SEQ ID NO: 31778 - protein, 10 aa, Artificial Sequence
  Description of Artificial Sequence: Synthetic peptide
  Seed: AVKGVGTMVM
AQKGVGTMVL

SEQ ID NO: 31779 - protein, 10 aa, Artificial Sequence
  Description of Artificial Sequence: Synthetic peptide
  Seed: AVKGVGTMVM
AQKGVGTMVM

SEQ ID NO: 31780 - protein, 10 aa, Artificial Sequence
  Description of Artificial Sequence: Synthetic peptide
  Seed: AVKGVGTMVM
AQKGVGTMVF

SEQ ID NO: 31781 - protein, 10 aa, Artificial Sequence
  Description of Artificial Sequence: Synthetic peptide
  Seed: AVKGVGTMVM
AQKGVGTMVW

SEQ ID NO: 31782 - protein, 10 aa, Artificial Sequence
  Description of Artificial Sequence: Synthetic peptide
  Seed: AVKGVGTMVM
AQKGVGTMVY

SEQ ID NO: 31783 - protein, 9 aa, Artificial Sequence
  Description of Artificial Sequence: Synthetic peptide
  Seed: AVKGVGTMV
AQKGVGTMV

SEQ ID NO: 31784 - protein, 10 aa, Artificial Sequence
  Description of Artificial Sequence: Synthetic peptide
  Seed: AVKGIGTMVM
AVKGIGTMVY

SEQ ID NO: 31785 - protein, 10 aa, Artificial Sequence
  Description of Artificial Sequence: Synthetic peptide
  Seed: AVKGIGTMVM
AVKGIGTMVF

SEQ ID NO: 31786 - protein, 10 aa, Artificial Sequence
  Description of Artificial Sequence: Synthetic peptide
  Seed: AVKGIGTMVM
AGKGIGTMVY

SEQ ID NO: 31787 - protein, 10 aa, Artificial Sequence
  Description of Artificial Sequence: Synthetic peptide
  Seed: AVKGIGTMVM
AIKGIGTMVM

SEQ ID NO: 31788 - protein, 10 aa, Artificial Sequence
  Description of Artificial Sequence: Synthetic peptide
  Seed: AVKGIGTMVM
AIKGIGTMVF

SEQ ID NO: 31789 - protein, 10 aa, Artificial Sequence
  Description of Artificial Sequence: Synthetic peptide
  Seed: AVKGIGTMVM
AIKGIGTMVY

SEQ ID NO: 31790 - protein, 10 aa, Artificial Sequence
  Description of Artificial Sequence: Synthetic peptide
  Seed: AVKGIGTMVM
ALKGIGTMVM

SEQ ID NO: 31791 - protein, 10 aa, Artificial Sequence
  Description of Artificial Sequence: Synthetic peptide
  Seed: AVKGIGTMVM
ALKGIGTMVF

SEQ ID NO: 31792 - protein, 10 aa, Artificial Sequence
  Description of Artificial Sequence: Synthetic peptide
  Seed: AVKGIGTMVM
ALKGIGTMVY

SEQ ID NO: 31793 - protein, 10 aa, Artificial Sequence
  Description of Artificial Sequence: Synthetic peptide
  Seed: AVKGIGTMVM
AMKGIGTMVI

SEQ ID NO: 31794 - protein, 10 aa, Artificial Sequence
  Description of Artificial Sequence: Synthetic peptide
  Seed: AVKGIGTMVM
AMKGIGTMVL

SEQ ID NO: 31795 - protein, 10 aa, Artificial Sequence
  Description of Artificial Sequence: Synthetic peptide
  Seed: AVKGIGTMVM
AMKGIGTMVM

SEQ ID NO: 31796 - protein, 10 aa, Artificial Sequence
  Description of Artificial Sequence: Synthetic peptide
  Seed: AVKGIGTMVM
AMKGIGTMVF

SEQ ID NO: 31797 - protein, 10 aa, Artificial Sequence
  Description of Artificial Sequence: Synthetic peptide
  Seed: AVKGIGTMVM
AMKGIGTMVW

SEQ ID NO: 31798 - protein, 10 aa, Artificial Sequence
  Description of Artificial Sequence: Synthetic peptide
  Seed: AVKGIGTMVM
AMKGIGTMVY

SEQ ID NO: 31799 - protein, 10 aa, Artificial Sequence
  Description of Artificial Sequence: Synthetic peptide
  Seed: AVKGIGTMVM
ASKGIGTMVM

SEQ ID NO: 31800 - protein, 10 aa, Artificial Sequence
  Description of Artificial Sequence: Synthetic peptide
  Seed: AVKGIGTMVM
ASKGIGTMVF

SEQ ID NO: 31801 - protein, 10 aa, Artificial Sequence
  Description of Artificial Sequence: Synthetic peptide
  Seed: AVKGIGTMVM
ASKGIGTMVY

SEQ ID NO: 31802 - protein, 10 aa, Artificial Sequence
  Description of Artificial Sequence: Synthetic peptide
  Seed: AVKGIGTMVM
ATKGIGTMVM

SEQ ID NO: 31803 - protein, 10 aa, Artificial Sequence
  Description of Artificial Sequence: Synthetic peptide
  Seed: AVKGIGTMVM
ATKGIGTMVF

SEQ ID NO: 31804 - protein, 10 aa, Artificial Sequence
  Description of Artificial Sequence: Synthetic peptide
  Seed: AVKGIGTMVM
ATKGIGTMVY

SEQ ID NO: 31805 - protein, 10 aa, Artificial Sequence
  Description of Artificial Sequence: Synthetic peptide
  Seed: AVKGVGTMVM
AQKGVGTMVV

SEQ ID NO: 31806 - protein, 10 aa, Artificial Sequence
  Description of Artificial Sequence: Synthetic peptide
  Seed: AVKGVGTMVM
AGKGVGTMVY

SEQ ID NO: 31807 - protein, 10 aa, Artificial Sequence
  Description of Artificial Sequence: Synthetic peptide
  Seed: AVSSGYDFEK
AISSGYDFEY

SEQ ID NO: 31808 - protein, 10 aa, Artificial Sequence
  Description of Artificial Sequence: Synthetic peptide
  Seed: AVSSGYDFEK
ACSSGYDFEK

SEQ ID NO: 31809 - protein, 10 aa, Artificial Sequence
  Description of Artificial Sequence: Synthetic peptide
  Seed: AVSSGYDFEK
AASSGYDFER

SEQ ID NO: 31810 - protein, 10 aa, Artificial Sequence
  Description of Artificial Sequence: Synthetic peptide
  Seed: AVSSGYDFEK
AASSGYDFEK

SEQ ID NO: 31811 - protein, 10 aa, Artificial Sequence
  Description of Artificial Sequence: Synthetic peptide
  Seed: AVSSGYDFEK
ARSSGYDFER

SEQ ID NO: 31812 - protein, 10 aa, Artificial Sequence
  Description of Artificial Sequence: Synthetic peptide
  Seed: AVSSGYDFEK
ARSSGYDFEK

SEQ ID NO: 31813 - protein, 10 aa, Artificial Sequence
  Description of Artificial Sequence: Synthetic peptide
  Seed: AVSSGYDFEK
ANSSGYDFER

SEQ ID NO: 31814 - protein, 10 aa, Artificial Sequence
  Description of Artificial Sequence: Synthetic peptide
  Seed: AVSSGYDFEK
ANSSGYDFEK

SEQ ID NO: 31815 - protein, 10 aa, Artificial Sequence
  Description of Artificial Sequence: Synthetic peptide
  Seed: AVSSGYDFEK
ADSSGYDFER

SEQ ID NO: 31816 - protein, 10 aa, Artificial Sequence
  Description of Artificial Sequence: Synthetic peptide
  Seed: AVSSGYDFEK
ADSSGYDFEK

SEQ ID NO: 31817 - protein, 10 aa, Artificial Sequence
  Description of Artificial Sequence: Synthetic peptide
  Seed: AVSSGYDFEK
ACSSGYDFER

SEQ ID NO: 31818 - protein, 10 aa, Artificial Sequence
  Description of Artificial Sequence: Synthetic peptide
  Seed: AVSSGYDFEK
AQSSGYDFER

SEQ ID NO: 31819 - protein, 10 aa, Artificial Sequence
  Description of Artificial Sequence: Synthetic peptide
  Seed: AVSSGYDFEK
AQSSGYDFEK

SEQ ID NO: 31820 - protein, 10 aa, Artificial Sequence
  Description of Artificial Sequence: Synthetic peptide
  Seed: AVSSGYDFEK
AESSGYDFER

SEQ ID NO: 31821 - protein, 10 aa, Artificial Sequence
  Description of Artificial Sequence: Synthetic peptide
  Seed: AVSSGYDFEK
AESSGYDFEK

SEQ ID NO: 31822 - protein, 10 aa, Artificial Sequence
  Description of Artificial Sequence: Synthetic peptide
  Seed: AVSSGYDFEK
AGSSGYDFER

SEQ ID NO: 31823 - protein, 10 aa, Artificial Sequence
  Description of Artificial Sequence: Synthetic peptide
  Seed: AVSSGYDFEK
AGSSGYDFEK

SEQ ID NO: 31824 - protein, 10 aa, Artificial Sequence
  Description of Artificial Sequence: Synthetic peptide
  Seed: AVSSGYDFEK
AHSSGYDFER

SEQ ID NO: 31825 - protein, 10 aa, Artificial Sequence
  Description of Artificial Sequence: Synthetic peptide
  Seed: AVSSGYDFEK
AHSSGYDFEK

SEQ ID NO: 31826 - protein, 10 aa, Artificial Sequence
  Description of Artificial Sequence: Synthetic peptide
  Seed: AVSSGYDFEK
AISSGYDFER

SEQ ID NO: 31827 - protein, 10 aa, Artificial Sequence
  Description of Artificial Sequence: Synthetic peptide
  Seed: AVSSGYDFEK
AISSGYDFEK

SEQ ID NO: 31828 - protein, 10 aa, Artificial Sequence
  Description of Artificial Sequence: Synthetic peptide
  Seed: AVKGVGTMVM
AVKGVGTMVY

SEQ ID NO: 31829 - protein, 10 aa, Artificial Sequence
  Description of Artificial Sequence: Synthetic peptide
  Seed: AVKGVGTMVM
AVKGVGTMVF

SEQ ID NO: 31830 - protein, 10 aa, Artificial Sequence
  Description of Artificial Sequence: Synthetic peptide
  Seed: AVKGVGTMVM
ATKGVGTMVY

SEQ ID NO: 31831 - protein, 10 aa, Artificial Sequence
  Description of Artificial Sequence: Synthetic peptide
  Seed: AVKGVGTMVM
AIKGVGTMVF

SEQ ID NO: 31832 - protein, 10 aa, Artificial Sequence
  Description of Artificial Sequence: Synthetic peptide
  Seed: AVKGVGTMVM
AIKGVGTMVY

SEQ ID NO: 31833 - protein, 10 aa, Artificial Sequence
  Description of Artificial Sequence: Synthetic peptide
  Seed: AVKGVGTMVM
ALKGVGTMVL

SEQ ID NO: 31834 - protein, 10 aa, Artificial Sequence
  Description of Artificial Sequence: Synthetic peptide
  Seed: AVKGVGTMVM
ALKGVGTMVM

SEQ ID NO: 31835 - protein, 10 aa, Artificial Sequence
  Description of Artificial Sequence: Synthetic peptide
  Seed: AVKGVGTMVM
ALKGVGTMVF

SEQ ID NO: 31836 - protein, 10 aa, Artificial Sequence
  Description of Artificial Sequence: Synthetic peptide
  Seed: AVKGVGTMVM
ALKGVGTMVY

SEQ ID NO: 31837 - protein, 10 aa, Artificial Sequence
  Description of Artificial Sequence: Synthetic peptide
  Seed: AVKGVGTMVM
AMKGVGTMVH

SEQ ID NO: 31838 - protein, 10 aa, Artificial Sequence
  Description of Artificial Sequence: Synthetic peptide
  Seed: AVKGVGTMVM
AMKGVGTMVI

SEQ ID NO: 31839 - protein, 10 aa, Artificial Sequence
  Description of Artificial Sequence: Synthetic peptide
  Seed: AVKGVGTMVM
AMKGVGTMVL

SEQ ID NO: 31840 - protein, 10 aa, Artificial Sequence
  Description of Artificial Sequence: Synthetic peptide
  Seed: AVKGVGTMVM
AMKGVGTMVM

SEQ ID NO: 31841 - protein, 10 aa, Artificial Sequence
  Description of Artificial Sequence: Synthetic peptide
  Seed: AVKGVGTMVM
AMKGVGTMVF

SEQ ID NO: 31842 - protein, 10 aa, Artificial Sequence
  Description of Artificial Sequence: Synthetic peptide
  Seed: AVKGVGTMVM
AMKGVGTMVW

SEQ ID NO: 31843 - protein, 10 aa, Artificial Sequence
  Description of Artificial Sequence: Synthetic peptide
  Seed: AVKGVGTMVM
AMKGVGTMVY

SEQ ID NO: 31844 - protein, 10 aa, Artificial Sequence
  Description of Artificial Sequence: Synthetic peptide
  Seed: AVKGVGTMVM
AFKGVGTMVY

SEQ ID NO: 31845 - protein, 10 aa, Artificial Sequence
  Description of Artificial Sequence: Synthetic peptide
  Seed: AVKGVGTMVM
ASKGVGTMVM

SEQ ID NO: 31846 - protein, 10 aa, Artificial Sequence
  Description of Artificial Sequence: Synthetic peptide
  Seed: AVKGVGTMVM
ASKGVGTMVF

SEQ ID NO: 31847 - protein, 10 aa, Artificial Sequence
  Description of Artificial Sequence: Synthetic peptide
  Seed: AVKGVGTMVM
ASKGVGTMVY

SEQ ID NO: 31848 - protein, 10 aa, Artificial Sequence
  Description of Artificial Sequence: Synthetic peptide
  Seed: AVKGVGTMVM
ATKGVGTMVM

SEQ ID NO: 31849 - protein, 10 aa, Artificial Sequence
  Description of Artificial Sequence: Synthetic peptide
  Seed: AVKGVGTMVM
ATKGVGTMVF

SEQ ID NO: 31850 - protein, 10 aa, Artificial Sequence
  Description of Artificial Sequence: Synthetic peptide
  Seed: AYERMCNILK
AVERMCNILA

SEQ ID NO: 31851 - protein, 10 aa, Artificial Sequence
  Description of Artificial Sequence: Synthetic peptide
  Seed: AYERMCNILK
AVERMCNILR

SEQ ID NO: 31852 - protein, 10 aa, Artificial Sequence
  Description of Artificial Sequence: Synthetic peptide
  Seed: AYERMCNILK
AVERMCNILI

SEQ ID NO: 31853 - protein, 10 aa, Artificial Sequence
  Description of Artificial Sequence: Synthetic peptide
  Seed: CLPACVYGPA
CKPACVYGPA

SEQ ID NO: 31854 - protein, 10 aa, Artificial Sequence
  Description of Artificial Sequence: Synthetic peptide
  Seed: CLPACVYGPA
CHPACVYGPV

SEQ ID NO: 31855 - protein, 10 aa, Artificial Sequence
  Description of Artificial Sequence: Synthetic peptide
  Seed: CLPACVYGPA
CIPACVYGPA

SEQ ID NO: 31856 - protein, 10 aa, Artificial Sequence
  Description of Artificial Sequence: Synthetic peptide
  Seed: CLPACVYGPA
CIPACVYGPI

SEQ ID NO: 31857 - protein, 10 aa, Artificial Sequence
  Description of Artificial Sequence: Synthetic peptide
  Seed: CLPACVYGPA
CIPACVYGPL

SEQ ID NO: 31858 - protein, 10 aa, Artificial Sequence
  Description of Artificial Sequence: Synthetic peptide
  Seed: CLPACVYGPA
CIPACVYGPV

SEQ ID NO: 31859 - protein, 10 aa, Artificial Sequence
  Description of Artificial Sequence: Synthetic peptide
  Seed: CLPACVYGPA
CLPACVYGPI

SEQ ID NO: 31860 - protein, 10 aa, Artificial Sequence
  Description of Artificial Sequence: Synthetic peptide
  Seed: CLPACVYGPA
CLPACVYGPL

SEQ ID NO: 31861 - protein, 10 aa, Artificial Sequence
  Description of Artificial Sequence: Synthetic peptide
  Seed: CLPACVYGPA
CLPACVYGPM

SEQ ID NO: 31862 - protein, 10 aa, Artificial Sequence
  Description of Artificial Sequence: Synthetic peptide
  Seed: CLPACVYGPA
CLPACVYGPV

SEQ ID NO: 31863 - protein, 10 aa, Artificial Sequence
  Description of Artificial Sequence: Synthetic peptide
  Seed: CLPACVYGPA
CKPACVYGPV

SEQ ID NO: 31864 - protein, 10 aa, Artificial Sequence
  Description of Artificial Sequence: Synthetic peptide
  Seed: CLPACVYGPA
CSPACVYGPA

SEQ ID NO: 31865 - protein, 10 aa, Artificial Sequence
  Description of Artificial Sequence: Synthetic peptide
  Seed: CLPACVYGPA
CMPACVYGPA

SEQ ID NO: 31866 - protein, 10 aa, Artificial Sequence
  Description of Artificial Sequence: Synthetic peptide
  Seed: CLPACVYGPA
CMPACVYGPI

SEQ ID NO: 31867 - protein, 10 aa, Artificial Sequence
  Description of Artificial Sequence: Synthetic peptide
  Seed: CLPACVYGPA
CMPACVYGPL

SEQ ID NO: 31868 - protein, 10 aa, Artificial Sequence
  Description of Artificial Sequence: Synthetic peptide
  Seed: CLPACVYGPA
CMPACVYGPM

SEQ ID NO: 31869 - protein, 10 aa, Artificial Sequence
  Description of Artificial Sequence: Synthetic peptide
  Seed: CLPACVYGPA
CMPACVYGPV

SEQ ID NO: 31870 - protein, 10 aa, Artificial Sequence
  Description of Artificial Sequence: Synthetic peptide
  Seed: CLPACVYGPA
CFPACVYGPA

SEQ ID NO: 31871 - protein, 10 aa, Artificial Sequence
  Description of Artificial Sequence: Synthetic peptide
  Seed: CLPACVYGPA
CFPACVYGPI

SEQ ID NO: 31872 - protein, 10 aa, Artificial Sequence
  Description of Artificial Sequence: Synthetic peptide
  Seed: CLPACVYGPA
CFPACVYGPV

SEQ ID NO: 31873 - protein, 10 aa, Artificial Sequence
  Description of Artificial Sequence: Synthetic peptide
  Seed: CLPACVYGPA
CPPACVYGPA

SEQ ID NO: 31874 - protein, 10 aa, Artificial Sequence
  Description of Artificial Sequence: Synthetic peptide
  Seed: CLPACVYGPA
CHPACVYGPA

SEQ ID NO: 31875 - protein, 10 aa, Artificial Sequence
  Description of Artificial Sequence: Synthetic peptide
  Seed: CLPACVYGPA
CGPACVYGPV

SEQ ID NO: 31876 - protein, 10 aa, Artificial Sequence
  Description of Artificial Sequence: Synthetic peptide
  Seed: CLPACVYGPA
CGPACVYGPA

SEQ ID NO: 31877 - protein, 10 aa, Artificial Sequence
  Description of Artificial Sequence: Synthetic peptide
  Seed: CLPACVYGPA
CEPACVYGPV

SEQ ID NO: 31878 - protein, 10 aa, Artificial Sequence
  Description of Artificial Sequence: Synthetic peptide
  Seed: CLPACVYGLA
CMPACVYGLV

SEQ ID NO: 31879 - protein, 10 aa, Artificial Sequence
  Description of Artificial Sequence: Synthetic peptide
  Seed: CLPACVYGLA
CTPACVYGLV

SEQ ID NO: 31880 - protein, 10 aa, Artificial Sequence
  Description of Artificial Sequence: Synthetic peptide
  Seed: CLPACVYGLA
CVPACVYGLV

SEQ ID NO: 31881 - protein, 11 aa, Artificial Sequence
  Description of Artificial Sequence: Synthetic peptide
  Seed: CLPACVYGLAV
CMPACVYGLAV

SEQ ID NO: 31882 - protein, 10 aa, Artificial Sequence
  Description of Artificial Sequence: Synthetic peptide
  Seed: CLPACVYGPA
CAPACVYGPA

SEQ ID NO: 31883 - protein, 10 aa, Artificial Sequence
  Description of Artificial Sequence: Synthetic peptide
  Seed: CLPACVYGPA
CAPACVYGPV

SEQ ID NO: 31884 - protein, 10 aa, Artificial Sequence
  Description of Artificial Sequence: Synthetic peptide
  Seed: CLPACVYGPA
CRPACVYGPA

SEQ ID NO: 31885 - protein, 10 aa, Artificial Sequence
  Description of Artificial Sequence: Synthetic peptide
  Seed: CLPACVYGPA
CRPACVYGPV

SEQ ID NO: 31886 - protein, 10 aa, Artificial Sequence
  Description of Artificial Sequence: Synthetic peptide
  Seed: CLPACVYGPA
CNPACVYGPA

SEQ ID NO: 31887 - protein, 10 aa, Artificial Sequence
  Description of Artificial Sequence: Synthetic peptide
  Seed: CLPACVYGPA
CNPACVYGPV

SEQ ID NO: 31888 - protein, 10 aa, Artificial Sequence
  Description of Artificial Sequence: Synthetic peptide
  Seed: CLPACVYGPA
CDPACVYGPA

SEQ ID NO: 31889 - protein, 10 aa, Artificial Sequence
  Description of Artificial Sequence: Synthetic peptide
  Seed: CLPACVYGPA
CDPACVYGPV

SEQ ID NO: 31890 - protein, 10 aa, Artificial Sequence
  Description of Artificial Sequence: Synthetic peptide
  Seed: CLPACVYGPA
CCPACVYGPA

SEQ ID NO: 31891 - protein, 10 aa, Artificial Sequence
  Description of Artificial Sequence: Synthetic peptide
  Seed: CLPACVYGPA
CCPACVYGPV

SEQ ID NO: 31892 - protein, 10 aa, Artificial Sequence
  Description of Artificial Sequence: Synthetic peptide
  Seed: CLPACVYGPA
CQPACVYGPA

SEQ ID NO: 31893 - protein, 10 aa, Artificial Sequence
  Description of Artificial Sequence: Synthetic peptide
  Seed: CLPACVYGPA
CQPACVYGPI

SEQ ID NO: 31894 - protein, 10 aa, Artificial Sequence
  Description of Artificial Sequence: Synthetic peptide
  Seed: CLPACVYGPA
CQPACVYGPL

SEQ ID NO: 31895 - protein, 10 aa, Artificial Sequence
  Description of Artificial Sequence: Synthetic peptide
  Seed: CLPACVYGPA
CQPACVYGPV

SEQ ID NO: 31896 - protein, 10 aa, Artificial Sequence
  Description of Artificial Sequence: Synthetic peptide
  Seed: CLPACVYGPA
CEPACVYGPA

SEQ ID NO: 31897 - protein, 10 aa, Artificial Sequence
  Description of Artificial Sequence: Synthetic peptide
  Seed: CLPACVYGPA
CPPACVYGPV

SEQ ID NO: 31898 - protein, 10 aa, Artificial Sequence
  Description of Artificial Sequence: Synthetic peptide
  Seed: CLPACVYGPA
CSPACVYGPV

SEQ ID NO: 31899 - protein, 10 aa, Artificial Sequence
  Description of Artificial Sequence: Synthetic peptide
  Seed: AYERMCNILK
AVERMCNILL

SEQ ID NO: 31900 - protein, 10 aa, Artificial Sequence
  Description of Artificial Sequence: Synthetic peptide
  Seed: CNSAAFEDLR
CLSAAFEDLK

SEQ ID NO: 31901 - protein, 10 aa, Artificial Sequence
  Description of Artificial Sequence: Synthetic peptide
  Seed: CNSAAFEDLR
CESAAFEDLR

SEQ ID NO: 31902 - protein, 10 aa, Artificial Sequence
  Description of Artificial Sequence: Synthetic peptide
  Seed: CNSAAFEDLR
CESAAFEDLK

SEQ ID NO: 31903 - protein, 10 aa, Artificial Sequence
  Description of Artificial Sequence: Synthetic peptide
  Seed: CNSAAFEDLR
CGSAAFEDLR

SEQ ID NO: 31904 - protein, 10 aa, Artificial Sequence
  Description of Artificial Sequence: Synthetic peptide
  Seed: CNSAAFEDLR
CGSAAFEDLK

SEQ ID NO: 31905 - protein, 10 aa, Artificial Sequence
  Description of Artificial Sequence: Synthetic peptide
  Seed: CNSAAFEDLR
CHSAAFEDLK

SEQ ID NO: 31906 - protein, 10 aa, Artificial Sequence
  Description of Artificial Sequence: Synthetic peptide
  Seed: CNSAAFEDLR
CISAAFEDLR

SEQ ID NO: 31907 - protein, 10 aa, Artificial Sequence
  Description of Artificial Sequence: Synthetic peptide
  Seed: CNSAAFEDLR
CISAAFEDLK

SEQ ID NO: 31908 - protein, 10 aa, Artificial Sequence
  Description of Artificial Sequence: Synthetic peptide
  Seed: CNSAAFEDLR
CLSAAFEDLR

SEQ ID NO: 31909 - protein, 10 aa, Artificial Sequence
  Description of Artificial Sequence: Synthetic peptide
  Seed: CNSAAFEDLR
CKSAAFEDLR

SEQ ID NO: 31910 - protein, 10 aa, Artificial Sequence
  Description of Artificial Sequence: Synthetic peptide
  Seed: CLPACVYGPA
CTPACVYGPA

SEQ ID NO: 31911 - protein, 10 aa, Artificial Sequence
  Description of Artificial Sequence: Synthetic peptide
  Seed: CNSAAFEDLR
CKSAAFEDLK

SEQ ID NO: 31912 - protein, 10 aa, Artificial Sequence
  Description of Artificial Sequence: Synthetic peptide
  Seed: CNSAAFEDLR
CMSAAFEDLR

SEQ ID NO: 31913 - protein, 10 aa, Artificial Sequence
  Description of Artificial Sequence: Synthetic peptide
  Seed: CNSAAFEDLR
CMSAAFEDLK

SEQ ID NO: 31914 - protein, 10 aa, Artificial Sequence
  Description of Artificial Sequence: Synthetic peptide
  Seed: CNSAAFEDLR
CFSAAFEDLR

SEQ ID NO: 31915 - protein, 10 aa, Artificial Sequence
  Description of Artificial Sequence: Synthetic peptide
  Seed: CNSAAFEDLR
CFSAAFEDLK

SEQ ID NO: 31916 - protein, 10 aa, Artificial Sequence
  Description of Artificial Sequence: Synthetic peptide
  Seed: CNSAAFEDLR
CPSAAFEDLR

SEQ ID NO: 31917 - protein, 10 aa, Artificial Sequence
  Description of Artificial Sequence: Synthetic peptide
  Seed: CNSAAFEDLR
CPSAAFEDLK

SEQ ID NO: 31918 - protein, 10 aa, Artificial Sequence
  Description of Artificial Sequence: Synthetic peptide
  Seed: CNSAAFEDLR
CSSAAFEDLR

SEQ ID NO: 31919 - protein, 10 aa, Artificial Sequence
  Description of Artificial Sequence: Synthetic peptide
  Seed: CNSAAFEDLR
CSSAAFEDLK

SEQ ID NO: 31920 - protein, 10 aa, Artificial Sequence
  Description of Artificial Sequence: Synthetic peptide
  Seed: CNSAAFEDLR
CQSAAFEDLK

SEQ ID NO: 31921 - protein, 10 aa, Artificial Sequence
  Description of Artificial Sequence: Synthetic peptide
  Seed: CNSAAFEDLR
CQSAAFEDLR

SEQ ID NO: 31922 - protein, 10 aa, Artificial Sequence
  Description of Artificial Sequence: Synthetic peptide
  Seed: CNSAAFEDLR
CCSAAFEDLK

SEQ ID NO: 31923 - protein, 10 aa, Artificial Sequence
  Description of Artificial Sequence: Synthetic peptide
  Seed: CNSAAFEDLR
CCSAAFEDLR

SEQ ID NO: 31924 - protein, 10 aa, Artificial Sequence
  Description of Artificial Sequence: Synthetic peptide
  Seed: CLPACVYGPA
CTPACVYGPL

SEQ ID NO: 31925 - protein, 10 aa, Artificial Sequence
  Description of Artificial Sequence: Synthetic peptide
  Seed: CLPACVYGPA
CTPACVYGPV

SEQ ID NO: 31926 - protein, 10 aa, Artificial Sequence
  Description of Artificial Sequence: Synthetic peptide
  Seed: CLPACVYGPA
CWPACVYGPA

SEQ ID NO: 31927 - protein, 10 aa, Artificial Sequence
  Description of Artificial Sequence: Synthetic peptide
  Seed: CLPACVYGPA
CWPACVYGPV

SEQ ID NO: 31928 - protein, 10 aa, Artificial Sequence
  Description of Artificial Sequence: Synthetic peptide
  Seed: CLPACVYGPA
CYPACVYGPA

SEQ ID NO: 31929 - protein, 10 aa, Artificial Sequence
  Description of Artificial Sequence: Synthetic peptide
  Seed: CLPACVYGPA
CYPACVYGPV

SEQ ID NO: 31930 - protein, 10 aa, Artificial Sequence
  Description of Artificial Sequence: Synthetic peptide
  Seed: CLPACVYGPA
CVPACVYGPA

SEQ ID NO: 31931 - protein, 10 aa, Artificial Sequence
  Description of Artificial Sequence: Synthetic peptide
  Seed: CLPACVYGPA
CVPACVYGPI

SEQ ID NO: 31932 - protein, 10 aa, Artificial Sequence
  Description of Artificial Sequence: Synthetic peptide
  Seed: CLPACVYGPA
CVPACVYGPL

SEQ ID NO: 31933 - protein, 10 aa, Artificial Sequence
  Description of Artificial Sequence: Synthetic peptide
  Seed: CLPACVYGPA
CVPACVYGPV

SEQ ID NO: 31934 - protein, 11 aa, Artificial Sequence
  Description of Artificial Sequence: Synthetic peptide
  Seed: CLPACVYGPAV
CLPACVYGPAI

SEQ ID NO: 31935 - protein, 11 aa, Artificial Sequence
  Description of Artificial Sequence: Synthetic peptide
  Seed: CLPACVYGPAV
CMPACVYGPAV

SEQ ID NO: 31936 - protein, 10 aa, Artificial Sequence
  Description of Artificial Sequence: Synthetic peptide
  Seed: CNSAAFEDLR
CASAAFEDLR

SEQ ID NO: 31937 - protein, 10 aa, Artificial Sequence
  Description of Artificial Sequence: Synthetic peptide
  Seed: CNSAAFEDLR
CASAAFEDLK

SEQ ID NO: 31938 - protein, 10 aa, Artificial Sequence
  Description of Artificial Sequence: Synthetic peptide
  Seed: CNSAAFEDLR
CRSAAFEDLR

SEQ ID NO: 31939 - protein, 10 aa, Artificial Sequence
  Description of Artificial Sequence: Synthetic peptide
  Seed: CNSAAFEDLR
CRSAAFEDLK

SEQ ID NO: 31940 - protein, 10 aa, Artificial Sequence
  Description of Artificial Sequence: Synthetic peptide
  Seed: CNSAAFEDLR
CNSAAFEDLK

SEQ ID NO: 31941 - protein, 10 aa, Artificial Sequence
  Description of Artificial Sequence: Synthetic peptide
  Seed: CNSAAFEDLR
CDSAAFEDLR

SEQ ID NO: 31942 - protein, 10 aa, Artificial Sequence
  Description of Artificial Sequence: Synthetic peptide
  Seed: CNSAAFEDLR
CDSAAFEDLK

SEQ ID NO: 31943 - protein, 10 aa, Artificial Sequence
  Description of Artificial Sequence: Synthetic peptide
  Seed: CLPACVYGLA
CMPACVYGLM

SEQ ID NO: 31944 - protein, 10 aa, Artificial Sequence
  Description of Artificial Sequence: Synthetic peptide
  Seed: CLPACVYGLA
CMPACVYGLL

SEQ ID NO: 31945 - protein, 10 aa, Artificial Sequence
  Description of Artificial Sequence: Synthetic peptide
  Seed: CLPACVYGLA
CMPACVYGLI

SEQ ID NO: 31946 - protein, 10 aa, Artificial Sequence
  Description of Artificial Sequence: Synthetic peptide
  Seed: CLPACVYGLA
CMPACVYGLA

SEQ ID NO: 31947 - protein, 10 aa, Artificial Sequence
  Description of Artificial Sequence: Synthetic peptide
  Seed: CHSAAFEDLR
CTSAAFEDLR

SEQ ID NO: 31948 - protein, 10 aa, Artificial Sequence
  Description of Artificial Sequence: Synthetic peptide
  Seed: CHSAAFEDLR
CTSAAFEDLK

SEQ ID NO: 31949 - protein, 10 aa, Artificial Sequence
  Description of Artificial Sequence: Synthetic peptide
  Seed: CHSAAFEDLR
CTSAAFEDLY

SEQ ID NO: 31950 - protein, 10 aa, Artificial Sequence
  Description of Artificial Sequence: Synthetic peptide
  Seed: CHSAAFEDLR
CWSAAFEDLR

SEQ ID NO: 31951 - protein, 10 aa, Artificial Sequence
  Description of Artificial Sequence: Synthetic peptide
  Seed: CHSAAFEDLR
CWSAAFEDLK

SEQ ID NO: 31952 - protein, 10 aa, Artificial Sequence
  Description of Artificial Sequence: Synthetic peptide
  Seed: AYERMCNILK
AVERMCNILK

SEQ ID NO: 31953 - protein, 10 aa, Artificial Sequence
  Description of Artificial Sequence: Synthetic peptide
  Seed: AYERMCNILK
AVERMCNILM

SEQ ID NO: 31954 - protein, 10 aa, Artificial Sequence
  Description of Artificial Sequence: Synthetic peptide
  Seed: AYERMCNILK
AVERMCNILS

SEQ ID NO: 31955 - protein, 10 aa, Artificial Sequence
  Description of Artificial Sequence: Synthetic peptide
  Seed: AYERMCNILK
AVERMCNILV

SEQ ID NO: 31956 - protein, 9 aa, Artificial Sequence
  Description of Artificial Sequence: Synthetic peptide
  Seed: CHSAAFEDL
CHSAAFEDI

SEQ ID NO: 31957 - protein, 9 aa, Artificial Sequence
  Description of Artificial Sequence: Synthetic peptide
  Seed: CHSAAFEDL
CHSAAFEDM

SEQ ID NO: 31958 - protein, 9 aa, Artificial Sequence
  Description of Artificial Sequence: Synthetic peptide
  Seed: CHSAAFEDL
CHSAAFEDF

SEQ ID NO: 31959 - protein, 10 aa, Artificial Sequence
  Description of Artificial Sequence: Synthetic peptide
  Seed: CHSAAFEDLR
CYSAAFEDLR

SEQ ID NO: 31960 - protein, 10 aa, Artificial Sequence
  Description of Artificial Sequence: Synthetic peptide
  Seed: CHSAAFEDLR
CYSAAFEDLK

SEQ ID NO: 31961 - protein, 10 aa, Artificial Sequence
  Description of Artificial Sequence: Synthetic peptide
  Seed: CHSAAFEDLR
CVSAAFEDLR

SEQ ID NO: 31962 - protein, 9 aa, Artificial Sequence
  Description of Artificial Sequence: Synthetic peptide
  Seed: CLPACVYGL
CMPACVYGV

SEQ ID NO: 31963 - protein, 9 aa, Artificial Sequence
  Description of Artificial Sequence: Synthetic peptide
  Seed: CLPACVYGL
CTPACVYGA

SEQ ID NO: 31964 - protein, 9 aa, Artificial Sequence
  Description of Artificial Sequence: Synthetic peptide
  Seed: CLPACVYGL
CTPACVYGI

SEQ ID NO: 31965 - protein, 9 aa, Artificial Sequence
  Description of Artificial Sequence: Synthetic peptide
  Seed: CLPACVYGL
CTPACVYGL

SEQ ID NO: 31966 - protein, 9 aa, Artificial Sequence
  Description of Artificial Sequence: Synthetic peptide
  Seed: CLPACVYGL
CTPACVYGV

SEQ ID NO: 31967 - protein, 9 aa, Artificial Sequence
  Description of Artificial Sequence: Synthetic peptide
  Seed: CLPACVYGL
CVPACVYGA

SEQ ID NO: 31968 - protein, 9 aa, Artificial Sequence
  Description of Artificial Sequence: Synthetic peptide
  Seed: CLPACVYGL
CVPACVYGI

SEQ ID NO: 31969 - protein, 9 aa, Artificial Sequence
  Description of Artificial Sequence: Synthetic peptide
  Seed: CLPACVYGL
CVPACVYGL

SEQ ID NO: 31970 - protein, 9 aa, Artificial Sequence
  Description of Artificial Sequence: Synthetic peptide
  Seed: CLPACVYGL
CVPACVYGM

SEQ ID NO: 31971 - protein, 9 aa, Artificial Sequence
  Description of Artificial Sequence: Synthetic peptide
  Seed: CLPACVYGL
CVPACVYGV

SEQ ID NO: 31972 - protein, 10 aa, Artificial Sequence
  Description of Artificial Sequence: Synthetic peptide
  Seed: CLPACVYGLA
CQPACVYGLA

SEQ ID NO: 31973 - protein, 10 aa, Artificial Sequence
  Description of Artificial Sequence: Synthetic peptide
  Seed: CLPACVYGLA
CQPACVYGLI

SEQ ID NO: 31974 - protein, 10 aa, Artificial Sequence
  Description of Artificial Sequence: Synthetic peptide
  Seed: CLPACVYGLA
CQPACVYGLL

SEQ ID NO: 31975 - protein, 10 aa, Artificial Sequence
  Description of Artificial Sequence: Synthetic peptide
  Seed: CLPACVYGLA
CQPACVYGLV

SEQ ID NO: 31976 - protein, 10 aa, Artificial Sequence
  Description of Artificial Sequence: Synthetic peptide
  Seed: CLPACVYGLA
CIPACVYGLL

SEQ ID NO: 31977 - protein, 10 aa, Artificial Sequence
  Description of Artificial Sequence: Synthetic peptide
  Seed: CLPACVYGLA
CIPACVYGLV

SEQ ID NO: 31978 - protein, 10 aa, Artificial Sequence
  Description of Artificial Sequence: Synthetic peptide
  Seed: CLPACVYGLA
CLPACVYGLL

SEQ ID NO: 31979 - protein, 10 aa, Artificial Sequence
  Description of Artificial Sequence: Synthetic peptide
  Seed: CLPACVYGLA
CLPACVYGLM

SEQ ID NO: 31980 - protein, 9 aa, Artificial Sequence
  Description of Artificial Sequence: Synthetic peptide
  Seed: CLPACVYGL
CSPACVYGV

SEQ ID NO: 31981 - protein, 9 aa, Artificial Sequence
  Description of Artificial Sequence: Synthetic peptide
  Seed: CLPACVYGL
CMPACVYGT

SEQ ID NO: 31982 - protein, 10 aa, Artificial Sequence
  Description of Artificial Sequence: Synthetic peptide
  Seed: CHSAAFEDLR
CVSAAFEDLK

SEQ ID NO: 31983 - protein, 9 aa, Artificial Sequence
  Description of Artificial Sequence: Synthetic peptide
  Seed: CLPACVYGL
CMPACVYGM

SEQ ID NO: 31984 - protein, 9 aa, Artificial Sequence
  Description of Artificial Sequence: Synthetic peptide
  Seed: CLPACVYGL
CAPACVYGV

SEQ ID NO: 31985 - protein, 9 aa, Artificial Sequence
  Description of Artificial Sequence: Synthetic peptide
  Seed: CLPACVYGL
CQPACVYGA

SEQ ID NO: 31986 - protein, 9 aa, Artificial Sequence
  Description of Artificial Sequence: Synthetic peptide
  Seed: CLPACVYGL
CQPACVYGI

SEQ ID NO: 31987 - protein, 9 aa, Artificial Sequence
  Description of Artificial Sequence: Synthetic peptide
  Seed: CLPACVYGL
CQPACVYGL

SEQ ID NO: 31988 - protein, 9 aa, Artificial Sequence
  Description of Artificial Sequence: Synthetic peptide
  Seed: CLPACVYGL
CQPACVYGM

SEQ ID NO: 31989 - protein, 9 aa, Artificial Sequence
  Description of Artificial Sequence: Synthetic peptide
  Seed: CLPACVYGL
CQPACVYGV

SEQ ID NO: 31990 - protein, 9 aa, Artificial Sequence
  Description of Artificial Sequence: Synthetic peptide
  Seed: CLPACVYGL
CIPACVYGA

SEQ ID NO: 31991 - protein, 9 aa, Artificial Sequence
  Description of Artificial Sequence: Synthetic peptide
  Seed: CLPACVYGL
CIPACVYGI

SEQ ID NO: 31992 - protein, 9 aa, Artificial Sequence
  Description of Artificial Sequence: Synthetic peptide
  Seed: CLPACVYGL
CIPACVYGL

SEQ ID NO: 31993 - protein, 9 aa, Artificial Sequence
  Description of Artificial Sequence: Synthetic peptide
  Seed: CLPACVYGL
CIPACVYGV

SEQ ID NO: 31994 - protein, 9 aa, Artificial Sequence
  Description of Artificial Sequence: Synthetic peptide
  Seed: CLPACVYGL
CLPACVYGA

SEQ ID NO: 31995 - protein, 9 aa, Artificial Sequence
  Description of Artificial Sequence: Synthetic peptide
  Seed: CLPACVYGL
CLPACVYGC

SEQ ID NO: 31996 - protein, 9 aa, Artificial Sequence
  Description of Artificial Sequence: Synthetic peptide
  Seed: CLPACVYGL
CLPACVYGI

SEQ ID NO: 31997 - protein, 9 aa, Artificial Sequence
  Description of Artificial Sequence: Synthetic peptide
  Seed: CLPACVYGL
CLPACVYGM

SEQ ID NO: 31998 - protein, 9 aa, Artificial Sequence
  Description of Artificial Sequence: Synthetic peptide
  Seed: CLPACVYGL
CLPACVYGT

SEQ ID NO: 31999 - protein, 9 aa, Artificial Sequence
  Description of Artificial Sequence: Synthetic peptide
  Seed: CLPACVYGL
CLPACVYGV

SEQ ID NO: 32000 - protein, 9 aa, Artificial Sequence
  Description of Artificial Sequence: Synthetic peptide
  Seed: CLPACVYGL
CMPACVYGA

SEQ ID NO: 32001 - protein, 9 aa, Artificial Sequence
  Description of Artificial Sequence: Synthetic peptide
  Seed: CLPACVYGL
CMPACVYGI

SEQ ID NO: 32002 - protein, 9 aa, Artificial Sequence
  Description of Artificial Sequence: Synthetic peptide
  Seed: CLPACVYGL
CMPACVYGL

SEQ ID NO: 32003 - protein, 10 aa, Artificial Sequence
  Description of Artificial Sequence: Synthetic peptide
  Seed: AVKGIGTMVM
AEKGIGTMVY

SEQ ID NO: 32004 - protein, 10 aa, Artificial Sequence
  Description of Artificial Sequence: Synthetic peptide
  Seed: AVKGIGTMVM
AQKGIGTMVV

SEQ ID NO: 32005 - protein, 10 aa, Artificial Sequence
  Description of Artificial Sequence: Synthetic peptide
  Seed: AVKGIGTMVM
AQKGIGTMVY

SEQ ID NO: 32006 - protein, 10 aa, Artificial Sequence
  Description of Artificial Sequence: Synthetic peptide
  Seed: ATYQRTRALV
ALYQRTRALV

SEQ ID NO: 32007 - protein, 10 aa, Artificial Sequence
  Description of Artificial Sequence: Synthetic peptide
  Seed: ATYQRTRALV
AIYQRTRALV

SEQ ID NO: 32008 - protein, 10 aa, Artificial Sequence
  Description of Artificial Sequence: Synthetic peptide
  Seed: ATYQRTRALV
ALYQRTRALA

SEQ ID NO: 32009 - protein, 10 aa, Artificial Sequence
  Description of Artificial Sequence: Synthetic peptide
  Seed: ATYQRTRALV
ALYQRTRALC

SEQ ID NO: 32010 - protein, 10 aa, Artificial Sequence
  Description of Artificial Sequence: Synthetic peptide
  Seed: ATYQRTRALV
ALYQRTRALI

SEQ ID NO: 32011 - protein, 10 aa, Artificial Sequence
  Description of Artificial Sequence: Synthetic peptide
  Seed: ATYQRTRALV
ALYQRTRALL

SEQ ID NO: 32012 - protein, 10 aa, Artificial Sequence
  Description of Artificial Sequence: Synthetic peptide
  Seed: ATYQRTRALV
ALYQRTRALK

SEQ ID NO: 32013 - protein, 10 aa, Artificial Sequence
  Description of Artificial Sequence: Synthetic peptide
  Seed: ATYQRTRALV
ALYQRTRALM

SEQ ID NO: 32014 - protein, 10 aa, Artificial Sequence
  Description of Artificial Sequence: Synthetic peptide
  Seed: ATYQRTRALV
ALYQRTRALS

SEQ ID NO: 32015 - protein, 10 aa, Artificial Sequence
  Description of Artificial Sequence: Synthetic peptide
  Seed: ATYQRTRALV
ALYQRTRALT

SEQ ID NO: 32016 - protein, 10 aa, Artificial Sequence
  Description of Artificial Sequence: Synthetic peptide
  Seed: ATYQRTRALV
AKYQRTRALK

SEQ ID NO: 32017 - protein, 10 aa, Artificial Sequence
  Description of Artificial Sequence: Synthetic peptide
  Seed: ATYQRTRALV
APYQRTRALK

SEQ ID NO: 32018 - protein, 10 aa, Artificial Sequence
  Description of Artificial Sequence: Synthetic peptide
  Seed: ATYQRTRALV
AMYQRTRALA

SEQ ID NO: 32019 - protein, 10 aa, Artificial Sequence
  Description of Artificial Sequence: Synthetic peptide
  Seed: ATYQRTRALV
AMYQRTRALC

SEQ ID NO: 32020 - protein, 10 aa, Artificial Sequence
  Description of Artificial Sequence: Synthetic peptide
  Seed: ATYQRTRALV
AMYQRTRALI

SEQ ID NO: 32021 - protein, 10 aa, Artificial Sequence
  Description of Artificial Sequence: Synthetic peptide
  Seed: ATYQRTRALV
AMYQRTRALL

SEQ ID NO: 32022 - protein, 10 aa, Artificial Sequence
  Description of Artificial Sequence: Synthetic peptide
  Seed: ATYQRTRALV
AMYQRTRALK

SEQ ID NO: 32023 - protein, 10 aa, Artificial Sequence
  Description of Artificial Sequence: Synthetic peptide
  Seed: ATYQRTRALV
AMYQRTRALM

SEQ ID NO: 32024 - protein, 10 aa, Artificial Sequence
  Description of Artificial Sequence: Synthetic peptide
  Seed: ATYQRTRALV
AMYQRTRALS

SEQ ID NO: 32025 - protein, 10 aa, Artificial Sequence
  Description of Artificial Sequence: Synthetic peptide
  Seed: ATYQRTRALV
AMYQRTRALT

SEQ ID NO: 32026 - protein, 10 aa, Artificial Sequence
  Description of Artificial Sequence: Synthetic peptide
  Seed: ATYQRTRALV
AMYQRTRALV

SEQ ID NO: 32027 - protein, 10 aa, Artificial Sequence
  Description of Artificial Sequence: Synthetic peptide
  Seed: ATYQRTRALV
AIYQRTRALK

SEQ ID NO: 32028 - protein, 10 aa, Artificial Sequence
  Description of Artificial Sequence: Synthetic peptide
  Seed: ATYQRTRALV
AIYQRTRALL

SEQ ID NO: 32029 - protein, 10 aa, Artificial Sequence
  Description of Artificial Sequence: Synthetic peptide
  Seed: ATYQRTRALV
AIYQRTRALI

SEQ ID NO: 32030 - protein, 10 aa, Artificial Sequence
  Description of Artificial Sequence: Synthetic peptide
  Seed: ATYQRTRALV
AIYQRTRALA

SEQ ID NO: 32031 - protein, 9 aa, Artificial Sequence
  Description of Artificial Sequence: Synthetic peptide
  Seed: ATYQRTRAL
AVYQRTRAM

SEQ ID NO: 32032 - protein, 9 aa, Artificial Sequence
  Description of Artificial Sequence: Synthetic peptide
  Seed: ATYQRTRAL
AVYQRTRAF

SEQ ID NO: 32033 - protein, 9 aa, Artificial Sequence
  Description of Artificial Sequence: Synthetic peptide
  Seed: ATYQRTRAL
AVYQRTRAS

SEQ ID NO: 32034 - protein, 9 aa, Artificial Sequence
  Description of Artificial Sequence: Synthetic peptide
  Seed: ATYQRTRAL
AVYQRTRAW

SEQ ID NO: 32035 - protein, 9 aa, Artificial Sequence
  Description of Artificial Sequence: Synthetic peptide
  Seed: ATYQRTRAL
AVYQRTRAY

SEQ ID NO: 32036 - protein, 9 aa, Artificial Sequence
  Description of Artificial Sequence: Synthetic peptide
  Seed: ATYQRTRAL
AVYQRTRAV

SEQ ID NO: 32037 - protein, 10 aa, Artificial Sequence
  Description of Artificial Sequence: Synthetic peptide
  Seed: ATYQRTRALV
AAYQRTRALA

SEQ ID NO: 32038 - protein, 10 aa, Artificial Sequence
  Description of Artificial Sequence: Synthetic peptide
  Seed: ATYQRTRALV
AAYQRTRALK

SEQ ID NO: 32039 - protein, 10 aa, Artificial Sequence
  Description of Artificial Sequence: Synthetic peptide
  Seed: ATYQRTRALV
ARYQRTRALK

SEQ ID NO: 32040 - protein, 10 aa, Artificial Sequence
  Description of Artificial Sequence: Synthetic peptide
  Seed: ATYQRTRALV
ANYQRTRALK

SEQ ID NO: 32041 - protein, 10 aa, Artificial Sequence
  Description of Artificial Sequence: Synthetic peptide
  Seed: ATYQRTRALV
ADYQRTRALK

SEQ ID NO: 32042 - protein, 10 aa, Artificial Sequence
  Description of Artificial Sequence: Synthetic peptide
  Seed: ATYQRTRALV
ACYQRTRALK

SEQ ID NO: 32043 - protein, 10 aa, Artificial Sequence
  Description of Artificial Sequence: Synthetic peptide
  Seed: ATYQRTRALV
AQYQRTRALA

SEQ ID NO: 32044 - protein, 10 aa, Artificial Sequence
  Description of Artificial Sequence: Synthetic peptide
  Seed: ATYQRTRALV
AQYQRTRALI

SEQ ID NO: 32045 - protein, 10 aa, Artificial Sequence
  Description of Artificial Sequence: Synthetic peptide
  Seed: ATYQRTRALV
AQYQRTRALK

SEQ ID NO: 32046 - protein, 10 aa, Artificial Sequence
  Description of Artificial Sequence: Synthetic peptide
  Seed: ATYQRTRALV
AQYQRTRALV

SEQ ID NO: 32047 - protein, 10 aa, Artificial Sequence
  Description of Artificial Sequence: Synthetic peptide
  Seed: ATYQRTRALV
AEYQRTRALK

SEQ ID NO: 32048 - protein, 10 aa, Artificial Sequence
  Description of Artificial Sequence: Synthetic peptide
  Seed: ATYQRTRALV
AGYQRTRALK

SEQ ID NO: 32049 - protein, 10 aa, Artificial Sequence
  Description of Artificial Sequence: Synthetic peptide
  Seed: ATYQRTRALV
AHYQRTRALK

SEQ ID NO: 32050 - protein, 10 aa, Artificial Sequence
  Description of Artificial Sequence: Synthetic peptide
  Seed: ATYQRTRALV
AFYQRTRALK

SEQ ID NO: 32051 - protein, 10 aa, Artificial Sequence
  Description of Artificial Sequence: Synthetic peptide
  Seed: ATYQRTRALV
ASYQRTRALA

SEQ ID NO: 32052 - protein, 11 aa, Artificial Sequence
  Description of Artificial Sequence: Synthetic peptide
  Seed: ATYQRTRALVR
ATYQRTRALVY

SEQ ID NO: 32053 - protein, 11 aa, Artificial Sequence
  Description of Artificial Sequence: Synthetic peptide
  Seed: ATYQRTRALVR
AIYQRTRALVR

SEQ ID NO: 32054 - protein, 11 aa, Artificial Sequence
  Description of Artificial Sequence: Synthetic peptide
  Seed: ATYQRTRALVR
AAYQRTRALVR

SEQ ID NO: 32055 - protein, 11 aa, Artificial Sequence
  Description of Artificial Sequence: Synthetic peptide
  Seed: ATYQRTRALVR
AAYQRTRALVK

SEQ ID NO: 32056 - protein, 11 aa, Artificial Sequence
  Description of Artificial Sequence: Synthetic peptide
  Seed: ATYQRTRALVR
ARYQRTRALVR

SEQ ID NO: 32057 - protein, 11 aa, Artificial Sequence
  Description of Artificial Sequence: Synthetic peptide
  Seed: ATYQRTRALVR
ANYQRTRALVR

SEQ ID NO: 32058 - protein, 11 aa, Artificial Sequence
  Description of Artificial Sequence: Synthetic peptide
  Seed: ATYQRTRALVR
ACYQRTRALVR

SEQ ID NO: 32059 - protein, 11 aa, Artificial Sequence
  Description of Artificial Sequence: Synthetic peptide
  Seed: ATYQRTRALVR
AQYQRTRALVR

SEQ ID NO: 32060 - protein, 11 aa, Artificial Sequence
  Description of Artificial Sequence: Synthetic peptide
  Seed: ATYQRTRALVR
AQYQRTRALVK

SEQ ID NO: 32061 - protein, 11 aa, Artificial Sequence
  Description of Artificial Sequence: Synthetic peptide
  Seed: ATYQRTRALVR
AGYQRTRALVR

SEQ ID NO: 32062 - protein, 11 aa, Artificial Sequence
  Description of Artificial Sequence: Synthetic peptide
  Seed: ATYQRTRALVR
AHYQRTRALVR

SEQ ID NO: 32063 - protein, 11 aa, Artificial Sequence
  Description of Artificial Sequence: Synthetic peptide
  Seed: ATYQRTRALVR
AIYQRTRALVK

SEQ ID NO: 32064 - protein, 10 aa, Artificial Sequence
  Description of Artificial Sequence: Synthetic peptide
  Seed: ATYQRTRALV
ASYQRTRALR

SEQ ID NO: 32065 - protein, 11 aa, Artificial Sequence
  Description of Artificial Sequence: Synthetic peptide
  Seed: ATYQRTRALVR
ALYQRTRALVR

SEQ ID NO: 32066 - protein, 11 aa, Artificial Sequence
  Description of Artificial Sequence: Synthetic peptide
  Seed: ATYQRTRALVR
ALYQRTRALVK

SEQ ID NO: 32067 - protein, 11 aa, Artificial Sequence
  Description of Artificial Sequence: Synthetic peptide
  Seed: ATYQRTRALVR
AKYQRTRALVR

SEQ ID NO: 32068 - protein, 11 aa, Artificial Sequence
  Description of Artificial Sequence: Synthetic peptide
  Seed: ATYQRTRALVR
AMYQRTRALVR

SEQ ID NO: 32069 - protein, 11 aa, Artificial Sequence
  Description of Artificial Sequence: Synthetic peptide
  Seed: ATYQRTRALVR
AMYQRTRALVK

SEQ ID NO: 32070 - protein, 11 aa, Artificial Sequence
  Description of Artificial Sequence: Synthetic peptide
  Seed: ATYQRTRALVR
AFYQRTRALVR

SEQ ID NO: 32071 - protein, 11 aa, Artificial Sequence
  Description of Artificial Sequence: Synthetic peptide
  Seed: ATYQRTRALVR
AFYQRTRALVK

SEQ ID NO: 32072 - protein, 11 aa, Artificial Sequence
  Description of Artificial Sequence: Synthetic peptide
  Seed: ATYQRTRALVR
ASYQRTRALVR

SEQ ID NO: 32073 - protein, 11 aa, Artificial Sequence
  Description of Artificial Sequence: Synthetic peptide
  Seed: ATYQRTRALVR
ASYQRTRALVK

SEQ ID NO: 32074 - protein, 10 aa, Artificial Sequence
  Description of Artificial Sequence: Synthetic peptide
  Seed: ATYQRTRALV
AVYQRTRALV

SEQ ID NO: 32075 - protein, 10 aa, Artificial Sequence
  Description of Artificial Sequence: Synthetic peptide
  Seed: ATYQRTRALV
AVYQRTRALK

SEQ ID NO: 32076 - protein, 10 aa, Artificial Sequence
  Description of Artificial Sequence: Synthetic peptide
  Seed: ATYQRTRALV
AVYQRTRALI

SEQ ID NO: 32077 - protein, 10 aa, Artificial Sequence
  Description of Artificial Sequence: Synthetic peptide
  Seed: ATYQRTRALV
AVYQRTRALA

SEQ ID NO: 32078 - protein, 10 aa, Artificial Sequence
  Description of Artificial Sequence: Synthetic peptide
  Seed: ATYQRTRALV
ASYQRTRALI

SEQ ID NO: 32079 - protein, 10 aa, Artificial Sequence
  Description of Artificial Sequence: Synthetic peptide
  Seed: ATYQRTRALV
ASYQRTRALL

SEQ ID NO: 32080 - protein, 10 aa, Artificial Sequence
  Description of Artificial Sequence: Synthetic peptide
  Seed: ATYQRTRALV
ASYQRTRALK

SEQ ID NO: 32081 - protein, 10 aa, Artificial Sequence
  Description of Artificial Sequence: Synthetic peptide
  Seed: ATYQRTRALV
ASYQRTRALM

SEQ ID NO: 32082 - protein, 10 aa, Artificial Sequence
  Description of Artificial Sequence: Synthetic peptide
  Seed: ATYQRTRALV
ASYQRTRALS

SEQ ID NO: 32083 - protein, 10 aa, Artificial Sequence
  Description of Artificial Sequence: Synthetic peptide
  Seed: ATYQRTRALV
ASYQRTRALY

SEQ ID NO: 32084 - protein, 10 aa, Artificial Sequence
  Description of Artificial Sequence: Synthetic peptide
  Seed: ATYQRTRALV
ASYQRTRALV

SEQ ID NO: 32085 - protein, 10 aa, Artificial Sequence
  Description of Artificial Sequence: Synthetic peptide
  Seed: ATYQRTRALV
ATYQRTRALA

SEQ ID NO: 32086 - protein, 10 aa, Artificial Sequence
  Description of Artificial Sequence: Synthetic peptide
  Seed: ATYQRTRALV
ATYQRTRALR

SEQ ID NO: 32087 - protein, 10 aa, Artificial Sequence
  Description of Artificial Sequence: Synthetic peptide
  Seed: ATYQRTRALV
ATYQRTRALG

SEQ ID NO: 32088 - protein, 10 aa, Artificial Sequence
  Description of Artificial Sequence: Synthetic peptide
  Seed: ATYQRTRALV
ATYQRTRALI

SEQ ID NO: 32089 - protein, 10 aa, Artificial Sequence
  Description of Artificial Sequence: Synthetic peptide
  Seed: ATYQRTRALV
ATYQRTRALL

SEQ ID NO: 32090 - protein, 10 aa, Artificial Sequence
  Description of Artificial Sequence: Synthetic peptide
  Seed: ATYQRTRALV
ATYQRTRALK

SEQ ID NO: 32091 - protein, 10 aa, Artificial Sequence
  Description of Artificial Sequence: Synthetic peptide
  Seed: ATYQRTRALV
ATYQRTRALM

SEQ ID NO: 32092 - protein, 10 aa, Artificial Sequence
  Description of Artificial Sequence: Synthetic peptide
  Seed: ATYQRTRALV
ATYQRTRALS

SEQ ID NO: 32093 - protein, 10 aa, Artificial Sequence
  Description of Artificial Sequence: Synthetic peptide
  Seed: ATYQRTRALV
ATYQRTRALY

SEQ ID NO: 32094 - protein, 10 aa, Artificial Sequence
  Description of Artificial Sequence: Synthetic peptide
  Seed: ATYQRTRALV
AWYQRTRALK

SEQ ID NO: 32095 - protein, 10 aa, Artificial Sequence
  Description of Artificial Sequence: Synthetic peptide
  Seed: ATYQRTRALV
AYYQRTRALA

SEQ ID NO: 32096 - protein, 10 aa, Artificial Sequence
  Description of Artificial Sequence: Synthetic peptide
  Seed: ATYQRTRALV
AYYQRTRALK

SEQ ID NO: 32097 - protein, 9 aa, Artificial Sequence
  Description of Artificial Sequence: Synthetic peptide
  Seed: ATYQRTRAL
AVYQRTRAK

SEQ ID NO: 32098 - protein, 9 aa, Artificial Sequence
  Description of Artificial Sequence: Synthetic peptide
  Seed: ATYQRTRAL
AVYQRTRAL

SEQ ID NO: 32099 - protein, 9 aa, Artificial Sequence
  Description of Artificial Sequence: Synthetic peptide
  Seed: ATYQRTRAL
AVYQRTRAI

SEQ ID NO: 32100 - protein, 9 aa, Artificial Sequence
  Description of Artificial Sequence: Synthetic peptide
  Seed: ATYQRTRAL
ASYQRTRAI

SEQ ID NO: 32101 - protein, 9 aa, Artificial Sequence
  Description of Artificial Sequence: Synthetic peptide
  Seed: ATYQRTRAL
APYQRTRAM

SEQ ID NO: 32102 - protein, 9 aa, Artificial Sequence
  Description of Artificial Sequence: Synthetic peptide
  Seed: ATYQRTRAL
APYQRTRAF

SEQ ID NO: 32103 - protein, 9 aa, Artificial Sequence
  Description of Artificial Sequence: Synthetic peptide
  Seed: ATYQRTRAL
APYQRTRAY

SEQ ID NO: 32104 - protein, 9 aa, Artificial Sequence
  Description of Artificial Sequence: Synthetic peptide
  Seed: ATYQRTRAL
APYQRTRAV

SEQ ID NO: 32105 - protein, 9 aa, Artificial Sequence
  Description of Artificial Sequence: Synthetic peptide
  Seed: ATYQRTRAL
ASYQRTRAA

SEQ ID NO: 32106 - protein, 9 aa, Artificial Sequence
  Description of Artificial Sequence: Synthetic peptide
  Seed: ATYQRTRAL
ASYQRTRAR

SEQ ID NO: 32107 - protein, 9 aa, Artificial Sequence
  Description of Artificial Sequence: Synthetic peptide
  Seed: ATYQRTRAL
ASYQRTRAC

SEQ ID NO: 32108 - protein, 9 aa, Artificial Sequence
  Description of Artificial Sequence: Synthetic peptide
  Seed: ATYQRTRAL
ASYQRTRAG

SEQ ID NO: 32109 - protein, 9 aa, Artificial Sequence
  Description of Artificial Sequence: Synthetic peptide
  Seed: ATYQRTRAL
ASYQRTRAH

SEQ ID NO: 32110 - protein, 9 aa, Artificial Sequence
  Description of Artificial Sequence: Synthetic peptide
  Seed: ATYQRTRAL
ASYQRTRAL

SEQ ID NO: 32111 - protein, 9 aa, Artificial Sequence
  Description of Artificial Sequence: Synthetic peptide
  Seed: ATYQRTRAL
AVYQRTRAH

SEQ ID NO: 32112 - protein, 9 aa, Artificial Sequence
  Description of Artificial Sequence: Synthetic peptide
  Seed: ATYQRTRAL
ASYQRTRAK

SEQ ID NO: 32113 - protein, 9 aa, Artificial Sequence
  Description of Artificial Sequence: Synthetic peptide
  Seed: ATYQRTRAL
ASYQRTRAM

SEQ ID NO: 32114 - protein, 9 aa, Artificial Sequence
  Description of Artificial Sequence: Synthetic peptide
  Seed: ATYQRTRAL
ASYQRTRAF

SEQ ID NO: 32115 - protein, 9 aa, Artificial Sequence
  Description of Artificial Sequence: Synthetic peptide
  Seed: ATYQRTRAL
ASYQRTRAS

SEQ ID NO: 32116 - protein, 9 aa, Artificial Sequence
  Description of Artificial Sequence: Synthetic peptide
  Seed: ATYQRTRAL
ASYQRTRAT

SEQ ID NO: 32117 - protein, 9 aa, Artificial Sequence
  Description of Artificial Sequence: Synthetic peptide
  Seed: ATYQRTRAL
ASYQRTRAW

SEQ ID NO: 32118 - protein, 9 aa, Artificial Sequence
  Description of Artificial Sequence: Synthetic peptide
  Seed: ATYQRTRAL
ASYQRTRAY

SEQ ID NO: 32119 - protein, 9 aa, Artificial Sequence
  Description of Artificial Sequence: Synthetic peptide
  Seed: ATYQRTRAL
ASYQRTRAV

SEQ ID NO: 32120 - protein, 9 aa, Artificial Sequence
  Description of Artificial Sequence: Synthetic peptide
  Seed: ATYQRTRAL
ATYQRTRAA

SEQ ID NO: 32121 - protein, 9 aa, Artificial Sequence
  Description of Artificial Sequence: Synthetic peptide
  Seed: ATYQRTRAL
APYQRTRAL

SEQ ID NO: 32122 - protein, 9 aa, Artificial Sequence
  Description of Artificial Sequence: Synthetic peptide
  Seed: ATYQRTRAL
APYQRTRAI

SEQ ID NO: 32123 - protein, 9 aa, Artificial Sequence
  Description of Artificial Sequence: Synthetic peptide
  Seed: ATYQRTRAL
AFYQRTRAY

SEQ ID NO: 32124 - protein, 9 aa, Artificial Sequence
  Description of Artificial Sequence: Synthetic peptide
  Seed: ATYQRTRAL
AFYQRTRAF

SEQ ID NO: 32125 - protein, 9 aa, Artificial Sequence
  Description of Artificial Sequence: Synthetic peptide
  Seed: ATYQRTRAL
AKYQRTRAF

SEQ ID NO: 32126 - protein, 9 aa, Artificial Sequence
  Description of Artificial Sequence: Synthetic peptide
  Seed: ATYQRTRAL
AKYQRTRAY

SEQ ID NO: 32127 - protein, 9 aa, Artificial Sequence
  Description of Artificial Sequence: Synthetic peptide
  Seed: ATYQRTRAL
AMYQRTRAA

SEQ ID NO: 32128 - protein, 9 aa, Artificial Sequence
  Description of Artificial Sequence: Synthetic peptide
  Seed: ATYQRTRAL
AMYQRTRAR

SEQ ID NO: 32129 - protein, 9 aa, Artificial Sequence
  Description of Artificial Sequence: Synthetic peptide
  Seed: ATYQRTRAL
AMYQRTRAC

SEQ ID NO: 32130 - protein, 9 aa, Artificial Sequence
  Description of Artificial Sequence: Synthetic peptide
  Seed: ATYQRTRAL
AMYQRTRAG

SEQ ID NO: 32131 - protein, 9 aa, Artificial Sequence
  Description of Artificial Sequence: Synthetic peptide
  Seed: ATYQRTRAL
AMYQRTRAH

SEQ ID NO: 32132 - protein, 9 aa, Artificial Sequence
  Description of Artificial Sequence: Synthetic peptide
  Seed: ATYQRTRAL
AMYQRTRAI

SEQ ID NO: 32133 - protein, 9 aa, Artificial Sequence
  Description of Artificial Sequence: Synthetic peptide
  Seed: ATYQRTRAL
AMYQRTRAL

SEQ ID NO: 32134 - protein, 9 aa, Artificial Sequence
  Description of Artificial Sequence: Synthetic peptide
  Seed: ATYQRTRAL
AMYQRTRAK

SEQ ID NO: 32135 - protein, 9 aa, Artificial Sequence
  Description of Artificial Sequence: Synthetic peptide
  Seed: ATYQRTRAL
AMYQRTRAM

SEQ ID NO: 32136 - protein, 9 aa, Artificial Sequence
  Description of Artificial Sequence: Synthetic peptide
  Seed: ATYQRTRAL
AMYQRTRAF

SEQ ID NO: 32137 - protein, 9 aa, Artificial Sequence
  Description of Artificial Sequence: Synthetic peptide
  Seed: ATYQRTRAL
AMYQRTRAS

SEQ ID NO: 32138 - protein, 9 aa, Artificial Sequence
  Description of Artificial Sequence: Synthetic peptide
  Seed: ATYQRTRAL
AMYQRTRAW

SEQ ID NO: 32139 - protein, 9 aa, Artificial Sequence
  Description of Artificial Sequence: Synthetic peptide
  Seed: ATYQRTRAL
AMYQRTRAY

SEQ ID NO: 32140 - protein, 9 aa, Artificial Sequence
  Description of Artificial Sequence: Synthetic peptide
  Seed: ATYQRTRAL
AMYQRTRAV

SEQ ID NO: 32141 - protein, 9 aa, Artificial Sequence
  Description of Artificial Sequence: Synthetic peptide
  Seed: ATYQRTRAL
AFYQRTRAA

SEQ ID NO: 32142 - protein, 9 aa, Artificial Sequence
  Description of Artificial Sequence: Synthetic peptide
  Seed: ATYQRTRAL
AFYQRTRAK

SEQ ID NO: 32143 - protein, 9 aa, Artificial Sequence
  Description of Artificial Sequence: Synthetic peptide
  Seed: ATYQRTRAL
AFYQRTRAM

SEQ ID NO: 32144 - protein, 9 aa, Artificial Sequence
  Description of Artificial Sequence: Synthetic peptide
  Seed: ATYQRTRAL
ATYQRTRAR

SEQ ID NO: 32145 - protein, 9 aa, Artificial Sequence
  Description of Artificial Sequence: Synthetic peptide
  Seed: ATYQRTRAL
ATYQRTRAN

SEQ ID NO: 32146 - protein, 9 aa, Artificial Sequence
  Description of Artificial Sequence: Synthetic peptide
  Seed: ATYQRTRAL
ATYQRTRAC

SEQ ID NO: 32147 - protein, 9 aa, Artificial Sequence
  Description of Artificial Sequence: Synthetic peptide
  Seed: ATYQRTRAL
AWYQRTRAV

SEQ ID NO: 32148 - protein, 9 aa, Artificial Sequence
  Description of Artificial Sequence: Synthetic peptide
  Seed: ATYQRTRAL
AYYQRTRAR

SEQ ID NO: 32149 - protein, 9 aa, Artificial Sequence
  Description of Artificial Sequence: Synthetic peptide
  Seed: ATYQRTRAL
AYYQRTRAC

SEQ ID NO: 32150 - protein, 9 aa, Artificial Sequence
  Description of Artificial Sequence: Synthetic peptide
  Seed: ATYQRTRAL
AYYQRTRAQ

SEQ ID NO: 32151 - protein, 9 aa, Artificial Sequence
  Description of Artificial Sequence: Synthetic peptide
  Seed: ATYQRTRAL
AYYQRTRAE

SEQ ID NO: 32152 - protein, 9 aa, Artificial Sequence
  Description of Artificial Sequence: Synthetic peptide
  Seed: ATYQRTRAL
AYYQRTRAG

SEQ ID NO: 32153 - protein, 9 aa, Artificial Sequence
  Description of Artificial Sequence: Synthetic peptide
  Seed: ATYQRTRAL
AYYQRTRAH

SEQ ID NO: 32154 - protein, 9 aa, Artificial Sequence
  Description of Artificial Sequence: Synthetic peptide
  Seed: ATYQRTRAL
AYYQRTRAI

SEQ ID NO: 32155 - protein, 9 aa, Artificial Sequence
  Description of Artificial Sequence: Synthetic peptide
  Seed: ATYQRTRAL
AYYQRTRAL

SEQ ID NO: 32156 - protein, 9 aa, Artificial Sequence
  Description of Artificial Sequence: Synthetic peptide
  Seed: ATYQRTRAL
AYYQRTRAK

SEQ ID NO: 32157 - protein, 9 aa, Artificial Sequence
  Description of Artificial Sequence: Synthetic peptide
  Seed: ATYQRTRAL
AYYQRTRAM

SEQ ID NO: 32158 - protein, 9 aa, Artificial Sequence
  Description of Artificial Sequence: Synthetic peptide
  Seed: ATYQRTRAL
AYYQRTRAF

SEQ ID NO: 32159 - protein, 9 aa, Artificial Sequence
  Description of Artificial Sequence: Synthetic peptide
  Seed: ATYQRTRAL
AYYQRTRAS

SEQ ID NO: 32160 - protein, 9 aa, Artificial Sequence
  Description of Artificial Sequence: Synthetic peptide
  Seed: ATYQRTRAL
AYYQRTRAT

SEQ ID NO: 32161 - protein, 9 aa, Artificial Sequence
  Description of Artificial Sequence: Synthetic peptide
  Seed: ATYQRTRAL
AYYQRTRAW

SEQ ID NO: 32162 - protein, 9 aa, Artificial Sequence
  Description of Artificial Sequence: Synthetic peptide
  Seed: ATYQRTRAL
AYYQRTRAY

SEQ ID NO: 32163 - protein, 9 aa, Artificial Sequence
  Description of Artificial Sequence: Synthetic peptide
  Seed: ATYQRTRAL
AYYQRTRAV

SEQ ID NO: 32164 - protein, 9 aa, Artificial Sequence
  Description of Artificial Sequence: Synthetic peptide
  Seed: ATYQRTRAL
AVYQRTRAA

SEQ ID NO: 32165 - protein, 9 aa, Artificial Sequence
  Description of Artificial Sequence: Synthetic peptide
  Seed: ATYQRTRAL
AVYQRTRAR

SEQ ID NO: 32166 - protein, 9 aa, Artificial Sequence
  Description of Artificial Sequence: Synthetic peptide
  Seed: ATYQRTRAL
AVYQRTRAG

SEQ ID NO: 32167 - protein, 9 aa, Artificial Sequence
  Description of Artificial Sequence: Synthetic peptide
  Seed: ATYQRTRAL
AYYQRTRAA

SEQ ID NO: 32168 - protein, 9 aa, Artificial Sequence
  Description of Artificial Sequence: Synthetic peptide
  Seed: ATYQRTRAL
AWYQRTRAY

SEQ ID NO: 32169 - protein, 9 aa, Artificial Sequence
  Description of Artificial Sequence: Synthetic peptide
  Seed: ATYQRTRAL
ATYQRTRAQ

SEQ ID NO: 32170 - protein, 9 aa, Artificial Sequence
  Description of Artificial Sequence: Synthetic peptide
  Seed: ATYQRTRAL
AWYQRTRAW

SEQ ID NO: 32171 - protein, 9 aa, Artificial Sequence
  Description of Artificial Sequence: Synthetic peptide
  Seed: ATYQRTRAL
ATYQRTRAG

SEQ ID NO: 32172 - protein, 9 aa, Artificial Sequence
  Description of Artificial Sequence: Synthetic peptide
  Seed: ATYQRTRAL
ATYQRTRAI

SEQ ID NO: 32173 - protein, 9 aa, Artificial Sequence
  Description of Artificial Sequence: Synthetic peptide
  Seed: ATYQRTRAL
ATYQRTRAK

SEQ ID NO: 32174 - protein, 9 aa, Artificial Sequence
  Description of Artificial Sequence: Synthetic peptide
  Seed: ATYQRTRAL
ATYQRTRAM

SEQ ID NO: 32175 - protein, 9 aa, Artificial Sequence
  Description of Artificial Sequence: Synthetic peptide
  Seed: ATYQRTRAL
ATYQRTRAF

SEQ ID NO: 32176 - protein, 9 aa, Artificial Sequence
  Description of Artificial Sequence: Synthetic peptide
  Seed: ATYQRTRAL
ATYQRTRAP

SEQ ID NO: 32177 - protein, 9 aa, Artificial Sequence
  Description of Artificial Sequence: Synthetic peptide
  Seed: ATYQRTRAL
ATYQRTRAS

SEQ ID NO: 32178 - protein, 9 aa, Artificial Sequence
  Description of Artificial Sequence: Synthetic peptide
  Seed: ATYQRTRAL
ATYQRTRAT

SEQ ID NO: 32179 - protein, 9 aa, Artificial Sequence
  Description of Artificial Sequence: Synthetic peptide
  Seed: ATYQRTRAL
ATYQRTRAW

SEQ ID NO: 32180 - protein, 9 aa, Artificial Sequence
  Description of Artificial Sequence: Synthetic peptide
  Seed: ATYQRTRAL
ATYQRTRAY

SEQ ID NO: 32181 - protein, 9 aa, Artificial Sequence
  Description of Artificial Sequence: Synthetic peptide
  Seed: ATYQRTRAL
ATYQRTRAV

SEQ ID NO: 32182 - protein, 9 aa, Artificial Sequence
  Description of Artificial Sequence: Synthetic peptide
  Seed: ATYQRTRAL
AWYQRTRAA

SEQ ID NO: 32183 - protein, 9 aa, Artificial Sequence
  Description of Artificial Sequence: Synthetic peptide
  Seed: ATYQRTRAL
AWYQRTRAH

SEQ ID NO: 32184 - protein, 9 aa, Artificial Sequence
  Description of Artificial Sequence: Synthetic peptide
  Seed: ATYQRTRAL
AWYQRTRAI

SEQ ID NO: 32185 - protein, 9 aa, Artificial Sequence
  Description of Artificial Sequence: Synthetic peptide
  Seed: ATYQRTRAL
AWYQRTRAL

SEQ ID NO: 32186 - protein, 9 aa, Artificial Sequence
  Description of Artificial Sequence: Synthetic peptide
  Seed: ATYQRTRAL
AWYQRTRAK

SEQ ID NO: 32187 - protein, 9 aa, Artificial Sequence
  Description of Artificial Sequence: Synthetic peptide
  Seed: ATYQRTRAL
AWYQRTRAM

SEQ ID NO: 32188 - protein, 9 aa, Artificial Sequence
  Description of Artificial Sequence: Synthetic peptide
  Seed: ATYQRTRAL
AWYQRTRAF

SEQ ID NO: 32189 - protein, 11 aa, Artificial Sequence
  Description of Artificial Sequence: Synthetic peptide
  Seed: ATYQRTRALVR
ATYQRTRALVK

SEQ ID NO: 32190 - protein, 11 aa, Artificial Sequence
  Description of Artificial Sequence: Synthetic peptide
  Seed: ATYQRTRALVR
AWYQRTRALVR

SEQ ID NO: 32191 - protein, 10 aa, Artificial Sequence
  Description of Artificial Sequence: Synthetic peptide
  Seed: AVKGIGTMVM
AQKGIGTMVW

SEQ ID NO: 32192 - protein, 10 aa, Artificial Sequence
  Description of Artificial Sequence: Synthetic peptide
  Seed: AVASGYDFER
AYASGYDFER

SEQ ID NO: 32193 - protein, 10 aa, Artificial Sequence
  Description of Artificial Sequence: Synthetic peptide
  Seed: AVASGYDFER
APASGYDFEK

SEQ ID NO: 32194 - protein, 10 aa, Artificial Sequence
  Description of Artificial Sequence: Synthetic peptide
  Seed: AVASGYDFER
ASASGYDFER

SEQ ID NO: 32195 - protein, 10 aa, Artificial Sequence
  Description of Artificial Sequence: Synthetic peptide
  Seed: AVASGYDFER
ASASGYDFEK

SEQ ID NO: 32196 - protein, 10 aa, Artificial Sequence
  Description of Artificial Sequence: Synthetic peptide
  Seed: AVASGYDFER
ASASGYDFEY

SEQ ID NO: 32197 - protein, 10 aa, Artificial Sequence
  Description of Artificial Sequence: Synthetic peptide
  Seed: AVASGYDFER
ATASGYDFER

SEQ ID NO: 32198 - protein, 10 aa, Artificial Sequence
  Description of Artificial Sequence: Synthetic peptide
  Seed: AVASGYDFER
ATASGYDFEK

SEQ ID NO: 32199 - protein, 10 aa, Artificial Sequence
  Description of Artificial Sequence: Synthetic peptide
  Seed: AVASGYDFER
ATASGYDFEY

SEQ ID NO: 32200 - protein, 10 aa, Artificial Sequence
  Description of Artificial Sequence: Synthetic peptide
  Seed: AVASGYDFER
AWASGYDFER

SEQ ID NO: 32201 - protein, 10 aa, Artificial Sequence
  Description of Artificial Sequence: Synthetic peptide
  Seed: AVASGYDFER
AWASGYDFEK

SEQ ID NO: 32202 - protein, 10 aa, Artificial Sequence
  Description of Artificial Sequence: Synthetic peptide
  Seed: AVASGYDFER
AYASGYDFEK

SEQ ID NO: 32203 - protein, 9 aa, Artificial Sequence
  Description of Artificial Sequence: Synthetic peptide
  Seed: AVKGIGTMV
AIKGIGTMK

SEQ ID NO: 32204 - protein, 10 aa, Artificial Sequence
  Description of Artificial Sequence: Synthetic peptide
  Seed: AVASGYDFER
AVASGYDFEY

SEQ ID NO: 32205 - protein, 9 aa, Artificial Sequence
  Description of Artificial Sequence: Synthetic peptide
  Seed: AVKGIGTMV
AAKGIGTMA

SEQ ID NO: 32206 - protein, 9 aa, Artificial Sequence
  Description of Artificial Sequence: Synthetic peptide
  Seed: AVKGIGTMV
AAKGIGTMK

SEQ ID NO: 32207 - protein, 9 aa, Artificial Sequence
  Description of Artificial Sequence: Synthetic peptide
  Seed: AVKGIGTMV
ANKGIGTMK

SEQ ID NO: 32208 - protein, 9 aa, Artificial Sequence
  Description of Artificial Sequence: Synthetic peptide
  Seed: AVKGIGTMV
ACKGIGTMK

SEQ ID NO: 32209 - protein, 9 aa, Artificial Sequence
  Description of Artificial Sequence: Synthetic peptide
  Seed: AVKGIGTMV
AQKGIGTMK

SEQ ID NO: 32210 - protein, 9 aa, Artificial Sequence
  Description of Artificial Sequence: Synthetic peptide
  Seed: AVKGIGTMV
AQKGIGTMV

SEQ ID NO: 32211 - protein, 9 aa, Artificial Sequence
  Description of Artificial Sequence: Synthetic peptide
  Seed: AVKGIGTMV
AGKGIGTMK

SEQ ID NO: 32212 - protein, 10 aa, Artificial Sequence
  Description of Artificial Sequence: Synthetic peptide
  Seed: AVASGYDFER
APASGYDFER

SEQ ID NO: 32213 - protein, 10 aa, Artificial Sequence
  Description of Artificial Sequence: Synthetic peptide
  Seed: AVASGYDFER
AFASGYDFEK

SEQ ID NO: 32214 - protein, 10 aa, Artificial Sequence
  Description of Artificial Sequence: Synthetic peptide
  Seed: AVASGYDFER
AFASGYDFER

SEQ ID NO: 32215 - protein, 10 aa, Artificial Sequence
  Description of Artificial Sequence: Synthetic peptide
  Seed: AVASGYDFER
AMASGYDFEY

SEQ ID NO: 32216 - protein, 10 aa, Artificial Sequence
  Description of Artificial Sequence: Synthetic peptide
  Seed: AVASGYDFER
ACASGYDFEK

SEQ ID NO: 32217 - protein, 10 aa, Artificial Sequence
  Description of Artificial Sequence: Synthetic peptide
  Seed: AVASGYDFER
AQASGYDFER

SEQ ID NO: 32218 - protein, 10 aa, Artificial Sequence
  Description of Artificial Sequence: Synthetic peptide
  Seed: AVASGYDFER
AQASGYDFEK

SEQ ID NO: 32219 - protein, 10 aa, Artificial Sequence
  Description of Artificial Sequence: Synthetic peptide
  Seed: AVASGYDFER
AEASGYDFER

SEQ ID NO: 32220 - protein, 10 aa, Artificial Sequence
  Description of Artificial Sequence: Synthetic peptide
  Seed: AVASGYDFER
AEASGYDFEK

SEQ ID NO: 32221 - protein, 10 aa, Artificial Sequence
  Description of Artificial Sequence: Synthetic peptide
  Seed: AVASGYDFER
AGASGYDFER

SEQ ID NO: 32222 - protein, 10 aa, Artificial Sequence
  Description of Artificial Sequence: Synthetic peptide
  Seed: AVASGYDFER
AGASGYDFEK

SEQ ID NO: 32223 - protein, 10 aa, Artificial Sequence
  Description of Artificial Sequence: Synthetic peptide
  Seed: AVASGYDFER
AHASGYDFER

SEQ ID NO: 32224 - protein, 10 aa, Artificial Sequence
  Description of Artificial Sequence: Synthetic peptide
  Seed: AVASGYDFER
AHASGYDFEK

SEQ ID NO: 32225 - protein, 10 aa, Artificial Sequence
  Description of Artificial Sequence: Synthetic peptide
  Seed: AVASGYDFER
AIASGYDFER

SEQ ID NO: 32226 - protein, 10 aa, Artificial Sequence
  Description of Artificial Sequence: Synthetic peptide
  Seed: AVASGYDFER
AIASGYDFEK

SEQ ID NO: 32227 - protein, 10 aa, Artificial Sequence
  Description of Artificial Sequence: Synthetic peptide
  Seed: AVASGYDFER
AIASGYDFEY

SEQ ID NO: 32228 - protein, 10 aa, Artificial Sequence
  Description of Artificial Sequence: Synthetic peptide
  Seed: AVASGYDFER
ALASGYDFER

SEQ ID NO: 32229 - protein, 10 aa, Artificial Sequence
  Description of Artificial Sequence: Synthetic peptide
  Seed: AVASGYDFER
ALASGYDFEK

SEQ ID NO: 32230 - protein, 10 aa, Artificial Sequence
  Description of Artificial Sequence: Synthetic peptide
  Seed: AVASGYDFER
ALASGYDFEY

SEQ ID NO: 32231 - protein, 10 aa, Artificial Sequence
  Description of Artificial Sequence: Synthetic peptide
  Seed: AVASGYDFER
AKASGYDFER

SEQ ID NO: 32232 - protein, 10 aa, Artificial Sequence
  Description of Artificial Sequence: Synthetic peptide
  Seed: AVASGYDFER
AKASGYDFEK

SEQ ID NO: 32233 - protein, 10 aa, Artificial Sequence
  Description of Artificial Sequence: Synthetic peptide
  Seed: AVASGYDFER
AMASGYDFER

SEQ ID NO: 32234 - protein, 10 aa, Artificial Sequence
  Description of Artificial Sequence: Synthetic peptide
  Seed: AVASGYDFER
AMASGYDFEK

SEQ ID NO: 32235 - protein, 9 aa, Artificial Sequence
  Description of Artificial Sequence: Synthetic peptide
  Seed: AVKGIGTMV
AIKGIGTMA

SEQ ID NO: 32236 - protein, 9 aa, Artificial Sequence
  Description of Artificial Sequence: Synthetic peptide
  Seed: AVKGIGTMV
AIKGIGTMV

SEQ ID NO: 32237 - protein, 11 aa, Artificial Sequence
  Description of Artificial Sequence: Synthetic peptide
  Seed: ATYQRTRALVR
AYYQRTRALVR

SEQ ID NO: 32238 - protein, 9 aa, Artificial Sequence
  Description of Artificial Sequence: Synthetic peptide
  Seed: AVKGIGTMV
AYKGIGTMK

SEQ ID NO: 32239 - protein, 9 aa, Artificial Sequence
  Description of Artificial Sequence: Synthetic peptide
  Seed: AVKGIGTMV
ATKGIGTMI

SEQ ID NO: 32240 - protein, 9 aa, Artificial Sequence
  Description of Artificial Sequence: Synthetic peptide
  Seed: AVKGIGTMV
ATKGIGTML

SEQ ID NO: 32241 - protein, 9 aa, Artificial Sequence
  Description of Artificial Sequence: Synthetic peptide
  Seed: AVKGIGTMV
ATKGIGTMK

SEQ ID NO: 32242 - protein, 9 aa, Artificial Sequence
  Description of Artificial Sequence: Synthetic peptide
  Seed: AVKGIGTMV
ATKGIGTMM

SEQ ID NO: 32243 - protein, 9 aa, Artificial Sequence
  Description of Artificial Sequence: Synthetic peptide
  Seed: AVKGIGTMV
ATKGIGTMS

SEQ ID NO: 32244 - protein, 9 aa, Artificial Sequence
  Description of Artificial Sequence: Synthetic peptide
  Seed: AVKGIGTMV
ATKGIGTMY

SEQ ID NO: 32245 - protein, 9 aa, Artificial Sequence
  Description of Artificial Sequence: Synthetic peptide
  Seed: AVKGIGTMV
ATKGIGTMV

SEQ ID NO: 32246 - protein, 9 aa, Artificial Sequence
  Description of Artificial Sequence: Synthetic peptide
  Seed: AVKGIGTMV
AWKGIGTMK

SEQ ID NO: 32247 - protein, 9 aa, Artificial Sequence
  Description of Artificial Sequence: Synthetic peptide
  Seed: AVKGIGTMV
AYKGIGTMA

SEQ ID NO: 32248 - protein, 9 aa, Artificial Sequence
  Description of Artificial Sequence: Synthetic peptide
  Seed: AVKGIGTMV
AVKGIGTMA

SEQ ID NO: 32249 - protein, 9 aa, Artificial Sequence
  Description of Artificial Sequence: Synthetic peptide
  Seed: AVKGIGTMV
ALKGIGTMA

SEQ ID NO: 32250 - protein, 9 aa, Artificial Sequence
  Description of Artificial Sequence: Synthetic peptide
  Seed: AVKGIGTMV
AVKGIGTMI

SEQ ID NO: 32251 - protein, 9 aa, Artificial Sequence
  Description of Artificial Sequence: Synthetic peptide
  Seed: AVKGIGTMV
AVKGIGTMK

SEQ ID NO: 32252 - protein, 10 aa, Artificial Sequence
  Description of Artificial Sequence: Synthetic peptide
  Seed: AVKGIGTMVM
AAKGIGTMVF

SEQ ID NO: 32253 - protein, 10 aa, Artificial Sequence
  Description of Artificial Sequence: Synthetic peptide
  Seed: AVKGIGTMVM
AAKGIGTMVY

SEQ ID NO: 32254 - protein, 10 aa, Artificial Sequence
  Description of Artificial Sequence: Synthetic peptide
  Seed: AVKGIGTMVM
AQKGIGTMVH

SEQ ID NO: 32255 - protein, 10 aa, Artificial Sequence
  Description of Artificial Sequence: Synthetic peptide
  Seed: AVKGIGTMVM
AQKGIGTMVI

SEQ ID NO: 32256 - protein, 10 aa, Artificial Sequence
  Description of Artificial Sequence: Synthetic peptide
  Seed: AVKGIGTMVM
AQKGIGTMVL

SEQ ID NO: 32257 - protein, 10 aa, Artificial Sequence
  Description of Artificial Sequence: Synthetic peptide
  Seed: AVKGIGTMVM
AQKGIGTMVM

SEQ ID NO: 32258 - protein, 10 aa, Artificial Sequence
  Description of Artificial Sequence: Synthetic peptide
  Seed: AVKGIGTMVM
AQKGIGTMVF

SEQ ID NO: 32259 - protein, 9 aa, Artificial Sequence
  Description of Artificial Sequence: Synthetic peptide
  Seed: AVKGIGTMV
ATKGIGTMG

SEQ ID NO: 32260 - protein, 9 aa, Artificial Sequence
  Description of Artificial Sequence: Synthetic peptide
  Seed: AVKGIGTMV
ATKGIGTMA

SEQ ID NO: 32261 - protein, 9 aa, Artificial Sequence
  Description of Artificial Sequence: Synthetic peptide
  Seed: AVKGIGTMV
ASKGIGTMV

SEQ ID NO: 32262 - protein, 9 aa, Artificial Sequence
  Description of Artificial Sequence: Synthetic peptide
  Seed: AVKGIGTMV
ASKGIGTMS

SEQ ID NO: 32263 - protein, 9 aa, Artificial Sequence
  Description of Artificial Sequence: Synthetic peptide
  Seed: AVKGIGTMV
ALKGIGTMI

SEQ ID NO: 32264 - protein, 9 aa, Artificial Sequence
  Description of Artificial Sequence: Synthetic peptide
  Seed: AVKGIGTMV
ALKGIGTML

SEQ ID NO: 32265 - protein, 9 aa, Artificial Sequence
  Description of Artificial Sequence: Synthetic peptide
  Seed: AVKGIGTMV
ALKGIGTMK

SEQ ID NO: 32266 - protein, 9 aa, Artificial Sequence
  Description of Artificial Sequence: Synthetic peptide
  Seed: AVKGIGTMV
ALKGIGTMM

SEQ ID NO: 32267 - protein, 9 aa, Artificial Sequence
  Description of Artificial Sequence: Synthetic peptide
  Seed: AVKGIGTMV
ALKGIGTMV

SEQ ID NO: 32268 - protein, 9 aa, Artificial Sequence
  Description of Artificial Sequence: Synthetic peptide
  Seed: AVKGIGTMV
AMKGIGTMA

SEQ ID NO: 32269 - protein, 9 aa, Artificial Sequence
  Description of Artificial Sequence: Synthetic peptide
  Seed: AVKGIGTMV
AMKGIGTMI

SEQ ID NO: 32270 - protein, 9 aa, Artificial Sequence
  Description of Artificial Sequence: Synthetic peptide
  Seed: AVKGIGTMV
AMKGIGTML

SEQ ID NO: 32271 - protein, 9 aa, Artificial Sequence
  Description of Artificial Sequence: Synthetic peptide
  Seed: AVKGIGTMV
AMKGIGTMK

SEQ ID NO: 32272 - protein, 9 aa, Artificial Sequence
  Description of Artificial Sequence: Synthetic peptide
  Seed: AVKGIGTMV
AMKGIGTMM

SEQ ID NO: 32273 - protein, 9 aa, Artificial Sequence
  Description of Artificial Sequence: Synthetic peptide
  Seed: AVKGIGTMV
AMKGIGTMT

SEQ ID NO: 32274 - protein, 9 aa, Artificial Sequence
  Description of Artificial Sequence: Synthetic peptide
  Seed: AVKGIGTMV
AMKGIGTMV

SEQ ID NO: 32275 - protein, 9 aa, Artificial Sequence
  Description of Artificial Sequence: Synthetic peptide
  Seed: AVKGIGTMV
AFKGIGTMK

SEQ ID NO: 32276 - protein, 9 aa, Artificial Sequence
  Description of Artificial Sequence: Synthetic peptide
  Seed: AVKGIGTMV
ASKGIGTMA

SEQ ID NO: 32277 - protein, 9 aa, Artificial Sequence
  Description of Artificial Sequence: Synthetic peptide
  Seed: AVKGIGTMV
ASKGIGTMG

SEQ ID NO: 32278 - protein, 9 aa, Artificial Sequence
  Description of Artificial Sequence: Synthetic peptide
  Seed: AVKGIGTMV
ASKGIGTMI

SEQ ID NO: 32279 - protein, 9 aa, Artificial Sequence
  Description of Artificial Sequence: Synthetic peptide
  Seed: AVKGIGTMV
ASKGIGTML

SEQ ID NO: 32280 - protein, 9 aa, Artificial Sequence
  Description of Artificial Sequence: Synthetic peptide
  Seed: AVKGIGTMV
ASKGIGTMK

SEQ ID NO: 32281 - protein, 9 aa, Artificial Sequence
  Description of Artificial Sequence: Synthetic peptide
  Seed: AVKGIGTMV
ASKGIGTMM

SEQ ID NO: 32282 - protein, 10 aa, Artificial Sequence
  Description of Artificial Sequence: Synthetic peptide
  Seed: AVASGYDFER
ACASGYDFER

SEQ ID NO: 32283 - protein, 10 aa, Artificial Sequence
  Description of Artificial Sequence: Synthetic peptide
  Seed: AVASGYDFER
ADASGYDFEK

SEQ ID NO: 32284 - protein, 10 aa, Artificial Sequence
  Description of Artificial Sequence: Synthetic peptide
  Seed: AVASGYDFER
ADASGYDFER

SEQ ID NO: 32285 - protein, 10 aa, Artificial Sequence
  Description of Artificial Sequence: Synthetic peptide
  Seed: AVASGHDFER
ATASGHDFEY

SEQ ID NO: 32286 - protein, 10 aa, Artificial Sequence
  Description of Artificial Sequence: Synthetic peptide
  Seed: AVASGHDFER
AMASGHDFEK

SEQ ID NO: 32287 - protein, 10 aa, Artificial Sequence
  Description of Artificial Sequence: Synthetic peptide
  Seed: AVASGHDFER
AMASGHDFEY

SEQ ID NO: 32288 - protein, 10 aa, Artificial Sequence
  Description of Artificial Sequence: Synthetic peptide
  Seed: AVASGHDFER
AFASGHDFER

SEQ ID NO: 32289 - protein, 10 aa, Artificial Sequence
  Description of Artificial Sequence: Synthetic peptide
  Seed: AVASGHDFER
AFASGHDFEK

SEQ ID NO: 32290 - protein, 10 aa, Artificial Sequence
  Description of Artificial Sequence: Synthetic peptide
  Seed: AVASGHDFER
APASGHDFER

SEQ ID NO: 32291 - protein, 10 aa, Artificial Sequence
  Description of Artificial Sequence: Synthetic peptide
  Seed: AVASGHDFER
ASASGHDFER

SEQ ID NO: 32292 - protein, 10 aa, Artificial Sequence
  Description of Artificial Sequence: Synthetic peptide
  Seed: AVASGHDFER
ASASGHDFEK

SEQ ID NO: 32293 - protein, 10 aa, Artificial Sequence
  Description of Artificial Sequence: Synthetic peptide
  Seed: AVASGHDFER
ATASGHDFER

SEQ ID NO: 32294 - protein, 10 aa, Artificial Sequence
  Description of Artificial Sequence: Synthetic peptide
  Seed: AVASGHDFER
ATASGHDFEK

SEQ ID NO: 32295 - protein, 10 aa, Artificial Sequence
  Description of Artificial Sequence: Synthetic peptide
  Seed: AVASGHDFER
AWASGHDFER

SEQ ID NO: 32296 - protein, 10 aa, Artificial Sequence
  Description of Artificial Sequence: Synthetic peptide
  Seed: AVASGYDFER
ANASGYDFEK

SEQ ID NO: 32297 - protein, 10 aa, Artificial Sequence
  Description of Artificial Sequence: Synthetic peptide
  Seed: AVASGHDFER
AWASGHDFEK

SEQ ID NO: 32298 - protein, 10 aa, Artificial Sequence
  Description of Artificial Sequence: Synthetic peptide
  Seed: AVASGHDFER
AYASGHDFER

SEQ ID NO: 32299 - protein, 10 aa, Artificial Sequence
  Description of Artificial Sequence: Synthetic peptide
  Seed: AVASGHDFER
AYASGHDFEK

SEQ ID NO: 32300 - protein, 10 aa, Artificial Sequence
  Description of Artificial Sequence: Synthetic peptide
  Seed: AVASGHDFER
AVASGHDFEK

SEQ ID NO: 32301 - protein, 10 aa, Artificial Sequence
  Description of Artificial Sequence: Synthetic peptide
  Seed: AVASGHDFER
AVASGHDFEY

SEQ ID NO: 32302 - protein, 10 aa, Artificial Sequence
  Description of Artificial Sequence: Synthetic peptide
  Seed: AVASGYDFEK
AAASGYDFER

SEQ ID NO: 32303 - protein, 10 aa, Artificial Sequence
  Description of Artificial Sequence: Synthetic peptide
  Seed: AVASGYDFEK
AAASGYDFEK

SEQ ID NO: 32304 - protein, 10 aa, Artificial Sequence
  Description of Artificial Sequence: Synthetic peptide
  Seed: AVASGYDFEK
ARASGYDFER

SEQ ID NO: 32305 - protein, 10 aa, Artificial Sequence
  Description of Artificial Sequence: Synthetic peptide
  Seed: AVASGYDFEK
ARASGYDFEK

SEQ ID NO: 32306 - protein, 10 aa, Artificial Sequence
  Description of Artificial Sequence: Synthetic peptide
  Seed: AVASGHDFER
AMASGHDFER

SEQ ID NO: 32307 - protein, 10 aa, Artificial Sequence
  Description of Artificial Sequence: Synthetic peptide
  Seed: AVASGHDFER
AKASGHDFER

SEQ ID NO: 32308 - protein, 10 aa, Artificial Sequence
  Description of Artificial Sequence: Synthetic peptide
  Seed: AVASGHDFER
ALASGHDFEK

SEQ ID NO: 32309 - protein, 10 aa, Artificial Sequence
  Description of Artificial Sequence: Synthetic peptide
  Seed: AVASGHDFER
ALASGHDFER

SEQ ID NO: 32310 - protein, 11 aa, Artificial Sequence
  Description of Artificial Sequence: Synthetic peptide
  Seed: ATYQRTRALVR
AYYQRTRALVK

SEQ ID NO: 32311 - protein, 11 aa, Artificial Sequence
  Description of Artificial Sequence: Synthetic peptide
  Seed: ATYQRTRALVR
AVYQRTRALVR

SEQ ID NO: 32312 - protein, 11 aa, Artificial Sequence
  Description of Artificial Sequence: Synthetic peptide
  Seed: ATYQRTRALVR
AVYQRTRALVK

SEQ ID NO: 32313 - protein, 10 aa, Artificial Sequence
  Description of Artificial Sequence: Synthetic peptide
  Seed: AVASGHDFER
AAASGHDFER

SEQ ID NO: 32314 - protein, 10 aa, Artificial Sequence
  Description of Artificial Sequence: Synthetic peptide
  Seed: AVASGHDFER
AAASGHDFEK

SEQ ID NO: 32315 - protein, 10 aa, Artificial Sequence
  Description of Artificial Sequence: Synthetic peptide
  Seed: AVASGHDFER
ARASGHDFER

SEQ ID NO: 32316 - protein, 10 aa, Artificial Sequence
  Description of Artificial Sequence: Synthetic peptide
  Seed: AVASGHDFER
ANASGHDFER

SEQ ID NO: 32317 - protein, 10 aa, Artificial Sequence
  Description of Artificial Sequence: Synthetic peptide
  Seed: AVASGHDFER
ANASGHDFEK

SEQ ID NO: 32318 - protein, 10 aa, Artificial Sequence
  Description of Artificial Sequence: Synthetic peptide
  Seed: AVASGHDFER
ADASGHDFER

SEQ ID NO: 32319 - protein, 10 aa, Artificial Sequence
  Description of Artificial Sequence: Synthetic peptide
  Seed: AVASGHDFER
ACASGHDFER

SEQ ID NO: 32320 - protein, 10 aa, Artificial Sequence
  Description of Artificial Sequence: Synthetic peptide
  Seed: AVASGHDFER
AQASGHDFER

SEQ ID NO: 32321 - protein, 10 aa, Artificial Sequence
  Description of Artificial Sequence: Synthetic peptide
  Seed: AVASGHDFER
AQASGHDFEK

SEQ ID NO: 32322 - protein, 10 aa, Artificial Sequence
  Description of Artificial Sequence: Synthetic peptide
  Seed: AVASGHDFER
AEASGHDFER

SEQ ID NO: 32323 - protein, 10 aa, Artificial Sequence
  Description of Artificial Sequence: Synthetic peptide
  Seed: AVASGHDFER
AGASGHDFER

SEQ ID NO: 32324 - protein, 10 aa, Artificial Sequence
  Description of Artificial Sequence: Synthetic peptide
  Seed: AVASGHDFER
AGASGHDFEK

SEQ ID NO: 32325 - protein, 10 aa, Artificial Sequence
  Description of Artificial Sequence: Synthetic peptide
  Seed: AVASGHDFER
AHASGHDFER

SEQ ID NO: 32326 - protein, 10 aa, Artificial Sequence
  Description of Artificial Sequence: Synthetic peptide
  Seed: AVASGHDFER
AIASGHDFER

SEQ ID NO: 32327 - protein, 10 aa, Artificial Sequence
  Description of Artificial Sequence: Synthetic peptide
  Seed: AVASGHDFER
AIASGHDFEK

SEQ ID NO: 32328 - protein, 10 aa, Artificial Sequence
  Description of Artificial Sequence: Synthetic peptide
  Seed: AVASGHDFER
AIASGHDFEY

SEQ ID NO: 32329 - protein, 10 aa, Artificial Sequence
  Description of Artificial Sequence: Synthetic peptide
  Seed: AVASGYDFEK
ANASGYDFER

SEQ ID NO: 32330 - protein, 9 aa, Artificial Sequence
  Description of Artificial Sequence: Synthetic peptide
  Seed: ATAGLTHIM
AAAGLTHIY

SEQ ID NO: 32331 - protein, 9 aa, Artificial Sequence
  Description of Artificial Sequence: Synthetic peptide
  Seed: ATAGLTHIM
AAAGLTHIW

SEQ ID NO: 32332 - protein, 9 aa, Artificial Sequence
  Description of Artificial Sequence: Synthetic peptide
  Seed: ATAGLTHIM
AAAGLTHIF

SEQ ID NO: 32333 - protein, 10 aa, Artificial Sequence
  Description of Artificial Sequence: Synthetic peptide
  Seed: AFEDLRLLSF
AREDLRLLSY

SEQ ID NO: 32334 - protein, 10 aa, Artificial Sequence
  Description of Artificial Sequence: Synthetic peptide
  Seed: AFEDLRLLSF
AAEDLRLLSF

SEQ ID NO: 32335 - protein, 10 aa, Artificial Sequence
  Description of Artificial Sequence: Synthetic peptide
  Seed: AFEDLRLLSF
AAEDLRLLSW

SEQ ID NO: 32336 - protein, 10 aa, Artificial Sequence
  Description of Artificial Sequence: Synthetic peptide
  Seed: AFEDLRLLSF
AAEDLRLLSY

SEQ ID NO: 32337 - protein, 10 aa, Artificial Sequence
  Description of Artificial Sequence: Synthetic peptide
  Seed: AFEDLRLLSF
AAEDLRLLSV

SEQ ID NO: 32338 - protein, 10 aa, Artificial Sequence
  Description of Artificial Sequence: Synthetic peptide
  Seed: AFEDLRLLSF
AREDLRLLSI

SEQ ID NO: 32339 - protein, 10 aa, Artificial Sequence
  Description of Artificial Sequence: Synthetic peptide
  Seed: AFEDLRLLSF
AREDLRLLSL

SEQ ID NO: 32340 - protein, 10 aa, Artificial Sequence
  Description of Artificial Sequence: Synthetic peptide
  Seed: AFEDLRLLSF
AREDLRLLSM

SEQ ID NO: 32341 - protein, 10 aa, Artificial Sequence
  Description of Artificial Sequence: Synthetic peptide
  Seed: AFEDLRLLSF
AREDLRLLSF

SEQ ID NO: 32342 - protein, 10 aa, Artificial Sequence
  Description of Artificial Sequence: Synthetic peptide
  Seed: AFEDLRLLSF
AREDLRLLSW

SEQ ID NO: 32343 - protein, 10 aa, Artificial Sequence
  Description of Artificial Sequence: Synthetic peptide
  Seed: AFEDLRLLSF
AREDLRLLSV

SEQ ID NO: 32344 - protein, 10 aa, Artificial Sequence
  Description of Artificial Sequence: Synthetic peptide
  Seed: AFEDLRLLSF
ADEDLRLLSF

SEQ ID NO: 32345 - protein, 10 aa, Artificial Sequence
  Description of Artificial Sequence: Synthetic peptide
  Seed: AFEDLRLLSF
ANEDLRLLSI

SEQ ID NO: 32346 - protein, 10 aa, Artificial Sequence
  Description of Artificial Sequence: Synthetic peptide
  Seed: AFEDLRLLSF
ANEDLRLLSL

SEQ ID NO: 32347 - protein, 10 aa, Artificial Sequence
  Description of Artificial Sequence: Synthetic peptide
  Seed: AFEDLRLLSF
ANEDLRLLSM

SEQ ID NO: 32348 - protein, 10 aa, Artificial Sequence
  Description of Artificial Sequence: Synthetic peptide
  Seed: AFEDLRLLSF
ANEDLRLLSF

SEQ ID NO: 32349 - protein, 10 aa, Artificial Sequence
  Description of Artificial Sequence: Synthetic peptide
  Seed: AFEDLRLLSF
ANEDLRLLSW

SEQ ID NO: 32350 - protein, 10 aa, Artificial Sequence
  Description of Artificial Sequence: Synthetic peptide
  Seed: AFEDLRLLSF
ANEDLRLLSY

SEQ ID NO: 32351 - protein, 10 aa, Artificial Sequence
  Description of Artificial Sequence: Synthetic peptide
  Seed: AFEDLRLLSF
ANEDLRLLSV

SEQ ID NO: 32352 - protein, 10 aa, Artificial Sequence
  Description of Artificial Sequence: Synthetic peptide
  Seed: AFEDLRLLSF
ADEDLRLLSI

SEQ ID NO: 32353 - protein, 10 aa, Artificial Sequence
  Description of Artificial Sequence: Synthetic peptide
  Seed: AFEDLRLLSF
ADEDLRLLSL

SEQ ID NO: 32354 - protein, 10 aa, Artificial Sequence
  Description of Artificial Sequence: Synthetic peptide
  Seed: AFEDLRLLSF
AAEDLRLLSM

SEQ ID NO: 32355 - protein, 10 aa, Artificial Sequence
  Description of Artificial Sequence: Synthetic peptide
  Seed: AFEDLRLLSF
AAEDLRLLSL

SEQ ID NO: 32356 - protein, 10 aa, Artificial Sequence
  Description of Artificial Sequence: Synthetic peptide
  Seed: AFEDLRLLSF
AAEDLRLLSI

SEQ ID NO: 32357 - protein, 9 aa, Artificial Sequence
  Description of Artificial Sequence: Synthetic peptide
  Seed: AFDERRNRY
AYDERRNRY

SEQ ID NO: 32358 - protein, 9 aa, Artificial Sequence
  Description of Artificial Sequence: Synthetic peptide
  Seed: AEIIRMMEG
AEIIRMMEV

SEQ ID NO: 32359 - protein, 10 aa, Artificial Sequence
  Description of Artificial Sequence: Synthetic peptide
  Seed: AEIIRMMEGA
AEIIRMMEGV

SEQ ID NO: 32360 - protein, 9 aa, Artificial Sequence
  Description of Artificial Sequence: Synthetic peptide
  Seed: AFDERRNKY
AFDERRNKL

SEQ ID NO: 32361 - protein, 9 aa, Artificial Sequence
  Description of Artificial Sequence: Synthetic peptide
  Seed: AFDERRNKY
AFDERRNKM

SEQ ID NO: 32362 - protein, 9 aa, Artificial Sequence
  Description of Artificial Sequence: Synthetic peptide
  Seed: AFDERRNKY
AFDERRNKF

SEQ ID NO: 32363 - protein, 9 aa, Artificial Sequence
  Description of Artificial Sequence: Synthetic peptide
  Seed: AFDERRNKY
AWDERRNKM

SEQ ID NO: 32364 - protein, 9 aa, Artificial Sequence
  Description of Artificial Sequence: Synthetic peptide
  Seed: AFDERRNKY
AWDERRNKF

SEQ ID NO: 32365 - protein, 9 aa, Artificial Sequence
  Description of Artificial Sequence: Synthetic peptide
  Seed: AFDERRNKY
AYDERRNKL

SEQ ID NO: 32366 - protein, 9 aa, Artificial Sequence
  Description of Artificial Sequence: Synthetic peptide
  Seed: AFDERRNKY
AYDERRNKM

SEQ ID NO: 32367 - protein, 9 aa, Artificial Sequence
  Description of Artificial Sequence: Synthetic peptide
  Seed: AFDERRNKY
AYDERRNKF

SEQ ID NO: 32368 - protein, 9 aa, Artificial Sequence
  Description of Artificial Sequence: Synthetic peptide
  Seed: AFDERRNKY
AYDERRNKY

SEQ ID NO: 32369 - protein, 9 aa, Artificial Sequence
  Description of Artificial Sequence: Synthetic peptide
  Seed: AFDERRNRY
AFDERRNRL

SEQ ID NO: 32370 - protein, 9 aa, Artificial Sequence
  Description of Artificial Sequence: Synthetic peptide
  Seed: AFDERRNRY
AFDERRNRM

SEQ ID NO: 32371 - protein, 9 aa, Artificial Sequence
  Description of Artificial Sequence: Synthetic peptide
  Seed: AFDERRNRY
AFDERRNRF

SEQ ID NO: 32372 - protein, 9 aa, Artificial Sequence
  Description of Artificial Sequence: Synthetic peptide
  Seed: AFDERRNRY
AWDERRNRM

SEQ ID NO: 32373 - protein, 9 aa, Artificial Sequence
  Description of Artificial Sequence: Synthetic peptide
  Seed: AFDERRNRY
AWDERRNRF

SEQ ID NO: 32374 - protein, 9 aa, Artificial Sequence
  Description of Artificial Sequence: Synthetic peptide
  Seed: AFDERRNRY
AYDERRNRL

SEQ ID NO: 32375 - protein, 9 aa, Artificial Sequence
  Description of Artificial Sequence: Synthetic peptide
  Seed: AFDERRNRY
AYDERRNRM

SEQ ID NO: 32376 - protein, 9 aa, Artificial Sequence
  Description of Artificial Sequence: Synthetic peptide
  Seed: AFDERRNRY
AYDERRNRF

SEQ ID NO: 32377 - protein, 10 aa, Artificial Sequence
  Description of Artificial Sequence: Synthetic peptide
  Seed: AFEDLRLLSF
ADEDLRLLSM

SEQ ID NO: 32378 - protein, 10 aa, Artificial Sequence
  Description of Artificial Sequence: Synthetic peptide
  Seed: AFEDLRLLSF
ADEDLRLLSW

SEQ ID NO: 32379 - protein, 10 aa, Artificial Sequence
  Description of Artificial Sequence: Synthetic peptide
  Seed: AFEDLRLLSF
AHEDLRLLSF

SEQ ID NO: 32380 - protein, 10 aa, Artificial Sequence
  Description of Artificial Sequence: Synthetic peptide
  Seed: AFEDLRLLSF
AGEDLRLLSL

SEQ ID NO: 32381 - protein, 10 aa, Artificial Sequence
  Description of Artificial Sequence: Synthetic peptide
  Seed: AFEDLRLLSF
AGEDLRLLSM

SEQ ID NO: 32382 - protein, 10 aa, Artificial Sequence
  Description of Artificial Sequence: Synthetic peptide
  Seed: AFEDLRLLSF
AGEDLRLLSF

SEQ ID NO: 32383 - protein, 10 aa, Artificial Sequence
  Description of Artificial Sequence: Synthetic peptide
  Seed: AFEDLRLLSF
AGEDLRLLSW

SEQ ID NO: 32384 - protein, 10 aa, Artificial Sequence
  Description of Artificial Sequence: Synthetic peptide
  Seed: AFEDLRLLSF
AGEDLRLLSY

SEQ ID NO: 32385 - protein, 10 aa, Artificial Sequence
  Description of Artificial Sequence: Synthetic peptide
  Seed: AFEDLRLLSF
AGEDLRLLSV

SEQ ID NO: 32386 - protein, 10 aa, Artificial Sequence
  Description of Artificial Sequence: Synthetic peptide
  Seed: AFEDLRLLSF
AHEDLRLLSI

SEQ ID NO: 32387 - protein, 10 aa, Artificial Sequence
  Description of Artificial Sequence: Synthetic peptide
  Seed: AFEDLRLLSF
AHEDLRLLSL

SEQ ID NO: 32388 - protein, 10 aa, Artificial Sequence
  Description of Artificial Sequence: Synthetic peptide
  Seed: AFEDLRLLSF
AHEDLRLLSM

SEQ ID NO: 32389 - protein, 10 aa, Artificial Sequence
  Description of Artificial Sequence: Synthetic peptide
  Seed: AFEDLRLLSF
AHEDLRLLSW

SEQ ID NO: 32390 - protein, 10 aa, Artificial Sequence
  Description of Artificial Sequence: Synthetic peptide
  Seed: AFEDLRLLSF
ADEDLRLLSY

SEQ ID NO: 32391 - protein, 10 aa, Artificial Sequence
  Description of Artificial Sequence: Synthetic peptide
  Seed: AFEDLRLLSF
AHEDLRLLSY

SEQ ID NO: 32392 - protein, 10 aa, Artificial Sequence
  Description of Artificial Sequence: Synthetic peptide
  Seed: AFEDLRLLSF
AHEDLRLLSV

SEQ ID NO: 32393 - protein, 10 aa, Artificial Sequence
  Description of Artificial Sequence: Synthetic peptide
  Seed: AFEDLRLLSF
AIEDLRLLSI

SEQ ID NO: 32394 - protein, 10 aa, Artificial Sequence
  Description of Artificial Sequence: Synthetic peptide
  Seed: AFEDLRLLSF
AIEDLRLLSL

SEQ ID NO: 32395 - protein, 10 aa, Artificial Sequence
  Description of Artificial Sequence: Synthetic peptide
  Seed: AFEDLRLLSF
AIEDLRLLSM

SEQ ID NO: 32396 - protein, 10 aa, Artificial Sequence
  Description of Artificial Sequence: Synthetic peptide
  Seed: AFEDLRLLSF
AIEDLRLLSF

SEQ ID NO: 32397 - protein, 10 aa, Artificial Sequence
  Description of Artificial Sequence: Synthetic peptide
  Seed: AFEDLRLLSF
AIEDLRLLSW

SEQ ID NO: 32398 - protein, 10 aa, Artificial Sequence
  Description of Artificial Sequence: Synthetic peptide
  Seed: AFEDLRLLSF
AIEDLRLLSY

SEQ ID NO: 32399 - protein, 10 aa, Artificial Sequence
  Description of Artificial Sequence: Synthetic peptide
  Seed: AFEDLRLLSF
AIEDLRLLSV

SEQ ID NO: 32400 - protein, 10 aa, Artificial Sequence
  Description of Artificial Sequence: Synthetic peptide
  Seed: AFEDLRLLSF
AGEDLRLLSI

SEQ ID NO: 32401 - protein, 10 aa, Artificial Sequence
  Description of Artificial Sequence: Synthetic peptide
  Seed: AFEDLRLLSF
AEEDLRLLSV

SEQ ID NO: 32402 - protein, 10 aa, Artificial Sequence
  Description of Artificial Sequence: Synthetic peptide
  Seed: AFEDLRLLSF
AEEDLRLLSY

SEQ ID NO: 32403 - protein, 10 aa, Artificial Sequence
  Description of Artificial Sequence: Synthetic peptide
  Seed: AFEDLRLLSF
AEEDLRLLSW

SEQ ID NO: 32404 - protein, 10 aa, Artificial Sequence
  Description of Artificial Sequence: Synthetic peptide
  Seed: AFEDLRLLSF
ADEDLRLLSV

SEQ ID NO: 32405 - protein, 10 aa, Artificial Sequence
  Description of Artificial Sequence: Synthetic peptide
  Seed: AFEDLRLLSF
ACEDLRLLSI

SEQ ID NO: 32406 - protein, 10 aa, Artificial Sequence
  Description of Artificial Sequence: Synthetic peptide
  Seed: AFEDLRLLSF
ACEDLRLLSL

SEQ ID NO: 32407 - protein, 10 aa, Artificial Sequence
  Description of Artificial Sequence: Synthetic peptide
  Seed: AFEDLRLLSF
ACEDLRLLSM

SEQ ID NO: 32408 - protein, 10 aa, Artificial Sequence
  Description of Artificial Sequence: Synthetic peptide
  Seed: AFEDLRLLSF
ACEDLRLLSF

SEQ ID NO: 32409 - protein, 10 aa, Artificial Sequence
  Description of Artificial Sequence: Synthetic peptide
  Seed: AFEDLRLLSF
ACEDLRLLSW

SEQ ID NO: 32410 - protein, 10 aa, Artificial Sequence
  Description of Artificial Sequence: Synthetic peptide
  Seed: AFEDLRLLSF
ACEDLRLLSY

SEQ ID NO: 32411 - protein, 10 aa, Artificial Sequence
  Description of Artificial Sequence: Synthetic peptide
  Seed: AFEDLRLLSF
ACEDLRLLSV

SEQ ID NO: 32412 - protein, 10 aa, Artificial Sequence
  Description of Artificial Sequence: Synthetic peptide
  Seed: AFEDLRLLSF
AQEDLRLLSI

SEQ ID NO: 32413 - protein, 10 aa, Artificial Sequence
  Description of Artificial Sequence: Synthetic peptide
  Seed: AFEDLRLLSF
AQEDLRLLSL

SEQ ID NO: 32414 - protein, 10 aa, Artificial Sequence
  Description of Artificial Sequence: Synthetic peptide
  Seed: AFEDLRLLSF
AQEDLRLLSM

SEQ ID NO: 32415 - protein, 10 aa, Artificial Sequence
  Description of Artificial Sequence: Synthetic peptide
  Seed: AFEDLRLLSF
AQEDLRLLSF

SEQ ID NO: 32416 - protein, 10 aa, Artificial Sequence
  Description of Artificial Sequence: Synthetic peptide
  Seed: AFEDLRLLSF
AQEDLRLLSW

SEQ ID NO: 32417 - protein, 10 aa, Artificial Sequence
  Description of Artificial Sequence: Synthetic peptide
  Seed: AFEDLRLLSF
AQEDLRLLSY

SEQ ID NO: 32418 - protein, 10 aa, Artificial Sequence
  Description of Artificial Sequence: Synthetic peptide
  Seed: AFEDLRLLSF
AQEDLRLLSV

SEQ ID NO: 32419 - protein, 10 aa, Artificial Sequence
  Description of Artificial Sequence: Synthetic peptide
  Seed: AFEDLRLLSF
AEEDLRLLSI

SEQ ID NO: 32420 - protein, 10 aa, Artificial Sequence
  Description of Artificial Sequence: Synthetic peptide
  Seed: AFEDLRLLSF
AEEDLRLLSL

SEQ ID NO: 32421 - protein, 10 aa, Artificial Sequence
  Description of Artificial Sequence: Synthetic peptide
  Seed: AFEDLRLLSF
AEEDLRLLSM

SEQ ID NO: 32422 - protein, 10 aa, Artificial Sequence
  Description of Artificial Sequence: Synthetic peptide
  Seed: AFEDLRLLSF
AEEDLRLLSF

SEQ ID NO: 32423 - protein, 9 aa, Artificial Sequence
  Description of Artificial Sequence: Synthetic peptide
  Seed: AEIIRMMEG
AEIIRMMET

SEQ ID NO: 32424 - protein, 9 aa, Artificial Sequence
  Description of Artificial Sequence: Synthetic peptide
  Seed: AEIIRMMEG
AEIIRMMEF

SEQ ID NO: 32425 - protein, 9 aa, Artificial Sequence
  Description of Artificial Sequence: Synthetic peptide
  Seed: ATAGLTHIM
AAAGLTHIM

SEQ ID NO: 32426 - protein, 9 aa, Artificial Sequence
  Description of Artificial Sequence: Synthetic peptide
  Seed: AEIEDLIFL
AEIEDLIFT

SEQ ID NO: 32427 - protein, 8 aa, Artificial Sequence
  Description of Artificial Sequence: Synthetic peptide
  Seed: AEIEDLIF
AEIEDLIV

SEQ ID NO: 32428 - protein, 9 aa, Artificial Sequence
  Description of Artificial Sequence: Synthetic peptide
  Seed: AEIEDLIFL
AEIEDLIFA

SEQ ID NO: 32429 - protein, 9 aa, Artificial Sequence
  Description of Artificial Sequence: Synthetic peptide
  Seed: AEIEDLIFL
AEIEDLIFC

SEQ ID NO: 32430 - protein, 9 aa, Artificial Sequence
  Description of Artificial Sequence: Synthetic peptide
  Seed: AEIEDLIFL
AEIEDLIFG

SEQ ID NO: 32431 - protein, 9 aa, Artificial Sequence
  Description of Artificial Sequence: Synthetic peptide
  Seed: AEIEDLIFL
AEIEDLIFI

SEQ ID NO: 32432 - protein, 9 aa, Artificial Sequence
  Description of Artificial Sequence: Synthetic peptide
  Seed: AEIEDLIFL
AEIEDLIFM

SEQ ID NO: 32433 - protein, 9 aa, Artificial Sequence
  Description of Artificial Sequence: Synthetic peptide
  Seed: AEIEDLIFL
AEIEDLIFF

SEQ ID NO: 32434 - protein, 9 aa, Artificial Sequence
  Description of Artificial Sequence: Synthetic peptide
  Seed: AEIEDLIFL
AEIEDLIFP

SEQ ID NO: 32435 - protein, 9 aa, Artificial Sequence
  Description of Artificial Sequence: Synthetic peptide
  Seed: AEIEDLIFL
AEIEDLIFV

SEQ ID NO: 32436 - protein, 10 aa, Artificial Sequence
  Description of Artificial Sequence: Synthetic peptide
  Seed: AEIEDLIFLA
AEIEDLIFLL

SEQ ID NO: 32437 - protein, 10 aa, Artificial Sequence
  Description of Artificial Sequence: Synthetic peptide
  Seed: AEIEDLIFLA
ADIEDLIFLW

SEQ ID NO: 32438 - protein, 10 aa, Artificial Sequence
  Description of Artificial Sequence: Synthetic peptide
  Seed: AEIEDLIFLA
AQIEDLIFLW

SEQ ID NO: 32439 - protein, 10 aa, Artificial Sequence
  Description of Artificial Sequence: Synthetic peptide
  Seed: AEIEDLIFLA
AEIEDLIFLN

SEQ ID NO: 32440 - protein, 10 aa, Artificial Sequence
  Description of Artificial Sequence: Synthetic peptide
  Seed: AEIEDLIFLA
AEIEDLIFLD

SEQ ID NO: 32441 - protein, 10 aa, Artificial Sequence
  Description of Artificial Sequence: Synthetic peptide
  Seed: AEIEDLIFLA
AEIEDLIFLC

SEQ ID NO: 32442 - protein, 10 aa, Artificial Sequence
  Description of Artificial Sequence: Synthetic peptide
  Seed: AEIEDLIFLA
AEIEDLIFLQ

SEQ ID NO: 32443 - protein, 10 aa, Artificial Sequence
  Description of Artificial Sequence: Synthetic peptide
  Seed: AEIEDLIFLA
AEIEDLIFLE

SEQ ID NO: 32444 - protein, 10 aa, Artificial Sequence
  Description of Artificial Sequence: Synthetic peptide
  Seed: AEIEDLIFLA
AEIEDLIFLG

SEQ ID NO: 32445 - protein, 10 aa, Artificial Sequence
  Description of Artificial Sequence: Synthetic peptide
  Seed: AEIEDLIFLA
AEIEDLIFLH

SEQ ID NO: 32446 - protein, 8 aa, Artificial Sequence
  Description of Artificial Sequence: Synthetic peptide
  Seed: AEIEDLIF
AEIEDLIM

SEQ ID NO: 32447 - protein, 8 aa, Artificial Sequence
  Description of Artificial Sequence: Synthetic peptide
  Seed: AEIEDLIF
AEIEDLIL

SEQ ID NO: 32448 - protein, 8 aa, Artificial Sequence
  Description of Artificial Sequence: Synthetic peptide
  Seed: AEIEDLIF
AEIEDLII

SEQ ID NO: 32449 - protein, 9 aa, Artificial Sequence
  Description of Artificial Sequence: Synthetic peptide
  Seed: AAVKGVGTM
AVVKGVGTY

SEQ ID NO: 32450 - protein, 9 aa, Artificial Sequence
  Description of Artificial Sequence: Synthetic peptide
  Seed: AAVKGVGTM
ASVKGVGTV

SEQ ID NO: 32451 - protein, 9 aa, Artificial Sequence
  Description of Artificial Sequence: Synthetic peptide
  Seed: AAVKGVGTM
ATVKGVGTR

SEQ ID NO: 32452 - protein, 9 aa, Artificial Sequence
  Description of Artificial Sequence: Synthetic peptide
  Seed: AAVKGVGTM
ATVKGVGTI

SEQ ID NO: 32453 - protein, 9 aa, Artificial Sequence
  Description of Artificial Sequence: Synthetic peptide
  Seed: AAVKGVGTM
ATVKGVGTL

SEQ ID NO: 32454 - protein, 9 aa, Artificial Sequence
  Description of Artificial Sequence: Synthetic peptide
  Seed: AAVKGVGTM
ATVKGVGTK

SEQ ID NO: 32455 - protein, 9 aa, Artificial Sequence
  Description of Artificial Sequence: Synthetic peptide
  Seed: AAVKGVGTM
ATVKGVGTF

SEQ ID NO: 32456 - protein, 9 aa, Artificial Sequence
  Description of Artificial Sequence: Synthetic peptide
  Seed: AAVKGVGTM
ATVKGVGTW

SEQ ID NO: 32457 - protein, 9 aa, Artificial Sequence
  Description of Artificial Sequence: Synthetic peptide
  Seed: AAVKGVGTM
ATVKGVGTY

SEQ ID NO: 32458 - protein, 9 aa, Artificial Sequence
  Description of Artificial Sequence: Synthetic peptide
  Seed: AAVKGVGTM
ATVKGVGTV

SEQ ID NO: 32459 - protein, 9 aa, Artificial Sequence
  Description of Artificial Sequence: Synthetic peptide
  Seed: AAVKGVGTM
AYVKGVGTM

SEQ ID NO: 32460 - protein, 9 aa, Artificial Sequence
  Description of Artificial Sequence: Synthetic peptide
  Seed: AAVKGVGTM
AYVKGVGTF

SEQ ID NO: 32461 - protein, 9 aa, Artificial Sequence
  Description of Artificial Sequence: Synthetic peptide
  Seed: AAVKGVGTM
AYVKGVGTY

SEQ ID NO: 32462 - protein, 9 aa, Artificial Sequence
  Description of Artificial Sequence: Synthetic peptide
  Seed: AAVKGVGTM
AVVKGVGTR

SEQ ID NO: 32463 - protein, 9 aa, Artificial Sequence
  Description of Artificial Sequence: Synthetic peptide
  Seed: AAVKGVGTM
AVVKGVGTL

SEQ ID NO: 32464 - protein, 9 aa, Artificial Sequence
  Description of Artificial Sequence: Synthetic peptide
  Seed: AAVKGVGTM
AVVKGVGTK

SEQ ID NO: 32465 - protein, 9 aa, Artificial Sequence
  Description of Artificial Sequence: Synthetic peptide
  Seed: AAVKGVGTM
AVVKGVGTM

SEQ ID NO: 32466 - protein, 9 aa, Artificial Sequence
  Description of Artificial Sequence: Synthetic peptide
  Seed: AAVKGVGTM
AVVKGVGTF

SEQ ID NO: 32467 - protein, 9 aa, Artificial Sequence
  Description of Artificial Sequence: Synthetic peptide
  Seed: AAVKGVGTM
AVVKGVGTW

SEQ ID NO: 32468 - protein, 10 aa, Artificial Sequence
  Description of Artificial Sequence: Synthetic peptide
  Seed: AEIEDLIFLA
AEIEDLIFLI

SEQ ID NO: 32469 - protein, 10 aa, Artificial Sequence
  Description of Artificial Sequence: Synthetic peptide
  Seed: AEIEDLIFLA
AEIEDLIFLK

SEQ ID NO: 32470 - protein, 9 aa, Artificial Sequence
  Description of Artificial Sequence: Synthetic peptide
  Seed: AEIIRMMEG
AEIIRMMEM

SEQ ID NO: 32471 - protein, 10 aa, Artificial Sequence
  Description of Artificial Sequence: Synthetic peptide
  Seed: AEIEDLIFSA
AEIEDLIFSV

SEQ ID NO: 32472 - protein, 10 aa, Artificial Sequence
  Description of Artificial Sequence: Synthetic peptide
  Seed: AEIEDLIFSA
AEIEDLIFSI

SEQ ID NO: 32473 - protein, 10 aa, Artificial Sequence
  Description of Artificial Sequence: Synthetic peptide
  Seed: AEIEDLIFSA
AEIEDLIFSL

SEQ ID NO: 32474 - protein, 10 aa, Artificial Sequence
  Description of Artificial Sequence: Synthetic peptide
  Seed: AEIEDLIFSA
AEIEDLIFSM

SEQ ID NO: 32475 - protein, 10 aa, Artificial Sequence
  Description of Artificial Sequence: Synthetic peptide
  Seed: AEIEDLIFSA
AEIEDLIFSF

SEQ ID NO: 32476 - protein, 10 aa, Artificial Sequence
  Description of Artificial Sequence: Synthetic peptide
  Seed: AEIEDLIFSA
AEIEDLIFSP

SEQ ID NO: 32477 - protein, 10 aa, Artificial Sequence
  Description of Artificial Sequence: Synthetic peptide
  Seed: AEIEDLIFSA
AEIEDLIFSS

SEQ ID NO: 32478 - protein, 10 aa, Artificial Sequence
  Description of Artificial Sequence: Synthetic peptide
  Seed: AEIEDLIFSA
AEIEDLIFST

SEQ ID NO: 32479 - protein, 10 aa, Artificial Sequence
  Description of Artificial Sequence: Synthetic peptide
  Seed: AEIEDLIFSA
AEIEDLIFSW

SEQ ID NO: 32480 - protein, 10 aa, Artificial Sequence
  Description of Artificial Sequence: Synthetic peptide
  Seed: AEIEDLIFSA
AEIEDLIFSY

SEQ ID NO: 32481 - protein, 9 aa, Artificial Sequence
  Description of Artificial Sequence: Synthetic peptide
  Seed: AEIIRMMEG
ADIIRMMEI

SEQ ID NO: 32482 - protein, 10 aa, Artificial Sequence
  Description of Artificial Sequence: Synthetic peptide
  Seed: AEIEDLIFLA
AEIEDLIFLM

SEQ ID NO: 32483 - protein, 9 aa, Artificial Sequence
  Description of Artificial Sequence: Synthetic peptide
  Seed: AEIIRMMEG
ADIIRMMEL

SEQ ID NO: 32484 - protein, 9 aa, Artificial Sequence
  Description of Artificial Sequence: Synthetic peptide
  Seed: AEIIRMMEG
ADIIRMMEM

SEQ ID NO: 32485 - protein, 9 aa, Artificial Sequence
  Description of Artificial Sequence: Synthetic peptide
  Seed: AEIIRMMEG
ADIIRMMEF

SEQ ID NO: 32486 - protein, 9 aa, Artificial Sequence
  Description of Artificial Sequence: Synthetic peptide
  Seed: AEIIRMMEG
ADIIRMMEV

SEQ ID NO: 32487 - protein, 9 aa, Artificial Sequence
  Description of Artificial Sequence: Synthetic peptide
  Seed: AEIIRMMEG
AQIIRMMEL

SEQ ID NO: 32488 - protein, 9 aa, Artificial Sequence
  Description of Artificial Sequence: Synthetic peptide
  Seed: AEIIRMMEG
AEIIRMMEA

SEQ ID NO: 32489 - protein, 9 aa, Artificial Sequence
  Description of Artificial Sequence: Synthetic peptide
  Seed: AEIIRMMEG
AEIIRMMEC

SEQ ID NO: 32490 - protein, 9 aa, Artificial Sequence
  Description of Artificial Sequence: Synthetic peptide
  Seed: AEIIRMMEG
AEIIRMMEI

SEQ ID NO: 32491 - protein, 9 aa, Artificial Sequence
  Description of Artificial Sequence: Synthetic peptide
  Seed: AEIIRMMEG
AEIIRMMEL

SEQ ID NO: 32492 - protein, 10 aa, Artificial Sequence
  Description of Artificial Sequence: Synthetic peptide
  Seed: AEIEDLIFSA
AEIEDLIFSG

SEQ ID NO: 32493 - protein, 10 aa, Artificial Sequence
  Description of Artificial Sequence: Synthetic peptide
  Seed: AEIEDLIFSA
AEIEDLIFSC

SEQ ID NO: 32494 - protein, 10 aa, Artificial Sequence
  Description of Artificial Sequence: Synthetic peptide
  Seed: AEIEDLIFSA
AQIEDLIFSW

SEQ ID NO: 32495 - protein, 10 aa, Artificial Sequence
  Description of Artificial Sequence: Synthetic peptide
  Seed: AEIEDLIFSA
AQIEDLIFSL

SEQ ID NO: 32496 - protein, 10 aa, Artificial Sequence
  Description of Artificial Sequence: Synthetic peptide
  Seed: AEIEDLIFLA
AEIEDLIFLF

SEQ ID NO: 32497 - protein, 10 aa, Artificial Sequence
  Description of Artificial Sequence: Synthetic peptide
  Seed: AEIEDLIFLA
AEIEDLIFLP

SEQ ID NO: 32498 - protein, 10 aa, Artificial Sequence
  Description of Artificial Sequence: Synthetic peptide
  Seed: AEIEDLIFLA
AEIEDLIFLS

SEQ ID NO: 32499 - protein, 10 aa, Artificial Sequence
  Description of Artificial Sequence: Synthetic peptide
  Seed: AEIEDLIFLA
AEIEDLIFLW

SEQ ID NO: 32500 - protein, 10 aa, Artificial Sequence
  Description of Artificial Sequence: Synthetic peptide
  Seed: AEIEDLIFLA
AEIEDLIFLY

SEQ ID NO: 32501 - protein, 10 aa, Artificial Sequence
  Description of Artificial Sequence: Synthetic peptide
  Seed: AEIEDLIFLA
AEIEDLIFLV

SEQ ID NO: 32502 - protein, 10 aa, Artificial Sequence
  Description of Artificial Sequence: Synthetic peptide
  Seed: AEIEDLIFSA
ADIEDLIFSL

SEQ ID NO: 32503 - protein, 10 aa, Artificial Sequence
  Description of Artificial Sequence: Synthetic peptide
  Seed: AEIEDLIFSA
ADIEDLIFSW

SEQ ID NO: 32504 - protein, 10 aa, Artificial Sequence
  Description of Artificial Sequence: Synthetic peptide
  Seed: AFEDLRLLSF
ALEDLRLLSI

SEQ ID NO: 32505 - protein, 10 aa, Artificial Sequence
  Description of Artificial Sequence: Synthetic peptide
  Seed: AFEDLRLLSF
ALEDLRLLSL

SEQ ID NO: 32506 - protein, 10 aa, Artificial Sequence
  Description of Artificial Sequence: Synthetic peptide
  Seed: AFEDLRLLSF
ALEDLRLLSM

SEQ ID NO: 32507 - protein, 10 aa, Artificial Sequence
  Description of Artificial Sequence: Synthetic peptide
  Seed: AFEDLRVSSF
AIEDLRVSSF

SEQ ID NO: 32508 - protein, 10 aa, Artificial Sequence
  Description of Artificial Sequence: Synthetic peptide
  Seed: AFEDLRVSSF
AHEDLRVSSI

SEQ ID NO: 32509 - protein, 10 aa, Artificial Sequence
  Description of Artificial Sequence: Synthetic peptide
  Seed: AFEDLRVSSF
AHEDLRVSSL

SEQ ID NO: 32510 - protein, 10 aa, Artificial Sequence
  Description of Artificial Sequence: Synthetic peptide
  Seed: AFEDLRVSSF
AHEDLRVSSM

SEQ ID NO: 32511 - protein, 10 aa, Artificial Sequence
  Description of Artificial Sequence: Synthetic peptide
  Seed: AFEDLRVSSF
AHEDLRVSSF

SEQ ID NO: 32512 - protein, 10 aa, Artificial Sequence
  Description of Artificial Sequence: Synthetic peptide
  Seed: AFEDLRVSSF
AHEDLRVSSW

SEQ ID NO: 32513 - protein, 10 aa, Artificial Sequence
  Description of Artificial Sequence: Synthetic peptide
  Seed: AFEDLRVSSF
AHEDLRVSSY

SEQ ID NO: 32514 - protein, 10 aa, Artificial Sequence
  Description of Artificial Sequence: Synthetic peptide
  Seed: AFEDLRVSSF
AIEDLRVSSI

SEQ ID NO: 32515 - protein, 10 aa, Artificial Sequence
  Description of Artificial Sequence: Synthetic peptide
  Seed: AFEDLRVSSF
AIEDLRVSSL

SEQ ID NO: 32516 - protein, 10 aa, Artificial Sequence
  Description of Artificial Sequence: Synthetic peptide
  Seed: AFEDLRVSSF
AIEDLRVSSM

SEQ ID NO: 32517 - protein, 10 aa, Artificial Sequence
  Description of Artificial Sequence: Synthetic peptide
  Seed: AFEDLRVSSF
AIEDLRVSSW

SEQ ID NO: 32518 - protein, 10 aa, Artificial Sequence
  Description of Artificial Sequence: Synthetic peptide
  Seed: AFEDLRVSSF
AKEDLRVSSF

SEQ ID NO: 32519 - protein, 10 aa, Artificial Sequence
  Description of Artificial Sequence: Synthetic peptide
  Seed: AFEDLRVSSF
AIEDLRVSSY

SEQ ID NO: 32520 - protein, 10 aa, Artificial Sequence
  Description of Artificial Sequence: Synthetic peptide
  Seed: AFEDLRVSSF
ALEDLRVSSI

SEQ ID NO: 32521 - protein, 10 aa, Artificial Sequence
  Description of Artificial Sequence: Synthetic peptide
  Seed: AFEDLRVSSF
ALEDLRVSSL

SEQ ID NO: 32522 - protein, 10 aa, Artificial Sequence
  Description of Artificial Sequence: Synthetic peptide
  Seed: AFEDLRVSSF
ALEDLRVSSM

SEQ ID NO: 32523 - protein, 10 aa, Artificial Sequence
  Description of Artificial Sequence: Synthetic peptide
  Seed: AFEDLRVSSF
ALEDLRVSSF

SEQ ID NO: 32524 - protein, 10 aa, Artificial Sequence
  Description of Artificial Sequence: Synthetic peptide
  Seed: AFEDLRVSSF
ALEDLRVSSW

SEQ ID NO: 32525 - protein, 10 aa, Artificial Sequence
  Description of Artificial Sequence: Synthetic peptide
  Seed: AFEDLRVSSF
ALEDLRVSSY

SEQ ID NO: 32526 - protein, 10 aa, Artificial Sequence
  Description of Artificial Sequence: Synthetic peptide
  Seed: AFEDLRVSSF
AKEDLRVSSI

SEQ ID NO: 32527 - protein, 10 aa, Artificial Sequence
  Description of Artificial Sequence: Synthetic peptide
  Seed: AFEDLRVSSF
AKEDLRVSSL

SEQ ID NO: 32528 - protein, 10 aa, Artificial Sequence
  Description of Artificial Sequence: Synthetic peptide
  Seed: AFEDLRVSSF
AGEDLRVSSY

SEQ ID NO: 32529 - protein, 10 aa, Artificial Sequence
  Description of Artificial Sequence: Synthetic peptide
  Seed: AFEDLRVSSF
AGEDLRVSSW

SEQ ID NO: 32530 - protein, 10 aa, Artificial Sequence
  Description of Artificial Sequence: Synthetic peptide
  Seed: AFEDLRVSSF
AGEDLRVSSF

SEQ ID NO: 32531 - protein, 10 aa, Artificial Sequence
  Description of Artificial Sequence: Synthetic peptide
  Seed: AFEDLRVSSF
AGEDLRVSSM

SEQ ID NO: 32532 - protein, 10 aa, Artificial Sequence
  Description of Artificial Sequence: Synthetic peptide
  Seed: AFEDLRVSSF
ACEDLRVSSF

SEQ ID NO: 32533 - protein, 10 aa, Artificial Sequence
  Description of Artificial Sequence: Synthetic peptide
  Seed: AFEDLRVSSF
ACEDLRVSSW

SEQ ID NO: 32534 - protein, 10 aa, Artificial Sequence
  Description of Artificial Sequence: Synthetic peptide
  Seed: AFEDLRVSSF
ACEDLRVSSY

SEQ ID NO: 32535 - protein, 10 aa, Artificial Sequence
  Description of Artificial Sequence: Synthetic peptide
  Seed: AFEDLRVSSF
AQEDLRVSSI

SEQ ID NO: 32536 - protein, 10 aa, Artificial Sequence
  Description of Artificial Sequence: Synthetic peptide
  Seed: AFEDLRVSSF
AQEDLRVSSL

SEQ ID NO: 32537 - protein, 10 aa, Artificial Sequence
  Description of Artificial Sequence: Synthetic peptide
  Seed: AFEDLRVSSF
AQEDLRVSSM

SEQ ID NO: 32538 - protein, 10 aa, Artificial Sequence
  Description of Artificial Sequence: Synthetic peptide
  Seed: AFEDLRVSSF
AQEDLRVSSF

SEQ ID NO: 32539 - protein, 10 aa, Artificial Sequence
  Description of Artificial Sequence: Synthetic peptide
  Seed: AFEDLRVSSF
AQEDLRVSSW

SEQ ID NO: 32540 - protein, 10 aa, Artificial Sequence
  Description of Artificial Sequence: Synthetic peptide
  Seed: AFEDLRVSSF
AQEDLRVSSY

SEQ ID NO: 32541 - protein, 10 aa, Artificial Sequence
  Description of Artificial Sequence: Synthetic peptide
  Seed: AFEDLRVSSF
AQEDLRVSSV

SEQ ID NO: 32542 - protein, 10 aa, Artificial Sequence
  Description of Artificial Sequence: Synthetic peptide
  Seed: AFEDLRVSSF
AEEDLRVSSI

SEQ ID NO: 32543 - protein, 10 aa, Artificial Sequence
  Description of Artificial Sequence: Synthetic peptide
  Seed: AFEDLRVSSF
AEEDLRVSSL

SEQ ID NO: 32544 - protein, 10 aa, Artificial Sequence
  Description of Artificial Sequence: Synthetic peptide
  Seed: AFEDLRVSSF
AEEDLRVSSM

SEQ ID NO: 32545 - protein, 10 aa, Artificial Sequence
  Description of Artificial Sequence: Synthetic peptide
  Seed: AFEDLRVSSF
AEEDLRVSSF

SEQ ID NO: 32546 - protein, 10 aa, Artificial Sequence
  Description of Artificial Sequence: Synthetic peptide
  Seed: AFEDLRVSSF
AEEDLRVSSW

SEQ ID NO: 32547 - protein, 10 aa, Artificial Sequence
  Description of Artificial Sequence: Synthetic peptide
  Seed: AFEDLRVSSF
AEEDLRVSSY

SEQ ID NO: 32548 - protein, 10 aa, Artificial Sequence
  Description of Artificial Sequence: Synthetic peptide
  Seed: AFEDLRVSSF
AEEDLRVSSV

SEQ ID NO: 32549 - protein, 10 aa, Artificial Sequence
  Description of Artificial Sequence: Synthetic peptide
  Seed: AFEDLRVSSF
AGEDLRVSSI

SEQ ID NO: 32550 - protein, 10 aa, Artificial Sequence
  Description of Artificial Sequence: Synthetic peptide
  Seed: AFEDLRVSSF
AGEDLRVSSL

SEQ ID NO: 32551 - protein, 10 aa, Artificial Sequence
  Description of Artificial Sequence: Synthetic peptide
  Seed: AFEDLRVSSF
AKEDLRVSSM

SEQ ID NO: 32552 - protein, 10 aa, Artificial Sequence
  Description of Artificial Sequence: Synthetic peptide
  Seed: AFEDLRVSSF
AKEDLRVSSW

SEQ ID NO: 32553 - protein, 10 aa, Artificial Sequence
  Description of Artificial Sequence: Synthetic peptide
  Seed: AFEDLRLLSF
ALEDLRLLSF

SEQ ID NO: 32554 - protein, 10 aa, Artificial Sequence
  Description of Artificial Sequence: Synthetic peptide
  Seed: AFEDLRVSSF
AWEDLRVSSL

SEQ ID NO: 32555 - protein, 10 aa, Artificial Sequence
  Description of Artificial Sequence: Synthetic peptide
  Seed: AFEDLRVSSF
ASEDLRVSSW

SEQ ID NO: 32556 - protein, 10 aa, Artificial Sequence
  Description of Artificial Sequence: Synthetic peptide
  Seed: AFEDLRVSSF
ASEDLRVSSY

SEQ ID NO: 32557 - protein, 10 aa, Artificial Sequence
  Description of Artificial Sequence: Synthetic peptide
  Seed: AFEDLRVSSF
ATEDLRVSSI

SEQ ID NO: 32558 - protein, 10 aa, Artificial Sequence
  Description of Artificial Sequence: Synthetic peptide
  Seed: AFEDLRVSSF
ATEDLRVSSL

SEQ ID NO: 32559 - protein, 10 aa, Artificial Sequence
  Description of Artificial Sequence: Synthetic peptide
  Seed: AFEDLRVSSF
ATEDLRVSSM

SEQ ID NO: 32560 - protein, 10 aa, Artificial Sequence
  Description of Artificial Sequence: Synthetic peptide
  Seed: AFEDLRVSSF
ATEDLRVSSF

SEQ ID NO: 32561 - protein, 10 aa, Artificial Sequence
  Description of Artificial Sequence: Synthetic peptide
  Seed: AFEDLRVSSF
ATEDLRVSSW

SEQ ID NO: 32562 - protein, 10 aa, Artificial Sequence
  Description of Artificial Sequence: Synthetic peptide
  Seed: AFEDLRVSSF
ATEDLRVSSY

SEQ ID NO: 32563 - protein, 10 aa, Artificial Sequence
  Description of Artificial Sequence: Synthetic peptide
  Seed: AFEDLRVSSF
AWEDLRVSSI

SEQ ID NO: 32564 - protein, 10 aa, Artificial Sequence
  Description of Artificial Sequence: Synthetic peptide
  Seed: AFEDLRVSSF
AWEDLRVSSM

SEQ ID NO: 32565 - protein, 10 aa, Artificial Sequence
  Description of Artificial Sequence: Synthetic peptide
  Seed: AFEDLRVSSF
AKEDLRVSSY

SEQ ID NO: 32566 - protein, 10 aa, Artificial Sequence
  Description of Artificial Sequence: Synthetic peptide
  Seed: AFEDLRVSSF
AWEDLRVSSF

SEQ ID NO: 32567 - protein, 10 aa, Artificial Sequence
  Description of Artificial Sequence: Synthetic peptide
  Seed: AFEDLRVSSF
AWEDLRVSSW

SEQ ID NO: 32568 - protein, 10 aa, Artificial Sequence
  Description of Artificial Sequence: Synthetic peptide
  Seed: AFEDLRVSSF
AWEDLRVSSY

SEQ ID NO: 32569 - protein, 10 aa, Artificial Sequence
  Description of Artificial Sequence: Synthetic peptide
  Seed: AFEDLRVSSF
AWEDLRVSSV

SEQ ID NO: 32570 - protein, 10 aa, Artificial Sequence
  Description of Artificial Sequence: Synthetic peptide
  Seed: AFEDLRVSSF
AYEDLRVSSI

SEQ ID NO: 32571 - protein, 10 aa, Artificial Sequence
  Description of Artificial Sequence: Synthetic peptide
  Seed: AFEDLRVSSF
AYEDLRVSSL

SEQ ID NO: 32572 - protein, 10 aa, Artificial Sequence
  Description of Artificial Sequence: Synthetic peptide
  Seed: AFEDLRVSSF
AYEDLRVSSM

SEQ ID NO: 32573 - protein, 10 aa, Artificial Sequence
  Description of Artificial Sequence: Synthetic peptide
  Seed: AFEDLRVSSF
AYEDLRVSSF

SEQ ID NO: 32574 - protein, 10 aa, Artificial Sequence
  Description of Artificial Sequence: Synthetic peptide
  Seed: AFEDLRVSSF
AYEDLRVSSW

SEQ ID NO: 32575 - protein, 10 aa, Artificial Sequence
  Description of Artificial Sequence: Synthetic peptide
  Seed: AFEDLRVSSF
ASEDLRVSSF

SEQ ID NO: 32576 - protein, 10 aa, Artificial Sequence
  Description of Artificial Sequence: Synthetic peptide
  Seed: AFEDLRVSSF
ASEDLRVSSM

SEQ ID NO: 32577 - protein, 10 aa, Artificial Sequence
  Description of Artificial Sequence: Synthetic peptide
  Seed: AFEDLRVSSF
ASEDLRVSSL

SEQ ID NO: 32578 - protein, 10 aa, Artificial Sequence
  Description of Artificial Sequence: Synthetic peptide
  Seed: AFEDLRVSSF
ASEDLRVSSI

SEQ ID NO: 32579 - protein, 10 aa, Artificial Sequence
  Description of Artificial Sequence: Synthetic peptide
  Seed: AFEDLRVSSF
AMEDLRVSSI

SEQ ID NO: 32580 - protein, 10 aa, Artificial Sequence
  Description of Artificial Sequence: Synthetic peptide
  Seed: AFEDLRVSSF
AMEDLRVSSL

SEQ ID NO: 32581 - protein, 10 aa, Artificial Sequence
  Description of Artificial Sequence: Synthetic peptide
  Seed: AFEDLRVSSF
AMEDLRVSSM

SEQ ID NO: 32582 - protein, 10 aa, Artificial Sequence
  Description of Artificial Sequence: Synthetic peptide
  Seed: AFEDLRVSSF
AMEDLRVSSF

SEQ ID NO: 32583 - protein, 10 aa, Artificial Sequence
  Description of Artificial Sequence: Synthetic peptide
  Seed: AFEDLRVSSF
AMEDLRVSSW

SEQ ID NO: 32584 - protein, 10 aa, Artificial Sequence
  Description of Artificial Sequence: Synthetic peptide
  Seed: AFEDLRVSSF
AMEDLRVSSY

SEQ ID NO: 32585 - protein, 10 aa, Artificial Sequence
  Description of Artificial Sequence: Synthetic peptide
  Seed: AFEDLRVSSF
AMEDLRVSSV

SEQ ID NO: 32586 - protein, 10 aa, Artificial Sequence
  Description of Artificial Sequence: Synthetic peptide
  Seed: AFEDLRVSSF
AFEDLRVSSI

SEQ ID NO: 32587 - protein, 10 aa, Artificial Sequence
  Description of Artificial Sequence: Synthetic peptide
  Seed: AFEDLRVSSF
AFEDLRVSSL

SEQ ID NO: 32588 - protein, 10 aa, Artificial Sequence
  Description of Artificial Sequence: Synthetic peptide
  Seed: AFEDLRVSSF
AFEDLRVSSM

SEQ ID NO: 32589 - protein, 10 aa, Artificial Sequence
  Description of Artificial Sequence: Synthetic peptide
  Seed: AFEDLRVSSF
AFEDLRVSSW

SEQ ID NO: 32590 - protein, 10 aa, Artificial Sequence
  Description of Artificial Sequence: Synthetic peptide
  Seed: AFEDLRVSSF
AFEDLRVSSY

SEQ ID NO: 32591 - protein, 10 aa, Artificial Sequence
  Description of Artificial Sequence: Synthetic peptide
  Seed: AFEDLRVSSF
AFEDLRVSSV

SEQ ID NO: 32592 - protein, 10 aa, Artificial Sequence
  Description of Artificial Sequence: Synthetic peptide
  Seed: AFEDLRVSSF
APEDLRVSSI

SEQ ID NO: 32593 - protein, 10 aa, Artificial Sequence
  Description of Artificial Sequence: Synthetic peptide
  Seed: AFEDLRVSSF
APEDLRVSSL

SEQ ID NO: 32594 - protein, 10 aa, Artificial Sequence
  Description of Artificial Sequence: Synthetic peptide
  Seed: AFEDLRVSSF
APEDLRVSSM

SEQ ID NO: 32595 - protein, 10 aa, Artificial Sequence
  Description of Artificial Sequence: Synthetic peptide
  Seed: AFEDLRVSSF
APEDLRVSSF

SEQ ID NO: 32596 - protein, 10 aa, Artificial Sequence
  Description of Artificial Sequence: Synthetic peptide
  Seed: AFEDLRVSSF
APEDLRVSSW

SEQ ID NO: 32597 - protein, 10 aa, Artificial Sequence
  Description of Artificial Sequence: Synthetic peptide
  Seed: AFEDLRVSSF
APEDLRVSSY

SEQ ID NO: 32598 - protein, 10 aa, Artificial Sequence
  Description of Artificial Sequence: Synthetic peptide
  Seed: AFEDLRVSSF
ACEDLRVSSM

SEQ ID NO: 32599 - protein, 10 aa, Artificial Sequence
  Description of Artificial Sequence: Synthetic peptide
  Seed: AFEDLRVSSF
ACEDLRVSSL

SEQ ID NO: 32600 - protein, 10 aa, Artificial Sequence
  Description of Artificial Sequence: Synthetic peptide
  Seed: AFEDLRVSSF
ACEDLRVSSI

SEQ ID NO: 32601 - protein, 10 aa, Artificial Sequence
  Description of Artificial Sequence: Synthetic peptide
  Seed: AFEDLRLLSF
ASEDLRLLSM

SEQ ID NO: 32602 - protein, 10 aa, Artificial Sequence
  Description of Artificial Sequence: Synthetic peptide
  Seed: AFEDLRLLSF
APEDLRLLSI

SEQ ID NO: 32603 - protein, 10 aa, Artificial Sequence
  Description of Artificial Sequence: Synthetic peptide
  Seed: AFEDLRLLSF
APEDLRLLSL

SEQ ID NO: 32604 - protein, 10 aa, Artificial Sequence
  Description of Artificial Sequence: Synthetic peptide
  Seed: AFEDLRLLSF
APEDLRLLSM

SEQ ID NO: 32605 - protein, 10 aa, Artificial Sequence
  Description of Artificial Sequence: Synthetic peptide
  Seed: AFEDLRLLSF
APEDLRLLSF

SEQ ID NO: 32606 - protein, 10 aa, Artificial Sequence
  Description of Artificial Sequence: Synthetic peptide
  Seed: AFEDLRLLSF
APEDLRLLSW

SEQ ID NO: 32607 - protein, 10 aa, Artificial Sequence
  Description of Artificial Sequence: Synthetic peptide
  Seed: AFEDLRLLSF
APEDLRLLSY

SEQ ID NO: 32608 - protein, 10 aa, Artificial Sequence
  Description of Artificial Sequence: Synthetic peptide
  Seed: AFEDLRLLSF
APEDLRLLSV

SEQ ID NO: 32609 - protein, 10 aa, Artificial Sequence
  Description of Artificial Sequence: Synthetic peptide
  Seed: AFEDLRLLSF
ASEDLRLLSI

SEQ ID NO: 32610 - protein, 10 aa, Artificial Sequence
  Description of Artificial Sequence: Synthetic peptide
  Seed: AFEDLRLLSF
ASEDLRLLSL

SEQ ID NO: 32611 - protein, 10 aa, Artificial Sequence
  Description of Artificial Sequence: Synthetic peptide
  Seed: AFEDLRLLSF
ASEDLRLLSF

SEQ ID NO: 32612 - protein, 10 aa, Artificial Sequence
  Description of Artificial Sequence: Synthetic peptide
  Seed: AFEDLRVSSF
ADEDLRVSSY

SEQ ID NO: 32613 - protein, 10 aa, Artificial Sequence
  Description of Artificial Sequence: Synthetic peptide
  Seed: AFEDLRLLSF
ASEDLRLLSW

SEQ ID NO: 32614 - protein, 10 aa, Artificial Sequence
  Description of Artificial Sequence: Synthetic peptide
  Seed: AFEDLRLLSF
ASEDLRLLSY

SEQ ID NO: 32615 - protein, 10 aa, Artificial Sequence
  Description of Artificial Sequence: Synthetic peptide
  Seed: AFEDLRLLSF
ASEDLRLLSV

SEQ ID NO: 32616 - protein, 10 aa, Artificial Sequence
  Description of Artificial Sequence: Synthetic peptide
  Seed: AFEDLRLLSF
ATEDLRLLSI

SEQ ID NO: 32617 - protein, 10 aa, Artificial Sequence
  Description of Artificial Sequence: Synthetic peptide
  Seed: AFEDLRLLSF
ATEDLRLLSL

SEQ ID NO: 32618 - protein, 10 aa, Artificial Sequence
  Description of Artificial Sequence: Synthetic peptide
  Seed: AFEDLRLLSF
ATEDLRLLSM

SEQ ID NO: 32619 - protein, 10 aa, Artificial Sequence
  Description of Artificial Sequence: Synthetic peptide
  Seed: AFEDLRLLSF
ATEDLRLLSF

SEQ ID NO: 32620 - protein, 10 aa, Artificial Sequence
  Description of Artificial Sequence: Synthetic peptide
  Seed: AFEDLRLLSF
ATEDLRLLSW

SEQ ID NO: 32621 - protein, 10 aa, Artificial Sequence
  Description of Artificial Sequence: Synthetic peptide
  Seed: AFEDLRLLSF
ATEDLRLLSY

SEQ ID NO: 32622 - protein, 10 aa, Artificial Sequence
  Description of Artificial Sequence: Synthetic peptide
  Seed: AFEDLRLLSF
AFEDLRLLSV

SEQ ID NO: 32623 - protein, 10 aa, Artificial Sequence
  Description of Artificial Sequence: Synthetic peptide
  Seed: AFEDLRLLSF
AFEDLRLLSY

SEQ ID NO: 32624 - protein, 10 aa, Artificial Sequence
  Description of Artificial Sequence: Synthetic peptide
  Seed: AFEDLRLLSF
AFEDLRLLSW

SEQ ID NO: 32625 - protein, 10 aa, Artificial Sequence
  Description of Artificial Sequence: Synthetic peptide
  Seed: AFEDLRLLSF
AFEDLRLLSM

SEQ ID NO: 32626 - protein, 10 aa, Artificial Sequence
  Description of Artificial Sequence: Synthetic peptide
  Seed: AFEDLRLLSF
ALEDLRLLSW

SEQ ID NO: 32627 - protein, 10 aa, Artificial Sequence
  Description of Artificial Sequence: Synthetic peptide
  Seed: AFEDLRLLSF
ALEDLRLLSY

SEQ ID NO: 32628 - protein, 10 aa, Artificial Sequence
  Description of Artificial Sequence: Synthetic peptide
  Seed: AFEDLRLLSF
ALEDLRLLSV

SEQ ID NO: 32629 - protein, 10 aa, Artificial Sequence
  Description of Artificial Sequence: Synthetic peptide
  Seed: AFEDLRLLSF
AKEDLRLLSI

SEQ ID NO: 32630 - protein, 10 aa, Artificial Sequence
  Description of Artificial Sequence: Synthetic peptide
  Seed: AFEDLRLLSF
AKEDLRLLSL

SEQ ID NO: 32631 - protein, 10 aa, Artificial Sequence
  Description of Artificial Sequence: Synthetic peptide
  Seed: AFEDLRLLSF
AKEDLRLLSM

SEQ ID NO: 32632 - protein, 10 aa, Artificial Sequence
  Description of Artificial Sequence: Synthetic peptide
  Seed: AFEDLRLLSF
AKEDLRLLSF

SEQ ID NO: 32633 - protein, 10 aa, Artificial Sequence
  Description of Artificial Sequence: Synthetic peptide
  Seed: AFEDLRLLSF
AKEDLRLLSW

SEQ ID NO: 32634 - protein, 10 aa, Artificial Sequence
  Description of Artificial Sequence: Synthetic peptide
  Seed: AFEDLRLLSF
AKEDLRLLSY

SEQ ID NO: 32635 - protein, 10 aa, Artificial Sequence
  Description of Artificial Sequence: Synthetic peptide
  Seed: AFEDLRLLSF
AKEDLRLLSV

SEQ ID NO: 32636 - protein, 10 aa, Artificial Sequence
  Description of Artificial Sequence: Synthetic peptide
  Seed: AFEDLRLLSF
AMEDLRLLSI

SEQ ID NO: 32637 - protein, 10 aa, Artificial Sequence
  Description of Artificial Sequence: Synthetic peptide
  Seed: AFEDLRLLSF
AMEDLRLLSL

SEQ ID NO: 32638 - protein, 10 aa, Artificial Sequence
  Description of Artificial Sequence: Synthetic peptide
  Seed: AFEDLRLLSF
AMEDLRLLSM

SEQ ID NO: 32639 - protein, 10 aa, Artificial Sequence
  Description of Artificial Sequence: Synthetic peptide
  Seed: AFEDLRLLSF
AMEDLRLLSF

SEQ ID NO: 32640 - protein, 10 aa, Artificial Sequence
  Description of Artificial Sequence: Synthetic peptide
  Seed: AFEDLRLLSF
AMEDLRLLSW

SEQ ID NO: 32641 - protein, 10 aa, Artificial Sequence
  Description of Artificial Sequence: Synthetic peptide
  Seed: AFEDLRLLSF
AMEDLRLLSY

SEQ ID NO: 32642 - protein, 10 aa, Artificial Sequence
  Description of Artificial Sequence: Synthetic peptide
  Seed: AFEDLRLLSF
AMEDLRLLSV

SEQ ID NO: 32643 - protein, 10 aa, Artificial Sequence
  Description of Artificial Sequence: Synthetic peptide
  Seed: AFEDLRLLSF
AFEDLRLLSI

SEQ ID NO: 32644 - protein, 10 aa, Artificial Sequence
  Description of Artificial Sequence: Synthetic peptide
  Seed: AFEDLRLLSF
AFEDLRLLSL

SEQ ID NO: 32645 - protein, 10 aa, Artificial Sequence
  Description of Artificial Sequence: Synthetic peptide
  Seed: AFEDLRLLSF
ATEDLRLLSV

SEQ ID NO: 32646 - protein, 10 aa, Artificial Sequence
  Description of Artificial Sequence: Synthetic peptide
  Seed: AFEDLRLLSF
AWEDLRLLSI

SEQ ID NO: 32647 - protein, 10 aa, Artificial Sequence
  Description of Artificial Sequence: Synthetic peptide
  Seed: AFEDLRLLSF
AWEDLRLLSL

SEQ ID NO: 32648 - protein, 10 aa, Artificial Sequence
  Description of Artificial Sequence: Synthetic peptide
  Seed: AFEDLRVSSF
AAEDLRVSSF

SEQ ID NO: 32649 - protein, 10 aa, Artificial Sequence
  Description of Artificial Sequence: Synthetic peptide
  Seed: AFEDLRVSSF
AAEDLRVSSY

SEQ ID NO: 32650 - protein, 10 aa, Artificial Sequence
  Description of Artificial Sequence: Synthetic peptide
  Seed: AFEDLRVSSF
AREDLRVSSI

SEQ ID NO: 32651 - protein, 10 aa, Artificial Sequence
  Description of Artificial Sequence: Synthetic peptide
  Seed: AFEDLRVSSF
AREDLRVSSL

SEQ ID NO: 32652 - protein, 10 aa, Artificial Sequence
  Description of Artificial Sequence: Synthetic peptide
  Seed: AFEDLRVSSF
AREDLRVSSM

SEQ ID NO: 32653 - protein, 10 aa, Artificial Sequence
  Description of Artificial Sequence: Synthetic peptide
  Seed: AFEDLRVSSF
AREDLRVSSF

SEQ ID NO: 32654 - protein, 10 aa, Artificial Sequence
  Description of Artificial Sequence: Synthetic peptide
  Seed: AFEDLRVSSF
AREDLRVSSW

SEQ ID NO: 32655 - protein, 10 aa, Artificial Sequence
  Description of Artificial Sequence: Synthetic peptide
  Seed: AFEDLRVSSF
AREDLRVSSY

SEQ ID NO: 32656 - protein, 10 aa, Artificial Sequence
  Description of Artificial Sequence: Synthetic peptide
  Seed: AFEDLRVSSF
AREDLRVSSV

SEQ ID NO: 32657 - protein, 10 aa, Artificial Sequence
  Description of Artificial Sequence: Synthetic peptide
  Seed: AFEDLRVSSF
ANEDLRVSSI

SEQ ID NO: 32658 - protein, 10 aa, Artificial Sequence
  Description of Artificial Sequence: Synthetic peptide
  Seed: AFEDLRVSSF
ANEDLRVSSL

SEQ ID NO: 32659 - protein, 10 aa, Artificial Sequence
  Description of Artificial Sequence: Synthetic peptide
  Seed: AFEDLRVSSF
ANEDLRVSSM

SEQ ID NO: 32660 - protein, 10 aa, Artificial Sequence
  Description of Artificial Sequence: Synthetic peptide
  Seed: AFEDLRVSSF
ANEDLRVSSF

SEQ ID NO: 32661 - protein, 10 aa, Artificial Sequence
  Description of Artificial Sequence: Synthetic peptide
  Seed: AFEDLRVSSF
ANEDLRVSSW

SEQ ID NO: 32662 - protein, 10 aa, Artificial Sequence
  Description of Artificial Sequence: Synthetic peptide
  Seed: AFEDLRVSSF
ANEDLRVSSY

SEQ ID NO: 32663 - protein, 10 aa, Artificial Sequence
  Description of Artificial Sequence: Synthetic peptide
  Seed: AFEDLRVSSF
ADEDLRVSSI

SEQ ID NO: 32664 - protein, 10 aa, Artificial Sequence
  Description of Artificial Sequence: Synthetic peptide
  Seed: AFEDLRVSSF
ADEDLRVSSL

SEQ ID NO: 32665 - protein, 10 aa, Artificial Sequence
  Description of Artificial Sequence: Synthetic peptide
  Seed: AFEDLRVSSF
ADEDLRVSSM

SEQ ID NO: 32666 - protein, 10 aa, Artificial Sequence
  Description of Artificial Sequence: Synthetic peptide
  Seed: AFEDLRVSSF
ADEDLRVSSF

SEQ ID NO: 32667 - protein, 10 aa, Artificial Sequence
  Description of Artificial Sequence: Synthetic peptide
  Seed: AFEDLRVSSF
ADEDLRVSSW

SEQ ID NO: 32668 - protein, 10 aa, Artificial Sequence
  Description of Artificial Sequence: Synthetic peptide
  Seed: AFEDLRVSSF
AAEDLRVSSW

SEQ ID NO: 32669 - protein, 10 aa, Artificial Sequence
  Description of Artificial Sequence: Synthetic peptide
  Seed: AFEDLRVSSF
AAEDLRVSSM

SEQ ID NO: 32670 - protein, 10 aa, Artificial Sequence
  Description of Artificial Sequence: Synthetic peptide
  Seed: AFEDLRLLSF
AWEDLRLLSM

SEQ ID NO: 32671 - protein, 10 aa, Artificial Sequence
  Description of Artificial Sequence: Synthetic peptide
  Seed: AFEDLRVSSF
AAEDLRVSSL

SEQ ID NO: 32672 - protein, 10 aa, Artificial Sequence
  Description of Artificial Sequence: Synthetic peptide
  Seed: AFEDLRLLSF
AWEDLRLLSF

SEQ ID NO: 32673 - protein, 10 aa, Artificial Sequence
  Description of Artificial Sequence: Synthetic peptide
  Seed: AFEDLRLLSF
AWEDLRLLSW

SEQ ID NO: 32674 - protein, 10 aa, Artificial Sequence
  Description of Artificial Sequence: Synthetic peptide
  Seed: AFEDLRLLSF
AWEDLRLLSY

SEQ ID NO: 32675 - protein, 10 aa, Artificial Sequence
  Description of Artificial Sequence: Synthetic peptide
  Seed: AFEDLRLLSF
AWEDLRLLSV

SEQ ID NO: 32676 - protein, 10 aa, Artificial Sequence
  Description of Artificial Sequence: Synthetic peptide
  Seed: AFEDLRLLSF
AYEDLRLLSI

SEQ ID NO: 32677 - protein, 10 aa, Artificial Sequence
  Description of Artificial Sequence: Synthetic peptide
  Seed: AFEDLRLLSF
AYEDLRLLSL

SEQ ID NO: 32678 - protein, 10 aa, Artificial Sequence
  Description of Artificial Sequence: Synthetic peptide
  Seed: AFEDLRLLSF
AYEDLRLLSM

SEQ ID NO: 32679 - protein, 10 aa, Artificial Sequence
  Description of Artificial Sequence: Synthetic peptide
  Seed: AFEDLRLLSF
AYEDLRLLSF

SEQ ID NO: 32680 - protein, 10 aa, Artificial Sequence
  Description of Artificial Sequence: Synthetic peptide
  Seed: AFEDLRLLSF
AYEDLRLLSW

SEQ ID NO: 32681 - protein, 10 aa, Artificial Sequence
  Description of Artificial Sequence: Synthetic peptide
  Seed: AFEDLRLLSF
AYEDLRLLSY

SEQ ID NO: 32682 - protein, 10 aa, Artificial Sequence
  Description of Artificial Sequence: Synthetic peptide
  Seed: AFEDLRLLSF
AYEDLRLLSV

SEQ ID NO: 32683 - protein, 10 aa, Artificial Sequence
  Description of Artificial Sequence: Synthetic peptide
  Seed: AFEDLRLLSF
AVEDLRLLSI

SEQ ID NO: 32684 - protein, 10 aa, Artificial Sequence
  Description of Artificial Sequence: Synthetic peptide
  Seed: AFEDLRLLSF
AVEDLRLLSL

SEQ ID NO: 32685 - protein, 10 aa, Artificial Sequence
  Description of Artificial Sequence: Synthetic peptide
  Seed: AFEDLRLLSF
AVEDLRLLSM

SEQ ID NO: 32686 - protein, 10 aa, Artificial Sequence
  Description of Artificial Sequence: Synthetic peptide
  Seed: AFEDLRLLSF
AVEDLRLLSF

SEQ ID NO: 32687 - protein, 10 aa, Artificial Sequence
  Description of Artificial Sequence: Synthetic peptide
  Seed: AFEDLRLLSF
AVEDLRLLSW

SEQ ID NO: 32688 - protein, 10 aa, Artificial Sequence
  Description of Artificial Sequence: Synthetic peptide
  Seed: AFEDLRLLSF
AVEDLRLLSY

SEQ ID NO: 32689 - protein, 10 aa, Artificial Sequence
  Description of Artificial Sequence: Synthetic peptide
  Seed: AFEDLRLLSF
AVEDLRLLSV

SEQ ID NO: 32690 - protein, 10 aa, Artificial Sequence
  Description of Artificial Sequence: Synthetic peptide
  Seed: AFEDLRVSSF
AAEDLRVSSI

SEQ ID NO: 32691 - protein, 9 aa, Artificial Sequence
  Description of Artificial Sequence: Synthetic peptide
  Seed: AAVKGVGTM
ASVKGVGTY

SEQ ID NO: 32692 - protein, 9 aa, Artificial Sequence
  Description of Artificial Sequence: Synthetic peptide
  Seed: AAVKGVGTM
ASVKGVGTW

SEQ ID NO: 32693 - protein, 9 aa, Artificial Sequence
  Description of Artificial Sequence: Synthetic peptide
  Seed: AAVKGVGTM
ASVKGVGTF

SEQ ID NO: 32694 - protein, 11 aa, Artificial Sequence
  Description of Artificial Sequence: Synthetic peptide
  Seed: AAFEDLRLLSF
ATFEDLRLLSY

SEQ ID NO: 32695 - protein, 11 aa, Artificial Sequence
  Description of Artificial Sequence: Synthetic peptide
  Seed: AAFEDLRLLSF
ASFEDLRLLSM

SEQ ID NO: 32696 - protein, 11 aa, Artificial Sequence
  Description of Artificial Sequence: Synthetic peptide
  Seed: AAFEDLRLLSF
ASFEDLRLLSF

SEQ ID NO: 32697 - protein, 11 aa, Artificial Sequence
  Description of Artificial Sequence: Synthetic peptide
  Seed: AAFEDLRLLSF
ASFEDLRLLSW

SEQ ID NO: 32698 - protein, 11 aa, Artificial Sequence
  Description of Artificial Sequence: Synthetic peptide
  Seed: AAFEDLRLLSF
ASFEDLRLLSY

SEQ ID NO: 32699 - protein, 11 aa, Artificial Sequence
  Description of Artificial Sequence: Synthetic peptide
  Seed: AAFEDLRLLSF
ATFEDLRLLSI

SEQ ID NO: 32700 - protein, 11 aa, Artificial Sequence
  Description of Artificial Sequence: Synthetic peptide
  Seed: AAFEDLRLLSF
ATFEDLRLLSL

SEQ ID NO: 32701 - protein, 11 aa, Artificial Sequence
  Description of Artificial Sequence: Synthetic peptide
  Seed: AAFEDLRLLSF
ATFEDLRLLSM

SEQ ID NO: 32702 - protein, 11 aa, Artificial Sequence
  Description of Artificial Sequence: Synthetic peptide
  Seed: AAFEDLRLLSF
ATFEDLRLLSF

SEQ ID NO: 32703 - protein, 11 aa, Artificial Sequence
  Description of Artificial Sequence: Synthetic peptide
  Seed: AAFEDLRLLSF
ATFEDLRLLSW

SEQ ID NO: 32704 - protein, 11 aa, Artificial Sequence
  Description of Artificial Sequence: Synthetic peptide
  Seed: AAFEDLRLLSF
AVFEDLRLLSF

SEQ ID NO: 32705 - protein, 11 aa, Artificial Sequence
  Description of Artificial Sequence: Synthetic peptide
  Seed: AAFEDLRVSSF
AQFEDLRVSSM

SEQ ID NO: 32706 - protein, 11 aa, Artificial Sequence
  Description of Artificial Sequence: Synthetic peptide
  Seed: AAFEDLRLLSF
AVFEDLRLLSW

SEQ ID NO: 32707 - protein, 11 aa, Artificial Sequence
  Description of Artificial Sequence: Synthetic peptide
  Seed: AAFEDLRLLSF
AVFEDLRLLSY

SEQ ID NO: 32708 - protein, 11 aa, Artificial Sequence
  Description of Artificial Sequence: Synthetic peptide
  Seed: AAFEDLRVSSF
AAFEDLRVSSM

SEQ ID NO: 32709 - protein, 11 aa, Artificial Sequence
  Description of Artificial Sequence: Synthetic peptide
  Seed: AAFEDLRVSSF
AAFEDLRVSSW

SEQ ID NO: 32710 - protein, 11 aa, Artificial Sequence
  Description of Artificial Sequence: Synthetic peptide
  Seed: AAFEDLRVSSF
AAFEDLRVSSY

SEQ ID NO: 32711 - protein, 11 aa, Artificial Sequence
  Description of Artificial Sequence: Synthetic peptide
  Seed: AAFEDLRVSSF
ARFEDLRVSSF

SEQ ID NO: 32712 - protein, 11 aa, Artificial Sequence
  Description of Artificial Sequence: Synthetic peptide
  Seed: AAFEDLRVSSF
ARFEDLRVSSY

SEQ ID NO: 32713 - protein, 11 aa, Artificial Sequence
  Description of Artificial Sequence: Synthetic peptide
  Seed: AAFEDLRVSSF
AQFEDLRVSSH

SEQ ID NO: 32714 - protein, 11 aa, Artificial Sequence
  Description of Artificial Sequence: Synthetic peptide
  Seed: AAFEDLRVSSF
AQFEDLRVSSI

SEQ ID NO: 32715 - protein, 11 aa, Artificial Sequence
  Description of Artificial Sequence: Synthetic peptide
  Seed: AAFEDLRLLSF
ASFEDLRLLSL

SEQ ID NO: 32716 - protein, 11 aa, Artificial Sequence
  Description of Artificial Sequence: Synthetic peptide
  Seed: AAFEDLRLLSF
ASFEDLRLLSI

SEQ ID NO: 32717 - protein, 11 aa, Artificial Sequence
  Description of Artificial Sequence: Synthetic peptide
  Seed: AAFEDLRLLSF
AMFEDLRLLSY

SEQ ID NO: 32718 - protein, 11 aa, Artificial Sequence
  Description of Artificial Sequence: Synthetic peptide
  Seed: AAFEDLRLLSF
AMFEDLRLLSW

SEQ ID NO: 32719 - protein, 11 aa, Artificial Sequence
  Description of Artificial Sequence: Synthetic peptide
  Seed: AAFEDLRLLSF
AQFEDLRLLSF

SEQ ID NO: 32720 - protein, 11 aa, Artificial Sequence
  Description of Artificial Sequence: Synthetic peptide
  Seed: AAFEDLRLLSF
AQFEDLRLLSW

SEQ ID NO: 32721 - protein, 11 aa, Artificial Sequence
  Description of Artificial Sequence: Synthetic peptide
  Seed: AAFEDLRLLSF
AQFEDLRLLSY

SEQ ID NO: 32722 - protein, 11 aa, Artificial Sequence
  Description of Artificial Sequence: Synthetic peptide
  Seed: AAFEDLRLLSF
AEFEDLRLLSF

SEQ ID NO: 32723 - protein, 11 aa, Artificial Sequence
  Description of Artificial Sequence: Synthetic peptide
  Seed: AAFEDLRLLSF
AEFEDLRLLSY

SEQ ID NO: 32724 - protein, 11 aa, Artificial Sequence
  Description of Artificial Sequence: Synthetic peptide
  Seed: AAFEDLRLLSF
AHFEDLRLLSF

SEQ ID NO: 32725 - protein, 11 aa, Artificial Sequence
  Description of Artificial Sequence: Synthetic peptide
  Seed: AAFEDLRLLSF
AHFEDLRLLSY

SEQ ID NO: 32726 - protein, 11 aa, Artificial Sequence
  Description of Artificial Sequence: Synthetic peptide
  Seed: AAFEDLRLLSF
AIFEDLRLLSF

SEQ ID NO: 32727 - protein, 11 aa, Artificial Sequence
  Description of Artificial Sequence: Synthetic peptide
  Seed: AAFEDLRLLSF
AIFEDLRLLSW

SEQ ID NO: 32728 - protein, 11 aa, Artificial Sequence
  Description of Artificial Sequence: Synthetic peptide
  Seed: AAFEDLRLLSF
AIFEDLRLLSY

SEQ ID NO: 32729 - protein, 11 aa, Artificial Sequence
  Description of Artificial Sequence: Synthetic peptide
  Seed: AAFEDLRLLSF
ALFEDLRLLSM

SEQ ID NO: 32730 - protein, 11 aa, Artificial Sequence
  Description of Artificial Sequence: Synthetic peptide
  Seed: AAFEDLRLLSF
ALFEDLRLLSF

SEQ ID NO: 32731 - protein, 11 aa, Artificial Sequence
  Description of Artificial Sequence: Synthetic peptide
  Seed: AAFEDLRLLSF
ALFEDLRLLSY

SEQ ID NO: 32732 - protein, 11 aa, Artificial Sequence
  Description of Artificial Sequence: Synthetic peptide
  Seed: AAFEDLRLLSF
AKFEDLRLLSM

SEQ ID NO: 32733 - protein, 11 aa, Artificial Sequence
  Description of Artificial Sequence: Synthetic peptide
  Seed: AAFEDLRLLSF
AKFEDLRLLSF

SEQ ID NO: 32734 - protein, 11 aa, Artificial Sequence
  Description of Artificial Sequence: Synthetic peptide
  Seed: AAFEDLRLLSF
AKFEDLRLLSY

SEQ ID NO: 32735 - protein, 11 aa, Artificial Sequence
  Description of Artificial Sequence: Synthetic peptide
  Seed: AAFEDLRLLSF
AMFEDLRLLSL

SEQ ID NO: 32736 - protein, 11 aa, Artificial Sequence
  Description of Artificial Sequence: Synthetic peptide
  Seed: AAFEDLRLLSF
AMFEDLRLLSM

SEQ ID NO: 32737 - protein, 11 aa, Artificial Sequence
  Description of Artificial Sequence: Synthetic peptide
  Seed: AAFEDLRLLSF
AMFEDLRLLSF

SEQ ID NO: 32738 - protein, 11 aa, Artificial Sequence
  Description of Artificial Sequence: Synthetic peptide
  Seed: AAFEDLRVSSF
AQFEDLRVSSL

SEQ ID NO: 32739 - protein, 11 aa, Artificial Sequence
  Description of Artificial Sequence: Synthetic peptide
  Seed: AAFEDLRVSSF
AQFEDLRVSSF

SEQ ID NO: 32740 - protein, 10 aa, Artificial Sequence
  Description of Artificial Sequence: Synthetic peptide
  Seed: AAFTGNAEGR
AFFTGNAEGR

SEQ ID NO: 32741 - protein, 11 aa, Artificial Sequence
  Description of Artificial Sequence: Synthetic peptide
  Seed: AAFEDLRVSSF
AVFEDLRVSSF

SEQ ID NO: 32742 - protein, 11 aa, Artificial Sequence
  Description of Artificial Sequence: Synthetic peptide
  Seed: AAFEDLRVSSF
ASFEDLRVSSF

SEQ ID NO: 32743 - protein, 11 aa, Artificial Sequence
  Description of Artificial Sequence: Synthetic peptide
  Seed: AAFEDLRVSSF
ASFEDLRVSSW

SEQ ID NO: 32744 - protein, 11 aa, Artificial Sequence
  Description of Artificial Sequence: Synthetic peptide
  Seed: AAFEDLRVSSF
ASFEDLRVSSY

SEQ ID NO: 32745 - protein, 11 aa, Artificial Sequence
  Description of Artificial Sequence: Synthetic peptide
  Seed: AAFEDLRVSSF
ATFEDLRVSSI

SEQ ID NO: 32746 - protein, 11 aa, Artificial Sequence
  Description of Artificial Sequence: Synthetic peptide
  Seed: AAFEDLRVSSF
ATFEDLRVSSL

SEQ ID NO: 32747 - protein, 11 aa, Artificial Sequence
  Description of Artificial Sequence: Synthetic peptide
  Seed: AAFEDLRVSSF
ATFEDLRVSSM

SEQ ID NO: 32748 - protein, 11 aa, Artificial Sequence
  Description of Artificial Sequence: Synthetic peptide
  Seed: AAFEDLRVSSF
ATFEDLRVSSF

SEQ ID NO: 32749 - protein, 11 aa, Artificial Sequence
  Description of Artificial Sequence: Synthetic peptide
  Seed: AAFEDLRVSSF
ATFEDLRVSSW

SEQ ID NO: 32750 - protein, 11 aa, Artificial Sequence
  Description of Artificial Sequence: Synthetic peptide
  Seed: AAFEDLRVSSF
ATFEDLRVSSY

SEQ ID NO: 32751 - protein, 11 aa, Artificial Sequence
  Description of Artificial Sequence: Synthetic peptide
  Seed: AAFEDLRVSSF
AVFEDLRVSSW

SEQ ID NO: 32752 - protein, 11 aa, Artificial Sequence
  Description of Artificial Sequence: Synthetic peptide
  Seed: AAFEDLRVSSF
AQFEDLRVSSW

SEQ ID NO: 32753 - protein, 11 aa, Artificial Sequence
  Description of Artificial Sequence: Synthetic peptide
  Seed: AAFEDLRVSSF
AVFEDLRVSSY

SEQ ID NO: 32754 - protein, 10 aa, Artificial Sequence
  Description of Artificial Sequence: Synthetic peptide
  Seed: AAFTGNAEGR
AAFTGNAEGK

SEQ ID NO: 32755 - protein, 10 aa, Artificial Sequence
  Description of Artificial Sequence: Synthetic peptide
  Seed: AAFTGNAEGR
ANFTGNAEGR

SEQ ID NO: 32756 - protein, 10 aa, Artificial Sequence
  Description of Artificial Sequence: Synthetic peptide
  Seed: AAFTGNAEGR
AQFTGNAEGR

SEQ ID NO: 32757 - protein, 10 aa, Artificial Sequence
  Description of Artificial Sequence: Synthetic peptide
  Seed: AAFTGNAEGR
AGFTGNAEGR

SEQ ID NO: 32758 - protein, 10 aa, Artificial Sequence
  Description of Artificial Sequence: Synthetic peptide
  Seed: AAFTGNAEGR
AIFTGNAEGR

SEQ ID NO: 32759 - protein, 10 aa, Artificial Sequence
  Description of Artificial Sequence: Synthetic peptide
  Seed: AAFTGNAEGR
AIFTGNAEGK

SEQ ID NO: 32760 - protein, 10 aa, Artificial Sequence
  Description of Artificial Sequence: Synthetic peptide
  Seed: AAFTGNAEGR
ALFTGNAEGR

SEQ ID NO: 32761 - protein, 10 aa, Artificial Sequence
  Description of Artificial Sequence: Synthetic peptide
  Seed: AAFTGNAEGR
AMFTGNAEGR

SEQ ID NO: 32762 - protein, 11 aa, Artificial Sequence
  Description of Artificial Sequence: Synthetic peptide
  Seed: AAFEDLRVSSF
ASFEDLRVSSM

SEQ ID NO: 32763 - protein, 11 aa, Artificial Sequence
  Description of Artificial Sequence: Synthetic peptide
  Seed: AAFEDLRVSSF
ASFEDLRVSSL

SEQ ID NO: 32764 - protein, 11 aa, Artificial Sequence
  Description of Artificial Sequence: Synthetic peptide
  Seed: AAFEDLRVSSF
ASFEDLRVSSI

SEQ ID NO: 32765 - protein, 11 aa, Artificial Sequence
  Description of Artificial Sequence: Synthetic peptide
  Seed: AAFEDLRVSSF
AMFEDLRVSSY

SEQ ID NO: 32766 - protein, 11 aa, Artificial Sequence
  Description of Artificial Sequence: Synthetic peptide
  Seed: AAFEDLRVSSF
AQFEDLRVSSY

SEQ ID NO: 32767 - protein, 11 aa, Artificial Sequence
  Description of Artificial Sequence: Synthetic peptide
  Seed: AAFEDLRVSSF
AEFEDLRVSSF

SEQ ID NO: 32768 - protein, 11 aa, Artificial Sequence
  Description of Artificial Sequence: Synthetic peptide
  Seed: AAFEDLRVSSF
AEFEDLRVSSY

SEQ ID NO: 32769 - protein, 11 aa, Artificial Sequence
  Description of Artificial Sequence: Synthetic peptide
  Seed: AAFEDLRVSSF
AHFEDLRVSSM

SEQ ID NO: 32770 - protein, 11 aa, Artificial Sequence
  Description of Artificial Sequence: Synthetic peptide
  Seed: AAFEDLRVSSF
AHFEDLRVSSF

SEQ ID NO: 32771 - protein, 11 aa, Artificial Sequence
  Description of Artificial Sequence: Synthetic peptide
  Seed: AAFEDLRVSSF
AHFEDLRVSSY

SEQ ID NO: 32772 - protein, 11 aa, Artificial Sequence
  Description of Artificial Sequence: Synthetic peptide
  Seed: AAFEDLRVSSF
AIFEDLRVSSF

SEQ ID NO: 32773 - protein, 11 aa, Artificial Sequence
  Description of Artificial Sequence: Synthetic peptide
  Seed: AAFEDLRVSSF
AIFEDLRVSSW

SEQ ID NO: 32774 - protein, 11 aa, Artificial Sequence
  Description of Artificial Sequence: Synthetic peptide
  Seed: AAFEDLRVSSF
AIFEDLRVSSY

SEQ ID NO: 32775 - protein, 11 aa, Artificial Sequence
  Description of Artificial Sequence: Synthetic peptide
  Seed: AAFEDLRVSSF
ALFEDLRVSSM

SEQ ID NO: 32776 - protein, 11 aa, Artificial Sequence
  Description of Artificial Sequence: Synthetic peptide
  Seed: AAFEDLRVSSF
ALFEDLRVSSF

SEQ ID NO: 32777 - protein, 11 aa, Artificial Sequence
  Description of Artificial Sequence: Synthetic peptide
  Seed: AAFEDLRVSSF
ALFEDLRVSSY

SEQ ID NO: 32778 - protein, 11 aa, Artificial Sequence
  Description of Artificial Sequence: Synthetic peptide
  Seed: AAFEDLRVSSF
AKFEDLRVSSM

SEQ ID NO: 32779 - protein, 11 aa, Artificial Sequence
  Description of Artificial Sequence: Synthetic peptide
  Seed: AAFEDLRVSSF
AKFEDLRVSSF

SEQ ID NO: 32780 - protein, 11 aa, Artificial Sequence
  Description of Artificial Sequence: Synthetic peptide
  Seed: AAFEDLRVSSF
AKFEDLRVSSY

SEQ ID NO: 32781 - protein, 11 aa, Artificial Sequence
  Description of Artificial Sequence: Synthetic peptide
  Seed: AAFEDLRVSSF
AMFEDLRVSSL

SEQ ID NO: 32782 - protein, 11 aa, Artificial Sequence
  Description of Artificial Sequence: Synthetic peptide
  Seed: AAFEDLRVSSF
AMFEDLRVSSM

SEQ ID NO: 32783 - protein, 11 aa, Artificial Sequence
  Description of Artificial Sequence: Synthetic peptide
  Seed: AAFEDLRVSSF
AMFEDLRVSSF

SEQ ID NO: 32784 - protein, 11 aa, Artificial Sequence
  Description of Artificial Sequence: Synthetic peptide
  Seed: AAFEDLRVSSF
AMFEDLRVSSW

SEQ ID NO: 32785 - protein, 11 aa, Artificial Sequence
  Description of Artificial Sequence: Synthetic peptide
  Seed: AAFEDLRLLSF
AQFEDLRLLSM

SEQ ID NO: 32786 - protein, 11 aa, Artificial Sequence
  Description of Artificial Sequence: Synthetic peptide
  Seed: AAFEDLRLLSF
AQFEDLRLLSL

SEQ ID NO: 32787 - protein, 11 aa, Artificial Sequence
  Description of Artificial Sequence: Synthetic peptide
  Seed: AAFEDLRLLSF
AQFEDLRLLSI

SEQ ID NO: 32788 - protein, 9 aa, Artificial Sequence
  Description of Artificial Sequence: Synthetic peptide
  Seed: AAFEDLRLL
AIFEDLRLF

SEQ ID NO: 32789 - protein, 9 aa, Artificial Sequence
  Description of Artificial Sequence: Synthetic peptide
  Seed: AAFEDLRLL
AEFEDLRLY

SEQ ID NO: 32790 - protein, 9 aa, Artificial Sequence
  Description of Artificial Sequence: Synthetic peptide
  Seed: AAFEDLRLL
AGFEDLRLF

SEQ ID NO: 32791 - protein, 9 aa, Artificial Sequence
  Description of Artificial Sequence: Synthetic peptide
  Seed: AAFEDLRLL
AGFEDLRLW

SEQ ID NO: 32792 - protein, 9 aa, Artificial Sequence
  Description of Artificial Sequence: Synthetic peptide
  Seed: AAFEDLRLL
AGFEDLRLY

SEQ ID NO: 32793 - protein, 9 aa, Artificial Sequence
  Description of Artificial Sequence: Synthetic peptide
  Seed: AAFEDLRLL
AHFEDLRLL

SEQ ID NO: 32794 - protein, 9 aa, Artificial Sequence
  Description of Artificial Sequence: Synthetic peptide
  Seed: AAFEDLRLL
AHFEDLRLM

SEQ ID NO: 32795 - protein, 9 aa, Artificial Sequence
  Description of Artificial Sequence: Synthetic peptide
  Seed: AAFEDLRLL
AHFEDLRLF

SEQ ID NO: 32796 - protein, 9 aa, Artificial Sequence
  Description of Artificial Sequence: Synthetic peptide
  Seed: AAFEDLRLL
AHFEDLRLY

SEQ ID NO: 32797 - protein, 9 aa, Artificial Sequence
  Description of Artificial Sequence: Synthetic peptide
  Seed: AAFEDLRLL
AIFEDLRLM

SEQ ID NO: 32798 - protein, 9 aa, Artificial Sequence
  Description of Artificial Sequence: Synthetic peptide
  Seed: AAFEDLRLL
AIFEDLRLW

SEQ ID NO: 32799 - protein, 11 aa, Artificial Sequence
  Description of Artificial Sequence: Synthetic peptide
  Seed: AAFEDLRLLSF
AQFEDLRLLSH

SEQ ID NO: 32800 - protein, 9 aa, Artificial Sequence
  Description of Artificial Sequence: Synthetic peptide
  Seed: AAFEDLRLL
AIFEDLRLY

SEQ ID NO: 32801 - protein, 9 aa, Artificial Sequence
  Description of Artificial Sequence: Synthetic peptide
  Seed: AAFEDLRLL
AIFEDLRLV

SEQ ID NO: 32802 - protein, 9 aa, Artificial Sequence
  Description of Artificial Sequence: Synthetic peptide
  Seed: AAFEDLRLL
ALFEDLRLM

SEQ ID NO: 32803 - protein, 9 aa, Artificial Sequence
  Description of Artificial Sequence: Synthetic peptide
  Seed: AAFEDLRLL
ALFEDLRLF

SEQ ID NO: 32804 - protein, 9 aa, Artificial Sequence
  Description of Artificial Sequence: Synthetic peptide
  Seed: AAFEDLRLL
ALFEDLRLW

SEQ ID NO: 32805 - protein, 9 aa, Artificial Sequence
  Description of Artificial Sequence: Synthetic peptide
  Seed: AAFEDLRLL
ALFEDLRLY

SEQ ID NO: 32806 - protein, 9 aa, Artificial Sequence
  Description of Artificial Sequence: Synthetic peptide
  Seed: AAFEDLRLL
AKFEDLRLI

SEQ ID NO: 32807 - protein, 9 aa, Artificial Sequence
  Description of Artificial Sequence: Synthetic peptide
  Seed: AAFEDLRLL
AKFEDLRLL

SEQ ID NO: 32808 - protein, 9 aa, Artificial Sequence
  Description of Artificial Sequence: Synthetic peptide
  Seed: AAFEDLRLL
AKFEDLRLM

SEQ ID NO: 32809 - protein, 9 aa, Artificial Sequence
  Description of Artificial Sequence: Synthetic peptide
  Seed: AAFEDLRLL
AEFEDLRLF

SEQ ID NO: 32810 - protein, 9 aa, Artificial Sequence
  Description of Artificial Sequence: Synthetic peptide
  Seed: AAFEDLRLL
AEFEDLRLM

SEQ ID NO: 32811 - protein, 9 aa, Artificial Sequence
  Description of Artificial Sequence: Synthetic peptide
  Seed: AAFEDLRLL
AQFEDLRLV

SEQ ID NO: 32812 - protein, 9 aa, Artificial Sequence
  Description of Artificial Sequence: Synthetic peptide
  Seed: AAFEDLRLL
AQFEDLRLY

SEQ ID NO: 32813 - protein, 9 aa, Artificial Sequence
  Description of Artificial Sequence: Synthetic peptide
  Seed: AAFEDLRLL
AAFEDLRLM

SEQ ID NO: 32814 - protein, 9 aa, Artificial Sequence
  Description of Artificial Sequence: Synthetic peptide
  Seed: AAFEDLRLL
AAFEDLRLW

SEQ ID NO: 32815 - protein, 9 aa, Artificial Sequence
  Description of Artificial Sequence: Synthetic peptide
  Seed: AAFEDLRLL
AAFEDLRLY

SEQ ID NO: 32816 - protein, 9 aa, Artificial Sequence
  Description of Artificial Sequence: Synthetic peptide
  Seed: AAFEDLRLL
AAFEDLRLV

SEQ ID NO: 32817 - protein, 9 aa, Artificial Sequence
  Description of Artificial Sequence: Synthetic peptide
  Seed: AAFEDLRLL
ARFEDLRLM

SEQ ID NO: 32818 - protein, 9 aa, Artificial Sequence
  Description of Artificial Sequence: Synthetic peptide
  Seed: AAFEDLRLL
ARFEDLRLF

SEQ ID NO: 32819 - protein, 9 aa, Artificial Sequence
  Description of Artificial Sequence: Synthetic peptide
  Seed: AAFEDLRLL
ARFEDLRLY

SEQ ID NO: 32820 - protein, 9 aa, Artificial Sequence
  Description of Artificial Sequence: Synthetic peptide
  Seed: AAFEDLRLL
ANFEDLRLF

SEQ ID NO: 32821 - protein, 9 aa, Artificial Sequence
  Description of Artificial Sequence: Synthetic peptide
  Seed: AAFEDLRLL
ANFEDLRLW

SEQ ID NO: 32822 - protein, 9 aa, Artificial Sequence
  Description of Artificial Sequence: Synthetic peptide
  Seed: AAFEDLRLL
ANFEDLRLY

SEQ ID NO: 32823 - protein, 9 aa, Artificial Sequence
  Description of Artificial Sequence: Synthetic peptide
  Seed: AAFEDLRLL
ACFEDLRLW

SEQ ID NO: 32824 - protein, 9 aa, Artificial Sequence
  Description of Artificial Sequence: Synthetic peptide
  Seed: AAFEDLRLL
AQFEDLRLA

SEQ ID NO: 32825 - protein, 9 aa, Artificial Sequence
  Description of Artificial Sequence: Synthetic peptide
  Seed: AAFEDLRLL
AQFEDLRLH

SEQ ID NO: 32826 - protein, 9 aa, Artificial Sequence
  Description of Artificial Sequence: Synthetic peptide
  Seed: AAFEDLRLL
AQFEDLRLI

SEQ ID NO: 32827 - protein, 9 aa, Artificial Sequence
  Description of Artificial Sequence: Synthetic peptide
  Seed: AAFEDLRLL
AQFEDLRLL

SEQ ID NO: 32828 - protein, 9 aa, Artificial Sequence
  Description of Artificial Sequence: Synthetic peptide
  Seed: AAFEDLRLL
AQFEDLRLM

SEQ ID NO: 32829 - protein, 9 aa, Artificial Sequence
  Description of Artificial Sequence: Synthetic peptide
  Seed: AAFEDLRLL
AQFEDLRLF

SEQ ID NO: 32830 - protein, 9 aa, Artificial Sequence
  Description of Artificial Sequence: Synthetic peptide
  Seed: AAFEDLRLL
AQFEDLRLW

SEQ ID NO: 32831 - protein, 9 aa, Artificial Sequence
  Description of Artificial Sequence: Synthetic peptide
  Seed: AAFEDLRLL
AKFEDLRLF

SEQ ID NO: 32832 - protein, 9 aa, Artificial Sequence
  Description of Artificial Sequence: Synthetic peptide
  Seed: AAFEDLRLL
AKFEDLRLY

SEQ ID NO: 32833 - protein, 9 aa, Artificial Sequence
  Description of Artificial Sequence: Synthetic peptide
  Seed: AAFEDLRLL
AMFEDLRLA

SEQ ID NO: 32834 - protein, 9 aa, Artificial Sequence
  Description of Artificial Sequence: Synthetic peptide
  Seed: AAFEDLRLL
ATFEDLRLL

SEQ ID NO: 32835 - protein, 9 aa, Artificial Sequence
  Description of Artificial Sequence: Synthetic peptide
  Seed: AAFEDLRLL
ATFEDLRLF

SEQ ID NO: 32836 - protein, 9 aa, Artificial Sequence
  Description of Artificial Sequence: Synthetic peptide
  Seed: AAFEDLRLL
ATFEDLRLW

SEQ ID NO: 32837 - protein, 9 aa, Artificial Sequence
  Description of Artificial Sequence: Synthetic peptide
  Seed: AAFEDLRLL
ATFEDLRLY

SEQ ID NO: 32838 - protein, 9 aa, Artificial Sequence
  Description of Artificial Sequence: Synthetic peptide
  Seed: AAFEDLRLL
ATFEDLRLV

SEQ ID NO: 32839 - protein, 9 aa, Artificial Sequence
  Description of Artificial Sequence: Synthetic peptide
  Seed: AAFEDLRLL
AVFEDLRLA

SEQ ID NO: 32840 - protein, 9 aa, Artificial Sequence
  Description of Artificial Sequence: Synthetic peptide
  Seed: AAFEDLRLL
AVFEDLRLC

SEQ ID NO: 32841 - protein, 9 aa, Artificial Sequence
  Description of Artificial Sequence: Synthetic peptide
  Seed: AAFEDLRLL
AVFEDLRLI

SEQ ID NO: 32842 - protein, 9 aa, Artificial Sequence
  Description of Artificial Sequence: Synthetic peptide
  Seed: AAFEDLRLL
AVFEDLRLL

SEQ ID NO: 32843 - protein, 9 aa, Artificial Sequence
  Description of Artificial Sequence: Synthetic peptide
  Seed: AAFEDLRLL
AVFEDLRLM

SEQ ID NO: 32844 - protein, 9 aa, Artificial Sequence
  Description of Artificial Sequence: Synthetic peptide
  Seed: AAFEDLRLL
AVFEDLRLF

SEQ ID NO: 32845 - protein, 9 aa, Artificial Sequence
  Description of Artificial Sequence: Synthetic peptide
  Seed: AAFEDLRLL
AVFEDLRLT

SEQ ID NO: 32846 - protein, 9 aa, Artificial Sequence
  Description of Artificial Sequence: Synthetic peptide
  Seed: AAFEDLRLL
AVFEDLRLW

SEQ ID NO: 32847 - protein, 9 aa, Artificial Sequence
  Description of Artificial Sequence: Synthetic peptide
  Seed: AAFEDLRLL
AVFEDLRLY

SEQ ID NO: 32848 - protein, 9 aa, Artificial Sequence
  Description of Artificial Sequence: Synthetic peptide
  Seed: AAFEDLRLL
AVFEDLRLV

SEQ ID NO: 32849 - protein, 11 aa, Artificial Sequence
  Description of Artificial Sequence: Synthetic peptide
  Seed: AAFEDLRLLSF
AAFEDLRLLSM

SEQ ID NO: 32850 - protein, 11 aa, Artificial Sequence
  Description of Artificial Sequence: Synthetic peptide
  Seed: AAFEDLRLLSF
AAFEDLRLLSW

SEQ ID NO: 32851 - protein, 11 aa, Artificial Sequence
  Description of Artificial Sequence: Synthetic peptide
  Seed: AAFEDLRLLSF
AAFEDLRLLSY

SEQ ID NO: 32852 - protein, 11 aa, Artificial Sequence
  Description of Artificial Sequence: Synthetic peptide
  Seed: AAFEDLRLLSF
ARFEDLRLLSF

SEQ ID NO: 32853 - protein, 11 aa, Artificial Sequence
  Description of Artificial Sequence: Synthetic peptide
  Seed: AAFEDLRLLSF
ARFEDLRLLSY

SEQ ID NO: 32854 - protein, 9 aa, Artificial Sequence
  Description of Artificial Sequence: Synthetic peptide
  Seed: AAFEDLRLL
ATFEDLRLM

SEQ ID NO: 32855 - protein, 9 aa, Artificial Sequence
  Description of Artificial Sequence: Synthetic peptide
  Seed: AAFEDLRLL
ATFEDLRLI

SEQ ID NO: 32856 - protein, 9 aa, Artificial Sequence
  Description of Artificial Sequence: Synthetic peptide
  Seed: AAFEDLRLL
AMFEDLRLH

SEQ ID NO: 32857 - protein, 9 aa, Artificial Sequence
  Description of Artificial Sequence: Synthetic peptide
  Seed: AAFEDLRLL
ATFEDLRLC

SEQ ID NO: 32858 - protein, 9 aa, Artificial Sequence
  Description of Artificial Sequence: Synthetic peptide
  Seed: AAFEDLRLL
AMFEDLRLI

SEQ ID NO: 32859 - protein, 9 aa, Artificial Sequence
  Description of Artificial Sequence: Synthetic peptide
  Seed: AAFEDLRLL
AMFEDLRLL

SEQ ID NO: 32860 - protein, 9 aa, Artificial Sequence
  Description of Artificial Sequence: Synthetic peptide
  Seed: AAFEDLRLL
AMFEDLRLM

SEQ ID NO: 32861 - protein, 9 aa, Artificial Sequence
  Description of Artificial Sequence: Synthetic peptide
  Seed: AAFEDLRLL
AMFEDLRLF

SEQ ID NO: 32862 - protein, 9 aa, Artificial Sequence
  Description of Artificial Sequence: Synthetic peptide
  Seed: AAFEDLRLL
AMFEDLRLS

SEQ ID NO: 32863 - protein, 9 aa, Artificial Sequence
  Description of Artificial Sequence: Synthetic peptide
  Seed: AAFEDLRLL
AMFEDLRLT

SEQ ID NO: 32864 - protein, 9 aa, Artificial Sequence
  Description of Artificial Sequence: Synthetic peptide
  Seed: AAFEDLRLL
AMFEDLRLW

SEQ ID NO: 32865 - protein, 9 aa, Artificial Sequence
  Description of Artificial Sequence: Synthetic peptide
  Seed: AAFEDLRLL
AMFEDLRLY

SEQ ID NO: 32866 - protein, 9 aa, Artificial Sequence
  Description of Artificial Sequence: Synthetic peptide
  Seed: AAFEDLRLL
AMFEDLRLV

SEQ ID NO: 32867 - protein, 9 aa, Artificial Sequence
  Description of Artificial Sequence: Synthetic peptide
  Seed: AAFEDLRLL
AFFEDLRLV

SEQ ID NO: 32868 - protein, 9 aa, Artificial Sequence
  Description of Artificial Sequence: Synthetic peptide
  Seed: AAFEDLRLL
ASFEDLRLA

SEQ ID NO: 32869 - protein, 9 aa, Artificial Sequence
  Description of Artificial Sequence: Synthetic peptide
  Seed: AAFEDLRLL
ASFEDLRLI

SEQ ID NO: 32870 - protein, 9 aa, Artificial Sequence
  Description of Artificial Sequence: Synthetic peptide
  Seed: AAFEDLRLL
ASFEDLRLL

SEQ ID NO: 32871 - protein, 9 aa, Artificial Sequence
  Description of Artificial Sequence: Synthetic peptide
  Seed: AAFEDLRLL
ASFEDLRLM

SEQ ID NO: 32872 - protein, 9 aa, Artificial Sequence
  Description of Artificial Sequence: Synthetic peptide
  Seed: AAFEDLRLL
ASFEDLRLF

SEQ ID NO: 32873 - protein, 9 aa, Artificial Sequence
  Description of Artificial Sequence: Synthetic peptide
  Seed: AAFEDLRLL
ASFEDLRLW

SEQ ID NO: 32874 - protein, 9 aa, Artificial Sequence
  Description of Artificial Sequence: Synthetic peptide
  Seed: AAFEDLRLL
ASFEDLRLY

SEQ ID NO: 32875 - protein, 9 aa, Artificial Sequence
  Description of Artificial Sequence: Synthetic peptide
  Seed: AAFEDLRLL
ASFEDLRLV

SEQ ID NO: 32876 - protein, 9 aa, Artificial Sequence
  Description of Artificial Sequence: Synthetic peptide
  Seed: AAFEDLRLL
ATFEDLRLA

SEQ ID NO: 32877 - protein, 10 aa, Artificial Sequence
  Description of Artificial Sequence: Synthetic peptide
  Seed: AAFTGNAEGR
AMFTGNAEGK

SEQ ID NO: 32878 - protein, 10 aa, Artificial Sequence
  Description of Artificial Sequence: Synthetic peptide
  Seed: AAFTGNAEGR
AFFTGNAEGK

SEQ ID NO: 32879 - protein, 9 aa, Artificial Sequence
  Description of Artificial Sequence: Synthetic peptide
  Seed: AAVKGVGTM
ASVKGVGTM

SEQ ID NO: 32880 - protein, 9 aa, Artificial Sequence
  Description of Artificial Sequence: Synthetic peptide
  Seed: AAVKGVGTM
ARVKGVGTY

SEQ ID NO: 32881 - protein, 9 aa, Artificial Sequence
  Description of Artificial Sequence: Synthetic peptide
  Seed: AAVKGIGTM
AVVKGIGTY

SEQ ID NO: 32882 - protein, 9 aa, Artificial Sequence
  Description of Artificial Sequence: Synthetic peptide
  Seed: AAVKGVGTM
AAVKGVGTL

SEQ ID NO: 32883 - protein, 9 aa, Artificial Sequence
  Description of Artificial Sequence: Synthetic peptide
  Seed: AAVKGVGTM
AAVKGVGTF

SEQ ID NO: 32884 - protein, 9 aa, Artificial Sequence
  Description of Artificial Sequence: Synthetic peptide
  Seed: AAVKGVGTM
AAVKGVGTW

SEQ ID NO: 32885 - protein, 9 aa, Artificial Sequence
  Description of Artificial Sequence: Synthetic peptide
  Seed: AAVKGVGTM
AAVKGVGTY

SEQ ID NO: 32886 - protein, 9 aa, Artificial Sequence
  Description of Artificial Sequence: Synthetic peptide
  Seed: AAVKGVGTM
ARVKGVGTM

SEQ ID NO: 32887 - protein, 9 aa, Artificial Sequence
  Description of Artificial Sequence: Synthetic peptide
  Seed: AAVKGVGTM
ARVKGVGTF

SEQ ID NO: 32888 - protein, 9 aa, Artificial Sequence
  Description of Artificial Sequence: Synthetic peptide
  Seed: AAVKGVGTM
ANVKGVGTM

SEQ ID NO: 32889 - protein, 9 aa, Artificial Sequence
  Description of Artificial Sequence: Synthetic peptide
  Seed: AAVKGVGTM
AQVKGVGTW

SEQ ID NO: 32890 - protein, 9 aa, Artificial Sequence
  Description of Artificial Sequence: Synthetic peptide
  Seed: AAVKGVGTM
ANVKGVGTF

SEQ ID NO: 32891 - protein, 9 aa, Artificial Sequence
  Description of Artificial Sequence: Synthetic peptide
  Seed: AAVKGVGTM
ANVKGVGTY

SEQ ID NO: 32892 - protein, 9 aa, Artificial Sequence
  Description of Artificial Sequence: Synthetic peptide
  Seed: AAVKGVGTM
ACVKGVGTW

SEQ ID NO: 32893 - protein, 9 aa, Artificial Sequence
  Description of Artificial Sequence: Synthetic peptide
  Seed: AAVKGVGTM
ACVKGVGTY

SEQ ID NO: 32894 - protein, 9 aa, Artificial Sequence
  Description of Artificial Sequence: Synthetic peptide
  Seed: AAVKGVGTM
AQVKGVGTA

SEQ ID NO: 32895 - protein, 9 aa, Artificial Sequence
  Description of Artificial Sequence: Synthetic peptide
  Seed: AAVKGVGTM
AQVKGVGTH

SEQ ID NO: 32896 - protein, 9 aa, Artificial Sequence
  Description of Artificial Sequence: Synthetic peptide
  Seed: AAVKGVGTM
AQVKGVGTI

SEQ ID NO: 32897 - protein, 9 aa, Artificial Sequence
  Description of Artificial Sequence: Synthetic peptide
  Seed: AAVKGVGTM
AQVKGVGTL

SEQ ID NO: 32898 - protein, 9 aa, Artificial Sequence
  Description of Artificial Sequence: Synthetic peptide
  Seed: AAVKGVGTM
AQVKGVGTM

SEQ ID NO: 32899 - protein, 9 aa, Artificial Sequence
  Description of Artificial Sequence: Synthetic peptide
  Seed: AAVKGIGTM
AVVKGIGTW

SEQ ID NO: 32900 - protein, 9 aa, Artificial Sequence
  Description of Artificial Sequence: Synthetic peptide
  Seed: AAVKGIGTM
AVVKGIGTF

SEQ ID NO: 32901 - protein, 9 aa, Artificial Sequence
  Description of Artificial Sequence: Synthetic peptide
  Seed: AAVKGIGTM
AVVKGIGTM

SEQ ID NO: 32902 - protein, 9 aa, Artificial Sequence
  Description of Artificial Sequence: Synthetic peptide
  Seed: AAVKGIGTM
AVVKGIGTL

SEQ ID NO: 32903 - protein, 9 aa, Artificial Sequence
  Description of Artificial Sequence: Synthetic peptide
  Seed: AAVKGIGTM
APVKGIGTY

SEQ ID NO: 32904 - protein, 9 aa, Artificial Sequence
  Description of Artificial Sequence: Synthetic peptide
  Seed: AAVKGIGTM
ASVKGIGTI

SEQ ID NO: 32905 - protein, 9 aa, Artificial Sequence
  Description of Artificial Sequence: Synthetic peptide
  Seed: AAVKGIGTM
ASVKGIGTL

SEQ ID NO: 32906 - protein, 9 aa, Artificial Sequence
  Description of Artificial Sequence: Synthetic peptide
  Seed: AAVKGIGTM
ASVKGIGTM

SEQ ID NO: 32907 - protein, 9 aa, Artificial Sequence
  Description of Artificial Sequence: Synthetic peptide
  Seed: AAVKGIGTM
ASVKGIGTF

SEQ ID NO: 32908 - protein, 9 aa, Artificial Sequence
  Description of Artificial Sequence: Synthetic peptide
  Seed: AAVKGIGTM
ASVKGIGTW

SEQ ID NO: 32909 - protein, 9 aa, Artificial Sequence
  Description of Artificial Sequence: Synthetic peptide
  Seed: AAVKGIGTM
ASVKGIGTY

SEQ ID NO: 32910 - protein, 9 aa, Artificial Sequence
  Description of Artificial Sequence: Synthetic peptide
  Seed: AAVKGIGTM
ASVKGIGTV

SEQ ID NO: 32911 - protein, 9 aa, Artificial Sequence
  Description of Artificial Sequence: Synthetic peptide
  Seed: AAVKGIGTM
ATVKGIGTI

SEQ ID NO: 32912 - protein, 9 aa, Artificial Sequence
  Description of Artificial Sequence: Synthetic peptide
  Seed: AAVKGIGTM
ATVKGIGTL

SEQ ID NO: 32913 - protein, 9 aa, Artificial Sequence
  Description of Artificial Sequence: Synthetic peptide
  Seed: AAVKGIGTM
ATVKGIGTM

SEQ ID NO: 32914 - protein, 9 aa, Artificial Sequence
  Description of Artificial Sequence: Synthetic peptide
  Seed: AAVKGIGTM
ATVKGIGTF

SEQ ID NO: 32915 - protein, 9 aa, Artificial Sequence
  Description of Artificial Sequence: Synthetic peptide
  Seed: AAVKGIGTM
ATVKGIGTW

SEQ ID NO: 32916 - protein, 9 aa, Artificial Sequence
  Description of Artificial Sequence: Synthetic peptide
  Seed: AAVKGIGTM
ATVKGIGTY

SEQ ID NO: 32917 - protein, 9 aa, Artificial Sequence
  Description of Artificial Sequence: Synthetic peptide
  Seed: AAVKGIGTM
ATVKGIGTV

SEQ ID NO: 32918 - protein, 9 aa, Artificial Sequence
  Description of Artificial Sequence: Synthetic peptide
  Seed: AAVKGIGTM
AYVKGIGTM

SEQ ID NO: 32919 - protein, 9 aa, Artificial Sequence
  Description of Artificial Sequence: Synthetic peptide
  Seed: AAVKGIGTM
AYVKGIGTF

SEQ ID NO: 32920 - protein, 9 aa, Artificial Sequence
  Description of Artificial Sequence: Synthetic peptide
  Seed: AAVKGIGTM
AYVKGIGTY

SEQ ID NO: 32921 - protein, 9 aa, Artificial Sequence
  Description of Artificial Sequence: Synthetic peptide
  Seed: AAVKGIGTM
AVVKGIGTI

SEQ ID NO: 32922 - protein, 9 aa, Artificial Sequence
  Description of Artificial Sequence: Synthetic peptide
  Seed: AAVKGVGTM
AQVKGVGTF

SEQ ID NO: 32923 - protein, 9 aa, Artificial Sequence
  Description of Artificial Sequence: Synthetic peptide
  Seed: AAVKGVGTM
AQVKGVGTY

SEQ ID NO: 32924 - protein, 10 aa, Artificial Sequence
  Description of Artificial Sequence: Synthetic peptide
  Seed: AAFTGNAEGR
ASFTGNAEGR

SEQ ID NO: 32925 - protein, 9 aa, Artificial Sequence
  Description of Artificial Sequence: Synthetic peptide
  Seed: AAVKGVGTM
AMVKGVGTI

SEQ ID NO: 32926 - protein, 9 aa, Artificial Sequence
  Description of Artificial Sequence: Synthetic peptide
  Seed: AAVKGVGTM
AKVKGVGTI

SEQ ID NO: 32927 - protein, 9 aa, Artificial Sequence
  Description of Artificial Sequence: Synthetic peptide
  Seed: AAVKGVGTM
AKVKGVGTL

SEQ ID NO: 32928 - protein, 9 aa, Artificial Sequence
  Description of Artificial Sequence: Synthetic peptide
  Seed: AAVKGVGTM
AKVKGVGTM

SEQ ID NO: 32929 - protein, 9 aa, Artificial Sequence
  Description of Artificial Sequence: Synthetic peptide
  Seed: AAVKGVGTM
AKVKGVGTF

SEQ ID NO: 32930 - protein, 9 aa, Artificial Sequence
  Description of Artificial Sequence: Synthetic peptide
  Seed: AAVKGVGTM
AKVKGVGTW

SEQ ID NO: 32931 - protein, 9 aa, Artificial Sequence
  Description of Artificial Sequence: Synthetic peptide
  Seed: AAVKGVGTM
AKVKGVGTY

SEQ ID NO: 32932 - protein, 9 aa, Artificial Sequence
  Description of Artificial Sequence: Synthetic peptide
  Seed: AAVKGVGTM
AKVKGVGTV

SEQ ID NO: 32933 - protein, 9 aa, Artificial Sequence
  Description of Artificial Sequence: Synthetic peptide
  Seed: AAVKGVGTM
AMVKGVGTA

SEQ ID NO: 32934 - protein, 9 aa, Artificial Sequence
  Description of Artificial Sequence: Synthetic peptide
  Seed: AAVKGVGTM
AMVKGVGTH

SEQ ID NO: 32935 - protein, 9 aa, Artificial Sequence
  Description of Artificial Sequence: Synthetic peptide
  Seed: AAVKGVGTM
AMVKGVGTL

SEQ ID NO: 32936 - protein, 9 aa, Artificial Sequence
  Description of Artificial Sequence: Synthetic peptide
  Seed: AAVKGVGTM
AQVKGVGTV

SEQ ID NO: 32937 - protein, 9 aa, Artificial Sequence
  Description of Artificial Sequence: Synthetic peptide
  Seed: AAVKGVGTM
AMVKGVGTM

SEQ ID NO: 32938 - protein, 9 aa, Artificial Sequence
  Description of Artificial Sequence: Synthetic peptide
  Seed: AAVKGVGTM
AMVKGVGTF

SEQ ID NO: 32939 - protein, 9 aa, Artificial Sequence
  Description of Artificial Sequence: Synthetic peptide
  Seed: AAVKGVGTM
AMVKGVGTW

SEQ ID NO: 32940 - protein, 9 aa, Artificial Sequence
  Description of Artificial Sequence: Synthetic peptide
  Seed: AAVKGVGTM
AMVKGVGTY

SEQ ID NO: 32941 - protein, 9 aa, Artificial Sequence
  Description of Artificial Sequence: Synthetic peptide
  Seed: AAVKGVGTM
AMVKGVGTV

SEQ ID NO: 32942 - protein, 9 aa, Artificial Sequence
  Description of Artificial Sequence: Synthetic peptide
  Seed: AAVKGVGTM
AFVKGVGTF

SEQ ID NO: 32943 - protein, 9 aa, Artificial Sequence
  Description of Artificial Sequence: Synthetic peptide
  Seed: AAVKGVGTM
AFVKGVGTY

SEQ ID NO: 32944 - protein, 9 aa, Artificial Sequence
  Description of Artificial Sequence: Synthetic peptide
  Seed: AAVKGVGTM
ASVKGVGTI

SEQ ID NO: 32945 - protein, 9 aa, Artificial Sequence
  Description of Artificial Sequence: Synthetic peptide
  Seed: AAVKGVGTM
ASVKGVGTL

SEQ ID NO: 32946 - protein, 9 aa, Artificial Sequence
  Description of Artificial Sequence: Synthetic peptide
  Seed: AAVKGVGTM
AKVKGVGTH

SEQ ID NO: 32947 - protein, 9 aa, Artificial Sequence
  Description of Artificial Sequence: Synthetic peptide
  Seed: AAVKGVGTM
ALVKGVGTY

SEQ ID NO: 32948 - protein, 9 aa, Artificial Sequence
  Description of Artificial Sequence: Synthetic peptide
  Seed: AAVKGVGTM
ALVKGVGTW

SEQ ID NO: 32949 - protein, 9 aa, Artificial Sequence
  Description of Artificial Sequence: Synthetic peptide
  Seed: AAVKGVGTM
ALVKGVGTF

SEQ ID NO: 32950 - protein, 9 aa, Artificial Sequence
  Description of Artificial Sequence: Synthetic peptide
  Seed: AAVKGVGTM
AEVKGVGTM

SEQ ID NO: 32951 - protein, 9 aa, Artificial Sequence
  Description of Artificial Sequence: Synthetic peptide
  Seed: AAVKGVGTM
AEVKGVGTF

SEQ ID NO: 32952 - protein, 9 aa, Artificial Sequence
  Description of Artificial Sequence: Synthetic peptide
  Seed: AAVKGVGTM
AEVKGVGTY

SEQ ID NO: 32953 - protein, 9 aa, Artificial Sequence
  Description of Artificial Sequence: Synthetic peptide
  Seed: AAVKGVGTM
AGVKGVGTF

SEQ ID NO: 32954 - protein, 9 aa, Artificial Sequence
  Description of Artificial Sequence: Synthetic peptide
  Seed: AAVKGVGTM
AGVKGVGTW

SEQ ID NO: 32955 - protein, 9 aa, Artificial Sequence
  Description of Artificial Sequence: Synthetic peptide
  Seed: AAVKGVGTM
AGVKGVGTY

SEQ ID NO: 32956 - protein, 9 aa, Artificial Sequence
  Description of Artificial Sequence: Synthetic peptide
  Seed: AAVKGVGTM
AHVKGVGTH

SEQ ID NO: 32957 - protein, 9 aa, Artificial Sequence
  Description of Artificial Sequence: Synthetic peptide
  Seed: AAVKGVGTM
AHVKGVGTL

SEQ ID NO: 32958 - protein, 9 aa, Artificial Sequence
  Description of Artificial Sequence: Synthetic peptide
  Seed: AAVKGVGTM
AHVKGVGTM

SEQ ID NO: 32959 - protein, 9 aa, Artificial Sequence
  Description of Artificial Sequence: Synthetic peptide
  Seed: AAVKGVGTM
AHVKGVGTF

SEQ ID NO: 32960 - protein, 9 aa, Artificial Sequence
  Description of Artificial Sequence: Synthetic peptide
  Seed: AAVKGVGTM
AHVKGVGTY

SEQ ID NO: 32961 - protein, 9 aa, Artificial Sequence
  Description of Artificial Sequence: Synthetic peptide
  Seed: AAVKGVGTM
AIVKGVGTR

SEQ ID NO: 32962 - protein, 9 aa, Artificial Sequence
  Description of Artificial Sequence: Synthetic peptide
  Seed: AAVKGVGTM
AIVKGVGTM

SEQ ID NO: 32963 - protein, 9 aa, Artificial Sequence
  Description of Artificial Sequence: Synthetic peptide
  Seed: AAVKGVGTM
AIVKGVGTF

SEQ ID NO: 32964 - protein, 9 aa, Artificial Sequence
  Description of Artificial Sequence: Synthetic peptide
  Seed: AAVKGVGTM
AIVKGVGTW

SEQ ID NO: 32965 - protein, 9 aa, Artificial Sequence
  Description of Artificial Sequence: Synthetic peptide
  Seed: AAVKGVGTM
AIVKGVGTY

SEQ ID NO: 32966 - protein, 9 aa, Artificial Sequence
  Description of Artificial Sequence: Synthetic peptide
  Seed: AAVKGVGTM
ALVKGVGTH

SEQ ID NO: 32967 - protein, 9 aa, Artificial Sequence
  Description of Artificial Sequence: Synthetic peptide
  Seed: AAVKGVGTM
ALVKGVGTL

SEQ ID NO: 32968 - protein, 9 aa, Artificial Sequence
  Description of Artificial Sequence: Synthetic peptide
  Seed: AAVKGVGTM
ALVKGVGTM

SEQ ID NO: 32969 - protein, 9 aa, Artificial Sequence
  Description of Artificial Sequence: Synthetic peptide
  Seed: AAVKGIGTM
APVKGIGTF

SEQ ID NO: 32970 - protein, 9 aa, Artificial Sequence
  Description of Artificial Sequence: Synthetic peptide
  Seed: AAVKGIGTM
APVKGIGTM

SEQ ID NO: 32971 - protein, 9 aa, Artificial Sequence
  Description of Artificial Sequence: Synthetic peptide
  Seed: AAVKGIGTM
AFVKGIGTY

SEQ ID NO: 32972 - protein, 9 aa, Artificial Sequence
  Description of Artificial Sequence: Synthetic peptide
  Seed: AAVKGIGTM
AAVKGIGTF

SEQ ID NO: 32973 - protein, 10 aa, Artificial Sequence
  Description of Artificial Sequence: Synthetic peptide
  Seed: AAFTGNTEGR
ATFTGNTEGK

SEQ ID NO: 32974 - protein, 10 aa, Artificial Sequence
  Description of Artificial Sequence: Synthetic peptide
  Seed: AAFTGNTEGR
AWFTGNTEGR

SEQ ID NO: 32975 - protein, 10 aa, Artificial Sequence
  Description of Artificial Sequence: Synthetic peptide
  Seed: AAFTGNTEGR
AWFTGNTEGK

SEQ ID NO: 32976 - protein, 10 aa, Artificial Sequence
  Description of Artificial Sequence: Synthetic peptide
  Seed: AAFTGNTEGR
AYFTGNTEGR

SEQ ID NO: 32977 - protein, 10 aa, Artificial Sequence
  Description of Artificial Sequence: Synthetic peptide
  Seed: AAFTGNTEGR
AYFTGNTEGK

SEQ ID NO: 32978 - protein, 10 aa, Artificial Sequence
  Description of Artificial Sequence: Synthetic peptide
  Seed: AAFTGNTEGR
AVFTGNTEGR

SEQ ID NO: 32979 - protein, 10 aa, Artificial Sequence
  Description of Artificial Sequence: Synthetic peptide
  Seed: AAFTGNTEGR
AVFTGNTEGK

SEQ ID NO: 32980 - protein, 9 aa, Artificial Sequence
  Description of Artificial Sequence: Synthetic peptide
  Seed: AAVKGIGTM
AAVKGIGTI

SEQ ID NO: 32981 - protein, 9 aa, Artificial Sequence
  Description of Artificial Sequence: Synthetic peptide
  Seed: AAVKGIGTM
AAVKGIGTL

SEQ ID NO: 32982 - protein, 9 aa, Artificial Sequence
  Description of Artificial Sequence: Synthetic peptide
  Seed: AAVKGIGTM
AAVKGIGTW

SEQ ID NO: 32983 - protein, 9 aa, Artificial Sequence
  Description of Artificial Sequence: Synthetic peptide
  Seed: AAVKGIGTM
AFVKGIGTF

SEQ ID NO: 32984 - protein, 9 aa, Artificial Sequence
  Description of Artificial Sequence: Synthetic peptide
  Seed: AAVKGIGTM
AAVKGIGTY

SEQ ID NO: 32985 - protein, 9 aa, Artificial Sequence
  Description of Artificial Sequence: Synthetic peptide
  Seed: AAVKGIGTM
AAVKGIGTV

SEQ ID NO: 32986 - protein, 9 aa, Artificial Sequence
  Description of Artificial Sequence: Synthetic peptide
  Seed: AAVKGIGTM
ARVKGIGTM

SEQ ID NO: 32987 - protein, 9 aa, Artificial Sequence
  Description of Artificial Sequence: Synthetic peptide
  Seed: AAVKGIGTM
ARVKGIGTF

SEQ ID NO: 32988 - protein, 9 aa, Artificial Sequence
  Description of Artificial Sequence: Synthetic peptide
  Seed: AAVKGIGTM
ARVKGIGTY

SEQ ID NO: 32989 - protein, 9 aa, Artificial Sequence
  Description of Artificial Sequence: Synthetic peptide
  Seed: AAVKGIGTM
ANVKGIGTM

SEQ ID NO: 32990 - protein, 9 aa, Artificial Sequence
  Description of Artificial Sequence: Synthetic peptide
  Seed: AAVKGIGTM
ANVKGIGTF

SEQ ID NO: 32991 - protein, 9 aa, Artificial Sequence
  Description of Artificial Sequence: Synthetic peptide
  Seed: AAVKGIGTM
ANVKGIGTY

SEQ ID NO: 32992 - protein, 9 aa, Artificial Sequence
  Description of Artificial Sequence: Synthetic peptide
  Seed: AAVKGIGTM
ACVKGIGTW

SEQ ID NO: 32993 - protein, 10 aa, Artificial Sequence
  Description of Artificial Sequence: Synthetic peptide
  Seed: AAFTGNTEGR
ATFTGNTEGR

SEQ ID NO: 32994 - protein, 10 aa, Artificial Sequence
  Description of Artificial Sequence: Synthetic peptide
  Seed: AAFTGNTEGR
ASFTGNTEGK

SEQ ID NO: 32995 - protein, 10 aa, Artificial Sequence
  Description of Artificial Sequence: Synthetic peptide
  Seed: AAFTGNTEGR
ASFTGNTEGR

SEQ ID NO: 32996 - protein, 10 aa, Artificial Sequence
  Description of Artificial Sequence: Synthetic peptide
  Seed: AAFTGNTEGR
AFFTGNTEGK

SEQ ID NO: 32997 - protein, 10 aa, Artificial Sequence
  Description of Artificial Sequence: Synthetic peptide
  Seed: AAFTGNAEGR
ASFTGNAEGK

SEQ ID NO: 32998 - protein, 10 aa, Artificial Sequence
  Description of Artificial Sequence: Synthetic peptide
  Seed: AAFTGNAEGR
ATFTGNAEGR

SEQ ID NO: 32999 - protein, 10 aa, Artificial Sequence
  Description of Artificial Sequence: Synthetic peptide
  Seed: AAFTGNAEGR
ATFTGNAEGK

SEQ ID NO: 33000 - protein, 10 aa, Artificial Sequence
  Description of Artificial Sequence: Synthetic peptide
  Seed: AAFTGNAEGR
AWFTGNAEGR

SEQ ID NO: 33001 - protein, 10 aa, Artificial Sequence
  Description of Artificial Sequence: Synthetic peptide
  Seed: AAFTGNAEGR
AWFTGNAEGK

SEQ ID NO: 33002 - protein, 10 aa, Artificial Sequence
  Description of Artificial Sequence: Synthetic peptide
  Seed: AAFTGNAEGR
AYFTGNAEGR

SEQ ID NO: 33003 - protein, 10 aa, Artificial Sequence
  Description of Artificial Sequence: Synthetic peptide
  Seed: AAFTGNAEGR
AYFTGNAEGK

SEQ ID NO: 33004 - protein, 10 aa, Artificial Sequence
  Description of Artificial Sequence: Synthetic peptide
  Seed: AAFTGNAEGR
AVFTGNAEGR

SEQ ID NO: 33005 - protein, 10 aa, Artificial Sequence
  Description of Artificial Sequence: Synthetic peptide
  Seed: AAFTGNAEGR
AVFTGNAEGK

SEQ ID NO: 33006 - protein, 10 aa, Artificial Sequence
  Description of Artificial Sequence: Synthetic peptide
  Seed: AAFTGNTEGR
AAFTGNTEGK

SEQ ID NO: 33007 - protein, 10 aa, Artificial Sequence
  Description of Artificial Sequence: Synthetic peptide
  Seed: AAFTGNTEGR
ANFTGNTEGR

SEQ ID NO: 33008 - protein, 10 aa, Artificial Sequence
  Description of Artificial Sequence: Synthetic peptide
  Seed: AAFTGNTEGR
AQFTGNTEGR

SEQ ID NO: 33009 - protein, 10 aa, Artificial Sequence
  Description of Artificial Sequence: Synthetic peptide
  Seed: AAFTGNTEGR
AGFTGNTEGR

SEQ ID NO: 33010 - protein, 10 aa, Artificial Sequence
  Description of Artificial Sequence: Synthetic peptide
  Seed: AAFTGNTEGR
AIFTGNTEGR

SEQ ID NO: 33011 - protein, 10 aa, Artificial Sequence
  Description of Artificial Sequence: Synthetic peptide
  Seed: AAFTGNTEGR
AIFTGNTEGK

SEQ ID NO: 33012 - protein, 10 aa, Artificial Sequence
  Description of Artificial Sequence: Synthetic peptide
  Seed: AAFTGNTEGR
ALFTGNTEGR

SEQ ID NO: 33013 - protein, 10 aa, Artificial Sequence
  Description of Artificial Sequence: Synthetic peptide
  Seed: AAFTGNTEGR
AMFTGNTEGR

SEQ ID NO: 33014 - protein, 10 aa, Artificial Sequence
  Description of Artificial Sequence: Synthetic peptide
  Seed: AAFTGNTEGR
AMFTGNTEGK

SEQ ID NO: 33015 - protein, 10 aa, Artificial Sequence
  Description of Artificial Sequence: Synthetic peptide
  Seed: AAFTGNTEGR
AFFTGNTEGR

SEQ ID NO: 33016 - protein, 9 aa, Artificial Sequence
  Description of Artificial Sequence: Synthetic peptide
  Seed: AAVKGIGTM
ACVKGIGTY

SEQ ID NO: 33017 - protein, 9 aa, Artificial Sequence
  Description of Artificial Sequence: Synthetic peptide
  Seed: AAVKGIGTM
AQVKGIGTA

SEQ ID NO: 33018 - protein, 9 aa, Artificial Sequence
  Description of Artificial Sequence: Synthetic peptide
  Seed: AAVKGIGTM
AQVKGIGTH

SEQ ID NO: 33019 - protein, 9 aa, Artificial Sequence
  Description of Artificial Sequence: Synthetic peptide
  Seed: AAVKGIGTM
ALVKGIGTH

SEQ ID NO: 33020 - protein, 9 aa, Artificial Sequence
  Description of Artificial Sequence: Synthetic peptide
  Seed: AAVKGIGTM
ALVKGIGTM

SEQ ID NO: 33021 - protein, 9 aa, Artificial Sequence
  Description of Artificial Sequence: Synthetic peptide
  Seed: AAVKGIGTM
ALVKGIGTF

SEQ ID NO: 33022 - protein, 9 aa, Artificial Sequence
  Description of Artificial Sequence: Synthetic peptide
  Seed: AAVKGIGTM
ALVKGIGTW

SEQ ID NO: 33023 - protein, 9 aa, Artificial Sequence
  Description of Artificial Sequence: Synthetic peptide
  Seed: AAVKGIGTM
ALVKGIGTY

SEQ ID NO: 33024 - protein, 9 aa, Artificial Sequence
  Description of Artificial Sequence: Synthetic peptide
  Seed: AAVKGIGTM
AKVKGIGTH

SEQ ID NO: 33025 - protein, 9 aa, Artificial Sequence
  Description of Artificial Sequence: Synthetic peptide
  Seed: AAVKGIGTM
AKVKGIGTI

SEQ ID NO: 33026 - protein, 9 aa, Artificial Sequence
  Description of Artificial Sequence: Synthetic peptide
  Seed: AAVKGIGTM
AKVKGIGTL

SEQ ID NO: 33027 - protein, 9 aa, Artificial Sequence
  Description of Artificial Sequence: Synthetic peptide
  Seed: AAVKGIGTM
AKVKGIGTM

SEQ ID NO: 33028 - protein, 9 aa, Artificial Sequence
  Description of Artificial Sequence: Synthetic peptide
  Seed: AAVKGIGTM
AKVKGIGTF

SEQ ID NO: 33029 - protein, 9 aa, Artificial Sequence
  Description of Artificial Sequence: Synthetic peptide
  Seed: AAVKGIGTM
AKVKGIGTW

SEQ ID NO: 33030 - protein, 9 aa, Artificial Sequence
  Description of Artificial Sequence: Synthetic peptide
  Seed: AAVKGIGTM
AKVKGIGTY

SEQ ID NO: 33031 - protein, 9 aa, Artificial Sequence
  Description of Artificial Sequence: Synthetic peptide
  Seed: AAVKGIGTM
AMVKGIGTH

SEQ ID NO: 33032 - protein, 9 aa, Artificial Sequence
  Description of Artificial Sequence: Synthetic peptide
  Seed: AAVKGIGTM
AMVKGIGTI

SEQ ID NO: 33033 - protein, 9 aa, Artificial Sequence
  Description of Artificial Sequence: Synthetic peptide
  Seed: AAVKGIGTM
AMVKGIGTL

SEQ ID NO: 33034 - protein, 9 aa, Artificial Sequence
  Description of Artificial Sequence: Synthetic peptide
  Seed: AAVKGIGTM
AMVKGIGTM

SEQ ID NO: 33035 - protein, 9 aa, Artificial Sequence
  Description of Artificial Sequence: Synthetic peptide
  Seed: AAVKGIGTM
AMVKGIGTF

SEQ ID NO: 33036 - protein, 9 aa, Artificial Sequence
  Description of Artificial Sequence: Synthetic peptide
  Seed: AAVKGIGTM
AMVKGIGTW

SEQ ID NO: 33037 - protein, 9 aa, Artificial Sequence
  Description of Artificial Sequence: Synthetic peptide
  Seed: AAVKGIGTM
AMVKGIGTY

SEQ ID NO: 33038 - protein, 9 aa, Artificial Sequence
  Description of Artificial Sequence: Synthetic peptide
  Seed: AAVKGIGTM
AMVKGIGTV

SEQ ID NO: 33039 - protein, 9 aa, Artificial Sequence
  Description of Artificial Sequence: Synthetic peptide
  Seed: AAVKGIGTM
ALVKGIGTL

SEQ ID NO: 33040 - protein, 9 aa, Artificial Sequence
  Description of Artificial Sequence: Synthetic peptide
  Seed: AAVKGIGTM
AIVKGIGTY

SEQ ID NO: 33041 - protein, 9 aa, Artificial Sequence
  Description of Artificial Sequence: Synthetic peptide
  Seed: AAVKGIGTM
AQVKGIGTI

SEQ ID NO: 33042 - protein, 9 aa, Artificial Sequence
  Description of Artificial Sequence: Synthetic peptide
  Seed: AAVKGIGTM
AIVKGIGTW

SEQ ID NO: 33043 - protein, 9 aa, Artificial Sequence
  Description of Artificial Sequence: Synthetic peptide
  Seed: AAVKGIGTM
AQVKGIGTL

SEQ ID NO: 33044 - protein, 9 aa, Artificial Sequence
  Description of Artificial Sequence: Synthetic peptide
  Seed: AAVKGIGTM
AQVKGIGTM

SEQ ID NO: 33045 - protein, 9 aa, Artificial Sequence
  Description of Artificial Sequence: Synthetic peptide
  Seed: AAVKGIGTM
AQVKGIGTF

SEQ ID NO: 33046 - protein, 9 aa, Artificial Sequence
  Description of Artificial Sequence: Synthetic peptide
  Seed: AAVKGIGTM
AQVKGIGTW

SEQ ID NO: 33047 - protein, 9 aa, Artificial Sequence
  Description of Artificial Sequence: Synthetic peptide
  Seed: AAVKGIGTM
AQVKGIGTY

SEQ ID NO: 33048 - protein, 9 aa, Artificial Sequence
  Description of Artificial Sequence: Synthetic peptide
  Seed: AAVKGIGTM
AQVKGIGTV

SEQ ID NO: 33049 - protein, 9 aa, Artificial Sequence
  Description of Artificial Sequence: Synthetic peptide
  Seed: AAVKGIGTM
AEVKGIGTM

SEQ ID NO: 33050 - protein, 9 aa, Artificial Sequence
  Description of Artificial Sequence: Synthetic peptide
  Seed: AAVKGIGTM
AEVKGIGTF

SEQ ID NO: 33051 - protein, 9 aa, Artificial Sequence
  Description of Artificial Sequence: Synthetic peptide
  Seed: AAVKGIGTM
AEVKGIGTY

SEQ ID NO: 33052 - protein, 9 aa, Artificial Sequence
  Description of Artificial Sequence: Synthetic peptide
  Seed: AAVKGIGTM
AGVKGIGTF

SEQ ID NO: 33053 - protein, 9 aa, Artificial Sequence
  Description of Artificial Sequence: Synthetic peptide
  Seed: AAVKGIGTM
AGVKGIGTW

SEQ ID NO: 33054 - protein, 9 aa, Artificial Sequence
  Description of Artificial Sequence: Synthetic peptide
  Seed: AAVKGIGTM
AGVKGIGTY

SEQ ID NO: 33055 - protein, 9 aa, Artificial Sequence
  Description of Artificial Sequence: Synthetic peptide
  Seed: AAVKGIGTM
AHVKGIGTH

SEQ ID NO: 33056 - protein, 9 aa, Artificial Sequence
  Description of Artificial Sequence: Synthetic peptide
  Seed: AAVKGIGTM
AHVKGIGTL

SEQ ID NO: 33057 - protein, 9 aa, Artificial Sequence
  Description of Artificial Sequence: Synthetic peptide
  Seed: AAVKGIGTM
AHVKGIGTM

SEQ ID NO: 33058 - protein, 9 aa, Artificial Sequence
  Description of Artificial Sequence: Synthetic peptide
  Seed: AAVKGIGTM
AHVKGIGTF

SEQ ID NO: 33059 - protein, 9 aa, Artificial Sequence
  Description of Artificial Sequence: Synthetic peptide
  Seed: AAVKGIGTM
AHVKGIGTY

SEQ ID NO: 33060 - protein, 9 aa, Artificial Sequence
  Description of Artificial Sequence: Synthetic peptide
  Seed: AAVKGIGTM
AIVKGIGTM

SEQ ID NO: 33061 - protein, 9 aa, Artificial Sequence
  Description of Artificial Sequence: Synthetic peptide
  Seed: AAVKGIGTM
AIVKGIGTF

SEQ ID NO: 33062 - protein, 10 aa, Artificial Sequence
  Description of Artificial Sequence: Synthetic peptide
  Seed: AFEDLRVSSF
AYEDLRVSSY

SEQ ID NO: 33063 - protein, 10 aa, Artificial Sequence
  Description of Artificial Sequence: Synthetic peptide
  Seed: AFEDLRVSSF
AYEDLRVSSV

SEQ ID NO: 33064 - protein, 10 aa, Artificial Sequence
  Description of Artificial Sequence: Synthetic peptide
  Seed: AFEDLRVSSF
AVEDLRVSSI

SEQ ID NO: 33065 - protein, 10 aa, Artificial Sequence
  Description of Artificial Sequence: Synthetic peptide
  Seed: AMMDQVRESR
AYMDQVRESK

SEQ ID NO: 33066 - protein, 10 aa, Artificial Sequence
  Description of Artificial Sequence: Synthetic peptide
  Seed: AMMDQVRESR
APMDQVRESR

SEQ ID NO: 33067 - protein, 10 aa, Artificial Sequence
  Description of Artificial Sequence: Synthetic peptide
  Seed: AMMDQVRESR
APMDQVRESK

SEQ ID NO: 33068 - protein, 10 aa, Artificial Sequence
  Description of Artificial Sequence: Synthetic peptide
  Seed: AMMDQVRESR
ASMDQVRESR

SEQ ID NO: 33069 - protein, 10 aa, Artificial Sequence
  Description of Artificial Sequence: Synthetic peptide
  Seed: AMMDQVRESR
ASMDQVRESK

SEQ ID NO: 33070 - protein, 10 aa, Artificial Sequence
  Description of Artificial Sequence: Synthetic peptide
  Seed: AMMDQVRESR
ATMDQVRESR

SEQ ID NO: 33071 - protein, 10 aa, Artificial Sequence
  Description of Artificial Sequence: Synthetic peptide
  Seed: AMMDQVRESR
ATMDQVRESK

SEQ ID NO: 33072 - protein, 10 aa, Artificial Sequence
  Description of Artificial Sequence: Synthetic peptide
  Seed: AMMDQVRESR
AWMDQVRESR

SEQ ID NO: 33073 - protein, 10 aa, Artificial Sequence
  Description of Artificial Sequence: Synthetic peptide
  Seed: AMMDQVRESR
AWMDQVRESK

SEQ ID NO: 33074 - protein, 10 aa, Artificial Sequence
  Description of Artificial Sequence: Synthetic peptide
  Seed: AMMDQVRESR
AYMDQVRESR

SEQ ID NO: 33075 - protein, 10 aa, Artificial Sequence
  Description of Artificial Sequence: Synthetic peptide
  Seed: AMMDQVRESR
AVMDQVRESR

SEQ ID NO: 33076 - protein, 9 aa, Artificial Sequence
  Description of Artificial Sequence: Synthetic peptide
  Seed: AQRAMMDQV
AQRAMMDQI

SEQ ID NO: 33077 - protein, 10 aa, Artificial Sequence
  Description of Artificial Sequence: Synthetic peptide
  Seed: AMMDQVRESR
AVMDQVRESK

SEQ ID NO: 33078 - protein, 9 aa, Artificial Sequence
  Description of Artificial Sequence: Synthetic peptide
  Seed: AQRAMMDQV
AARAMMDQA

SEQ ID NO: 33079 - protein, 9 aa, Artificial Sequence
  Description of Artificial Sequence: Synthetic peptide
  Seed: AQRAMMDQV
AARAMMDQR

SEQ ID NO: 33080 - protein, 9 aa, Artificial Sequence
  Description of Artificial Sequence: Synthetic peptide
  Seed: AQRAMMDQV
AARAMMDQI

SEQ ID NO: 33081 - protein, 9 aa, Artificial Sequence
  Description of Artificial Sequence: Synthetic peptide
  Seed: AQRAMMDQV
AARAMMDQL

SEQ ID NO: 33082 - protein, 9 aa, Artificial Sequence
  Description of Artificial Sequence: Synthetic peptide
  Seed: AQRAMMDQV
AARAMMDQK

SEQ ID NO: 33083 - protein, 9 aa, Artificial Sequence
  Description of Artificial Sequence: Synthetic peptide
  Seed: AQRAMMDQV
AARAMMDQV

SEQ ID NO: 33084 - protein, 9 aa, Artificial Sequence
  Description of Artificial Sequence: Synthetic peptide
  Seed: AQRAMMDQV
ANRAMMDQK

SEQ ID NO: 33085 - protein, 9 aa, Artificial Sequence
  Description of Artificial Sequence: Synthetic peptide
  Seed: AQRAMMDQV
ACRAMMDQK

SEQ ID NO: 33086 - protein, 10 aa, Artificial Sequence
  Description of Artificial Sequence: Synthetic peptide
  Seed: AMMDQVRESR
AFMDQVRESK

SEQ ID NO: 33087 - protein, 10 aa, Artificial Sequence
  Description of Artificial Sequence: Synthetic peptide
  Seed: AMMDQVRESR
AFMDQVRESR

SEQ ID NO: 33088 - protein, 10 aa, Artificial Sequence
  Description of Artificial Sequence: Synthetic peptide
  Seed: AMMDQVRESR
AMMDQVRESK

SEQ ID NO: 33089 - protein, 10 aa, Artificial Sequence
  Description of Artificial Sequence: Synthetic peptide
  Seed: AMMDQVRESR
AKMDQVRESK

SEQ ID NO: 33090 - protein, 10 aa, Artificial Sequence
  Description of Artificial Sequence: Synthetic peptide
  Seed: AMMDQVRESR
ANMDQVRESR

SEQ ID NO: 33091 - protein, 10 aa, Artificial Sequence
  Description of Artificial Sequence: Synthetic peptide
  Seed: AMMDQVRESR
ANMDQVRESK

SEQ ID NO: 33092 - protein, 10 aa, Artificial Sequence
  Description of Artificial Sequence: Synthetic peptide
  Seed: AMMDQVRESR
ADMDQVRESR

SEQ ID NO: 33093 - protein, 10 aa, Artificial Sequence
  Description of Artificial Sequence: Synthetic peptide
  Seed: AMMDQVRESR
ADMDQVRESK

SEQ ID NO: 33094 - protein, 10 aa, Artificial Sequence
  Description of Artificial Sequence: Synthetic peptide
  Seed: AMMDQVRESR
ACMDQVRESR

SEQ ID NO: 33095 - protein, 10 aa, Artificial Sequence
  Description of Artificial Sequence: Synthetic peptide
  Seed: AMMDQVRESR
ACMDQVRESK

SEQ ID NO: 33096 - protein, 10 aa, Artificial Sequence
  Description of Artificial Sequence: Synthetic peptide
  Seed: AMMDQVRESR
AQMDQVRESR

SEQ ID NO: 33097 - protein, 10 aa, Artificial Sequence
  Description of Artificial Sequence: Synthetic peptide
  Seed: AMMDQVRESR
AQMDQVRESK

SEQ ID NO: 33098 - protein, 10 aa, Artificial Sequence
  Description of Artificial Sequence: Synthetic peptide
  Seed: AMMDQVRESR
AEMDQVRESR

SEQ ID NO: 33099 - protein, 10 aa, Artificial Sequence
  Description of Artificial Sequence: Synthetic peptide
  Seed: AMMDQVRESR
AEMDQVRESK

SEQ ID NO: 33100 - protein, 10 aa, Artificial Sequence
  Description of Artificial Sequence: Synthetic peptide
  Seed: AMMDQVRESR
AGMDQVRESR

SEQ ID NO: 33101 - protein, 10 aa, Artificial Sequence
  Description of Artificial Sequence: Synthetic peptide
  Seed: AMMDQVRESR
AGMDQVRESK

SEQ ID NO: 33102 - protein, 10 aa, Artificial Sequence
  Description of Artificial Sequence: Synthetic peptide
  Seed: AMMDQVRESR
AHMDQVRESR

SEQ ID NO: 33103 - protein, 10 aa, Artificial Sequence
  Description of Artificial Sequence: Synthetic peptide
  Seed: AMMDQVRESR
AHMDQVRESK

SEQ ID NO: 33104 - protein, 10 aa, Artificial Sequence
  Description of Artificial Sequence: Synthetic peptide
  Seed: AMMDQVRESR
AIMDQVRESK

SEQ ID NO: 33105 - protein, 10 aa, Artificial Sequence
  Description of Artificial Sequence: Synthetic peptide
  Seed: AMMDQVRESR
ALMDQVRESR

SEQ ID NO: 33106 - protein, 10 aa, Artificial Sequence
  Description of Artificial Sequence: Synthetic peptide
  Seed: AMMDQVRESR
ALMDQVRESK

SEQ ID NO: 33107 - protein, 10 aa, Artificial Sequence
  Description of Artificial Sequence: Synthetic peptide
  Seed: AMMDQVRESR
AKMDQVRESR

SEQ ID NO: 33108 - protein, 9 aa, Artificial Sequence
  Description of Artificial Sequence: Synthetic peptide
  Seed: AQRAMMDQV
AQRAMMDQA

SEQ ID NO: 33109 - protein, 9 aa, Artificial Sequence
  Description of Artificial Sequence: Synthetic peptide
  Seed: AQRAMMDQV
AQRAMMDQL

SEQ ID NO: 33110 - protein, 9 aa, Artificial Sequence
  Description of Artificial Sequence: Synthetic peptide
  Seed: AQRAMMDQV
ATRAMMDQI

SEQ ID NO: 33111 - protein, 9 aa, Artificial Sequence
  Description of Artificial Sequence: Synthetic peptide
  Seed: AQRAMMDQV
ASRAMMDQL

SEQ ID NO: 33112 - protein, 9 aa, Artificial Sequence
  Description of Artificial Sequence: Synthetic peptide
  Seed: AQRAMMDQV
AMRAMMDQV

SEQ ID NO: 33113 - protein, 9 aa, Artificial Sequence
  Description of Artificial Sequence: Synthetic peptide
  Seed: AQRAMMDQV
AFRAMMDQA

SEQ ID NO: 33114 - protein, 9 aa, Artificial Sequence
  Description of Artificial Sequence: Synthetic peptide
  Seed: AQRAMMDQV
AFRAMMDQI

SEQ ID NO: 33115 - protein, 9 aa, Artificial Sequence
  Description of Artificial Sequence: Synthetic peptide
  Seed: AQRAMMDQV
AFRAMMDQK

SEQ ID NO: 33116 - protein, 9 aa, Artificial Sequence
  Description of Artificial Sequence: Synthetic peptide
  Seed: AQRAMMDQV
AFRAMMDQV

SEQ ID NO: 33117 - protein, 9 aa, Artificial Sequence
  Description of Artificial Sequence: Synthetic peptide
  Seed: AQRAMMDQV
ASRAMMDQA

SEQ ID NO: 33118 - protein, 9 aa, Artificial Sequence
  Description of Artificial Sequence: Synthetic peptide
  Seed: AQRAMMDQV
ASRAMMDQR

SEQ ID NO: 33119 - protein, 9 aa, Artificial Sequence
  Description of Artificial Sequence: Synthetic peptide
  Seed: AQRAMMDQV
ASRAMMDQG

SEQ ID NO: 33120 - protein, 9 aa, Artificial Sequence
  Description of Artificial Sequence: Synthetic peptide
  Seed: AQRAMMDQV
ASRAMMDQI

SEQ ID NO: 33121 - protein, 9 aa, Artificial Sequence
  Description of Artificial Sequence: Synthetic peptide
  Seed: AQRAMMDQV
ASRAMMDQK

SEQ ID NO: 33122 - protein, 9 aa, Artificial Sequence
  Description of Artificial Sequence: Synthetic peptide
  Seed: AQRAMMDQV
AQRAMMDQK

SEQ ID NO: 33123 - protein, 9 aa, Artificial Sequence
  Description of Artificial Sequence: Synthetic peptide
  Seed: AQRAMMDQV
ASRAMMDQM

SEQ ID NO: 33124 - protein, 9 aa, Artificial Sequence
  Description of Artificial Sequence: Synthetic peptide
  Seed: AQRAMMDQV
ASRAMMDQS

SEQ ID NO: 33125 - protein, 9 aa, Artificial Sequence
  Description of Artificial Sequence: Synthetic peptide
  Seed: AQRAMMDQV
ASRAMMDQT

SEQ ID NO: 33126 - protein, 9 aa, Artificial Sequence
  Description of Artificial Sequence: Synthetic peptide
  Seed: AQRAMMDQV
ASRAMMDQY

SEQ ID NO: 33127 - protein, 9 aa, Artificial Sequence
  Description of Artificial Sequence: Synthetic peptide
  Seed: AQRAMMDQV
ASRAMMDQV

SEQ ID NO: 33128 - protein, 9 aa, Artificial Sequence
  Description of Artificial Sequence: Synthetic peptide
  Seed: AQRAMMDQV
ATRAMMDQA

SEQ ID NO: 33129 - protein, 9 aa, Artificial Sequence
  Description of Artificial Sequence: Synthetic peptide
  Seed: AQRAMMDQV
ATRAMMDQR

SEQ ID NO: 33130 - protein, 9 aa, Artificial Sequence
  Description of Artificial Sequence: Synthetic peptide
  Seed: AQRAMMDQV
ATRAMMDQC

SEQ ID NO: 33131 - protein, 9 aa, Artificial Sequence
  Description of Artificial Sequence: Synthetic peptide
  Seed: AQRAMMDQV
ATRAMMDQG

SEQ ID NO: 33132 - protein, 9 aa, Artificial Sequence
  Description of Artificial Sequence: Synthetic peptide
  Seed: AQRAMMDQV
AMRAMMDQY

SEQ ID NO: 33133 - protein, 9 aa, Artificial Sequence
  Description of Artificial Sequence: Synthetic peptide
  Seed: AQRAMMDQV
AMRAMMDQT

SEQ ID NO: 33134 - protein, 9 aa, Artificial Sequence
  Description of Artificial Sequence: Synthetic peptide
  Seed: AQRAMMDQV
AMRAMMDQM

SEQ ID NO: 33135 - protein, 9 aa, Artificial Sequence
  Description of Artificial Sequence: Synthetic peptide
  Seed: AQRAMMDQV
AMRAMMDQK

SEQ ID NO: 33136 - protein, 9 aa, Artificial Sequence
  Description of Artificial Sequence: Synthetic peptide
  Seed: AQRAMMDQV
AGRAMMDQA

SEQ ID NO: 33137 - protein, 9 aa, Artificial Sequence
  Description of Artificial Sequence: Synthetic peptide
  Seed: AQRAMMDQV
AGRAMMDQK

SEQ ID NO: 33138 - protein, 9 aa, Artificial Sequence
  Description of Artificial Sequence: Synthetic peptide
  Seed: AQRAMMDQV
AIRAMMDQA

SEQ ID NO: 33139 - protein, 9 aa, Artificial Sequence
  Description of Artificial Sequence: Synthetic peptide
  Seed: AQRAMMDQV
AIRAMMDQI

SEQ ID NO: 33140 - protein, 9 aa, Artificial Sequence
  Description of Artificial Sequence: Synthetic peptide
  Seed: AQRAMMDQV
AIRAMMDQL

SEQ ID NO: 33141 - protein, 9 aa, Artificial Sequence
  Description of Artificial Sequence: Synthetic peptide
  Seed: AQRAMMDQV
AIRAMMDQK

SEQ ID NO: 33142 - protein, 9 aa, Artificial Sequence
  Description of Artificial Sequence: Synthetic peptide
  Seed: AQRAMMDQV
AIRAMMDQM

SEQ ID NO: 33143 - protein, 9 aa, Artificial Sequence
  Description of Artificial Sequence: Synthetic peptide
  Seed: AQRAMMDQV
AIRAMMDQV

SEQ ID NO: 33144 - protein, 9 aa, Artificial Sequence
  Description of Artificial Sequence: Synthetic peptide
  Seed: AQRAMMDQV
ALRAMMDQA

SEQ ID NO: 33145 - protein, 9 aa, Artificial Sequence
  Description of Artificial Sequence: Synthetic peptide
  Seed: AQRAMMDQV
ALRAMMDQI

SEQ ID NO: 33146 - protein, 9 aa, Artificial Sequence
  Description of Artificial Sequence: Synthetic peptide
  Seed: AQRAMMDQV
ALRAMMDQL

SEQ ID NO: 33147 - protein, 9 aa, Artificial Sequence
  Description of Artificial Sequence: Synthetic peptide
  Seed: AQRAMMDQV
ALRAMMDQK

SEQ ID NO: 33148 - protein, 9 aa, Artificial Sequence
  Description of Artificial Sequence: Synthetic peptide
  Seed: AQRAMMDQV
ALRAMMDQM

SEQ ID NO: 33149 - protein, 9 aa, Artificial Sequence
  Description of Artificial Sequence: Synthetic peptide
  Seed: AQRAMMDQV
ALRAMMDQT

SEQ ID NO: 33150 - protein, 9 aa, Artificial Sequence
  Description of Artificial Sequence: Synthetic peptide
  Seed: AQRAMMDQV
ALRAMMDQV

SEQ ID NO: 33151 - protein, 9 aa, Artificial Sequence
  Description of Artificial Sequence: Synthetic peptide
  Seed: AQRAMMDQV
AMRAMMDQA

SEQ ID NO: 33152 - protein, 9 aa, Artificial Sequence
  Description of Artificial Sequence: Synthetic peptide
  Seed: AQRAMMDQV
AMRAMMDQR

SEQ ID NO: 33153 - protein, 9 aa, Artificial Sequence
  Description of Artificial Sequence: Synthetic peptide
  Seed: AQRAMMDQV
AMRAMMDQI

SEQ ID NO: 33154 - protein, 9 aa, Artificial Sequence
  Description of Artificial Sequence: Synthetic peptide
  Seed: AQRAMMDQV
AMRAMMDQL

SEQ ID NO: 33155 - protein, 10 aa, Artificial Sequence
  Description of Artificial Sequence: Synthetic peptide
  Seed: AMMDQVRESR
ARMDQVRESK

SEQ ID NO: 33156 - protein, 10 aa, Artificial Sequence
  Description of Artificial Sequence: Synthetic peptide
  Seed: AMMDQVRESR
ARMDQVRESR

SEQ ID NO: 33157 - protein, 10 aa, Artificial Sequence
  Description of Artificial Sequence: Synthetic peptide
  Seed: AMMDQVRESR
AAMDQVRESK

SEQ ID NO: 33158 - protein, 10 aa, Artificial Sequence
  Description of Artificial Sequence: Synthetic peptide
  Seed: ALVRTGMDPR
AYVRTGMDPK

SEQ ID NO: 33159 - protein, 10 aa, Artificial Sequence
  Description of Artificial Sequence: Synthetic peptide
  Seed: ALVRTGMDPR
AFVRTGMDPK

SEQ ID NO: 33160 - protein, 10 aa, Artificial Sequence
  Description of Artificial Sequence: Synthetic peptide
  Seed: ALVRTGMDPR
APVRTGMDPR

SEQ ID NO: 33161 - protein, 10 aa, Artificial Sequence
  Description of Artificial Sequence: Synthetic peptide
  Seed: ALVRTGMDPR
ASVRTGMDPR

SEQ ID NO: 33162 - protein, 10 aa, Artificial Sequence
  Description of Artificial Sequence: Synthetic peptide
  Seed: ALVRTGMDPR
ASVRTGMDPK

SEQ ID NO: 33163 - protein, 10 aa, Artificial Sequence
  Description of Artificial Sequence: Synthetic peptide
  Seed: ALVRTGMDPR
ATVRTGMDPR

SEQ ID NO: 33164 - protein, 10 aa, Artificial Sequence
  Description of Artificial Sequence: Synthetic peptide
  Seed: ALVRTGMDPR
ATVRTGMDPK

SEQ ID NO: 33165 - protein, 10 aa, Artificial Sequence
  Description of Artificial Sequence: Synthetic peptide
  Seed: ALVRTGMDPR
AWVRTGMDPR

SEQ ID NO: 33166 - protein, 10 aa, Artificial Sequence
  Description of Artificial Sequence: Synthetic peptide
  Seed: ALVRTGMDPR
AWVRTGMDPK

SEQ ID NO: 33167 - protein, 10 aa, Artificial Sequence
  Description of Artificial Sequence: Synthetic peptide
  Seed: ALVRTGMDPR
AYVRTGMDPR

SEQ ID NO: 33168 - protein, 10 aa, Artificial Sequence
  Description of Artificial Sequence: Synthetic peptide
  Seed: ALVRTGMDPR
AVVRTGMDPR

SEQ ID NO: 33169 - protein, 10 aa, Artificial Sequence
  Description of Artificial Sequence: Synthetic peptide
  Seed: AMMDQVRESR
AAMDQVRESR

SEQ ID NO: 33170 - protein, 9 aa, Artificial Sequence
  Description of Artificial Sequence: Synthetic peptide
  Seed: AMMDQVRES
AAMDQVREA

SEQ ID NO: 33171 - protein, 9 aa, Artificial Sequence
  Description of Artificial Sequence: Synthetic peptide
  Seed: AMMDQVRES
AAMDQVREI

SEQ ID NO: 33172 - protein, 9 aa, Artificial Sequence
  Description of Artificial Sequence: Synthetic peptide
  Seed: AMMDQVRES
AAMDQVREV

SEQ ID NO: 33173 - protein, 9 aa, Artificial Sequence
  Description of Artificial Sequence: Synthetic peptide
  Seed: AMMDQVRES
ACMDQVREV

SEQ ID NO: 33174 - protein, 9 aa, Artificial Sequence
  Description of Artificial Sequence: Synthetic peptide
  Seed: AMMDQVRES
AQMDQVREA

SEQ ID NO: 33175 - protein, 9 aa, Artificial Sequence
  Description of Artificial Sequence: Synthetic peptide
  Seed: AMMDQVRES
AQMDQVREC

SEQ ID NO: 33176 - protein, 9 aa, Artificial Sequence
  Description of Artificial Sequence: Synthetic peptide
  Seed: AMMDQVRES
AQMDQVREI

SEQ ID NO: 33177 - protein, 9 aa, Artificial Sequence
  Description of Artificial Sequence: Synthetic peptide
  Seed: AMMDQVRES
AQMDQVREL

SEQ ID NO: 33178 - protein, 9 aa, Artificial Sequence
  Description of Artificial Sequence: Synthetic peptide
  Seed: AMMDQVRES
AQMDQVREM

SEQ ID NO: 33179 - protein, 10 aa, Artificial Sequence
  Description of Artificial Sequence: Synthetic peptide
  Seed: ALVRTGMDPR
AFVRTGMDPR

SEQ ID NO: 33180 - protein, 10 aa, Artificial Sequence
  Description of Artificial Sequence: Synthetic peptide
  Seed: ALVRTGMDPR
AMVRTGMDPK

SEQ ID NO: 33181 - protein, 10 aa, Artificial Sequence
  Description of Artificial Sequence: Synthetic peptide
  Seed: ALVRTGMDPR
AMVRTGMDPR

SEQ ID NO: 33182 - protein, 10 aa, Artificial Sequence
  Description of Artificial Sequence: Synthetic peptide
  Seed: ALVRTGMDPR
AKVRTGMDPR

SEQ ID NO: 33183 - protein, 11 aa, Artificial Sequence
  Description of Artificial Sequence: Synthetic peptide
  Seed: ALILRGSVAHK
AMILRGSVAHK

SEQ ID NO: 33184 - protein, 11 aa, Artificial Sequence
  Description of Artificial Sequence: Synthetic peptide
  Seed: ALILRGSVAHK
AFILRGSVAHK

SEQ ID NO: 33185 - protein, 11 aa, Artificial Sequence
  Description of Artificial Sequence: Synthetic peptide
  Seed: ALILRGSVAHK
APILRGSVAHK

SEQ ID NO: 33186 - protein, 11 aa, Artificial Sequence
  Description of Artificial Sequence: Synthetic peptide
  Seed: ALILRGSVAHK
ASILRGSVAHK

SEQ ID NO: 33187 - protein, 11 aa, Artificial Sequence
  Description of Artificial Sequence: Synthetic peptide
  Seed: ALILRGSVAHK
ATILRGSVAHR

SEQ ID NO: 33188 - protein, 11 aa, Artificial Sequence
  Description of Artificial Sequence: Synthetic peptide
  Seed: ALILRGSVAHK
ATILRGSVAHK

SEQ ID NO: 33189 - protein, 11 aa, Artificial Sequence
  Description of Artificial Sequence: Synthetic peptide
  Seed: ALILRGSVAHK
AWILRGSVAHK

SEQ ID NO: 33190 - protein, 11 aa, Artificial Sequence
  Description of Artificial Sequence: Synthetic peptide
  Seed: ALILRGSVAHK
AYILRGSVAHK

SEQ ID NO: 33191 - protein, 11 aa, Artificial Sequence
  Description of Artificial Sequence: Synthetic peptide
  Seed: ALILRGSVAHK
AVILRGSVAHK

SEQ ID NO: 33192 - protein, 10 aa, Artificial Sequence
  Description of Artificial Sequence: Synthetic peptide
  Seed: ALVRTGMDPR
AAVRTGMDPR

SEQ ID NO: 33193 - protein, 10 aa, Artificial Sequence
  Description of Artificial Sequence: Synthetic peptide
  Seed: ALVRTGMDPR
ARVRTGMDPR

SEQ ID NO: 33194 - protein, 10 aa, Artificial Sequence
  Description of Artificial Sequence: Synthetic peptide
  Seed: ALVRTGMDPR
ANVRTGMDPR

SEQ ID NO: 33195 - protein, 10 aa, Artificial Sequence
  Description of Artificial Sequence: Synthetic peptide
  Seed: ALVRTGMDPR
ADVRTGMDPR

SEQ ID NO: 33196 - protein, 10 aa, Artificial Sequence
  Description of Artificial Sequence: Synthetic peptide
  Seed: ALVRTGMDPR
ACVRTGMDPR

SEQ ID NO: 33197 - protein, 10 aa, Artificial Sequence
  Description of Artificial Sequence: Synthetic peptide
  Seed: ALVRTGMDPR
AQVRTGMDPR

SEQ ID NO: 33198 - protein, 10 aa, Artificial Sequence
  Description of Artificial Sequence: Synthetic peptide
  Seed: ALVRTGMDPR
AEVRTGMDPR

SEQ ID NO: 33199 - protein, 10 aa, Artificial Sequence
  Description of Artificial Sequence: Synthetic peptide
  Seed: ALVRTGMDPR
AGVRTGMDPR

SEQ ID NO: 33200 - protein, 10 aa, Artificial Sequence
  Description of Artificial Sequence: Synthetic peptide
  Seed: ALVRTGMDPR
AIVRTGMDPR

SEQ ID NO: 33201 - protein, 9 aa, Artificial Sequence
  Description of Artificial Sequence: Synthetic peptide
  Seed: AMMDQVRES
AQMDQVREF

SEQ ID NO: 33202 - protein, 9 aa, Artificial Sequence
  Description of Artificial Sequence: Synthetic peptide
  Seed: AMMDQVRES
AQMDQVRES

SEQ ID NO: 33203 - protein, 9 aa, Artificial Sequence
  Description of Artificial Sequence: Synthetic peptide
  Seed: AMMDQVRES
AQMDQVRET

SEQ ID NO: 33204 - protein, 9 aa, Artificial Sequence
  Description of Artificial Sequence: Synthetic peptide
  Seed: AMMDQVRES
AMMDQVREI

SEQ ID NO: 33205 - protein, 9 aa, Artificial Sequence
  Description of Artificial Sequence: Synthetic peptide
  Seed: AMMDQVRES
AMMDQVREM

SEQ ID NO: 33206 - protein, 9 aa, Artificial Sequence
  Description of Artificial Sequence: Synthetic peptide
  Seed: AMMDQVRES
AMMDQVREF

SEQ ID NO: 33207 - protein, 9 aa, Artificial Sequence
  Description of Artificial Sequence: Synthetic peptide
  Seed: AMMDQVRES
AMMDQVREP

SEQ ID NO: 33208 - protein, 9 aa, Artificial Sequence
  Description of Artificial Sequence: Synthetic peptide
  Seed: AMMDQVRES
AMMDQVRET

SEQ ID NO: 33209 - protein, 9 aa, Artificial Sequence
  Description of Artificial Sequence: Synthetic peptide
  Seed: AMMDQVRES
AMMDQVREV

SEQ ID NO: 33210 - protein, 9 aa, Artificial Sequence
  Description of Artificial Sequence: Synthetic peptide
  Seed: AMMDQVRES
AFMDQVREV

SEQ ID NO: 33211 - protein, 9 aa, Artificial Sequence
  Description of Artificial Sequence: Synthetic peptide
  Seed: AMMDQVRES
ASMDQVREV

SEQ ID NO: 33212 - protein, 9 aa, Artificial Sequence
  Description of Artificial Sequence: Synthetic peptide
  Seed: AMMDQVRES
ATMDQVREA

SEQ ID NO: 33213 - protein, 9 aa, Artificial Sequence
  Description of Artificial Sequence: Synthetic peptide
  Seed: AMMDQVRES
ATMDQVREI

SEQ ID NO: 33214 - protein, 9 aa, Artificial Sequence
  Description of Artificial Sequence: Synthetic peptide
  Seed: AMMDQVRES
ATMDQVREL

SEQ ID NO: 33215 - protein, 9 aa, Artificial Sequence
  Description of Artificial Sequence: Synthetic peptide
  Seed: AMMDQVRES
ATMDQVREM

SEQ ID NO: 33216 - protein, 9 aa, Artificial Sequence
  Description of Artificial Sequence: Synthetic peptide
  Seed: AMMDQVRES
ATMDQVREV

SEQ ID NO: 33217 - protein, 9 aa, Artificial Sequence
  Description of Artificial Sequence: Synthetic peptide
  Seed: AMMDQVRES
AVMDQVREA

SEQ ID NO: 33218 - protein, 9 aa, Artificial Sequence
  Description of Artificial Sequence: Synthetic peptide
  Seed: AMMDQVRES
AVMDQVREC

SEQ ID NO: 33219 - protein, 9 aa, Artificial Sequence
  Description of Artificial Sequence: Synthetic peptide
  Seed: AMMDQVRES
AVMDQVREI

SEQ ID NO: 33220 - protein, 9 aa, Artificial Sequence
  Description of Artificial Sequence: Synthetic peptide
  Seed: AMMDQVRES
AVMDQVREL

SEQ ID NO: 33221 - protein, 9 aa, Artificial Sequence
  Description of Artificial Sequence: Synthetic peptide
  Seed: AMMDQVRES
AVMDQVREM

SEQ ID NO: 33222 - protein, 9 aa, Artificial Sequence
  Description of Artificial Sequence: Synthetic peptide
  Seed: AMMDQVRES
AVMDQVRET

SEQ ID NO: 33223 - protein, 9 aa, Artificial Sequence
  Description of Artificial Sequence: Synthetic peptide
  Seed: AMMDQVRES
AVMDQVREV

SEQ ID NO: 33224 - protein, 9 aa, Artificial Sequence
  Description of Artificial Sequence: Synthetic peptide
  Seed: AMMDQVRES
AMMDQVREL

SEQ ID NO: 33225 - protein, 9 aa, Artificial Sequence
  Description of Artificial Sequence: Synthetic peptide
  Seed: AMMDQVRES
AQMDQVREV

SEQ ID NO: 33226 - protein, 9 aa, Artificial Sequence
  Description of Artificial Sequence: Synthetic peptide
  Seed: AMMDQVRES
AMMDQVREC

SEQ ID NO: 33227 - protein, 9 aa, Artificial Sequence
  Description of Artificial Sequence: Synthetic peptide
  Seed: AMMDQVRES
AIMDQVREA

SEQ ID NO: 33228 - protein, 9 aa, Artificial Sequence
  Description of Artificial Sequence: Synthetic peptide
  Seed: AMMDQVRES
AIMDQVREC

SEQ ID NO: 33229 - protein, 9 aa, Artificial Sequence
  Description of Artificial Sequence: Synthetic peptide
  Seed: AMMDQVRES
AIMDQVREI

SEQ ID NO: 33230 - protein, 9 aa, Artificial Sequence
  Description of Artificial Sequence: Synthetic peptide
  Seed: AMMDQVRES
AIMDQVREL

SEQ ID NO: 33231 - protein, 9 aa, Artificial Sequence
  Description of Artificial Sequence: Synthetic peptide
  Seed: AMMDQVRES
AIMDQVREM

SEQ ID NO: 33232 - protein, 9 aa, Artificial Sequence
  Description of Artificial Sequence: Synthetic peptide
  Seed: AMMDQVRES
AIMDQVRET

SEQ ID NO: 33233 - protein, 9 aa, Artificial Sequence
  Description of Artificial Sequence: Synthetic peptide
  Seed: AMMDQVRES
AIMDQVREV

SEQ ID NO: 33234 - protein, 9 aa, Artificial Sequence
  Description of Artificial Sequence: Synthetic peptide
  Seed: AMMDQVRES
ALMDQVREA

SEQ ID NO: 33235 - protein, 9 aa, Artificial Sequence
  Description of Artificial Sequence: Synthetic peptide
  Seed: AMMDQVRES
ALMDQVREC

SEQ ID NO: 33236 - protein, 9 aa, Artificial Sequence
  Description of Artificial Sequence: Synthetic peptide
  Seed: AMMDQVRES
ALMDQVREG

SEQ ID NO: 33237 - protein, 9 aa, Artificial Sequence
  Description of Artificial Sequence: Synthetic peptide
  Seed: AMMDQVRES
ALMDQVREI

SEQ ID NO: 33238 - protein, 9 aa, Artificial Sequence
  Description of Artificial Sequence: Synthetic peptide
  Seed: AMMDQVRES
ALMDQVREL

SEQ ID NO: 33239 - protein, 9 aa, Artificial Sequence
  Description of Artificial Sequence: Synthetic peptide
  Seed: AMMDQVRES
ALMDQVREM

SEQ ID NO: 33240 - protein, 9 aa, Artificial Sequence
  Description of Artificial Sequence: Synthetic peptide
  Seed: AMMDQVRES
ALMDQVREF

SEQ ID NO: 33241 - protein, 9 aa, Artificial Sequence
  Description of Artificial Sequence: Synthetic peptide
  Seed: AMMDQVRES
ALMDQVREP

SEQ ID NO: 33242 - protein, 9 aa, Artificial Sequence
  Description of Artificial Sequence: Synthetic peptide
  Seed: AMMDQVRES
ALMDQVRES

SEQ ID NO: 33243 - protein, 9 aa, Artificial Sequence
  Description of Artificial Sequence: Synthetic peptide
  Seed: AMMDQVRES
ALMDQVRET

SEQ ID NO: 33244 - protein, 9 aa, Artificial Sequence
  Description of Artificial Sequence: Synthetic peptide
  Seed: AMMDQVRES
ALMDQVREV

SEQ ID NO: 33245 - protein, 9 aa, Artificial Sequence
  Description of Artificial Sequence: Synthetic peptide
  Seed: AMMDQVRES
AMMDQVREA

SEQ ID NO: 33246 - protein, 9 aa, Artificial Sequence
  Description of Artificial Sequence: Synthetic peptide
  Seed: AQRAMMDQV
ATRAMMDQH

SEQ ID NO: 33247 - protein, 9 aa, Artificial Sequence
  Description of Artificial Sequence: Synthetic peptide
  Seed: AQRAMMDQV
ATRAMMDQL

SEQ ID NO: 33248 - protein, 11 aa, Artificial Sequence
  Description of Artificial Sequence: Synthetic peptide
  Seed: ALILRGSVAHK
AIILRGSVAHK

SEQ ID NO: 33249 - protein, 9 aa, Artificial Sequence
  Description of Artificial Sequence: Synthetic peptide
  Seed: ASNENMETM
ALNENMETY

SEQ ID NO: 33250 - protein, 9 aa, Artificial Sequence
  Description of Artificial Sequence: Synthetic peptide
  Seed: ASNENMETM
AHNENMETM

SEQ ID NO: 33251 - protein, 9 aa, Artificial Sequence
  Description of Artificial Sequence: Synthetic peptide
  Seed: ASNENMETM
AHNENMETF

SEQ ID NO: 33252 - protein, 9 aa, Artificial Sequence
  Description of Artificial Sequence: Synthetic peptide
  Seed: ASNENMETM
AHNENMETY

SEQ ID NO: 33253 - protein, 9 aa, Artificial Sequence
  Description of Artificial Sequence: Synthetic peptide
  Seed: ASNENMETM
AINENMETM

SEQ ID NO: 33254 - protein, 9 aa, Artificial Sequence
  Description of Artificial Sequence: Synthetic peptide
  Seed: ASNENMETM
AINENMETF

SEQ ID NO: 33255 - protein, 9 aa, Artificial Sequence
  Description of Artificial Sequence: Synthetic peptide
  Seed: ASNENMETM
AINENMETW

SEQ ID NO: 33256 - protein, 9 aa, Artificial Sequence
  Description of Artificial Sequence: Synthetic peptide
  Seed: ASNENMETM
AINENMETY

SEQ ID NO: 33257 - protein, 9 aa, Artificial Sequence
  Description of Artificial Sequence: Synthetic peptide
  Seed: ASNENMETM
ALNENMETM

SEQ ID NO: 33258 - protein, 9 aa, Artificial Sequence
  Description of Artificial Sequence: Synthetic peptide
  Seed: ASNENMETM
ALNENMETF

SEQ ID NO: 33259 - protein, 9 aa, Artificial Sequence
  Description of Artificial Sequence: Synthetic peptide
  Seed: ASNENMETM
AKNENMETL

SEQ ID NO: 33260 - protein, 9 aa, Artificial Sequence
  Description of Artificial Sequence: Synthetic peptide
  Seed: ASNENMETM
ASNENMETL

SEQ ID NO: 33261 - protein, 9 aa, Artificial Sequence
  Description of Artificial Sequence: Synthetic peptide
  Seed: ASNENMETM
AKNENMETM

SEQ ID NO: 33262 - protein, 9 aa, Artificial Sequence
  Description of Artificial Sequence: Synthetic peptide
  Seed: ASNENMETM
AKNENMETF

SEQ ID NO: 33263 - protein, 9 aa, Artificial Sequence
  Description of Artificial Sequence: Synthetic peptide
  Seed: ASNENMETM
AKNENMETY

SEQ ID NO: 33264 - protein, 9 aa, Artificial Sequence
  Description of Artificial Sequence: Synthetic peptide
  Seed: ASNENMETM
AMNENMETI

SEQ ID NO: 33265 - protein, 9 aa, Artificial Sequence
  Description of Artificial Sequence: Synthetic peptide
  Seed: ASNENMETM
AMNENMETL

SEQ ID NO: 33266 - protein, 9 aa, Artificial Sequence
  Description of Artificial Sequence: Synthetic peptide
  Seed: ASNENMETM
AMNENMETM

SEQ ID NO: 33267 - protein, 9 aa, Artificial Sequence
  Description of Artificial Sequence: Synthetic peptide
  Seed: ASNENMETM
AMNENMETF

SEQ ID NO: 33268 - protein, 9 aa, Artificial Sequence
  Description of Artificial Sequence: Synthetic peptide
  Seed: ASNENMETM
AMNENMETW

SEQ ID NO: 33269 - protein, 9 aa, Artificial Sequence
  Description of Artificial Sequence: Synthetic peptide
  Seed: ASNENMETM
AMNENMETY

SEQ ID NO: 33270 - protein, 9 aa, Artificial Sequence
  Description of Artificial Sequence: Synthetic peptide
  Seed: ASNENMETM
AGNENMETY

SEQ ID NO: 33271 - protein, 9 aa, Artificial Sequence
  Description of Artificial Sequence: Synthetic peptide
  Seed: ASNENMETM
AENENMETY

SEQ ID NO: 33272 - protein, 9 aa, Artificial Sequence
  Description of Artificial Sequence: Synthetic peptide
  Seed: ASNENMETM
AENENMETF

SEQ ID NO: 33273 - protein, 9 aa, Artificial Sequence
  Description of Artificial Sequence: Synthetic peptide
  Seed: ASNENMETM
AENENMETM

SEQ ID NO: 33274 - protein, 9 aa, Artificial Sequence
  Description of Artificial Sequence: Synthetic peptide
  Seed: ASNENMETM
AANENMETL

SEQ ID NO: 33275 - protein, 9 aa, Artificial Sequence
  Description of Artificial Sequence: Synthetic peptide
  Seed: ASNENMETM
AANENMETM

SEQ ID NO: 33276 - protein, 9 aa, Artificial Sequence
  Description of Artificial Sequence: Synthetic peptide
  Seed: ASNENMETM
AANENMETF

SEQ ID NO: 33277 - protein, 9 aa, Artificial Sequence
  Description of Artificial Sequence: Synthetic peptide
  Seed: ASNENMETM
AANENMETW

SEQ ID NO: 33278 - protein, 9 aa, Artificial Sequence
  Description of Artificial Sequence: Synthetic peptide
  Seed: ASNENMETM
AANENMETY

SEQ ID NO: 33279 - protein, 9 aa, Artificial Sequence
  Description of Artificial Sequence: Synthetic peptide
  Seed: ASNENMETM
AANENMETV

SEQ ID NO: 33280 - protein, 9 aa, Artificial Sequence
  Description of Artificial Sequence: Synthetic peptide
  Seed: ASNENMETM
ARNENMETM

SEQ ID NO: 33281 - protein, 9 aa, Artificial Sequence
  Description of Artificial Sequence: Synthetic peptide
  Seed: ASNENMETM
ARNENMETF

SEQ ID NO: 33282 - protein, 9 aa, Artificial Sequence
  Description of Artificial Sequence: Synthetic peptide
  Seed: ASNENMETM
ARNENMETY

SEQ ID NO: 33283 - protein, 9 aa, Artificial Sequence
  Description of Artificial Sequence: Synthetic peptide
  Seed: ASNENMETM
ANNENMETF

SEQ ID NO: 33284 - protein, 9 aa, Artificial Sequence
  Description of Artificial Sequence: Synthetic peptide
  Seed: ASNENMETM
ANNENMETY

SEQ ID NO: 33285 - protein, 9 aa, Artificial Sequence
  Description of Artificial Sequence: Synthetic peptide
  Seed: ASNENMETM
AQNENMETH

SEQ ID NO: 33286 - protein, 9 aa, Artificial Sequence
  Description of Artificial Sequence: Synthetic peptide
  Seed: ASNENMETM
AQNENMETI

SEQ ID NO: 33287 - protein, 9 aa, Artificial Sequence
  Description of Artificial Sequence: Synthetic peptide
  Seed: ASNENMETM
AQNENMETL

SEQ ID NO: 33288 - protein, 9 aa, Artificial Sequence
  Description of Artificial Sequence: Synthetic peptide
  Seed: ASNENMETM
AQNENMETM

SEQ ID NO: 33289 - protein, 9 aa, Artificial Sequence
  Description of Artificial Sequence: Synthetic peptide
  Seed: ASNENMETM
AQNENMETF

SEQ ID NO: 33290 - protein, 9 aa, Artificial Sequence
  Description of Artificial Sequence: Synthetic peptide
  Seed: ASNENMETM
AQNENMETW

SEQ ID NO: 33291 - protein, 9 aa, Artificial Sequence
  Description of Artificial Sequence: Synthetic peptide
  Seed: ASNENMETM
AQNENMETY

SEQ ID NO: 33292 - protein, 9 aa, Artificial Sequence
  Description of Artificial Sequence: Synthetic peptide
  Seed: ASNENMETM
AQNENMETV

SEQ ID NO: 33293 - protein, 9 aa, Artificial Sequence
  Description of Artificial Sequence: Synthetic peptide
  Seed: ASNENMETM
ASNENMETF

SEQ ID NO: 33294 - protein, 9 aa, Artificial Sequence
  Description of Artificial Sequence: Synthetic peptide
  Seed: AQRAMMDQV
ATRAMMDQK

SEQ ID NO: 33295 - protein, 9 aa, Artificial Sequence
  Description of Artificial Sequence: Synthetic peptide
  Seed: ASQGTKRSY
AKQGTKRSF

SEQ ID NO: 33296 - protein, 9 aa, Artificial Sequence
  Description of Artificial Sequence: Synthetic peptide
  Seed: ASQGTKRSY
AHQGTKRSM

SEQ ID NO: 33297 - protein, 9 aa, Artificial Sequence
  Description of Artificial Sequence: Synthetic peptide
  Seed: ASQGTKRSY
AHQGTKRSF

SEQ ID NO: 33298 - protein, 9 aa, Artificial Sequence
  Description of Artificial Sequence: Synthetic peptide
  Seed: ASQGTKRSY
AHQGTKRSY

SEQ ID NO: 33299 - protein, 9 aa, Artificial Sequence
  Description of Artificial Sequence: Synthetic peptide
  Seed: ASQGTKRSY
AIQGTKRSF

SEQ ID NO: 33300 - protein, 9 aa, Artificial Sequence
  Description of Artificial Sequence: Synthetic peptide
  Seed: ASQGTKRSY
AIQGTKRSY

SEQ ID NO: 33301 - protein, 9 aa, Artificial Sequence
  Description of Artificial Sequence: Synthetic peptide
  Seed: ASQGTKRSY
ALQGTKRSM

SEQ ID NO: 33302 - protein, 9 aa, Artificial Sequence
  Description of Artificial Sequence: Synthetic peptide
  Seed: ASQGTKRSY
ALQGTKRSF

SEQ ID NO: 33303 - protein, 9 aa, Artificial Sequence
  Description of Artificial Sequence: Synthetic peptide
  Seed: ASQGTKRSY
AKQGTKRSM

SEQ ID NO: 33304 - protein, 9 aa, Artificial Sequence
  Description of Artificial Sequence: Synthetic peptide
  Seed: ASQGTKRSY
AKQGTKRSY

SEQ ID NO: 33305 - protein, 9 aa, Artificial Sequence
  Description of Artificial Sequence: Synthetic peptide
  Seed: ASNENMETM
ASNENMETW

SEQ ID NO: 33306 - protein, 9 aa, Artificial Sequence
  Description of Artificial Sequence: Synthetic peptide
  Seed: ASQGTKRSY
AMQGTKRSM

SEQ ID NO: 33307 - protein, 9 aa, Artificial Sequence
  Description of Artificial Sequence: Synthetic peptide
  Seed: ASQGTKRSY
AMQGTKRSF

SEQ ID NO: 33308 - protein, 9 aa, Artificial Sequence
  Description of Artificial Sequence: Synthetic peptide
  Seed: ASQGTKRSY
AMQGTKRSY

SEQ ID NO: 33309 - protein, 9 aa, Artificial Sequence
  Description of Artificial Sequence: Synthetic peptide
  Seed: ASQGTKRSY
ASQGTKRSF

SEQ ID NO: 33310 - protein, 9 aa, Artificial Sequence
  Description of Artificial Sequence: Synthetic peptide
  Seed: ASQGTKRSY
AVQGTKRSF

SEQ ID NO: 33311 - protein, 9 aa, Artificial Sequence
  Description of Artificial Sequence: Synthetic peptide
  Seed: ASQGTKRSY
AVQGTKRSY

SEQ ID NO: 33312 - protein, 9 aa, Artificial Sequence
  Description of Artificial Sequence: Synthetic peptide
  Seed: ATAGLTHIM
AAAGLTHII

SEQ ID NO: 33313 - protein, 9 aa, Artificial Sequence
  Description of Artificial Sequence: Synthetic peptide
  Seed: ATAGLTHIM
AAAGLTHIL

SEQ ID NO: 33314 - protein, 9 aa, Artificial Sequence
  Description of Artificial Sequence: Synthetic peptide
  Seed: ASQGTKRSY
AEQGTKRSY

SEQ ID NO: 33315 - protein, 9 aa, Artificial Sequence
  Description of Artificial Sequence: Synthetic peptide
  Seed: ASQGTKRSY
AEQGTKRSF

SEQ ID NO: 33316 - protein, 9 aa, Artificial Sequence
  Description of Artificial Sequence: Synthetic peptide
  Seed: ASQGTKRSY
AQQGTKRSY

SEQ ID NO: 33317 - protein, 9 aa, Artificial Sequence
  Description of Artificial Sequence: Synthetic peptide
  Seed: ASQGTKRSY
AQQGTKRSW

SEQ ID NO: 33318 - protein, 9 aa, Artificial Sequence
  Description of Artificial Sequence: Synthetic peptide
  Seed: ASNENMETM
ASNENMETY

SEQ ID NO: 33319 - protein, 9 aa, Artificial Sequence
  Description of Artificial Sequence: Synthetic peptide
  Seed: ASNENMETM
ASNENMETV

SEQ ID NO: 33320 - protein, 9 aa, Artificial Sequence
  Description of Artificial Sequence: Synthetic peptide
  Seed: ASNENMETM
ATNENMETI

SEQ ID NO: 33321 - protein, 9 aa, Artificial Sequence
  Description of Artificial Sequence: Synthetic peptide
  Seed: ASNENMETM
ATNENMETL

SEQ ID NO: 33322 - protein, 9 aa, Artificial Sequence
  Description of Artificial Sequence: Synthetic peptide
  Seed: ASNENMETM
ATNENMETM

SEQ ID NO: 33323 - protein, 9 aa, Artificial Sequence
  Description of Artificial Sequence: Synthetic peptide
  Seed: ASNENMETM
ATNENMETF

SEQ ID NO: 33324 - protein, 9 aa, Artificial Sequence
  Description of Artificial Sequence: Synthetic peptide
  Seed: ASNENMETM
ATNENMETW

SEQ ID NO: 33325 - protein, 9 aa, Artificial Sequence
  Description of Artificial Sequence: Synthetic peptide
  Seed: ASNENMETM
ATNENMETY

SEQ ID NO: 33326 - protein, 9 aa, Artificial Sequence
  Description of Artificial Sequence: Synthetic peptide
  Seed: ASNENMETM
ATNENMETV

SEQ ID NO: 33327 - protein, 9 aa, Artificial Sequence
  Description of Artificial Sequence: Synthetic peptide
  Seed: ASNENMETM
AVNENMETF

SEQ ID NO: 33328 - protein, 9 aa, Artificial Sequence
  Description of Artificial Sequence: Synthetic peptide
  Seed: ASNENMETM
AVNENMETW

SEQ ID NO: 33329 - protein, 9 aa, Artificial Sequence
  Description of Artificial Sequence: Synthetic peptide
  Seed: ASNENMETM
AVNENMETY

SEQ ID NO: 33330 - protein, 9 aa, Artificial Sequence
  Description of Artificial Sequence: Synthetic peptide
  Seed: ASQGTKRSY
AAQGTKRSF

SEQ ID NO: 33331 - protein, 9 aa, Artificial Sequence
  Description of Artificial Sequence: Synthetic peptide
  Seed: ASQGTKRSY
AAQGTKRSY

SEQ ID NO: 33332 - protein, 9 aa, Artificial Sequence
  Description of Artificial Sequence: Synthetic peptide
  Seed: ASQGTKRSY
ARQGTKRSY

SEQ ID NO: 33333 - protein, 9 aa, Artificial Sequence
  Description of Artificial Sequence: Synthetic peptide
  Seed: ASQGTKRSY
AQQGTKRSH

SEQ ID NO: 33334 - protein, 9 aa, Artificial Sequence
  Description of Artificial Sequence: Synthetic peptide
  Seed: ASQGTKRSY
AQQGTKRSL

SEQ ID NO: 33335 - protein, 9 aa, Artificial Sequence
  Description of Artificial Sequence: Synthetic peptide
  Seed: ASQGTKRSY
AQQGTKRSM

SEQ ID NO: 33336 - protein, 9 aa, Artificial Sequence
  Description of Artificial Sequence: Synthetic peptide
  Seed: ASQGTKRSY
AQQGTKRSF

SEQ ID NO: 33337 - protein, 9 aa, Artificial Sequence
  Description of Artificial Sequence: Synthetic peptide
  Seed: ASNENMETM
AANENMETI

SEQ ID NO: 33338 - protein, 9 aa, Artificial Sequence
  Description of Artificial Sequence: Synthetic peptide
  Seed: ASNENMDTM
AVNENMDTY

SEQ ID NO: 33339 - protein, 9 aa, Artificial Sequence
  Description of Artificial Sequence: Synthetic peptide
  Seed: ASNENMDTM
AVNENMDTW

SEQ ID NO: 33340 - protein, 10 aa, Artificial Sequence
  Description of Artificial Sequence: Synthetic peptide
  Seed: AQRAMMDQVR
AFRAMMDQVR

SEQ ID NO: 33341 - protein, 9 aa, Artificial Sequence
  Description of Artificial Sequence: Synthetic peptide
  Seed: AQRAMMDQV
AVRAMMDQM

SEQ ID NO: 33342 - protein, 9 aa, Artificial Sequence
  Description of Artificial Sequence: Synthetic peptide
  Seed: AQRAMMDQV
AVRAMMDQS

SEQ ID NO: 33343 - protein, 9 aa, Artificial Sequence
  Description of Artificial Sequence: Synthetic peptide
  Seed: AQRAMMDQV
AVRAMMDQY

SEQ ID NO: 33344 - protein, 9 aa, Artificial Sequence
  Description of Artificial Sequence: Synthetic peptide
  Seed: AQRAMMDQV
AVRAMMDQV

SEQ ID NO: 33345 - protein, 10 aa, Artificial Sequence
  Description of Artificial Sequence: Synthetic peptide
  Seed: AQRAMMDQVR
AARAMMDQVR

SEQ ID NO: 33346 - protein, 10 aa, Artificial Sequence
  Description of Artificial Sequence: Synthetic peptide
  Seed: AQRAMMDQVR
AIRAMMDQVR

SEQ ID NO: 33347 - protein, 10 aa, Artificial Sequence
  Description of Artificial Sequence: Synthetic peptide
  Seed: AQRAMMDQVR
ALRAMMDQVR

SEQ ID NO: 33348 - protein, 10 aa, Artificial Sequence
  Description of Artificial Sequence: Synthetic peptide
  Seed: AQRAMMDQVR
AMRAMMDQVR

SEQ ID NO: 33349 - protein, 10 aa, Artificial Sequence
  Description of Artificial Sequence: Synthetic peptide
  Seed: AQRAMMDQVR
AMRAMMDQVK

SEQ ID NO: 33350 - protein, 10 aa, Artificial Sequence
  Description of Artificial Sequence: Synthetic peptide
  Seed: AQRAMMDQVR
AFRAMMDQVK

SEQ ID NO: 33351 - protein, 9 aa, Artificial Sequence
  Description of Artificial Sequence: Synthetic peptide
  Seed: ASNENMDTM
AVNENMDTF

SEQ ID NO: 33352 - protein, 10 aa, Artificial Sequence
  Description of Artificial Sequence: Synthetic peptide
  Seed: AQRAMMDQVR
ASRAMMDQVR

SEQ ID NO: 33353 - protein, 10 aa, Artificial Sequence
  Description of Artificial Sequence: Synthetic peptide
  Seed: AQRAMMDQVR
ATRAMMDQVR

SEQ ID NO: 33354 - protein, 10 aa, Artificial Sequence
  Description of Artificial Sequence: Synthetic peptide
  Seed: AQRAMMDQVR
ATRAMMDQVK

SEQ ID NO: 33355 - protein, 10 aa, Artificial Sequence
  Description of Artificial Sequence: Synthetic peptide
  Seed: AQRAMMDQVR
AWRAMMDQVR

SEQ ID NO: 33356 - protein, 10 aa, Artificial Sequence
  Description of Artificial Sequence: Synthetic peptide
  Seed: AQRAMMDQVR
AWRAMMDQVK

SEQ ID NO: 33357 - protein, 10 aa, Artificial Sequence
  Description of Artificial Sequence: Synthetic peptide
  Seed: AQRAMMDQVR
AYRAMMDQVR

SEQ ID NO: 33358 - protein, 10 aa, Artificial Sequence
  Description of Artificial Sequence: Synthetic peptide
  Seed: AQRAMMDQVR
AYRAMMDQVK

SEQ ID NO: 33359 - protein, 10 aa, Artificial Sequence
  Description of Artificial Sequence: Synthetic peptide
  Seed: AQRAMMDQVR
AVRAMMDQVR

SEQ ID NO: 33360 - protein, 9 aa, Artificial Sequence
  Description of Artificial Sequence: Synthetic peptide
  Seed: ARSALILRG
ARSALILRA

SEQ ID NO: 33361 - protein, 9 aa, Artificial Sequence
  Description of Artificial Sequence: Synthetic peptide
  Seed: AQRAMMDQV
AVRAMMDQK

SEQ ID NO: 33362 - protein, 9 aa, Artificial Sequence
  Description of Artificial Sequence: Synthetic peptide
  Seed: AQRAMMDQV
AVRAMMDQL

SEQ ID NO: 33363 - protein, 9 aa, Artificial Sequence
  Description of Artificial Sequence: Synthetic peptide
  Seed: AQRAMMDQV
AVRAMMDQI

SEQ ID NO: 33364 - protein, 9 aa, Artificial Sequence
  Description of Artificial Sequence: Synthetic peptide
  Seed: AQRAMMDQV
AVRAMMDQG

SEQ ID NO: 33365 - protein, 9 aa, Artificial Sequence
  Description of Artificial Sequence: Synthetic peptide
  Seed: AQRAMMDQV
ATRAMMDQM

SEQ ID NO: 33366 - protein, 9 aa, Artificial Sequence
  Description of Artificial Sequence: Synthetic peptide
  Seed: AQRAMMDQV
ATRAMMDQF

SEQ ID NO: 33367 - protein, 9 aa, Artificial Sequence
  Description of Artificial Sequence: Synthetic peptide
  Seed: AQRAMMDQV
ATRAMMDQP

SEQ ID NO: 33368 - protein, 9 aa, Artificial Sequence
  Description of Artificial Sequence: Synthetic peptide
  Seed: AQRAMMDQV
ATRAMMDQS

SEQ ID NO: 33369 - protein, 9 aa, Artificial Sequence
  Description of Artificial Sequence: Synthetic peptide
  Seed: AQRAMMDQV
ATRAMMDQT

SEQ ID NO: 33370 - protein, 9 aa, Artificial Sequence
  Description of Artificial Sequence: Synthetic peptide
  Seed: AQRAMMDQV
ATRAMMDQY

SEQ ID NO: 33371 - protein, 9 aa, Artificial Sequence
  Description of Artificial Sequence: Synthetic peptide
  Seed: AQRAMMDQV
ATRAMMDQV

SEQ ID NO: 33372 - protein, 9 aa, Artificial Sequence
  Description of Artificial Sequence: Synthetic peptide
  Seed: AQRAMMDQV
AWRAMMDQA

SEQ ID NO: 33373 - protein, 9 aa, Artificial Sequence
  Description of Artificial Sequence: Synthetic peptide
  Seed: AQRAMMDQV
AWRAMMDQK

SEQ ID NO: 33374 - protein, 9 aa, Artificial Sequence
  Description of Artificial Sequence: Synthetic peptide
  Seed: AQRAMMDQV
AWRAMMDQV

SEQ ID NO: 33375 - protein, 9 aa, Artificial Sequence
  Description of Artificial Sequence: Synthetic peptide
  Seed: AQRAMMDQV
AYRAMMDQA

SEQ ID NO: 33376 - protein, 9 aa, Artificial Sequence
  Description of Artificial Sequence: Synthetic peptide
  Seed: AQRAMMDQV
AYRAMMDQR

SEQ ID NO: 33377 - protein, 9 aa, Artificial Sequence
  Description of Artificial Sequence: Synthetic peptide
  Seed: AQRAMMDQV
AYRAMMDQI

SEQ ID NO: 33378 - protein, 9 aa, Artificial Sequence
  Description of Artificial Sequence: Synthetic peptide
  Seed: AQRAMMDQV
AYRAMMDQL

SEQ ID NO: 33379 - protein, 9 aa, Artificial Sequence
  Description of Artificial Sequence: Synthetic peptide
  Seed: AQRAMMDQV
AYRAMMDQK

SEQ ID NO: 33380 - protein, 9 aa, Artificial Sequence
  Description of Artificial Sequence: Synthetic peptide
  Seed: AQRAMMDQV
AYRAMMDQM

SEQ ID NO: 33381 - protein, 9 aa, Artificial Sequence
  Description of Artificial Sequence: Synthetic peptide
  Seed: AQRAMMDQV
AYRAMMDQV

SEQ ID NO: 33382 - protein, 9 aa, Artificial Sequence
  Description of Artificial Sequence: Synthetic peptide
  Seed: AQRAMMDQV
AVRAMMDQA

SEQ ID NO: 33383 - protein, 9 aa, Artificial Sequence
  Description of Artificial Sequence: Synthetic peptide
  Seed: AQRAMMDQV
AVRAMMDQR

SEQ ID NO: 33384 - protein, 9 aa, Artificial Sequence
  Description of Artificial Sequence: Synthetic peptide
  Seed: ARSALILRG
ARSALILRR

SEQ ID NO: 33385 - protein, 9 aa, Artificial Sequence
  Description of Artificial Sequence: Synthetic peptide
  Seed: ARSALILRG
ARSALILRH

SEQ ID NO: 33386 - protein, 9 aa, Artificial Sequence
  Description of Artificial Sequence: Synthetic peptide
  Seed: ARSALILRG
ARSALILRI

SEQ ID NO: 33387 - protein, 9 aa, Artificial Sequence
  Description of Artificial Sequence: Synthetic peptide
  Seed: ASNENMDTM
AANENMDTV

SEQ ID NO: 33388 - protein, 9 aa, Artificial Sequence
  Description of Artificial Sequence: Synthetic peptide
  Seed: ASNENMDTM
AINENMDTF

SEQ ID NO: 33389 - protein, 9 aa, Artificial Sequence
  Description of Artificial Sequence: Synthetic peptide
  Seed: ASNENMDTM
AINENMDTW

SEQ ID NO: 33390 - protein, 9 aa, Artificial Sequence
  Description of Artificial Sequence: Synthetic peptide
  Seed: ASNENMDTM
AINENMDTY

SEQ ID NO: 33391 - protein, 9 aa, Artificial Sequence
  Description of Artificial Sequence: Synthetic peptide
  Seed: ASNENMDTM
AMNENMDTM

SEQ ID NO: 33392 - protein, 9 aa, Artificial Sequence
  Description of Artificial Sequence: Synthetic peptide
  Seed: ASNENMDTM
AMNENMDTF

SEQ ID NO: 33393 - protein, 9 aa, Artificial Sequence
  Description of Artificial Sequence: Synthetic peptide
  Seed: ASNENMDTM
AMNENMDTW

SEQ ID NO: 33394 - protein, 9 aa, Artificial Sequence
  Description of Artificial Sequence: Synthetic peptide
  Seed: ASNENMDTM
AMNENMDTY

SEQ ID NO: 33395 - protein, 9 aa, Artificial Sequence
  Description of Artificial Sequence: Synthetic peptide
  Seed: ASNENMDTM
ASNENMDTI

SEQ ID NO: 33396 - protein, 9 aa, Artificial Sequence
  Description of Artificial Sequence: Synthetic peptide
  Seed: ASNENMDTM
ASNENMDTL

SEQ ID NO: 33397 - protein, 9 aa, Artificial Sequence
  Description of Artificial Sequence: Synthetic peptide
  Seed: ASNENMDTM
ASNENMDTF

SEQ ID NO: 33398 - protein, 9 aa, Artificial Sequence
  Description of Artificial Sequence: Synthetic peptide
  Seed: ASNENMDTM
ASNENMDTW

SEQ ID NO: 33399 - protein, 9 aa, Artificial Sequence
  Description of Artificial Sequence: Synthetic peptide
  Seed: ASNENMDTM
ASNENMDTY

SEQ ID NO: 33400 - protein, 9 aa, Artificial Sequence
  Description of Artificial Sequence: Synthetic peptide
  Seed: ASNENMDTM
ATNENMDTI

SEQ ID NO: 33401 - protein, 9 aa, Artificial Sequence
  Description of Artificial Sequence: Synthetic peptide
  Seed: ASNENMDTM
ATNENMDTL

SEQ ID NO: 33402 - protein, 9 aa, Artificial Sequence
  Description of Artificial Sequence: Synthetic peptide
  Seed: ASNENMDTM
ATNENMDTM

SEQ ID NO: 33403 - protein, 9 aa, Artificial Sequence
  Description of Artificial Sequence: Synthetic peptide
  Seed: ASNENMDTM
ATNENMDTF

SEQ ID NO: 33404 - protein, 9 aa, Artificial Sequence
  Description of Artificial Sequence: Synthetic peptide
  Seed: ASNENMDTM
ATNENMDTW

SEQ ID NO: 33405 - protein, 9 aa, Artificial Sequence
  Description of Artificial Sequence: Synthetic peptide
  Seed: ASNENMDTM
ATNENMDTY

SEQ ID NO: 33406 - protein, 9 aa, Artificial Sequence
  Description of Artificial Sequence: Synthetic peptide
  Seed: ASNENMDTM
AVNENMDTM

SEQ ID NO: 33407 - protein, 9 aa, Artificial Sequence
  Description of Artificial Sequence: Synthetic peptide
  Seed: ASNENMDTM
AINENMDTM

SEQ ID NO: 33408 - protein, 9 aa, Artificial Sequence
  Description of Artificial Sequence: Synthetic peptide
  Seed: ASNENMDTM
AANENMDTY

SEQ ID NO: 33409 - protein, 9 aa, Artificial Sequence
  Description of Artificial Sequence: Synthetic peptide
  Seed: ARSALILRG
ARSALILRL

SEQ ID NO: 33410 - protein, 9 aa, Artificial Sequence
  Description of Artificial Sequence: Synthetic peptide
  Seed: ASNENMDTM
AANENMDTW

SEQ ID NO: 33411 - protein, 9 aa, Artificial Sequence
  Description of Artificial Sequence: Synthetic peptide
  Seed: ARSALILRG
ARSALILRK

SEQ ID NO: 33412 - protein, 9 aa, Artificial Sequence
  Description of Artificial Sequence: Synthetic peptide
  Seed: ARSALILRG
ARSALILRM

SEQ ID NO: 33413 - protein, 9 aa, Artificial Sequence
  Description of Artificial Sequence: Synthetic peptide
  Seed: ARSALILRG
ARSALILRF

SEQ ID NO: 33414 - protein, 9 aa, Artificial Sequence
  Description of Artificial Sequence: Synthetic peptide
  Seed: ARSALILRG
ARSALILRS

SEQ ID NO: 33415 - protein, 9 aa, Artificial Sequence
  Description of Artificial Sequence: Synthetic peptide
  Seed: ARSALILRG
ARSALILRT

SEQ ID NO: 33416 - protein, 9 aa, Artificial Sequence
  Description of Artificial Sequence: Synthetic peptide
  Seed: ARSALILRG
ARSALILRW

SEQ ID NO: 33417 - protein, 9 aa, Artificial Sequence
  Description of Artificial Sequence: Synthetic peptide
  Seed: ARSALILRG
ARSALILRY

SEQ ID NO: 33418 - protein, 9 aa, Artificial Sequence
  Description of Artificial Sequence: Synthetic peptide
  Seed: ARSALILRG
ARSALILRV

SEQ ID NO: 33419 - protein, 11 aa, Artificial Sequence
  Description of Artificial Sequence: Synthetic peptide
  Seed: ARSALILRGSV
ARSALILRGSR

SEQ ID NO: 33420 - protein, 11 aa, Artificial Sequence
  Description of Artificial Sequence: Synthetic peptide
  Seed: ARSALILRGSV
ARSALILRGSI

SEQ ID NO: 33421 - protein, 11 aa, Artificial Sequence
  Description of Artificial Sequence: Synthetic peptide
  Seed: ARSALILRGSV
ARSALILRGSL

SEQ ID NO: 33422 - protein, 11 aa, Artificial Sequence
  Description of Artificial Sequence: Synthetic peptide
  Seed: ARSALILRGSV
ARSALILRGSK

SEQ ID NO: 33423 - protein, 11 aa, Artificial Sequence
  Description of Artificial Sequence: Synthetic peptide
  Seed: ARSALILRGSV
ARSALILRGSM

SEQ ID NO: 33424 - protein, 11 aa, Artificial Sequence
  Description of Artificial Sequence: Synthetic peptide
  Seed: ARSALILRGSV
ARSALILRGSF

SEQ ID NO: 33425 - protein, 11 aa, Artificial Sequence
  Description of Artificial Sequence: Synthetic peptide
  Seed: ARSALILRGSV
ARSALILRGSY

SEQ ID NO: 33426 - protein, 9 aa, Artificial Sequence
  Description of Artificial Sequence: Synthetic peptide
  Seed: ASNENMDTM
AANENMDTI

SEQ ID NO: 33427 - protein, 9 aa, Artificial Sequence
  Description of Artificial Sequence: Synthetic peptide
  Seed: ASNENMDTM
AANENMDTL

SEQ ID NO: 33428 - protein, 9 aa, Artificial Sequence
  Description of Artificial Sequence: Synthetic peptide
  Seed: ASNENMDTM
AANENMDTM

SEQ ID NO: 33429 - protein, 9 aa, Artificial Sequence
  Description of Artificial Sequence: Synthetic peptide
  Seed: ASNENMDTM
AANENMDTF

SEQ ID NO: 33430 - protein, 11 aa, Artificial Sequence
  Description of Artificial Sequence: Synthetic peptide
  Seed: ALILRGSVAHK
AKILRGSVAHK

SEQ ID NO: 33431 - protein, 11 aa, Artificial Sequence
  Description of Artificial Sequence: Synthetic peptide
  Seed: ALILRGSVAHK
AHILRGSVAHK

SEQ ID NO: 33432 - protein, 10 aa, Artificial Sequence
  Description of Artificial Sequence: Synthetic peptide
  Seed: AFEDLRVSSF
AVEDLRVSSL

SEQ ID NO: 33433 - protein, 10 aa, Artificial Sequence
  Description of Artificial Sequence: Synthetic peptide
  Seed: AGQISIQPTF
AAQISIQPTF

SEQ ID NO: 33434 - protein, 9 aa, Artificial Sequence
  Description of Artificial Sequence: Synthetic peptide
  Seed: AGLTHMMIW
ATLTHMMIV

SEQ ID NO: 33435 - protein, 9 aa, Artificial Sequence
  Description of Artificial Sequence: Synthetic peptide
  Seed: AGLTHMMIW
AVLTHMMII

SEQ ID NO: 33436 - protein, 9 aa, Artificial Sequence
  Description of Artificial Sequence: Synthetic peptide
  Seed: AGLTHMMIW
AVLTHMMIL

SEQ ID NO: 33437 - protein, 9 aa, Artificial Sequence
  Description of Artificial Sequence: Synthetic peptide
  Seed: AGLTHMMIW
AVLTHMMIM

SEQ ID NO: 33438 - protein, 9 aa, Artificial Sequence
  Description of Artificial Sequence: Synthetic peptide
  Seed: AGLTHMMIW
AVLTHMMIF

SEQ ID NO: 33439 - protein, 9 aa, Artificial Sequence
  Description of Artificial Sequence: Synthetic peptide
  Seed: AGLTHMMIW
AVLTHMMIW

SEQ ID NO: 33440 - protein, 9 aa, Artificial Sequence
  Description of Artificial Sequence: Synthetic peptide
  Seed: AGLTHMMIW
AVLTHMMIY

SEQ ID NO: 33441 - protein, 10 aa, Artificial Sequence
  Description of Artificial Sequence: Synthetic peptide
  Seed: AGQISIQPTF
AAQISIQPTL

SEQ ID NO: 33442 - protein, 10 aa, Artificial Sequence
  Description of Artificial Sequence: Synthetic peptide
  Seed: AGQISIQPTF
AAQISIQPTM

SEQ ID NO: 33443 - protein, 10 aa, Artificial Sequence
  Description of Artificial Sequence: Synthetic peptide
  Seed: AGQISIQPTF
AAQISIQPTW

SEQ ID NO: 33444 - protein, 10 aa, Artificial Sequence
  Description of Artificial Sequence: Synthetic peptide
  Seed: AGQISIQPTF
ANQISIQPTW

SEQ ID NO: 33445 - protein, 10 aa, Artificial Sequence
  Description of Artificial Sequence: Synthetic peptide
  Seed: AGQISIQPTF
AAQISIQPTY

SEQ ID NO: 33446 - protein, 10 aa, Artificial Sequence
  Description of Artificial Sequence: Synthetic peptide
  Seed: AGQISIQPTF
ARQISIQPTI

SEQ ID NO: 33447 - protein, 10 aa, Artificial Sequence
  Description of Artificial Sequence: Synthetic peptide
  Seed: AGQISIQPTF
ARQISIQPTL

SEQ ID NO: 33448 - protein, 10 aa, Artificial Sequence
  Description of Artificial Sequence: Synthetic peptide
  Seed: AGQISIQPTF
ARQISIQPTM

SEQ ID NO: 33449 - protein, 10 aa, Artificial Sequence
  Description of Artificial Sequence: Synthetic peptide
  Seed: AGQISIQPTF
ARQISIQPTF

SEQ ID NO: 33450 - protein, 10 aa, Artificial Sequence
  Description of Artificial Sequence: Synthetic peptide
  Seed: AGQISIQPTF
ARQISIQPTW

SEQ ID NO: 33451 - protein, 10 aa, Artificial Sequence
  Description of Artificial Sequence: Synthetic peptide
  Seed: AGQISIQPTF
ARQISIQPTY

SEQ ID NO: 33452 - protein, 10 aa, Artificial Sequence
  Description of Artificial Sequence: Synthetic peptide
  Seed: AGQISIQPTF
ANQISIQPTL

SEQ ID NO: 33453 - protein, 10 aa, Artificial Sequence
  Description of Artificial Sequence: Synthetic peptide
  Seed: AGQISIQPTF
ANQISIQPTM

SEQ ID NO: 33454 - protein, 9 aa, Artificial Sequence
  Description of Artificial Sequence: Synthetic peptide
  Seed: AGLTHMMIW
ATLTHMMIY

SEQ ID NO: 33455 - protein, 9 aa, Artificial Sequence
  Description of Artificial Sequence: Synthetic peptide
  Seed: AGLTHMMIW
ATLTHMMIW

SEQ ID NO: 33456 - protein, 9 aa, Artificial Sequence
  Description of Artificial Sequence: Synthetic peptide
  Seed: AGLTHMMIW
ATLTHMMIF

SEQ ID NO: 33457 - protein, 9 aa, Artificial Sequence
  Description of Artificial Sequence: Synthetic peptide
  Seed: AGLTHMMIW
ATLTHMMIM

SEQ ID NO: 33458 - protein, 9 aa, Artificial Sequence
  Description of Artificial Sequence: Synthetic peptide
  Seed: AGLTHMMIW
AQLTHMMIW

SEQ ID NO: 33459 - protein, 9 aa, Artificial Sequence
  Description of Artificial Sequence: Synthetic peptide
  Seed: AGLTHMMIW
AGLTHMMIF

SEQ ID NO: 33460 - protein, 9 aa, Artificial Sequence
  Description of Artificial Sequence: Synthetic peptide
  Seed: AGLTHMMIW
AGLTHMMIY

SEQ ID NO: 33461 - protein, 9 aa, Artificial Sequence
  Description of Artificial Sequence: Synthetic peptide
  Seed: AGLTHMMIW
AILTHMMIF

SEQ ID NO: 33462 - protein, 9 aa, Artificial Sequence
  Description of Artificial Sequence: Synthetic peptide
  Seed: AGLTHMMIW
AILTHMMIW

SEQ ID NO: 33463 - protein, 9 aa, Artificial Sequence
  Description of Artificial Sequence: Synthetic peptide
  Seed: AGLTHMMIW
AILTHMMIY

SEQ ID NO: 33464 - protein, 9 aa, Artificial Sequence
  Description of Artificial Sequence: Synthetic peptide
  Seed: AGLTHMMIW
ALLTHMMIW

SEQ ID NO: 33465 - protein, 9 aa, Artificial Sequence
  Description of Artificial Sequence: Synthetic peptide
  Seed: AGLTHMMIW
AMLTHMMIF

SEQ ID NO: 33466 - protein, 9 aa, Artificial Sequence
  Description of Artificial Sequence: Synthetic peptide
  Seed: AGLTHMMIW
AMLTHMMIW

SEQ ID NO: 33467 - protein, 9 aa, Artificial Sequence
  Description of Artificial Sequence: Synthetic peptide
  Seed: AGLTHMMIW
AMLTHMMIY

SEQ ID NO: 33468 - protein, 9 aa, Artificial Sequence
  Description of Artificial Sequence: Synthetic peptide
  Seed: AGLTHMMIW
ASLTHMMII

SEQ ID NO: 33469 - protein, 9 aa, Artificial Sequence
  Description of Artificial Sequence: Synthetic peptide
  Seed: AGLTHMMIW
ASLTHMMIL

SEQ ID NO: 33470 - protein, 9 aa, Artificial Sequence
  Description of Artificial Sequence: Synthetic peptide
  Seed: AGLTHMMIW
ASLTHMMIM

SEQ ID NO: 33471 - protein, 9 aa, Artificial Sequence
  Description of Artificial Sequence: Synthetic peptide
  Seed: AGLTHMMIW
ASLTHMMIF

SEQ ID NO: 33472 - protein, 9 aa, Artificial Sequence
  Description of Artificial Sequence: Synthetic peptide
  Seed: AGLTHMMIW
ASLTHMMIW

SEQ ID NO: 33473 - protein, 9 aa, Artificial Sequence
  Description of Artificial Sequence: Synthetic peptide
  Seed: AGLTHMMIW
ASLTHMMIY

SEQ ID NO: 33474 - protein, 9 aa, Artificial Sequence
  Description of Artificial Sequence: Synthetic peptide
  Seed: AGLTHMMIW
ASLTHMMIV

SEQ ID NO: 33475 - protein, 9 aa, Artificial Sequence
  Description of Artificial Sequence: Synthetic peptide
  Seed: AGLTHMMIW
ATLTHMMII

SEQ ID NO: 33476 - protein, 9 aa, Artificial Sequence
  Description of Artificial Sequence: Synthetic peptide
  Seed: AGLTHMMIW
ATLTHMMIL

SEQ ID NO: 33477 - protein, 10 aa, Artificial Sequence
  Description of Artificial Sequence: Synthetic peptide
  Seed: AGQISIQPTF
ANQISIQPTF

SEQ ID NO: 33478 - protein, 10 aa, Artificial Sequence
  Description of Artificial Sequence: Synthetic peptide
  Seed: AGQISIQPTF
ANQISIQPTY

SEQ ID NO: 33479 - protein, 10 aa, Artificial Sequence
  Description of Artificial Sequence: Synthetic peptide
  Seed: AGQISIQPTF
AKQISIQPTF

SEQ ID NO: 33480 - protein, 10 aa, Artificial Sequence
  Description of Artificial Sequence: Synthetic peptide
  Seed: AGQISIQPTF
AIQISIQPTM

SEQ ID NO: 33481 - protein, 10 aa, Artificial Sequence
  Description of Artificial Sequence: Synthetic peptide
  Seed: AGQISIQPTF
AGQISIQPTM

SEQ ID NO: 33482 - protein, 10 aa, Artificial Sequence
  Description of Artificial Sequence: Synthetic peptide
  Seed: AGQISIQPTF
AGQISIQPTW

SEQ ID NO: 33483 - protein, 10 aa, Artificial Sequence
  Description of Artificial Sequence: Synthetic peptide
  Seed: AGQISIQPTF
AGQISIQPTY

SEQ ID NO: 33484 - protein, 10 aa, Artificial Sequence
  Description of Artificial Sequence: Synthetic peptide
  Seed: AGQISIQPTF
AHQISIQPTL

SEQ ID NO: 33485 - protein, 10 aa, Artificial Sequence
  Description of Artificial Sequence: Synthetic peptide
  Seed: AGQISIQPTF
AHQISIQPTM

SEQ ID NO: 33486 - protein, 10 aa, Artificial Sequence
  Description of Artificial Sequence: Synthetic peptide
  Seed: AGQISIQPTF
AHQISIQPTF

SEQ ID NO: 33487 - protein, 10 aa, Artificial Sequence
  Description of Artificial Sequence: Synthetic peptide
  Seed: AGQISIQPTF
AHQISIQPTW

SEQ ID NO: 33488 - protein, 10 aa, Artificial Sequence
  Description of Artificial Sequence: Synthetic peptide
  Seed: AGQISIQPTF
AHQISIQPTY

SEQ ID NO: 33489 - protein, 10 aa, Artificial Sequence
  Description of Artificial Sequence: Synthetic peptide
  Seed: AGQISIQPTF
AIQISIQPTL

SEQ ID NO: 33490 - protein, 10 aa, Artificial Sequence
  Description of Artificial Sequence: Synthetic peptide
  Seed: AGQISIQPTF
AIQISIQPTF

SEQ ID NO: 33491 - protein, 10 aa, Artificial Sequence
  Description of Artificial Sequence: Synthetic peptide
  Seed: AGQISIQPTF
ADQISIQPTL

SEQ ID NO: 33492 - protein, 10 aa, Artificial Sequence
  Description of Artificial Sequence: Synthetic peptide
  Seed: AGQISIQPTF
AIQISIQPTW

SEQ ID NO: 33493 - protein, 10 aa, Artificial Sequence
  Description of Artificial Sequence: Synthetic peptide
  Seed: AGQISIQPTF
AIQISIQPTY

SEQ ID NO: 33494 - protein, 10 aa, Artificial Sequence
  Description of Artificial Sequence: Synthetic peptide
  Seed: AGQISIQPTF
ALQISIQPTI

SEQ ID NO: 33495 - protein, 10 aa, Artificial Sequence
  Description of Artificial Sequence: Synthetic peptide
  Seed: AGQISIQPTF
ALQISIQPTL

SEQ ID NO: 33496 - protein, 10 aa, Artificial Sequence
  Description of Artificial Sequence: Synthetic peptide
  Seed: AGQISIQPTF
ALQISIQPTM

SEQ ID NO: 33497 - protein, 10 aa, Artificial Sequence
  Description of Artificial Sequence: Synthetic peptide
  Seed: AGQISIQPTF
ALQISIQPTF

SEQ ID NO: 33498 - protein, 10 aa, Artificial Sequence
  Description of Artificial Sequence: Synthetic peptide
  Seed: AGQISIQPTF
ALQISIQPTW

SEQ ID NO: 33499 - protein, 10 aa, Artificial Sequence
  Description of Artificial Sequence: Synthetic peptide
  Seed: AGQISIQPTF
ALQISIQPTY

SEQ ID NO: 33500 - protein, 10 aa, Artificial Sequence
  Description of Artificial Sequence: Synthetic peptide
  Seed: AGQISIQPTF
AKQISIQPTL

SEQ ID NO: 33501 - protein, 10 aa, Artificial Sequence
  Description of Artificial Sequence: Synthetic peptide
  Seed: AGQISIQPTF
AGQISIQPTL

SEQ ID NO: 33502 - protein, 10 aa, Artificial Sequence
  Description of Artificial Sequence: Synthetic peptide
  Seed: AGQISIQPTF
AEQISIQPTY

SEQ ID NO: 33503 - protein, 10 aa, Artificial Sequence
  Description of Artificial Sequence: Synthetic peptide
  Seed: AGQISIQPTF
AEQISIQPTW

SEQ ID NO: 33504 - protein, 10 aa, Artificial Sequence
  Description of Artificial Sequence: Synthetic peptide
  Seed: AGQISIQPTF
AEQISIQPTF

SEQ ID NO: 33505 - protein, 10 aa, Artificial Sequence
  Description of Artificial Sequence: Synthetic peptide
  Seed: AGQISIQPTF
ADQISIQPTM

SEQ ID NO: 33506 - protein, 10 aa, Artificial Sequence
  Description of Artificial Sequence: Synthetic peptide
  Seed: AGQISIQPTF
ADQISIQPTF

SEQ ID NO: 33507 - protein, 10 aa, Artificial Sequence
  Description of Artificial Sequence: Synthetic peptide
  Seed: AGQISIQPTF
ADQISIQPTW

SEQ ID NO: 33508 - protein, 10 aa, Artificial Sequence
  Description of Artificial Sequence: Synthetic peptide
  Seed: AGQISIQPTF
ADQISIQPTY

SEQ ID NO: 33509 - protein, 10 aa, Artificial Sequence
  Description of Artificial Sequence: Synthetic peptide
  Seed: AGQISIQPTF
ACQISIQPTI

SEQ ID NO: 33510 - protein, 10 aa, Artificial Sequence
  Description of Artificial Sequence: Synthetic peptide
  Seed: AGQISIQPTF
ACQISIQPTL

SEQ ID NO: 33511 - protein, 10 aa, Artificial Sequence
  Description of Artificial Sequence: Synthetic peptide
  Seed: AGQISIQPTF
ACQISIQPTM

SEQ ID NO: 33512 - protein, 10 aa, Artificial Sequence
  Description of Artificial Sequence: Synthetic peptide
  Seed: AGQISIQPTF
ACQISIQPTF

SEQ ID NO: 33513 - protein, 10 aa, Artificial Sequence
  Description of Artificial Sequence: Synthetic peptide
  Seed: AGQISIQPTF
ACQISIQPTW

SEQ ID NO: 33514 - protein, 10 aa, Artificial Sequence
  Description of Artificial Sequence: Synthetic peptide
  Seed: AGQISIQPTF
ACQISIQPTY

SEQ ID NO: 33515 - protein, 10 aa, Artificial Sequence
  Description of Artificial Sequence: Synthetic peptide
  Seed: AGQISIQPTF
AQQISIQPTI

SEQ ID NO: 33516 - protein, 10 aa, Artificial Sequence
  Description of Artificial Sequence: Synthetic peptide
  Seed: AGQISIQPTF
AQQISIQPTL

SEQ ID NO: 33517 - protein, 10 aa, Artificial Sequence
  Description of Artificial Sequence: Synthetic peptide
  Seed: AGQISIQPTF
AQQISIQPTM

SEQ ID NO: 33518 - protein, 10 aa, Artificial Sequence
  Description of Artificial Sequence: Synthetic peptide
  Seed: AGQISIQPTF
AQQISIQPTF

SEQ ID NO: 33519 - protein, 10 aa, Artificial Sequence
  Description of Artificial Sequence: Synthetic peptide
  Seed: AGQISIQPTF
AQQISIQPTW

SEQ ID NO: 33520 - protein, 10 aa, Artificial Sequence
  Description of Artificial Sequence: Synthetic peptide
  Seed: AGQISIQPTF
AQQISIQPTY

SEQ ID NO: 33521 - protein, 10 aa, Artificial Sequence
  Description of Artificial Sequence: Synthetic peptide
  Seed: AGQISIQPTF
AEQISIQPTI

SEQ ID NO: 33522 - protein, 10 aa, Artificial Sequence
  Description of Artificial Sequence: Synthetic peptide
  Seed: AGQISIQPTF
AEQISIQPTL

SEQ ID NO: 33523 - protein, 10 aa, Artificial Sequence
  Description of Artificial Sequence: Synthetic peptide
  Seed: AGQISIQPTF
AEQISIQPTM

SEQ ID NO: 33524 - protein, 9 aa, Artificial Sequence
  Description of Artificial Sequence: Synthetic peptide
  Seed: AGLTHMMIW
ACLTHMMIW

SEQ ID NO: 33525 - protein, 9 aa, Artificial Sequence
  Description of Artificial Sequence: Synthetic peptide
  Seed: AGLTHMMIW
ANLTHMMIW

SEQ ID NO: 33526 - protein, 9 aa, Artificial Sequence
  Description of Artificial Sequence: Synthetic peptide
  Seed: AGLTHMMIW
AALTHMMIY

SEQ ID NO: 33527 - protein, 9 aa, Artificial Sequence
  Description of Artificial Sequence: Synthetic peptide
  Seed: AGLTHIMIW
ASLTHIMIW

SEQ ID NO: 33528 - protein, 9 aa, Artificial Sequence
  Description of Artificial Sequence: Synthetic peptide
  Seed: AGLTHIMIW
AILTHIMIY

SEQ ID NO: 33529 - protein, 9 aa, Artificial Sequence
  Description of Artificial Sequence: Synthetic peptide
  Seed: AGLTHIMIW
ALLTHIMIW

SEQ ID NO: 33530 - protein, 9 aa, Artificial Sequence
  Description of Artificial Sequence: Synthetic peptide
  Seed: AGLTHIMIW
AMLTHIMIF

SEQ ID NO: 33531 - protein, 9 aa, Artificial Sequence
  Description of Artificial Sequence: Synthetic peptide
  Seed: AGLTHIMIW
AMLTHIMIW

SEQ ID NO: 33532 - protein, 9 aa, Artificial Sequence
  Description of Artificial Sequence: Synthetic peptide
  Seed: AGLTHIMIW
AMLTHIMIY

SEQ ID NO: 33533 - protein, 9 aa, Artificial Sequence
  Description of Artificial Sequence: Synthetic peptide
  Seed: AGLTHIMIW
ASLTHIMII

SEQ ID NO: 33534 - protein, 9 aa, Artificial Sequence
  Description of Artificial Sequence: Synthetic peptide
  Seed: AGLTHIMIW
ASLTHIMIL

SEQ ID NO: 33535 - protein, 9 aa, Artificial Sequence
  Description of Artificial Sequence: Synthetic peptide
  Seed: AGLTHIMIW
ASLTHIMIM

SEQ ID NO: 33536 - protein, 9 aa, Artificial Sequence
  Description of Artificial Sequence: Synthetic peptide
  Seed: AGLTHIMIW
ASLTHIMIF

SEQ ID NO: 33537 - protein, 9 aa, Artificial Sequence
  Description of Artificial Sequence: Synthetic peptide
  Seed: AGLTHIMIW
ASLTHIMIY

SEQ ID NO: 33538 - protein, 9 aa, Artificial Sequence
  Description of Artificial Sequence: Synthetic peptide
  Seed: AGLTHMMIW
AALTHMMIW

SEQ ID NO: 33539 - protein, 9 aa, Artificial Sequence
  Description of Artificial Sequence: Synthetic peptide
  Seed: AGLTHIMIW
ASLTHIMIV

SEQ ID NO: 33540 - protein, 9 aa, Artificial Sequence
  Description of Artificial Sequence: Synthetic peptide
  Seed: AGLTHIMIW
ATLTHIMII

SEQ ID NO: 33541 - protein, 9 aa, Artificial Sequence
  Description of Artificial Sequence: Synthetic peptide
  Seed: AGLTHIMIW
ATLTHIMIL

SEQ ID NO: 33542 - protein, 9 aa, Artificial Sequence
  Description of Artificial Sequence: Synthetic peptide
  Seed: AGLTHIMIW
ATLTHIMIM

SEQ ID NO: 33543 - protein, 9 aa, Artificial Sequence
  Description of Artificial Sequence: Synthetic peptide
  Seed: AGLTHIMIW
ATLTHIMIF

SEQ ID NO: 33544 - protein, 9 aa, Artificial Sequence
  Description of Artificial Sequence: Synthetic peptide
  Seed: AGLTHIMIW
ATLTHIMIW

SEQ ID NO: 33545 - protein, 9 aa, Artificial Sequence
  Description of Artificial Sequence: Synthetic peptide
  Seed: AGLTHIMIW
ATLTHIMIY

SEQ ID NO: 33546 - protein, 9 aa, Artificial Sequence
  Description of Artificial Sequence: Synthetic peptide
  Seed: AGLTHIMIW
ATLTHIMIV

SEQ ID NO: 33547 - protein, 9 aa, Artificial Sequence
  Description of Artificial Sequence: Synthetic peptide
  Seed: AGLTHIMIW
AVLTHIMII

SEQ ID NO: 33548 - protein, 9 aa, Artificial Sequence
  Description of Artificial Sequence: Synthetic peptide
  Seed: AGLTHIMIW
AILTHIMIW

SEQ ID NO: 33549 - protein, 9 aa, Artificial Sequence
  Description of Artificial Sequence: Synthetic peptide
  Seed: AGLTHIMIW
AILTHIMIF

SEQ ID NO: 33550 - protein, 9 aa, Artificial Sequence
  Description of Artificial Sequence: Synthetic peptide
  Seed: AGLTHIMIW
AGLTHIMIY

SEQ ID NO: 33551 - protein, 9 aa, Artificial Sequence
  Description of Artificial Sequence: Synthetic peptide
  Seed: AGLTHIMIW
AGLTHIMIF

SEQ ID NO: 33552 - protein, 10 aa, Artificial Sequence
  Description of Artificial Sequence: Synthetic peptide
  Seed: AFEDLRVSSF
AVEDLRVSSM

SEQ ID NO: 33553 - protein, 10 aa, Artificial Sequence
  Description of Artificial Sequence: Synthetic peptide
  Seed: AFEDLRVSSF
AVEDLRVSSF

SEQ ID NO: 33554 - protein, 10 aa, Artificial Sequence
  Description of Artificial Sequence: Synthetic peptide
  Seed: AFEDLRVSSF
AVEDLRVSSW

SEQ ID NO: 33555 - protein, 10 aa, Artificial Sequence
  Description of Artificial Sequence: Synthetic peptide
  Seed: AFEDLRVSSF
AVEDLRVSSY

SEQ ID NO: 33556 - protein, 9 aa, Artificial Sequence
  Description of Artificial Sequence: Synthetic peptide
  Seed: AFTGNTEGR
AITGNTEGR

SEQ ID NO: 33557 - protein, 9 aa, Artificial Sequence
  Description of Artificial Sequence: Synthetic peptide
  Seed: AFTGNTEGR
AMTGNTEGR

SEQ ID NO: 33558 - protein, 9 aa, Artificial Sequence
  Description of Artificial Sequence: Synthetic peptide
  Seed: AFTGNTEGR
ASTGNTEGR

SEQ ID NO: 33559 - protein, 9 aa, Artificial Sequence
  Description of Artificial Sequence: Synthetic peptide
  Seed: AFTGNTEGR
ATTGNTEGR

SEQ ID NO: 33560 - protein, 9 aa, Artificial Sequence
  Description of Artificial Sequence: Synthetic peptide
  Seed: AFTGNTEGR
AYTGNTEGR

SEQ ID NO: 33561 - protein, 9 aa, Artificial Sequence
  Description of Artificial Sequence: Synthetic peptide
  Seed: AFTGNTEGR
AVTGNTEGR

SEQ ID NO: 33562 - protein, 9 aa, Artificial Sequence
  Description of Artificial Sequence: Synthetic peptide
  Seed: AGLTHIMIW
AALTHIMII

SEQ ID NO: 33563 - protein, 9 aa, Artificial Sequence
  Description of Artificial Sequence: Synthetic peptide
  Seed: AGLTHIMIW
AALTHIMIL

SEQ ID NO: 33564 - protein, 9 aa, Artificial Sequence
  Description of Artificial Sequence: Synthetic peptide
  Seed: AGLTHIMIW
AALTHIMIM

SEQ ID NO: 33565 - protein, 9 aa, Artificial Sequence
  Description of Artificial Sequence: Synthetic peptide
  Seed: AGLTHIMIW
AALTHIMIF

SEQ ID NO: 33566 - protein, 9 aa, Artificial Sequence
  Description of Artificial Sequence: Synthetic peptide
  Seed: AGLTHIMIW
AALTHIMIW

SEQ ID NO: 33567 - protein, 9 aa, Artificial Sequence
  Description of Artificial Sequence: Synthetic peptide
  Seed: AGLTHIMIW
AALTHIMIY

SEQ ID NO: 33568 - protein, 9 aa, Artificial Sequence
  Description of Artificial Sequence: Synthetic peptide
  Seed: AGLTHIMIW
ANLTHIMIW

SEQ ID NO: 33569 - protein, 9 aa, Artificial Sequence
  Description of Artificial Sequence: Synthetic peptide
  Seed: AGLTHIMIW
ACLTHIMIW

SEQ ID NO: 33570 - protein, 9 aa, Artificial Sequence
  Description of Artificial Sequence: Synthetic peptide
  Seed: AGLTHIMIW
AQLTHIMIW

SEQ ID NO: 33571 - protein, 9 aa, Artificial Sequence
  Description of Artificial Sequence: Synthetic peptide
  Seed: AGLTHIMIW
AVLTHIMIL

SEQ ID NO: 33572 - protein, 9 aa, Artificial Sequence
  Description of Artificial Sequence: Synthetic peptide
  Seed: AGLTHIMIW
AVLTHIMIM

SEQ ID NO: 33573 - protein, 9 aa, Artificial Sequence
  Description of Artificial Sequence: Synthetic peptide
  Seed: AGLTHIMIW
AVLTHIMIF

SEQ ID NO: 33574 - protein, 9 aa, Artificial Sequence
  Description of Artificial Sequence: Synthetic peptide
  Seed: AGLTHLMIW
ASLTHLMIM

SEQ ID NO: 33575 - protein, 9 aa, Artificial Sequence
  Description of Artificial Sequence: Synthetic peptide
  Seed: AGLTHLMIW
ASLTHLMIW

SEQ ID NO: 33576 - protein, 9 aa, Artificial Sequence
  Description of Artificial Sequence: Synthetic peptide
  Seed: AGLTHLMIW
ASLTHLMIY

SEQ ID NO: 33577 - protein, 9 aa, Artificial Sequence
  Description of Artificial Sequence: Synthetic peptide
  Seed: AGLTHLMIW
ASLTHLMIV

SEQ ID NO: 33578 - protein, 9 aa, Artificial Sequence
  Description of Artificial Sequence: Synthetic peptide
  Seed: AGLTHLMIW
ATLTHLMII

SEQ ID NO: 33579 - protein, 9 aa, Artificial Sequence
  Description of Artificial Sequence: Synthetic peptide
  Seed: AGLTHLMIW
ATLTHLMIL

SEQ ID NO: 33580 - protein, 9 aa, Artificial Sequence
  Description of Artificial Sequence: Synthetic peptide
  Seed: AGLTHLMIW
ATLTHLMIM

SEQ ID NO: 33581 - protein, 9 aa, Artificial Sequence
  Description of Artificial Sequence: Synthetic peptide
  Seed: AGLTHLMIW
ATLTHLMIF

SEQ ID NO: 33582 - protein, 9 aa, Artificial Sequence
  Description of Artificial Sequence: Synthetic peptide
  Seed: AGLTHLMIW
ATLTHLMIW

SEQ ID NO: 33583 - protein, 9 aa, Artificial Sequence
  Description of Artificial Sequence: Synthetic peptide
  Seed: AGLTHLMIW
ATLTHLMIY

SEQ ID NO: 33584 - protein, 9 aa, Artificial Sequence
  Description of Artificial Sequence: Synthetic peptide
  Seed: AGLTHLMIW
ATLTHLMIV

SEQ ID NO: 33585 - protein, 9 aa, Artificial Sequence
  Description of Artificial Sequence: Synthetic peptide
  Seed: AGLTHLMIW
AVLTHLMIL

SEQ ID NO: 33586 - protein, 9 aa, Artificial Sequence
  Description of Artificial Sequence: Synthetic peptide
  Seed: AGLTHLMIW
AVLTHLMIM

SEQ ID NO: 33587 - protein, 9 aa, Artificial Sequence
  Description of Artificial Sequence: Synthetic peptide
  Seed: AGLTHLMIW
AVLTHLMIF

SEQ ID NO: 33588 - protein, 9 aa, Artificial Sequence
  Description of Artificial Sequence: Synthetic peptide
  Seed: AGLTHLMIW
AVLTHLMIW

SEQ ID NO: 33589 - protein, 9 aa, Artificial Sequence
  Description of Artificial Sequence: Synthetic peptide
  Seed: AGLTHLMIW
AVLTHLMIY

SEQ ID NO: 33590 - protein, 9 aa, Artificial Sequence
  Description of Artificial Sequence: Synthetic peptide
  Seed: AGLTHMMIW
AALTHMMII

SEQ ID NO: 33591 - protein, 9 aa, Artificial Sequence
  Description of Artificial Sequence: Synthetic peptide
  Seed: AGLTHMMIW
AALTHMMIL

SEQ ID NO: 33592 - protein, 9 aa, Artificial Sequence
  Description of Artificial Sequence: Synthetic peptide
  Seed: AGLTHMMIW
AALTHMMIM

SEQ ID NO: 33593 - protein, 9 aa, Artificial Sequence
  Description of Artificial Sequence: Synthetic peptide
  Seed: AGLTHMMIW
AALTHMMIF

SEQ ID NO: 33594 - protein, 9 aa, Artificial Sequence
  Description of Artificial Sequence: Synthetic peptide
  Seed: AGLTHLMIW
ASLTHLMIF

SEQ ID NO: 33595 - protein, 9 aa, Artificial Sequence
  Description of Artificial Sequence: Synthetic peptide
  Seed: AGLTHLMIW
ASLTHLMIL

SEQ ID NO: 33596 - protein, 9 aa, Artificial Sequence
  Description of Artificial Sequence: Synthetic peptide
  Seed: AGLTHIMIW
AVLTHIMIW

SEQ ID NO: 33597 - protein, 9 aa, Artificial Sequence
  Description of Artificial Sequence: Synthetic peptide
  Seed: AGLTHLMIW
ASLTHLMII

SEQ ID NO: 33598 - protein, 9 aa, Artificial Sequence
  Description of Artificial Sequence: Synthetic peptide
  Seed: AGLTHIMIW
AVLTHIMIY

SEQ ID NO: 33599 - protein, 9 aa, Artificial Sequence
  Description of Artificial Sequence: Synthetic peptide
  Seed: AGLTHLMIW
AALTHLMII

SEQ ID NO: 33600 - protein, 9 aa, Artificial Sequence
  Description of Artificial Sequence: Synthetic peptide
  Seed: AGLTHLMIW
AALTHLMIL

SEQ ID NO: 33601 - protein, 9 aa, Artificial Sequence
  Description of Artificial Sequence: Synthetic peptide
  Seed: AGLTHLMIW
AALTHLMIM

SEQ ID NO: 33602 - protein, 9 aa, Artificial Sequence
  Description of Artificial Sequence: Synthetic peptide
  Seed: AGLTHLMIW
AALTHLMIF

SEQ ID NO: 33603 - protein, 9 aa, Artificial Sequence
  Description of Artificial Sequence: Synthetic peptide
  Seed: AGLTHLMIW
AALTHLMIW

SEQ ID NO: 33604 - protein, 9 aa, Artificial Sequence
  Description of Artificial Sequence: Synthetic peptide
  Seed: AGLTHLMIW
AALTHLMIY

SEQ ID NO: 33605 - protein, 9 aa, Artificial Sequence
  Description of Artificial Sequence: Synthetic peptide
  Seed: AGLTHLMIW
ANLTHLMIW

SEQ ID NO: 33606 - protein, 9 aa, Artificial Sequence
  Description of Artificial Sequence: Synthetic peptide
  Seed: AGLTHLMIW
ACLTHLMIW

SEQ ID NO: 33607 - protein, 9 aa, Artificial Sequence
  Description of Artificial Sequence: Synthetic peptide
  Seed: AGLTHLMIW
AQLTHLMIW

SEQ ID NO: 33608 - protein, 9 aa, Artificial Sequence
  Description of Artificial Sequence: Synthetic peptide
  Seed: AGLTHLMIW
AGLTHLMIF

SEQ ID NO: 33609 - protein, 9 aa, Artificial Sequence
  Description of Artificial Sequence: Synthetic peptide
  Seed: AGLTHLMIW
AGLTHLMIY

SEQ ID NO: 33610 - protein, 9 aa, Artificial Sequence
  Description of Artificial Sequence: Synthetic peptide
  Seed: AGLTHLMIW
AILTHLMIF

SEQ ID NO: 33611 - protein, 9 aa, Artificial Sequence
  Description of Artificial Sequence: Synthetic peptide
  Seed: AGLTHLMIW
AILTHLMIW

SEQ ID NO: 33612 - protein, 9 aa, Artificial Sequence
  Description of Artificial Sequence: Synthetic peptide
  Seed: AGLTHLMIW
AILTHLMIY

SEQ ID NO: 33613 - protein, 9 aa, Artificial Sequence
  Description of Artificial Sequence: Synthetic peptide
  Seed: AGLTHLMIW
ALLTHLMIW

SEQ ID NO: 33614 - protein, 9 aa, Artificial Sequence
  Description of Artificial Sequence: Synthetic peptide
  Seed: AGLTHLMIW
AMLTHLMIF

SEQ ID NO: 33615 - protein, 9 aa, Artificial Sequence
  Description of Artificial Sequence: Synthetic peptide
  Seed: AGLTHLMIW
AMLTHLMIW

SEQ ID NO: 33616 - protein, 9 aa, Artificial Sequence
  Description of Artificial Sequence: Synthetic peptide
  Seed: AGLTHLMIW
AMLTHLMIY

SEQ ID NO: 33617 - protein, 10 aa, Artificial Sequence
  Description of Artificial Sequence: Synthetic peptide
  Seed: AGQISIQPTF
AKQISIQPTM

SEQ ID NO: 33618 - protein, 10 aa, Artificial Sequence
  Description of Artificial Sequence: Synthetic peptide
  Seed: AGQISIQPTF
AKQISIQPTW

SEQ ID NO: 33619 - protein, 11 aa, Artificial Sequence
  Description of Artificial Sequence: Synthetic peptide
  Seed: ALILRGSVAHK
AGILRGSVAHK

SEQ ID NO: 33620 - protein, 10 aa, Artificial Sequence
  Description of Artificial Sequence: Synthetic peptide
  Seed: AGQISVQPTF
ASQISVQPTF

SEQ ID NO: 33621 - protein, 10 aa, Artificial Sequence
  Description of Artificial Sequence: Synthetic peptide
  Seed: AGQISVQPTF
AFQISVQPTW

SEQ ID NO: 33622 - protein, 10 aa, Artificial Sequence
  Description of Artificial Sequence: Synthetic peptide
  Seed: AGQISVQPTF
AFQISVQPTY

SEQ ID NO: 33623 - protein, 10 aa, Artificial Sequence
  Description of Artificial Sequence: Synthetic peptide
  Seed: AGQISVQPTF
APQISVQPTL

SEQ ID NO: 33624 - protein, 10 aa, Artificial Sequence
  Description of Artificial Sequence: Synthetic peptide
  Seed: AGQISVQPTF
APQISVQPTM

SEQ ID NO: 33625 - protein, 10 aa, Artificial Sequence
  Description of Artificial Sequence: Synthetic peptide
  Seed: AGQISVQPTF
APQISVQPTF

SEQ ID NO: 33626 - protein, 10 aa, Artificial Sequence
  Description of Artificial Sequence: Synthetic peptide
  Seed: AGQISVQPTF
APQISVQPTW

SEQ ID NO: 33627 - protein, 10 aa, Artificial Sequence
  Description of Artificial Sequence: Synthetic peptide
  Seed: AGQISVQPTF
APQISVQPTY

SEQ ID NO: 33628 - protein, 10 aa, Artificial Sequence
  Description of Artificial Sequence: Synthetic peptide
  Seed: AGQISVQPTF
ASQISVQPTL

SEQ ID NO: 33629 - protein, 10 aa, Artificial Sequence
  Description of Artificial Sequence: Synthetic peptide
  Seed: AGQISVQPTF
ASQISVQPTM

SEQ ID NO: 33630 - protein, 10 aa, Artificial Sequence
  Description of Artificial Sequence: Synthetic peptide
  Seed: AGQISVQPTF
ASQISVQPTW

SEQ ID NO: 33631 - protein, 10 aa, Artificial Sequence
  Description of Artificial Sequence: Synthetic peptide
  Seed: AGQISVQPTF
AWQISVQPTW

SEQ ID NO: 33632 - protein, 10 aa, Artificial Sequence
  Description of Artificial Sequence: Synthetic peptide
  Seed: AGQISVQPTF
ASQISVQPTY

SEQ ID NO: 33633 - protein, 10 aa, Artificial Sequence
  Description of Artificial Sequence: Synthetic peptide
  Seed: AGQISVQPTF
ATQISVQPTL

SEQ ID NO: 33634 - protein, 10 aa, Artificial Sequence
  Description of Artificial Sequence: Synthetic peptide
  Seed: AGQISVQPTF
ATQISVQPTM

SEQ ID NO: 33635 - protein, 10 aa, Artificial Sequence
  Description of Artificial Sequence: Synthetic peptide
  Seed: AGQISVQPTF
ATQISVQPTF

SEQ ID NO: 33636 - protein, 10 aa, Artificial Sequence
  Description of Artificial Sequence: Synthetic peptide
  Seed: AGQISVQPTF
ATQISVQPTW

SEQ ID NO: 33637 - protein, 10 aa, Artificial Sequence
  Description of Artificial Sequence: Synthetic peptide
  Seed: AGQISVQPTF
ATQISVQPTY

SEQ ID NO: 33638 - protein, 10 aa, Artificial Sequence
  Description of Artificial Sequence: Synthetic peptide
  Seed: AGQISVQPTF
AWQISVQPTI

SEQ ID NO: 33639 - protein, 10 aa, Artificial Sequence
  Description of Artificial Sequence: Synthetic peptide
  Seed: AGQISVQPTF
AWQISVQPTL

SEQ ID NO: 33640 - protein, 10 aa, Artificial Sequence
  Description of Artificial Sequence: Synthetic peptide
  Seed: AGQISVQPTF
AWQISVQPTM

SEQ ID NO: 33641 - protein, 10 aa, Artificial Sequence
  Description of Artificial Sequence: Synthetic peptide
  Seed: AGQISVQPTF
AFQISVQPTF

SEQ ID NO: 33642 - protein, 10 aa, Artificial Sequence
  Description of Artificial Sequence: Synthetic peptide
  Seed: AGQISVQPTF
AFQISVQPTM

SEQ ID NO: 33643 - protein, 10 aa, Artificial Sequence
  Description of Artificial Sequence: Synthetic peptide
  Seed: AGQISVQPTF
AFQISVQPTL

SEQ ID NO: 33644 - protein, 10 aa, Artificial Sequence
  Description of Artificial Sequence: Synthetic peptide
  Seed: AGQISVQPTF
AFQISVQPTI

SEQ ID NO: 33645 - protein, 10 aa, Artificial Sequence
  Description of Artificial Sequence: Synthetic peptide
  Seed: AGQISVQPTF
AIQISVQPTF

SEQ ID NO: 33646 - protein, 10 aa, Artificial Sequence
  Description of Artificial Sequence: Synthetic peptide
  Seed: AGQISVQPTF
AIQISVQPTW

SEQ ID NO: 33647 - protein, 10 aa, Artificial Sequence
  Description of Artificial Sequence: Synthetic peptide
  Seed: AGQISVQPTF
AIQISVQPTY

SEQ ID NO: 33648 - protein, 10 aa, Artificial Sequence
  Description of Artificial Sequence: Synthetic peptide
  Seed: AGQISVQPTF
ALQISVQPTL

SEQ ID NO: 33649 - protein, 10 aa, Artificial Sequence
  Description of Artificial Sequence: Synthetic peptide
  Seed: AGQISVQPTF
ALQISVQPTM

SEQ ID NO: 33650 - protein, 10 aa, Artificial Sequence
  Description of Artificial Sequence: Synthetic peptide
  Seed: AGQISVQPTF
ALQISVQPTF

SEQ ID NO: 33651 - protein, 10 aa, Artificial Sequence
  Description of Artificial Sequence: Synthetic peptide
  Seed: AGQISVQPTF
ALQISVQPTW

SEQ ID NO: 33652 - protein, 10 aa, Artificial Sequence
  Description of Artificial Sequence: Synthetic peptide
  Seed: AGQISVQPTF
ALQISVQPTY

SEQ ID NO: 33653 - protein, 10 aa, Artificial Sequence
  Description of Artificial Sequence: Synthetic peptide
  Seed: AGQISVQPTF
AKQISVQPTL

SEQ ID NO: 33654 - protein, 10 aa, Artificial Sequence
  Description of Artificial Sequence: Synthetic peptide
  Seed: AGQISVQPTF
AKQISVQPTM

SEQ ID NO: 33655 - protein, 10 aa, Artificial Sequence
  Description of Artificial Sequence: Synthetic peptide
  Seed: AGQISVQPTF
AKQISVQPTF

SEQ ID NO: 33656 - protein, 10 aa, Artificial Sequence
  Description of Artificial Sequence: Synthetic peptide
  Seed: AGQISVQPTF
AKQISVQPTW

SEQ ID NO: 33657 - protein, 10 aa, Artificial Sequence
  Description of Artificial Sequence: Synthetic peptide
  Seed: AGQISVQPTF
AKQISVQPTY

SEQ ID NO: 33658 - protein, 10 aa, Artificial Sequence
  Description of Artificial Sequence: Synthetic peptide
  Seed: AGQISVQPTF
AMQISVQPTI

SEQ ID NO: 33659 - protein, 10 aa, Artificial Sequence
  Description of Artificial Sequence: Synthetic peptide
  Seed: AGQISVQPTF
AMQISVQPTL

SEQ ID NO: 33660 - protein, 10 aa, Artificial Sequence
  Description of Artificial Sequence: Synthetic peptide
  Seed: AGQISVQPTF
AMQISVQPTM

SEQ ID NO: 33661 - protein, 10 aa, Artificial Sequence
  Description of Artificial Sequence: Synthetic peptide
  Seed: AGQISVQPTF
AMQISVQPTF

SEQ ID NO: 33662 - protein, 10 aa, Artificial Sequence
  Description of Artificial Sequence: Synthetic peptide
  Seed: AGQISVQPTF
AMQISVQPTW

SEQ ID NO: 33663 - protein, 10 aa, Artificial Sequence
  Description of Artificial Sequence: Synthetic peptide
  Seed: AGQISVQPTF
AMQISVQPTY

SEQ ID NO: 33664 - protein, 10 aa, Artificial Sequence
  Description of Artificial Sequence: Synthetic peptide
  Seed: AGQISVQPTF
AWQISVQPTF

SEQ ID NO: 33665 - protein, 10 aa, Artificial Sequence
  Description of Artificial Sequence: Synthetic peptide
  Seed: AGQISVQPTF
AWQISVQPTY

SEQ ID NO: 33666 - protein, 10 aa, Artificial Sequence
  Description of Artificial Sequence: Synthetic peptide
  Seed: AGQISIQPTF
AKQISIQPTY

SEQ ID NO: 33667 - protein, 9 aa, Artificial Sequence
  Description of Artificial Sequence: Synthetic peptide
  Seed: ALILRGSVA
AMILRGSVM

SEQ ID NO: 33668 - protein, 9 aa, Artificial Sequence
  Description of Artificial Sequence: Synthetic peptide
  Seed: ALILRGSVA
AIILRGSVV

SEQ ID NO: 33669 - protein, 9 aa, Artificial Sequence
  Description of Artificial Sequence: Synthetic peptide
  Seed: ALILRGSVA
ALILRGSVI

SEQ ID NO: 33670 - protein, 9 aa, Artificial Sequence
  Description of Artificial Sequence: Synthetic peptide
  Seed: ALILRGSVA
ALILRGSVL

SEQ ID NO: 33671 - protein, 9 aa, Artificial Sequence
  Description of Artificial Sequence: Synthetic peptide
  Seed: ALILRGSVA
ALILRGSVM

SEQ ID NO: 33672 - protein, 9 aa, Artificial Sequence
  Description of Artificial Sequence: Synthetic peptide
  Seed: ALILRGSVA
ALILRGSVT

SEQ ID NO: 33673 - protein, 9 aa, Artificial Sequence
  Description of Artificial Sequence: Synthetic peptide
  Seed: ALILRGSVA
ALILRGSVV

SEQ ID NO: 33674 - protein, 9 aa, Artificial Sequence
  Description of Artificial Sequence: Synthetic peptide
  Seed: ALILRGSVA
AMILRGSVA

SEQ ID NO: 33675 - protein, 9 aa, Artificial Sequence
  Description of Artificial Sequence: Synthetic peptide
  Seed: ALILRGSVA
AMILRGSVI

SEQ ID NO: 33676 - protein, 9 aa, Artificial Sequence
  Description of Artificial Sequence: Synthetic peptide
  Seed: ALILRGSVA
AMILRGSVL

SEQ ID NO: 33677 - protein, 9 aa, Artificial Sequence
  Description of Artificial Sequence: Synthetic peptide
  Seed: ALILRGSVA
AMILRGSVT

SEQ ID NO: 33678 - protein, 10 aa, Artificial Sequence
  Description of Artificial Sequence: Synthetic peptide
  Seed: AGQISVQPTF
AYQISVQPTI

SEQ ID NO: 33679 - protein, 9 aa, Artificial Sequence
  Description of Artificial Sequence: Synthetic peptide
  Seed: ALILRGSVA
AMILRGSVV

SEQ ID NO: 33680 - protein, 9 aa, Artificial Sequence
  Description of Artificial Sequence: Synthetic peptide
  Seed: ALILRGSVA
AVILRGSVV

SEQ ID NO: 33681 - protein, 11 aa, Artificial Sequence
  Description of Artificial Sequence: Synthetic peptide
  Seed: ALILRGSVAHK
AAILRGSVAHK

SEQ ID NO: 33682 - protein, 11 aa, Artificial Sequence
  Description of Artificial Sequence: Synthetic peptide
  Seed: ALILRGSVAHK
ARILRGSVAHK

SEQ ID NO: 33683 - protein, 11 aa, Artificial Sequence
  Description of Artificial Sequence: Synthetic peptide
  Seed: ALILRGSVAHK
ANILRGSVAHK

SEQ ID NO: 33684 - protein, 11 aa, Artificial Sequence
  Description of Artificial Sequence: Synthetic peptide
  Seed: ALILRGSVAHK
ADILRGSVAHK

SEQ ID NO: 33685 - protein, 11 aa, Artificial Sequence
  Description of Artificial Sequence: Synthetic peptide
  Seed: ALILRGSVAHK
ACILRGSVAHK

SEQ ID NO: 33686 - protein, 11 aa, Artificial Sequence
  Description of Artificial Sequence: Synthetic peptide
  Seed: ALILRGSVAHK
AQILRGSVAHK

SEQ ID NO: 33687 - protein, 11 aa, Artificial Sequence
  Description of Artificial Sequence: Synthetic peptide
  Seed: ALILRGSVAHK
AEILRGSVAHK

SEQ ID NO: 33688 - protein, 9 aa, Artificial Sequence
  Description of Artificial Sequence: Synthetic peptide
  Seed: ALILRGSVA
AIILRGSVA

SEQ ID NO: 33689 - protein, 9 aa, Artificial Sequence
  Description of Artificial Sequence: Synthetic peptide
  Seed: ALILRGSVA
AQILRGSVV

SEQ ID NO: 33690 - protein, 11 aa, Artificial Sequence
  Description of Artificial Sequence: Synthetic peptide
  Seed: AHKSCLPACVY
AMKSCLPACVY

SEQ ID NO: 33691 - protein, 11 aa, Artificial Sequence
  Description of Artificial Sequence: Synthetic peptide
  Seed: AHKSCLPACVY
AMKSCLPACVF

SEQ ID NO: 33692 - protein, 10 aa, Artificial Sequence
  Description of Artificial Sequence: Synthetic peptide
  Seed: AGQISVQPTF
AYQISVQPTL

SEQ ID NO: 33693 - protein, 10 aa, Artificial Sequence
  Description of Artificial Sequence: Synthetic peptide
  Seed: AGQISVQPTF
AYQISVQPTM

SEQ ID NO: 33694 - protein, 10 aa, Artificial Sequence
  Description of Artificial Sequence: Synthetic peptide
  Seed: AGQISVQPTF
AYQISVQPTF

SEQ ID NO: 33695 - protein, 10 aa, Artificial Sequence
  Description of Artificial Sequence: Synthetic peptide
  Seed: AGQISVQPTF
AYQISVQPTW

SEQ ID NO: 33696 - protein, 10 aa, Artificial Sequence
  Description of Artificial Sequence: Synthetic peptide
  Seed: AGQISVQPTF
AYQISVQPTY

SEQ ID NO: 33697 - protein, 10 aa, Artificial Sequence
  Description of Artificial Sequence: Synthetic peptide
  Seed: AGQISVQPTF
AVQISVQPTL

SEQ ID NO: 33698 - protein, 10 aa, Artificial Sequence
  Description of Artificial Sequence: Synthetic peptide
  Seed: AGQISVQPTF
AVQISVQPTM

SEQ ID NO: 33699 - protein, 10 aa, Artificial Sequence
  Description of Artificial Sequence: Synthetic peptide
  Seed: AGQISVQPTF
AVQISVQPTF

SEQ ID NO: 33700 - protein, 10 aa, Artificial Sequence
  Description of Artificial Sequence: Synthetic peptide
  Seed: AGQISVQPTF
AVQISVQPTW

SEQ ID NO: 33701 - protein, 10 aa, Artificial Sequence
  Description of Artificial Sequence: Synthetic peptide
  Seed: AGQISVQPTF
AVQISVQPTY

SEQ ID NO: 33702 - protein, 11 aa, Artificial Sequence
  Description of Artificial Sequence: Synthetic peptide
  Seed: AHKSCLPACVY
ARKSCLPACVY

SEQ ID NO: 33703 - protein, 11 aa, Artificial Sequence
  Description of Artificial Sequence: Synthetic peptide
  Seed: AHKSCLPACVY
AQKSCLPACVL

SEQ ID NO: 33704 - protein, 11 aa, Artificial Sequence
  Description of Artificial Sequence: Synthetic peptide
  Seed: AHKSCLPACVY
AQKSCLPACVM

SEQ ID NO: 33705 - protein, 11 aa, Artificial Sequence
  Description of Artificial Sequence: Synthetic peptide
  Seed: AHKSCLPACVY
AQKSCLPACVF

SEQ ID NO: 33706 - protein, 11 aa, Artificial Sequence
  Description of Artificial Sequence: Synthetic peptide
  Seed: AHKSCLPACVY
AQKSCLPACVY

SEQ ID NO: 33707 - protein, 11 aa, Artificial Sequence
  Description of Artificial Sequence: Synthetic peptide
  Seed: AHKSCLPACVY
AHKSCLPACVF

SEQ ID NO: 33708 - protein, 11 aa, Artificial Sequence
  Description of Artificial Sequence: Synthetic peptide
  Seed: AHKSCLPACVY
AKKSCLPACVF

SEQ ID NO: 33709 - protein, 11 aa, Artificial Sequence
  Description of Artificial Sequence: Synthetic peptide
  Seed: AHKSCLPACVY
AKKSCLPACVY

SEQ ID NO: 33710 - protein, 11 aa, Artificial Sequence
  Description of Artificial Sequence: Synthetic peptide
  Seed: AHKSCLPACVY
AMKSCLPACVM

SEQ ID NO: 33711 - protein, 10 aa, Artificial Sequence
  Description of Artificial Sequence: Synthetic peptide
  Seed: AGQISVQPTF
AIQISVQPTM

SEQ ID NO: 33712 - protein, 10 aa, Artificial Sequence
  Description of Artificial Sequence: Synthetic peptide
  Seed: AGQISVQPTF
AIQISVQPTL

SEQ ID NO: 33713 - protein, 10 aa, Artificial Sequence
  Description of Artificial Sequence: Synthetic peptide
  Seed: AGQISVQPTF
AHQISVQPTY

SEQ ID NO: 33714 - protein, 10 aa, Artificial Sequence
  Description of Artificial Sequence: Synthetic peptide
  Seed: AGQISIQPTF
AWQISIQPTY

SEQ ID NO: 33715 - protein, 10 aa, Artificial Sequence
  Description of Artificial Sequence: Synthetic peptide
  Seed: AGQISIQPTF
ATQISIQPTM

SEQ ID NO: 33716 - protein, 10 aa, Artificial Sequence
  Description of Artificial Sequence: Synthetic peptide
  Seed: AGQISIQPTF
ATQISIQPTF

SEQ ID NO: 33717 - protein, 10 aa, Artificial Sequence
  Description of Artificial Sequence: Synthetic peptide
  Seed: AGQISIQPTF
ATQISIQPTW

SEQ ID NO: 33718 - protein, 10 aa, Artificial Sequence
  Description of Artificial Sequence: Synthetic peptide
  Seed: AGQISIQPTF
ATQISIQPTY

SEQ ID NO: 33719 - protein, 10 aa, Artificial Sequence
  Description of Artificial Sequence: Synthetic peptide
  Seed: AGQISIQPTF
AWQISIQPTI

SEQ ID NO: 33720 - protein, 10 aa, Artificial Sequence
  Description of Artificial Sequence: Synthetic peptide
  Seed: AGQISIQPTF
AWQISIQPTL

SEQ ID NO: 33721 - protein, 10 aa, Artificial Sequence
  Description of Artificial Sequence: Synthetic peptide
  Seed: AGQISIQPTF
AWQISIQPTM

SEQ ID NO: 33722 - protein, 10 aa, Artificial Sequence
  Description of Artificial Sequence: Synthetic peptide
  Seed: AGQISIQPTF
AWQISIQPTF

SEQ ID NO: 33723 - protein, 10 aa, Artificial Sequence
  Description of Artificial Sequence: Synthetic peptide
  Seed: AGQISIQPTF
AWQISIQPTW

SEQ ID NO: 33724 - protein, 10 aa, Artificial Sequence
  Description of Artificial Sequence: Synthetic peptide
  Seed: AGQISIQPTF
AYQISIQPTI

SEQ ID NO: 33725 - protein, 10 aa, Artificial Sequence
  Description of Artificial Sequence: Synthetic peptide
  Seed: AGQISVQPTF
AHQISVQPTW

SEQ ID NO: 33726 - protein, 10 aa, Artificial Sequence
  Description of Artificial Sequence: Synthetic peptide
  Seed: AGQISIQPTF
AYQISIQPTL

SEQ ID NO: 33727 - protein, 10 aa, Artificial Sequence
  Description of Artificial Sequence: Synthetic peptide
  Seed: AGQISIQPTF
AYQISIQPTM

SEQ ID NO: 33728 - protein, 10 aa, Artificial Sequence
  Description of Artificial Sequence: Synthetic peptide
  Seed: AGQISIQPTF
AYQISIQPTF

SEQ ID NO: 33729 - protein, 10 aa, Artificial Sequence
  Description of Artificial Sequence: Synthetic peptide
  Seed: AGQISIQPTF
AYQISIQPTW

SEQ ID NO: 33730 - protein, 10 aa, Artificial Sequence
  Description of Artificial Sequence: Synthetic peptide
  Seed: AGQISIQPTF
AYQISIQPTY

SEQ ID NO: 33731 - protein, 10 aa, Artificial Sequence
  Description of Artificial Sequence: Synthetic peptide
  Seed: AGQISIQPTF
AVQISIQPTL

SEQ ID NO: 33732 - protein, 10 aa, Artificial Sequence
  Description of Artificial Sequence: Synthetic peptide
  Seed: AGQISIQPTF
AVQISIQPTM

SEQ ID NO: 33733 - protein, 10 aa, Artificial Sequence
  Description of Artificial Sequence: Synthetic peptide
  Seed: AGQISIQPTF
AVQISIQPTF

SEQ ID NO: 33734 - protein, 10 aa, Artificial Sequence
  Description of Artificial Sequence: Synthetic peptide
  Seed: AGQISIQPTF
AVQISIQPTW

SEQ ID NO: 33735 - protein, 10 aa, Artificial Sequence
  Description of Artificial Sequence: Synthetic peptide
  Seed: AGQISIQPTF
ATQISIQPTL

SEQ ID NO: 33736 - protein, 10 aa, Artificial Sequence
  Description of Artificial Sequence: Synthetic peptide
  Seed: AGQISIQPTF
ASQISIQPTY

SEQ ID NO: 33737 - protein, 10 aa, Artificial Sequence
  Description of Artificial Sequence: Synthetic peptide
  Seed: AGQISIQPTF
ASQISIQPTW

SEQ ID NO: 33738 - protein, 10 aa, Artificial Sequence
  Description of Artificial Sequence: Synthetic peptide
  Seed: AGQISIQPTF
ASQISIQPTF

SEQ ID NO: 33739 - protein, 10 aa, Artificial Sequence
  Description of Artificial Sequence: Synthetic peptide
  Seed: AGQISIQPTF
AMQISIQPTI

SEQ ID NO: 33740 - protein, 10 aa, Artificial Sequence
  Description of Artificial Sequence: Synthetic peptide
  Seed: AGQISIQPTF
AMQISIQPTL

SEQ ID NO: 33741 - protein, 10 aa, Artificial Sequence
  Description of Artificial Sequence: Synthetic peptide
  Seed: AGQISIQPTF
AMQISIQPTM

SEQ ID NO: 33742 - protein, 10 aa, Artificial Sequence
  Description of Artificial Sequence: Synthetic peptide
  Seed: AGQISIQPTF
AMQISIQPTF

SEQ ID NO: 33743 - protein, 10 aa, Artificial Sequence
  Description of Artificial Sequence: Synthetic peptide
  Seed: AGQISIQPTF
AMQISIQPTW

SEQ ID NO: 33744 - protein, 10 aa, Artificial Sequence
  Description of Artificial Sequence: Synthetic peptide
  Seed: AGQISIQPTF
AMQISIQPTY

SEQ ID NO: 33745 - protein, 10 aa, Artificial Sequence
  Description of Artificial Sequence: Synthetic peptide
  Seed: AGQISIQPTF
AFQISIQPTI

SEQ ID NO: 33746 - protein, 10 aa, Artificial Sequence
  Description of Artificial Sequence: Synthetic peptide
  Seed: AGQISIQPTF
AFQISIQPTL

SEQ ID NO: 33747 - protein, 10 aa, Artificial Sequence
  Description of Artificial Sequence: Synthetic peptide
  Seed: AGQISIQPTF
AFQISIQPTM

SEQ ID NO: 33748 - protein, 10 aa, Artificial Sequence
  Description of Artificial Sequence: Synthetic peptide
  Seed: AGQISIQPTF
AFQISIQPTF

SEQ ID NO: 33749 - protein, 10 aa, Artificial Sequence
  Description of Artificial Sequence: Synthetic peptide
  Seed: AGQISIQPTF
AFQISIQPTW

SEQ ID NO: 33750 - protein, 10 aa, Artificial Sequence
  Description of Artificial Sequence: Synthetic peptide
  Seed: AGQISIQPTF
AFQISIQPTY

SEQ ID NO: 33751 - protein, 10 aa, Artificial Sequence
  Description of Artificial Sequence: Synthetic peptide
  Seed: AGQISIQPTF
APQISIQPTL

SEQ ID NO: 33752 - protein, 10 aa, Artificial Sequence
  Description of Artificial Sequence: Synthetic peptide
  Seed: AGQISIQPTF
APQISIQPTM

SEQ ID NO: 33753 - protein, 10 aa, Artificial Sequence
  Description of Artificial Sequence: Synthetic peptide
  Seed: AGQISIQPTF
APQISIQPTF

SEQ ID NO: 33754 - protein, 10 aa, Artificial Sequence
  Description of Artificial Sequence: Synthetic peptide
  Seed: AGQISIQPTF
APQISIQPTW

SEQ ID NO: 33755 - protein, 10 aa, Artificial Sequence
  Description of Artificial Sequence: Synthetic peptide
  Seed: AGQISIQPTF
APQISIQPTY

SEQ ID NO: 33756 - protein, 10 aa, Artificial Sequence
  Description of Artificial Sequence: Synthetic peptide
  Seed: AGQISIQPTF
ASQISIQPTL

SEQ ID NO: 33757 - protein, 10 aa, Artificial Sequence
  Description of Artificial Sequence: Synthetic peptide
  Seed: AGQISIQPTF
ASQISIQPTM

SEQ ID NO: 33758 - protein, 10 aa, Artificial Sequence
  Description of Artificial Sequence: Synthetic peptide
  Seed: AGQISIQPTF
AVQISIQPTY

SEQ ID NO: 33759 - protein, 10 aa, Artificial Sequence
  Description of Artificial Sequence: Synthetic peptide
  Seed: AGQISVQPTF
AAQISVQPTL

SEQ ID NO: 33760 - protein, 10 aa, Artificial Sequence
  Description of Artificial Sequence: Synthetic peptide
  Seed: AGQISVQPTF
AAQISVQPTM

SEQ ID NO: 33761 - protein, 10 aa, Artificial Sequence
  Description of Artificial Sequence: Synthetic peptide
  Seed: AGQISVQPTF
ACQISVQPTW

SEQ ID NO: 33762 - protein, 10 aa, Artificial Sequence
  Description of Artificial Sequence: Synthetic peptide
  Seed: AGQISVQPTF
AQQISVQPTI

SEQ ID NO: 33763 - protein, 10 aa, Artificial Sequence
  Description of Artificial Sequence: Synthetic peptide
  Seed: AGQISVQPTF
AQQISVQPTL

SEQ ID NO: 33764 - protein, 10 aa, Artificial Sequence
  Description of Artificial Sequence: Synthetic peptide
  Seed: AGQISVQPTF
AQQISVQPTM

SEQ ID NO: 33765 - protein, 10 aa, Artificial Sequence
  Description of Artificial Sequence: Synthetic peptide
  Seed: AGQISVQPTF
AQQISVQPTF

SEQ ID NO: 33766 - protein, 10 aa, Artificial Sequence
  Description of Artificial Sequence: Synthetic peptide
  Seed: AGQISVQPTF
AQQISVQPTW

SEQ ID NO: 33767 - protein, 10 aa, Artificial Sequence
  Description of Artificial Sequence: Synthetic peptide
  Seed: AGQISVQPTF
AQQISVQPTY

SEQ ID NO: 33768 - protein, 10 aa, Artificial Sequence
  Description of Artificial Sequence: Synthetic peptide
  Seed: AGQISVQPTF
AEQISVQPTI

SEQ ID NO: 33769 - protein, 10 aa, Artificial Sequence
  Description of Artificial Sequence: Synthetic peptide
  Seed: AGQISVQPTF
AEQISVQPTL

SEQ ID NO: 33770 - protein, 10 aa, Artificial Sequence
  Description of Artificial Sequence: Synthetic peptide
  Seed: AGQISVQPTF
AEQISVQPTM

SEQ ID NO: 33771 - protein, 10 aa, Artificial Sequence
  Description of Artificial Sequence: Synthetic peptide
  Seed: AGQISVQPTF
AEQISVQPTF

SEQ ID NO: 33772 - protein, 10 aa, Artificial Sequence
  Description of Artificial Sequence: Synthetic peptide
  Seed: AGQISVQPTF
AEQISVQPTW

SEQ ID NO: 33773 - protein, 10 aa, Artificial Sequence
  Description of Artificial Sequence: Synthetic peptide
  Seed: AGQISVQPTF
AEQISVQPTY

SEQ ID NO: 33774 - protein, 10 aa, Artificial Sequence
  Description of Artificial Sequence: Synthetic peptide
  Seed: AGQISVQPTF
AGQISVQPTL

SEQ ID NO: 33775 - protein, 10 aa, Artificial Sequence
  Description of Artificial Sequence: Synthetic peptide
  Seed: AGQISVQPTF
AGQISVQPTM

SEQ ID NO: 33776 - protein, 10 aa, Artificial Sequence
  Description of Artificial Sequence: Synthetic peptide
  Seed: AGQISVQPTF
AGQISVQPTW

SEQ ID NO: 33777 - protein, 10 aa, Artificial Sequence
  Description of Artificial Sequence: Synthetic peptide
  Seed: AGQISVQPTF
AGQISVQPTY

SEQ ID NO: 33778 - protein, 10 aa, Artificial Sequence
  Description of Artificial Sequence: Synthetic peptide
  Seed: AGQISVQPTF
AHQISVQPTL

SEQ ID NO: 33779 - protein, 10 aa, Artificial Sequence
  Description of Artificial Sequence: Synthetic peptide
  Seed: AGQISVQPTF
AHQISVQPTM

SEQ ID NO: 33780 - protein, 10 aa, Artificial Sequence
  Description of Artificial Sequence: Synthetic peptide
  Seed: AGQISVQPTF
AHQISVQPTF

SEQ ID NO: 33781 - protein, 10 aa, Artificial Sequence
  Description of Artificial Sequence: Synthetic peptide
  Seed: AGQISVQPTF
ACQISVQPTY

SEQ ID NO: 33782 - protein, 10 aa, Artificial Sequence
  Description of Artificial Sequence: Synthetic peptide
  Seed: AGQISVQPTF
ACQISVQPTF

SEQ ID NO: 33783 - protein, 10 aa, Artificial Sequence
  Description of Artificial Sequence: Synthetic peptide
  Seed: AGQISVQPTF
AAQISVQPTF

SEQ ID NO: 33784 - protein, 10 aa, Artificial Sequence
  Description of Artificial Sequence: Synthetic peptide
  Seed: AGQISVQPTF
ACQISVQPTM

SEQ ID NO: 33785 - protein, 10 aa, Artificial Sequence
  Description of Artificial Sequence: Synthetic peptide
  Seed: AGQISVQPTF
AAQISVQPTW

SEQ ID NO: 33786 - protein, 10 aa, Artificial Sequence
  Description of Artificial Sequence: Synthetic peptide
  Seed: AGQISVQPTF
AAQISVQPTY

SEQ ID NO: 33787 - protein, 10 aa, Artificial Sequence
  Description of Artificial Sequence: Synthetic peptide
  Seed: AGQISVQPTF
ARQISVQPTI

SEQ ID NO: 33788 - protein, 10 aa, Artificial Sequence
  Description of Artificial Sequence: Synthetic peptide
  Seed: AGQISVQPTF
ARQISVQPTL

SEQ ID NO: 33789 - protein, 10 aa, Artificial Sequence
  Description of Artificial Sequence: Synthetic peptide
  Seed: AGQISVQPTF
ARQISVQPTM

SEQ ID NO: 33790 - protein, 10 aa, Artificial Sequence
  Description of Artificial Sequence: Synthetic peptide
  Seed: AGQISVQPTF
ARQISVQPTF

SEQ ID NO: 33791 - protein, 10 aa, Artificial Sequence
  Description of Artificial Sequence: Synthetic peptide
  Seed: AGQISVQPTF
ARQISVQPTW

SEQ ID NO: 33792 - protein, 10 aa, Artificial Sequence
  Description of Artificial Sequence: Synthetic peptide
  Seed: AGQISVQPTF
ARQISVQPTY

SEQ ID NO: 33793 - protein, 10 aa, Artificial Sequence
  Description of Artificial Sequence: Synthetic peptide
  Seed: AGQISVQPTF
ANQISVQPTL

SEQ ID NO: 33794 - protein, 10 aa, Artificial Sequence
  Description of Artificial Sequence: Synthetic peptide
  Seed: AGQISVQPTF
ANQISVQPTM

SEQ ID NO: 33795 - protein, 10 aa, Artificial Sequence
  Description of Artificial Sequence: Synthetic peptide
  Seed: AGQISVQPTF
ANQISVQPTF

SEQ ID NO: 33796 - protein, 10 aa, Artificial Sequence
  Description of Artificial Sequence: Synthetic peptide
  Seed: AGQISVQPTF
ANQISVQPTW

SEQ ID NO: 33797 - protein, 10 aa, Artificial Sequence
  Description of Artificial Sequence: Synthetic peptide
  Seed: AGQISVQPTF
ANQISVQPTY

SEQ ID NO: 33798 - protein, 10 aa, Artificial Sequence
  Description of Artificial Sequence: Synthetic peptide
  Seed: AGQISVQPTF
ADQISVQPTL

SEQ ID NO: 33799 - protein, 10 aa, Artificial Sequence
  Description of Artificial Sequence: Synthetic peptide
  Seed: AGQISVQPTF
ADQISVQPTM

SEQ ID NO: 33800 - protein, 10 aa, Artificial Sequence
  Description of Artificial Sequence: Synthetic peptide
  Seed: AGQISVQPTF
ADQISVQPTW

SEQ ID NO: 33801 - protein, 10 aa, Artificial Sequence
  Description of Artificial Sequence: Synthetic peptide
  Seed: AGQISVQPTF
ADQISVQPTY

SEQ ID NO: 33802 - protein, 10 aa, Artificial Sequence
  Description of Artificial Sequence: Synthetic peptide
  Seed: AGQISVQPTF
ACQISVQPTL

SEQ ID NO: 33803 - protein, 8 aa, Artificial Sequence
  Description of Artificial Sequence: Synthetic peptide
  Seed: ERMVLSAF
EEMVLSAF

SEQ ID NO: 33804 - protein, 8 aa, Artificial Sequence
  Description of Artificial Sequence: Synthetic peptide
  Seed: ERMVLSAF
ENMVLSAF

SEQ ID NO: 33805 - protein, 8 aa, Artificial Sequence
  Description of Artificial Sequence: Synthetic peptide
  Seed: ERMVLSAF
ENMVLSAY

SEQ ID NO: 33806 - protein, 8 aa, Artificial Sequence
  Description of Artificial Sequence: Synthetic peptide
  Seed: ERMVLSAF
EQMVLSAF

SEQ ID NO: 33807 - protein, 8 aa, Artificial Sequence
  Description of Artificial Sequence: Synthetic peptide
  Seed: ERMVLSAF
EQMVLSAY

SEQ ID NO: 33808 - protein, 8 aa, Artificial Sequence
  Description of Artificial Sequence: Synthetic peptide
  Seed: ERMVLSAF
EEMVLSAA

SEQ ID NO: 33809 - protein, 8 aa, Artificial Sequence
  Description of Artificial Sequence: Synthetic peptide
  Seed: ERMVLSAF
EEMVLSAH

SEQ ID NO: 33810 - protein, 8 aa, Artificial Sequence
  Description of Artificial Sequence: Synthetic peptide
  Seed: ERMVLSAF
EEMVLSAI

SEQ ID NO: 33811 - protein, 8 aa, Artificial Sequence
  Description of Artificial Sequence: Synthetic peptide
  Seed: ERMVLSAF
EEMVLSAL

SEQ ID NO: 33812 - protein, 8 aa, Artificial Sequence
  Description of Artificial Sequence: Synthetic peptide
  Seed: ERMVLSAF
EEMVLSAM

SEQ ID NO: 33813 - protein, 8 aa, Artificial Sequence
  Description of Artificial Sequence: Synthetic peptide
  Seed: ERMVLSAF
EEMVLSAW

SEQ ID NO: 33814 - protein, 8 aa, Artificial Sequence
  Description of Artificial Sequence: Synthetic peptide
  Seed: ERMVLSAF
EMMVLSAF

SEQ ID NO: 33815 - protein, 8 aa, Artificial Sequence
  Description of Artificial Sequence: Synthetic peptide
  Seed: ERMVLSAF
EEMVLSAY

SEQ ID NO: 33816 - protein, 8 aa, Artificial Sequence
  Description of Artificial Sequence: Synthetic peptide
  Seed: ERMVLSAF
EEMVLSAV

SEQ ID NO: 33817 - protein, 8 aa, Artificial Sequence
  Description of Artificial Sequence: Synthetic peptide
  Seed: ERMVLSAF
EHMVLSAF

SEQ ID NO: 33818 - protein, 8 aa, Artificial Sequence
  Description of Artificial Sequence: Synthetic peptide
  Seed: ERMVLSAF
EHMVLSAY

SEQ ID NO: 33819 - protein, 8 aa, Artificial Sequence
  Description of Artificial Sequence: Synthetic peptide
  Seed: ERMVLSAF
EIMVLSAF

SEQ ID NO: 33820 - protein, 8 aa, Artificial Sequence
  Description of Artificial Sequence: Synthetic peptide
  Seed: ERMVLSAF
EIMVLSAY

SEQ ID NO: 33821 - protein, 8 aa, Artificial Sequence
  Description of Artificial Sequence: Synthetic peptide
  Seed: ERMVLSAF
ELMVLSAF

SEQ ID NO: 33822 - protein, 8 aa, Artificial Sequence
  Description of Artificial Sequence: Synthetic peptide
  Seed: ERMVLSAF
ELMVLSAY

SEQ ID NO: 33823 - protein, 8 aa, Artificial Sequence
  Description of Artificial Sequence: Synthetic peptide
  Seed: ERMVLSAF
EKMVLSAY

SEQ ID NO: 33824 - protein, 8 aa, Artificial Sequence
  Description of Artificial Sequence: Synthetic peptide
  Seed: ERMVLSAF
ERMVLSAY

SEQ ID NO: 33825 - protein, 10 aa, Artificial Sequence
  Description of Artificial Sequence: Synthetic peptide
  Seed: ERMCNILKGK
ERMCNILKGY

SEQ ID NO: 33826 - protein, 10 aa, Artificial Sequence
  Description of Artificial Sequence: Synthetic peptide
  Seed: ERMCNILKGK
ERMCNILKGF

SEQ ID NO: 33827 - protein, 10 aa, Artificial Sequence
  Description of Artificial Sequence: Synthetic peptide
  Seed: ERMCNILKGK
ERMCNILKGM

SEQ ID NO: 33828 - protein, 9 aa, Artificial Sequence
  Description of Artificial Sequence: Synthetic peptide
  Seed: ERATVMAAF
EQATVMAAL

SEQ ID NO: 33829 - protein, 9 aa, Artificial Sequence
  Description of Artificial Sequence: Synthetic peptide
  Seed: ERATVMAAF
EQATVMAAM

SEQ ID NO: 33830 - protein, 9 aa, Artificial Sequence
  Description of Artificial Sequence: Synthetic peptide
  Seed: ERATVMAAF
EQATVMAAF

SEQ ID NO: 33831 - protein, 9 aa, Artificial Sequence
  Description of Artificial Sequence: Synthetic peptide
  Seed: ERATVMAAF
EQATVMAAY

SEQ ID NO: 33832 - protein, 9 aa, Artificial Sequence
  Description of Artificial Sequence: Synthetic peptide
  Seed: ERATVMAAF
EHATVMAAL

SEQ ID NO: 33833 - protein, 9 aa, Artificial Sequence
  Description of Artificial Sequence: Synthetic peptide
  Seed: ERATVMAAF
EHATVMAAM

SEQ ID NO: 33834 - protein, 9 aa, Artificial Sequence
  Description of Artificial Sequence: Synthetic peptide
  Seed: ERATVMAAF
EHATVMAAF

SEQ ID NO: 33835 - protein, 9 aa, Artificial Sequence
  Description of Artificial Sequence: Synthetic peptide
  Seed: ERATVMAAF
EHATVMAAY

SEQ ID NO: 33836 - protein, 9 aa, Artificial Sequence
  Description of Artificial Sequence: Synthetic peptide
  Seed: ERATVMAAF
ELATVMAAF

SEQ ID NO: 33837 - protein, 9 aa, Artificial Sequence
  Description of Artificial Sequence: Synthetic peptide
  Seed: ERATVMAAF
ELATVMAAY

SEQ ID NO: 33838 - protein, 9 aa, Artificial Sequence
  Description of Artificial Sequence: Synthetic peptide
  Seed: ERATVMAAF
EKATVMAAM

SEQ ID NO: 33839 - protein, 9 aa, Artificial Sequence
  Description of Artificial Sequence: Synthetic peptide
  Seed: ERATVMAAF
EKATVMAAF

SEQ ID NO: 33840 - protein, 9 aa, Artificial Sequence
  Description of Artificial Sequence: Synthetic peptide
  Seed: ERATVMAAF
EKATVMAAY

SEQ ID NO: 33841 - protein, 9 aa, Artificial Sequence
  Description of Artificial Sequence: Synthetic peptide
  Seed: ERATVMAAF
EMATVMAAM

SEQ ID NO: 33842 - protein, 9 aa, Artificial Sequence
  Description of Artificial Sequence: Synthetic peptide
  Seed: ERATVMAAF
EMATVMAAF

SEQ ID NO: 33843 - protein, 9 aa, Artificial Sequence
  Description of Artificial Sequence: Synthetic peptide
  Seed: ERATVMAAF
EMATVMAAY

SEQ ID NO: 33844 - protein, 9 aa, Artificial Sequence
  Description of Artificial Sequence: Synthetic peptide
  Seed: ERATVMAAF
ESATVMAAF

SEQ ID NO: 33845 - protein, 9 aa, Artificial Sequence
  Description of Artificial Sequence: Synthetic peptide
  Seed: ERATVMAAF
ESATVMAAY

SEQ ID NO: 33846 - protein, 10 aa, Artificial Sequence
  Description of Artificial Sequence: Synthetic peptide
  Seed: ERMCNILKGK
ERMCNILKGL

SEQ ID NO: 33847 - protein, 8 aa, Artificial Sequence
  Description of Artificial Sequence: Synthetic peptide
  Seed: ERMVLSAF
EMMVLSAM

SEQ ID NO: 33848 - protein, 8 aa, Artificial Sequence
  Description of Artificial Sequence: Synthetic peptide
  Seed: ERMVLSAF
EMMVLSAY

SEQ ID NO: 33849 - protein, 9 aa, Artificial Sequence
  Description of Artificial Sequence: Synthetic peptide
  Seed: ERATVMAAF
ERATVMAAM

SEQ ID NO: 33850 - protein, 11 aa, Artificial Sequence
  Description of Artificial Sequence: Synthetic peptide
  Seed: ERMVLSAFDER
EMMVLSAFDEK

SEQ ID NO: 33851 - protein, 11 aa, Artificial Sequence
  Description of Artificial Sequence: Synthetic peptide
  Seed: ERMVLSAFDER
EHMVLSAFDER

SEQ ID NO: 33852 - protein, 11 aa, Artificial Sequence
  Description of Artificial Sequence: Synthetic peptide
  Seed: ERMVLSAFDER
EHMVLSAFDEK

SEQ ID NO: 33853 - protein, 11 aa, Artificial Sequence
  Description of Artificial Sequence: Synthetic peptide
  Seed: ERMVLSAFDER
EIMVLSAFDER

SEQ ID NO: 33854 - protein, 11 aa, Artificial Sequence
  Description of Artificial Sequence: Synthetic peptide
  Seed: ERMVLSAFDER
EIMVLSAFDEK

SEQ ID NO: 33855 - protein, 11 aa, Artificial Sequence
  Description of Artificial Sequence: Synthetic peptide
  Seed: ERMVLSAFDER
ELMVLSAFDER

SEQ ID NO: 33856 - protein, 11 aa, Artificial Sequence
  Description of Artificial Sequence: Synthetic peptide
  Seed: ERMVLSAFDER
ELMVLSAFDEK

SEQ ID NO: 33857 - protein, 11 aa, Artificial Sequence
  Description of Artificial Sequence: Synthetic peptide
  Seed: ERMVLSAFDER
EKMVLSAFDEK

SEQ ID NO: 33858 - protein, 11 aa, Artificial Sequence
  Description of Artificial Sequence: Synthetic peptide
  Seed: ERMVLSAFDER
EMMVLSAFDER

SEQ ID NO: 33859 - protein, 11 aa, Artificial Sequence
  Description of Artificial Sequence: Synthetic peptide
  Seed: ERMVLSAFDER
EFMVLSAFDER

SEQ ID NO: 33860 - protein, 8 aa, Artificial Sequence
  Description of Artificial Sequence: Synthetic peptide
  Seed: ERMVLSAF
EFMVLSAM

SEQ ID NO: 33861 - protein, 11 aa, Artificial Sequence
  Description of Artificial Sequence: Synthetic peptide
  Seed: ERMVLSAFDER
EFMVLSAFDEK

SEQ ID NO: 33862 - protein, 11 aa, Artificial Sequence
  Description of Artificial Sequence: Synthetic peptide
  Seed: ERMVLSAFDER
EPMVLSAFDER

SEQ ID NO: 33863 - protein, 11 aa, Artificial Sequence
  Description of Artificial Sequence: Synthetic peptide
  Seed: ERMVLSAFDER
EPMVLSAFDEK

SEQ ID NO: 33864 - protein, 11 aa, Artificial Sequence
  Description of Artificial Sequence: Synthetic peptide
  Seed: ERMVLSAFDER
ESMVLSAFDER

SEQ ID NO: 33865 - protein, 11 aa, Artificial Sequence
  Description of Artificial Sequence: Synthetic peptide
  Seed: ERMVLSAFDER
ESMVLSAFDEK

SEQ ID NO: 33866 - protein, 11 aa, Artificial Sequence
  Description of Artificial Sequence: Synthetic peptide
  Seed: ERMVLSAFDER
ETMVLSAFDER

SEQ ID NO: 33867 - protein, 11 aa, Artificial Sequence
  Description of Artificial Sequence: Synthetic peptide
  Seed: ERMVLSAFDER
ETMVLSAFDEK

SEQ ID NO: 33868 - protein, 11 aa, Artificial Sequence
  Description of Artificial Sequence: Synthetic peptide
  Seed: ERMVLSAFDER
ETMVLSAFDEY

SEQ ID NO: 33869 - protein, 11 aa, Artificial Sequence
  Description of Artificial Sequence: Synthetic peptide
  Seed: ERMVLSAFDER
EWMVLSAFDER

SEQ ID NO: 33870 - protein, 11 aa, Artificial Sequence
  Description of Artificial Sequence: Synthetic peptide
  Seed: ERMVLSAFDER
EGMVLSAFDEK

SEQ ID NO: 33871 - protein, 11 aa, Artificial Sequence
  Description of Artificial Sequence: Synthetic peptide
  Seed: ERMVLSAFDER
EGMVLSAFDER

SEQ ID NO: 33872 - protein, 11 aa, Artificial Sequence
  Description of Artificial Sequence: Synthetic peptide
  Seed: ERMVLSAFDER
EEMVLSAFDEK

SEQ ID NO: 33873 - protein, 11 aa, Artificial Sequence
  Description of Artificial Sequence: Synthetic peptide
  Seed: ERMVLSAFDER
EEMVLSAFDER

SEQ ID NO: 33874 - protein, 8 aa, Artificial Sequence
  Description of Artificial Sequence: Synthetic peptide
  Seed: ERMVLSAF
EFMVLSAF

SEQ ID NO: 33875 - protein, 8 aa, Artificial Sequence
  Description of Artificial Sequence: Synthetic peptide
  Seed: ERMVLSAF
EFMVLSAY

SEQ ID NO: 33876 - protein, 8 aa, Artificial Sequence
  Description of Artificial Sequence: Synthetic peptide
  Seed: ERMVLSAF
EWMVLSAM

SEQ ID NO: 33877 - protein, 8 aa, Artificial Sequence
  Description of Artificial Sequence: Synthetic peptide
  Seed: ERMVLSAF
EWMVLSAF

SEQ ID NO: 33878 - protein, 8 aa, Artificial Sequence
  Description of Artificial Sequence: Synthetic peptide
  Seed: ERMVLSAF
EWMVLSAY

SEQ ID NO: 33879 - protein, 8 aa, Artificial Sequence
  Description of Artificial Sequence: Synthetic peptide
  Seed: ERMVLSAF
EYMVLSAM

SEQ ID NO: 33880 - protein, 8 aa, Artificial Sequence
  Description of Artificial Sequence: Synthetic peptide
  Seed: ERMVLSAF
EYMVLSAF

SEQ ID NO: 33881 - protein, 8 aa, Artificial Sequence
  Description of Artificial Sequence: Synthetic peptide
  Seed: ERMVLSAF
EYMVLSAY

SEQ ID NO: 33882 - protein, 11 aa, Artificial Sequence
  Description of Artificial Sequence: Synthetic peptide
  Seed: ERMVLSAFDER
EAMVLSAFDER

SEQ ID NO: 33883 - protein, 11 aa, Artificial Sequence
  Description of Artificial Sequence: Synthetic peptide
  Seed: ERMVLSAFDER
EAMVLSAFDEK

SEQ ID NO: 33884 - protein, 11 aa, Artificial Sequence
  Description of Artificial Sequence: Synthetic peptide
  Seed: ERMVLSAFDER
ERMVLSAFDEK

SEQ ID NO: 33885 - protein, 11 aa, Artificial Sequence
  Description of Artificial Sequence: Synthetic peptide
  Seed: ERMVLSAFDER
ENMVLSAFDER

SEQ ID NO: 33886 - protein, 11 aa, Artificial Sequence
  Description of Artificial Sequence: Synthetic peptide
  Seed: ERMVLSAFDER
ENMVLSAFDEK

SEQ ID NO: 33887 - protein, 11 aa, Artificial Sequence
  Description of Artificial Sequence: Synthetic peptide
  Seed: ERMVLSAFDER
EDMVLSAFDER

SEQ ID NO: 33888 - protein, 11 aa, Artificial Sequence
  Description of Artificial Sequence: Synthetic peptide
  Seed: ERMVLSAFDER
EDMVLSAFDEK

SEQ ID NO: 33889 - protein, 11 aa, Artificial Sequence
  Description of Artificial Sequence: Synthetic peptide
  Seed: ERMVLSAFDER
ECMVLSAFDER

SEQ ID NO: 33890 - protein, 11 aa, Artificial Sequence
  Description of Artificial Sequence: Synthetic peptide
  Seed: ERMVLSAFDER
ECMVLSAFDEK

SEQ ID NO: 33891 - protein, 11 aa, Artificial Sequence
  Description of Artificial Sequence: Synthetic peptide
  Seed: ERMVLSAFDER
EQMVLSAFDER

SEQ ID NO: 33892 - protein, 11 aa, Artificial Sequence
  Description of Artificial Sequence: Synthetic peptide
  Seed: ERMVLSAFDER
EQMVLSAFDEK

SEQ ID NO: 33893 - protein, 9 aa, Artificial Sequence
  Description of Artificial Sequence: Synthetic peptide
  Seed: ERATVMAAF
ERATVMAAY

SEQ ID NO: 33894 - protein, 9 aa, Artificial Sequence
  Description of Artificial Sequence: Synthetic peptide
  Seed: ERATVMAAF
ERATVMAAL

SEQ ID NO: 33895 - protein, 10 aa, Artificial Sequence
  Description of Artificial Sequence: Synthetic peptide
  Seed: EIIRMMESAR
ENIRMMESAK

SEQ ID NO: 33896 - protein, 9 aa, Artificial Sequence
  Description of Artificial Sequence: Synthetic peptide
  Seed: EQMETDGER
ESMETDGEK

SEQ ID NO: 33897 - protein, 9 aa, Artificial Sequence
  Description of Artificial Sequence: Synthetic peptide
  Seed: EQMETDGER
EIMETDGER

SEQ ID NO: 33898 - protein, 9 aa, Artificial Sequence
  Description of Artificial Sequence: Synthetic peptide
  Seed: EQMETDGER
EIMETDGEK

SEQ ID NO: 33899 - protein, 9 aa, Artificial Sequence
  Description of Artificial Sequence: Synthetic peptide
  Seed: EQMETDGER
ELMETDGER

SEQ ID NO: 33900 - protein, 9 aa, Artificial Sequence
  Description of Artificial Sequence: Synthetic peptide
  Seed: EQMETDGER
ELMETDGEK

SEQ ID NO: 33901 - protein, 9 aa, Artificial Sequence
  Description of Artificial Sequence: Synthetic peptide
  Seed: EQMETDGER
EMMETDGER

SEQ ID NO: 33902 - protein, 9 aa, Artificial Sequence
  Description of Artificial Sequence: Synthetic peptide
  Seed: EQMETDGER
EMMETDGEK

SEQ ID NO: 33903 - protein, 9 aa, Artificial Sequence
  Description of Artificial Sequence: Synthetic peptide
  Seed: EQMETDGER
EFMETDGER

SEQ ID NO: 33904 - protein, 9 aa, Artificial Sequence
  Description of Artificial Sequence: Synthetic peptide
  Seed: EQMETDGER
EFMETDGEK

SEQ ID NO: 33905 - protein, 9 aa, Artificial Sequence
  Description of Artificial Sequence: Synthetic peptide
  Seed: EQMETDGER
ESMETDGER

SEQ ID NO: 33906 - protein, 9 aa, Artificial Sequence
  Description of Artificial Sequence: Synthetic peptide
  Seed: EQMETDGER
ETMETDGER

SEQ ID NO: 33907 - protein, 9 aa, Artificial Sequence
  Description of Artificial Sequence: Synthetic peptide
  Seed: EQMETGGER
EGMETGGER

SEQ ID NO: 33908 - protein, 9 aa, Artificial Sequence
  Description of Artificial Sequence: Synthetic peptide
  Seed: EQMETDGER
ETMETDGEK

SEQ ID NO: 33909 - protein, 9 aa, Artificial Sequence
  Description of Artificial Sequence: Synthetic peptide
  Seed: EQMETDGER
ETMETDGEY

SEQ ID NO: 33910 - protein, 9 aa, Artificial Sequence
  Description of Artificial Sequence: Synthetic peptide
  Seed: EQMETDGER
EVMETDGER

SEQ ID NO: 33911 - protein, 9 aa, Artificial Sequence
  Description of Artificial Sequence: Synthetic peptide
  Seed: EQMETDGER
EVMETDGEK

SEQ ID NO: 33912 - protein, 9 aa, Artificial Sequence
  Description of Artificial Sequence: Synthetic peptide
  Seed: EQMETDGER
EVMETDGEY

SEQ ID NO: 33913 - protein, 9 aa, Artificial Sequence
  Description of Artificial Sequence: Synthetic peptide
  Seed: EQMETGGER
EAMETGGER

SEQ ID NO: 33914 - protein, 9 aa, Artificial Sequence
  Description of Artificial Sequence: Synthetic peptide
  Seed: EQMETGGER
EAMETGGEK

SEQ ID NO: 33915 - protein, 9 aa, Artificial Sequence
  Description of Artificial Sequence: Synthetic peptide
  Seed: EQMETGGER
ENMETGGER

SEQ ID NO: 33916 - protein, 9 aa, Artificial Sequence
  Description of Artificial Sequence: Synthetic peptide
  Seed: EQMETGGER
ENMETGGEK

SEQ ID NO: 33917 - protein, 9 aa, Artificial Sequence
  Description of Artificial Sequence: Synthetic peptide
  Seed: EQMETDGER
EGMETDGER

SEQ ID NO: 33918 - protein, 9 aa, Artificial Sequence
  Description of Artificial Sequence: Synthetic peptide
  Seed: EQMETDGER
ECMETDGER

SEQ ID NO: 33919 - protein, 9 aa, Artificial Sequence
  Description of Artificial Sequence: Synthetic peptide
  Seed: EQMETDGER
ENMETDGER

SEQ ID NO: 33920 - protein, 9 aa, Artificial Sequence
  Description of Artificial Sequence: Synthetic peptide
  Seed: EQMETDGER
EAMETDGEK

SEQ ID NO: 33921 - protein, 10 aa, Artificial Sequence
  Description of Artificial Sequence: Synthetic peptide
  Seed: ELRSRYWAIR
ESRSRYWAIK

SEQ ID NO: 33922 - protein, 10 aa, Artificial Sequence
  Description of Artificial Sequence: Synthetic peptide
  Seed: ELRSRYWAIR
ESRSRYWAIM

SEQ ID NO: 33923 - protein, 10 aa, Artificial Sequence
  Description of Artificial Sequence: Synthetic peptide
  Seed: ELRSRYWAIR
ETRSRYWAIR

SEQ ID NO: 33924 - protein, 10 aa, Artificial Sequence
  Description of Artificial Sequence: Synthetic peptide
  Seed: ELRSRYWAIR
ETRSRYWAIL

SEQ ID NO: 33925 - protein, 10 aa, Artificial Sequence
  Description of Artificial Sequence: Synthetic peptide
  Seed: ELRSRYWAIR
ETRSRYWAIK

SEQ ID NO: 33926 - protein, 10 aa, Artificial Sequence
  Description of Artificial Sequence: Synthetic peptide
  Seed: ELRSRYWAIR
ETRSRYWAIM

SEQ ID NO: 33927 - protein, 10 aa, Artificial Sequence
  Description of Artificial Sequence: Synthetic peptide
  Seed: ELRSRYWAIR
EWRSRYWAIR

SEQ ID NO: 33928 - protein, 10 aa, Artificial Sequence
  Description of Artificial Sequence: Synthetic peptide
  Seed: ELRSRYWAIR
EWRSRYWAIL

SEQ ID NO: 33929 - protein, 10 aa, Artificial Sequence
  Description of Artificial Sequence: Synthetic peptide
  Seed: ELRSRYWAIR
EWRSRYWAIK

SEQ ID NO: 33930 - protein, 10 aa, Artificial Sequence
  Description of Artificial Sequence: Synthetic peptide
  Seed: ELRSRYWAIR
EYRSRYWAIR

SEQ ID NO: 33931 - protein, 10 aa, Artificial Sequence
  Description of Artificial Sequence: Synthetic peptide
  Seed: ELRSRYWAIR
EYRSRYWAIK

SEQ ID NO: 33932 - protein, 10 aa, Artificial Sequence
  Description of Artificial Sequence: Synthetic peptide
  Seed: ELRSRYWAIR
EVRSRYWAIR

SEQ ID NO: 33933 - protein, 10 aa, Artificial Sequence
  Description of Artificial Sequence: Synthetic peptide
  Seed: ELRSRYWAIR
EVRSRYWAII

SEQ ID NO: 33934 - protein, 10 aa, Artificial Sequence
  Description of Artificial Sequence: Synthetic peptide
  Seed: ELRSRYWAIR
EVRSRYWAIL

SEQ ID NO: 33935 - protein, 10 aa, Artificial Sequence
  Description of Artificial Sequence: Synthetic peptide
  Seed: ELRSRYWAIR
EVRSRYWAIK

SEQ ID NO: 33936 - protein, 10 aa, Artificial Sequence
  Description of Artificial Sequence: Synthetic peptide
  Seed: ELRSRYWAIR
EVRSRYWAIM

SEQ ID NO: 33937 - protein, 10 aa, Artificial Sequence
  Description of Artificial Sequence: Synthetic peptide
  Seed: ELRSRYWAIR
EVRSRYWAIF

SEQ ID NO: 33938 - protein, 10 aa, Artificial Sequence
  Description of Artificial Sequence: Synthetic peptide
  Seed: ELRSRYWAIR
EVRSRYWAIV

SEQ ID NO: 33939 - protein, 9 aa, Artificial Sequence
  Description of Artificial Sequence: Synthetic peptide
  Seed: EQMETDGER
EAMETDGER

SEQ ID NO: 33940 - protein, 9 aa, Artificial Sequence
  Description of Artificial Sequence: Synthetic peptide
  Seed: EQMETGGER
ECMETGGER

SEQ ID NO: 33941 - protein, 9 aa, Artificial Sequence
  Description of Artificial Sequence: Synthetic peptide
  Seed: EQMETGGER
EGMETGGEK

SEQ ID NO: 33942 - protein, 9 aa, Artificial Sequence
  Description of Artificial Sequence: Synthetic peptide
  Seed: ERATVMAAF
ERATVMAAI

SEQ ID NO: 33943 - protein, 9 aa, Artificial Sequence
  Description of Artificial Sequence: Synthetic peptide
  Seed: ERATIMAAF
ELATIMAAY

SEQ ID NO: 33944 - protein, 9 aa, Artificial Sequence
  Description of Artificial Sequence: Synthetic peptide
  Seed: ERATIMAAF
EQATIMAAL

SEQ ID NO: 33945 - protein, 9 aa, Artificial Sequence
  Description of Artificial Sequence: Synthetic peptide
  Seed: ERATIMAAF
EQATIMAAM

SEQ ID NO: 33946 - protein, 9 aa, Artificial Sequence
  Description of Artificial Sequence: Synthetic peptide
  Seed: ERATIMAAF
EQATIMAAF

SEQ ID NO: 33947 - protein, 9 aa, Artificial Sequence
  Description of Artificial Sequence: Synthetic peptide
  Seed: ERATIMAAF
EQATIMAAY

SEQ ID NO: 33948 - protein, 9 aa, Artificial Sequence
  Description of Artificial Sequence: Synthetic peptide
  Seed: ERATIMAAF
EHATIMAAL

SEQ ID NO: 33949 - protein, 9 aa, Artificial Sequence
  Description of Artificial Sequence: Synthetic peptide
  Seed: ERATIMAAF
EHATIMAAM

SEQ ID NO: 33950 - protein, 9 aa, Artificial Sequence
  Description of Artificial Sequence: Synthetic peptide
  Seed: ERATIMAAF
EHATIMAAF

SEQ ID NO: 33951 - protein, 9 aa, Artificial Sequence
  Description of Artificial Sequence: Synthetic peptide
  Seed: ERATIMAAF
EHATIMAAY

SEQ ID NO: 33952 - protein, 9 aa, Artificial Sequence
  Description of Artificial Sequence: Synthetic peptide
  Seed: ERATIMAAF
ELATIMAAF

SEQ ID NO: 33953 - protein, 9 aa, Artificial Sequence
  Description of Artificial Sequence: Synthetic peptide
  Seed: ERATIMAAF
EKATIMAAM

SEQ ID NO: 33954 - protein, 9 aa, Artificial Sequence
  Description of Artificial Sequence: Synthetic peptide
  Seed: EQMETGGER
EIMETGGER

SEQ ID NO: 33955 - protein, 9 aa, Artificial Sequence
  Description of Artificial Sequence: Synthetic peptide
  Seed: ERATIMAAF
EKATIMAAY

SEQ ID NO: 33956 - protein, 9 aa, Artificial Sequence
  Description of Artificial Sequence: Synthetic peptide
  Seed: ERATIMAAF
EMATIMAAM

SEQ ID NO: 33957 - protein, 9 aa, Artificial Sequence
  Description of Artificial Sequence: Synthetic peptide
  Seed: ERATIMAAF
EMATIMAAF

SEQ ID NO: 33958 - protein, 9 aa, Artificial Sequence
  Description of Artificial Sequence: Synthetic peptide
  Seed: ERATIMAAF
EMATIMAAY

SEQ ID NO: 33959 - protein, 9 aa, Artificial Sequence
  Description of Artificial Sequence: Synthetic peptide
  Seed: ERATIMAAF
ESATIMAAF

SEQ ID NO: 33960 - protein, 9 aa, Artificial Sequence
  Description of Artificial Sequence: Synthetic peptide
  Seed: ERATIMAAF
ESATIMAAY

SEQ ID NO: 33961 - protein, 9 aa, Artificial Sequence
  Description of Artificial Sequence: Synthetic peptide
  Seed: ERATVMAAF
EAATVMAAF

SEQ ID NO: 33962 - protein, 9 aa, Artificial Sequence
  Description of Artificial Sequence: Synthetic peptide
  Seed: ERATVMAAF
EAATVMAAY

SEQ ID NO: 33963 - protein, 9 aa, Artificial Sequence
  Description of Artificial Sequence: Synthetic peptide
  Seed: ERATIMAAF
ERATIMAAV

SEQ ID NO: 33964 - protein, 9 aa, Artificial Sequence
  Description of Artificial Sequence: Synthetic peptide
  Seed: ERATIMAAF
ERATIMAAY

SEQ ID NO: 33965 - protein, 9 aa, Artificial Sequence
  Description of Artificial Sequence: Synthetic peptide
  Seed: ERATIMAAF
ERATIMAAM

SEQ ID NO: 33966 - protein, 9 aa, Artificial Sequence
  Description of Artificial Sequence: Synthetic peptide
  Seed: ERATIMAAF
ERATIMAAL

SEQ ID NO: 33967 - protein, 9 aa, Artificial Sequence
  Description of Artificial Sequence: Synthetic peptide
  Seed: EQMETGGER
EIMETGGEK

SEQ ID NO: 33968 - protein, 9 aa, Artificial Sequence
  Description of Artificial Sequence: Synthetic peptide
  Seed: EQMETGGER
ELMETGGER

SEQ ID NO: 33969 - protein, 9 aa, Artificial Sequence
  Description of Artificial Sequence: Synthetic peptide
  Seed: EQMETGGER
ELMETGGEK

SEQ ID NO: 33970 - protein, 9 aa, Artificial Sequence
  Description of Artificial Sequence: Synthetic peptide
  Seed: EQMETGGER
EMMETGGER

SEQ ID NO: 33971 - protein, 9 aa, Artificial Sequence
  Description of Artificial Sequence: Synthetic peptide
  Seed: EQMETGGER
EMMETGGEK

SEQ ID NO: 33972 - protein, 9 aa, Artificial Sequence
  Description of Artificial Sequence: Synthetic peptide
  Seed: EQMETGGER
EFMETGGER

SEQ ID NO: 33973 - protein, 9 aa, Artificial Sequence
  Description of Artificial Sequence: Synthetic peptide
  Seed: EQMETGGER
ESMETGGER

SEQ ID NO: 33974 - protein, 9 aa, Artificial Sequence
  Description of Artificial Sequence: Synthetic peptide
  Seed: EQMETGGER
ESMETGGEK

SEQ ID NO: 33975 - protein, 9 aa, Artificial Sequence
  Description of Artificial Sequence: Synthetic peptide
  Seed: EQMETGGER
ESMETGGEY

SEQ ID NO: 33976 - protein, 9 aa, Artificial Sequence
  Description of Artificial Sequence: Synthetic peptide
  Seed: EQMETGGER
ETMETGGER

SEQ ID NO: 33977 - protein, 9 aa, Artificial Sequence
  Description of Artificial Sequence: Synthetic peptide
  Seed: EQMETGGER
ETMETGGEK

SEQ ID NO: 33978 - protein, 9 aa, Artificial Sequence
  Description of Artificial Sequence: Synthetic peptide
  Seed: EQMETGGER
ETMETGGEY

SEQ ID NO: 33979 - protein, 9 aa, Artificial Sequence
  Description of Artificial Sequence: Synthetic peptide
  Seed: EQMETGGER
EVMETGGER

SEQ ID NO: 33980 - protein, 9 aa, Artificial Sequence
  Description of Artificial Sequence: Synthetic peptide
  Seed: EQMETGGER
EVMETGGEK

SEQ ID NO: 33981 - protein, 9 aa, Artificial Sequence
  Description of Artificial Sequence: Synthetic peptide
  Seed: EQMETGGER
EVMETGGEY

SEQ ID NO: 33982 - protein, 8 aa, Artificial Sequence
  Description of Artificial Sequence: Synthetic peptide
  Seed: ERATIMAA
EHATIMAA

SEQ ID NO: 33983 - protein, 9 aa, Artificial Sequence
  Description of Artificial Sequence: Synthetic peptide
  Seed: ERATIMAAF
EAATIMAAF

SEQ ID NO: 33984 - protein, 9 aa, Artificial Sequence
  Description of Artificial Sequence: Synthetic peptide
  Seed: ERATIMAAF
EAATIMAAY

SEQ ID NO: 33985 - protein, 9 aa, Artificial Sequence
  Description of Artificial Sequence: Synthetic peptide
  Seed: ERATIMAAF
ERATIMAAI

SEQ ID NO: 33986 - protein, 11 aa, Artificial Sequence
  Description of Artificial Sequence: Synthetic peptide
  Seed: ERMVLSAFDER
EWMVLSAFDEK

SEQ ID NO: 33987 - protein, 11 aa, Artificial Sequence
  Description of Artificial Sequence: Synthetic peptide
  Seed: ERMVLSAFDER
EYMVLSAFDER

SEQ ID NO: 33988 - protein, 11 aa, Artificial Sequence
  Description of Artificial Sequence: Synthetic peptide
  Seed: ERMVLSAFDER
EYMVLSAFDEK

SEQ ID NO: 33989 - protein, 11 aa, Artificial Sequence
  Description of Artificial Sequence: Synthetic peptide
  Seed: ETMDSSTLELR
ESMDSSTLELR

SEQ ID NO: 33990 - protein, 11 aa, Artificial Sequence
  Description of Artificial Sequence: Synthetic peptide
  Seed: ETMDSSTLELR
EGMDSSTLELR

SEQ ID NO: 33991 - protein, 11 aa, Artificial Sequence
  Description of Artificial Sequence: Synthetic peptide
  Seed: ETMDSSTLELR
EIMDSSTLELR

SEQ ID NO: 33992 - protein, 11 aa, Artificial Sequence
  Description of Artificial Sequence: Synthetic peptide
  Seed: ETMDSSTLELR
EIMDSSTLELK

SEQ ID NO: 33993 - protein, 11 aa, Artificial Sequence
  Description of Artificial Sequence: Synthetic peptide
  Seed: ETMDSSTLELR
ELMDSSTLELR

SEQ ID NO: 33994 - protein, 11 aa, Artificial Sequence
  Description of Artificial Sequence: Synthetic peptide
  Seed: ETMDSSTLELR
ELMDSSTLELK

SEQ ID NO: 33995 - protein, 11 aa, Artificial Sequence
  Description of Artificial Sequence: Synthetic peptide
  Seed: ETMDSSTLELR
EKMDSSTLELR

SEQ ID NO: 33996 - protein, 11 aa, Artificial Sequence
  Description of Artificial Sequence: Synthetic peptide
  Seed: ETMDSSTLELR
EMMDSSTLELR

SEQ ID NO: 33997 - protein, 11 aa, Artificial Sequence
  Description of Artificial Sequence: Synthetic peptide
  Seed: ETMDSSTLELR
EMMDSSTLELK

SEQ ID NO: 33998 - protein, 11 aa, Artificial Sequence
  Description of Artificial Sequence: Synthetic peptide
  Seed: ETMDSSTLELR
EFMDSSTLELR

SEQ ID NO: 33999 - protein, 11 aa, Artificial Sequence
  Description of Artificial Sequence: Synthetic peptide
  Seed: ETMDSSTLELR
ESMDSSTLELK

SEQ ID NO: 34000 - protein, 9 aa, Artificial Sequence
  Description of Artificial Sequence: Synthetic peptide
  Seed: EVSFQGRGV
ETSFQGRGI

SEQ ID NO: 34001 - protein, 11 aa, Artificial Sequence
  Description of Artificial Sequence: Synthetic peptide
  Seed: ETMDSSTLELR
ETMDSSTLELK

SEQ ID NO: 34002 - protein, 11 aa, Artificial Sequence
  Description of Artificial Sequence: Synthetic peptide
  Seed: ETMDSSTLELR
ETMDSSTLELY

SEQ ID NO: 34003 - protein, 11 aa, Artificial Sequence
  Description of Artificial Sequence: Synthetic peptide
  Seed: ETMDSSTLELR
EWMDSSTLELR

SEQ ID NO: 34004 - protein, 11 aa, Artificial Sequence
  Description of Artificial Sequence: Synthetic peptide
  Seed: ETMDSSTLELR
EYMDSSTLELR

SEQ ID NO: 34005 - protein, 11 aa, Artificial Sequence
  Description of Artificial Sequence: Synthetic peptide
  Seed: ETMDSSTLELR
EVMDSSTLELR

SEQ ID NO: 34006 - protein, 11 aa, Artificial Sequence
  Description of Artificial Sequence: Synthetic peptide
  Seed: ETMDSSTLELR
EVMDSSTLELK

SEQ ID NO: 34007 - protein, 9 aa, Artificial Sequence
  Description of Artificial Sequence: Synthetic peptide
  Seed: EVSFQGRGV
EASFQGRGV

SEQ ID NO: 34008 - protein, 9 aa, Artificial Sequence
  Description of Artificial Sequence: Synthetic peptide
  Seed: EVSFQGRGV
EISFQGRGV

SEQ ID NO: 34009 - protein, 9 aa, Artificial Sequence
  Description of Artificial Sequence: Synthetic peptide
  Seed: EVSFQGRGV
ESSFQGRGV

SEQ ID NO: 34010 - protein, 11 aa, Artificial Sequence
  Description of Artificial Sequence: Synthetic peptide
  Seed: ETMDSSTLELR
ENMDSSTLELR

SEQ ID NO: 34011 - protein, 11 aa, Artificial Sequence
  Description of Artificial Sequence: Synthetic peptide
  Seed: ETMDSSTLELR
ERMDSSTLELR

SEQ ID NO: 34012 - protein, 11 aa, Artificial Sequence
  Description of Artificial Sequence: Synthetic peptide
  Seed: ETMDSSTLELR
EAMDSSTLELK

SEQ ID NO: 34013 - protein, 10 aa, Artificial Sequence
  Description of Artificial Sequence: Synthetic peptide
  Seed: ETMDSSTLEL
ESMDSSTLEY

SEQ ID NO: 34014 - protein, 10 aa, Artificial Sequence
  Description of Artificial Sequence: Synthetic peptide
  Seed: ETMDSSTLEL
ESMDSSTLEV

SEQ ID NO: 34015 - protein, 10 aa, Artificial Sequence
  Description of Artificial Sequence: Synthetic peptide
  Seed: ETMDSSTLEL
ETMDSSTLEA

SEQ ID NO: 34016 - protein, 10 aa, Artificial Sequence
  Description of Artificial Sequence: Synthetic peptide
  Seed: ETMDSSTLEL
ETMDSSTLEI

SEQ ID NO: 34017 - protein, 10 aa, Artificial Sequence
  Description of Artificial Sequence: Synthetic peptide
  Seed: ETMDSSTLEL
ETMDSSTLEM

SEQ ID NO: 34018 - protein, 10 aa, Artificial Sequence
  Description of Artificial Sequence: Synthetic peptide
  Seed: ETMDSSTLEL
ETMDSSTLEF

SEQ ID NO: 34019 - protein, 10 aa, Artificial Sequence
  Description of Artificial Sequence: Synthetic peptide
  Seed: ETMDSSTLEL
ETMDSSTLET

SEQ ID NO: 34020 - protein, 10 aa, Artificial Sequence
  Description of Artificial Sequence: Synthetic peptide
  Seed: ETMDSSTLEL
ETMDSSTLEW

SEQ ID NO: 34021 - protein, 10 aa, Artificial Sequence
  Description of Artificial Sequence: Synthetic peptide
  Seed: ETMDSSTLEL
ETMDSSTLEY

SEQ ID NO: 34022 - protein, 10 aa, Artificial Sequence
  Description of Artificial Sequence: Synthetic peptide
  Seed: ETMDSSTLEL
ETMDSSTLEV

SEQ ID NO: 34023 - protein, 10 aa, Artificial Sequence
  Description of Artificial Sequence: Synthetic peptide
  Seed: ETMDSSTLEL
EVMDSSTLEA

SEQ ID NO: 34024 - protein, 10 aa, Artificial Sequence
  Description of Artificial Sequence: Synthetic peptide
  Seed: ETMDSSTLEL
EVMDSSTLEI

SEQ ID NO: 34025 - protein, 10 aa, Artificial Sequence
  Description of Artificial Sequence: Synthetic peptide
  Seed: ETMDSSTLEL
EVMDSSTLEL

SEQ ID NO: 34026 - protein, 10 aa, Artificial Sequence
  Description of Artificial Sequence: Synthetic peptide
  Seed: ETMDSSTLEL
EVMDSSTLEM

SEQ ID NO: 34027 - protein, 10 aa, Artificial Sequence
  Description of Artificial Sequence: Synthetic peptide
  Seed: ETMDSSTLEL
EVMDSSTLEF

SEQ ID NO: 34028 - protein, 10 aa, Artificial Sequence
  Description of Artificial Sequence: Synthetic peptide
  Seed: ETMDSSTLEL
EVMDSSTLET

SEQ ID NO: 34029 - protein, 10 aa, Artificial Sequence
  Description of Artificial Sequence: Synthetic peptide
  Seed: ETMDSSTLEL
EVMDSSTLEW

SEQ ID NO: 34030 - protein, 10 aa, Artificial Sequence
  Description of Artificial Sequence: Synthetic peptide
  Seed: ETMDSSTLEL
EVMDSSTLEY

SEQ ID NO: 34031 - protein, 10 aa, Artificial Sequence
  Description of Artificial Sequence: Synthetic peptide
  Seed: ETMDSSTLEL
EVMDSSTLEV

SEQ ID NO: 34032 - protein, 9 aa, Artificial Sequence
  Description of Artificial Sequence: Synthetic peptide
  Seed: EVSFQGRGV
ETSFQGRGA

SEQ ID NO: 34033 - protein, 9 aa, Artificial Sequence
  Description of Artificial Sequence: Synthetic peptide
  Seed: EVSFQGRGV
ETSFQGRGL

SEQ ID NO: 34034 - protein, 11 aa, Artificial Sequence
  Description of Artificial Sequence: Synthetic peptide
  Seed: ERMVLSAFDER
EVMVLSAFDER

SEQ ID NO: 34035 - protein, 10 aa, Artificial Sequence
  Description of Artificial Sequence: Synthetic peptide
  Seed: EVSFQGRGVF
EMSFQGRGVY

SEQ ID NO: 34036 - protein, 10 aa, Artificial Sequence
  Description of Artificial Sequence: Synthetic peptide
  Seed: EVSFQGRGVF
ELSFQGRGVF

SEQ ID NO: 34037 - protein, 10 aa, Artificial Sequence
  Description of Artificial Sequence: Synthetic peptide
  Seed: EVSFQGRGVF
ELSFQGRGVW

SEQ ID NO: 34038 - protein, 10 aa, Artificial Sequence
  Description of Artificial Sequence: Synthetic peptide
  Seed: EVSFQGRGVF
ELSFQGRGVY

SEQ ID NO: 34039 - protein, 10 aa, Artificial Sequence
  Description of Artificial Sequence: Synthetic peptide
  Seed: EVSFQGRGVF
EKSFQGRGVF

SEQ ID NO: 34040 - protein, 10 aa, Artificial Sequence
  Description of Artificial Sequence: Synthetic peptide
  Seed: EVSFQGRGVF
EKSFQGRGVW

SEQ ID NO: 34041 - protein, 10 aa, Artificial Sequence
  Description of Artificial Sequence: Synthetic peptide
  Seed: EVSFQGRGVF
EKSFQGRGVY

SEQ ID NO: 34042 - protein, 10 aa, Artificial Sequence
  Description of Artificial Sequence: Synthetic peptide
  Seed: EVSFQGRGVF
EMSFQGRGVM

SEQ ID NO: 34043 - protein, 10 aa, Artificial Sequence
  Description of Artificial Sequence: Synthetic peptide
  Seed: EVSFQGRGVF
EMSFQGRGVW

SEQ ID NO: 34044 - protein, 10 aa, Artificial Sequence
  Description of Artificial Sequence: Synthetic peptide
  Seed: EVSFQGRGVF
EFSFQGRGVM

SEQ ID NO: 34045 - protein, 9 aa, Artificial Sequence
  Description of Artificial Sequence: Synthetic peptide
  Seed: EVSFQGRGV
ETSFQGRGV

SEQ ID NO: 34046 - protein, 10 aa, Artificial Sequence
  Description of Artificial Sequence: Synthetic peptide
  Seed: EVSFQGRGVF
EFSFQGRGVF

SEQ ID NO: 34047 - protein, 10 aa, Artificial Sequence
  Description of Artificial Sequence: Synthetic peptide
  Seed: EVSFQGRGVF
EFSFQGRGVW

SEQ ID NO: 34048 - protein, 10 aa, Artificial Sequence
  Description of Artificial Sequence: Synthetic peptide
  Seed: EVSFQGRGVF
EFSFQGRGVY

SEQ ID NO: 34049 - protein, 10 aa, Artificial Sequence
  Description of Artificial Sequence: Synthetic peptide
  Seed: EVSFQGRGVF
EPSFQGRGVW

SEQ ID NO: 34050 - protein, 10 aa, Artificial Sequence
  Description of Artificial Sequence: Synthetic peptide
  Seed: EVSFQGRGVF
ESSFQGRGVF

SEQ ID NO: 34051 - protein, 10 aa, Artificial Sequence
  Description of Artificial Sequence: Synthetic peptide
  Seed: EVSFQGRGVF
ESSFQGRGVW

SEQ ID NO: 34052 - protein, 10 aa, Artificial Sequence
  Description of Artificial Sequence: Synthetic peptide
  Seed: EVSFQGRGVF
ESSFQGRGVY

SEQ ID NO: 34053 - protein, 10 aa, Artificial Sequence
  Description of Artificial Sequence: Synthetic peptide
  Seed: EVSFQGRGVF
ETSFQGRGVW

SEQ ID NO: 34054 - protein, 10 aa, Artificial Sequence
  Description of Artificial Sequence: Synthetic peptide
  Seed: EVSFQGRGVF
ETSFQGRGVY

SEQ ID NO: 34055 - protein, 10 aa, Artificial Sequence
  Description of Artificial Sequence: Synthetic peptide
  Seed: EVSFQGRGVF
EISFQGRGVY

SEQ ID NO: 34056 - protein, 10 aa, Artificial Sequence
  Description of Artificial Sequence: Synthetic peptide
  Seed: EVSFQGRGVF
EISFQGRGVW

SEQ ID NO: 34057 - protein, 10 aa, Artificial Sequence
  Description of Artificial Sequence: Synthetic peptide
  Seed: EVSFQGRGVF
EISFQGRGVF

SEQ ID NO: 34058 - protein, 10 aa, Artificial Sequence
  Description of Artificial Sequence: Synthetic peptide
  Seed: EVSFQGRGVF
EHSFQGRGVY

SEQ ID NO: 34059 - protein, 9 aa, Artificial Sequence
  Description of Artificial Sequence: Synthetic peptide
  Seed: EVSFQGRGV
EVSFQGRGI

SEQ ID NO: 34060 - protein, 9 aa, Artificial Sequence
  Description of Artificial Sequence: Synthetic peptide
  Seed: EVSFQGRGV
EVSFQGRGL

SEQ ID NO: 34061 - protein, 10 aa, Artificial Sequence
  Description of Artificial Sequence: Synthetic peptide
  Seed: EVSFQGRGVF
EASFQGRGVF

SEQ ID NO: 34062 - protein, 10 aa, Artificial Sequence
  Description of Artificial Sequence: Synthetic peptide
  Seed: EVSFQGRGVF
EASFQGRGVW

SEQ ID NO: 34063 - protein, 10 aa, Artificial Sequence
  Description of Artificial Sequence: Synthetic peptide
  Seed: EVSFQGRGVF
EASFQGRGVY

SEQ ID NO: 34064 - protein, 10 aa, Artificial Sequence
  Description of Artificial Sequence: Synthetic peptide
  Seed: EVSFQGRGVF
ERSFQGRGVF

SEQ ID NO: 34065 - protein, 10 aa, Artificial Sequence
  Description of Artificial Sequence: Synthetic peptide
  Seed: EVSFQGRGVF
ERSFQGRGVW

SEQ ID NO: 34066 - protein, 10 aa, Artificial Sequence
  Description of Artificial Sequence: Synthetic peptide
  Seed: EVSFQGRGVF
ERSFQGRGVY

SEQ ID NO: 34067 - protein, 10 aa, Artificial Sequence
  Description of Artificial Sequence: Synthetic peptide
  Seed: EVSFQGRGVF
ENSFQGRGVW

SEQ ID NO: 34068 - protein, 10 aa, Artificial Sequence
  Description of Artificial Sequence: Synthetic peptide
  Seed: EVSFQGRGVF
EDSFQGRGVW

SEQ ID NO: 34069 - protein, 10 aa, Artificial Sequence
  Description of Artificial Sequence: Synthetic peptide
  Seed: EVSFQGRGVF
ECSFQGRGVW

SEQ ID NO: 34070 - protein, 10 aa, Artificial Sequence
  Description of Artificial Sequence: Synthetic peptide
  Seed: EVSFQGRGVF
EQSFQGRGVM

SEQ ID NO: 34071 - protein, 10 aa, Artificial Sequence
  Description of Artificial Sequence: Synthetic peptide
  Seed: EVSFQGRGVF
EQSFQGRGVF

SEQ ID NO: 34072 - protein, 10 aa, Artificial Sequence
  Description of Artificial Sequence: Synthetic peptide
  Seed: EVSFQGRGVF
EQSFQGRGVW

SEQ ID NO: 34073 - protein, 10 aa, Artificial Sequence
  Description of Artificial Sequence: Synthetic peptide
  Seed: EVSFQGRGVF
EQSFQGRGVY

SEQ ID NO: 34074 - protein, 10 aa, Artificial Sequence
  Description of Artificial Sequence: Synthetic peptide
  Seed: EVSFQGRGVF
EESFQGRGVW

SEQ ID NO: 34075 - protein, 10 aa, Artificial Sequence
  Description of Artificial Sequence: Synthetic peptide
  Seed: EVSFQGRGVF
EGSFQGRGVW

SEQ ID NO: 34076 - protein, 10 aa, Artificial Sequence
  Description of Artificial Sequence: Synthetic peptide
  Seed: EVSFQGRGVF
EHSFQGRGVF

SEQ ID NO: 34077 - protein, 10 aa, Artificial Sequence
  Description of Artificial Sequence: Synthetic peptide
  Seed: EVSFQGRGVF
EHSFQGRGVW

SEQ ID NO: 34078 - protein, 10 aa, Artificial Sequence
  Description of Artificial Sequence: Synthetic peptide
  Seed: ETMDSSTLEL
ESMDSSTLEF

SEQ ID NO: 34079 - protein, 10 aa, Artificial Sequence
  Description of Artificial Sequence: Synthetic peptide
  Seed: ETMDSSTLEL
ESMDSSTLEM

SEQ ID NO: 34080 - protein, 10 aa, Artificial Sequence
  Description of Artificial Sequence: Synthetic peptide
  Seed: ETMDSSTLEL
ESMDSSTLEL

SEQ ID NO: 34081 - protein, 9 aa, Artificial Sequence
  Description of Artificial Sequence: Synthetic peptide
  Seed: ETMDSSTLE
EHMDSSTLR

SEQ ID NO: 34082 - protein, 9 aa, Artificial Sequence
  Description of Artificial Sequence: Synthetic peptide
  Seed: ETMDSSTLE
ENMDSSTLR

SEQ ID NO: 34083 - protein, 9 aa, Artificial Sequence
  Description of Artificial Sequence: Synthetic peptide
  Seed: ETMDSSTLE
ENMDSSTLK

SEQ ID NO: 34084 - protein, 9 aa, Artificial Sequence
  Description of Artificial Sequence: Synthetic peptide
  Seed: ETMDSSTLE
EDMDSSTLR

SEQ ID NO: 34085 - protein, 9 aa, Artificial Sequence
  Description of Artificial Sequence: Synthetic peptide
  Seed: ETMDSSTLE
ECMDSSTLR

SEQ ID NO: 34086 - protein, 9 aa, Artificial Sequence
  Description of Artificial Sequence: Synthetic peptide
  Seed: ETMDSSTLE
ECMDSSTLK

SEQ ID NO: 34087 - protein, 9 aa, Artificial Sequence
  Description of Artificial Sequence: Synthetic peptide
  Seed: ETMDSSTLE
EQMDSSTLR

SEQ ID NO: 34088 - protein, 9 aa, Artificial Sequence
  Description of Artificial Sequence: Synthetic peptide
  Seed: ETMDSSTLE
EQMDSSTLK

SEQ ID NO: 34089 - protein, 9 aa, Artificial Sequence
  Description of Artificial Sequence: Synthetic peptide
  Seed: ETMDSSTLE
EGMDSSTLR

SEQ ID NO: 34090 - protein, 9 aa, Artificial Sequence
  Description of Artificial Sequence: Synthetic peptide
  Seed: ETMDSSTLE
EGMDSSTLK

SEQ ID NO: 34091 - protein, 9 aa, Artificial Sequence
  Description of Artificial Sequence: Synthetic peptide
  Seed: ETMDSSTLE
EIMDSSTLR

SEQ ID NO: 34092 - protein, 10 aa, Artificial Sequence
  Description of Artificial Sequence: Synthetic peptide
  Seed: ETMDSSTLEL
ESMDSSTLEI

SEQ ID NO: 34093 - protein, 9 aa, Artificial Sequence
  Description of Artificial Sequence: Synthetic peptide
  Seed: ETMDSSTLE
EIMDSSTLH

SEQ ID NO: 34094 - protein, 9 aa, Artificial Sequence
  Description of Artificial Sequence: Synthetic peptide
  Seed: ETMDSSTLE
EIMDSSTLK

SEQ ID NO: 34095 - protein, 9 aa, Artificial Sequence
  Description of Artificial Sequence: Synthetic peptide
  Seed: ETMDSSTLE
EIMDSSTLY

SEQ ID NO: 34096 - protein, 9 aa, Artificial Sequence
  Description of Artificial Sequence: Synthetic peptide
  Seed: ETMDSSTLE
ELMDSSTLR

SEQ ID NO: 34097 - protein, 9 aa, Artificial Sequence
  Description of Artificial Sequence: Synthetic peptide
  Seed: ETMDSSTLE
ELMDSSTLK

SEQ ID NO: 34098 - protein, 9 aa, Artificial Sequence
  Description of Artificial Sequence: Synthetic peptide
  Seed: ETMDSSTLE
ELMDSSTLY

SEQ ID NO: 34099 - protein, 9 aa, Artificial Sequence
  Description of Artificial Sequence: Synthetic peptide
  Seed: ETMDSSTLE
EMMDSSTLR

SEQ ID NO: 34100 - protein, 9 aa, Artificial Sequence
  Description of Artificial Sequence: Synthetic peptide
  Seed: ETMDSSTLE
EMMDSSTLK

SEQ ID NO: 34101 - protein, 9 aa, Artificial Sequence
  Description of Artificial Sequence: Synthetic peptide
  Seed: ETMDSSTLE
EMMDSSTLY

SEQ ID NO: 34102 - protein, 9 aa, Artificial Sequence
  Description of Artificial Sequence: Synthetic peptide
  Seed: ETMDSSTLE
EAMDSSTLY

SEQ ID NO: 34103 - protein, 9 aa, Artificial Sequence
  Description of Artificial Sequence: Synthetic peptide
  Seed: ETMDSSTLE
EAMDSSTLK

SEQ ID NO: 34104 - protein, 9 aa, Artificial Sequence
  Description of Artificial Sequence: Synthetic peptide
  Seed: ETMDSSTLE
EAMDSSTLR

SEQ ID NO: 34105 - protein, 10 aa, Artificial Sequence
  Description of Artificial Sequence: Synthetic peptide
  Seed: ESSTLELRSR
EVSTLELRSK

SEQ ID NO: 34106 - protein, 11 aa, Artificial Sequence
  Description of Artificial Sequence: Synthetic peptide
  Seed: ERMVLSAFDER
EVMVLSAFDEK

SEQ ID NO: 34107 - protein, 10 aa, Artificial Sequence
  Description of Artificial Sequence: Synthetic peptide
  Seed: ESSTLELRSR
EASTLELRSR

SEQ ID NO: 34108 - protein, 10 aa, Artificial Sequence
  Description of Artificial Sequence: Synthetic peptide
  Seed: ESSTLELRSR
EASTLELRSK

SEQ ID NO: 34109 - protein, 10 aa, Artificial Sequence
  Description of Artificial Sequence: Synthetic peptide
  Seed: ESSTLELRSR
ENSTLELRSR

SEQ ID NO: 34110 - protein, 10 aa, Artificial Sequence
  Description of Artificial Sequence: Synthetic peptide
  Seed: ESSTLELRSR
EQSTLELRSR

SEQ ID NO: 34111 - protein, 10 aa, Artificial Sequence
  Description of Artificial Sequence: Synthetic peptide
  Seed: ESSTLELRSR
EGSTLELRSR

SEQ ID NO: 34112 - protein, 10 aa, Artificial Sequence
  Description of Artificial Sequence: Synthetic peptide
  Seed: ESSTLELRSR
EISTLELRSR

SEQ ID NO: 34113 - protein, 10 aa, Artificial Sequence
  Description of Artificial Sequence: Synthetic peptide
  Seed: ESSTLELRSR
EISTLELRSK

SEQ ID NO: 34114 - protein, 10 aa, Artificial Sequence
  Description of Artificial Sequence: Synthetic peptide
  Seed: ESSTLELRSR
ELSTLELRSR

SEQ ID NO: 34115 - protein, 10 aa, Artificial Sequence
  Description of Artificial Sequence: Synthetic peptide
  Seed: ESSTLELRSR
ELSTLELRSK

SEQ ID NO: 34116 - protein, 10 aa, Artificial Sequence
  Description of Artificial Sequence: Synthetic peptide
  Seed: ESSTLELRSR
EMSTLELRSR

SEQ ID NO: 34117 - protein, 10 aa, Artificial Sequence
  Description of Artificial Sequence: Synthetic peptide
  Seed: ESSTLELRSR
EMSTLELRSK

SEQ ID NO: 34118 - protein, 10 aa, Artificial Sequence
  Description of Artificial Sequence: Synthetic peptide
  Seed: ESSTLELRSR
EFSTLELRSR

SEQ ID NO: 34119 - protein, 10 aa, Artificial Sequence
  Description of Artificial Sequence: Synthetic peptide
  Seed: ESSTLELRSR
ETSTLELRSR

SEQ ID NO: 34120 - protein, 10 aa, Artificial Sequence
  Description of Artificial Sequence: Synthetic peptide
  Seed: ESSTLELRSR
ETSTLELRSK

SEQ ID NO: 34121 - protein, 10 aa, Artificial Sequence
  Description of Artificial Sequence: Synthetic peptide
  Seed: ESSTLELRSR
EWSTLELRSR

SEQ ID NO: 34122 - protein, 10 aa, Artificial Sequence
  Description of Artificial Sequence: Synthetic peptide
  Seed: ESSTLELRSR
EYSTLELRSR

SEQ ID NO: 34123 - protein, 10 aa, Artificial Sequence
  Description of Artificial Sequence: Synthetic peptide
  Seed: ESSTLELRSR
EVSTLELRSR

SEQ ID NO: 34124 - protein, 9 aa, Artificial Sequence
  Description of Artificial Sequence: Synthetic peptide
  Seed: ETMDSSTLE
EFMDSSTLR

SEQ ID NO: 34125 - protein, 9 aa, Artificial Sequence
  Description of Artificial Sequence: Synthetic peptide
  Seed: ETMDSSTLE
EFMDSSTLK

SEQ ID NO: 34126 - protein, 9 aa, Artificial Sequence
  Description of Artificial Sequence: Synthetic peptide
  Seed: ETMDSSTLE
EPMDSSTLR

SEQ ID NO: 34127 - protein, 10 aa, Artificial Sequence
  Description of Artificial Sequence: Synthetic peptide
  Seed: ETMDSSTLEL
EAMDSSTLEY

SEQ ID NO: 34128 - protein, 10 aa, Artificial Sequence
  Description of Artificial Sequence: Synthetic peptide
  Seed: ETMDSSTLEL
ENMDSSTLEV

SEQ ID NO: 34129 - protein, 10 aa, Artificial Sequence
  Description of Artificial Sequence: Synthetic peptide
  Seed: ETMDSSTLEL
ECMDSSTLEV

SEQ ID NO: 34130 - protein, 10 aa, Artificial Sequence
  Description of Artificial Sequence: Synthetic peptide
  Seed: ETMDSSTLEL
EGMDSSTLEV

SEQ ID NO: 34131 - protein, 10 aa, Artificial Sequence
  Description of Artificial Sequence: Synthetic peptide
  Seed: ETMDSSTLEL
EIMDSSTLEA

SEQ ID NO: 34132 - protein, 10 aa, Artificial Sequence
  Description of Artificial Sequence: Synthetic peptide
  Seed: ETMDSSTLEL
EIMDSSTLEI

SEQ ID NO: 34133 - protein, 10 aa, Artificial Sequence
  Description of Artificial Sequence: Synthetic peptide
  Seed: ETMDSSTLEL
EIMDSSTLEL

SEQ ID NO: 34134 - protein, 10 aa, Artificial Sequence
  Description of Artificial Sequence: Synthetic peptide
  Seed: ETMDSSTLEL
EIMDSSTLEM

SEQ ID NO: 34135 - protein, 10 aa, Artificial Sequence
  Description of Artificial Sequence: Synthetic peptide
  Seed: ETMDSSTLEL
EIMDSSTLEF

SEQ ID NO: 34136 - protein, 10 aa, Artificial Sequence
  Description of Artificial Sequence: Synthetic peptide
  Seed: ETMDSSTLEL
EIMDSSTLEY

SEQ ID NO: 34137 - protein, 10 aa, Artificial Sequence
  Description of Artificial Sequence: Synthetic peptide
  Seed: ETMDSSTLEL
EIMDSSTLEV

SEQ ID NO: 34138 - protein, 10 aa, Artificial Sequence
  Description of Artificial Sequence: Synthetic peptide
  Seed: ETMDSSTLEL
ELMDSSTLEI

SEQ ID NO: 34139 - protein, 10 aa, Artificial Sequence
  Description of Artificial Sequence: Synthetic peptide
  Seed: ETMDSSTLEL
ELMDSSTLEL

SEQ ID NO: 34140 - protein, 10 aa, Artificial Sequence
  Description of Artificial Sequence: Synthetic peptide
  Seed: ETMDSSTLEL
ELMDSSTLEY

SEQ ID NO: 34141 - protein, 10 aa, Artificial Sequence
  Description of Artificial Sequence: Synthetic peptide
  Seed: ETMDSSTLEL
ELMDSSTLEV

SEQ ID NO: 34142 - protein, 10 aa, Artificial Sequence
  Description of Artificial Sequence: Synthetic peptide
  Seed: ETMDSSTLEL
EMMDSSTLEI

SEQ ID NO: 34143 - protein, 10 aa, Artificial Sequence
  Description of Artificial Sequence: Synthetic peptide
  Seed: ETMDSSTLEL
EMMDSSTLEL

SEQ ID NO: 34144 - protein, 10 aa, Artificial Sequence
  Description of Artificial Sequence: Synthetic peptide
  Seed: ETMDSSTLEL
EMMDSSTLEY

SEQ ID NO: 34145 - protein, 10 aa, Artificial Sequence
  Description of Artificial Sequence: Synthetic peptide
  Seed: ETMDSSTLEL
EMMDSSTLEV

SEQ ID NO: 34146 - protein, 10 aa, Artificial Sequence
  Description of Artificial Sequence: Synthetic peptide
  Seed: ETMDSSTLEL
ESMDSSTLEA

SEQ ID NO: 34147 - protein, 10 aa, Artificial Sequence
  Description of Artificial Sequence: Synthetic peptide
  Seed: ETMDSSTLEL
EAMDSSTLEV

SEQ ID NO: 34148 - protein, 10 aa, Artificial Sequence
  Description of Artificial Sequence: Synthetic peptide
  Seed: ETMDSSTLEL
EAMDSSTLEF

SEQ ID NO: 34149 - protein, 9 aa, Artificial Sequence
  Description of Artificial Sequence: Synthetic peptide
  Seed: ETMDSSTLE
EPMDSSTLK

SEQ ID NO: 34150 - protein, 9 aa, Artificial Sequence
  Description of Artificial Sequence: Synthetic peptide
  Seed: ETMDSSTLE
ESMDSSTLR

SEQ ID NO: 34151 - protein, 9 aa, Artificial Sequence
  Description of Artificial Sequence: Synthetic peptide
  Seed: ETMDSSTLE
ESMDSSTLK

SEQ ID NO: 34152 - protein, 9 aa, Artificial Sequence
  Description of Artificial Sequence: Synthetic peptide
  Seed: ETMDSSTLE
ESMDSSTLY

SEQ ID NO: 34153 - protein, 9 aa, Artificial Sequence
  Description of Artificial Sequence: Synthetic peptide
  Seed: ETMDSSTLE
ETMDSSTLR

SEQ ID NO: 34154 - protein, 9 aa, Artificial Sequence
  Description of Artificial Sequence: Synthetic peptide
  Seed: ETMDSSTLE
ETMDSSTLQ

SEQ ID NO: 34155 - protein, 9 aa, Artificial Sequence
  Description of Artificial Sequence: Synthetic peptide
  Seed: ETMDSSTLE
ETMDSSTLH

SEQ ID NO: 34156 - protein, 9 aa, Artificial Sequence
  Description of Artificial Sequence: Synthetic peptide
  Seed: ETMDSSTLE
ETMDSSTLK

SEQ ID NO: 34157 - protein, 9 aa, Artificial Sequence
  Description of Artificial Sequence: Synthetic peptide
  Seed: ETMDSSTLE
ETMDSSTLM

SEQ ID NO: 34158 - protein, 9 aa, Artificial Sequence
  Description of Artificial Sequence: Synthetic peptide
  Seed: ETMDSSTLE
ETMDSSTLF

SEQ ID NO: 34159 - protein, 9 aa, Artificial Sequence
  Description of Artificial Sequence: Synthetic peptide
  Seed: ETMDSSTLE
ETMDSSTLY

SEQ ID NO: 34160 - protein, 9 aa, Artificial Sequence
  Description of Artificial Sequence: Synthetic peptide
  Seed: ETMDSSTLE
EYMDSSTLR

SEQ ID NO: 34161 - protein, 9 aa, Artificial Sequence
  Description of Artificial Sequence: Synthetic peptide
  Seed: ETMDSSTLE
EYMDSSTLK

SEQ ID NO: 34162 - protein, 9 aa, Artificial Sequence
  Description of Artificial Sequence: Synthetic peptide
  Seed: ETMDSSTLE
EVMDSSTLR

SEQ ID NO: 34163 - protein, 9 aa, Artificial Sequence
  Description of Artificial Sequence: Synthetic peptide
  Seed: ETMDSSTLE
EVMDSSTLQ

SEQ ID NO: 34164 - protein, 9 aa, Artificial Sequence
  Description of Artificial Sequence: Synthetic peptide
  Seed: ETMDSSTLE
EVMDSSTLH

SEQ ID NO: 34165 - protein, 9 aa, Artificial Sequence
  Description of Artificial Sequence: Synthetic peptide
  Seed: ETMDSSTLE
EVMDSSTLK

SEQ ID NO: 34166 - protein, 9 aa, Artificial Sequence
  Description of Artificial Sequence: Synthetic peptide
  Seed: ETMDSSTLE
EVMDSSTLY

SEQ ID NO: 34167 - protein, 10 aa, Artificial Sequence
  Description of Artificial Sequence: Synthetic peptide
  Seed: ETMDSSTLEL
EAMDSSTLEA

SEQ ID NO: 34168 - protein, 10 aa, Artificial Sequence
  Description of Artificial Sequence: Synthetic peptide
  Seed: ETMDSSTLEL
EAMDSSTLEI

SEQ ID NO: 34169 - protein, 10 aa, Artificial Sequence
  Description of Artificial Sequence: Synthetic peptide
  Seed: ELRSRYWAIR
ESRSRYWAIL

SEQ ID NO: 34170 - protein, 10 aa, Artificial Sequence
  Description of Artificial Sequence: Synthetic peptide
  Seed: ELRSRYWAIR
ESRSRYWAIR

SEQ ID NO: 34171 - protein, 10 aa, Artificial Sequence
  Description of Artificial Sequence: Synthetic peptide
  Seed: ELRSRYWAIR
EPRSRYWAIV

SEQ ID NO: 34172 - protein, 10 aa, Artificial Sequence
  Description of Artificial Sequence: Synthetic peptide
  Seed: ELKLSDYEGR
EAKLSDYEGR

SEQ ID NO: 34173 - protein, 9 aa, Artificial Sequence
  Description of Artificial Sequence: Synthetic peptide
  Seed: EKSTVMAAF
ELSTVMAAF

SEQ ID NO: 34174 - protein, 9 aa, Artificial Sequence
  Description of Artificial Sequence: Synthetic peptide
  Seed: EKSTVMAAF
ELSTVMAAY

SEQ ID NO: 34175 - protein, 9 aa, Artificial Sequence
  Description of Artificial Sequence: Synthetic peptide
  Seed: EKSTVMAAF
EKSTVMAAM

SEQ ID NO: 34176 - protein, 9 aa, Artificial Sequence
  Description of Artificial Sequence: Synthetic peptide
  Seed: EKSTVMAAF
EKSTVMAAY

SEQ ID NO: 34177 - protein, 9 aa, Artificial Sequence
  Description of Artificial Sequence: Synthetic peptide
  Seed: EKSTVMAAF
EMSTVMAAM

SEQ ID NO: 34178 - protein, 9 aa, Artificial Sequence
  Description of Artificial Sequence: Synthetic peptide
  Seed: EKSTVMAAF
EMSTVMAAF

SEQ ID NO: 34179 - protein, 9 aa, Artificial Sequence
  Description of Artificial Sequence: Synthetic peptide
  Seed: EKSTVMAAF
EMSTVMAAY

SEQ ID NO: 34180 - protein, 9 aa, Artificial Sequence
  Description of Artificial Sequence: Synthetic peptide
  Seed: EKSTVMAAF
ESSTVMAAF

SEQ ID NO: 34181 - protein, 9 aa, Artificial Sequence
  Description of Artificial Sequence: Synthetic peptide
  Seed: EKSTVMAAF
ESSTVMAAY

SEQ ID NO: 34182 - protein, 10 aa, Artificial Sequence
  Description of Artificial Sequence: Synthetic peptide
  Seed: ELKLSDYEGR
EAKLSDYEGK

SEQ ID NO: 34183 - protein, 10 aa, Artificial Sequence
  Description of Artificial Sequence: Synthetic peptide
  Seed: ELKLSDYEGR
EYKLSDYEGR

SEQ ID NO: 34184 - protein, 10 aa, Artificial Sequence
  Description of Artificial Sequence: Synthetic peptide
  Seed: ELKLSDYEGR
EIKLSDYEGK

SEQ ID NO: 34185 - protein, 10 aa, Artificial Sequence
  Description of Artificial Sequence: Synthetic peptide
  Seed: ELKLSDYEGR
EMKLSDYEGR

SEQ ID NO: 34186 - protein, 10 aa, Artificial Sequence
  Description of Artificial Sequence: Synthetic peptide
  Seed: ELKLSDYEGR
EMKLSDYEGK

SEQ ID NO: 34187 - protein, 10 aa, Artificial Sequence
  Description of Artificial Sequence: Synthetic peptide
  Seed: ELKLSDYEGR
ESKLSDYEGR

SEQ ID NO: 34188 - protein, 10 aa, Artificial Sequence
  Description of Artificial Sequence: Synthetic peptide
  Seed: ELKLSDYEGR
ESKLSDYEGK

SEQ ID NO: 34189 - protein, 10 aa, Artificial Sequence
  Description of Artificial Sequence: Synthetic peptide
  Seed: ELKLSDYEGR
ETKLSDYEGR

SEQ ID NO: 34190 - protein, 10 aa, Artificial Sequence
  Description of Artificial Sequence: Synthetic peptide
  Seed: ELKLSDYEGR
ETKLSDYEGK

SEQ ID NO: 34191 - protein, 9 aa, Artificial Sequence
  Description of Artificial Sequence: Synthetic peptide
  Seed: EKSTVMAAF
EHSTVMAAY

SEQ ID NO: 34192 - protein, 9 aa, Artificial Sequence
  Description of Artificial Sequence: Synthetic peptide
  Seed: EKSTVMAAF
EHSTVMAAF

SEQ ID NO: 34193 - protein, 9 aa, Artificial Sequence
  Description of Artificial Sequence: Synthetic peptide
  Seed: EKSTVMAAF
EQSTVMAAY

SEQ ID NO: 34194 - protein, 9 aa, Artificial Sequence
  Description of Artificial Sequence: Synthetic peptide
  Seed: EKSTVMAAF
EQSTVMAAF

SEQ ID NO: 34195 - protein, 10 aa, Artificial Sequence
  Description of Artificial Sequence: Synthetic peptide
  Seed: EIRASVGRMV
ETRASVGRML

SEQ ID NO: 34196 - protein, 10 aa, Artificial Sequence
  Description of Artificial Sequence: Synthetic peptide
  Seed: EIRASVGRMV
ETRASVGRMV

SEQ ID NO: 34197 - protein, 10 aa, Artificial Sequence
  Description of Artificial Sequence: Synthetic peptide
  Seed: EIRASVGRMV
EVRASVGRMI

SEQ ID NO: 34198 - protein, 10 aa, Artificial Sequence
  Description of Artificial Sequence: Synthetic peptide
  Seed: EIRASVGRMV
EVRASVGRML

SEQ ID NO: 34199 - protein, 10 aa, Artificial Sequence
  Description of Artificial Sequence: Synthetic peptide
  Seed: EIRASVGRMV
EVRASVGRMV

SEQ ID NO: 34200 - protein, 11 aa, Artificial Sequence
  Description of Artificial Sequence: Synthetic peptide
  Seed: EKATNPIVPSF
ERATNPIVPSW

SEQ ID NO: 34201 - protein, 11 aa, Artificial Sequence
  Description of Artificial Sequence: Synthetic peptide
  Seed: EKATNPIVPSF
ERATNPIVPSY

SEQ ID NO: 34202 - protein, 11 aa, Artificial Sequence
  Description of Artificial Sequence: Synthetic peptide
  Seed: EKATNPIVPSF
EIATNPIVPSW

SEQ ID NO: 34203 - protein, 11 aa, Artificial Sequence
  Description of Artificial Sequence: Synthetic peptide
  Seed: EKATNPIVPSF
EKATNPIVPSW

SEQ ID NO: 34204 - protein, 11 aa, Artificial Sequence
  Description of Artificial Sequence: Synthetic peptide
  Seed: EKATNPIVPSF
EMATNPIVPSF

SEQ ID NO: 34205 - protein, 11 aa, Artificial Sequence
  Description of Artificial Sequence: Synthetic peptide
  Seed: EKATNPIVPSF
EMATNPIVPSW

SEQ ID NO: 34206 - protein, 11 aa, Artificial Sequence
  Description of Artificial Sequence: Synthetic peptide
  Seed: EKATNPIVPSF
EYATNPIVPSW

SEQ ID NO: 34207 - protein, 9 aa, Artificial Sequence
  Description of Artificial Sequence: Synthetic peptide
  Seed: EKSTVMAAF
EASTVMAAF

SEQ ID NO: 34208 - protein, 9 aa, Artificial Sequence
  Description of Artificial Sequence: Synthetic peptide
  Seed: EKSTVMAAF
EASTVMAAY

SEQ ID NO: 34209 - protein, 9 aa, Artificial Sequence
  Description of Artificial Sequence: Synthetic peptide
  Seed: EKSTVMAAF
ERSTVMAAF

SEQ ID NO: 34210 - protein, 9 aa, Artificial Sequence
  Description of Artificial Sequence: Synthetic peptide
  Seed: EKSTVMAAF
ERSTVMAAY

SEQ ID NO: 34211 - protein, 9 aa, Artificial Sequence
  Description of Artificial Sequence: Synthetic peptide
  Seed: EKSTVMAAF
EQSTVMAAL

SEQ ID NO: 34212 - protein, 9 aa, Artificial Sequence
  Description of Artificial Sequence: Synthetic peptide
  Seed: EKSTVMAAF
EQSTVMAAM

SEQ ID NO: 34213 - protein, 10 aa, Artificial Sequence
  Description of Artificial Sequence: Synthetic peptide
  Seed: ELKLSDYEGR
EWKLSDYEGR

SEQ ID NO: 34214 - protein, 10 aa, Artificial Sequence
  Description of Artificial Sequence: Synthetic peptide
  Seed: ELKLSDYEGR
EVKLSDYEGR

SEQ ID NO: 34215 - protein, 9 aa, Artificial Sequence
  Description of Artificial Sequence: Synthetic peptide
  Seed: ELRSRYWAI
EERSRYWAI

SEQ ID NO: 34216 - protein, 9 aa, Artificial Sequence
  Description of Artificial Sequence: Synthetic peptide
  Seed: ELRSRYWAI
ECRSRYWAF

SEQ ID NO: 34217 - protein, 9 aa, Artificial Sequence
  Description of Artificial Sequence: Synthetic peptide
  Seed: ELRSRYWAI
ENRSRYWAT

SEQ ID NO: 34218 - protein, 9 aa, Artificial Sequence
  Description of Artificial Sequence: Synthetic peptide
  Seed: ELRSRYWAI
ENRSRYWAV

SEQ ID NO: 34219 - protein, 9 aa, Artificial Sequence
  Description of Artificial Sequence: Synthetic peptide
  Seed: ELRSRYWAI
EDRSRYWAI

SEQ ID NO: 34220 - protein, 9 aa, Artificial Sequence
  Description of Artificial Sequence: Synthetic peptide
  Seed: ELRSRYWAI
EDRSRYWAL

SEQ ID NO: 34221 - protein, 9 aa, Artificial Sequence
  Description of Artificial Sequence: Synthetic peptide
  Seed: ELRSRYWAI
EDRSRYWAM

SEQ ID NO: 34222 - protein, 9 aa, Artificial Sequence
  Description of Artificial Sequence: Synthetic peptide
  Seed: ELRSRYWAI
ECRSRYWAA

SEQ ID NO: 34223 - protein, 9 aa, Artificial Sequence
  Description of Artificial Sequence: Synthetic peptide
  Seed: ELRSRYWAI
ECRSRYWAI

SEQ ID NO: 34224 - protein, 9 aa, Artificial Sequence
  Description of Artificial Sequence: Synthetic peptide
  Seed: ELRSRYWAI
ECRSRYWAL

SEQ ID NO: 34225 - protein, 9 aa, Artificial Sequence
  Description of Artificial Sequence: Synthetic peptide
  Seed: ELRSRYWAI
ECRSRYWAM

SEQ ID NO: 34226 - protein, 9 aa, Artificial Sequence
  Description of Artificial Sequence: Synthetic peptide
  Seed: ELRSRYWAI
ECRSRYWAV

SEQ ID NO: 34227 - protein, 10 aa, Artificial Sequence
  Description of Artificial Sequence: Synthetic peptide
  Seed: ELKLSDYEGR
EVKLSDYEGK

SEQ ID NO: 34228 - protein, 9 aa, Artificial Sequence
  Description of Artificial Sequence: Synthetic peptide
  Seed: ELRSRYWAI
EQRSRYWAA

SEQ ID NO: 34229 - protein, 9 aa, Artificial Sequence
  Description of Artificial Sequence: Synthetic peptide
  Seed: ELRSRYWAI
EQRSRYWAC

SEQ ID NO: 34230 - protein, 9 aa, Artificial Sequence
  Description of Artificial Sequence: Synthetic peptide
  Seed: ELRSRYWAI
EQRSRYWAG

SEQ ID NO: 34231 - protein, 9 aa, Artificial Sequence
  Description of Artificial Sequence: Synthetic peptide
  Seed: ELRSRYWAI
EQRSRYWAI

SEQ ID NO: 34232 - protein, 9 aa, Artificial Sequence
  Description of Artificial Sequence: Synthetic peptide
  Seed: ELRSRYWAI
EQRSRYWAL

SEQ ID NO: 34233 - protein, 9 aa, Artificial Sequence
  Description of Artificial Sequence: Synthetic peptide
  Seed: ELRSRYWAI
EQRSRYWAM

SEQ ID NO: 34234 - protein, 9 aa, Artificial Sequence
  Description of Artificial Sequence: Synthetic peptide
  Seed: ELRSRYWAI
EQRSRYWAF

SEQ ID NO: 34235 - protein, 9 aa, Artificial Sequence
  Description of Artificial Sequence: Synthetic peptide
  Seed: ELRSRYWAI
EQRSRYWAS

SEQ ID NO: 34236 - protein, 9 aa, Artificial Sequence
  Description of Artificial Sequence: Synthetic peptide
  Seed: ELRSRYWAI
EQRSRYWAT

SEQ ID NO: 34237 - protein, 9 aa, Artificial Sequence
  Description of Artificial Sequence: Synthetic peptide
  Seed: ELRSRYWAI
ENRSRYWAF

SEQ ID NO: 34238 - protein, 9 aa, Artificial Sequence
  Description of Artificial Sequence: Synthetic peptide
  Seed: ELRSRYWAI
ENRSRYWAM

SEQ ID NO: 34239 - protein, 9 aa, Artificial Sequence
  Description of Artificial Sequence: Synthetic peptide
  Seed: ELRSRYWAI
ENRSRYWAL

SEQ ID NO: 34240 - protein, 9 aa, Artificial Sequence
  Description of Artificial Sequence: Synthetic peptide
  Seed: ELRSRYWAI
ENRSRYWAI

SEQ ID NO: 34241 - protein, 9 aa, Artificial Sequence
  Description of Artificial Sequence: Synthetic peptide
  Seed: ELRSRYWAI
EARSRYWAA

SEQ ID NO: 34242 - protein, 9 aa, Artificial Sequence
  Description of Artificial Sequence: Synthetic peptide
  Seed: ELRSRYWAI
EARSRYWAC

SEQ ID NO: 34243 - protein, 9 aa, Artificial Sequence
  Description of Artificial Sequence: Synthetic peptide
  Seed: ELRSRYWAI
EARSRYWAG

SEQ ID NO: 34244 - protein, 9 aa, Artificial Sequence
  Description of Artificial Sequence: Synthetic peptide
  Seed: ELRSRYWAI
EARSRYWAI

SEQ ID NO: 34245 - protein, 9 aa, Artificial Sequence
  Description of Artificial Sequence: Synthetic peptide
  Seed: ELRSRYWAI
EARSRYWAL

SEQ ID NO: 34246 - protein, 9 aa, Artificial Sequence
  Description of Artificial Sequence: Synthetic peptide
  Seed: ELRSRYWAI
EARSRYWAM

SEQ ID NO: 34247 - protein, 9 aa, Artificial Sequence
  Description of Artificial Sequence: Synthetic peptide
  Seed: ELRSRYWAI
EARSRYWAF

SEQ ID NO: 34248 - protein, 9 aa, Artificial Sequence
  Description of Artificial Sequence: Synthetic peptide
  Seed: ELRSRYWAI
EARSRYWAS

SEQ ID NO: 34249 - protein, 9 aa, Artificial Sequence
  Description of Artificial Sequence: Synthetic peptide
  Seed: ELRSRYWAI
EARSRYWAT

SEQ ID NO: 34250 - protein, 9 aa, Artificial Sequence
  Description of Artificial Sequence: Synthetic peptide
  Seed: ELRSRYWAI
EARSRYWAV

SEQ ID NO: 34251 - protein, 9 aa, Artificial Sequence
  Description of Artificial Sequence: Synthetic peptide
  Seed: ELRSRYWAI
ERRSRYWAA

SEQ ID NO: 34252 - protein, 9 aa, Artificial Sequence
  Description of Artificial Sequence: Synthetic peptide
  Seed: ELRSRYWAI
ERRSRYWAC

SEQ ID NO: 34253 - protein, 9 aa, Artificial Sequence
  Description of Artificial Sequence: Synthetic peptide
  Seed: ELRSRYWAI
ERRSRYWAI

SEQ ID NO: 34254 - protein, 9 aa, Artificial Sequence
  Description of Artificial Sequence: Synthetic peptide
  Seed: ELRSRYWAI
ERRSRYWAL

SEQ ID NO: 34255 - protein, 9 aa, Artificial Sequence
  Description of Artificial Sequence: Synthetic peptide
  Seed: ELRSRYWAI
ERRSRYWAM

SEQ ID NO: 34256 - protein, 9 aa, Artificial Sequence
  Description of Artificial Sequence: Synthetic peptide
  Seed: ELRSRYWAI
ERRSRYWAF

SEQ ID NO: 34257 - protein, 9 aa, Artificial Sequence
  Description of Artificial Sequence: Synthetic peptide
  Seed: ELRSRYWAI
ERRSRYWAV

SEQ ID NO: 34258 - protein, 9 aa, Artificial Sequence
  Description of Artificial Sequence: Synthetic peptide
  Seed: ELRSRYWAI
ENRSRYWAA

SEQ ID NO: 34259 - protein, 9 aa, Artificial Sequence
  Description of Artificial Sequence: Synthetic peptide
  Seed: ELRSRYWAI
ENRSRYWAC

SEQ ID NO: 34260 - protein, 10 aa, Artificial Sequence
  Description of Artificial Sequence: Synthetic peptide
  Seed: EIRASVGRMV
ETRASVGRMI

SEQ ID NO: 34261 - protein, 10 aa, Artificial Sequence
  Description of Artificial Sequence: Synthetic peptide
  Seed: EIRASVGRMV
ETRASVGRMA

SEQ ID NO: 34262 - protein, 10 aa, Artificial Sequence
  Description of Artificial Sequence: Synthetic peptide
  Seed: EIRASVGRMV
ESRASVGRMV

SEQ ID NO: 34263 - protein, 10 aa, Artificial Sequence
  Description of Artificial Sequence: Synthetic peptide
  Seed: EIIRMMESAR
EVIRMMESAH

SEQ ID NO: 34264 - protein, 10 aa, Artificial Sequence
  Description of Artificial Sequence: Synthetic peptide
  Seed: EIIRMMESAR
ETIRMMESAL

SEQ ID NO: 34265 - protein, 10 aa, Artificial Sequence
  Description of Artificial Sequence: Synthetic peptide
  Seed: EIIRMMESAR
ETIRMMESAK

SEQ ID NO: 34266 - protein, 10 aa, Artificial Sequence
  Description of Artificial Sequence: Synthetic peptide
  Seed: EIIRMMESAR
ETIRMMESAM

SEQ ID NO: 34267 - protein, 10 aa, Artificial Sequence
  Description of Artificial Sequence: Synthetic peptide
  Seed: EIIRMMESAR
ETIRMMESAF

SEQ ID NO: 34268 - protein, 10 aa, Artificial Sequence
  Description of Artificial Sequence: Synthetic peptide
  Seed: EIIRMMESAR
ETIRMMESAY

SEQ ID NO: 34269 - protein, 10 aa, Artificial Sequence
  Description of Artificial Sequence: Synthetic peptide
  Seed: EIIRMMESAR
ETIRMMESAV

SEQ ID NO: 34270 - protein, 10 aa, Artificial Sequence
  Description of Artificial Sequence: Synthetic peptide
  Seed: EIIRMMESAR
EYIRMMESAR

SEQ ID NO: 34271 - protein, 10 aa, Artificial Sequence
  Description of Artificial Sequence: Synthetic peptide
  Seed: EIIRMMESAR
EVIRMMESAA

SEQ ID NO: 34272 - protein, 10 aa, Artificial Sequence
  Description of Artificial Sequence: Synthetic peptide
  Seed: EIIRMMESAR
EVIRMMESAR

SEQ ID NO: 34273 - protein, 10 aa, Artificial Sequence
  Description of Artificial Sequence: Synthetic peptide
  Seed: EIIRMMESAR
EVIRMMESAL

SEQ ID NO: 34274 - protein, 10 aa, Artificial Sequence
  Description of Artificial Sequence: Synthetic peptide
  Seed: EIRASVGRMV
EARASVGRMV

SEQ ID NO: 34275 - protein, 10 aa, Artificial Sequence
  Description of Artificial Sequence: Synthetic peptide
  Seed: EIIRMMESAR
EVIRMMESAM

SEQ ID NO: 34276 - protein, 10 aa, Artificial Sequence
  Description of Artificial Sequence: Synthetic peptide
  Seed: EIIRMMESAR
EVIRMMESAF

SEQ ID NO: 34277 - protein, 10 aa, Artificial Sequence
  Description of Artificial Sequence: Synthetic peptide
  Seed: EIIRMMESAR
EVIRMMESAY

SEQ ID NO: 34278 - protein, 10 aa, Artificial Sequence
  Description of Artificial Sequence: Synthetic peptide
  Seed: EIIRMMESAR
EVIRMMESAV

SEQ ID NO: 34279 - protein, 9 aa, Artificial Sequence
  Description of Artificial Sequence: Synthetic peptide
  Seed: EIRASVGKM
EARASVGKR

SEQ ID NO: 34280 - protein, 9 aa, Artificial Sequence
  Description of Artificial Sequence: Synthetic peptide
  Seed: EIRASVGKM
EARASVGKK

SEQ ID NO: 34281 - protein, 9 aa, Artificial Sequence
  Description of Artificial Sequence: Synthetic peptide
  Seed: EIRASVGKM
EARASVGKY

SEQ ID NO: 34282 - protein, 9 aa, Artificial Sequence
  Description of Artificial Sequence: Synthetic peptide
  Seed: EIRASVGKM
EIRASVGKR

SEQ ID NO: 34283 - protein, 10 aa, Artificial Sequence
  Description of Artificial Sequence: Synthetic peptide
  Seed: EIIRMMESAR
ETIRMMESAH

SEQ ID NO: 34284 - protein, 10 aa, Artificial Sequence
  Description of Artificial Sequence: Synthetic peptide
  Seed: EIIRMMESAR
ETIRMMESAR

SEQ ID NO: 34285 - protein, 10 aa, Artificial Sequence
  Description of Artificial Sequence: Synthetic peptide
  Seed: EIIRMMESAR
ETIRMMESAA

SEQ ID NO: 34286 - protein, 10 aa, Artificial Sequence
  Description of Artificial Sequence: Synthetic peptide
  Seed: EIIRMMESAR
ESIRMMESAY

SEQ ID NO: 34287 - protein, 10 aa, Artificial Sequence
  Description of Artificial Sequence: Synthetic peptide
  Seed: EIIRMMESAR
EQIRMMESAR

SEQ ID NO: 34288 - protein, 10 aa, Artificial Sequence
  Description of Artificial Sequence: Synthetic peptide
  Seed: EIIRMMESAR
EQIRMMESAK

SEQ ID NO: 34289 - protein, 10 aa, Artificial Sequence
  Description of Artificial Sequence: Synthetic peptide
  Seed: EIIRMMESAR
EGIRMMESAR

SEQ ID NO: 34290 - protein, 10 aa, Artificial Sequence
  Description of Artificial Sequence: Synthetic peptide
  Seed: EIIRMMESAR
EGIRMMESAK

SEQ ID NO: 34291 - protein, 10 aa, Artificial Sequence
  Description of Artificial Sequence: Synthetic peptide
  Seed: EIIRMMESAR
EIIRMMESAM

SEQ ID NO: 34292 - protein, 10 aa, Artificial Sequence
  Description of Artificial Sequence: Synthetic peptide
  Seed: EIIRMMESAR
EIIRMMESAF

SEQ ID NO: 34293 - protein, 10 aa, Artificial Sequence
  Description of Artificial Sequence: Synthetic peptide
  Seed: EIIRMMESAR
EIIRMMESAY

SEQ ID NO: 34294 - protein, 10 aa, Artificial Sequence
  Description of Artificial Sequence: Synthetic peptide
  Seed: EIIRMMESAR
ELIRMMESAR

SEQ ID NO: 34295 - protein, 10 aa, Artificial Sequence
  Description of Artificial Sequence: Synthetic peptide
  Seed: EIIRMMESAR
ELIRMMESAK

SEQ ID NO: 34296 - protein, 10 aa, Artificial Sequence
  Description of Artificial Sequence: Synthetic peptide
  Seed: EIIRMMESAR
ELIRMMESAY

SEQ ID NO: 34297 - protein, 10 aa, Artificial Sequence
  Description of Artificial Sequence: Synthetic peptide
  Seed: EIIRMMESAR
EMIRMMESAR

SEQ ID NO: 34298 - protein, 10 aa, Artificial Sequence
  Description of Artificial Sequence: Synthetic peptide
  Seed: EIIRMMESAR
EMIRMMESAK

SEQ ID NO: 34299 - protein, 10 aa, Artificial Sequence
  Description of Artificial Sequence: Synthetic peptide
  Seed: EIIRMMESAR
EMIRMMESAM

SEQ ID NO: 34300 - protein, 10 aa, Artificial Sequence
  Description of Artificial Sequence: Synthetic peptide
  Seed: EIIRMMESAR
EMIRMMESAY

SEQ ID NO: 34301 - protein, 10 aa, Artificial Sequence
  Description of Artificial Sequence: Synthetic peptide
  Seed: EIIRMMESAR
EFIRMMESAR

SEQ ID NO: 34302 - protein, 10 aa, Artificial Sequence
  Description of Artificial Sequence: Synthetic peptide
  Seed: EIIRMMESAR
EFIRMMESAK

SEQ ID NO: 34303 - protein, 10 aa, Artificial Sequence
  Description of Artificial Sequence: Synthetic peptide
  Seed: EIIRMMESAR
ESIRMMESAR

SEQ ID NO: 34304 - protein, 10 aa, Artificial Sequence
  Description of Artificial Sequence: Synthetic peptide
  Seed: EIIRMMESAR
ESIRMMESAK

SEQ ID NO: 34305 - protein, 9 aa, Artificial Sequence
  Description of Artificial Sequence: Synthetic peptide
  Seed: EIRASVGKM
EIRASVGKK

SEQ ID NO: 34306 - protein, 9 aa, Artificial Sequence
  Description of Artificial Sequence: Synthetic peptide
  Seed: EIRASVGKM
EIRASVGKF

SEQ ID NO: 34307 - protein, 9 aa, Artificial Sequence
  Description of Artificial Sequence: Synthetic peptide
  Seed: EIRASVGKM
EIRASVGKY

SEQ ID NO: 34308 - protein, 9 aa, Artificial Sequence
  Description of Artificial Sequence: Synthetic peptide
  Seed: EIRASVGRM
EIRASVGRR

SEQ ID NO: 34309 - protein, 9 aa, Artificial Sequence
  Description of Artificial Sequence: Synthetic peptide
  Seed: EIRASVGRM
EIRASVGRF

SEQ ID NO: 34310 - protein, 9 aa, Artificial Sequence
  Description of Artificial Sequence: Synthetic peptide
  Seed: EIRASVGRM
EIRASVGRY

SEQ ID NO: 34311 - protein, 9 aa, Artificial Sequence
  Description of Artificial Sequence: Synthetic peptide
  Seed: EIRASVGRM
ELRASVGRR

SEQ ID NO: 34312 - protein, 9 aa, Artificial Sequence
  Description of Artificial Sequence: Synthetic peptide
  Seed: EIRASVGRM
ELRASVGRY

SEQ ID NO: 34313 - protein, 9 aa, Artificial Sequence
  Description of Artificial Sequence: Synthetic peptide
  Seed: EIRASVGRM
EMRASVGRR

SEQ ID NO: 34314 - protein, 9 aa, Artificial Sequence
  Description of Artificial Sequence: Synthetic peptide
  Seed: EIRASVGRM
EMRASVGRY

SEQ ID NO: 34315 - protein, 9 aa, Artificial Sequence
  Description of Artificial Sequence: Synthetic peptide
  Seed: EIRASVGRM
ESRASVGRR

SEQ ID NO: 34316 - protein, 9 aa, Artificial Sequence
  Description of Artificial Sequence: Synthetic peptide
  Seed: EIRASVGRM
ESRASVGRK

SEQ ID NO: 34317 - protein, 9 aa, Artificial Sequence
  Description of Artificial Sequence: Synthetic peptide
  Seed: EIRASVGRM
ESRASVGRY

SEQ ID NO: 34318 - protein, 9 aa, Artificial Sequence
  Description of Artificial Sequence: Synthetic peptide
  Seed: EIRASVGRM
ETRASVGRR

SEQ ID NO: 34319 - protein, 9 aa, Artificial Sequence
  Description of Artificial Sequence: Synthetic peptide
  Seed: EIRASVGRM
ETRASVGRK

SEQ ID NO: 34320 - protein, 9 aa, Artificial Sequence
  Description of Artificial Sequence: Synthetic peptide
  Seed: EIRASVGRM
ETRASVGRM

SEQ ID NO: 34321 - protein, 9 aa, Artificial Sequence
  Description of Artificial Sequence: Synthetic peptide
  Seed: EIRASVGRM
ETRASVGRF

SEQ ID NO: 34322 - protein, 9 aa, Artificial Sequence
  Description of Artificial Sequence: Synthetic peptide
  Seed: EIRASVGRM
ETRASVGRY

SEQ ID NO: 34323 - protein, 9 aa, Artificial Sequence
  Description of Artificial Sequence: Synthetic peptide
  Seed: EIRASVGRM
EVRASVGRR

SEQ ID NO: 34324 - protein, 9 aa, Artificial Sequence
  Description of Artificial Sequence: Synthetic peptide
  Seed: EIRASVGRM
EVRASVGRK

SEQ ID NO: 34325 - protein, 9 aa, Artificial Sequence
  Description of Artificial Sequence: Synthetic peptide
  Seed: EIRASVGRM
EVRASVGRM

SEQ ID NO: 34326 - protein, 9 aa, Artificial Sequence
  Description of Artificial Sequence: Synthetic peptide
  Seed: EIRASVGRM
EVRASVGRF

SEQ ID NO: 34327 - protein, 9 aa, Artificial Sequence
  Description of Artificial Sequence: Synthetic peptide
  Seed: EIRASVGRM
EVRASVGRY

SEQ ID NO: 34328 - protein, 9 aa, Artificial Sequence
  Description of Artificial Sequence: Synthetic peptide
  Seed: EIRASVGRM
EIRASVGRK

SEQ ID NO: 34329 - protein, 9 aa, Artificial Sequence
  Description of Artificial Sequence: Synthetic peptide
  Seed: EIRASVGRM
EARASVGRY

SEQ ID NO: 34330 - protein, 9 aa, Artificial Sequence
  Description of Artificial Sequence: Synthetic peptide
  Seed: EIRASVGKM
ELRASVGKR

SEQ ID NO: 34331 - protein, 9 aa, Artificial Sequence
  Description of Artificial Sequence: Synthetic peptide
  Seed: EIRASVGRM
EARASVGRK

SEQ ID NO: 34332 - protein, 9 aa, Artificial Sequence
  Description of Artificial Sequence: Synthetic peptide
  Seed: EIRASVGKM
ELRASVGKY

SEQ ID NO: 34333 - protein, 9 aa, Artificial Sequence
  Description of Artificial Sequence: Synthetic peptide
  Seed: EIRASVGKM
EMRASVGKR

SEQ ID NO: 34334 - protein, 9 aa, Artificial Sequence
  Description of Artificial Sequence: Synthetic peptide
  Seed: EIRASVGKM
EMRASVGKK

SEQ ID NO: 34335 - protein, 9 aa, Artificial Sequence
  Description of Artificial Sequence: Synthetic peptide
  Seed: EIRASVGKM
EMRASVGKY

SEQ ID NO: 34336 - protein, 9 aa, Artificial Sequence
  Description of Artificial Sequence: Synthetic peptide
  Seed: EIRASVGKM
ESRASVGKR

SEQ ID NO: 34337 - protein, 9 aa, Artificial Sequence
  Description of Artificial Sequence: Synthetic peptide
  Seed: EIRASVGKM
ESRASVGKK

SEQ ID NO: 34338 - protein, 9 aa, Artificial Sequence
  Description of Artificial Sequence: Synthetic peptide
  Seed: EIRASVGKM
ESRASVGKF

SEQ ID NO: 34339 - protein, 9 aa, Artificial Sequence
  Description of Artificial Sequence: Synthetic peptide
  Seed: EIRASVGKM
ESRASVGKY

SEQ ID NO: 34340 - protein, 9 aa, Artificial Sequence
  Description of Artificial Sequence: Synthetic peptide
  Seed: EIRASVGKM
ETRASVGKR

SEQ ID NO: 34341 - protein, 9 aa, Artificial Sequence
  Description of Artificial Sequence: Synthetic peptide
  Seed: EIRASVGKM
ETRASVGKK

SEQ ID NO: 34342 - protein, 9 aa, Artificial Sequence
  Description of Artificial Sequence: Synthetic peptide
  Seed: EIRASVGKM
ETRASVGKM

SEQ ID NO: 34343 - protein, 9 aa, Artificial Sequence
  Description of Artificial Sequence: Synthetic peptide
  Seed: EIRASVGKM
ETRASVGKF

SEQ ID NO: 34344 - protein, 9 aa, Artificial Sequence
  Description of Artificial Sequence: Synthetic peptide
  Seed: EIRASVGKM
ETRASVGKY

SEQ ID NO: 34345 - protein, 9 aa, Artificial Sequence
  Description of Artificial Sequence: Synthetic peptide
  Seed: EIRASVGKM
EVRASVGKR

SEQ ID NO: 34346 - protein, 9 aa, Artificial Sequence
  Description of Artificial Sequence: Synthetic peptide
  Seed: EIRASVGKM
EVRASVGKK

SEQ ID NO: 34347 - protein, 9 aa, Artificial Sequence
  Description of Artificial Sequence: Synthetic peptide
  Seed: EIRASVGKM
EVRASVGKM

SEQ ID NO: 34348 - protein, 9 aa, Artificial Sequence
  Description of Artificial Sequence: Synthetic peptide
  Seed: EIRASVGKM
EVRASVGKF

SEQ ID NO: 34349 - protein, 9 aa, Artificial Sequence
  Description of Artificial Sequence: Synthetic peptide
  Seed: EIRASVGKM
EVRASVGKY

SEQ ID NO: 34350 - protein, 9 aa, Artificial Sequence
  Description of Artificial Sequence: Synthetic peptide
  Seed: EIRASVGRM
EARASVGRR

SEQ ID NO: 34351 - protein, 9 aa, Artificial Sequence
  Description of Artificial Sequence: Synthetic peptide
  Seed: ELRSRYWAI
EQRSRYWAV

SEQ ID NO: 34352 - protein, 9 aa, Artificial Sequence
  Description of Artificial Sequence: Synthetic peptide
  Seed: ELRSRYWAI
EERSRYWAL

SEQ ID NO: 34353 - protein, 10 aa, Artificial Sequence
  Description of Artificial Sequence: Synthetic peptide
  Seed: ELRSRYWAIR
EPRSRYWAIF

SEQ ID NO: 34354 - protein, 10 aa, Artificial Sequence
  Description of Artificial Sequence: Synthetic peptide
  Seed: ELRSRYWAIR
EQRSRYWAIV

SEQ ID NO: 34355 - protein, 10 aa, Artificial Sequence
  Description of Artificial Sequence: Synthetic peptide
  Seed: ELRSRYWAIR
ERRSRYWAIL

SEQ ID NO: 34356 - protein, 10 aa, Artificial Sequence
  Description of Artificial Sequence: Synthetic peptide
  Seed: ELRSRYWAIR
ERRSRYWAIM

SEQ ID NO: 34357 - protein, 10 aa, Artificial Sequence
  Description of Artificial Sequence: Synthetic peptide
  Seed: ELRSRYWAIR
ENRSRYWAIL

SEQ ID NO: 34358 - protein, 10 aa, Artificial Sequence
  Description of Artificial Sequence: Synthetic peptide
  Seed: ELRSRYWAIR
ENRSRYWAIM

SEQ ID NO: 34359 - protein, 10 aa, Artificial Sequence
  Description of Artificial Sequence: Synthetic peptide
  Seed: ELRSRYWAIR
EQRSRYWAIA

SEQ ID NO: 34360 - protein, 10 aa, Artificial Sequence
  Description of Artificial Sequence: Synthetic peptide
  Seed: ELRSRYWAIR
EQRSRYWAII

SEQ ID NO: 34361 - protein, 10 aa, Artificial Sequence
  Description of Artificial Sequence: Synthetic peptide
  Seed: ELRSRYWAIR
EQRSRYWAIL

SEQ ID NO: 34362 - protein, 10 aa, Artificial Sequence
  Description of Artificial Sequence: Synthetic peptide
  Seed: ELRSRYWAIR
EQRSRYWAIM

SEQ ID NO: 34363 - protein, 10 aa, Artificial Sequence
  Description of Artificial Sequence: Synthetic peptide
  Seed: ELRSRYWAIR
EQRSRYWAIF

SEQ ID NO: 34364 - protein, 10 aa, Artificial Sequence
  Description of Artificial Sequence: Synthetic peptide
  Seed: ELRSRYWAIR
EGRSRYWAII

SEQ ID NO: 34365 - protein, 10 aa, Artificial Sequence
  Description of Artificial Sequence: Synthetic peptide
  Seed: ELRSRYWAIR
ELRSRYWAIN

SEQ ID NO: 34366 - protein, 10 aa, Artificial Sequence
  Description of Artificial Sequence: Synthetic peptide
  Seed: ELRSRYWAIR
EGRSRYWAIL

SEQ ID NO: 34367 - protein, 10 aa, Artificial Sequence
  Description of Artificial Sequence: Synthetic peptide
  Seed: ELRSRYWAIR
EGRSRYWAIM

SEQ ID NO: 34368 - protein, 10 aa, Artificial Sequence
  Description of Artificial Sequence: Synthetic peptide
  Seed: ELRSRYWAIR
EIRSRYWAIA

SEQ ID NO: 34369 - protein, 10 aa, Artificial Sequence
  Description of Artificial Sequence: Synthetic peptide
  Seed: ELRSRYWAIR
EIRSRYWAII

SEQ ID NO: 34370 - protein, 10 aa, Artificial Sequence
  Description of Artificial Sequence: Synthetic peptide
  Seed: ELRSRYWAIR
EIRSRYWAIL

SEQ ID NO: 34371 - protein, 10 aa, Artificial Sequence
  Description of Artificial Sequence: Synthetic peptide
  Seed: ELRSRYWAIR
EIRSRYWAIK

SEQ ID NO: 34372 - protein, 10 aa, Artificial Sequence
  Description of Artificial Sequence: Synthetic peptide
  Seed: ELRSRYWAIR
EIRSRYWAIM

SEQ ID NO: 34373 - protein, 10 aa, Artificial Sequence
  Description of Artificial Sequence: Synthetic peptide
  Seed: ELRSRYWAIR
EIRSRYWAIF

SEQ ID NO: 34374 - protein, 10 aa, Artificial Sequence
  Description of Artificial Sequence: Synthetic peptide
  Seed: ELRSRYWAIR
EIRSRYWAIV

SEQ ID NO: 34375 - protein, 10 aa, Artificial Sequence
  Description of Artificial Sequence: Synthetic peptide
  Seed: ELRSRYWAIR
EARSRYWAIV

SEQ ID NO: 34376 - protein, 10 aa, Artificial Sequence
  Description of Artificial Sequence: Synthetic peptide
  Seed: ELRSRYWAIR
EARSRYWAIF

SEQ ID NO: 34377 - protein, 10 aa, Artificial Sequence
  Description of Artificial Sequence: Synthetic peptide
  Seed: ELRSRYWAIR
EARSRYWAIM

SEQ ID NO: 34378 - protein, 10 aa, Artificial Sequence
  Description of Artificial Sequence: Synthetic peptide
  Seed: ELRSRYWAIR
EARSRYWAIK

SEQ ID NO: 34379 - protein, 9 aa, Artificial Sequence
  Description of Artificial Sequence: Synthetic peptide
  Seed: ELRSRYWAI
EWRSRYWAF

SEQ ID NO: 34380 - protein, 9 aa, Artificial Sequence
  Description of Artificial Sequence: Synthetic peptide
  Seed: ELRSRYWAI
EWRSRYWAV

SEQ ID NO: 34381 - protein, 9 aa, Artificial Sequence
  Description of Artificial Sequence: Synthetic peptide
  Seed: ELRSRYWAI
EYRSRYWAA

SEQ ID NO: 34382 - protein, 9 aa, Artificial Sequence
  Description of Artificial Sequence: Synthetic peptide
  Seed: ELRSRYWAI
EYRSRYWAI

SEQ ID NO: 34383 - protein, 9 aa, Artificial Sequence
  Description of Artificial Sequence: Synthetic peptide
  Seed: ELRSRYWAI
EYRSRYWAL

SEQ ID NO: 34384 - protein, 9 aa, Artificial Sequence
  Description of Artificial Sequence: Synthetic peptide
  Seed: ELRSRYWAI
EYRSRYWAM

SEQ ID NO: 34385 - protein, 9 aa, Artificial Sequence
  Description of Artificial Sequence: Synthetic peptide
  Seed: ELRSRYWAI
EYRSRYWAV

SEQ ID NO: 34386 - protein, 9 aa, Artificial Sequence
  Description of Artificial Sequence: Synthetic peptide
  Seed: ELRSRYWAI
EVRSRYWAA

SEQ ID NO: 34387 - protein, 9 aa, Artificial Sequence
  Description of Artificial Sequence: Synthetic peptide
  Seed: ELRSRYWAI
EVRSRYWAC

SEQ ID NO: 34388 - protein, 9 aa, Artificial Sequence
  Description of Artificial Sequence: Synthetic peptide
  Seed: ELRSRYWAI
EVRSRYWAG

SEQ ID NO: 34389 - protein, 9 aa, Artificial Sequence
  Description of Artificial Sequence: Synthetic peptide
  Seed: ELRSRYWAI
EVRSRYWAI

SEQ ID NO: 34390 - protein, 9 aa, Artificial Sequence
  Description of Artificial Sequence: Synthetic peptide
  Seed: ELRSRYWAI
EVRSRYWAL

SEQ ID NO: 34391 - protein, 9 aa, Artificial Sequence
  Description of Artificial Sequence: Synthetic peptide
  Seed: ELRSRYWAI
EVRSRYWAM

SEQ ID NO: 34392 - protein, 9 aa, Artificial Sequence
  Description of Artificial Sequence: Synthetic peptide
  Seed: ELRSRYWAI
EVRSRYWAF

SEQ ID NO: 34393 - protein, 9 aa, Artificial Sequence
  Description of Artificial Sequence: Synthetic peptide
  Seed: ELRSRYWAI
EVRSRYWAT

SEQ ID NO: 34394 - protein, 9 aa, Artificial Sequence
  Description of Artificial Sequence: Synthetic peptide
  Seed: ELRSRYWAI
EVRSRYWAV

SEQ ID NO: 34395 - protein, 10 aa, Artificial Sequence
  Description of Artificial Sequence: Synthetic peptide
  Seed: ELRSRYWAIR
EARSRYWAIA

SEQ ID NO: 34396 - protein, 10 aa, Artificial Sequence
  Description of Artificial Sequence: Synthetic peptide
  Seed: ELRSRYWAIR
EARSRYWAII

SEQ ID NO: 34397 - protein, 10 aa, Artificial Sequence
  Description of Artificial Sequence: Synthetic peptide
  Seed: ELRSRYWAIR
EARSRYWAIL

SEQ ID NO: 34398 - protein, 10 aa, Artificial Sequence
  Description of Artificial Sequence: Synthetic peptide
  Seed: ELRSRYWAIR
ELRSRYWAIA

SEQ ID NO: 34399 - protein, 10 aa, Artificial Sequence
  Description of Artificial Sequence: Synthetic peptide
  Seed: ELRSRYWAIR
ELRSRYWAID

SEQ ID NO: 34400 - protein, 9 aa, Artificial Sequence
  Description of Artificial Sequence: Synthetic peptide
  Seed: ELRSRYWAI
EERSRYWAM

SEQ ID NO: 34401 - protein, 10 aa, Artificial Sequence
  Description of Artificial Sequence: Synthetic peptide
  Seed: ELRSRYWAIR
EMRSRYWAIS

SEQ ID NO: 34402 - protein, 10 aa, Artificial Sequence
  Description of Artificial Sequence: Synthetic peptide
  Seed: ELRSRYWAIR
EMRSRYWAIE

SEQ ID NO: 34403 - protein, 10 aa, Artificial Sequence
  Description of Artificial Sequence: Synthetic peptide
  Seed: ELRSRYWAIR
EMRSRYWAIG

SEQ ID NO: 34404 - protein, 10 aa, Artificial Sequence
  Description of Artificial Sequence: Synthetic peptide
  Seed: ELRSRYWAIR
EMRSRYWAIH

SEQ ID NO: 34405 - protein, 10 aa, Artificial Sequence
  Description of Artificial Sequence: Synthetic peptide
  Seed: ELRSRYWAIR
EMRSRYWAII

SEQ ID NO: 34406 - protein, 10 aa, Artificial Sequence
  Description of Artificial Sequence: Synthetic peptide
  Seed: ELRSRYWAIR
EMRSRYWAIL

SEQ ID NO: 34407 - protein, 10 aa, Artificial Sequence
  Description of Artificial Sequence: Synthetic peptide
  Seed: ELRSRYWAIR
EMRSRYWAIK

SEQ ID NO: 34408 - protein, 10 aa, Artificial Sequence
  Description of Artificial Sequence: Synthetic peptide
  Seed: ELRSRYWAIR
EMRSRYWAIM

SEQ ID NO: 34409 - protein, 10 aa, Artificial Sequence
  Description of Artificial Sequence: Synthetic peptide
  Seed: ELRSRYWAIR
EMRSRYWAIF

SEQ ID NO: 34410 - protein, 10 aa, Artificial Sequence
  Description of Artificial Sequence: Synthetic peptide
  Seed: ELRSRYWAIR
EMRSRYWAIP

SEQ ID NO: 34411 - protein, 10 aa, Artificial Sequence
  Description of Artificial Sequence: Synthetic peptide
  Seed: ELRSRYWAIR
EMRSRYWAIT

SEQ ID NO: 34412 - protein, 10 aa, Artificial Sequence
  Description of Artificial Sequence: Synthetic peptide
  Seed: ELRSRYWAIR
ELRSRYWAIC

SEQ ID NO: 34413 - protein, 10 aa, Artificial Sequence
  Description of Artificial Sequence: Synthetic peptide
  Seed: ELRSRYWAIR
EMRSRYWAIW

SEQ ID NO: 34414 - protein, 10 aa, Artificial Sequence
  Description of Artificial Sequence: Synthetic peptide
  Seed: ELRSRYWAIR
EMRSRYWAIY

SEQ ID NO: 34415 - protein, 10 aa, Artificial Sequence
  Description of Artificial Sequence: Synthetic peptide
  Seed: ELRSRYWAIR
EMRSRYWAIV

SEQ ID NO: 34416 - protein, 10 aa, Artificial Sequence
  Description of Artificial Sequence: Synthetic peptide
  Seed: ELRSRYWAIR
EFRSRYWAIL

SEQ ID NO: 34417 - protein, 10 aa, Artificial Sequence
  Description of Artificial Sequence: Synthetic peptide
  Seed: ELRSRYWAIR
EFRSRYWAIM

SEQ ID NO: 34418 - protein, 10 aa, Artificial Sequence
  Description of Artificial Sequence: Synthetic peptide
  Seed: ELRSRYWAIR
EPRSRYWAIA

SEQ ID NO: 34419 - protein, 10 aa, Artificial Sequence
  Description of Artificial Sequence: Synthetic peptide
  Seed: ELRSRYWAIR
EPRSRYWAII

SEQ ID NO: 34420 - protein, 10 aa, Artificial Sequence
  Description of Artificial Sequence: Synthetic peptide
  Seed: ELRSRYWAIR
EPRSRYWAIL

SEQ ID NO: 34421 - protein, 10 aa, Artificial Sequence
  Description of Artificial Sequence: Synthetic peptide
  Seed: ELRSRYWAIR
EPRSRYWAIM

SEQ ID NO: 34422 - protein, 10 aa, Artificial Sequence
  Description of Artificial Sequence: Synthetic peptide
  Seed: ELRSRYWAIR
EMRSRYWAIQ

SEQ ID NO: 34423 - protein, 10 aa, Artificial Sequence
  Description of Artificial Sequence: Synthetic peptide
  Seed: ELRSRYWAIR
EMRSRYWAIC

SEQ ID NO: 34424 - protein, 10 aa, Artificial Sequence
  Description of Artificial Sequence: Synthetic peptide
  Seed: ELRSRYWAIR
EMRSRYWAID

SEQ ID NO: 34425 - protein, 10 aa, Artificial Sequence
  Description of Artificial Sequence: Synthetic peptide
  Seed: ELRSRYWAIR
EMRSRYWAIN

SEQ ID NO: 34426 - protein, 10 aa, Artificial Sequence
  Description of Artificial Sequence: Synthetic peptide
  Seed: ELRSRYWAIR
ELRSRYWAIQ

SEQ ID NO: 34427 - protein, 10 aa, Artificial Sequence
  Description of Artificial Sequence: Synthetic peptide
  Seed: ELRSRYWAIR
ELRSRYWAIE

SEQ ID NO: 34428 - protein, 10 aa, Artificial Sequence
  Description of Artificial Sequence: Synthetic peptide
  Seed: ELRSRYWAIR
ELRSRYWAIG

SEQ ID NO: 34429 - protein, 10 aa, Artificial Sequence
  Description of Artificial Sequence: Synthetic peptide
  Seed: ELRSRYWAIR
ELRSRYWAIH

SEQ ID NO: 34430 - protein, 10 aa, Artificial Sequence
  Description of Artificial Sequence: Synthetic peptide
  Seed: ELRSRYWAIR
ELRSRYWAII

SEQ ID NO: 34431 - protein, 10 aa, Artificial Sequence
  Description of Artificial Sequence: Synthetic peptide
  Seed: ELRSRYWAIR
ELRSRYWAIL

SEQ ID NO: 34432 - protein, 10 aa, Artificial Sequence
  Description of Artificial Sequence: Synthetic peptide
  Seed: ELRSRYWAIR
ELRSRYWAIM

SEQ ID NO: 34433 - protein, 10 aa, Artificial Sequence
  Description of Artificial Sequence: Synthetic peptide
  Seed: ELRSRYWAIR
ELRSRYWAIF

SEQ ID NO: 34434 - protein, 10 aa, Artificial Sequence
  Description of Artificial Sequence: Synthetic peptide
  Seed: ELRSRYWAIR
ELRSRYWAIP

SEQ ID NO: 34435 - protein, 10 aa, Artificial Sequence
  Description of Artificial Sequence: Synthetic peptide
  Seed: ELRSRYWAIR
ELRSRYWAIS

SEQ ID NO: 34436 - protein, 10 aa, Artificial Sequence
  Description of Artificial Sequence: Synthetic peptide
  Seed: ELRSRYWAIR
ELRSRYWAIT

SEQ ID NO: 34437 - protein, 10 aa, Artificial Sequence
  Description of Artificial Sequence: Synthetic peptide
  Seed: ELRSRYWAIR
ELRSRYWAIW

SEQ ID NO: 34438 - protein, 10 aa, Artificial Sequence
  Description of Artificial Sequence: Synthetic peptide
  Seed: ELRSRYWAIR
ELRSRYWAIY

SEQ ID NO: 34439 - protein, 10 aa, Artificial Sequence
  Description of Artificial Sequence: Synthetic peptide
  Seed: ELRSRYWAIR
ELRSRYWAIV

SEQ ID NO: 34440 - protein, 10 aa, Artificial Sequence
  Description of Artificial Sequence: Synthetic peptide
  Seed: ELRSRYWAIR
EKRSRYWAIL

SEQ ID NO: 34441 - protein, 10 aa, Artificial Sequence
  Description of Artificial Sequence: Synthetic peptide
  Seed: ELRSRYWAIR
EKRSRYWAIM

SEQ ID NO: 34442 - protein, 10 aa, Artificial Sequence
  Description of Artificial Sequence: Synthetic peptide
  Seed: ELRSRYWAIR
EMRSRYWAIA

SEQ ID NO: 34443 - protein, 10 aa, Artificial Sequence
  Description of Artificial Sequence: Synthetic peptide
  Seed: ELRSRYWAIR
EMRSRYWAIR

SEQ ID NO: 34444 - protein, 9 aa, Artificial Sequence
  Description of Artificial Sequence: Synthetic peptide
  Seed: ELRSRYWAI
EWRSRYWAM

SEQ ID NO: 34445 - protein, 9 aa, Artificial Sequence
  Description of Artificial Sequence: Synthetic peptide
  Seed: ELRSRYWAI
EWRSRYWAL

SEQ ID NO: 34446 - protein, 9 aa, Artificial Sequence
  Description of Artificial Sequence: Synthetic peptide
  Seed: ELRSRYWAI
EWRSRYWAI

SEQ ID NO: 34447 - protein, 9 aa, Artificial Sequence
  Description of Artificial Sequence: Synthetic peptide
  Seed: ELRSRYWAI
ELRSRYWAT

SEQ ID NO: 34448 - protein, 9 aa, Artificial Sequence
  Description of Artificial Sequence: Synthetic peptide
  Seed: ELRSRYWAI
ELRSRYWAA

SEQ ID NO: 34449 - protein, 9 aa, Artificial Sequence
  Description of Artificial Sequence: Synthetic peptide
  Seed: ELRSRYWAI
ELRSRYWAC

SEQ ID NO: 34450 - protein, 9 aa, Artificial Sequence
  Description of Artificial Sequence: Synthetic peptide
  Seed: ELRSRYWAI
ELRSRYWAE

SEQ ID NO: 34451 - protein, 9 aa, Artificial Sequence
  Description of Artificial Sequence: Synthetic peptide
  Seed: ELRSRYWAI
ELRSRYWAG

SEQ ID NO: 34452 - protein, 9 aa, Artificial Sequence
  Description of Artificial Sequence: Synthetic peptide
  Seed: ELRSRYWAI
ELRSRYWAL

SEQ ID NO: 34453 - protein, 9 aa, Artificial Sequence
  Description of Artificial Sequence: Synthetic peptide
  Seed: ELRSRYWAI
ELRSRYWAM

SEQ ID NO: 34454 - protein, 9 aa, Artificial Sequence
  Description of Artificial Sequence: Synthetic peptide
  Seed: ELRSRYWAI
ELRSRYWAF

SEQ ID NO: 34455 - protein, 9 aa, Artificial Sequence
  Description of Artificial Sequence: Synthetic peptide
  Seed: ELRSRYWAI
ELRSRYWAP

SEQ ID NO: 34456 - protein, 9 aa, Artificial Sequence
  Description of Artificial Sequence: Synthetic peptide
  Seed: ELRSRYWAI
ELRSRYWAS

SEQ ID NO: 34457 - protein, 9 aa, Artificial Sequence
  Description of Artificial Sequence: Synthetic peptide
  Seed: ELRSRYWAI
ELRSRYWAW

SEQ ID NO: 34458 - protein, 9 aa, Artificial Sequence
  Description of Artificial Sequence: Synthetic peptide
  Seed: ELRSRYWAI
EWRSRYWAA

SEQ ID NO: 34459 - protein, 9 aa, Artificial Sequence
  Description of Artificial Sequence: Synthetic peptide
  Seed: ELRSRYWAI
ELRSRYWAY

SEQ ID NO: 34460 - protein, 9 aa, Artificial Sequence
  Description of Artificial Sequence: Synthetic peptide
  Seed: ELRSRYWAI
ELRSRYWAV

SEQ ID NO: 34461 - protein, 9 aa, Artificial Sequence
  Description of Artificial Sequence: Synthetic peptide
  Seed: ELRSRYWAI
EKRSRYWAA

SEQ ID NO: 34462 - protein, 9 aa, Artificial Sequence
  Description of Artificial Sequence: Synthetic peptide
  Seed: ELRSRYWAI
EKRSRYWAC

SEQ ID NO: 34463 - protein, 9 aa, Artificial Sequence
  Description of Artificial Sequence: Synthetic peptide
  Seed: ELRSRYWAI
EKRSRYWAI

SEQ ID NO: 34464 - protein, 9 aa, Artificial Sequence
  Description of Artificial Sequence: Synthetic peptide
  Seed: ELRSRYWAI
EKRSRYWAL

SEQ ID NO: 34465 - protein, 9 aa, Artificial Sequence
  Description of Artificial Sequence: Synthetic peptide
  Seed: ELRSRYWAI
EKRSRYWAM

SEQ ID NO: 34466 - protein, 9 aa, Artificial Sequence
  Description of Artificial Sequence: Synthetic peptide
  Seed: ELRSRYWAI
EKRSRYWAF

SEQ ID NO: 34467 - protein, 9 aa, Artificial Sequence
  Description of Artificial Sequence: Synthetic peptide
  Seed: ELRSRYWAI
EKRSRYWAV

SEQ ID NO: 34468 - protein, 9 aa, Artificial Sequence
  Description of Artificial Sequence: Synthetic peptide
  Seed: ELRSRYWAI
EIRSRYWAV

SEQ ID NO: 34469 - protein, 9 aa, Artificial Sequence
  Description of Artificial Sequence: Synthetic peptide
  Seed: ELRSRYWAI
EIRSRYWAT

SEQ ID NO: 34470 - protein, 9 aa, Artificial Sequence
  Description of Artificial Sequence: Synthetic peptide
  Seed: ELRSRYWAI
EIRSRYWAS

SEQ ID NO: 34471 - protein, 9 aa, Artificial Sequence
  Description of Artificial Sequence: Synthetic peptide
  Seed: ELRSRYWAI
EIRSRYWAF

SEQ ID NO: 34472 - protein, 9 aa, Artificial Sequence
  Description of Artificial Sequence: Synthetic peptide
  Seed: ELRSRYWAI
EERSRYWAV

SEQ ID NO: 34473 - protein, 9 aa, Artificial Sequence
  Description of Artificial Sequence: Synthetic peptide
  Seed: ELRSRYWAI
EGRSRYWAA

SEQ ID NO: 34474 - protein, 9 aa, Artificial Sequence
  Description of Artificial Sequence: Synthetic peptide
  Seed: ELRSRYWAI
EGRSRYWAC

SEQ ID NO: 34475 - protein, 9 aa, Artificial Sequence
  Description of Artificial Sequence: Synthetic peptide
  Seed: ELRSRYWAI
EGRSRYWAI

SEQ ID NO: 34476 - protein, 9 aa, Artificial Sequence
  Description of Artificial Sequence: Synthetic peptide
  Seed: ELRSRYWAI
EGRSRYWAL

SEQ ID NO: 34477 - protein, 9 aa, Artificial Sequence
  Description of Artificial Sequence: Synthetic peptide
  Seed: ELRSRYWAI
EGRSRYWAM

SEQ ID NO: 34478 - protein, 9 aa, Artificial Sequence
  Description of Artificial Sequence: Synthetic peptide
  Seed: ELRSRYWAI
EGRSRYWAF

SEQ ID NO: 34479 - protein, 9 aa, Artificial Sequence
  Description of Artificial Sequence: Synthetic peptide
  Seed: ELRSRYWAI
EGRSRYWAT

SEQ ID NO: 34480 - protein, 9 aa, Artificial Sequence
  Description of Artificial Sequence: Synthetic peptide
  Seed: ELRSRYWAI
EGRSRYWAV

SEQ ID NO: 34481 - protein, 9 aa, Artificial Sequence
  Description of Artificial Sequence: Synthetic peptide
  Seed: ELRSRYWAI
EHRSRYWAI

SEQ ID NO: 34482 - protein, 9 aa, Artificial Sequence
  Description of Artificial Sequence: Synthetic peptide
  Seed: ELRSRYWAI
EHRSRYWAL

SEQ ID NO: 34483 - protein, 9 aa, Artificial Sequence
  Description of Artificial Sequence: Synthetic peptide
  Seed: ELRSRYWAI
EHRSRYWAM

SEQ ID NO: 34484 - protein, 9 aa, Artificial Sequence
  Description of Artificial Sequence: Synthetic peptide
  Seed: ELRSRYWAI
EHRSRYWAV

SEQ ID NO: 34485 - protein, 9 aa, Artificial Sequence
  Description of Artificial Sequence: Synthetic peptide
  Seed: ELRSRYWAI
EIRSRYWAA

SEQ ID NO: 34486 - protein, 9 aa, Artificial Sequence
  Description of Artificial Sequence: Synthetic peptide
  Seed: ELRSRYWAI
EIRSRYWAC

SEQ ID NO: 34487 - protein, 9 aa, Artificial Sequence
  Description of Artificial Sequence: Synthetic peptide
  Seed: ELRSRYWAI
EIRSRYWAG

SEQ ID NO: 34488 - protein, 9 aa, Artificial Sequence
  Description of Artificial Sequence: Synthetic peptide
  Seed: ELRSRYWAI
EIRSRYWAI

SEQ ID NO: 34489 - protein, 9 aa, Artificial Sequence
  Description of Artificial Sequence: Synthetic peptide
  Seed: ELRSRYWAI
EIRSRYWAL

SEQ ID NO: 34490 - protein, 9 aa, Artificial Sequence
  Description of Artificial Sequence: Synthetic peptide
  Seed: ELRSRYWAI
EIRSRYWAM

SEQ ID NO: 34491 - protein, 9 aa, Artificial Sequence
  Description of Artificial Sequence: Synthetic peptide
  Seed: ELRSRYWAI
EMRSRYWAA

SEQ ID NO: 34492 - protein, 9 aa, Artificial Sequence
  Description of Artificial Sequence: Synthetic peptide
  Seed: ELRSRYWAI
EMRSRYWAC

SEQ ID NO: 34493 - protein, 9 aa, Artificial Sequence
  Description of Artificial Sequence: Synthetic peptide
  Seed: ELRSRYWAI
EMRSRYWAE

SEQ ID NO: 34494 - protein, 9 aa, Artificial Sequence
  Description of Artificial Sequence: Synthetic peptide
  Seed: ELRSRYWAI
EPRSRYWAL

SEQ ID NO: 34495 - protein, 9 aa, Artificial Sequence
  Description of Artificial Sequence: Synthetic peptide
  Seed: ELRSRYWAI
EPRSRYWAF

SEQ ID NO: 34496 - protein, 9 aa, Artificial Sequence
  Description of Artificial Sequence: Synthetic peptide
  Seed: ELRSRYWAI
EPRSRYWAS

SEQ ID NO: 34497 - protein, 9 aa, Artificial Sequence
  Description of Artificial Sequence: Synthetic peptide
  Seed: ELRSRYWAI
EPRSRYWAT

SEQ ID NO: 34498 - protein, 9 aa, Artificial Sequence
  Description of Artificial Sequence: Synthetic peptide
  Seed: ELRSRYWAI
EPRSRYWAV

SEQ ID NO: 34499 - protein, 9 aa, Artificial Sequence
  Description of Artificial Sequence: Synthetic peptide
  Seed: ELRSRYWAI
ESRSRYWAA

SEQ ID NO: 34500 - protein, 9 aa, Artificial Sequence
  Description of Artificial Sequence: Synthetic peptide
  Seed: ELRSRYWAI
ESRSRYWAC

SEQ ID NO: 34501 - protein, 9 aa, Artificial Sequence
  Description of Artificial Sequence: Synthetic peptide
  Seed: ELRSRYWAI
ESRSRYWAI

SEQ ID NO: 34502 - protein, 9 aa, Artificial Sequence
  Description of Artificial Sequence: Synthetic peptide
  Seed: ELRSRYWAI
ESRSRYWAL

SEQ ID NO: 34503 - protein, 9 aa, Artificial Sequence
  Description of Artificial Sequence: Synthetic peptide
  Seed: ELRSRYWAI
ESRSRYWAM

SEQ ID NO: 34504 - protein, 9 aa, Artificial Sequence
  Description of Artificial Sequence: Synthetic peptide
  Seed: ELRSRYWAI
ESRSRYWAF

SEQ ID NO: 34505 - protein, 9 aa, Artificial Sequence
  Description of Artificial Sequence: Synthetic peptide
  Seed: ELRSRYWAI
ESRSRYWAT

SEQ ID NO: 34506 - protein, 9 aa, Artificial Sequence
  Description of Artificial Sequence: Synthetic peptide
  Seed: ELRSRYWAI
ESRSRYWAV

SEQ ID NO: 34507 - protein, 9 aa, Artificial Sequence
  Description of Artificial Sequence: Synthetic peptide
  Seed: ELRSRYWAI
ETRSRYWAA

SEQ ID NO: 34508 - protein, 9 aa, Artificial Sequence
  Description of Artificial Sequence: Synthetic peptide
  Seed: ELRSRYWAI
ETRSRYWAC

SEQ ID NO: 34509 - protein, 9 aa, Artificial Sequence
  Description of Artificial Sequence: Synthetic peptide
  Seed: ELRSRYWAI
ETRSRYWAI

SEQ ID NO: 34510 - protein, 9 aa, Artificial Sequence
  Description of Artificial Sequence: Synthetic peptide
  Seed: ELRSRYWAI
ETRSRYWAL

SEQ ID NO: 34511 - protein, 9 aa, Artificial Sequence
  Description of Artificial Sequence: Synthetic peptide
  Seed: ELRSRYWAI
ETRSRYWAM

SEQ ID NO: 34512 - protein, 9 aa, Artificial Sequence
  Description of Artificial Sequence: Synthetic peptide
  Seed: ELRSRYWAI
ETRSRYWAF

SEQ ID NO: 34513 - protein, 9 aa, Artificial Sequence
  Description of Artificial Sequence: Synthetic peptide
  Seed: ELRSRYWAI
ETRSRYWAV

SEQ ID NO: 34514 - protein, 9 aa, Artificial Sequence
  Description of Artificial Sequence: Synthetic peptide
  Seed: ELRSRYWAI
EPRSRYWAM

SEQ ID NO: 34515 - protein, 9 aa, Artificial Sequence
  Description of Artificial Sequence: Synthetic peptide
  Seed: ELRSRYWAI
EPRSRYWAI

SEQ ID NO: 34516 - protein, 9 aa, Artificial Sequence
  Description of Artificial Sequence: Synthetic peptide
  Seed: ELRSRYWAI
EMRSRYWAG

SEQ ID NO: 34517 - protein, 9 aa, Artificial Sequence
  Description of Artificial Sequence: Synthetic peptide
  Seed: ELRSRYWAI
EPRSRYWAG

SEQ ID NO: 34518 - protein, 9 aa, Artificial Sequence
  Description of Artificial Sequence: Synthetic peptide
  Seed: ELRSRYWAI
EMRSRYWAI

SEQ ID NO: 34519 - protein, 9 aa, Artificial Sequence
  Description of Artificial Sequence: Synthetic peptide
  Seed: ELRSRYWAI
EMRSRYWAL

SEQ ID NO: 34520 - protein, 9 aa, Artificial Sequence
  Description of Artificial Sequence: Synthetic peptide
  Seed: ELRSRYWAI
EMRSRYWAM

SEQ ID NO: 34521 - protein, 9 aa, Artificial Sequence
  Description of Artificial Sequence: Synthetic peptide
  Seed: ELRSRYWAI
EMRSRYWAF

SEQ ID NO: 34522 - protein, 9 aa, Artificial Sequence
  Description of Artificial Sequence: Synthetic peptide
  Seed: ELRSRYWAI
EMRSRYWAP

SEQ ID NO: 34523 - protein, 9 aa, Artificial Sequence
  Description of Artificial Sequence: Synthetic peptide
  Seed: ELRSRYWAI
EMRSRYWAS

SEQ ID NO: 34524 - protein, 9 aa, Artificial Sequence
  Description of Artificial Sequence: Synthetic peptide
  Seed: ELRSRYWAI
EMRSRYWAT

SEQ ID NO: 34525 - protein, 9 aa, Artificial Sequence
  Description of Artificial Sequence: Synthetic peptide
  Seed: ELRSRYWAI
EMRSRYWAW

SEQ ID NO: 34526 - protein, 9 aa, Artificial Sequence
  Description of Artificial Sequence: Synthetic peptide
  Seed: ELRSRYWAI
EMRSRYWAY

SEQ ID NO: 34527 - protein, 9 aa, Artificial Sequence
  Description of Artificial Sequence: Synthetic peptide
  Seed: ELRSRYWAI
EMRSRYWAV

SEQ ID NO: 34528 - protein, 9 aa, Artificial Sequence
  Description of Artificial Sequence: Synthetic peptide
  Seed: ELRSRYWAI
EFRSRYWAA

SEQ ID NO: 34529 - protein, 9 aa, Artificial Sequence
  Description of Artificial Sequence: Synthetic peptide
  Seed: ELRSRYWAI
EFRSRYWAC

SEQ ID NO: 34530 - protein, 9 aa, Artificial Sequence
  Description of Artificial Sequence: Synthetic peptide
  Seed: ELRSRYWAI
EFRSRYWAI

SEQ ID NO: 34531 - protein, 9 aa, Artificial Sequence
  Description of Artificial Sequence: Synthetic peptide
  Seed: ELRSRYWAI
EFRSRYWAL

SEQ ID NO: 34532 - protein, 9 aa, Artificial Sequence
  Description of Artificial Sequence: Synthetic peptide
  Seed: ELRSRYWAI
EFRSRYWAM

SEQ ID NO: 34533 - protein, 9 aa, Artificial Sequence
  Description of Artificial Sequence: Synthetic peptide
  Seed: ELRSRYWAI
EFRSRYWAF

SEQ ID NO: 34534 - protein, 9 aa, Artificial Sequence
  Description of Artificial Sequence: Synthetic peptide
  Seed: ELRSRYWAI
EFRSRYWAV

SEQ ID NO: 34535 - protein, 9 aa, Artificial Sequence
  Description of Artificial Sequence: Synthetic peptide
  Seed: ELRSRYWAI
EPRSRYWAA

SEQ ID NO: 34536 - protein, 9 aa, Artificial Sequence
  Description of Artificial Sequence: Synthetic peptide
  Seed: ELRSRYWAI
EPRSRYWAC

SEQ ID NO: 34537 - protein, 10 aa, Artificial Sequence
  Description of Artificial Sequence: Synthetic peptide
  Seed: EVSFQGRGVF
EWSFQGRGVF

SEQ ID NO: 34538 - protein, 10 aa, Artificial Sequence
  Description of Artificial Sequence: Synthetic peptide
  Seed: EVSFQGRGVF
EWSFQGRGVW

SEQ ID NO: 34539 - protein, 10 aa, Artificial Sequence
  Description of Artificial Sequence: Synthetic peptide
  Seed: EVSFQGRGVF
EWSFQGRGVY

SEQ ID NO: 34540 - protein, 10 aa, Artificial Sequence
  Description of Artificial Sequence: Synthetic peptide
  Seed: FEDLRLLSFI
FEDLRLLSFL

SEQ ID NO: 34541 - protein, 9 aa, Artificial Sequence
  Description of Artificial Sequence: Synthetic peptide
  Seed: FEDLRLLSF
FMDLRLLSF

SEQ ID NO: 34542 - protein, 9 aa, Artificial Sequence
  Description of Artificial Sequence: Synthetic peptide
  Seed: FEDLRLLSF
FMDLRLLSY

SEQ ID NO: 34543 - protein, 9 aa, Artificial Sequence
  Description of Artificial Sequence: Synthetic peptide
  Seed: FEDLRLLSF
FSDLRLLSM

SEQ ID NO: 34544 - protein, 9 aa, Artificial Sequence
  Description of Artificial Sequence: Synthetic peptide
  Seed: FEDLRLLSF
FSDLRLLSF

SEQ ID NO: 34545 - protein, 9 aa, Artificial Sequence
  Description of Artificial Sequence: Synthetic peptide
  Seed: FEDLRLLSF
FSDLRLLSY

SEQ ID NO: 34546 - protein, 9 aa, Artificial Sequence
  Description of Artificial Sequence: Synthetic peptide
  Seed: FEDLRLLSF
FTDLRLLSF

SEQ ID NO: 34547 - protein, 9 aa, Artificial Sequence
  Description of Artificial Sequence: Synthetic peptide
  Seed: FEDLRLLSF
FTDLRLLSY

SEQ ID NO: 34548 - protein, 9 aa, Artificial Sequence
  Description of Artificial Sequence: Synthetic peptide
  Seed: FEDLRLLSF
FVDLRLLSF

SEQ ID NO: 34549 - protein, 9 aa, Artificial Sequence
  Description of Artificial Sequence: Synthetic peptide
  Seed: FEDLRLLSF
FVDLRLLSY

SEQ ID NO: 34550 - protein, 10 aa, Artificial Sequence
  Description of Artificial Sequence: Synthetic peptide
  Seed: FEDLRLLSFI
FEDLRLLSFM

SEQ ID NO: 34551 - protein, 9 aa, Artificial Sequence
  Description of Artificial Sequence: Synthetic peptide
  Seed: FEDLRVSSF
FDDLRVSSL

SEQ ID NO: 34552 - protein, 10 aa, Artificial Sequence
  Description of Artificial Sequence: Synthetic peptide
  Seed: FEDLRLLSFI
FEDLRLLSFF

SEQ ID NO: 34553 - protein, 10 aa, Artificial Sequence
  Description of Artificial Sequence: Synthetic peptide
  Seed: FEDLRLLSFI
FEDLRLLSFV

SEQ ID NO: 34554 - protein, 9 aa, Artificial Sequence
  Description of Artificial Sequence: Synthetic peptide
  Seed: FEDLRVSSF
FADLRVSSM

SEQ ID NO: 34555 - protein, 9 aa, Artificial Sequence
  Description of Artificial Sequence: Synthetic peptide
  Seed: FEDLRVSSF
FADLRVSSF

SEQ ID NO: 34556 - protein, 9 aa, Artificial Sequence
  Description of Artificial Sequence: Synthetic peptide
  Seed: FEDLRVSSF
FADLRVSSY

SEQ ID NO: 34557 - protein, 9 aa, Artificial Sequence
  Description of Artificial Sequence: Synthetic peptide
  Seed: FEDLRVSSF
FRDLRVSSM

SEQ ID NO: 34558 - protein, 9 aa, Artificial Sequence
  Description of Artificial Sequence: Synthetic peptide
  Seed: FEDLRVSSF
FRDLRVSSF

SEQ ID NO: 34559 - protein, 9 aa, Artificial Sequence
  Description of Artificial Sequence: Synthetic peptide
  Seed: FEDLRVSSF
FRDLRVSSY

SEQ ID NO: 34560 - protein, 9 aa, Artificial Sequence
  Description of Artificial Sequence: Synthetic peptide
  Seed: FEDLRVSSF
FNDLRVSSF

SEQ ID NO: 34561 - protein, 9 aa, Artificial Sequence
  Description of Artificial Sequence: Synthetic peptide
  Seed: FEDLRLLSF
FMDLRLLSM

SEQ ID NO: 34562 - protein, 9 aa, Artificial Sequence
  Description of Artificial Sequence: Synthetic peptide
  Seed: FEDLRLLSF
FMDLRLLSL

SEQ ID NO: 34563 - protein, 9 aa, Artificial Sequence
  Description of Artificial Sequence: Synthetic peptide
  Seed: FEDLRLLSF
FKDLRLLSY

SEQ ID NO: 34564 - protein, 9 aa, Artificial Sequence
  Description of Artificial Sequence: Synthetic peptide
  Seed: FEDLRLLSF
FKDLRLLSF

SEQ ID NO: 34565 - protein, 9 aa, Artificial Sequence
  Description of Artificial Sequence: Synthetic peptide
  Seed: FEDLRLLSF
FQDLRLLSM

SEQ ID NO: 34566 - protein, 9 aa, Artificial Sequence
  Description of Artificial Sequence: Synthetic peptide
  Seed: FEDLRLLSF
FQDLRLLSF

SEQ ID NO: 34567 - protein, 9 aa, Artificial Sequence
  Description of Artificial Sequence: Synthetic peptide
  Seed: FEDLRLLSF
FQDLRLLSW

SEQ ID NO: 34568 - protein, 9 aa, Artificial Sequence
  Description of Artificial Sequence: Synthetic peptide
  Seed: FEDLRLLSF
FQDLRLLSY

SEQ ID NO: 34569 - protein, 9 aa, Artificial Sequence
  Description of Artificial Sequence: Synthetic peptide
  Seed: FEDLRLLSF
FEDLRLLSA

SEQ ID NO: 34570 - protein, 9 aa, Artificial Sequence
  Description of Artificial Sequence: Synthetic peptide
  Seed: FEDLRLLSF
FEDLRLLSI

SEQ ID NO: 34571 - protein, 9 aa, Artificial Sequence
  Description of Artificial Sequence: Synthetic peptide
  Seed: FEDLRLLSF
FEDLRLLSL

SEQ ID NO: 34572 - protein, 9 aa, Artificial Sequence
  Description of Artificial Sequence: Synthetic peptide
  Seed: FEDLRLLSF
FEDLRLLSM

SEQ ID NO: 34573 - protein, 9 aa, Artificial Sequence
  Description of Artificial Sequence: Synthetic peptide
  Seed: FEDLRLLSF
FEDLRLLSY

SEQ ID NO: 34574 - protein, 9 aa, Artificial Sequence
  Description of Artificial Sequence: Synthetic peptide
  Seed: FEDLRLLSF
FEDLRLLSV

SEQ ID NO: 34575 - protein, 9 aa, Artificial Sequence
  Description of Artificial Sequence: Synthetic peptide
  Seed: FEDLRLLSF
FGDLRLLSY

SEQ ID NO: 34576 - protein, 9 aa, Artificial Sequence
  Description of Artificial Sequence: Synthetic peptide
  Seed: FEDLRLLSF
FHDLRLLSM

SEQ ID NO: 34577 - protein, 9 aa, Artificial Sequence
  Description of Artificial Sequence: Synthetic peptide
  Seed: FEDLRLLSF
FHDLRLLSF

SEQ ID NO: 34578 - protein, 9 aa, Artificial Sequence
  Description of Artificial Sequence: Synthetic peptide
  Seed: FEDLRLLSF
FHDLRLLSY

SEQ ID NO: 34579 - protein, 9 aa, Artificial Sequence
  Description of Artificial Sequence: Synthetic peptide
  Seed: FEDLRLLSF
FIDLRLLSY

SEQ ID NO: 34580 - protein, 9 aa, Artificial Sequence
  Description of Artificial Sequence: Synthetic peptide
  Seed: FEDLRLLSF
FLDLRLLSF

SEQ ID NO: 34581 - protein, 9 aa, Artificial Sequence
  Description of Artificial Sequence: Synthetic peptide
  Seed: FEDLRLLSF
FLDLRLLSY

SEQ ID NO: 34582 - protein, 9 aa, Artificial Sequence
  Description of Artificial Sequence: Synthetic peptide
  Seed: FEDLRLLSF
FKDLRLLSL

SEQ ID NO: 34583 - protein, 9 aa, Artificial Sequence
  Description of Artificial Sequence: Synthetic peptide
  Seed: FEDLRLLSF
FKDLRLLSM

SEQ ID NO: 34584 - protein, 9 aa, Artificial Sequence
  Description of Artificial Sequence: Synthetic peptide
  Seed: FEDLRVSSF
FNDLRVSSY

SEQ ID NO: 34585 - protein, 9 aa, Artificial Sequence
  Description of Artificial Sequence: Synthetic peptide
  Seed: FEDLRVSSF
FQDLRVSSH

SEQ ID NO: 34586 - protein, 11 aa, Artificial Sequence
  Description of Artificial Sequence: Synthetic peptide
  Seed: FEDLRVSSFIR
FRDLRVSSFIR

SEQ ID NO: 34587 - protein, 9 aa, Artificial Sequence
  Description of Artificial Sequence: Synthetic peptide
  Seed: FEDLRVSSF
FSDLRVSSY

SEQ ID NO: 34588 - protein, 9 aa, Artificial Sequence
  Description of Artificial Sequence: Synthetic peptide
  Seed: FEDLRVSSF
FKDLRVSSY

SEQ ID NO: 34589 - protein, 9 aa, Artificial Sequence
  Description of Artificial Sequence: Synthetic peptide
  Seed: FEDLRVSSF
FMDLRVSSL

SEQ ID NO: 34590 - protein, 9 aa, Artificial Sequence
  Description of Artificial Sequence: Synthetic peptide
  Seed: FEDLRVSSF
FMDLRVSSM

SEQ ID NO: 34591 - protein, 9 aa, Artificial Sequence
  Description of Artificial Sequence: Synthetic peptide
  Seed: FEDLRVSSF
FMDLRVSSF

SEQ ID NO: 34592 - protein, 9 aa, Artificial Sequence
  Description of Artificial Sequence: Synthetic peptide
  Seed: FEDLRVSSF
FMDLRVSSW

SEQ ID NO: 34593 - protein, 9 aa, Artificial Sequence
  Description of Artificial Sequence: Synthetic peptide
  Seed: FEDLRVSSF
FMDLRVSSY

SEQ ID NO: 34594 - protein, 9 aa, Artificial Sequence
  Description of Artificial Sequence: Synthetic peptide
  Seed: FEDLRVSSF
FFDLRVSSF

SEQ ID NO: 34595 - protein, 9 aa, Artificial Sequence
  Description of Artificial Sequence: Synthetic peptide
  Seed: FEDLRVSSF
FSDLRVSSM

SEQ ID NO: 34596 - protein, 9 aa, Artificial Sequence
  Description of Artificial Sequence: Synthetic peptide
  Seed: FEDLRVSSF
FSDLRVSSF

SEQ ID NO: 34597 - protein, 9 aa, Artificial Sequence
  Description of Artificial Sequence: Synthetic peptide
  Seed: FEDLRVSSF
FTDLRVSSF

SEQ ID NO: 34598 - protein, 9 aa, Artificial Sequence
  Description of Artificial Sequence: Synthetic peptide
  Seed: FEDLRVSSF
FQDLRVSSI

SEQ ID NO: 34599 - protein, 9 aa, Artificial Sequence
  Description of Artificial Sequence: Synthetic peptide
  Seed: FEDLRVSSF
FTDLRVSSY

SEQ ID NO: 34600 - protein, 9 aa, Artificial Sequence
  Description of Artificial Sequence: Synthetic peptide
  Seed: FEDLRVSSF
FVDLRVSSF

SEQ ID NO: 34601 - protein, 9 aa, Artificial Sequence
  Description of Artificial Sequence: Synthetic peptide
  Seed: FEDLRVSSF
FVDLRVSSY

SEQ ID NO: 34602 - protein, 10 aa, Artificial Sequence
  Description of Artificial Sequence: Synthetic peptide
  Seed: FEDLRVSSFI
FEDLRVSSFA

SEQ ID NO: 34603 - protein, 10 aa, Artificial Sequence
  Description of Artificial Sequence: Synthetic peptide
  Seed: FEDLRVSSFI
FEDLRVSSFL

SEQ ID NO: 34604 - protein, 10 aa, Artificial Sequence
  Description of Artificial Sequence: Synthetic peptide
  Seed: FEDLRVSSFI
FEDLRVSSFM

SEQ ID NO: 34605 - protein, 10 aa, Artificial Sequence
  Description of Artificial Sequence: Synthetic peptide
  Seed: FEDLRVSSFI
FEDLRVSSFF

SEQ ID NO: 34606 - protein, 10 aa, Artificial Sequence
  Description of Artificial Sequence: Synthetic peptide
  Seed: FEDLRVSSFI
FEDLRVSSFP

SEQ ID NO: 34607 - protein, 10 aa, Artificial Sequence
  Description of Artificial Sequence: Synthetic peptide
  Seed: FEDLRVSSFI
FEDLRVSSFV

SEQ ID NO: 34608 - protein, 9 aa, Artificial Sequence
  Description of Artificial Sequence: Synthetic peptide
  Seed: FEDLRVSSF
FKDLRVSSF

SEQ ID NO: 34609 - protein, 9 aa, Artificial Sequence
  Description of Artificial Sequence: Synthetic peptide
  Seed: FEDLRVSSF
FKDLRVSSM

SEQ ID NO: 34610 - protein, 9 aa, Artificial Sequence
  Description of Artificial Sequence: Synthetic peptide
  Seed: FEDLRVSSF
FKDLRVSSL

SEQ ID NO: 34611 - protein, 9 aa, Artificial Sequence
  Description of Artificial Sequence: Synthetic peptide
  Seed: FEDLRVSSF
FLDLRVSSY

SEQ ID NO: 34612 - protein, 9 aa, Artificial Sequence
  Description of Artificial Sequence: Synthetic peptide
  Seed: FEDLRVSSF
FQDLRVSSL

SEQ ID NO: 34613 - protein, 9 aa, Artificial Sequence
  Description of Artificial Sequence: Synthetic peptide
  Seed: FEDLRVSSF
FQDLRVSSM

SEQ ID NO: 34614 - protein, 9 aa, Artificial Sequence
  Description of Artificial Sequence: Synthetic peptide
  Seed: FEDLRVSSF
FQDLRVSSF

SEQ ID NO: 34615 - protein, 9 aa, Artificial Sequence
  Description of Artificial Sequence: Synthetic peptide
  Seed: FEDLRVSSF
FQDLRVSSW

SEQ ID NO: 34616 - protein, 9 aa, Artificial Sequence
  Description of Artificial Sequence: Synthetic peptide
  Seed: FEDLRVSSF
FQDLRVSSY

SEQ ID NO: 34617 - protein, 9 aa, Artificial Sequence
  Description of Artificial Sequence: Synthetic peptide
  Seed: FEDLRVSSF
FEDLRVSSA

SEQ ID NO: 34618 - protein, 9 aa, Artificial Sequence
  Description of Artificial Sequence: Synthetic peptide
  Seed: FEDLRVSSF
FEDLRVSSI

SEQ ID NO: 34619 - protein, 9 aa, Artificial Sequence
  Description of Artificial Sequence: Synthetic peptide
  Seed: FEDLRVSSF
FEDLRVSSL

SEQ ID NO: 34620 - protein, 9 aa, Artificial Sequence
  Description of Artificial Sequence: Synthetic peptide
  Seed: FEDLRVSSF
FEDLRVSSM

SEQ ID NO: 34621 - protein, 9 aa, Artificial Sequence
  Description of Artificial Sequence: Synthetic peptide
  Seed: FEDLRVSSF
FEDLRVSSY

SEQ ID NO: 34622 - protein, 9 aa, Artificial Sequence
  Description of Artificial Sequence: Synthetic peptide
  Seed: FEDLRVSSF
FEDLRVSSV

SEQ ID NO: 34623 - protein, 9 aa, Artificial Sequence
  Description of Artificial Sequence: Synthetic peptide
  Seed: FEDLRVSSF
FGDLRVSSY

SEQ ID NO: 34624 - protein, 9 aa, Artificial Sequence
  Description of Artificial Sequence: Synthetic peptide
  Seed: FEDLRVSSF
FHDLRVSSM

SEQ ID NO: 34625 - protein, 9 aa, Artificial Sequence
  Description of Artificial Sequence: Synthetic peptide
  Seed: FEDLRVSSF
FHDLRVSSF

SEQ ID NO: 34626 - protein, 9 aa, Artificial Sequence
  Description of Artificial Sequence: Synthetic peptide
  Seed: FEDLRVSSF
FHDLRVSSY

SEQ ID NO: 34627 - protein, 9 aa, Artificial Sequence
  Description of Artificial Sequence: Synthetic peptide
  Seed: FEDLRVSSF
FIDLRVSSF

SEQ ID NO: 34628 - protein, 9 aa, Artificial Sequence
  Description of Artificial Sequence: Synthetic peptide
  Seed: FEDLRVSSF
FIDLRVSSY

SEQ ID NO: 34629 - protein, 9 aa, Artificial Sequence
  Description of Artificial Sequence: Synthetic peptide
  Seed: FEDLRVSSF
FLDLRVSSM

SEQ ID NO: 34630 - protein, 9 aa, Artificial Sequence
  Description of Artificial Sequence: Synthetic peptide
  Seed: FEDLRVSSF
FLDLRVSSF

SEQ ID NO: 34631 - protein, 9 aa, Artificial Sequence
  Description of Artificial Sequence: Synthetic peptide
  Seed: FEDLRLLSF
FQDLRLLSL

SEQ ID NO: 34632 - protein, 9 aa, Artificial Sequence
  Description of Artificial Sequence: Synthetic peptide
  Seed: FEDLRLLSF
FQDLRLLSI

SEQ ID NO: 34633 - protein, 9 aa, Artificial Sequence
  Description of Artificial Sequence: Synthetic peptide
  Seed: FEDLRLLSF
FQDLRLLSH

SEQ ID NO: 34634 - protein, 11 aa, Artificial Sequence
  Description of Artificial Sequence: Synthetic peptide
  Seed: FDMSNEGSYFF
FQMSNEGSYFF

SEQ ID NO: 34635 - protein, 11 aa, Artificial Sequence
  Description of Artificial Sequence: Synthetic peptide
  Seed: FDMSNEGSYFF
FRMSNEGSYFY

SEQ ID NO: 34636 - protein, 11 aa, Artificial Sequence
  Description of Artificial Sequence: Synthetic peptide
  Seed: FDMSNEGSYFF
FNMSNEGSYFF

SEQ ID NO: 34637 - protein, 11 aa, Artificial Sequence
  Description of Artificial Sequence: Synthetic peptide
  Seed: FDMSNEGSYFF
FNMSNEGSYFW

SEQ ID NO: 34638 - protein, 11 aa, Artificial Sequence
  Description of Artificial Sequence: Synthetic peptide
  Seed: FDMSNEGSYFF
FNMSNEGSYFY

SEQ ID NO: 34639 - protein, 11 aa, Artificial Sequence
  Description of Artificial Sequence: Synthetic peptide
  Seed: FDMSNEGSYFF
FDMSNEGSYFW

SEQ ID NO: 34640 - protein, 11 aa, Artificial Sequence
  Description of Artificial Sequence: Synthetic peptide
  Seed: FDMSNEGSYFF
FDMSNEGSYFY

SEQ ID NO: 34641 - protein, 11 aa, Artificial Sequence
  Description of Artificial Sequence: Synthetic peptide
  Seed: FDMSNEGSYFF
FCMSNEGSYFF

SEQ ID NO: 34642 - protein, 11 aa, Artificial Sequence
  Description of Artificial Sequence: Synthetic peptide
  Seed: FDMSNEGSYFF
FCMSNEGSYFW

SEQ ID NO: 34643 - protein, 11 aa, Artificial Sequence
  Description of Artificial Sequence: Synthetic peptide
  Seed: FDMSNEGSYFF
FCMSNEGSYFY

SEQ ID NO: 34644 - protein, 11 aa, Artificial Sequence
  Description of Artificial Sequence: Synthetic peptide
  Seed: FDMSNEGSYFF
FQMSNEGSYFW

SEQ ID NO: 34645 - protein, 9 aa, Artificial Sequence
  Description of Artificial Sequence: Synthetic peptide
  Seed: FEDLRLLSF
FDDLRLLSL

SEQ ID NO: 34646 - protein, 11 aa, Artificial Sequence
  Description of Artificial Sequence: Synthetic peptide
  Seed: FDMSNEGSYFF
FQMSNEGSYFY

SEQ ID NO: 34647 - protein, 11 aa, Artificial Sequence
  Description of Artificial Sequence: Synthetic peptide
  Seed: FDMSNEGSYFF
FEMSNEGSYFF

SEQ ID NO: 34648 - protein, 11 aa, Artificial Sequence
  Description of Artificial Sequence: Synthetic peptide
  Seed: FDMSNEGSYFF
FEMSNEGSYFW

SEQ ID NO: 34649 - protein, 11 aa, Artificial Sequence
  Description of Artificial Sequence: Synthetic peptide
  Seed: FDMSNEGSYFF
FEMSNEGSYFY

SEQ ID NO: 34650 - protein, 11 aa, Artificial Sequence
  Description of Artificial Sequence: Synthetic peptide
  Seed: FDMSNEGSYFF
FGMSNEGSYFF

SEQ ID NO: 34651 - protein, 11 aa, Artificial Sequence
  Description of Artificial Sequence: Synthetic peptide
  Seed: FDMSNEGSYFF
FGMSNEGSYFW

SEQ ID NO: 34652 - protein, 11 aa, Artificial Sequence
  Description of Artificial Sequence: Synthetic peptide
  Seed: FDMSNEGSYFF
FGMSNEGSYFY

SEQ ID NO: 34653 - protein, 11 aa, Artificial Sequence
  Description of Artificial Sequence: Synthetic peptide
  Seed: FDMSNEGSYFF
FHMSNEGSYFF

SEQ ID NO: 34654 - protein, 11 aa, Artificial Sequence
  Description of Artificial Sequence: Synthetic peptide
  Seed: FDMSNEGSYFF
FHMSNEGSYFW

SEQ ID NO: 34655 - protein, 11 aa, Artificial Sequence
  Description of Artificial Sequence: Synthetic peptide
  Seed: FDMSNEGSYFF
FRMSNEGSYFW

SEQ ID NO: 34656 - protein, 11 aa, Artificial Sequence
  Description of Artificial Sequence: Synthetic peptide
  Seed: FDMSNEGSYFF
FRMSNEGSYFF

SEQ ID NO: 34657 - protein, 11 aa, Artificial Sequence
  Description of Artificial Sequence: Synthetic peptide
  Seed: FDMSNEGSYFF
FAMSNEGSYFY

SEQ ID NO: 34658 - protein, 11 aa, Artificial Sequence
  Description of Artificial Sequence: Synthetic peptide
  Seed: FDMSNEGSYFF
FAMSNEGSYFW

SEQ ID NO: 34659 - protein, 10 aa, Artificial Sequence
  Description of Artificial Sequence: Synthetic peptide
  Seed: FDMSNEGSYF
FTMSNEGSYW

SEQ ID NO: 34660 - protein, 10 aa, Artificial Sequence
  Description of Artificial Sequence: Synthetic peptide
  Seed: FDMSNEGSYF
FTMSNEGSYY

SEQ ID NO: 34661 - protein, 10 aa, Artificial Sequence
  Description of Artificial Sequence: Synthetic peptide
  Seed: FDMSNEGSYF
FTMSNEGSYV

SEQ ID NO: 34662 - protein, 10 aa, Artificial Sequence
  Description of Artificial Sequence: Synthetic peptide
  Seed: FDMSNEGSYF
FWMSNEGSYM

SEQ ID NO: 34663 - protein, 10 aa, Artificial Sequence
  Description of Artificial Sequence: Synthetic peptide
  Seed: FDMSNEGSYF
FWMSNEGSYF

SEQ ID NO: 34664 - protein, 10 aa, Artificial Sequence
  Description of Artificial Sequence: Synthetic peptide
  Seed: FDMSNEGSYF
FWMSNEGSYW

SEQ ID NO: 34665 - protein, 10 aa, Artificial Sequence
  Description of Artificial Sequence: Synthetic peptide
  Seed: FDMSNEGSYF
FWMSNEGSYY

SEQ ID NO: 34666 - protein, 10 aa, Artificial Sequence
  Description of Artificial Sequence: Synthetic peptide
  Seed: FDMSNEGSYF
FYMSNEGSYM

SEQ ID NO: 34667 - protein, 10 aa, Artificial Sequence
  Description of Artificial Sequence: Synthetic peptide
  Seed: FDMSNEGSYF
FYMSNEGSYF

SEQ ID NO: 34668 - protein, 10 aa, Artificial Sequence
  Description of Artificial Sequence: Synthetic peptide
  Seed: FDMSNEGSYF
FYMSNEGSYW

SEQ ID NO: 34669 - protein, 10 aa, Artificial Sequence
  Description of Artificial Sequence: Synthetic peptide
  Seed: FDMSNEGSYF
FYMSNEGSYY

SEQ ID NO: 34670 - protein, 10 aa, Artificial Sequence
  Description of Artificial Sequence: Synthetic peptide
  Seed: FDMSNEGSYF
FVMSNEGSYI

SEQ ID NO: 34671 - protein, 10 aa, Artificial Sequence
  Description of Artificial Sequence: Synthetic peptide
  Seed: FDMSNEGSYF
FVMSNEGSYL

SEQ ID NO: 34672 - protein, 10 aa, Artificial Sequence
  Description of Artificial Sequence: Synthetic peptide
  Seed: FDMSNEGSYF
FVMSNEGSYM

SEQ ID NO: 34673 - protein, 10 aa, Artificial Sequence
  Description of Artificial Sequence: Synthetic peptide
  Seed: FDMSNEGSYF
FVMSNEGSYF

SEQ ID NO: 34674 - protein, 10 aa, Artificial Sequence
  Description of Artificial Sequence: Synthetic peptide
  Seed: FDMSNEGSYF
FVMSNEGSYW

SEQ ID NO: 34675 - protein, 10 aa, Artificial Sequence
  Description of Artificial Sequence: Synthetic peptide
  Seed: FDMSNEGSYF
FVMSNEGSYY

SEQ ID NO: 34676 - protein, 10 aa, Artificial Sequence
  Description of Artificial Sequence: Synthetic peptide
  Seed: FDMSNEGSYF
FVMSNEGSYV

SEQ ID NO: 34677 - protein, 11 aa, Artificial Sequence
  Description of Artificial Sequence: Synthetic peptide
  Seed: FDMSNEGSYFF
FAMSNEGSYFF

SEQ ID NO: 34678 - protein, 11 aa, Artificial Sequence
  Description of Artificial Sequence: Synthetic peptide
  Seed: FDMSNEGSYFF
FHMSNEGSYFY

SEQ ID NO: 34679 - protein, 11 aa, Artificial Sequence
  Description of Artificial Sequence: Synthetic peptide
  Seed: FDMSNEGSYFF
FIMSNEGSYFF

SEQ ID NO: 34680 - protein, 11 aa, Artificial Sequence
  Description of Artificial Sequence: Synthetic peptide
  Seed: FDMSNEGSYFF
FIMSNEGSYFW

SEQ ID NO: 34681 - protein, 11 aa, Artificial Sequence
  Description of Artificial Sequence: Synthetic peptide
  Seed: FDMSNEGSYFF
FTMSNEGSYFI

SEQ ID NO: 34682 - protein, 11 aa, Artificial Sequence
  Description of Artificial Sequence: Synthetic peptide
  Seed: FDMSNEGSYFF
FTMSNEGSYFM

SEQ ID NO: 34683 - protein, 11 aa, Artificial Sequence
  Description of Artificial Sequence: Synthetic peptide
  Seed: FDMSNEGSYFF
FTMSNEGSYFF

SEQ ID NO: 34684 - protein, 11 aa, Artificial Sequence
  Description of Artificial Sequence: Synthetic peptide
  Seed: FDMSNEGSYFF
FTMSNEGSYFW

SEQ ID NO: 34685 - protein, 11 aa, Artificial Sequence
  Description of Artificial Sequence: Synthetic peptide
  Seed: FDMSNEGSYFF
FTMSNEGSYFY

SEQ ID NO: 34686 - protein, 11 aa, Artificial Sequence
  Description of Artificial Sequence: Synthetic peptide
  Seed: FDMSNEGSYFF
FWMSNEGSYFF

SEQ ID NO: 34687 - protein, 11 aa, Artificial Sequence
  Description of Artificial Sequence: Synthetic peptide
  Seed: FDMSNEGSYFF
FWMSNEGSYFW

SEQ ID NO: 34688 - protein, 11 aa, Artificial Sequence
  Description of Artificial Sequence: Synthetic peptide
  Seed: FDMSNEGSYFF
FWMSNEGSYFY

SEQ ID NO: 34689 - protein, 11 aa, Artificial Sequence
  Description of Artificial Sequence: Synthetic peptide
  Seed: FDMSNEGSYFF
FYMSNEGSYFF

SEQ ID NO: 34690 - protein, 11 aa, Artificial Sequence
  Description of Artificial Sequence: Synthetic peptide
  Seed: FDMSNEGSYFF
FYMSNEGSYFW

SEQ ID NO: 34691 - protein, 11 aa, Artificial Sequence
  Description of Artificial Sequence: Synthetic peptide
  Seed: FDMSNEGSYFF
FYMSNEGSYFY

SEQ ID NO: 34692 - protein, 11 aa, Artificial Sequence
  Description of Artificial Sequence: Synthetic peptide
  Seed: FDMSNEGSYFF
FVMSNEGSYFF

SEQ ID NO: 34693 - protein, 11 aa, Artificial Sequence
  Description of Artificial Sequence: Synthetic peptide
  Seed: FDMSNEGSYFF
FVMSNEGSYFW

SEQ ID NO: 34694 - protein, 11 aa, Artificial Sequence
  Description of Artificial Sequence: Synthetic peptide
  Seed: FDMSNEGSYFF
FVMSNEGSYFY

SEQ ID NO: 34695 - protein, 9 aa, Artificial Sequence
  Description of Artificial Sequence: Synthetic peptide
  Seed: FEDLRLLSF
FADLRLLSM

SEQ ID NO: 34696 - protein, 9 aa, Artificial Sequence
  Description of Artificial Sequence: Synthetic peptide
  Seed: FEDLRLLSF
FADLRLLSF

SEQ ID NO: 34697 - protein, 9 aa, Artificial Sequence
  Description of Artificial Sequence: Synthetic peptide
  Seed: FEDLRLLSF
FADLRLLSY

SEQ ID NO: 34698 - protein, 9 aa, Artificial Sequence
  Description of Artificial Sequence: Synthetic peptide
  Seed: FEDLRLLSF
FRDLRLLSM

SEQ ID NO: 34699 - protein, 9 aa, Artificial Sequence
  Description of Artificial Sequence: Synthetic peptide
  Seed: FEDLRLLSF
FRDLRLLSF

SEQ ID NO: 34700 - protein, 9 aa, Artificial Sequence
  Description of Artificial Sequence: Synthetic peptide
  Seed: FEDLRLLSF
FRDLRLLSY

SEQ ID NO: 34701 - protein, 11 aa, Artificial Sequence
  Description of Artificial Sequence: Synthetic peptide
  Seed: FDMSNEGSYFF
FTMSNEGSYFL

SEQ ID NO: 34702 - protein, 11 aa, Artificial Sequence
  Description of Artificial Sequence: Synthetic peptide
  Seed: FDMSNEGSYFF
FSMSNEGSYFY

SEQ ID NO: 34703 - protein, 11 aa, Artificial Sequence
  Description of Artificial Sequence: Synthetic peptide
  Seed: FDMSNEGSYFF
FIMSNEGSYFY

SEQ ID NO: 34704 - protein, 11 aa, Artificial Sequence
  Description of Artificial Sequence: Synthetic peptide
  Seed: FDMSNEGSYFF
FSMSNEGSYFW

SEQ ID NO: 34705 - protein, 11 aa, Artificial Sequence
  Description of Artificial Sequence: Synthetic peptide
  Seed: FDMSNEGSYFF
FLMSNEGSYFF

SEQ ID NO: 34706 - protein, 11 aa, Artificial Sequence
  Description of Artificial Sequence: Synthetic peptide
  Seed: FDMSNEGSYFF
FLMSNEGSYFW

SEQ ID NO: 34707 - protein, 11 aa, Artificial Sequence
  Description of Artificial Sequence: Synthetic peptide
  Seed: FDMSNEGSYFF
FLMSNEGSYFY

SEQ ID NO: 34708 - protein, 11 aa, Artificial Sequence
  Description of Artificial Sequence: Synthetic peptide
  Seed: FDMSNEGSYFF
FKMSNEGSYFF

SEQ ID NO: 34709 - protein, 11 aa, Artificial Sequence
  Description of Artificial Sequence: Synthetic peptide
  Seed: FDMSNEGSYFF
FKMSNEGSYFW

SEQ ID NO: 34710 - protein, 11 aa, Artificial Sequence
  Description of Artificial Sequence: Synthetic peptide
  Seed: FDMSNEGSYFF
FKMSNEGSYFY

SEQ ID NO: 34711 - protein, 11 aa, Artificial Sequence
  Description of Artificial Sequence: Synthetic peptide
  Seed: FDMSNEGSYFF
FMMSNEGSYFF

SEQ ID NO: 34712 - protein, 11 aa, Artificial Sequence
  Description of Artificial Sequence: Synthetic peptide
  Seed: FDMSNEGSYFF
FMMSNEGSYFW

SEQ ID NO: 34713 - protein, 11 aa, Artificial Sequence
  Description of Artificial Sequence: Synthetic peptide
  Seed: FDMSNEGSYFF
FMMSNEGSYFY

SEQ ID NO: 34714 - protein, 11 aa, Artificial Sequence
  Description of Artificial Sequence: Synthetic peptide
  Seed: FDMSNEGSYFF
FFMSNEGSYFF

SEQ ID NO: 34715 - protein, 11 aa, Artificial Sequence
  Description of Artificial Sequence: Synthetic peptide
  Seed: FDMSNEGSYFF
FFMSNEGSYFW

SEQ ID NO: 34716 - protein, 11 aa, Artificial Sequence
  Description of Artificial Sequence: Synthetic peptide
  Seed: FDMSNEGSYFF
FFMSNEGSYFY

SEQ ID NO: 34717 - protein, 11 aa, Artificial Sequence
  Description of Artificial Sequence: Synthetic peptide
  Seed: FDMSNEGSYFF
FPMSNEGSYFF

SEQ ID NO: 34718 - protein, 11 aa, Artificial Sequence
  Description of Artificial Sequence: Synthetic peptide
  Seed: FDMSNEGSYFF
FPMSNEGSYFW

SEQ ID NO: 34719 - protein, 11 aa, Artificial Sequence
  Description of Artificial Sequence: Synthetic peptide
  Seed: FDMSNEGSYFF
FPMSNEGSYFY

SEQ ID NO: 34720 - protein, 11 aa, Artificial Sequence
  Description of Artificial Sequence: Synthetic peptide
  Seed: FDMSNEGSYFF
FSMSNEGSYFI

SEQ ID NO: 34721 - protein, 11 aa, Artificial Sequence
  Description of Artificial Sequence: Synthetic peptide
  Seed: FDMSNEGSYFF
FSMSNEGSYFL

SEQ ID NO: 34722 - protein, 11 aa, Artificial Sequence
  Description of Artificial Sequence: Synthetic peptide
  Seed: FDMSNEGSYFF
FSMSNEGSYFM

SEQ ID NO: 34723 - protein, 11 aa, Artificial Sequence
  Description of Artificial Sequence: Synthetic peptide
  Seed: FDMSNEGSYFF
FSMSNEGSYFF

SEQ ID NO: 34724 - protein, 11 aa, Artificial Sequence
  Description of Artificial Sequence: Synthetic peptide
  Seed: FEDLRVSSFIR
FADLRVSSFIR

SEQ ID NO: 34725 - protein, 11 aa, Artificial Sequence
  Description of Artificial Sequence: Synthetic peptide
  Seed: FEDLRVSSFIR
FNDLRVSSFIR

SEQ ID NO: 34726 - protein, 10 aa, Artificial Sequence
  Description of Artificial Sequence: Synthetic peptide
  Seed: FDMSNEGSYF
FTMSNEGSYM

SEQ ID NO: 34727 - protein, 10 aa, Artificial Sequence
  Description of Artificial Sequence: Synthetic peptide
  Seed: FEKSTVMAAF
FPKSTVMAAL

SEQ ID NO: 34728 - protein, 10 aa, Artificial Sequence
  Description of Artificial Sequence: Synthetic peptide
  Seed: FEKSTVMAAF
FMKSTVMAAM

SEQ ID NO: 34729 - protein, 10 aa, Artificial Sequence
  Description of Artificial Sequence: Synthetic peptide
  Seed: FEKSTVMAAF
FMKSTVMAAF

SEQ ID NO: 34730 - protein, 10 aa, Artificial Sequence
  Description of Artificial Sequence: Synthetic peptide
  Seed: FEKSTVMAAF
FMKSTVMAAW

SEQ ID NO: 34731 - protein, 10 aa, Artificial Sequence
  Description of Artificial Sequence: Synthetic peptide
  Seed: FEKSTVMAAF
FMKSTVMAAY

SEQ ID NO: 34732 - protein, 10 aa, Artificial Sequence
  Description of Artificial Sequence: Synthetic peptide
  Seed: FEKSTVMAAF
FMKSTVMAAV

SEQ ID NO: 34733 - protein, 10 aa, Artificial Sequence
  Description of Artificial Sequence: Synthetic peptide
  Seed: FEKSTVMAAF
FFKSTVMAAL

SEQ ID NO: 34734 - protein, 10 aa, Artificial Sequence
  Description of Artificial Sequence: Synthetic peptide
  Seed: FEKSTVMAAF
FFKSTVMAAM

SEQ ID NO: 34735 - protein, 10 aa, Artificial Sequence
  Description of Artificial Sequence: Synthetic peptide
  Seed: FEKSTVMAAF
FFKSTVMAAF

SEQ ID NO: 34736 - protein, 10 aa, Artificial Sequence
  Description of Artificial Sequence: Synthetic peptide
  Seed: FEKSTVMAAF
FFKSTVMAAY

SEQ ID NO: 34737 - protein, 10 aa, Artificial Sequence
  Description of Artificial Sequence: Synthetic peptide
  Seed: FEKSTVMAAF
FPKSTVMAAM

SEQ ID NO: 34738 - protein, 10 aa, Artificial Sequence
  Description of Artificial Sequence: Synthetic peptide
  Seed: FEKSTVMAAF
FWKSTVMAAL

SEQ ID NO: 34739 - protein, 10 aa, Artificial Sequence
  Description of Artificial Sequence: Synthetic peptide
  Seed: FEKSTVMAAF
FPKSTVMAAF

SEQ ID NO: 34740 - protein, 10 aa, Artificial Sequence
  Description of Artificial Sequence: Synthetic peptide
  Seed: FEKSTVMAAF
FPKSTVMAAY

SEQ ID NO: 34741 - protein, 10 aa, Artificial Sequence
  Description of Artificial Sequence: Synthetic peptide
  Seed: FEKSTVMAAF
FSKSTVMAAL

SEQ ID NO: 34742 - protein, 10 aa, Artificial Sequence
  Description of Artificial Sequence: Synthetic peptide
  Seed: FEKSTVMAAF
FSKSTVMAAM

SEQ ID NO: 34743 - protein, 10 aa, Artificial Sequence
  Description of Artificial Sequence: Synthetic peptide
  Seed: FEKSTVMAAF
FSKSTVMAAF

SEQ ID NO: 34744 - protein, 10 aa, Artificial Sequence
  Description of Artificial Sequence: Synthetic peptide
  Seed: FEKSTVMAAF
FSKSTVMAAY

SEQ ID NO: 34745 - protein, 10 aa, Artificial Sequence
  Description of Artificial Sequence: Synthetic peptide
  Seed: FEKSTVMAAF
FTKSTVMAAL

SEQ ID NO: 34746 - protein, 10 aa, Artificial Sequence
  Description of Artificial Sequence: Synthetic peptide
  Seed: FEKSTVMAAF
FTKSTVMAAM

SEQ ID NO: 34747 - protein, 10 aa, Artificial Sequence
  Description of Artificial Sequence: Synthetic peptide
  Seed: FEKSTVMAAF
FTKSTVMAAF

SEQ ID NO: 34748 - protein, 10 aa, Artificial Sequence
  Description of Artificial Sequence: Synthetic peptide
  Seed: FEKSTVMAAF
FMKSTVMAAL

SEQ ID NO: 34749 - protein, 10 aa, Artificial Sequence
  Description of Artificial Sequence: Synthetic peptide
  Seed: FEKSTVMAAF
FMKSTVMAAI

SEQ ID NO: 34750 - protein, 10 aa, Artificial Sequence
  Description of Artificial Sequence: Synthetic peptide
  Seed: FEKSTVMAAF
FMKSTVMAAH

SEQ ID NO: 34751 - protein, 10 aa, Artificial Sequence
  Description of Artificial Sequence: Synthetic peptide
  Seed: FEKSTVMAAF
FMKSTVMAAA

SEQ ID NO: 34752 - protein, 10 aa, Artificial Sequence
  Description of Artificial Sequence: Synthetic peptide
  Seed: FEKSTVMAAF
FGKSTVMAAF

SEQ ID NO: 34753 - protein, 10 aa, Artificial Sequence
  Description of Artificial Sequence: Synthetic peptide
  Seed: FEKSTVMAAF
FGKSTVMAAY

SEQ ID NO: 34754 - protein, 10 aa, Artificial Sequence
  Description of Artificial Sequence: Synthetic peptide
  Seed: FEKSTVMAAF
FHKSTVMAAL

SEQ ID NO: 34755 - protein, 10 aa, Artificial Sequence
  Description of Artificial Sequence: Synthetic peptide
  Seed: FEKSTVMAAF
FHKSTVMAAM

SEQ ID NO: 34756 - protein, 10 aa, Artificial Sequence
  Description of Artificial Sequence: Synthetic peptide
  Seed: FEKSTVMAAF
FHKSTVMAAF

SEQ ID NO: 34757 - protein, 10 aa, Artificial Sequence
  Description of Artificial Sequence: Synthetic peptide
  Seed: FEKSTVMAAF
FHKSTVMAAY

SEQ ID NO: 34758 - protein, 10 aa, Artificial Sequence
  Description of Artificial Sequence: Synthetic peptide
  Seed: FEKSTVMAAF
FIKSTVMAAL

SEQ ID NO: 34759 - protein, 10 aa, Artificial Sequence
  Description of Artificial Sequence: Synthetic peptide
  Seed: FEKSTVMAAF
FIKSTVMAAM

SEQ ID NO: 34760 - protein, 10 aa, Artificial Sequence
  Description of Artificial Sequence: Synthetic peptide
  Seed: FEKSTVMAAF
FIKSTVMAAF

SEQ ID NO: 34761 - protein, 10 aa, Artificial Sequence
  Description of Artificial Sequence: Synthetic peptide
  Seed: FEKSTVMAAF
FIKSTVMAAY

SEQ ID NO: 34762 - protein, 10 aa, Artificial Sequence
  Description of Artificial Sequence: Synthetic peptide
  Seed: FEKSTVMAAF
FLKSTVMAAL

SEQ ID NO: 34763 - protein, 10 aa, Artificial Sequence
  Description of Artificial Sequence: Synthetic peptide
  Seed: FEKSTVMAAF
FLKSTVMAAM

SEQ ID NO: 34764 - protein, 10 aa, Artificial Sequence
  Description of Artificial Sequence: Synthetic peptide
  Seed: FEKSTVMAAF
FLKSTVMAAF

SEQ ID NO: 34765 - protein, 10 aa, Artificial Sequence
  Description of Artificial Sequence: Synthetic peptide
  Seed: FEKSTVMAAF
FLKSTVMAAW

SEQ ID NO: 34766 - protein, 10 aa, Artificial Sequence
  Description of Artificial Sequence: Synthetic peptide
  Seed: FEKSTVMAAF
FLKSTVMAAY

SEQ ID NO: 34767 - protein, 10 aa, Artificial Sequence
  Description of Artificial Sequence: Synthetic peptide
  Seed: FEKSTVMAAF
FKKSTVMAAL

SEQ ID NO: 34768 - protein, 10 aa, Artificial Sequence
  Description of Artificial Sequence: Synthetic peptide
  Seed: FEKSTVMAAF
FKKSTVMAAM

SEQ ID NO: 34769 - protein, 10 aa, Artificial Sequence
  Description of Artificial Sequence: Synthetic peptide
  Seed: FEKSTVMAAF
FKKSTVMAAF

SEQ ID NO: 34770 - protein, 10 aa, Artificial Sequence
  Description of Artificial Sequence: Synthetic peptide
  Seed: FEKSTVMAAF
FKKSTVMAAY

SEQ ID NO: 34771 - protein, 10 aa, Artificial Sequence
  Description of Artificial Sequence: Synthetic peptide
  Seed: FEKSTVMAAF
FTKSTVMAAY

SEQ ID NO: 34772 - protein, 10 aa, Artificial Sequence
  Description of Artificial Sequence: Synthetic peptide
  Seed: FEKSTVMAAF
FWKSTVMAAM

SEQ ID NO: 34773 - protein, 11 aa, Artificial Sequence
  Description of Artificial Sequence: Synthetic peptide
  Seed: FEDLRVSSFIR
FDDLRVSSFIR

SEQ ID NO: 34774 - protein, 9 aa, Artificial Sequence
  Description of Artificial Sequence: Synthetic peptide
  Seed: FERATIMAA
FDRATIMAI

SEQ ID NO: 34775 - protein, 9 aa, Artificial Sequence
  Description of Artificial Sequence: Synthetic peptide
  Seed: FERATIMAA
FRRATIMAW

SEQ ID NO: 34776 - protein, 9 aa, Artificial Sequence
  Description of Artificial Sequence: Synthetic peptide
  Seed: FERATIMAA
FRRATIMAY

SEQ ID NO: 34777 - protein, 9 aa, Artificial Sequence
  Description of Artificial Sequence: Synthetic peptide
  Seed: FERATIMAA
FNRATIMAH

SEQ ID NO: 34778 - protein, 9 aa, Artificial Sequence
  Description of Artificial Sequence: Synthetic peptide
  Seed: FERATIMAA
FNRATIMAI

SEQ ID NO: 34779 - protein, 9 aa, Artificial Sequence
  Description of Artificial Sequence: Synthetic peptide
  Seed: FERATIMAA
FNRATIMAL

SEQ ID NO: 34780 - protein, 9 aa, Artificial Sequence
  Description of Artificial Sequence: Synthetic peptide
  Seed: FERATIMAA
FNRATIMAM

SEQ ID NO: 34781 - protein, 9 aa, Artificial Sequence
  Description of Artificial Sequence: Synthetic peptide
  Seed: FERATIMAA
FNRATIMAF

SEQ ID NO: 34782 - protein, 9 aa, Artificial Sequence
  Description of Artificial Sequence: Synthetic peptide
  Seed: FERATIMAA
FNRATIMAW

SEQ ID NO: 34783 - protein, 9 aa, Artificial Sequence
  Description of Artificial Sequence: Synthetic peptide
  Seed: FERATIMAA
FNRATIMAY

SEQ ID NO: 34784 - protein, 9 aa, Artificial Sequence
  Description of Artificial Sequence: Synthetic peptide
  Seed: FERATIMAA
FDRATIMAL

SEQ ID NO: 34785 - protein, 10 aa, Artificial Sequence
  Description of Artificial Sequence: Synthetic peptide
  Seed: FEKSTVMAAF
FWKSTVMAAF

SEQ ID NO: 34786 - protein, 9 aa, Artificial Sequence
  Description of Artificial Sequence: Synthetic peptide
  Seed: FERATIMAA
FDRATIMAM

SEQ ID NO: 34787 - protein, 9 aa, Artificial Sequence
  Description of Artificial Sequence: Synthetic peptide
  Seed: FERATIMAA
FDRATIMAF

SEQ ID NO: 34788 - protein, 9 aa, Artificial Sequence
  Description of Artificial Sequence: Synthetic peptide
  Seed: FERATIMAA
FDRATIMAY

SEQ ID NO: 34789 - protein, 9 aa, Artificial Sequence
  Description of Artificial Sequence: Synthetic peptide
  Seed: FERATIMAA
FDRATIMAV

SEQ ID NO: 34790 - protein, 9 aa, Artificial Sequence
  Description of Artificial Sequence: Synthetic peptide
  Seed: FERATIMAA
FCRATIMAM

SEQ ID NO: 34791 - protein, 9 aa, Artificial Sequence
  Description of Artificial Sequence: Synthetic peptide
  Seed: FERATIMAA
FCRATIMAF

SEQ ID NO: 34792 - protein, 9 aa, Artificial Sequence
  Description of Artificial Sequence: Synthetic peptide
  Seed: FERATIMAA
FCRATIMAY

SEQ ID NO: 34793 - protein, 9 aa, Artificial Sequence
  Description of Artificial Sequence: Synthetic peptide
  Seed: FERATIMAA
FQRATIMAA

SEQ ID NO: 34794 - protein, 9 aa, Artificial Sequence
  Description of Artificial Sequence: Synthetic peptide
  Seed: FERATIMAA
FQRATIMAN

SEQ ID NO: 34795 - protein, 9 aa, Artificial Sequence
  Description of Artificial Sequence: Synthetic peptide
  Seed: FERATIMAA
FRRATIMAF

SEQ ID NO: 34796 - protein, 9 aa, Artificial Sequence
  Description of Artificial Sequence: Synthetic peptide
  Seed: FERATIMAA
FRRATIMAM

SEQ ID NO: 34797 - protein, 9 aa, Artificial Sequence
  Description of Artificial Sequence: Synthetic peptide
  Seed: FERATIMAA
FRRATIMAL

SEQ ID NO: 34798 - protein, 9 aa, Artificial Sequence
  Description of Artificial Sequence: Synthetic peptide
  Seed: FERATIMAA
FRRATIMAI

SEQ ID NO: 34799 - protein, 10 aa, Artificial Sequence
  Description of Artificial Sequence: Synthetic peptide
  Seed: FEKSTVMAAF
FWKSTVMAAY

SEQ ID NO: 34800 - protein, 10 aa, Artificial Sequence
  Description of Artificial Sequence: Synthetic peptide
  Seed: FEKSTVMAAF
FYKSTVMAAL

SEQ ID NO: 34801 - protein, 10 aa, Artificial Sequence
  Description of Artificial Sequence: Synthetic peptide
  Seed: FEKSTVMAAF
FYKSTVMAAM

SEQ ID NO: 34802 - protein, 10 aa, Artificial Sequence
  Description of Artificial Sequence: Synthetic peptide
  Seed: FEKSTVMAAF
FYKSTVMAAF

SEQ ID NO: 34803 - protein, 10 aa, Artificial Sequence
  Description of Artificial Sequence: Synthetic peptide
  Seed: FEKSTVMAAF
FYKSTVMAAY

SEQ ID NO: 34804 - protein, 10 aa, Artificial Sequence
  Description of Artificial Sequence: Synthetic peptide
  Seed: FEKSTVMAAF
FVKSTVMAAL

SEQ ID NO: 34805 - protein, 10 aa, Artificial Sequence
  Description of Artificial Sequence: Synthetic peptide
  Seed: FEKSTVMAAF
FVKSTVMAAM

SEQ ID NO: 34806 - protein, 10 aa, Artificial Sequence
  Description of Artificial Sequence: Synthetic peptide
  Seed: FEKSTVMAAF
FVKSTVMAAF

SEQ ID NO: 34807 - protein, 10 aa, Artificial Sequence
  Description of Artificial Sequence: Synthetic peptide
  Seed: FEKSTVMAAF
FVKSTVMAAY

SEQ ID NO: 34808 - protein, 9 aa, Artificial Sequence
  Description of Artificial Sequence: Synthetic peptide
  Seed: FERATIMAA
FARATIMAA

SEQ ID NO: 34809 - protein, 9 aa, Artificial Sequence
  Description of Artificial Sequence: Synthetic peptide
  Seed: FERATIMAA
FARATIMAH

SEQ ID NO: 34810 - protein, 9 aa, Artificial Sequence
  Description of Artificial Sequence: Synthetic peptide
  Seed: FERATIMAA
FARATIMAI

SEQ ID NO: 34811 - protein, 9 aa, Artificial Sequence
  Description of Artificial Sequence: Synthetic peptide
  Seed: FERATIMAA
FARATIMAL

SEQ ID NO: 34812 - protein, 9 aa, Artificial Sequence
  Description of Artificial Sequence: Synthetic peptide
  Seed: FERATIMAA
FARATIMAM

SEQ ID NO: 34813 - protein, 9 aa, Artificial Sequence
  Description of Artificial Sequence: Synthetic peptide
  Seed: FERATIMAA
FARATIMAF

SEQ ID NO: 34814 - protein, 9 aa, Artificial Sequence
  Description of Artificial Sequence: Synthetic peptide
  Seed: FERATIMAA
FARATIMAW

SEQ ID NO: 34815 - protein, 9 aa, Artificial Sequence
  Description of Artificial Sequence: Synthetic peptide
  Seed: FERATIMAA
FARATIMAY

SEQ ID NO: 34816 - protein, 9 aa, Artificial Sequence
  Description of Artificial Sequence: Synthetic peptide
  Seed: FERATIMAA
FARATIMAV

SEQ ID NO: 34817 - protein, 9 aa, Artificial Sequence
  Description of Artificial Sequence: Synthetic peptide
  Seed: FERATIMAA
FRRATIMAH

SEQ ID NO: 34818 - protein, 10 aa, Artificial Sequence
  Description of Artificial Sequence: Synthetic peptide
  Seed: FEKSTVMAAF
FGKSTVMAAM

SEQ ID NO: 34819 - protein, 10 aa, Artificial Sequence
  Description of Artificial Sequence: Synthetic peptide
  Seed: FEKSTVMAAF
FGKSTVMAAL

SEQ ID NO: 34820 - protein, 10 aa, Artificial Sequence
  Description of Artificial Sequence: Synthetic peptide
  Seed: FEKSTVMAAF
FEKSTVMAAV

SEQ ID NO: 34821 - protein, 9 aa, Artificial Sequence
  Description of Artificial Sequence: Synthetic peptide
  Seed: FEKSTVMAA
FDKSTVMAL

SEQ ID NO: 34822 - protein, 9 aa, Artificial Sequence
  Description of Artificial Sequence: Synthetic peptide
  Seed: FEKEGYSLV
FEKEGYSLA

SEQ ID NO: 34823 - protein, 9 aa, Artificial Sequence
  Description of Artificial Sequence: Synthetic peptide
  Seed: FEKEGYSLV
FEKEGYSLI

SEQ ID NO: 34824 - protein, 9 aa, Artificial Sequence
  Description of Artificial Sequence: Synthetic peptide
  Seed: FEKEGYSLV
FEKEGYSLL

SEQ ID NO: 34825 - protein, 9 aa, Artificial Sequence
  Description of Artificial Sequence: Synthetic peptide
  Seed: FEKEGYSLV
FEKEGYSLM

SEQ ID NO: 34826 - protein, 9 aa, Artificial Sequence
  Description of Artificial Sequence: Synthetic peptide
  Seed: FEKEGYSLV
FEKEGYSLF

SEQ ID NO: 34827 - protein, 9 aa, Artificial Sequence
  Description of Artificial Sequence: Synthetic peptide
  Seed: FEKEGYSLV
FEKEGYSLP

SEQ ID NO: 34828 - protein, 9 aa, Artificial Sequence
  Description of Artificial Sequence: Synthetic peptide
  Seed: FEKEGYSLV
FEKEGYSLS

SEQ ID NO: 34829 - protein, 9 aa, Artificial Sequence
  Description of Artificial Sequence: Synthetic peptide
  Seed: FEKEGYSLV
FEKEGYSLT

SEQ ID NO: 34830 - protein, 9 aa, Artificial Sequence
  Description of Artificial Sequence: Synthetic peptide
  Seed: FEKSTVMAA
FDKSTVMAI

SEQ ID NO: 34831 - protein, 9 aa, Artificial Sequence
  Description of Artificial Sequence: Synthetic peptide
  Seed: FEKSTVMAA
FDKSTVMAM

SEQ ID NO: 34832 - protein, 10 aa, Artificial Sequence
  Description of Artificial Sequence: Synthetic peptide
  Seed: FEKSTVMAAF
FEKSTVMAAY

SEQ ID NO: 34833 - protein, 9 aa, Artificial Sequence
  Description of Artificial Sequence: Synthetic peptide
  Seed: FEKSTVMAA
FDKSTVMAF

SEQ ID NO: 34834 - protein, 9 aa, Artificial Sequence
  Description of Artificial Sequence: Synthetic peptide
  Seed: FEKSTVMAA
FDKSTVMAY

SEQ ID NO: 34835 - protein, 9 aa, Artificial Sequence
  Description of Artificial Sequence: Synthetic peptide
  Seed: FEKSTVMAA
FQKSTVMAA

SEQ ID NO: 34836 - protein, 9 aa, Artificial Sequence
  Description of Artificial Sequence: Synthetic peptide
  Seed: FEKSTVMAA
FQKSTVMAL

SEQ ID NO: 34837 - protein, 9 aa, Artificial Sequence
  Description of Artificial Sequence: Synthetic peptide
  Seed: FEKSTVMAA
FQKSTVMAF

SEQ ID NO: 34838 - protein, 9 aa, Artificial Sequence
  Description of Artificial Sequence: Synthetic peptide
  Seed: FEKSTVMAA
FQKSTVMAY

SEQ ID NO: 34839 - protein, 9 aa, Artificial Sequence
  Description of Artificial Sequence: Synthetic peptide
  Seed: FEKSTVMAA
FEKSTVMAC

SEQ ID NO: 34840 - protein, 9 aa, Artificial Sequence
  Description of Artificial Sequence: Synthetic peptide
  Seed: FEKSTVMAA
FEKSTVMAG

SEQ ID NO: 34841 - protein, 9 aa, Artificial Sequence
  Description of Artificial Sequence: Synthetic peptide
  Seed: FEKSTVMAA
FEKSTVMAH

SEQ ID NO: 34842 - protein, 9 aa, Artificial Sequence
  Description of Artificial Sequence: Synthetic peptide
  Seed: FEKEGYSLV
FDKEGYSLL

SEQ ID NO: 34843 - protein, 8 aa, Artificial Sequence
  Description of Artificial Sequence: Synthetic peptide
  Seed: FEKEGYSL
FEKEGYSV

SEQ ID NO: 34844 - protein, 8 aa, Artificial Sequence
  Description of Artificial Sequence: Synthetic peptide
  Seed: FEKEGYSL
FEKEGYSY

SEQ ID NO: 34845 - protein, 8 aa, Artificial Sequence
  Description of Artificial Sequence: Synthetic peptide
  Seed: FEKEGYSL
FEKEGYSF

SEQ ID NO: 34846 - protein, 11 aa, Artificial Sequence
  Description of Artificial Sequence: Synthetic peptide
  Seed: FEDLRVSSFIR
FCDLRVSSFIR

SEQ ID NO: 34847 - protein, 11 aa, Artificial Sequence
  Description of Artificial Sequence: Synthetic peptide
  Seed: FEDLRVSSFIR
FQDLRVSSFIR

SEQ ID NO: 34848 - protein, 11 aa, Artificial Sequence
  Description of Artificial Sequence: Synthetic peptide
  Seed: FEDLRVSSFIR
FGDLRVSSFIR

SEQ ID NO: 34849 - protein, 11 aa, Artificial Sequence
  Description of Artificial Sequence: Synthetic peptide
  Seed: FEDLRVSSFIR
FHDLRVSSFIR

SEQ ID NO: 34850 - protein, 11 aa, Artificial Sequence
  Description of Artificial Sequence: Synthetic peptide
  Seed: FEDLRVSSFIR
FIDLRVSSFIR

SEQ ID NO: 34851 - protein, 11 aa, Artificial Sequence
  Description of Artificial Sequence: Synthetic peptide
  Seed: FEDLRVSSFIR
FLDLRVSSFIR

SEQ ID NO: 34852 - protein, 11 aa, Artificial Sequence
  Description of Artificial Sequence: Synthetic peptide
  Seed: FEDLRVSSFIR
FKDLRVSSFIR

SEQ ID NO: 34853 - protein, 11 aa, Artificial Sequence
  Description of Artificial Sequence: Synthetic peptide
  Seed: FEDLRVSSFIR
FMDLRVSSFIR

SEQ ID NO: 34854 - protein, 11 aa, Artificial Sequence
  Description of Artificial Sequence: Synthetic peptide
  Seed: FEDLRVSSFIR
FMDLRVSSFIK

SEQ ID NO: 34855 - protein, 11 aa, Artificial Sequence
  Description of Artificial Sequence: Synthetic peptide
  Seed: FEDLRVSSFIR
FFDLRVSSFIR

SEQ ID NO: 34856 - protein, 11 aa, Artificial Sequence
  Description of Artificial Sequence: Synthetic peptide
  Seed: FEDLRVSSFIR
FFDLRVSSFIK

SEQ ID NO: 34857 - protein, 11 aa, Artificial Sequence
  Description of Artificial Sequence: Synthetic peptide
  Seed: FEDLRVSSFIR
FPDLRVSSFIR

SEQ ID NO: 34858 - protein, 11 aa, Artificial Sequence
  Description of Artificial Sequence: Synthetic peptide
  Seed: FEDLRVSSFIR
FSDLRVSSFIR

SEQ ID NO: 34859 - protein, 11 aa, Artificial Sequence
  Description of Artificial Sequence: Synthetic peptide
  Seed: FEDLRVSSFIR
FTDLRVSSFIR

SEQ ID NO: 34860 - protein, 11 aa, Artificial Sequence
  Description of Artificial Sequence: Synthetic peptide
  Seed: FEDLRVSSFIR
FWDLRVSSFIR

SEQ ID NO: 34861 - protein, 11 aa, Artificial Sequence
  Description of Artificial Sequence: Synthetic peptide
  Seed: FEDLRVSSFIR
FYDLRVSSFIR

SEQ ID NO: 34862 - protein, 11 aa, Artificial Sequence
  Description of Artificial Sequence: Synthetic peptide
  Seed: FEDLRVSSFIR
FVDLRVSSFIR

SEQ ID NO: 34863 - protein, 8 aa, Artificial Sequence
  Description of Artificial Sequence: Synthetic peptide
  Seed: FEKEGYSL
FEKEGYSI

SEQ ID NO: 34864 - protein, 8 aa, Artificial Sequence
  Description of Artificial Sequence: Synthetic peptide
  Seed: FEKEGYSL
FEKEGYSM

SEQ ID NO: 34865 - protein, 9 aa, Artificial Sequence
  Description of Artificial Sequence: Synthetic peptide
  Seed: FEKSTVMAA
FEKSTVMAI

SEQ ID NO: 34866 - protein, 9 aa, Artificial Sequence
  Description of Artificial Sequence: Synthetic peptide
  Seed: FEKSTVMAA
FEKSTVMAL

SEQ ID NO: 34867 - protein, 9 aa, Artificial Sequence
  Description of Artificial Sequence: Synthetic peptide
  Seed: FEKSTVMAA
FEKSTVMAM

SEQ ID NO: 34868 - protein, 10 aa, Artificial Sequence
  Description of Artificial Sequence: Synthetic peptide
  Seed: FEKSTVMAAF
FDKSTVMAAM

SEQ ID NO: 34869 - protein, 10 aa, Artificial Sequence
  Description of Artificial Sequence: Synthetic peptide
  Seed: FEKSTVMAAF
FDKSTVMAAY

SEQ ID NO: 34870 - protein, 10 aa, Artificial Sequence
  Description of Artificial Sequence: Synthetic peptide
  Seed: FEKSTVMAAF
FCKSTVMAAL

SEQ ID NO: 34871 - protein, 10 aa, Artificial Sequence
  Description of Artificial Sequence: Synthetic peptide
  Seed: FEKSTVMAAF
FCKSTVMAAM

SEQ ID NO: 34872 - protein, 10 aa, Artificial Sequence
  Description of Artificial Sequence: Synthetic peptide
  Seed: FEKSTVMAAF
FCKSTVMAAF

SEQ ID NO: 34873 - protein, 10 aa, Artificial Sequence
  Description of Artificial Sequence: Synthetic peptide
  Seed: FEKSTVMAAF
FCKSTVMAAY

SEQ ID NO: 34874 - protein, 10 aa, Artificial Sequence
  Description of Artificial Sequence: Synthetic peptide
  Seed: FEKSTVMAAF
FQKSTVMAAA

SEQ ID NO: 34875 - protein, 10 aa, Artificial Sequence
  Description of Artificial Sequence: Synthetic peptide
  Seed: FEKSTVMAAF
FQKSTVMAAH

SEQ ID NO: 34876 - protein, 10 aa, Artificial Sequence
  Description of Artificial Sequence: Synthetic peptide
  Seed: FEKSTVMAAF
FQKSTVMAAI

SEQ ID NO: 34877 - protein, 10 aa, Artificial Sequence
  Description of Artificial Sequence: Synthetic peptide
  Seed: FEKSTVMAAF
FQKSTVMAAL

SEQ ID NO: 34878 - protein, 10 aa, Artificial Sequence
  Description of Artificial Sequence: Synthetic peptide
  Seed: FEKSTVMAAF
FQKSTVMAAM

SEQ ID NO: 34879 - protein, 10 aa, Artificial Sequence
  Description of Artificial Sequence: Synthetic peptide
  Seed: FEKSTVMAAF
FQKSTVMAAF

SEQ ID NO: 34880 - protein, 10 aa, Artificial Sequence
  Description of Artificial Sequence: Synthetic peptide
  Seed: FEKSTVMAAF
FQKSTVMAAW

SEQ ID NO: 34881 - protein, 10 aa, Artificial Sequence
  Description of Artificial Sequence: Synthetic peptide
  Seed: FEKSTVMAAF
FQKSTVMAAY

SEQ ID NO: 34882 - protein, 10 aa, Artificial Sequence
  Description of Artificial Sequence: Synthetic peptide
  Seed: FEKSTVMAAF
FQKSTVMAAV

SEQ ID NO: 34883 - protein, 10 aa, Artificial Sequence
  Description of Artificial Sequence: Synthetic peptide
  Seed: FEKSTVMAAF
FEKSTVMAAA

SEQ ID NO: 34884 - protein, 10 aa, Artificial Sequence
  Description of Artificial Sequence: Synthetic peptide
  Seed: FEKSTVMAAF
FEKSTVMAAI

SEQ ID NO: 34885 - protein, 10 aa, Artificial Sequence
  Description of Artificial Sequence: Synthetic peptide
  Seed: FEKSTVMAAF
FEKSTVMAAL

SEQ ID NO: 34886 - protein, 10 aa, Artificial Sequence
  Description of Artificial Sequence: Synthetic peptide
  Seed: FEKSTVMAAF
FEKSTVMAAM

SEQ ID NO: 34887 - protein, 10 aa, Artificial Sequence
  Description of Artificial Sequence: Synthetic peptide
  Seed: FEKSTVMAAF
FEKSTVMAAW

SEQ ID NO: 34888 - protein, 10 aa, Artificial Sequence
  Description of Artificial Sequence: Synthetic peptide
  Seed: FEKSTVMAAF
FDKSTVMAAL

SEQ ID NO: 34889 - protein, 9 aa, Artificial Sequence
  Description of Artificial Sequence: Synthetic peptide
  Seed: FEKSTVMAA
FEKSTVMAF

SEQ ID NO: 34890 - protein, 10 aa, Artificial Sequence
  Description of Artificial Sequence: Synthetic peptide
  Seed: FEKSTVMAAF
FNKSTVMAAY

SEQ ID NO: 34891 - protein, 9 aa, Artificial Sequence
  Description of Artificial Sequence: Synthetic peptide
  Seed: FEKSTVMAA
FEKSTVMAP

SEQ ID NO: 34892 - protein, 9 aa, Artificial Sequence
  Description of Artificial Sequence: Synthetic peptide
  Seed: FEKSTVMAA
FEKSTVMAS

SEQ ID NO: 34893 - protein, 9 aa, Artificial Sequence
  Description of Artificial Sequence: Synthetic peptide
  Seed: FEKSTVMAA
FEKSTVMAT

SEQ ID NO: 34894 - protein, 9 aa, Artificial Sequence
  Description of Artificial Sequence: Synthetic peptide
  Seed: FEKSTVMAA
FEKSTVMAW

SEQ ID NO: 34895 - protein, 9 aa, Artificial Sequence
  Description of Artificial Sequence: Synthetic peptide
  Seed: FEKSTVMAA
FEKSTVMAY

SEQ ID NO: 34896 - protein, 9 aa, Artificial Sequence
  Description of Artificial Sequence: Synthetic peptide
  Seed: FEKSTVMAA
FEKSTVMAV

SEQ ID NO: 34897 - protein, 9 aa, Artificial Sequence
  Description of Artificial Sequence: Synthetic peptide
  Seed: FEKSTVMAA
FPKSTVMAF

SEQ ID NO: 34898 - protein, 9 aa, Artificial Sequence
  Description of Artificial Sequence: Synthetic peptide
  Seed: FEKSTVMAA
FPKSTVMAY

SEQ ID NO: 34899 - protein, 10 aa, Artificial Sequence
  Description of Artificial Sequence: Synthetic peptide
  Seed: FEKSTVMAAF
FAKSTVMAAL

SEQ ID NO: 34900 - protein, 10 aa, Artificial Sequence
  Description of Artificial Sequence: Synthetic peptide
  Seed: FEKSTVMAAF
FAKSTVMAAM

SEQ ID NO: 34901 - protein, 10 aa, Artificial Sequence
  Description of Artificial Sequence: Synthetic peptide
  Seed: FEKSTVMAAF
FAKSTVMAAF

SEQ ID NO: 34902 - protein, 10 aa, Artificial Sequence
  Description of Artificial Sequence: Synthetic peptide
  Seed: FEKSTVMAAF
FAKSTVMAAY

SEQ ID NO: 34903 - protein, 10 aa, Artificial Sequence
  Description of Artificial Sequence: Synthetic peptide
  Seed: FEKSTVMAAF
FRKSTVMAAL

SEQ ID NO: 34904 - protein, 10 aa, Artificial Sequence
  Description of Artificial Sequence: Synthetic peptide
  Seed: FEKSTVMAAF
FRKSTVMAAM

SEQ ID NO: 34905 - protein, 10 aa, Artificial Sequence
  Description of Artificial Sequence: Synthetic peptide
  Seed: FEKSTVMAAF
FRKSTVMAAF

SEQ ID NO: 34906 - protein, 10 aa, Artificial Sequence
  Description of Artificial Sequence: Synthetic peptide
  Seed: FEKSTVMAAF
FRKSTVMAAY

SEQ ID NO: 34907 - protein, 10 aa, Artificial Sequence
  Description of Artificial Sequence: Synthetic peptide
  Seed: FEKSTVMAAF
FNKSTVMAAL

SEQ ID NO: 34908 - protein, 10 aa, Artificial Sequence
  Description of Artificial Sequence: Synthetic peptide
  Seed: FEKSTVMAAF
FNKSTVMAAM

SEQ ID NO: 34909 - protein, 10 aa, Artificial Sequence
  Description of Artificial Sequence: Synthetic peptide
  Seed: FEKSTVMAAF
FNKSTVMAAF

SEQ ID NO: 34910 - protein, 10 aa, Artificial Sequence
  Description of Artificial Sequence: Synthetic peptide
  Seed: FDMSNEGSYF
FTMSNEGSYF

SEQ ID NO: 34911 - protein, 10 aa, Artificial Sequence
  Description of Artificial Sequence: Synthetic peptide
  Seed: FDMSNEGSYF
FTMSNEGSYL

SEQ ID NO: 34912 - protein, 10 aa, Artificial Sequence
  Description of Artificial Sequence: Synthetic peptide
  Seed: EVSFQGRGVF
EYSFQGRGVM

SEQ ID NO: 34913 - protein, 10 aa, Artificial Sequence
  Description of Artificial Sequence: Synthetic peptide
  Seed: FDMNNEGSYF
FLMNNEGSYM

SEQ ID NO: 34914 - protein, 10 aa, Artificial Sequence
  Description of Artificial Sequence: Synthetic peptide
  Seed: FDMNNEGSYF
FIMNNEGSYL

SEQ ID NO: 34915 - protein, 10 aa, Artificial Sequence
  Description of Artificial Sequence: Synthetic peptide
  Seed: FDMNNEGSYF
FIMNNEGSYM

SEQ ID NO: 34916 - protein, 10 aa, Artificial Sequence
  Description of Artificial Sequence: Synthetic peptide
  Seed: FDMNNEGSYF
FIMNNEGSYF

SEQ ID NO: 34917 - protein, 10 aa, Artificial Sequence
  Description of Artificial Sequence: Synthetic peptide
  Seed: FDMNNEGSYF
FIMNNEGSYW

SEQ ID NO: 34918 - protein, 10 aa, Artificial Sequence
  Description of Artificial Sequence: Synthetic peptide
  Seed: FDMNNEGSYF
FIMNNEGSYY

SEQ ID NO: 34919 - protein, 10 aa, Artificial Sequence
  Description of Artificial Sequence: Synthetic peptide
  Seed: FDMNNEGSYF
FLMNNEGSYA

SEQ ID NO: 34920 - protein, 10 aa, Artificial Sequence
  Description of Artificial Sequence: Synthetic peptide
  Seed: FDMNNEGSYF
FLMNNEGSYH

SEQ ID NO: 34921 - protein, 10 aa, Artificial Sequence
  Description of Artificial Sequence: Synthetic peptide
  Seed: FDMNNEGSYF
FLMNNEGSYI

SEQ ID NO: 34922 - protein, 10 aa, Artificial Sequence
  Description of Artificial Sequence: Synthetic peptide
  Seed: FDMNNEGSYF
FLMNNEGSYL

SEQ ID NO: 34923 - protein, 10 aa, Artificial Sequence
  Description of Artificial Sequence: Synthetic peptide
  Seed: FDMNNEGSYF
FLMNNEGSYF

SEQ ID NO: 34924 - protein, 10 aa, Artificial Sequence
  Description of Artificial Sequence: Synthetic peptide
  Seed: FDMNNEGSYF
FKMNNEGSYH

SEQ ID NO: 34925 - protein, 10 aa, Artificial Sequence
  Description of Artificial Sequence: Synthetic peptide
  Seed: FDMNNEGSYF
FLMNNEGSYW

SEQ ID NO: 34926 - protein, 10 aa, Artificial Sequence
  Description of Artificial Sequence: Synthetic peptide
  Seed: FDMNNEGSYF
FLMNNEGSYY

SEQ ID NO: 34927 - protein, 10 aa, Artificial Sequence
  Description of Artificial Sequence: Synthetic peptide
  Seed: FDMNNEGSYF
FLMNNEGSYV

SEQ ID NO: 34928 - protein, 10 aa, Artificial Sequence
  Description of Artificial Sequence: Synthetic peptide
  Seed: FDMNNEGSYF
FKMNNEGSYA

SEQ ID NO: 34929 - protein, 10 aa, Artificial Sequence
  Description of Artificial Sequence: Synthetic peptide
  Seed: FDMNNEGSYF
FKMNNEGSYR

SEQ ID NO: 34930 - protein, 10 aa, Artificial Sequence
  Description of Artificial Sequence: Synthetic peptide
  Seed: FDMNNEGSYF
FKMNNEGSYN

SEQ ID NO: 34931 - protein, 10 aa, Artificial Sequence
  Description of Artificial Sequence: Synthetic peptide
  Seed: FDMNNEGSYF
FKMNNEGSYC

SEQ ID NO: 34932 - protein, 10 aa, Artificial Sequence
  Description of Artificial Sequence: Synthetic peptide
  Seed: FDMNNEGSYF
FKMNNEGSYQ

SEQ ID NO: 34933 - protein, 10 aa, Artificial Sequence
  Description of Artificial Sequence: Synthetic peptide
  Seed: FDMNNEGSYF
FKMNNEGSYE

SEQ ID NO: 34934 - protein, 10 aa, Artificial Sequence
  Description of Artificial Sequence: Synthetic peptide
  Seed: FDMNNEGSYF
FHMNNEGSYY

SEQ ID NO: 34935 - protein, 10 aa, Artificial Sequence
  Description of Artificial Sequence: Synthetic peptide
  Seed: FDMNNEGSYF
FHMNNEGSYW

SEQ ID NO: 34936 - protein, 10 aa, Artificial Sequence
  Description of Artificial Sequence: Synthetic peptide
  Seed: FDMNNEGSYF
FHMNNEGSYF

SEQ ID NO: 34937 - protein, 10 aa, Artificial Sequence
  Description of Artificial Sequence: Synthetic peptide
  Seed: FDMNNEGSYF
FHMNNEGSYM

SEQ ID NO: 34938 - protein, 10 aa, Artificial Sequence
  Description of Artificial Sequence: Synthetic peptide
  Seed: FDMNNEGSYF
FQMNNEGSYF

SEQ ID NO: 34939 - protein, 10 aa, Artificial Sequence
  Description of Artificial Sequence: Synthetic peptide
  Seed: FDMNNEGSYF
FQMNNEGSYP

SEQ ID NO: 34940 - protein, 10 aa, Artificial Sequence
  Description of Artificial Sequence: Synthetic peptide
  Seed: FDMNNEGSYF
FQMNNEGSYS

SEQ ID NO: 34941 - protein, 10 aa, Artificial Sequence
  Description of Artificial Sequence: Synthetic peptide
  Seed: FDMNNEGSYF
FQMNNEGSYT

SEQ ID NO: 34942 - protein, 10 aa, Artificial Sequence
  Description of Artificial Sequence: Synthetic peptide
  Seed: FDMNNEGSYF
FQMNNEGSYW

SEQ ID NO: 34943 - protein, 10 aa, Artificial Sequence
  Description of Artificial Sequence: Synthetic peptide
  Seed: FDMNNEGSYF
FQMNNEGSYY

SEQ ID NO: 34944 - protein, 10 aa, Artificial Sequence
  Description of Artificial Sequence: Synthetic peptide
  Seed: FDMNNEGSYF
FQMNNEGSYV

SEQ ID NO: 34945 - protein, 10 aa, Artificial Sequence
  Description of Artificial Sequence: Synthetic peptide
  Seed: FDMNNEGSYF
FEMNNEGSYL

SEQ ID NO: 34946 - protein, 10 aa, Artificial Sequence
  Description of Artificial Sequence: Synthetic peptide
  Seed: FDMNNEGSYF
FEMNNEGSYM

SEQ ID NO: 34947 - protein, 10 aa, Artificial Sequence
  Description of Artificial Sequence: Synthetic peptide
  Seed: FDMNNEGSYF
FEMNNEGSYF

SEQ ID NO: 34948 - protein, 10 aa, Artificial Sequence
  Description of Artificial Sequence: Synthetic peptide
  Seed: FDMNNEGSYF
FEMNNEGSYW

SEQ ID NO: 34949 - protein, 10 aa, Artificial Sequence
  Description of Artificial Sequence: Synthetic peptide
  Seed: FDMNNEGSYF
FEMNNEGSYY

SEQ ID NO: 34950 - protein, 10 aa, Artificial Sequence
  Description of Artificial Sequence: Synthetic peptide
  Seed: FDMNNEGSYF
FGMNNEGSYM

SEQ ID NO: 34951 - protein, 10 aa, Artificial Sequence
  Description of Artificial Sequence: Synthetic peptide
  Seed: FDMNNEGSYF
FGMNNEGSYF

SEQ ID NO: 34952 - protein, 10 aa, Artificial Sequence
  Description of Artificial Sequence: Synthetic peptide
  Seed: FDMNNEGSYF
FGMNNEGSYW

SEQ ID NO: 34953 - protein, 10 aa, Artificial Sequence
  Description of Artificial Sequence: Synthetic peptide
  Seed: FDMNNEGSYF
FGMNNEGSYY

SEQ ID NO: 34954 - protein, 10 aa, Artificial Sequence
  Description of Artificial Sequence: Synthetic peptide
  Seed: FDMNNEGSYF
FHMNNEGSYH

SEQ ID NO: 34955 - protein, 10 aa, Artificial Sequence
  Description of Artificial Sequence: Synthetic peptide
  Seed: FDMNNEGSYF
FHMNNEGSYI

SEQ ID NO: 34956 - protein, 10 aa, Artificial Sequence
  Description of Artificial Sequence: Synthetic peptide
  Seed: FDMNNEGSYF
FHMNNEGSYL

SEQ ID NO: 34957 - protein, 10 aa, Artificial Sequence
  Description of Artificial Sequence: Synthetic peptide
  Seed: FDMNNEGSYF
FKMNNEGSYG

SEQ ID NO: 34958 - protein, 10 aa, Artificial Sequence
  Description of Artificial Sequence: Synthetic peptide
  Seed: FDMNNEGSYF
FKMNNEGSYI

SEQ ID NO: 34959 - protein, 10 aa, Artificial Sequence
  Description of Artificial Sequence: Synthetic peptide
  Seed: FDMNNEGSYF
FSMNNEGSYY

SEQ ID NO: 34960 - protein, 10 aa, Artificial Sequence
  Description of Artificial Sequence: Synthetic peptide
  Seed: FDMNNEGSYF
FFMNNEGSYY

SEQ ID NO: 34961 - protein, 10 aa, Artificial Sequence
  Description of Artificial Sequence: Synthetic peptide
  Seed: FDMNNEGSYF
FMMNNEGSYP

SEQ ID NO: 34962 - protein, 10 aa, Artificial Sequence
  Description of Artificial Sequence: Synthetic peptide
  Seed: FDMNNEGSYF
FMMNNEGSYS

SEQ ID NO: 34963 - protein, 10 aa, Artificial Sequence
  Description of Artificial Sequence: Synthetic peptide
  Seed: FDMNNEGSYF
FMMNNEGSYT

SEQ ID NO: 34964 - protein, 10 aa, Artificial Sequence
  Description of Artificial Sequence: Synthetic peptide
  Seed: FDMNNEGSYF
FMMNNEGSYW

SEQ ID NO: 34965 - protein, 10 aa, Artificial Sequence
  Description of Artificial Sequence: Synthetic peptide
  Seed: FDMNNEGSYF
FMMNNEGSYY

SEQ ID NO: 34966 - protein, 10 aa, Artificial Sequence
  Description of Artificial Sequence: Synthetic peptide
  Seed: FDMNNEGSYF
FMMNNEGSYV

SEQ ID NO: 34967 - protein, 10 aa, Artificial Sequence
  Description of Artificial Sequence: Synthetic peptide
  Seed: FDMNNEGSYF
FFMNNEGSYM

SEQ ID NO: 34968 - protein, 10 aa, Artificial Sequence
  Description of Artificial Sequence: Synthetic peptide
  Seed: FDMNNEGSYF
FFMNNEGSYF

SEQ ID NO: 34969 - protein, 10 aa, Artificial Sequence
  Description of Artificial Sequence: Synthetic peptide
  Seed: FDMNNEGSYF
FFMNNEGSYW

SEQ ID NO: 34970 - protein, 10 aa, Artificial Sequence
  Description of Artificial Sequence: Synthetic peptide
  Seed: FDMNNEGSYF
FPMNNEGSYM

SEQ ID NO: 34971 - protein, 10 aa, Artificial Sequence
  Description of Artificial Sequence: Synthetic peptide
  Seed: FDMNNEGSYF
FKMNNEGSYL

SEQ ID NO: 34972 - protein, 10 aa, Artificial Sequence
  Description of Artificial Sequence: Synthetic peptide
  Seed: FDMNNEGSYF
FPMNNEGSYF

SEQ ID NO: 34973 - protein, 10 aa, Artificial Sequence
  Description of Artificial Sequence: Synthetic peptide
  Seed: FDMNNEGSYF
FPMNNEGSYW

SEQ ID NO: 34974 - protein, 10 aa, Artificial Sequence
  Description of Artificial Sequence: Synthetic peptide
  Seed: FDMNNEGSYF
FPMNNEGSYY

SEQ ID NO: 34975 - protein, 10 aa, Artificial Sequence
  Description of Artificial Sequence: Synthetic peptide
  Seed: FDMNNEGSYF
FSMNNEGSYA

SEQ ID NO: 34976 - protein, 10 aa, Artificial Sequence
  Description of Artificial Sequence: Synthetic peptide
  Seed: FDMNNEGSYF
FSMNNEGSYH

SEQ ID NO: 34977 - protein, 10 aa, Artificial Sequence
  Description of Artificial Sequence: Synthetic peptide
  Seed: FDMNNEGSYF
FSMNNEGSYI

SEQ ID NO: 34978 - protein, 10 aa, Artificial Sequence
  Description of Artificial Sequence: Synthetic peptide
  Seed: FDMNNEGSYF
FSMNNEGSYL

SEQ ID NO: 34979 - protein, 10 aa, Artificial Sequence
  Description of Artificial Sequence: Synthetic peptide
  Seed: FDMNNEGSYF
FSMNNEGSYM

SEQ ID NO: 34980 - protein, 10 aa, Artificial Sequence
  Description of Artificial Sequence: Synthetic peptide
  Seed: FDMNNEGSYF
FSMNNEGSYF

SEQ ID NO: 34981 - protein, 10 aa, Artificial Sequence
  Description of Artificial Sequence: Synthetic peptide
  Seed: FDMNNEGSYF
FMMNNEGSYF

SEQ ID NO: 34982 - protein, 10 aa, Artificial Sequence
  Description of Artificial Sequence: Synthetic peptide
  Seed: FDMNNEGSYF
FMMNNEGSYM

SEQ ID NO: 34983 - protein, 10 aa, Artificial Sequence
  Description of Artificial Sequence: Synthetic peptide
  Seed: FDMNNEGSYF
FMMNNEGSYK

SEQ ID NO: 34984 - protein, 10 aa, Artificial Sequence
  Description of Artificial Sequence: Synthetic peptide
  Seed: FDMNNEGSYF
FMMNNEGSYL

SEQ ID NO: 34985 - protein, 10 aa, Artificial Sequence
  Description of Artificial Sequence: Synthetic peptide
  Seed: FDMNNEGSYF
FKMNNEGSYK

SEQ ID NO: 34986 - protein, 10 aa, Artificial Sequence
  Description of Artificial Sequence: Synthetic peptide
  Seed: FDMNNEGSYF
FKMNNEGSYM

SEQ ID NO: 34987 - protein, 10 aa, Artificial Sequence
  Description of Artificial Sequence: Synthetic peptide
  Seed: FDMNNEGSYF
FKMNNEGSYF

SEQ ID NO: 34988 - protein, 10 aa, Artificial Sequence
  Description of Artificial Sequence: Synthetic peptide
  Seed: FDMNNEGSYF
FKMNNEGSYP

SEQ ID NO: 34989 - protein, 10 aa, Artificial Sequence
  Description of Artificial Sequence: Synthetic peptide
  Seed: FDMNNEGSYF
FKMNNEGSYS

SEQ ID NO: 34990 - protein, 10 aa, Artificial Sequence
  Description of Artificial Sequence: Synthetic peptide
  Seed: FDMNNEGSYF
FKMNNEGSYT

SEQ ID NO: 34991 - protein, 10 aa, Artificial Sequence
  Description of Artificial Sequence: Synthetic peptide
  Seed: FDMNNEGSYF
FKMNNEGSYW

SEQ ID NO: 34992 - protein, 10 aa, Artificial Sequence
  Description of Artificial Sequence: Synthetic peptide
  Seed: FDMNNEGSYF
FKMNNEGSYY

SEQ ID NO: 34993 - protein, 10 aa, Artificial Sequence
  Description of Artificial Sequence: Synthetic peptide
  Seed: FDMNNEGSYF
FKMNNEGSYV

SEQ ID NO: 34994 - protein, 10 aa, Artificial Sequence
  Description of Artificial Sequence: Synthetic peptide
  Seed: FDMNNEGSYF
FMMNNEGSYA

SEQ ID NO: 34995 - protein, 10 aa, Artificial Sequence
  Description of Artificial Sequence: Synthetic peptide
  Seed: FDMNNEGSYF
FMMNNEGSYR

SEQ ID NO: 34996 - protein, 10 aa, Artificial Sequence
  Description of Artificial Sequence: Synthetic peptide
  Seed: FDMNNEGSYF
FMMNNEGSYN

SEQ ID NO: 34997 - protein, 10 aa, Artificial Sequence
  Description of Artificial Sequence: Synthetic peptide
  Seed: FDMNNEGSYF
FMMNNEGSYD

SEQ ID NO: 34998 - protein, 10 aa, Artificial Sequence
  Description of Artificial Sequence: Synthetic peptide
  Seed: FDMNNEGSYF
FMMNNEGSYC

SEQ ID NO: 34999 - protein, 10 aa, Artificial Sequence
  Description of Artificial Sequence: Synthetic peptide
  Seed: FDMNNEGSYF
FMMNNEGSYQ

SEQ ID NO: 35000 - protein, 10 aa, Artificial Sequence
  Description of Artificial Sequence: Synthetic peptide
  Seed: FDMNNEGSYF
FMMNNEGSYE

SEQ ID NO: 35001 - protein, 10 aa, Artificial Sequence
  Description of Artificial Sequence: Synthetic peptide
  Seed: FDMNNEGSYF
FMMNNEGSYG

SEQ ID NO: 35002 - protein, 10 aa, Artificial Sequence
  Description of Artificial Sequence: Synthetic peptide
  Seed: FDMNNEGSYF
FMMNNEGSYH

SEQ ID NO: 35003 - protein, 10 aa, Artificial Sequence
  Description of Artificial Sequence: Synthetic peptide
  Seed: FDMNNEGSYF
FMMNNEGSYI

SEQ ID NO: 35004 - protein, 10 aa, Artificial Sequence
  Description of Artificial Sequence: Synthetic peptide
  Seed: FDMNNEGSYF
FQMNNEGSYM

SEQ ID NO: 35005 - protein, 10 aa, Artificial Sequence
  Description of Artificial Sequence: Synthetic peptide
  Seed: FDMNNEGSYF
FQMNNEGSYK

SEQ ID NO: 35006 - protein, 10 aa, Artificial Sequence
  Description of Artificial Sequence: Synthetic peptide
  Seed: FDMNNEGSYF
FQMNNEGSYL

SEQ ID NO: 35007 - protein, 10 aa, Artificial Sequence
  Description of Artificial Sequence: Synthetic peptide
  Seed: EVSFRGRGVF
EFSFRGRGVW

SEQ ID NO: 35008 - protein, 10 aa, Artificial Sequence
  Description of Artificial Sequence: Synthetic peptide
  Seed: EVSFRGRGVF
ELSFRGRGVW

SEQ ID NO: 35009 - protein, 10 aa, Artificial Sequence
  Description of Artificial Sequence: Synthetic peptide
  Seed: EVSFRGRGVF
ELSFRGRGVY

SEQ ID NO: 35010 - protein, 10 aa, Artificial Sequence
  Description of Artificial Sequence: Synthetic peptide
  Seed: EVSFRGRGVF
EKSFRGRGVF

SEQ ID NO: 35011 - protein, 10 aa, Artificial Sequence
  Description of Artificial Sequence: Synthetic peptide
  Seed: EVSFRGRGVF
EKSFRGRGVW

SEQ ID NO: 35012 - protein, 10 aa, Artificial Sequence
  Description of Artificial Sequence: Synthetic peptide
  Seed: EVSFRGRGVF
EKSFRGRGVY

SEQ ID NO: 35013 - protein, 10 aa, Artificial Sequence
  Description of Artificial Sequence: Synthetic peptide
  Seed: EVSFRGRGVF
EMSFRGRGVW

SEQ ID NO: 35014 - protein, 10 aa, Artificial Sequence
  Description of Artificial Sequence: Synthetic peptide
  Seed: EVSFRGRGVF
EMSFRGRGVY

SEQ ID NO: 35015 - protein, 10 aa, Artificial Sequence
  Description of Artificial Sequence: Synthetic peptide
  Seed: EVSFRGRGVF
EFSFRGRGVF

SEQ ID NO: 35016 - protein, 10 aa, Artificial Sequence
  Description of Artificial Sequence: Synthetic peptide
  Seed: EVSFRGRGVF
EFSFRGRGVY

SEQ ID NO: 35017 - protein, 10 aa, Artificial Sequence
  Description of Artificial Sequence: Synthetic peptide
  Seed: FDMNNEGSYF
FQMNNEGSYI

SEQ ID NO: 35018 - protein, 10 aa, Artificial Sequence
  Description of Artificial Sequence: Synthetic peptide
  Seed: EVSFRGRGVF
ESSFRGRGVF

SEQ ID NO: 35019 - protein, 10 aa, Artificial Sequence
  Description of Artificial Sequence: Synthetic peptide
  Seed: EVSFRGRGVF
ESSFRGRGVW

SEQ ID NO: 35020 - protein, 10 aa, Artificial Sequence
  Description of Artificial Sequence: Synthetic peptide
  Seed: EVSFRGRGVF
ETSFRGRGVW

SEQ ID NO: 35021 - protein, 10 aa, Artificial Sequence
  Description of Artificial Sequence: Synthetic peptide
  Seed: EVSFRGRGVF
EWSFRGRGVW

SEQ ID NO: 35022 - protein, 10 aa, Artificial Sequence
  Description of Artificial Sequence: Synthetic peptide
  Seed: EVSFRGRGVF
EYSFRGRGVF

SEQ ID NO: 35023 - protein, 10 aa, Artificial Sequence
  Description of Artificial Sequence: Synthetic peptide
  Seed: EVSFRGRGVF
EYSFRGRGVW

SEQ ID NO: 35024 - protein, 10 aa, Artificial Sequence
  Description of Artificial Sequence: Synthetic peptide
  Seed: EVSFRGRGVF
EYSFRGRGVY

SEQ ID NO: 35025 - protein, 10 aa, Artificial Sequence
  Description of Artificial Sequence: Synthetic peptide
  Seed: EVSFRGRGVF
EVSFRGRGVW

SEQ ID NO: 35026 - protein, 10 aa, Artificial Sequence
  Description of Artificial Sequence: Synthetic peptide
  Seed: EVSFRGRGVF
EVSFRGRGVY

SEQ ID NO: 35027 - protein, 10 aa, Artificial Sequence
  Description of Artificial Sequence: Synthetic peptide
  Seed: EVSFRGRGVF
ELSFRGRGVF

SEQ ID NO: 35028 - protein, 10 aa, Artificial Sequence
  Description of Artificial Sequence: Synthetic peptide
  Seed: EVSFRGRGVF
EISFRGRGVY

SEQ ID NO: 35029 - protein, 10 aa, Artificial Sequence
  Description of Artificial Sequence: Synthetic peptide
  Seed: EVSFRGRGVF
EISFRGRGVW

SEQ ID NO: 35030 - protein, 10 aa, Artificial Sequence
  Description of Artificial Sequence: Synthetic peptide
  Seed: EVSFRGRGVF
EISFRGRGVF

SEQ ID NO: 35031 - protein, 10 aa, Artificial Sequence
  Description of Artificial Sequence: Synthetic peptide
  Seed: EVSFQGRGVF
EYSFQGRGVF

SEQ ID NO: 35032 - protein, 10 aa, Artificial Sequence
  Description of Artificial Sequence: Synthetic peptide
  Seed: EVSFQGRGVF
EYSFQGRGVW

SEQ ID NO: 35033 - protein, 10 aa, Artificial Sequence
  Description of Artificial Sequence: Synthetic peptide
  Seed: EVSFQGRGVF
EYSFQGRGVY

SEQ ID NO: 35034 - protein, 10 aa, Artificial Sequence
  Description of Artificial Sequence: Synthetic peptide
  Seed: EVSFQGRGVF
EVSFQGRGVW

SEQ ID NO: 35035 - protein, 10 aa, Artificial Sequence
  Description of Artificial Sequence: Synthetic peptide
  Seed: EVSFQGRGVF
EVSFQGRGVY

SEQ ID NO: 35036 - protein, 9 aa, Artificial Sequence
  Description of Artificial Sequence: Synthetic peptide
  Seed: EVSFRGRGV
ETSFRGRGI

SEQ ID NO: 35037 - protein, 9 aa, Artificial Sequence
  Description of Artificial Sequence: Synthetic peptide
  Seed: EVSFRGRGV
ETSFRGRGV

SEQ ID NO: 35038 - protein, 10 aa, Artificial Sequence
  Description of Artificial Sequence: Synthetic peptide
  Seed: EVSFRGRGVF
EASFRGRGVW

SEQ ID NO: 35039 - protein, 10 aa, Artificial Sequence
  Description of Artificial Sequence: Synthetic peptide
  Seed: EVSFRGRGVF
ERSFRGRGVF

SEQ ID NO: 35040 - protein, 10 aa, Artificial Sequence
  Description of Artificial Sequence: Synthetic peptide
  Seed: EVSFRGRGVF
ERSFRGRGVW

SEQ ID NO: 35041 - protein, 10 aa, Artificial Sequence
  Description of Artificial Sequence: Synthetic peptide
  Seed: EVSFRGRGVF
ERSFRGRGVY

SEQ ID NO: 35042 - protein, 10 aa, Artificial Sequence
  Description of Artificial Sequence: Synthetic peptide
  Seed: EVSFRGRGVF
ECSFRGRGVW

SEQ ID NO: 35043 - protein, 10 aa, Artificial Sequence
  Description of Artificial Sequence: Synthetic peptide
  Seed: EVSFRGRGVF
EQSFRGRGVM

SEQ ID NO: 35044 - protein, 10 aa, Artificial Sequence
  Description of Artificial Sequence: Synthetic peptide
  Seed: EVSFRGRGVF
EQSFRGRGVF

SEQ ID NO: 35045 - protein, 10 aa, Artificial Sequence
  Description of Artificial Sequence: Synthetic peptide
  Seed: EVSFRGRGVF
EQSFRGRGVW

SEQ ID NO: 35046 - protein, 10 aa, Artificial Sequence
  Description of Artificial Sequence: Synthetic peptide
  Seed: EVSFRGRGVF
EQSFRGRGVY

SEQ ID NO: 35047 - protein, 10 aa, Artificial Sequence
  Description of Artificial Sequence: Synthetic peptide
  Seed: EVSFRGRGVF
EGSFRGRGVW

SEQ ID NO: 35048 - protein, 10 aa, Artificial Sequence
  Description of Artificial Sequence: Synthetic peptide
  Seed: EVSFRGRGVF
EHSFRGRGVW

SEQ ID NO: 35049 - protein, 10 aa, Artificial Sequence
  Description of Artificial Sequence: Synthetic peptide
  Seed: EVSFRGRGVF
EHSFRGRGVY

SEQ ID NO: 35050 - protein, 10 aa, Artificial Sequence
  Description of Artificial Sequence: Synthetic peptide
  Seed: FDMNNEGSYF
FAMNNEGSYA

SEQ ID NO: 35051 - protein, 10 aa, Artificial Sequence
  Description of Artificial Sequence: Synthetic peptide
  Seed: FDMNNEGSYF
FAMNNEGSYR

SEQ ID NO: 35052 - protein, 10 aa, Artificial Sequence
  Description of Artificial Sequence: Synthetic peptide
  Seed: FDMNNEGSYF
FAMNNEGSYN

SEQ ID NO: 35053 - protein, 10 aa, Artificial Sequence
  Description of Artificial Sequence: Synthetic peptide
  Seed: FDMNNEGSYF
FRMNNEGSYY

SEQ ID NO: 35054 - protein, 10 aa, Artificial Sequence
  Description of Artificial Sequence: Synthetic peptide
  Seed: FDMNNEGSYF
FNMNNEGSYF

SEQ ID NO: 35055 - protein, 10 aa, Artificial Sequence
  Description of Artificial Sequence: Synthetic peptide
  Seed: FDMNNEGSYF
FNMNNEGSYW

SEQ ID NO: 35056 - protein, 10 aa, Artificial Sequence
  Description of Artificial Sequence: Synthetic peptide
  Seed: FDMNNEGSYF
FNMNNEGSYY

SEQ ID NO: 35057 - protein, 10 aa, Artificial Sequence
  Description of Artificial Sequence: Synthetic peptide
  Seed: FDMNNEGSYF
FDMNNEGSYM

SEQ ID NO: 35058 - protein, 10 aa, Artificial Sequence
  Description of Artificial Sequence: Synthetic peptide
  Seed: FDMNNEGSYF
FDMNNEGSYW

SEQ ID NO: 35059 - protein, 10 aa, Artificial Sequence
  Description of Artificial Sequence: Synthetic peptide
  Seed: FDMNNEGSYF
FDMNNEGSYY

SEQ ID NO: 35060 - protein, 10 aa, Artificial Sequence
  Description of Artificial Sequence: Synthetic peptide
  Seed: FDMNNEGSYF
FCMNNEGSYM

SEQ ID NO: 35061 - protein, 10 aa, Artificial Sequence
  Description of Artificial Sequence: Synthetic peptide
  Seed: FDMNNEGSYF
FCMNNEGSYF

SEQ ID NO: 35062 - protein, 10 aa, Artificial Sequence
  Description of Artificial Sequence: Synthetic peptide
  Seed: FDMNNEGSYF
FCMNNEGSYW

SEQ ID NO: 35063 - protein, 10 aa, Artificial Sequence
  Description of Artificial Sequence: Synthetic peptide
  Seed: FDMNNEGSYF
FCMNNEGSYY

SEQ ID NO: 35064 - protein, 10 aa, Artificial Sequence
  Description of Artificial Sequence: Synthetic peptide
  Seed: FDMNNEGSYF
FQMNNEGSYA

SEQ ID NO: 35065 - protein, 10 aa, Artificial Sequence
  Description of Artificial Sequence: Synthetic peptide
  Seed: FDMNNEGSYF
FQMNNEGSYR

SEQ ID NO: 35066 - protein, 10 aa, Artificial Sequence
  Description of Artificial Sequence: Synthetic peptide
  Seed: FDMNNEGSYF
FQMNNEGSYN

SEQ ID NO: 35067 - protein, 10 aa, Artificial Sequence
  Description of Artificial Sequence: Synthetic peptide
  Seed: FDMNNEGSYF
FQMNNEGSYD

SEQ ID NO: 35068 - protein, 10 aa, Artificial Sequence
  Description of Artificial Sequence: Synthetic peptide
  Seed: FDMNNEGSYF
FQMNNEGSYC

SEQ ID NO: 35069 - protein, 10 aa, Artificial Sequence
  Description of Artificial Sequence: Synthetic peptide
  Seed: FDMNNEGSYF
FQMNNEGSYQ

SEQ ID NO: 35070 - protein, 10 aa, Artificial Sequence
  Description of Artificial Sequence: Synthetic peptide
  Seed: FDMNNEGSYF
FQMNNEGSYE

SEQ ID NO: 35071 - protein, 10 aa, Artificial Sequence
  Description of Artificial Sequence: Synthetic peptide
  Seed: FDMNNEGSYF
FQMNNEGSYG

SEQ ID NO: 35072 - protein, 10 aa, Artificial Sequence
  Description of Artificial Sequence: Synthetic peptide
  Seed: FDMNNEGSYF
FQMNNEGSYH

SEQ ID NO: 35073 - protein, 10 aa, Artificial Sequence
  Description of Artificial Sequence: Synthetic peptide
  Seed: FDMNNEGSYF
FNMNNEGSYM

SEQ ID NO: 35074 - protein, 10 aa, Artificial Sequence
  Description of Artificial Sequence: Synthetic peptide
  Seed: FDMNNEGSYF
FRMNNEGSYW

SEQ ID NO: 35075 - protein, 10 aa, Artificial Sequence
  Description of Artificial Sequence: Synthetic peptide
  Seed: FDMNNEGSYF
FAMNNEGSYD

SEQ ID NO: 35076 - protein, 10 aa, Artificial Sequence
  Description of Artificial Sequence: Synthetic peptide
  Seed: FDMNNEGSYF
FRMNNEGSYF

SEQ ID NO: 35077 - protein, 10 aa, Artificial Sequence
  Description of Artificial Sequence: Synthetic peptide
  Seed: FDMNNEGSYF
FAMNNEGSYC

SEQ ID NO: 35078 - protein, 10 aa, Artificial Sequence
  Description of Artificial Sequence: Synthetic peptide
  Seed: FDMNNEGSYF
FAMNNEGSYQ

SEQ ID NO: 35079 - protein, 10 aa, Artificial Sequence
  Description of Artificial Sequence: Synthetic peptide
  Seed: FDMNNEGSYF
FAMNNEGSYE

SEQ ID NO: 35080 - protein, 10 aa, Artificial Sequence
  Description of Artificial Sequence: Synthetic peptide
  Seed: FDMNNEGSYF
FAMNNEGSYG

SEQ ID NO: 35081 - protein, 10 aa, Artificial Sequence
  Description of Artificial Sequence: Synthetic peptide
  Seed: FDMNNEGSYF
FAMNNEGSYH

SEQ ID NO: 35082 - protein, 10 aa, Artificial Sequence
  Description of Artificial Sequence: Synthetic peptide
  Seed: FDMNNEGSYF
FAMNNEGSYI

SEQ ID NO: 35083 - protein, 10 aa, Artificial Sequence
  Description of Artificial Sequence: Synthetic peptide
  Seed: FDMNNEGSYF
FAMNNEGSYL

SEQ ID NO: 35084 - protein, 10 aa, Artificial Sequence
  Description of Artificial Sequence: Synthetic peptide
  Seed: FDMNNEGSYF
FAMNNEGSYK

SEQ ID NO: 35085 - protein, 10 aa, Artificial Sequence
  Description of Artificial Sequence: Synthetic peptide
  Seed: FDMNNEGSYF
FAMNNEGSYM

SEQ ID NO: 35086 - protein, 10 aa, Artificial Sequence
  Description of Artificial Sequence: Synthetic peptide
  Seed: FDMNNEGSYF
FAMNNEGSYF

SEQ ID NO: 35087 - protein, 10 aa, Artificial Sequence
  Description of Artificial Sequence: Synthetic peptide
  Seed: FDMNNEGSYF
FAMNNEGSYP

SEQ ID NO: 35088 - protein, 10 aa, Artificial Sequence
  Description of Artificial Sequence: Synthetic peptide
  Seed: FDMNNEGSYF
FAMNNEGSYS

SEQ ID NO: 35089 - protein, 10 aa, Artificial Sequence
  Description of Artificial Sequence: Synthetic peptide
  Seed: FDMNNEGSYF
FAMNNEGSYT

SEQ ID NO: 35090 - protein, 10 aa, Artificial Sequence
  Description of Artificial Sequence: Synthetic peptide
  Seed: FDMNNEGSYF
FAMNNEGSYW

SEQ ID NO: 35091 - protein, 10 aa, Artificial Sequence
  Description of Artificial Sequence: Synthetic peptide
  Seed: FDMNNEGSYF
FAMNNEGSYY

SEQ ID NO: 35092 - protein, 10 aa, Artificial Sequence
  Description of Artificial Sequence: Synthetic peptide
  Seed: FDMNNEGSYF
FAMNNEGSYV

SEQ ID NO: 35093 - protein, 10 aa, Artificial Sequence
  Description of Artificial Sequence: Synthetic peptide
  Seed: FDMNNEGSYF
FRMNNEGSYI

SEQ ID NO: 35094 - protein, 10 aa, Artificial Sequence
  Description of Artificial Sequence: Synthetic peptide
  Seed: FDMNNEGSYF
FRMNNEGSYL

SEQ ID NO: 35095 - protein, 10 aa, Artificial Sequence
  Description of Artificial Sequence: Synthetic peptide
  Seed: FDMNNEGSYF
FRMNNEGSYM

SEQ ID NO: 35096 - protein, 10 aa, Artificial Sequence
  Description of Artificial Sequence: Synthetic peptide
  Seed: FDMNNEGSYF
FSMNNEGSYW

SEQ ID NO: 35097 - protein, 10 aa, Artificial Sequence
  Description of Artificial Sequence: Synthetic peptide
  Seed: FDMNNEGSYF
FSMNNEGSYV

SEQ ID NO: 35098 - protein, 10 aa, Artificial Sequence
  Description of Artificial Sequence: Synthetic peptide
  Seed: FDMSNEGSYF
FTMSNEGSYI

SEQ ID NO: 35099 - protein, 10 aa, Artificial Sequence
  Description of Artificial Sequence: Synthetic peptide
  Seed: FDMSNEGSYF
FKMSNEGSYR

SEQ ID NO: 35100 - protein, 10 aa, Artificial Sequence
  Description of Artificial Sequence: Synthetic peptide
  Seed: FDMSNEGSYF
FLMSNEGSYM

SEQ ID NO: 35101 - protein, 10 aa, Artificial Sequence
  Description of Artificial Sequence: Synthetic peptide
  Seed: FDMSNEGSYF
FLMSNEGSYF

SEQ ID NO: 35102 - protein, 10 aa, Artificial Sequence
  Description of Artificial Sequence: Synthetic peptide
  Seed: FDMSNEGSYF
FLMSNEGSYP

SEQ ID NO: 35103 - protein, 10 aa, Artificial Sequence
  Description of Artificial Sequence: Synthetic peptide
  Seed: FDMSNEGSYF
FLMSNEGSYS

SEQ ID NO: 35104 - protein, 10 aa, Artificial Sequence
  Description of Artificial Sequence: Synthetic peptide
  Seed: FDMSNEGSYF
FLMSNEGSYT

SEQ ID NO: 35105 - protein, 10 aa, Artificial Sequence
  Description of Artificial Sequence: Synthetic peptide
  Seed: FDMSNEGSYF
FLMSNEGSYW

SEQ ID NO: 35106 - protein, 10 aa, Artificial Sequence
  Description of Artificial Sequence: Synthetic peptide
  Seed: FDMSNEGSYF
FLMSNEGSYY

SEQ ID NO: 35107 - protein, 10 aa, Artificial Sequence
  Description of Artificial Sequence: Synthetic peptide
  Seed: FDMSNEGSYF
FLMSNEGSYV

SEQ ID NO: 35108 - protein, 10 aa, Artificial Sequence
  Description of Artificial Sequence: Synthetic peptide
  Seed: FDMSNEGSYF
FKMSNEGSYA

SEQ ID NO: 35109 - protein, 10 aa, Artificial Sequence
  Description of Artificial Sequence: Synthetic peptide
  Seed: FDMSNEGSYF
FKMSNEGSYN

SEQ ID NO: 35110 - protein, 10 aa, Artificial Sequence
  Description of Artificial Sequence: Synthetic peptide
  Seed: FDMSNEGSYF
FKMSNEGSYF

SEQ ID NO: 35111 - protein, 10 aa, Artificial Sequence
  Description of Artificial Sequence: Synthetic peptide
  Seed: FDMSNEGSYF
FKMSNEGSYD

SEQ ID NO: 35112 - protein, 10 aa, Artificial Sequence
  Description of Artificial Sequence: Synthetic peptide
  Seed: FDMSNEGSYF
FKMSNEGSYC

SEQ ID NO: 35113 - protein, 10 aa, Artificial Sequence
  Description of Artificial Sequence: Synthetic peptide
  Seed: FDMSNEGSYF
FKMSNEGSYQ

SEQ ID NO: 35114 - protein, 10 aa, Artificial Sequence
  Description of Artificial Sequence: Synthetic peptide
  Seed: FDMSNEGSYF
FKMSNEGSYE

SEQ ID NO: 35115 - protein, 10 aa, Artificial Sequence
  Description of Artificial Sequence: Synthetic peptide
  Seed: FDMSNEGSYF
FKMSNEGSYG

SEQ ID NO: 35116 - protein, 10 aa, Artificial Sequence
  Description of Artificial Sequence: Synthetic peptide
  Seed: FDMSNEGSYF
FKMSNEGSYH

SEQ ID NO: 35117 - protein, 10 aa, Artificial Sequence
  Description of Artificial Sequence: Synthetic peptide
  Seed: FDMSNEGSYF
FKMSNEGSYI

SEQ ID NO: 35118 - protein, 10 aa, Artificial Sequence
  Description of Artificial Sequence: Synthetic peptide
  Seed: FDMSNEGSYF
FKMSNEGSYL

SEQ ID NO: 35119 - protein, 10 aa, Artificial Sequence
  Description of Artificial Sequence: Synthetic peptide
  Seed: FDMSNEGSYF
FKMSNEGSYK

SEQ ID NO: 35120 - protein, 10 aa, Artificial Sequence
  Description of Artificial Sequence: Synthetic peptide
  Seed: FDMSNEGSYF
FLMSNEGSYK

SEQ ID NO: 35121 - protein, 10 aa, Artificial Sequence
  Description of Artificial Sequence: Synthetic peptide
  Seed: FDMSNEGSYF
FLMSNEGSYL

SEQ ID NO: 35122 - protein, 10 aa, Artificial Sequence
  Description of Artificial Sequence: Synthetic peptide
  Seed: FDMSNEGSYF
FLMSNEGSYI

SEQ ID NO: 35123 - protein, 10 aa, Artificial Sequence
  Description of Artificial Sequence: Synthetic peptide
  Seed: FDMSNEGSYF
FLMSNEGSYH

SEQ ID NO: 35124 - protein, 10 aa, Artificial Sequence
  Description of Artificial Sequence: Synthetic peptide
  Seed: FDMSNEGSYF
FHMSNEGSYL

SEQ ID NO: 35125 - protein, 10 aa, Artificial Sequence
  Description of Artificial Sequence: Synthetic peptide
  Seed: FDMSNEGSYF
FHMSNEGSYM

SEQ ID NO: 35126 - protein, 10 aa, Artificial Sequence
  Description of Artificial Sequence: Synthetic peptide
  Seed: FDMSNEGSYF
FHMSNEGSYF

SEQ ID NO: 35127 - protein, 10 aa, Artificial Sequence
  Description of Artificial Sequence: Synthetic peptide
  Seed: FDMSNEGSYF
FHMSNEGSYW

SEQ ID NO: 35128 - protein, 10 aa, Artificial Sequence
  Description of Artificial Sequence: Synthetic peptide
  Seed: FDMSNEGSYF
FHMSNEGSYY

SEQ ID NO: 35129 - protein, 10 aa, Artificial Sequence
  Description of Artificial Sequence: Synthetic peptide
  Seed: FDMSNEGSYF
FIMSNEGSYI

SEQ ID NO: 35130 - protein, 10 aa, Artificial Sequence
  Description of Artificial Sequence: Synthetic peptide
  Seed: FDMSNEGSYF
FIMSNEGSYL

SEQ ID NO: 35131 - protein, 10 aa, Artificial Sequence
  Description of Artificial Sequence: Synthetic peptide
  Seed: FDMSNEGSYF
FIMSNEGSYM

SEQ ID NO: 35132 - protein, 10 aa, Artificial Sequence
  Description of Artificial Sequence: Synthetic peptide
  Seed: FDMSNEGSYF
FIMSNEGSYF

SEQ ID NO: 35133 - protein, 10 aa, Artificial Sequence
  Description of Artificial Sequence: Synthetic peptide
  Seed: FDMSNEGSYF
FIMSNEGSYW

SEQ ID NO: 35134 - protein, 10 aa, Artificial Sequence
  Description of Artificial Sequence: Synthetic peptide
  Seed: FDMSNEGSYF
FIMSNEGSYY

SEQ ID NO: 35135 - protein, 10 aa, Artificial Sequence
  Description of Artificial Sequence: Synthetic peptide
  Seed: FDMSNEGSYF
FLMSNEGSYA

SEQ ID NO: 35136 - protein, 10 aa, Artificial Sequence
  Description of Artificial Sequence: Synthetic peptide
  Seed: FDMSNEGSYF
FLMSNEGSYR

SEQ ID NO: 35137 - protein, 10 aa, Artificial Sequence
  Description of Artificial Sequence: Synthetic peptide
  Seed: FDMSNEGSYF
FLMSNEGSYN

SEQ ID NO: 35138 - protein, 10 aa, Artificial Sequence
  Description of Artificial Sequence: Synthetic peptide
  Seed: FDMSNEGSYF
FLMSNEGSYD

SEQ ID NO: 35139 - protein, 10 aa, Artificial Sequence
  Description of Artificial Sequence: Synthetic peptide
  Seed: FDMSNEGSYF
FLMSNEGSYC

SEQ ID NO: 35140 - protein, 10 aa, Artificial Sequence
  Description of Artificial Sequence: Synthetic peptide
  Seed: FDMSNEGSYF
FLMSNEGSYQ

SEQ ID NO: 35141 - protein, 10 aa, Artificial Sequence
  Description of Artificial Sequence: Synthetic peptide
  Seed: FDMSNEGSYF
FLMSNEGSYE

SEQ ID NO: 35142 - protein, 10 aa, Artificial Sequence
  Description of Artificial Sequence: Synthetic peptide
  Seed: FDMSNEGSYF
FLMSNEGSYG

SEQ ID NO: 35143 - protein, 10 aa, Artificial Sequence
  Description of Artificial Sequence: Synthetic peptide
  Seed: FDMSNEGSYF
FKMSNEGSYM

SEQ ID NO: 35144 - protein, 10 aa, Artificial Sequence
  Description of Artificial Sequence: Synthetic peptide
  Seed: FDMSNEGSYF
FKMSNEGSYP

SEQ ID NO: 35145 - protein, 10 aa, Artificial Sequence
  Description of Artificial Sequence: Synthetic peptide
  Seed: FDMNNEGSYF
FTMNNEGSYI

SEQ ID NO: 35146 - protein, 10 aa, Artificial Sequence
  Description of Artificial Sequence: Synthetic peptide
  Seed: FDMSNEGSYF
FSMSNEGSYA

SEQ ID NO: 35147 - protein, 10 aa, Artificial Sequence
  Description of Artificial Sequence: Synthetic peptide
  Seed: FDMSNEGSYF
FMMSNEGSYV

SEQ ID NO: 35148 - protein, 10 aa, Artificial Sequence
  Description of Artificial Sequence: Synthetic peptide
  Seed: FDMSNEGSYF
FFMSNEGSYM

SEQ ID NO: 35149 - protein, 10 aa, Artificial Sequence
  Description of Artificial Sequence: Synthetic peptide
  Seed: FDMSNEGSYF
FFMSNEGSYF

SEQ ID NO: 35150 - protein, 10 aa, Artificial Sequence
  Description of Artificial Sequence: Synthetic peptide
  Seed: FDMSNEGSYF
FFMSNEGSYW

SEQ ID NO: 35151 - protein, 10 aa, Artificial Sequence
  Description of Artificial Sequence: Synthetic peptide
  Seed: FDMSNEGSYF
FFMSNEGSYY

SEQ ID NO: 35152 - protein, 10 aa, Artificial Sequence
  Description of Artificial Sequence: Synthetic peptide
  Seed: FDMSNEGSYF
FPMSNEGSYM

SEQ ID NO: 35153 - protein, 10 aa, Artificial Sequence
  Description of Artificial Sequence: Synthetic peptide
  Seed: FDMSNEGSYF
FPMSNEGSYF

SEQ ID NO: 35154 - protein, 10 aa, Artificial Sequence
  Description of Artificial Sequence: Synthetic peptide
  Seed: FDMSNEGSYF
FPMSNEGSYW

SEQ ID NO: 35155 - protein, 10 aa, Artificial Sequence
  Description of Artificial Sequence: Synthetic peptide
  Seed: FDMSNEGSYF
FPMSNEGSYY

SEQ ID NO: 35156 - protein, 10 aa, Artificial Sequence
  Description of Artificial Sequence: Synthetic peptide
  Seed: FDMSNEGSYF
FSMSNEGSYC

SEQ ID NO: 35157 - protein, 10 aa, Artificial Sequence
  Description of Artificial Sequence: Synthetic peptide
  Seed: FDMSNEGSYF
FKMSNEGSYS

SEQ ID NO: 35158 - protein, 10 aa, Artificial Sequence
  Description of Artificial Sequence: Synthetic peptide
  Seed: FDMSNEGSYF
FSMSNEGSYH

SEQ ID NO: 35159 - protein, 10 aa, Artificial Sequence
  Description of Artificial Sequence: Synthetic peptide
  Seed: FDMSNEGSYF
FSMSNEGSYI

SEQ ID NO: 35160 - protein, 10 aa, Artificial Sequence
  Description of Artificial Sequence: Synthetic peptide
  Seed: FDMSNEGSYF
FSMSNEGSYL

SEQ ID NO: 35161 - protein, 10 aa, Artificial Sequence
  Description of Artificial Sequence: Synthetic peptide
  Seed: FDMSNEGSYF
FSMSNEGSYM

SEQ ID NO: 35162 - protein, 10 aa, Artificial Sequence
  Description of Artificial Sequence: Synthetic peptide
  Seed: FDMSNEGSYF
FSMSNEGSYF

SEQ ID NO: 35163 - protein, 10 aa, Artificial Sequence
  Description of Artificial Sequence: Synthetic peptide
  Seed: FDMSNEGSYF
FSMSNEGSYW

SEQ ID NO: 35164 - protein, 10 aa, Artificial Sequence
  Description of Artificial Sequence: Synthetic peptide
  Seed: FDMSNEGSYF
FSMSNEGSYY

SEQ ID NO: 35165 - protein, 10 aa, Artificial Sequence
  Description of Artificial Sequence: Synthetic peptide
  Seed: FDMSNEGSYF
FSMSNEGSYV

SEQ ID NO: 35166 - protein, 10 aa, Artificial Sequence
  Description of Artificial Sequence: Synthetic peptide
  Seed: FDMSNEGSYF
FTMSNEGSYH

SEQ ID NO: 35167 - protein, 10 aa, Artificial Sequence
  Description of Artificial Sequence: Synthetic peptide
  Seed: FDMSNEGSYF
FMMSNEGSYY

SEQ ID NO: 35168 - protein, 10 aa, Artificial Sequence
  Description of Artificial Sequence: Synthetic peptide
  Seed: FDMSNEGSYF
FMMSNEGSYW

SEQ ID NO: 35169 - protein, 10 aa, Artificial Sequence
  Description of Artificial Sequence: Synthetic peptide
  Seed: FDMSNEGSYF
FMMSNEGSYT

SEQ ID NO: 35170 - protein, 10 aa, Artificial Sequence
  Description of Artificial Sequence: Synthetic peptide
  Seed: FDMSNEGSYF
FMMSNEGSYS

SEQ ID NO: 35171 - protein, 10 aa, Artificial Sequence
  Description of Artificial Sequence: Synthetic peptide
  Seed: FDMSNEGSYF
FKMSNEGSYT

SEQ ID NO: 35172 - protein, 10 aa, Artificial Sequence
  Description of Artificial Sequence: Synthetic peptide
  Seed: FDMSNEGSYF
FKMSNEGSYW

SEQ ID NO: 35173 - protein, 10 aa, Artificial Sequence
  Description of Artificial Sequence: Synthetic peptide
  Seed: FDMSNEGSYF
FKMSNEGSYY

SEQ ID NO: 35174 - protein, 10 aa, Artificial Sequence
  Description of Artificial Sequence: Synthetic peptide
  Seed: FDMSNEGSYF
FKMSNEGSYV

SEQ ID NO: 35175 - protein, 10 aa, Artificial Sequence
  Description of Artificial Sequence: Synthetic peptide
  Seed: FDMSNEGSYF
FMMSNEGSYA

SEQ ID NO: 35176 - protein, 10 aa, Artificial Sequence
  Description of Artificial Sequence: Synthetic peptide
  Seed: FDMSNEGSYF
FMMSNEGSYR

SEQ ID NO: 35177 - protein, 10 aa, Artificial Sequence
  Description of Artificial Sequence: Synthetic peptide
  Seed: FDMSNEGSYF
FMMSNEGSYN

SEQ ID NO: 35178 - protein, 10 aa, Artificial Sequence
  Description of Artificial Sequence: Synthetic peptide
  Seed: FDMSNEGSYF
FMMSNEGSYD

SEQ ID NO: 35179 - protein, 10 aa, Artificial Sequence
  Description of Artificial Sequence: Synthetic peptide
  Seed: FDMSNEGSYF
FMMSNEGSYC

SEQ ID NO: 35180 - protein, 10 aa, Artificial Sequence
  Description of Artificial Sequence: Synthetic peptide
  Seed: FDMSNEGSYF
FMMSNEGSYQ

SEQ ID NO: 35181 - protein, 10 aa, Artificial Sequence
  Description of Artificial Sequence: Synthetic peptide
  Seed: FDMSNEGSYF
FMMSNEGSYE

SEQ ID NO: 35182 - protein, 10 aa, Artificial Sequence
  Description of Artificial Sequence: Synthetic peptide
  Seed: FDMSNEGSYF
FMMSNEGSYG

SEQ ID NO: 35183 - protein, 10 aa, Artificial Sequence
  Description of Artificial Sequence: Synthetic peptide
  Seed: FDMSNEGSYF
FMMSNEGSYH

SEQ ID NO: 35184 - protein, 10 aa, Artificial Sequence
  Description of Artificial Sequence: Synthetic peptide
  Seed: FDMSNEGSYF
FMMSNEGSYI

SEQ ID NO: 35185 - protein, 10 aa, Artificial Sequence
  Description of Artificial Sequence: Synthetic peptide
  Seed: FDMSNEGSYF
FMMSNEGSYL

SEQ ID NO: 35186 - protein, 10 aa, Artificial Sequence
  Description of Artificial Sequence: Synthetic peptide
  Seed: FDMSNEGSYF
FMMSNEGSYK

SEQ ID NO: 35187 - protein, 10 aa, Artificial Sequence
  Description of Artificial Sequence: Synthetic peptide
  Seed: FDMSNEGSYF
FMMSNEGSYM

SEQ ID NO: 35188 - protein, 10 aa, Artificial Sequence
  Description of Artificial Sequence: Synthetic peptide
  Seed: FDMSNEGSYF
FMMSNEGSYF

SEQ ID NO: 35189 - protein, 10 aa, Artificial Sequence
  Description of Artificial Sequence: Synthetic peptide
  Seed: FDMSNEGSYF
FMMSNEGSYP

SEQ ID NO: 35190 - protein, 10 aa, Artificial Sequence
  Description of Artificial Sequence: Synthetic peptide
  Seed: FDMSNEGSYF
FHMSNEGSYI

SEQ ID NO: 35191 - protein, 10 aa, Artificial Sequence
  Description of Artificial Sequence: Synthetic peptide
  Seed: FDMSNEGSYF
FHMSNEGSYH

SEQ ID NO: 35192 - protein, 10 aa, Artificial Sequence
  Description of Artificial Sequence: Synthetic peptide
  Seed: FDMSNEGSYF
FGMSNEGSYY

SEQ ID NO: 35193 - protein, 10 aa, Artificial Sequence
  Description of Artificial Sequence: Synthetic peptide
  Seed: FDMSNEGSYF
FAMSNEGSYL

SEQ ID NO: 35194 - protein, 10 aa, Artificial Sequence
  Description of Artificial Sequence: Synthetic peptide
  Seed: FDMSNEGSYF
FAMSNEGSYR

SEQ ID NO: 35195 - protein, 10 aa, Artificial Sequence
  Description of Artificial Sequence: Synthetic peptide
  Seed: FDMSNEGSYF
FAMSNEGSYN

SEQ ID NO: 35196 - protein, 10 aa, Artificial Sequence
  Description of Artificial Sequence: Synthetic peptide
  Seed: FDMSNEGSYF
FAMSNEGSYD

SEQ ID NO: 35197 - protein, 10 aa, Artificial Sequence
  Description of Artificial Sequence: Synthetic peptide
  Seed: FDMSNEGSYF
FAMSNEGSYC

SEQ ID NO: 35198 - protein, 10 aa, Artificial Sequence
  Description of Artificial Sequence: Synthetic peptide
  Seed: FDMSNEGSYF
FAMSNEGSYQ

SEQ ID NO: 35199 - protein, 10 aa, Artificial Sequence
  Description of Artificial Sequence: Synthetic peptide
  Seed: FDMSNEGSYF
FAMSNEGSYE

SEQ ID NO: 35200 - protein, 10 aa, Artificial Sequence
  Description of Artificial Sequence: Synthetic peptide
  Seed: FDMSNEGSYF
FAMSNEGSYG

SEQ ID NO: 35201 - protein, 10 aa, Artificial Sequence
  Description of Artificial Sequence: Synthetic peptide
  Seed: FDMSNEGSYF
FAMSNEGSYH

SEQ ID NO: 35202 - protein, 10 aa, Artificial Sequence
  Description of Artificial Sequence: Synthetic peptide
  Seed: FDMSNEGSYF
FAMSNEGSYI

SEQ ID NO: 35203 - protein, 10 aa, Artificial Sequence
  Description of Artificial Sequence: Synthetic peptide
  Seed: FDMSNEGSYF
FAMSNEGSYK

SEQ ID NO: 35204 - protein, 10 aa, Artificial Sequence
  Description of Artificial Sequence: Synthetic peptide
  Seed: FDMSNEGSYF
FGMSNEGSYW

SEQ ID NO: 35205 - protein, 10 aa, Artificial Sequence
  Description of Artificial Sequence: Synthetic peptide
  Seed: FDMSNEGSYF
FAMSNEGSYM

SEQ ID NO: 35206 - protein, 10 aa, Artificial Sequence
  Description of Artificial Sequence: Synthetic peptide
  Seed: FDMSNEGSYF
FAMSNEGSYF

SEQ ID NO: 35207 - protein, 10 aa, Artificial Sequence
  Description of Artificial Sequence: Synthetic peptide
  Seed: FDMSNEGSYF
FAMSNEGSYP

SEQ ID NO: 35208 - protein, 10 aa, Artificial Sequence
  Description of Artificial Sequence: Synthetic peptide
  Seed: FDMSNEGSYF
FAMSNEGSYS

SEQ ID NO: 35209 - protein, 10 aa, Artificial Sequence
  Description of Artificial Sequence: Synthetic peptide
  Seed: FDMSNEGSYF
FAMSNEGSYT

SEQ ID NO: 35210 - protein, 10 aa, Artificial Sequence
  Description of Artificial Sequence: Synthetic peptide
  Seed: FDMSNEGSYF
FAMSNEGSYW

SEQ ID NO: 35211 - protein, 10 aa, Artificial Sequence
  Description of Artificial Sequence: Synthetic peptide
  Seed: FDMSNEGSYF
FAMSNEGSYY

SEQ ID NO: 35212 - protein, 10 aa, Artificial Sequence
  Description of Artificial Sequence: Synthetic peptide
  Seed: FDMSNEGSYF
FAMSNEGSYV

SEQ ID NO: 35213 - protein, 10 aa, Artificial Sequence
  Description of Artificial Sequence: Synthetic peptide
  Seed: FDMSNEGSYF
FRMSNEGSYH

SEQ ID NO: 35214 - protein, 10 aa, Artificial Sequence
  Description of Artificial Sequence: Synthetic peptide
  Seed: FDMSNEGSYF
FAMSNEGSYA

SEQ ID NO: 35215 - protein, 10 aa, Artificial Sequence
  Description of Artificial Sequence: Synthetic peptide
  Seed: FDMNNEGSYF
FVMNNEGSYV

SEQ ID NO: 35216 - protein, 10 aa, Artificial Sequence
  Description of Artificial Sequence: Synthetic peptide
  Seed: FDMNNEGSYF
FVMNNEGSYY

SEQ ID NO: 35217 - protein, 10 aa, Artificial Sequence
  Description of Artificial Sequence: Synthetic peptide
  Seed: FDMNNEGSYF
FVMNNEGSYW

SEQ ID NO: 35218 - protein, 10 aa, Artificial Sequence
  Description of Artificial Sequence: Synthetic peptide
  Seed: FDMNNEGSYF
FTMNNEGSYL

SEQ ID NO: 35219 - protein, 10 aa, Artificial Sequence
  Description of Artificial Sequence: Synthetic peptide
  Seed: FDMNNEGSYF
FTMNNEGSYM

SEQ ID NO: 35220 - protein, 10 aa, Artificial Sequence
  Description of Artificial Sequence: Synthetic peptide
  Seed: FDMNNEGSYF
FTMNNEGSYF

SEQ ID NO: 35221 - protein, 10 aa, Artificial Sequence
  Description of Artificial Sequence: Synthetic peptide
  Seed: FDMNNEGSYF
FTMNNEGSYW

SEQ ID NO: 35222 - protein, 10 aa, Artificial Sequence
  Description of Artificial Sequence: Synthetic peptide
  Seed: FDMNNEGSYF
FTMNNEGSYY

SEQ ID NO: 35223 - protein, 10 aa, Artificial Sequence
  Description of Artificial Sequence: Synthetic peptide
  Seed: FDMNNEGSYF
FTMNNEGSYV

SEQ ID NO: 35224 - protein, 10 aa, Artificial Sequence
  Description of Artificial Sequence: Synthetic peptide
  Seed: FDMNNEGSYF
FWMNNEGSYM

SEQ ID NO: 35225 - protein, 10 aa, Artificial Sequence
  Description of Artificial Sequence: Synthetic peptide
  Seed: FDMNNEGSYF
FWMNNEGSYF

SEQ ID NO: 35226 - protein, 10 aa, Artificial Sequence
  Description of Artificial Sequence: Synthetic peptide
  Seed: FDMNNEGSYF
FWMNNEGSYW

SEQ ID NO: 35227 - protein, 10 aa, Artificial Sequence
  Description of Artificial Sequence: Synthetic peptide
  Seed: FDMNNEGSYF
FWMNNEGSYY

SEQ ID NO: 35228 - protein, 10 aa, Artificial Sequence
  Description of Artificial Sequence: Synthetic peptide
  Seed: FDMNNEGSYF
FYMNNEGSYL

SEQ ID NO: 35229 - protein, 10 aa, Artificial Sequence
  Description of Artificial Sequence: Synthetic peptide
  Seed: FDMNNEGSYF
FYMNNEGSYM

SEQ ID NO: 35230 - protein, 10 aa, Artificial Sequence
  Description of Artificial Sequence: Synthetic peptide
  Seed: FDMNNEGSYF
FYMNNEGSYF

SEQ ID NO: 35231 - protein, 10 aa, Artificial Sequence
  Description of Artificial Sequence: Synthetic peptide
  Seed: FDMNNEGSYF
FYMNNEGSYW

SEQ ID NO: 35232 - protein, 10 aa, Artificial Sequence
  Description of Artificial Sequence: Synthetic peptide
  Seed: FDMNNEGSYF
FYMNNEGSYY

SEQ ID NO: 35233 - protein, 10 aa, Artificial Sequence
  Description of Artificial Sequence: Synthetic peptide
  Seed: FDMNNEGSYF
FVMNNEGSYI

SEQ ID NO: 35234 - protein, 10 aa, Artificial Sequence
  Description of Artificial Sequence: Synthetic peptide
  Seed: FDMNNEGSYF
FVMNNEGSYL

SEQ ID NO: 35235 - protein, 10 aa, Artificial Sequence
  Description of Artificial Sequence: Synthetic peptide
  Seed: FDMNNEGSYF
FVMNNEGSYM

SEQ ID NO: 35236 - protein, 10 aa, Artificial Sequence
  Description of Artificial Sequence: Synthetic peptide
  Seed: FDMNNEGSYF
FVMNNEGSYF

SEQ ID NO: 35237 - protein, 10 aa, Artificial Sequence
  Description of Artificial Sequence: Synthetic peptide
  Seed: FDMSNEGSYF
FRMSNEGSYI

SEQ ID NO: 35238 - protein, 10 aa, Artificial Sequence
  Description of Artificial Sequence: Synthetic peptide
  Seed: FDMSNEGSYF
FRMSNEGSYL

SEQ ID NO: 35239 - protein, 10 aa, Artificial Sequence
  Description of Artificial Sequence: Synthetic peptide
  Seed: FDMSNEGSYF
FRMSNEGSYM

SEQ ID NO: 35240 - protein, 10 aa, Artificial Sequence
  Description of Artificial Sequence: Synthetic peptide
  Seed: FDMSNEGSYF
FQMSNEGSYH

SEQ ID NO: 35241 - protein, 10 aa, Artificial Sequence
  Description of Artificial Sequence: Synthetic peptide
  Seed: FDMSNEGSYF
FQMSNEGSYL

SEQ ID NO: 35242 - protein, 10 aa, Artificial Sequence
  Description of Artificial Sequence: Synthetic peptide
  Seed: FDMSNEGSYF
FQMSNEGSYK

SEQ ID NO: 35243 - protein, 10 aa, Artificial Sequence
  Description of Artificial Sequence: Synthetic peptide
  Seed: FDMSNEGSYF
FQMSNEGSYM

SEQ ID NO: 35244 - protein, 10 aa, Artificial Sequence
  Description of Artificial Sequence: Synthetic peptide
  Seed: FDMSNEGSYF
FQMSNEGSYF

SEQ ID NO: 35245 - protein, 10 aa, Artificial Sequence
  Description of Artificial Sequence: Synthetic peptide
  Seed: FDMSNEGSYF
FQMSNEGSYP

SEQ ID NO: 35246 - protein, 10 aa, Artificial Sequence
  Description of Artificial Sequence: Synthetic peptide
  Seed: FDMSNEGSYF
FQMSNEGSYS

SEQ ID NO: 35247 - protein, 10 aa, Artificial Sequence
  Description of Artificial Sequence: Synthetic peptide
  Seed: FDMSNEGSYF
FQMSNEGSYT

SEQ ID NO: 35248 - protein, 10 aa, Artificial Sequence
  Description of Artificial Sequence: Synthetic peptide
  Seed: FDMSNEGSYF
FQMSNEGSYW

SEQ ID NO: 35249 - protein, 10 aa, Artificial Sequence
  Description of Artificial Sequence: Synthetic peptide
  Seed: FDMSNEGSYF
FQMSNEGSYY

SEQ ID NO: 35250 - protein, 10 aa, Artificial Sequence
  Description of Artificial Sequence: Synthetic peptide
  Seed: FDMSNEGSYF
FQMSNEGSYV

SEQ ID NO: 35251 - protein, 10 aa, Artificial Sequence
  Description of Artificial Sequence: Synthetic peptide
  Seed: FDMSNEGSYF
FEMSNEGSYH

SEQ ID NO: 35252 - protein, 10 aa, Artificial Sequence
  Description of Artificial Sequence: Synthetic peptide
  Seed: FDMSNEGSYF
FEMSNEGSYI

SEQ ID NO: 35253 - protein, 10 aa, Artificial Sequence
  Description of Artificial Sequence: Synthetic peptide
  Seed: FDMSNEGSYF
FEMSNEGSYL

SEQ ID NO: 35254 - protein, 10 aa, Artificial Sequence
  Description of Artificial Sequence: Synthetic peptide
  Seed: FDMSNEGSYF
FEMSNEGSYM

SEQ ID NO: 35255 - protein, 10 aa, Artificial Sequence
  Description of Artificial Sequence: Synthetic peptide
  Seed: FDMSNEGSYF
FEMSNEGSYF

SEQ ID NO: 35256 - protein, 10 aa, Artificial Sequence
  Description of Artificial Sequence: Synthetic peptide
  Seed: FDMSNEGSYF
FEMSNEGSYW

SEQ ID NO: 35257 - protein, 10 aa, Artificial Sequence
  Description of Artificial Sequence: Synthetic peptide
  Seed: FDMSNEGSYF
FEMSNEGSYY

SEQ ID NO: 35258 - protein, 10 aa, Artificial Sequence
  Description of Artificial Sequence: Synthetic peptide
  Seed: FDMSNEGSYF
FGMSNEGSYM

SEQ ID NO: 35259 - protein, 10 aa, Artificial Sequence
  Description of Artificial Sequence: Synthetic peptide
  Seed: FDMSNEGSYF
FGMSNEGSYF

SEQ ID NO: 35260 - protein, 10 aa, Artificial Sequence
  Description of Artificial Sequence: Synthetic peptide
  Seed: FDMSNEGSYF
FQMSNEGSYI

SEQ ID NO: 35261 - protein, 10 aa, Artificial Sequence
  Description of Artificial Sequence: Synthetic peptide
  Seed: FDMSNEGSYF
FQMSNEGSYG

SEQ ID NO: 35262 - protein, 10 aa, Artificial Sequence
  Description of Artificial Sequence: Synthetic peptide
  Seed: FDMSNEGSYF
FRMSNEGSYF

SEQ ID NO: 35263 - protein, 10 aa, Artificial Sequence
  Description of Artificial Sequence: Synthetic peptide
  Seed: FDMSNEGSYF
FQMSNEGSYE

SEQ ID NO: 35264 - protein, 10 aa, Artificial Sequence
  Description of Artificial Sequence: Synthetic peptide
  Seed: FDMSNEGSYF
FRMSNEGSYW

SEQ ID NO: 35265 - protein, 10 aa, Artificial Sequence
  Description of Artificial Sequence: Synthetic peptide
  Seed: FDMSNEGSYF
FRMSNEGSYY

SEQ ID NO: 35266 - protein, 10 aa, Artificial Sequence
  Description of Artificial Sequence: Synthetic peptide
  Seed: FDMSNEGSYF
FNMSNEGSYM

SEQ ID NO: 35267 - protein, 10 aa, Artificial Sequence
  Description of Artificial Sequence: Synthetic peptide
  Seed: FDMSNEGSYF
FNMSNEGSYF

SEQ ID NO: 35268 - protein, 10 aa, Artificial Sequence
  Description of Artificial Sequence: Synthetic peptide
  Seed: FDMSNEGSYF
FNMSNEGSYW

SEQ ID NO: 35269 - protein, 10 aa, Artificial Sequence
  Description of Artificial Sequence: Synthetic peptide
  Seed: FDMSNEGSYF
FNMSNEGSYY

SEQ ID NO: 35270 - protein, 10 aa, Artificial Sequence
  Description of Artificial Sequence: Synthetic peptide
  Seed: FDMSNEGSYF
FDMSNEGSYM

SEQ ID NO: 35271 - protein, 10 aa, Artificial Sequence
  Description of Artificial Sequence: Synthetic peptide
  Seed: FDMSNEGSYF
FDMSNEGSYW

SEQ ID NO: 35272 - protein, 10 aa, Artificial Sequence
  Description of Artificial Sequence: Synthetic peptide
  Seed: FDMSNEGSYF
FDMSNEGSYY

SEQ ID NO: 35273 - protein, 10 aa, Artificial Sequence
  Description of Artificial Sequence: Synthetic peptide
  Seed: FDMSNEGSYF
FCMSNEGSYM

SEQ ID NO: 35274 - protein, 10 aa, Artificial Sequence
  Description of Artificial Sequence: Synthetic peptide
  Seed: FDMSNEGSYF
FCMSNEGSYF

SEQ ID NO: 35275 - protein, 10 aa, Artificial Sequence
  Description of Artificial Sequence: Synthetic peptide
  Seed: FDMSNEGSYF
FCMSNEGSYW

SEQ ID NO: 35276 - protein, 10 aa, Artificial Sequence
  Description of Artificial Sequence: Synthetic peptide
  Seed: FDMSNEGSYF
FCMSNEGSYY

SEQ ID NO: 35277 - protein, 10 aa, Artificial Sequence
  Description of Artificial Sequence: Synthetic peptide
  Seed: FDMSNEGSYF
FQMSNEGSYA

SEQ ID NO: 35278 - protein, 10 aa, Artificial Sequence
  Description of Artificial Sequence: Synthetic peptide
  Seed: FDMSNEGSYF
FQMSNEGSYR

SEQ ID NO: 35279 - protein, 10 aa, Artificial Sequence
  Description of Artificial Sequence: Synthetic peptide
  Seed: FDMSNEGSYF
FQMSNEGSYN

SEQ ID NO: 35280 - protein, 10 aa, Artificial Sequence
  Description of Artificial Sequence: Synthetic peptide
  Seed: FDMSNEGSYF
FQMSNEGSYD

SEQ ID NO: 35281 - protein, 10 aa, Artificial Sequence
  Description of Artificial Sequence: Synthetic peptide
  Seed: FDMSNEGSYF
FQMSNEGSYC

SEQ ID NO: 35282 - protein, 10 aa, Artificial Sequence
  Description of Artificial Sequence: Synthetic peptide
  Seed: FDMSNEGSYF
FQMSNEGSYQ

SEQ ID NO: 35283 - protein, 10 aa, Artificial Sequence
  Description of Artificial Sequence: Synthetic peptide
  Seed: EIIRMMESAR
ECIRMMESAR

SEQ ID NO: 35284 - protein, 10 aa, Artificial Sequence
  Description of Artificial Sequence: Synthetic peptide
  Seed: EIIRMMESAR
ENIRMMESAR

SEQ ID NO: 35285 - protein, 9 aa, Artificial Sequence
  Description of Artificial Sequence: Synthetic peptide
  Seed: DATAGLTHM
DSTAGLTHY

SEQ ID NO: 35286 - protein, 10 aa, Artificial Sequence
  Description of Artificial Sequence: Synthetic peptide
  Seed: DATAGLTHLM
DVTAGLTHLF

SEQ ID NO: 35287 - protein, 10 aa, Artificial Sequence
  Description of Artificial Sequence: Synthetic peptide
  Seed: DATAGLTHLM
DVTAGLTHLT

SEQ ID NO: 35288 - protein, 10 aa, Artificial Sequence
  Description of Artificial Sequence: Synthetic peptide
  Seed: DATAGLTHLM
DVTAGLTHLY

SEQ ID NO: 35289 - protein, 10 aa, Artificial Sequence
  Description of Artificial Sequence: Synthetic peptide
  Seed: DATAGLTHLM
DVTAGLTHLV

SEQ ID NO: 35290 - protein, 9 aa, Artificial Sequence
  Description of Artificial Sequence: Synthetic peptide
  Seed: DATAGLTHM
DITAGLTHM

SEQ ID NO: 35291 - protein, 9 aa, Artificial Sequence
  Description of Artificial Sequence: Synthetic peptide
  Seed: DATAGLTHM
DITAGLTHF

SEQ ID NO: 35292 - protein, 9 aa, Artificial Sequence
  Description of Artificial Sequence: Synthetic peptide
  Seed: DATAGLTHM
DITAGLTHY

SEQ ID NO: 35293 - protein, 9 aa, Artificial Sequence
  Description of Artificial Sequence: Synthetic peptide
  Seed: DATAGLTHM
DLTAGLTHY

SEQ ID NO: 35294 - protein, 9 aa, Artificial Sequence
  Description of Artificial Sequence: Synthetic peptide
  Seed: DATAGLTHM
DMTAGLTHY

SEQ ID NO: 35295 - protein, 10 aa, Artificial Sequence
  Description of Artificial Sequence: Synthetic peptide
  Seed: DATAGLTHMM
DATAGLTHMV

SEQ ID NO: 35296 - protein, 9 aa, Artificial Sequence
  Description of Artificial Sequence: Synthetic peptide
  Seed: DATAGLTHM
DTTAGLTHF

SEQ ID NO: 35297 - protein, 9 aa, Artificial Sequence
  Description of Artificial Sequence: Synthetic peptide
  Seed: DATAGLTHM
DTTAGLTHY

SEQ ID NO: 35298 - protein, 9 aa, Artificial Sequence
  Description of Artificial Sequence: Synthetic peptide
  Seed: DATAGLTHM
DVTAGLTHM

SEQ ID NO: 35299 - protein, 9 aa, Artificial Sequence
  Description of Artificial Sequence: Synthetic peptide
  Seed: DATAGLTHM
DVTAGLTHF

SEQ ID NO: 35300 - protein, 9 aa, Artificial Sequence
  Description of Artificial Sequence: Synthetic peptide
  Seed: DATAGLTHM
DVTAGLTHY

SEQ ID NO: 35301 - protein, 10 aa, Artificial Sequence
  Description of Artificial Sequence: Synthetic peptide
  Seed: DATAGLTHMM
DATAGLTHMA

SEQ ID NO: 35302 - protein, 10 aa, Artificial Sequence
  Description of Artificial Sequence: Synthetic peptide
  Seed: DATAGLTHMM
DATAGLTHMI

SEQ ID NO: 35303 - protein, 10 aa, Artificial Sequence
  Description of Artificial Sequence: Synthetic peptide
  Seed: DATAGLTHMM
DATAGLTHML

SEQ ID NO: 35304 - protein, 10 aa, Artificial Sequence
  Description of Artificial Sequence: Synthetic peptide
  Seed: DATAGLTHMM
DATAGLTHMF

SEQ ID NO: 35305 - protein, 10 aa, Artificial Sequence
  Description of Artificial Sequence: Synthetic peptide
  Seed: DATAGLTHLM
DVTAGLTHLM

SEQ ID NO: 35306 - protein, 10 aa, Artificial Sequence
  Description of Artificial Sequence: Synthetic peptide
  Seed: DATAGLTHLM
DVTAGLTHLL

SEQ ID NO: 35307 - protein, 10 aa, Artificial Sequence
  Description of Artificial Sequence: Synthetic peptide
  Seed: DATAGLTHLM
DVTAGLTHLI

SEQ ID NO: 35308 - protein, 10 aa, Artificial Sequence
  Description of Artificial Sequence: Synthetic peptide
  Seed: DATAGLTHLM
DVTAGLTHLA

SEQ ID NO: 35309 - protein, 10 aa, Artificial Sequence
  Description of Artificial Sequence: Synthetic peptide
  Seed: DATAGLTHLM
DTTAGLTHLT

SEQ ID NO: 35310 - protein, 10 aa, Artificial Sequence
  Description of Artificial Sequence: Synthetic peptide
  Seed: DATAGLTHLM
DTTAGLTHLY

SEQ ID NO: 35311 - protein, 10 aa, Artificial Sequence
  Description of Artificial Sequence: Synthetic peptide
  Seed: DATAGLTHLM
DTTAGLTHLV

SEQ ID NO: 35312 - protein, 10 aa, Artificial Sequence
  Description of Artificial Sequence: Synthetic peptide
  Seed: DATAGLTHLM
DWTAGLTHLA

SEQ ID NO: 35313 - protein, 10 aa, Artificial Sequence
  Description of Artificial Sequence: Synthetic peptide
  Seed: DATAGLTHLM
DWTAGLTHLI

SEQ ID NO: 35314 - protein, 10 aa, Artificial Sequence
  Description of Artificial Sequence: Synthetic peptide
  Seed: DATAGLTHLM
DWTAGLTHLL

SEQ ID NO: 35315 - protein, 10 aa, Artificial Sequence
  Description of Artificial Sequence: Synthetic peptide
  Seed: DATAGLTHLM
DWTAGLTHLM

SEQ ID NO: 35316 - protein, 10 aa, Artificial Sequence
  Description of Artificial Sequence: Synthetic peptide
  Seed: DATAGLTHLM
DWTAGLTHLF

SEQ ID NO: 35317 - protein, 10 aa, Artificial Sequence
  Description of Artificial Sequence: Synthetic peptide
  Seed: DATAGLTHLM
DWTAGLTHLT

SEQ ID NO: 35318 - protein, 10 aa, Artificial Sequence
  Description of Artificial Sequence: Synthetic peptide
  Seed: DATAGLTHLM
DWTAGLTHLY

SEQ ID NO: 35319 - protein, 10 aa, Artificial Sequence
  Description of Artificial Sequence: Synthetic peptide
  Seed: DATAGLTHLM
DWTAGLTHLV

SEQ ID NO: 35320 - protein, 10 aa, Artificial Sequence
  Description of Artificial Sequence: Synthetic peptide
  Seed: DATAGLTHLM
DYTAGLTHLA

SEQ ID NO: 35321 - protein, 10 aa, Artificial Sequence
  Description of Artificial Sequence: Synthetic peptide
  Seed: DATAGLTHLM
DYTAGLTHLI

SEQ ID NO: 35322 - protein, 10 aa, Artificial Sequence
  Description of Artificial Sequence: Synthetic peptide
  Seed: DATAGLTHLM
DYTAGLTHLL

SEQ ID NO: 35323 - protein, 10 aa, Artificial Sequence
  Description of Artificial Sequence: Synthetic peptide
  Seed: DATAGLTHLM
DYTAGLTHLM

SEQ ID NO: 35324 - protein, 10 aa, Artificial Sequence
  Description of Artificial Sequence: Synthetic peptide
  Seed: DATAGLTHLM
DYTAGLTHLF

SEQ ID NO: 35325 - protein, 10 aa, Artificial Sequence
  Description of Artificial Sequence: Synthetic peptide
  Seed: DATAGLTHLM
DYTAGLTHLT

SEQ ID NO: 35326 - protein, 10 aa, Artificial Sequence
  Description of Artificial Sequence: Synthetic peptide
  Seed: DATAGLTHLM
DYTAGLTHLY

SEQ ID NO: 35327 - protein, 10 aa, Artificial Sequence
  Description of Artificial Sequence: Synthetic peptide
  Seed: DATAGLTHLM
DYTAGLTHLV

SEQ ID NO: 35328 - protein, 10 aa, Artificial Sequence
  Description of Artificial Sequence: Synthetic peptide
  Seed: DATAGLTHMM
DATAGLTHMY

SEQ ID NO: 35329 - protein, 10 aa, Artificial Sequence
  Description of Artificial Sequence: Synthetic peptide
  Seed: DATAGLTHMM
DRTAGLTHMA

SEQ ID NO: 35330 - protein, 10 aa, Artificial Sequence
  Description of Artificial Sequence: Synthetic peptide
  Seed: DATAGLTHLM
DTTAGLTHLM

SEQ ID NO: 35331 - protein, 10 aa, Artificial Sequence
  Description of Artificial Sequence: Synthetic peptide
  Seed: DATAGLTHMM
DQTAGLTHMV

SEQ ID NO: 35332 - protein, 10 aa, Artificial Sequence
  Description of Artificial Sequence: Synthetic peptide
  Seed: DATAGLTHMM
DCTAGLTHMF

SEQ ID NO: 35333 - protein, 10 aa, Artificial Sequence
  Description of Artificial Sequence: Synthetic peptide
  Seed: DATAGLTHMM
DCTAGLTHMY

SEQ ID NO: 35334 - protein, 10 aa, Artificial Sequence
  Description of Artificial Sequence: Synthetic peptide
  Seed: DATAGLTHMM
DCTAGLTHMV

SEQ ID NO: 35335 - protein, 10 aa, Artificial Sequence
  Description of Artificial Sequence: Synthetic peptide
  Seed: DATAGLTHMM
DQTAGLTHMA

SEQ ID NO: 35336 - protein, 10 aa, Artificial Sequence
  Description of Artificial Sequence: Synthetic peptide
  Seed: DATAGLTHMM
DQTAGLTHMI

SEQ ID NO: 35337 - protein, 10 aa, Artificial Sequence
  Description of Artificial Sequence: Synthetic peptide
  Seed: DATAGLTHMM
DQTAGLTHML

SEQ ID NO: 35338 - protein, 10 aa, Artificial Sequence
  Description of Artificial Sequence: Synthetic peptide
  Seed: DATAGLTHMM
DQTAGLTHMM

SEQ ID NO: 35339 - protein, 10 aa, Artificial Sequence
  Description of Artificial Sequence: Synthetic peptide
  Seed: DATAGLTHMM
DQTAGLTHMF

SEQ ID NO: 35340 - protein, 10 aa, Artificial Sequence
  Description of Artificial Sequence: Synthetic peptide
  Seed: DATAGLTHMM
DQTAGLTHMY

SEQ ID NO: 35341 - protein, 10 aa, Artificial Sequence
  Description of Artificial Sequence: Synthetic peptide
  Seed: DATAGLTHMM
DETAGLTHMA

SEQ ID NO: 35342 - protein, 10 aa, Artificial Sequence
  Description of Artificial Sequence: Synthetic peptide
  Seed: DATAGLTHMM
DRTAGLTHMI

SEQ ID NO: 35343 - protein, 10 aa, Artificial Sequence
  Description of Artificial Sequence: Synthetic peptide
  Seed: DATAGLTHMM
DETAGLTHMI

SEQ ID NO: 35344 - protein, 10 aa, Artificial Sequence
  Description of Artificial Sequence: Synthetic peptide
  Seed: DATAGLTHMM
DETAGLTHML

SEQ ID NO: 35345 - protein, 10 aa, Artificial Sequence
  Description of Artificial Sequence: Synthetic peptide
  Seed: DATAGLTHMM
DETAGLTHMM

SEQ ID NO: 35346 - protein, 10 aa, Artificial Sequence
  Description of Artificial Sequence: Synthetic peptide
  Seed: DATAGLTHMM
DETAGLTHMF

SEQ ID NO: 35347 - protein, 10 aa, Artificial Sequence
  Description of Artificial Sequence: Synthetic peptide
  Seed: DATAGLTHMM
DETAGLTHMY

SEQ ID NO: 35348 - protein, 10 aa, Artificial Sequence
  Description of Artificial Sequence: Synthetic peptide
  Seed: DATAGLTHMM
DETAGLTHMV

SEQ ID NO: 35349 - protein, 10 aa, Artificial Sequence
  Description of Artificial Sequence: Synthetic peptide
  Seed: DATAGLTHMM
DGTAGLTHMA

SEQ ID NO: 35350 - protein, 10 aa, Artificial Sequence
  Description of Artificial Sequence: Synthetic peptide
  Seed: DATAGLTHMM
DGTAGLTHMI

SEQ ID NO: 35351 - protein, 10 aa, Artificial Sequence
  Description of Artificial Sequence: Synthetic peptide
  Seed: DATAGLTHMM
DGTAGLTHML

SEQ ID NO: 35352 - protein, 10 aa, Artificial Sequence
  Description of Artificial Sequence: Synthetic peptide
  Seed: DATAGLTHMM
DCTAGLTHMM

SEQ ID NO: 35353 - protein, 10 aa, Artificial Sequence
  Description of Artificial Sequence: Synthetic peptide
  Seed: DATAGLTHMM
DCTAGLTHML

SEQ ID NO: 35354 - protein, 10 aa, Artificial Sequence
  Description of Artificial Sequence: Synthetic peptide
  Seed: DATAGLTHMM
DCTAGLTHMI

SEQ ID NO: 35355 - protein, 10 aa, Artificial Sequence
  Description of Artificial Sequence: Synthetic peptide
  Seed: DATAGLTHMM
DCTAGLTHMA

SEQ ID NO: 35356 - protein, 10 aa, Artificial Sequence
  Description of Artificial Sequence: Synthetic peptide
  Seed: DATAGLTHMM
DRTAGLTHML

SEQ ID NO: 35357 - protein, 10 aa, Artificial Sequence
  Description of Artificial Sequence: Synthetic peptide
  Seed: DATAGLTHMM
DRTAGLTHMM

SEQ ID NO: 35358 - protein, 10 aa, Artificial Sequence
  Description of Artificial Sequence: Synthetic peptide
  Seed: DATAGLTHMM
DRTAGLTHMF

SEQ ID NO: 35359 - protein, 10 aa, Artificial Sequence
  Description of Artificial Sequence: Synthetic peptide
  Seed: DATAGLTHMM
DRTAGLTHMY

SEQ ID NO: 35360 - protein, 10 aa, Artificial Sequence
  Description of Artificial Sequence: Synthetic peptide
  Seed: DATAGLTHMM
DRTAGLTHMV

SEQ ID NO: 35361 - protein, 10 aa, Artificial Sequence
  Description of Artificial Sequence: Synthetic peptide
  Seed: DATAGLTHMM
DNTAGLTHMA

SEQ ID NO: 35362 - protein, 10 aa, Artificial Sequence
  Description of Artificial Sequence: Synthetic peptide
  Seed: DATAGLTHMM
DNTAGLTHMI

SEQ ID NO: 35363 - protein, 10 aa, Artificial Sequence
  Description of Artificial Sequence: Synthetic peptide
  Seed: DATAGLTHMM
DNTAGLTHML

SEQ ID NO: 35364 - protein, 10 aa, Artificial Sequence
  Description of Artificial Sequence: Synthetic peptide
  Seed: DATAGLTHMM
DNTAGLTHMM

SEQ ID NO: 35365 - protein, 10 aa, Artificial Sequence
  Description of Artificial Sequence: Synthetic peptide
  Seed: DATAGLTHMM
DNTAGLTHMF

SEQ ID NO: 35366 - protein, 10 aa, Artificial Sequence
  Description of Artificial Sequence: Synthetic peptide
  Seed: DATAGLTHMM
DNTAGLTHMY

SEQ ID NO: 35367 - protein, 10 aa, Artificial Sequence
  Description of Artificial Sequence: Synthetic peptide
  Seed: DATAGLTHMM
DNTAGLTHMV

SEQ ID NO: 35368 - protein, 10 aa, Artificial Sequence
  Description of Artificial Sequence: Synthetic peptide
  Seed: DATAGLTHMM
DDTAGLTHMA

SEQ ID NO: 35369 - protein, 10 aa, Artificial Sequence
  Description of Artificial Sequence: Synthetic peptide
  Seed: DATAGLTHMM
DDTAGLTHMI

SEQ ID NO: 35370 - protein, 10 aa, Artificial Sequence
  Description of Artificial Sequence: Synthetic peptide
  Seed: DATAGLTHMM
DDTAGLTHML

SEQ ID NO: 35371 - protein, 10 aa, Artificial Sequence
  Description of Artificial Sequence: Synthetic peptide
  Seed: DATAGLTHMM
DDTAGLTHMM

SEQ ID NO: 35372 - protein, 10 aa, Artificial Sequence
  Description of Artificial Sequence: Synthetic peptide
  Seed: DATAGLTHMM
DDTAGLTHMF

SEQ ID NO: 35373 - protein, 10 aa, Artificial Sequence
  Description of Artificial Sequence: Synthetic peptide
  Seed: DATAGLTHMM
DDTAGLTHMY

SEQ ID NO: 35374 - protein, 10 aa, Artificial Sequence
  Description of Artificial Sequence: Synthetic peptide
  Seed: DATAGLTHMM
DDTAGLTHMV

SEQ ID NO: 35375 - protein, 10 aa, Artificial Sequence
  Description of Artificial Sequence: Synthetic peptide
  Seed: DATAGLTHLM
DTTAGLTHLF

SEQ ID NO: 35376 - protein, 10 aa, Artificial Sequence
  Description of Artificial Sequence: Synthetic peptide
  Seed: DATAGLTHLM
DTTAGLTHLL

SEQ ID NO: 35377 - protein, 10 aa, Artificial Sequence
  Description of Artificial Sequence: Synthetic peptide
  Seed: EIIRMMESAR
EAIRMMESAY

SEQ ID NO: 35378 - protein, 10 aa, Artificial Sequence
  Description of Artificial Sequence: Synthetic peptide
  Seed: DATAGLTHLM
DHTAGLTHLV

SEQ ID NO: 35379 - protein, 10 aa, Artificial Sequence
  Description of Artificial Sequence: Synthetic peptide
  Seed: DATAGLTHLM
DGTAGLTHLY

SEQ ID NO: 35380 - protein, 10 aa, Artificial Sequence
  Description of Artificial Sequence: Synthetic peptide
  Seed: DATAGLTHLM
DGTAGLTHLV

SEQ ID NO: 35381 - protein, 10 aa, Artificial Sequence
  Description of Artificial Sequence: Synthetic peptide
  Seed: DATAGLTHLM
DHTAGLTHLA

SEQ ID NO: 35382 - protein, 10 aa, Artificial Sequence
  Description of Artificial Sequence: Synthetic peptide
  Seed: DATAGLTHLM
DHTAGLTHLI

SEQ ID NO: 35383 - protein, 10 aa, Artificial Sequence
  Description of Artificial Sequence: Synthetic peptide
  Seed: DATAGLTHLM
DHTAGLTHLL

SEQ ID NO: 35384 - protein, 10 aa, Artificial Sequence
  Description of Artificial Sequence: Synthetic peptide
  Seed: DATAGLTHLM
DHTAGLTHLM

SEQ ID NO: 35385 - protein, 10 aa, Artificial Sequence
  Description of Artificial Sequence: Synthetic peptide
  Seed: DATAGLTHLM
DHTAGLTHLF

SEQ ID NO: 35386 - protein, 10 aa, Artificial Sequence
  Description of Artificial Sequence: Synthetic peptide
  Seed: DATAGLTHLM
DHTAGLTHLT

SEQ ID NO: 35387 - protein, 10 aa, Artificial Sequence
  Description of Artificial Sequence: Synthetic peptide
  Seed: DATAGLTHLM
DHTAGLTHLY

SEQ ID NO: 35388 - protein, 10 aa, Artificial Sequence
  Description of Artificial Sequence: Synthetic peptide
  Seed: DATAGLTHLM
DITAGLTHLA

SEQ ID NO: 35389 - protein, 10 aa, Artificial Sequence
  Description of Artificial Sequence: Synthetic peptide
  Seed: DATAGLTHLM
DLTAGLTHLM

SEQ ID NO: 35390 - protein, 10 aa, Artificial Sequence
  Description of Artificial Sequence: Synthetic peptide
  Seed: DATAGLTHLM
DITAGLTHLI

SEQ ID NO: 35391 - protein, 10 aa, Artificial Sequence
  Description of Artificial Sequence: Synthetic peptide
  Seed: DATAGLTHLM
DITAGLTHLL

SEQ ID NO: 35392 - protein, 10 aa, Artificial Sequence
  Description of Artificial Sequence: Synthetic peptide
  Seed: DATAGLTHLM
DITAGLTHLM

SEQ ID NO: 35393 - protein, 10 aa, Artificial Sequence
  Description of Artificial Sequence: Synthetic peptide
  Seed: DATAGLTHLM
DITAGLTHLF

SEQ ID NO: 35394 - protein, 10 aa, Artificial Sequence
  Description of Artificial Sequence: Synthetic peptide
  Seed: DATAGLTHLM
DITAGLTHLT

SEQ ID NO: 35395 - protein, 10 aa, Artificial Sequence
  Description of Artificial Sequence: Synthetic peptide
  Seed: DATAGLTHLM
DITAGLTHLY

SEQ ID NO: 35396 - protein, 10 aa, Artificial Sequence
  Description of Artificial Sequence: Synthetic peptide
  Seed: DATAGLTHLM
DITAGLTHLV

SEQ ID NO: 35397 - protein, 10 aa, Artificial Sequence
  Description of Artificial Sequence: Synthetic peptide
  Seed: DATAGLTHLM
DLTAGLTHLA

SEQ ID NO: 35398 - protein, 10 aa, Artificial Sequence
  Description of Artificial Sequence: Synthetic peptide
  Seed: DATAGLTHLM
DLTAGLTHLI

SEQ ID NO: 35399 - protein, 10 aa, Artificial Sequence
  Description of Artificial Sequence: Synthetic peptide
  Seed: DATAGLTHLM
DGTAGLTHLT

SEQ ID NO: 35400 - protein, 10 aa, Artificial Sequence
  Description of Artificial Sequence: Synthetic peptide
  Seed: DATAGLTHLM
DGTAGLTHLF

SEQ ID NO: 35401 - protein, 10 aa, Artificial Sequence
  Description of Artificial Sequence: Synthetic peptide
  Seed: DATAGLTHLM
DGTAGLTHLM

SEQ ID NO: 35402 - protein, 10 aa, Artificial Sequence
  Description of Artificial Sequence: Synthetic peptide
  Seed: DATAGLTHLM
DGTAGLTHLL

SEQ ID NO: 35403 - protein, 10 aa, Artificial Sequence
  Description of Artificial Sequence: Synthetic peptide
  Seed: DATAGLTHLM
DCTAGLTHLV

SEQ ID NO: 35404 - protein, 10 aa, Artificial Sequence
  Description of Artificial Sequence: Synthetic peptide
  Seed: DATAGLTHLM
DQTAGLTHLA

SEQ ID NO: 35405 - protein, 10 aa, Artificial Sequence
  Description of Artificial Sequence: Synthetic peptide
  Seed: DATAGLTHLM
DQTAGLTHLI

SEQ ID NO: 35406 - protein, 10 aa, Artificial Sequence
  Description of Artificial Sequence: Synthetic peptide
  Seed: DATAGLTHLM
DQTAGLTHLL

SEQ ID NO: 35407 - protein, 10 aa, Artificial Sequence
  Description of Artificial Sequence: Synthetic peptide
  Seed: DATAGLTHLM
DQTAGLTHLM

SEQ ID NO: 35408 - protein, 10 aa, Artificial Sequence
  Description of Artificial Sequence: Synthetic peptide
  Seed: DATAGLTHLM
DQTAGLTHLF

SEQ ID NO: 35409 - protein, 10 aa, Artificial Sequence
  Description of Artificial Sequence: Synthetic peptide
  Seed: DATAGLTHLM
DQTAGLTHLT

SEQ ID NO: 35410 - protein, 10 aa, Artificial Sequence
  Description of Artificial Sequence: Synthetic peptide
  Seed: DATAGLTHLM
DQTAGLTHLY

SEQ ID NO: 35411 - protein, 10 aa, Artificial Sequence
  Description of Artificial Sequence: Synthetic peptide
  Seed: DATAGLTHLM
DQTAGLTHLV

SEQ ID NO: 35412 - protein, 10 aa, Artificial Sequence
  Description of Artificial Sequence: Synthetic peptide
  Seed: DATAGLTHLM
DETAGLTHLA

SEQ ID NO: 35413 - protein, 10 aa, Artificial Sequence
  Description of Artificial Sequence: Synthetic peptide
  Seed: DATAGLTHLM
DETAGLTHLI

SEQ ID NO: 35414 - protein, 10 aa, Artificial Sequence
  Description of Artificial Sequence: Synthetic peptide
  Seed: DATAGLTHLM
DETAGLTHLL

SEQ ID NO: 35415 - protein, 10 aa, Artificial Sequence
  Description of Artificial Sequence: Synthetic peptide
  Seed: DATAGLTHLM
DETAGLTHLM

SEQ ID NO: 35416 - protein, 10 aa, Artificial Sequence
  Description of Artificial Sequence: Synthetic peptide
  Seed: DATAGLTHLM
DETAGLTHLF

SEQ ID NO: 35417 - protein, 10 aa, Artificial Sequence
  Description of Artificial Sequence: Synthetic peptide
  Seed: DATAGLTHLM
DETAGLTHLT

SEQ ID NO: 35418 - protein, 10 aa, Artificial Sequence
  Description of Artificial Sequence: Synthetic peptide
  Seed: DATAGLTHLM
DETAGLTHLY

SEQ ID NO: 35419 - protein, 10 aa, Artificial Sequence
  Description of Artificial Sequence: Synthetic peptide
  Seed: DATAGLTHLM
DETAGLTHLV

SEQ ID NO: 35420 - protein, 10 aa, Artificial Sequence
  Description of Artificial Sequence: Synthetic peptide
  Seed: DATAGLTHLM
DGTAGLTHLA

SEQ ID NO: 35421 - protein, 10 aa, Artificial Sequence
  Description of Artificial Sequence: Synthetic peptide
  Seed: DATAGLTHLM
DGTAGLTHLI

SEQ ID NO: 35422 - protein, 10 aa, Artificial Sequence
  Description of Artificial Sequence: Synthetic peptide
  Seed: DATAGLTHLM
DLTAGLTHLL

SEQ ID NO: 35423 - protein, 10 aa, Artificial Sequence
  Description of Artificial Sequence: Synthetic peptide
  Seed: DATAGLTHLM
DLTAGLTHLF

SEQ ID NO: 35424 - protein, 10 aa, Artificial Sequence
  Description of Artificial Sequence: Synthetic peptide
  Seed: DATAGLTHLM
DTTAGLTHLI

SEQ ID NO: 35425 - protein, 10 aa, Artificial Sequence
  Description of Artificial Sequence: Synthetic peptide
  Seed: DATAGLTHLM
DPTAGLTHLY

SEQ ID NO: 35426 - protein, 10 aa, Artificial Sequence
  Description of Artificial Sequence: Synthetic peptide
  Seed: DATAGLTHLM
DFTAGLTHLT

SEQ ID NO: 35427 - protein, 10 aa, Artificial Sequence
  Description of Artificial Sequence: Synthetic peptide
  Seed: DATAGLTHLM
DFTAGLTHLY

SEQ ID NO: 35428 - protein, 10 aa, Artificial Sequence
  Description of Artificial Sequence: Synthetic peptide
  Seed: DATAGLTHLM
DFTAGLTHLV

SEQ ID NO: 35429 - protein, 10 aa, Artificial Sequence
  Description of Artificial Sequence: Synthetic peptide
  Seed: DATAGLTHLM
DPTAGLTHLA

SEQ ID NO: 35430 - protein, 10 aa, Artificial Sequence
  Description of Artificial Sequence: Synthetic peptide
  Seed: DATAGLTHLM
DPTAGLTHLI

SEQ ID NO: 35431 - protein, 10 aa, Artificial Sequence
  Description of Artificial Sequence: Synthetic peptide
  Seed: DATAGLTHLM
DPTAGLTHLL

SEQ ID NO: 35432 - protein, 10 aa, Artificial Sequence
  Description of Artificial Sequence: Synthetic peptide
  Seed: DATAGLTHLM
DPTAGLTHLM

SEQ ID NO: 35433 - protein, 10 aa, Artificial Sequence
  Description of Artificial Sequence: Synthetic peptide
  Seed: DATAGLTHLM
DPTAGLTHLF

SEQ ID NO: 35434 - protein, 10 aa, Artificial Sequence
  Description of Artificial Sequence: Synthetic peptide
  Seed: DATAGLTHLM
DPTAGLTHLT

SEQ ID NO: 35435 - protein, 10 aa, Artificial Sequence
  Description of Artificial Sequence: Synthetic peptide
  Seed: DATAGLTHLM
DPTAGLTHLV

SEQ ID NO: 35436 - protein, 10 aa, Artificial Sequence
  Description of Artificial Sequence: Synthetic peptide
  Seed: DATAGLTHLM
DLTAGLTHLT

SEQ ID NO: 35437 - protein, 10 aa, Artificial Sequence
  Description of Artificial Sequence: Synthetic peptide
  Seed: DATAGLTHLM
DSTAGLTHLA

SEQ ID NO: 35438 - protein, 10 aa, Artificial Sequence
  Description of Artificial Sequence: Synthetic peptide
  Seed: DATAGLTHLM
DSTAGLTHLI

SEQ ID NO: 35439 - protein, 10 aa, Artificial Sequence
  Description of Artificial Sequence: Synthetic peptide
  Seed: DATAGLTHLM
DSTAGLTHLL

SEQ ID NO: 35440 - protein, 10 aa, Artificial Sequence
  Description of Artificial Sequence: Synthetic peptide
  Seed: DATAGLTHLM
DSTAGLTHLM

SEQ ID NO: 35441 - protein, 10 aa, Artificial Sequence
  Description of Artificial Sequence: Synthetic peptide
  Seed: DATAGLTHLM
DSTAGLTHLF

SEQ ID NO: 35442 - protein, 10 aa, Artificial Sequence
  Description of Artificial Sequence: Synthetic peptide
  Seed: DATAGLTHLM
DSTAGLTHLT

SEQ ID NO: 35443 - protein, 10 aa, Artificial Sequence
  Description of Artificial Sequence: Synthetic peptide
  Seed: DATAGLTHLM
DSTAGLTHLY

SEQ ID NO: 35444 - protein, 10 aa, Artificial Sequence
  Description of Artificial Sequence: Synthetic peptide
  Seed: DATAGLTHLM
DSTAGLTHLV

SEQ ID NO: 35445 - protein, 10 aa, Artificial Sequence
  Description of Artificial Sequence: Synthetic peptide
  Seed: DATAGLTHLM
DTTAGLTHLA

SEQ ID NO: 35446 - protein, 10 aa, Artificial Sequence
  Description of Artificial Sequence: Synthetic peptide
  Seed: DATAGLTHLM
DFTAGLTHLF

SEQ ID NO: 35447 - protein, 10 aa, Artificial Sequence
  Description of Artificial Sequence: Synthetic peptide
  Seed: DATAGLTHLM
DFTAGLTHLM

SEQ ID NO: 35448 - protein, 10 aa, Artificial Sequence
  Description of Artificial Sequence: Synthetic peptide
  Seed: DATAGLTHLM
DFTAGLTHLL

SEQ ID NO: 35449 - protein, 10 aa, Artificial Sequence
  Description of Artificial Sequence: Synthetic peptide
  Seed: DATAGLTHLM
DFTAGLTHLI

SEQ ID NO: 35450 - protein, 10 aa, Artificial Sequence
  Description of Artificial Sequence: Synthetic peptide
  Seed: DATAGLTHLM
DLTAGLTHLY

SEQ ID NO: 35451 - protein, 10 aa, Artificial Sequence
  Description of Artificial Sequence: Synthetic peptide
  Seed: DATAGLTHLM
DLTAGLTHLV

SEQ ID NO: 35452 - protein, 10 aa, Artificial Sequence
  Description of Artificial Sequence: Synthetic peptide
  Seed: DATAGLTHLM
DKTAGLTHLA

SEQ ID NO: 35453 - protein, 10 aa, Artificial Sequence
  Description of Artificial Sequence: Synthetic peptide
  Seed: DATAGLTHLM
DKTAGLTHLI

SEQ ID NO: 35454 - protein, 10 aa, Artificial Sequence
  Description of Artificial Sequence: Synthetic peptide
  Seed: DATAGLTHLM
DKTAGLTHLL

SEQ ID NO: 35455 - protein, 10 aa, Artificial Sequence
  Description of Artificial Sequence: Synthetic peptide
  Seed: DATAGLTHLM
DKTAGLTHLM

SEQ ID NO: 35456 - protein, 10 aa, Artificial Sequence
  Description of Artificial Sequence: Synthetic peptide
  Seed: DATAGLTHLM
DKTAGLTHLF

SEQ ID NO: 35457 - protein, 10 aa, Artificial Sequence
  Description of Artificial Sequence: Synthetic peptide
  Seed: DATAGLTHLM
DKTAGLTHLT

SEQ ID NO: 35458 - protein, 10 aa, Artificial Sequence
  Description of Artificial Sequence: Synthetic peptide
  Seed: DATAGLTHLM
DKTAGLTHLY

SEQ ID NO: 35459 - protein, 10 aa, Artificial Sequence
  Description of Artificial Sequence: Synthetic peptide
  Seed: DATAGLTHLM
DKTAGLTHLV

SEQ ID NO: 35460 - protein, 10 aa, Artificial Sequence
  Description of Artificial Sequence: Synthetic peptide
  Seed: DATAGLTHLM
DMTAGLTHLA

SEQ ID NO: 35461 - protein, 10 aa, Artificial Sequence
  Description of Artificial Sequence: Synthetic peptide
  Seed: DATAGLTHLM
DMTAGLTHLI

SEQ ID NO: 35462 - protein, 10 aa, Artificial Sequence
  Description of Artificial Sequence: Synthetic peptide
  Seed: DATAGLTHLM
DMTAGLTHLL

SEQ ID NO: 35463 - protein, 10 aa, Artificial Sequence
  Description of Artificial Sequence: Synthetic peptide
  Seed: DATAGLTHLM
DMTAGLTHLM

SEQ ID NO: 35464 - protein, 10 aa, Artificial Sequence
  Description of Artificial Sequence: Synthetic peptide
  Seed: DATAGLTHLM
DMTAGLTHLF

SEQ ID NO: 35465 - protein, 10 aa, Artificial Sequence
  Description of Artificial Sequence: Synthetic peptide
  Seed: DATAGLTHLM
DMTAGLTHLT

SEQ ID NO: 35466 - protein, 10 aa, Artificial Sequence
  Description of Artificial Sequence: Synthetic peptide
  Seed: DATAGLTHLM
DMTAGLTHLY

SEQ ID NO: 35467 - protein, 10 aa, Artificial Sequence
  Description of Artificial Sequence: Synthetic peptide
  Seed: DATAGLTHLM
DMTAGLTHLV

SEQ ID NO: 35468 - protein, 10 aa, Artificial Sequence
  Description of Artificial Sequence: Synthetic peptide
  Seed: DATAGLTHLM
DFTAGLTHLA

SEQ ID NO: 35469 - protein, 10 aa, Artificial Sequence
  Description of Artificial Sequence: Synthetic peptide
  Seed: DATAGLTHMM
DGTAGLTHMM

SEQ ID NO: 35470 - protein, 10 aa, Artificial Sequence
  Description of Artificial Sequence: Synthetic peptide
  Seed: DATAGLTHMM
DGTAGLTHMF

SEQ ID NO: 35471 - protein, 10 aa, Artificial Sequence
  Description of Artificial Sequence: Synthetic peptide
  Seed: DATAGLTHMM
DGTAGLTHMY

SEQ ID NO: 35472 - protein, 9 aa, Artificial Sequence
  Description of Artificial Sequence: Synthetic peptide
  Seed: DLRLLSFIR
DYRLLSFIK

SEQ ID NO: 35473 - protein, 9 aa, Artificial Sequence
  Description of Artificial Sequence: Synthetic peptide
  Seed: DLRLLSFIR
DFRLLSFIR

SEQ ID NO: 35474 - protein, 9 aa, Artificial Sequence
  Description of Artificial Sequence: Synthetic peptide
  Seed: DLRLLSFIR
DFRLLSFIK

SEQ ID NO: 35475 - protein, 9 aa, Artificial Sequence
  Description of Artificial Sequence: Synthetic peptide
  Seed: DLRLLSFIR
DSRLLSFIR

SEQ ID NO: 35476 - protein, 9 aa, Artificial Sequence
  Description of Artificial Sequence: Synthetic peptide
  Seed: DLRLLSFIR
DSRLLSFIK

SEQ ID NO: 35477 - protein, 9 aa, Artificial Sequence
  Description of Artificial Sequence: Synthetic peptide
  Seed: DLRLLSFIR
DTRLLSFIR

SEQ ID NO: 35478 - protein, 9 aa, Artificial Sequence
  Description of Artificial Sequence: Synthetic peptide
  Seed: DLRLLSFIR
DTRLLSFIK

SEQ ID NO: 35479 - protein, 9 aa, Artificial Sequence
  Description of Artificial Sequence: Synthetic peptide
  Seed: DLRLLSFIR
DWRLLSFIR

SEQ ID NO: 35480 - protein, 9 aa, Artificial Sequence
  Description of Artificial Sequence: Synthetic peptide
  Seed: DLRLLSFIR
DWRLLSFIK

SEQ ID NO: 35481 - protein, 9 aa, Artificial Sequence
  Description of Artificial Sequence: Synthetic peptide
  Seed: DLRLLSFIR
DYRLLSFIR

SEQ ID NO: 35482 - protein, 9 aa, Artificial Sequence
  Description of Artificial Sequence: Synthetic peptide
  Seed: DLRLLSFIR
DVRLLSFIR

SEQ ID NO: 35483 - protein, 9 aa, Artificial Sequence
  Description of Artificial Sequence: Synthetic peptide
  Seed: DLRVSSFIR
DMRVSSFIR

SEQ ID NO: 35484 - protein, 9 aa, Artificial Sequence
  Description of Artificial Sequence: Synthetic peptide
  Seed: DLRLLSFIR
DVRLLSFIK

SEQ ID NO: 35485 - protein, 9 aa, Artificial Sequence
  Description of Artificial Sequence: Synthetic peptide
  Seed: DLRVSSFIR
DARVSSFIR

SEQ ID NO: 35486 - protein, 9 aa, Artificial Sequence
  Description of Artificial Sequence: Synthetic peptide
  Seed: DLRVSSFIR
DARVSSFIK

SEQ ID NO: 35487 - protein, 9 aa, Artificial Sequence
  Description of Artificial Sequence: Synthetic peptide
  Seed: DLRVSSFIR
DNRVSSFIR

SEQ ID NO: 35488 - protein, 9 aa, Artificial Sequence
  Description of Artificial Sequence: Synthetic peptide
  Seed: DLRVSSFIR
DCRVSSFIR

SEQ ID NO: 35489 - protein, 9 aa, Artificial Sequence
  Description of Artificial Sequence: Synthetic peptide
  Seed: DLRVSSFIR
DQRVSSFIR

SEQ ID NO: 35490 - protein, 9 aa, Artificial Sequence
  Description of Artificial Sequence: Synthetic peptide
  Seed: DLRVSSFIR
DGRVSSFIR

SEQ ID NO: 35491 - protein, 9 aa, Artificial Sequence
  Description of Artificial Sequence: Synthetic peptide
  Seed: DLRVSSFIR
DIRVSSFIR

SEQ ID NO: 35492 - protein, 9 aa, Artificial Sequence
  Description of Artificial Sequence: Synthetic peptide
  Seed: DLRVSSFIR
DIRVSSFIK

SEQ ID NO: 35493 - protein, 9 aa, Artificial Sequence
  Description of Artificial Sequence: Synthetic peptide
  Seed: DLRLLSFIR
DMRLLSFIK

SEQ ID NO: 35494 - protein, 9 aa, Artificial Sequence
  Description of Artificial Sequence: Synthetic peptide
  Seed: DLRLLSFIR
DMRLLSFIR

SEQ ID NO: 35495 - protein, 9 aa, Artificial Sequence
  Description of Artificial Sequence: Synthetic peptide
  Seed: DLRLLSFIR
DIRLLSFIK

SEQ ID NO: 35496 - protein, 9 aa, Artificial Sequence
  Description of Artificial Sequence: Synthetic peptide
  Seed: DLRLLSFIR
DIRLLSFIR

SEQ ID NO: 35497 - protein, 10 aa, Artificial Sequence
  Description of Artificial Sequence: Synthetic peptide
  Seed: DATYQRTRAL
DLTYQRTRAF

SEQ ID NO: 35498 - protein, 10 aa, Artificial Sequence
  Description of Artificial Sequence: Synthetic peptide
  Seed: DATYQRTRAL
DMTYQRTRAA

SEQ ID NO: 35499 - protein, 10 aa, Artificial Sequence
  Description of Artificial Sequence: Synthetic peptide
  Seed: DATYQRTRAL
DMTYQRTRAI

SEQ ID NO: 35500 - protein, 10 aa, Artificial Sequence
  Description of Artificial Sequence: Synthetic peptide
  Seed: DATYQRTRAL
DMTYQRTRAL

SEQ ID NO: 35501 - protein, 10 aa, Artificial Sequence
  Description of Artificial Sequence: Synthetic peptide
  Seed: DATYQRTRAL
DMTYQRTRAM

SEQ ID NO: 35502 - protein, 10 aa, Artificial Sequence
  Description of Artificial Sequence: Synthetic peptide
  Seed: DATYQRTRAL
DMTYQRTRAF

SEQ ID NO: 35503 - protein, 10 aa, Artificial Sequence
  Description of Artificial Sequence: Synthetic peptide
  Seed: DATYQRTRAL
DMTYQRTRAV

SEQ ID NO: 35504 - protein, 10 aa, Artificial Sequence
  Description of Artificial Sequence: Synthetic peptide
  Seed: DATYQRTRAL
DFTYQRTRAL

SEQ ID NO: 35505 - protein, 10 aa, Artificial Sequence
  Description of Artificial Sequence: Synthetic peptide
  Seed: DATYQRTRAL
DPTYQRTRAL

SEQ ID NO: 35506 - protein, 10 aa, Artificial Sequence
  Description of Artificial Sequence: Synthetic peptide
  Seed: DATYQRTRAL
DWTYQRTRAL

SEQ ID NO: 35507 - protein, 10 aa, Artificial Sequence
  Description of Artificial Sequence: Synthetic peptide
  Seed: DATYQRTRAL
DYTYQRTRAL

SEQ ID NO: 35508 - protein, 10 aa, Artificial Sequence
  Description of Artificial Sequence: Synthetic peptide
  Seed: DATYQRTRAL
DVTYQRTRAL

SEQ ID NO: 35509 - protein, 9 aa, Artificial Sequence
  Description of Artificial Sequence: Synthetic peptide
  Seed: DLRLLSFIR
DARLLSFIR

SEQ ID NO: 35510 - protein, 9 aa, Artificial Sequence
  Description of Artificial Sequence: Synthetic peptide
  Seed: DLRLLSFIR
DARLLSFIK

SEQ ID NO: 35511 - protein, 9 aa, Artificial Sequence
  Description of Artificial Sequence: Synthetic peptide
  Seed: DLRLLSFIR
DNRLLSFIR

SEQ ID NO: 35512 - protein, 9 aa, Artificial Sequence
  Description of Artificial Sequence: Synthetic peptide
  Seed: DLRLLSFIR
DCRLLSFIR

SEQ ID NO: 35513 - protein, 9 aa, Artificial Sequence
  Description of Artificial Sequence: Synthetic peptide
  Seed: DLRLLSFIR
DQRLLSFIR

SEQ ID NO: 35514 - protein, 9 aa, Artificial Sequence
  Description of Artificial Sequence: Synthetic peptide
  Seed: DLRLLSFIR
DGRLLSFIR

SEQ ID NO: 35515 - protein, 9 aa, Artificial Sequence
  Description of Artificial Sequence: Synthetic peptide
  Seed: DLRLLSFIR
DHRLLSFIR

SEQ ID NO: 35516 - protein, 9 aa, Artificial Sequence
  Description of Artificial Sequence: Synthetic peptide
  Seed: DLRVSSFIR
DLRVSSFIK

SEQ ID NO: 35517 - protein, 9 aa, Artificial Sequence
  Description of Artificial Sequence: Synthetic peptide
  Seed: DLRVSSFIR
DMRVSSFIK

SEQ ID NO: 35518 - protein, 10 aa, Artificial Sequence
  Description of Artificial Sequence: Synthetic peptide
  Seed: DATAGLTHMM
DGTAGLTHMV

SEQ ID NO: 35519 - protein, 10 aa, Artificial Sequence
  Description of Artificial Sequence: Synthetic peptide
  Seed: DMSNEGSYFF
DYSNEGSYFW

SEQ ID NO: 35520 - protein, 10 aa, Artificial Sequence
  Description of Artificial Sequence: Synthetic peptide
  Seed: DMSNEGSYFF
DISNEGSYFW

SEQ ID NO: 35521 - protein, 10 aa, Artificial Sequence
  Description of Artificial Sequence: Synthetic peptide
  Seed: DMSNEGSYFF
DLSNEGSYFW

SEQ ID NO: 35522 - protein, 10 aa, Artificial Sequence
  Description of Artificial Sequence: Synthetic peptide
  Seed: DMSNEGSYFF
DKSNEGSYFF

SEQ ID NO: 35523 - protein, 10 aa, Artificial Sequence
  Description of Artificial Sequence: Synthetic peptide
  Seed: DMSNEGSYFF
DKSNEGSYFW

SEQ ID NO: 35524 - protein, 10 aa, Artificial Sequence
  Description of Artificial Sequence: Synthetic peptide
  Seed: DMSNEGSYFF
DMSNEGSYFW

SEQ ID NO: 35525 - protein, 10 aa, Artificial Sequence
  Description of Artificial Sequence: Synthetic peptide
  Seed: DMSNEGSYFF
DFSNEGSYFW

SEQ ID NO: 35526 - protein, 10 aa, Artificial Sequence
  Description of Artificial Sequence: Synthetic peptide
  Seed: DMSNEGSYFF
DSSNEGSYFW

SEQ ID NO: 35527 - protein, 10 aa, Artificial Sequence
  Description of Artificial Sequence: Synthetic peptide
  Seed: DMSNEGSYFF
DTSNEGSYFW

SEQ ID NO: 35528 - protein, 10 aa, Artificial Sequence
  Description of Artificial Sequence: Synthetic peptide
  Seed: DMSNEGSYFF
DWSNEGSYFW

SEQ ID NO: 35529 - protein, 10 aa, Artificial Sequence
  Description of Artificial Sequence: Synthetic peptide
  Seed: DMSNEGSYFF
DVSNEGSYFW

SEQ ID NO: 35530 - protein, 9 aa, Artificial Sequence
  Description of Artificial Sequence: Synthetic peptide
  Seed: DLRVSSFIR
DFRVSSFIR

SEQ ID NO: 35531 - protein, 9 aa, Artificial Sequence
  Description of Artificial Sequence: Synthetic peptide
  Seed: DPKKTGGPI
DPKKTGGPL

SEQ ID NO: 35532 - protein, 9 aa, Artificial Sequence
  Description of Artificial Sequence: Synthetic peptide
  Seed: DPKKTGGPI
DPKKTGGPM

SEQ ID NO: 35533 - protein, 9 aa, Artificial Sequence
  Description of Artificial Sequence: Synthetic peptide
  Seed: DPKKTGGPI
DPKKTGGPF

SEQ ID NO: 35534 - protein, 9 aa, Artificial Sequence
  Description of Artificial Sequence: Synthetic peptide
  Seed: DPKKTGGPI
DPKKTGGPV

SEQ ID NO: 35535 - protein, 11 aa, Artificial Sequence
  Description of Artificial Sequence: Synthetic peptide
  Seed: DRNFWRGENGR
DANFWRGENGR

SEQ ID NO: 35536 - protein, 11 aa, Artificial Sequence
  Description of Artificial Sequence: Synthetic peptide
  Seed: DRNFWRGENGR
DNNFWRGENGR

SEQ ID NO: 35537 - protein, 11 aa, Artificial Sequence
  Description of Artificial Sequence: Synthetic peptide
  Seed: DRNFWRGENGR
DDNFWRGENGR

SEQ ID NO: 35538 - protein, 11 aa, Artificial Sequence
  Description of Artificial Sequence: Synthetic peptide
  Seed: DRNFWRGENGR
DCNFWRGENGR

SEQ ID NO: 35539 - protein, 11 aa, Artificial Sequence
  Description of Artificial Sequence: Synthetic peptide
  Seed: DRNFWRGENGR
DQNFWRGENGR

SEQ ID NO: 35540 - protein, 10 aa, Artificial Sequence
  Description of Artificial Sequence: Synthetic peptide
  Seed: DMSNEGSYFF
DHSNEGSYFW

SEQ ID NO: 35541 - protein, 10 aa, Artificial Sequence
  Description of Artificial Sequence: Synthetic peptide
  Seed: DMSNEGSYFF
DGSNEGSYFW

SEQ ID NO: 35542 - protein, 10 aa, Artificial Sequence
  Description of Artificial Sequence: Synthetic peptide
  Seed: DMSNEGSYFF
DQSNEGSYFW

SEQ ID NO: 35543 - protein, 10 aa, Artificial Sequence
  Description of Artificial Sequence: Synthetic peptide
  Seed: DMSNEGSYFF
DCSNEGSYFW

SEQ ID NO: 35544 - protein, 9 aa, Artificial Sequence
  Description of Artificial Sequence: Synthetic peptide
  Seed: DLRVSSFIR
DFRVSSFIK

SEQ ID NO: 35545 - protein, 9 aa, Artificial Sequence
  Description of Artificial Sequence: Synthetic peptide
  Seed: DLRVSSFIR
DSRVSSFIR

SEQ ID NO: 35546 - protein, 9 aa, Artificial Sequence
  Description of Artificial Sequence: Synthetic peptide
  Seed: DLRVSSFIR
DSRVSSFIK

SEQ ID NO: 35547 - protein, 9 aa, Artificial Sequence
  Description of Artificial Sequence: Synthetic peptide
  Seed: DLRVSSFIR
DTRVSSFIR

SEQ ID NO: 35548 - protein, 9 aa, Artificial Sequence
  Description of Artificial Sequence: Synthetic peptide
  Seed: DLRVSSFIR
DTRVSSFIK

SEQ ID NO: 35549 - protein, 9 aa, Artificial Sequence
  Description of Artificial Sequence: Synthetic peptide
  Seed: DLRVSSFIR
DWRVSSFIR

SEQ ID NO: 35550 - protein, 9 aa, Artificial Sequence
  Description of Artificial Sequence: Synthetic peptide
  Seed: DLRVSSFIR
DYRVSSFIR

SEQ ID NO: 35551 - protein, 9 aa, Artificial Sequence
  Description of Artificial Sequence: Synthetic peptide
  Seed: DLRVSSFIR
DYRVSSFIK

SEQ ID NO: 35552 - protein, 9 aa, Artificial Sequence
  Description of Artificial Sequence: Synthetic peptide
  Seed: DLRVSSFIR
DVRVSSFIR

SEQ ID NO: 35553 - protein, 9 aa, Artificial Sequence
  Description of Artificial Sequence: Synthetic peptide
  Seed: DLRVSSFIR
DVRVSSFIK

SEQ ID NO: 35554 - protein, 9 aa, Artificial Sequence
  Description of Artificial Sequence: Synthetic peptide
  Seed: DMNNEGSYF
DQNNEGSYF

SEQ ID NO: 35555 - protein, 9 aa, Artificial Sequence
  Description of Artificial Sequence: Synthetic peptide
  Seed: DMNNEGSYF
DQNNEGSYY

SEQ ID NO: 35556 - protein, 9 aa, Artificial Sequence
  Description of Artificial Sequence: Synthetic peptide
  Seed: DMNNEGSYF
DLNNEGSYY

SEQ ID NO: 35557 - protein, 9 aa, Artificial Sequence
  Description of Artificial Sequence: Synthetic peptide
  Seed: DMNNEGSYF
DMNNEGSYY

SEQ ID NO: 35558 - protein, 9 aa, Artificial Sequence
  Description of Artificial Sequence: Synthetic peptide
  Seed: DMSNEGSYF
DMSNEGSYY

SEQ ID NO: 35559 - protein, 10 aa, Artificial Sequence
  Description of Artificial Sequence: Synthetic peptide
  Seed: DMSNEGSYFF
DASNEGSYFW

SEQ ID NO: 35560 - protein, 10 aa, Artificial Sequence
  Description of Artificial Sequence: Synthetic peptide
  Seed: DMSNEGSYFF
DRSNEGSYFF

SEQ ID NO: 35561 - protein, 10 aa, Artificial Sequence
  Description of Artificial Sequence: Synthetic peptide
  Seed: DMSNEGSYFF
DRSNEGSYFW

SEQ ID NO: 35562 - protein, 10 aa, Artificial Sequence
  Description of Artificial Sequence: Synthetic peptide
  Seed: DMSNEGSYFF
DNSNEGSYFW

SEQ ID NO: 35563 - protein, 10 aa, Artificial Sequence
  Description of Artificial Sequence: Synthetic peptide
  Seed: DATYQRTRAL
DLTYQRTRAM

SEQ ID NO: 35564 - protein, 10 aa, Artificial Sequence
  Description of Artificial Sequence: Synthetic peptide
  Seed: DATYQRTRAL
DLTYQRTRAL

SEQ ID NO: 35565 - protein, 10 aa, Artificial Sequence
  Description of Artificial Sequence: Synthetic peptide
  Seed: DATYQRTRAL
DLTYQRTRAI

SEQ ID NO: 35566 - protein, 10 aa, Artificial Sequence
  Description of Artificial Sequence: Synthetic peptide
  Seed: DATAGLTHMM
DMTAGLTHMF

SEQ ID NO: 35567 - protein, 10 aa, Artificial Sequence
  Description of Artificial Sequence: Synthetic peptide
  Seed: DATAGLTHMM
DKTAGLTHML

SEQ ID NO: 35568 - protein, 10 aa, Artificial Sequence
  Description of Artificial Sequence: Synthetic peptide
  Seed: DATAGLTHMM
DKTAGLTHMM

SEQ ID NO: 35569 - protein, 10 aa, Artificial Sequence
  Description of Artificial Sequence: Synthetic peptide
  Seed: DATAGLTHMM
DKTAGLTHMF

SEQ ID NO: 35570 - protein, 10 aa, Artificial Sequence
  Description of Artificial Sequence: Synthetic peptide
  Seed: DATAGLTHMM
DKTAGLTHMY

SEQ ID NO: 35571 - protein, 10 aa, Artificial Sequence
  Description of Artificial Sequence: Synthetic peptide
  Seed: DATAGLTHMM
DKTAGLTHMV

SEQ ID NO: 35572 - protein, 10 aa, Artificial Sequence
  Description of Artificial Sequence: Synthetic peptide
  Seed: DATAGLTHMM
DMTAGLTHMA

SEQ ID NO: 35573 - protein, 10 aa, Artificial Sequence
  Description of Artificial Sequence: Synthetic peptide
  Seed: DATAGLTHMM
DMTAGLTHMI

SEQ ID NO: 35574 - protein, 10 aa, Artificial Sequence
  Description of Artificial Sequence: Synthetic peptide
  Seed: DATAGLTHMM
DMTAGLTHML

SEQ ID NO: 35575 - protein, 10 aa, Artificial Sequence
  Description of Artificial Sequence: Synthetic peptide
  Seed: DATAGLTHMM
DMTAGLTHMM

SEQ ID NO: 35576 - protein, 10 aa, Artificial Sequence
  Description of Artificial Sequence: Synthetic peptide
  Seed: DATAGLTHMM
DMTAGLTHMT

SEQ ID NO: 35577 - protein, 10 aa, Artificial Sequence
  Description of Artificial Sequence: Synthetic peptide
  Seed: DATYQRTRAL
DITYQRTRAL

SEQ ID NO: 35578 - protein, 10 aa, Artificial Sequence
  Description of Artificial Sequence: Synthetic peptide
  Seed: DATAGLTHMM
DMTAGLTHMY

SEQ ID NO: 35579 - protein, 10 aa, Artificial Sequence
  Description of Artificial Sequence: Synthetic peptide
  Seed: DATAGLTHMM
DMTAGLTHMV

SEQ ID NO: 35580 - protein, 10 aa, Artificial Sequence
  Description of Artificial Sequence: Synthetic peptide
  Seed: DATAGLTHMM
DFTAGLTHMA

SEQ ID NO: 35581 - protein, 10 aa, Artificial Sequence
  Description of Artificial Sequence: Synthetic peptide
  Seed: DATAGLTHMM
DFTAGLTHMI

SEQ ID NO: 35582 - protein, 10 aa, Artificial Sequence
  Description of Artificial Sequence: Synthetic peptide
  Seed: DATAGLTHMM
DFTAGLTHML

SEQ ID NO: 35583 - protein, 10 aa, Artificial Sequence
  Description of Artificial Sequence: Synthetic peptide
  Seed: DATAGLTHMM
DFTAGLTHMM

SEQ ID NO: 35584 - protein, 10 aa, Artificial Sequence
  Description of Artificial Sequence: Synthetic peptide
  Seed: DATAGLTHMM
DFTAGLTHMF

SEQ ID NO: 35585 - protein, 10 aa, Artificial Sequence
  Description of Artificial Sequence: Synthetic peptide
  Seed: DATAGLTHMM
DFTAGLTHMT

SEQ ID NO: 35586 - protein, 10 aa, Artificial Sequence
  Description of Artificial Sequence: Synthetic peptide
  Seed: DATAGLTHMM
DFTAGLTHMY

SEQ ID NO: 35587 - protein, 10 aa, Artificial Sequence
  Description of Artificial Sequence: Synthetic peptide
  Seed: DATAGLTHMM
DKTAGLTHMI

SEQ ID NO: 35588 - protein, 10 aa, Artificial Sequence
  Description of Artificial Sequence: Synthetic peptide
  Seed: DATAGLTHMM
DKTAGLTHMA

SEQ ID NO: 35589 - protein, 10 aa, Artificial Sequence
  Description of Artificial Sequence: Synthetic peptide
  Seed: DATAGLTHMM
DLTAGLTHMV

SEQ ID NO: 35590 - protein, 10 aa, Artificial Sequence
  Description of Artificial Sequence: Synthetic peptide
  Seed: DATAGLTHMM
DLTAGLTHMY

SEQ ID NO: 35591 - protein, 10 aa, Artificial Sequence
  Description of Artificial Sequence: Synthetic peptide
  Seed: DATAGLTHMM
DHTAGLTHMA

SEQ ID NO: 35592 - protein, 10 aa, Artificial Sequence
  Description of Artificial Sequence: Synthetic peptide
  Seed: DATAGLTHMM
DHTAGLTHMI

SEQ ID NO: 35593 - protein, 10 aa, Artificial Sequence
  Description of Artificial Sequence: Synthetic peptide
  Seed: DATAGLTHMM
DHTAGLTHML

SEQ ID NO: 35594 - protein, 10 aa, Artificial Sequence
  Description of Artificial Sequence: Synthetic peptide
  Seed: DATAGLTHMM
DHTAGLTHMM

SEQ ID NO: 35595 - protein, 10 aa, Artificial Sequence
  Description of Artificial Sequence: Synthetic peptide
  Seed: DATAGLTHMM
DHTAGLTHMF

SEQ ID NO: 35596 - protein, 10 aa, Artificial Sequence
  Description of Artificial Sequence: Synthetic peptide
  Seed: DATAGLTHMM
DHTAGLTHMY

SEQ ID NO: 35597 - protein, 10 aa, Artificial Sequence
  Description of Artificial Sequence: Synthetic peptide
  Seed: DATAGLTHMM
DHTAGLTHMV

SEQ ID NO: 35598 - protein, 10 aa, Artificial Sequence
  Description of Artificial Sequence: Synthetic peptide
  Seed: DATAGLTHMM
DITAGLTHMA

SEQ ID NO: 35599 - protein, 10 aa, Artificial Sequence
  Description of Artificial Sequence: Synthetic peptide
  Seed: DATAGLTHMM
DITAGLTHMI

SEQ ID NO: 35600 - protein, 10 aa, Artificial Sequence
  Description of Artificial Sequence: Synthetic peptide
  Seed: DATAGLTHMM
DITAGLTHML

SEQ ID NO: 35601 - protein, 10 aa, Artificial Sequence
  Description of Artificial Sequence: Synthetic peptide
  Seed: DATAGLTHMM
DITAGLTHMM

SEQ ID NO: 35602 - protein, 10 aa, Artificial Sequence
  Description of Artificial Sequence: Synthetic peptide
  Seed: DATAGLTHMM
DITAGLTHMF

SEQ ID NO: 35603 - protein, 10 aa, Artificial Sequence
  Description of Artificial Sequence: Synthetic peptide
  Seed: DATAGLTHMM
DITAGLTHMY

SEQ ID NO: 35604 - protein, 10 aa, Artificial Sequence
  Description of Artificial Sequence: Synthetic peptide
  Seed: DATAGLTHMM
DITAGLTHMV

SEQ ID NO: 35605 - protein, 10 aa, Artificial Sequence
  Description of Artificial Sequence: Synthetic peptide
  Seed: DATAGLTHMM
DLTAGLTHMA

SEQ ID NO: 35606 - protein, 10 aa, Artificial Sequence
  Description of Artificial Sequence: Synthetic peptide
  Seed: DATAGLTHMM
DLTAGLTHMI

SEQ ID NO: 35607 - protein, 10 aa, Artificial Sequence
  Description of Artificial Sequence: Synthetic peptide
  Seed: DATAGLTHMM
DLTAGLTHML

SEQ ID NO: 35608 - protein, 10 aa, Artificial Sequence
  Description of Artificial Sequence: Synthetic peptide
  Seed: DATAGLTHMM
DLTAGLTHMM

SEQ ID NO: 35609 - protein, 10 aa, Artificial Sequence
  Description of Artificial Sequence: Synthetic peptide
  Seed: DATAGLTHMM
DLTAGLTHMF

SEQ ID NO: 35610 - protein, 10 aa, Artificial Sequence
  Description of Artificial Sequence: Synthetic peptide
  Seed: DATAGLTHMM
DFTAGLTHMV

SEQ ID NO: 35611 - protein, 10 aa, Artificial Sequence
  Description of Artificial Sequence: Synthetic peptide
  Seed: DATAGLTHMM
DPTAGLTHMA

SEQ ID NO: 35612 - protein, 10 aa, Artificial Sequence
  Description of Artificial Sequence: Synthetic peptide
  Seed: DATAGLTHMM
DPTAGLTHMI

SEQ ID NO: 35613 - protein, 10 aa, Artificial Sequence
  Description of Artificial Sequence: Synthetic peptide
  Seed: DATAGLTHMM
DWTAGLTHMM

SEQ ID NO: 35614 - protein, 10 aa, Artificial Sequence
  Description of Artificial Sequence: Synthetic peptide
  Seed: DATAGLTHMM
DWTAGLTHMY

SEQ ID NO: 35615 - protein, 10 aa, Artificial Sequence
  Description of Artificial Sequence: Synthetic peptide
  Seed: DATAGLTHMM
DWTAGLTHMV

SEQ ID NO: 35616 - protein, 10 aa, Artificial Sequence
  Description of Artificial Sequence: Synthetic peptide
  Seed: DATAGLTHMM
DYTAGLTHMA

SEQ ID NO: 35617 - protein, 10 aa, Artificial Sequence
  Description of Artificial Sequence: Synthetic peptide
  Seed: DATAGLTHMM
DYTAGLTHMI

SEQ ID NO: 35618 - protein, 10 aa, Artificial Sequence
  Description of Artificial Sequence: Synthetic peptide
  Seed: DATAGLTHMM
DYTAGLTHML

SEQ ID NO: 35619 - protein, 10 aa, Artificial Sequence
  Description of Artificial Sequence: Synthetic peptide
  Seed: DATAGLTHMM
DYTAGLTHMM

SEQ ID NO: 35620 - protein, 10 aa, Artificial Sequence
  Description of Artificial Sequence: Synthetic peptide
  Seed: DATAGLTHMM
DYTAGLTHMF

SEQ ID NO: 35621 - protein, 10 aa, Artificial Sequence
  Description of Artificial Sequence: Synthetic peptide
  Seed: DATAGLTHMM
DYTAGLTHMT

SEQ ID NO: 35622 - protein, 10 aa, Artificial Sequence
  Description of Artificial Sequence: Synthetic peptide
  Seed: DATAGLTHMM
DYTAGLTHMY

SEQ ID NO: 35623 - protein, 10 aa, Artificial Sequence
  Description of Artificial Sequence: Synthetic peptide
  Seed: DATAGLTHMM
DYTAGLTHMV

SEQ ID NO: 35624 - protein, 10 aa, Artificial Sequence
  Description of Artificial Sequence: Synthetic peptide
  Seed: DATAGLTHMM
DVTAGLTHMA

SEQ ID NO: 35625 - protein, 10 aa, Artificial Sequence
  Description of Artificial Sequence: Synthetic peptide
  Seed: DATAGLTHMM
DVTAGLTHMI

SEQ ID NO: 35626 - protein, 10 aa, Artificial Sequence
  Description of Artificial Sequence: Synthetic peptide
  Seed: DATAGLTHMM
DVTAGLTHML

SEQ ID NO: 35627 - protein, 10 aa, Artificial Sequence
  Description of Artificial Sequence: Synthetic peptide
  Seed: DATAGLTHMM
DVTAGLTHMM

SEQ ID NO: 35628 - protein, 10 aa, Artificial Sequence
  Description of Artificial Sequence: Synthetic peptide
  Seed: DATAGLTHMM
DVTAGLTHMF

SEQ ID NO: 35629 - protein, 10 aa, Artificial Sequence
  Description of Artificial Sequence: Synthetic peptide
  Seed: DATAGLTHMM
DVTAGLTHMY

SEQ ID NO: 35630 - protein, 10 aa, Artificial Sequence
  Description of Artificial Sequence: Synthetic peptide
  Seed: DATAGLTHMM
DVTAGLTHMV

SEQ ID NO: 35631 - protein, 10 aa, Artificial Sequence
  Description of Artificial Sequence: Synthetic peptide
  Seed: DATYQRTRAL
DQTYQRTRAL

SEQ ID NO: 35632 - protein, 10 aa, Artificial Sequence
  Description of Artificial Sequence: Synthetic peptide
  Seed: DATYQRTRAL
DGTYQRTRAL

SEQ ID NO: 35633 - protein, 10 aa, Artificial Sequence
  Description of Artificial Sequence: Synthetic peptide
  Seed: DATAGLTHMM
DWTAGLTHMF

SEQ ID NO: 35634 - protein, 10 aa, Artificial Sequence
  Description of Artificial Sequence: Synthetic peptide
  Seed: DATAGLTHMM
DWTAGLTHML

SEQ ID NO: 35635 - protein, 10 aa, Artificial Sequence
  Description of Artificial Sequence: Synthetic peptide
  Seed: DATAGLTHMM
DPTAGLTHML

SEQ ID NO: 35636 - protein, 10 aa, Artificial Sequence
  Description of Artificial Sequence: Synthetic peptide
  Seed: DATAGLTHMM
DWTAGLTHMI

SEQ ID NO: 35637 - protein, 10 aa, Artificial Sequence
  Description of Artificial Sequence: Synthetic peptide
  Seed: DATAGLTHMM
DPTAGLTHMM

SEQ ID NO: 35638 - protein, 10 aa, Artificial Sequence
  Description of Artificial Sequence: Synthetic peptide
  Seed: DATAGLTHMM
DPTAGLTHMF

SEQ ID NO: 35639 - protein, 10 aa, Artificial Sequence
  Description of Artificial Sequence: Synthetic peptide
  Seed: DATAGLTHMM
DPTAGLTHMY

SEQ ID NO: 35640 - protein, 10 aa, Artificial Sequence
  Description of Artificial Sequence: Synthetic peptide
  Seed: DATAGLTHMM
DPTAGLTHMV

SEQ ID NO: 35641 - protein, 10 aa, Artificial Sequence
  Description of Artificial Sequence: Synthetic peptide
  Seed: DATAGLTHMM
DSTAGLTHMA

SEQ ID NO: 35642 - protein, 10 aa, Artificial Sequence
  Description of Artificial Sequence: Synthetic peptide
  Seed: DATAGLTHMM
DSTAGLTHMI

SEQ ID NO: 35643 - protein, 10 aa, Artificial Sequence
  Description of Artificial Sequence: Synthetic peptide
  Seed: DATAGLTHMM
DSTAGLTHML

SEQ ID NO: 35644 - protein, 10 aa, Artificial Sequence
  Description of Artificial Sequence: Synthetic peptide
  Seed: DATAGLTHMM
DSTAGLTHMM

SEQ ID NO: 35645 - protein, 10 aa, Artificial Sequence
  Description of Artificial Sequence: Synthetic peptide
  Seed: DATAGLTHMM
DSTAGLTHMF

SEQ ID NO: 35646 - protein, 10 aa, Artificial Sequence
  Description of Artificial Sequence: Synthetic peptide
  Seed: DATAGLTHMM
DSTAGLTHMY

SEQ ID NO: 35647 - protein, 10 aa, Artificial Sequence
  Description of Artificial Sequence: Synthetic peptide
  Seed: DATAGLTHMM
DSTAGLTHMV

SEQ ID NO: 35648 - protein, 10 aa, Artificial Sequence
  Description of Artificial Sequence: Synthetic peptide
  Seed: DATAGLTHMM
DTTAGLTHMA

SEQ ID NO: 35649 - protein, 10 aa, Artificial Sequence
  Description of Artificial Sequence: Synthetic peptide
  Seed: DATAGLTHMM
DTTAGLTHMI

SEQ ID NO: 35650 - protein, 10 aa, Artificial Sequence
  Description of Artificial Sequence: Synthetic peptide
  Seed: DATAGLTHMM
DTTAGLTHML

SEQ ID NO: 35651 - protein, 10 aa, Artificial Sequence
  Description of Artificial Sequence: Synthetic peptide
  Seed: DATAGLTHMM
DTTAGLTHMF

SEQ ID NO: 35652 - protein, 10 aa, Artificial Sequence
  Description of Artificial Sequence: Synthetic peptide
  Seed: DATAGLTHMM
DTTAGLTHMY

SEQ ID NO: 35653 - protein, 10 aa, Artificial Sequence
  Description of Artificial Sequence: Synthetic peptide
  Seed: DATAGLTHMM
DTTAGLTHMV

SEQ ID NO: 35654 - protein, 10 aa, Artificial Sequence
  Description of Artificial Sequence: Synthetic peptide
  Seed: DATAGLTHMM
DWTAGLTHMA

SEQ ID NO: 35655 - protein, 10 aa, Artificial Sequence
  Description of Artificial Sequence: Synthetic peptide
  Seed: DATAGLTHLM
DCTAGLTHLY

SEQ ID NO: 35656 - protein, 10 aa, Artificial Sequence
  Description of Artificial Sequence: Synthetic peptide
  Seed: DATAGLTHLM
DCTAGLTHLT

SEQ ID NO: 35657 - protein, 10 aa, Artificial Sequence
  Description of Artificial Sequence: Synthetic peptide
  Seed: DATAGLTHLM
DCTAGLTHLF

SEQ ID NO: 35658 - protein, 11 aa, Artificial Sequence
  Description of Artificial Sequence: Synthetic peptide
  Seed: CSLMQGSTLPR
CFLMQGSTLPK

SEQ ID NO: 35659 - protein, 11 aa, Artificial Sequence
  Description of Artificial Sequence: Synthetic peptide
  Seed: CSLMQGSTLPR
CILMQGSTLPR

SEQ ID NO: 35660 - protein, 11 aa, Artificial Sequence
  Description of Artificial Sequence: Synthetic peptide
  Seed: CSLMQGSTLPR
CILMQGSTLPK

SEQ ID NO: 35661 - protein, 11 aa, Artificial Sequence
  Description of Artificial Sequence: Synthetic peptide
  Seed: CSLMQGSTLPR
CLLMQGSTLPR

SEQ ID NO: 35662 - protein, 11 aa, Artificial Sequence
  Description of Artificial Sequence: Synthetic peptide
  Seed: CSLMQGSTLPR
CLLMQGSTLPK

SEQ ID NO: 35663 - protein, 11 aa, Artificial Sequence
  Description of Artificial Sequence: Synthetic peptide
  Seed: CSLMQGSTLPR
CKLMQGSTLPR

SEQ ID NO: 35664 - protein, 11 aa, Artificial Sequence
  Description of Artificial Sequence: Synthetic peptide
  Seed: CSLMQGSTLPR
CKLMQGSTLPK

SEQ ID NO: 35665 - protein, 11 aa, Artificial Sequence
  Description of Artificial Sequence: Synthetic peptide
  Seed: CSLMQGSTLPR
CMLMQGSTLPR

SEQ ID NO: 35666 - protein, 11 aa, Artificial Sequence
  Description of Artificial Sequence: Synthetic peptide
  Seed: CSLMQGSTLPR
CMLMQGSTLPK

SEQ ID NO: 35667 - protein, 11 aa, Artificial Sequence
  Description of Artificial Sequence: Synthetic peptide
  Seed: CSLMQGSTLPR
CFLMQGSTLPR

SEQ ID NO: 35668 - protein, 11 aa, Artificial Sequence
  Description of Artificial Sequence: Synthetic peptide
  Seed: CSLMQGSTLPR
CPLMQGSTLPR

SEQ ID NO: 35669 - protein, 9 aa, Artificial Sequence
  Description of Artificial Sequence: Synthetic peptide
  Seed: CTELKLSDY
CAELKLSDY

SEQ ID NO: 35670 - protein, 11 aa, Artificial Sequence
  Description of Artificial Sequence: Synthetic peptide
  Seed: CSLMQGSTLPR
CPLMQGSTLPK

SEQ ID NO: 35671 - protein, 11 aa, Artificial Sequence
  Description of Artificial Sequence: Synthetic peptide
  Seed: CSLMQGSTLPR
CSLMQGSTLPK

SEQ ID NO: 35672 - protein, 11 aa, Artificial Sequence
  Description of Artificial Sequence: Synthetic peptide
  Seed: CSLMQGSTLPR
CTLMQGSTLPR

SEQ ID NO: 35673 - protein, 11 aa, Artificial Sequence
  Description of Artificial Sequence: Synthetic peptide
  Seed: CSLMQGSTLPR
CTLMQGSTLPK

SEQ ID NO: 35674 - protein, 11 aa, Artificial Sequence
  Description of Artificial Sequence: Synthetic peptide
  Seed: CSLMQGSTLPR
CWLMQGSTLPR

SEQ ID NO: 35675 - protein, 11 aa, Artificial Sequence
  Description of Artificial Sequence: Synthetic peptide
  Seed: CSLMQGSTLPR
CWLMQGSTLPK

SEQ ID NO: 35676 - protein, 11 aa, Artificial Sequence
  Description of Artificial Sequence: Synthetic peptide
  Seed: CSLMQGSTLPR
CYLMQGSTLPR

SEQ ID NO: 35677 - protein, 11 aa, Artificial Sequence
  Description of Artificial Sequence: Synthetic peptide
  Seed: CSLMQGSTLPR
CYLMQGSTLPK

SEQ ID NO: 35678 - protein, 11 aa, Artificial Sequence
  Description of Artificial Sequence: Synthetic peptide
  Seed: CSLMQGSTLPR
CVLMQGSTLPR

SEQ ID NO: 35679 - protein, 11 aa, Artificial Sequence
  Description of Artificial Sequence: Synthetic peptide
  Seed: CSLMQGSTLPR
CHLMQGSTLPK

SEQ ID NO: 35680 - protein, 11 aa, Artificial Sequence
  Description of Artificial Sequence: Synthetic peptide
  Seed: CSLMQGSTLPR
CHLMQGSTLPR

SEQ ID NO: 35681 - protein, 11 aa, Artificial Sequence
  Description of Artificial Sequence: Synthetic peptide
  Seed: CSLMQGSTLPR
CGLMQGSTLPK

SEQ ID NO: 35682 - protein, 11 aa, Artificial Sequence
  Description of Artificial Sequence: Synthetic peptide
  Seed: CSLMQGSTLPR
CGLMQGSTLPR

SEQ ID NO: 35683 - protein, 9 aa, Artificial Sequence
  Description of Artificial Sequence: Synthetic peptide
  Seed: CSLMQGSTL
CVLMQGSTL

SEQ ID NO: 35684 - protein, 9 aa, Artificial Sequence
  Description of Artificial Sequence: Synthetic peptide
  Seed: CSLMQGSTL
CVLMQGSTM

SEQ ID NO: 35685 - protein, 9 aa, Artificial Sequence
  Description of Artificial Sequence: Synthetic peptide
  Seed: CSLMQGSTL
CVLMQGSTF

SEQ ID NO: 35686 - protein, 9 aa, Artificial Sequence
  Description of Artificial Sequence: Synthetic peptide
  Seed: CSLMQGSTL
CVLMQGSTW

SEQ ID NO: 35687 - protein, 9 aa, Artificial Sequence
  Description of Artificial Sequence: Synthetic peptide
  Seed: CSLMQGSTL
CVLMQGSTY

SEQ ID NO: 35688 - protein, 11 aa, Artificial Sequence
  Description of Artificial Sequence: Synthetic peptide
  Seed: CSLMQGSTLPR
CALMQGSTLPR

SEQ ID NO: 35689 - protein, 11 aa, Artificial Sequence
  Description of Artificial Sequence: Synthetic peptide
  Seed: CSLMQGSTLPR
CALMQGSTLPK

SEQ ID NO: 35690 - protein, 11 aa, Artificial Sequence
  Description of Artificial Sequence: Synthetic peptide
  Seed: CSLMQGSTLPR
CRLMQGSTLPR

SEQ ID NO: 35691 - protein, 11 aa, Artificial Sequence
  Description of Artificial Sequence: Synthetic peptide
  Seed: CSLMQGSTLPR
CRLMQGSTLPK

SEQ ID NO: 35692 - protein, 11 aa, Artificial Sequence
  Description of Artificial Sequence: Synthetic peptide
  Seed: CSLMQGSTLPR
CNLMQGSTLPR

SEQ ID NO: 35693 - protein, 11 aa, Artificial Sequence
  Description of Artificial Sequence: Synthetic peptide
  Seed: CSLMQGSTLPR
CNLMQGSTLPK

SEQ ID NO: 35694 - protein, 11 aa, Artificial Sequence
  Description of Artificial Sequence: Synthetic peptide
  Seed: CSLMQGSTLPR
CDLMQGSTLPR

SEQ ID NO: 35695 - protein, 11 aa, Artificial Sequence
  Description of Artificial Sequence: Synthetic peptide
  Seed: CSLMQGSTLPR
CDLMQGSTLPK

SEQ ID NO: 35696 - protein, 11 aa, Artificial Sequence
  Description of Artificial Sequence: Synthetic peptide
  Seed: CSLMQGSTLPR
CCLMQGSTLPR

SEQ ID NO: 35697 - protein, 11 aa, Artificial Sequence
  Description of Artificial Sequence: Synthetic peptide
  Seed: CSLMQGSTLPR
CCLMQGSTLPK

SEQ ID NO: 35698 - protein, 11 aa, Artificial Sequence
  Description of Artificial Sequence: Synthetic peptide
  Seed: CSLMQGSTLPR
CQLMQGSTLPR

SEQ ID NO: 35699 - protein, 11 aa, Artificial Sequence
  Description of Artificial Sequence: Synthetic peptide
  Seed: CSLMQGSTLPR
CQLMQGSTLPK

SEQ ID NO: 35700 - protein, 11 aa, Artificial Sequence
  Description of Artificial Sequence: Synthetic peptide
  Seed: CSLMQGSTLPR
CELMQGSTLPR

SEQ ID NO: 35701 - protein, 11 aa, Artificial Sequence
  Description of Artificial Sequence: Synthetic peptide
  Seed: CSLMQGSTLPR
CELMQGSTLPK

SEQ ID NO: 35702 - protein, 11 aa, Artificial Sequence
  Description of Artificial Sequence: Synthetic peptide
  Seed: CSLMQGSTLPR
CVLMQGSTLPK

SEQ ID NO: 35703 - protein, 9 aa, Artificial Sequence
  Description of Artificial Sequence: Synthetic peptide
  Seed: CTELKLSDY
CNELKLSDY

SEQ ID NO: 35704 - protein, 11 aa, Artificial Sequence
  Description of Artificial Sequence: Synthetic peptide
  Seed: CVYGPAVSSGY
CSYGPAVSSGR

SEQ ID NO: 35705 - protein, 11 aa, Artificial Sequence
  Description of Artificial Sequence: Synthetic peptide
  Seed: CVYGPAVSSGY
CIYGPAVSSGF

SEQ ID NO: 35706 - protein, 11 aa, Artificial Sequence
  Description of Artificial Sequence: Synthetic peptide
  Seed: CVYGPAVSSGY
CAYGPAVSSGF

SEQ ID NO: 35707 - protein, 11 aa, Artificial Sequence
  Description of Artificial Sequence: Synthetic peptide
  Seed: CVYGPAVSSGY
CAYGPAVSSGY

SEQ ID NO: 35708 - protein, 11 aa, Artificial Sequence
  Description of Artificial Sequence: Synthetic peptide
  Seed: CVYGPAVSSGY
CNYGPAVSSGY

SEQ ID NO: 35709 - protein, 11 aa, Artificial Sequence
  Description of Artificial Sequence: Synthetic peptide
  Seed: CVYGPAVSSGY
CQYGPAVSSGM

SEQ ID NO: 35710 - protein, 11 aa, Artificial Sequence
  Description of Artificial Sequence: Synthetic peptide
  Seed: CVYGPAVSSGY
CQYGPAVSSGF

SEQ ID NO: 35711 - protein, 11 aa, Artificial Sequence
  Description of Artificial Sequence: Synthetic peptide
  Seed: CVYGPAVSSGY
CQYGPAVSSGY

SEQ ID NO: 35712 - protein, 11 aa, Artificial Sequence
  Description of Artificial Sequence: Synthetic peptide
  Seed: CVYGPAVSSGY
CGYGPAVSSGY

SEQ ID NO: 35713 - protein, 11 aa, Artificial Sequence
  Description of Artificial Sequence: Synthetic peptide
  Seed: CVYGPAVSSGY
CIYGPAVSSGR

SEQ ID NO: 35714 - protein, 11 aa, Artificial Sequence
  Description of Artificial Sequence: Synthetic peptide
  Seed: CVYGPAVSSGY
CIYGPAVSSGK

SEQ ID NO: 35715 - protein, 11 aa, Artificial Sequence
  Description of Artificial Sequence: Synthetic peptide
  Seed: CVYGPAVSSGY
CIYGPAVSSGY

SEQ ID NO: 35716 - protein, 9 aa, Artificial Sequence
  Description of Artificial Sequence: Synthetic peptide
  Seed: CTELKLSDY
CSELKLSDY

SEQ ID NO: 35717 - protein, 11 aa, Artificial Sequence
  Description of Artificial Sequence: Synthetic peptide
  Seed: CVYGPAVSSGY
CLYGPAVSSGR

SEQ ID NO: 35718 - protein, 11 aa, Artificial Sequence
  Description of Artificial Sequence: Synthetic peptide
  Seed: CVYGPAVSSGY
CLYGPAVSSGK

SEQ ID NO: 35719 - protein, 11 aa, Artificial Sequence
  Description of Artificial Sequence: Synthetic peptide
  Seed: CVYGPAVSSGY
CLYGPAVSSGF

SEQ ID NO: 35720 - protein, 11 aa, Artificial Sequence
  Description of Artificial Sequence: Synthetic peptide
  Seed: CVYGPAVSSGY
CLYGPAVSSGY

SEQ ID NO: 35721 - protein, 11 aa, Artificial Sequence
  Description of Artificial Sequence: Synthetic peptide
  Seed: CVYGPAVSSGY
CMYGPAVSSGR

SEQ ID NO: 35722 - protein, 11 aa, Artificial Sequence
  Description of Artificial Sequence: Synthetic peptide
  Seed: CVYGPAVSSGY
CMYGPAVSSGK

SEQ ID NO: 35723 - protein, 11 aa, Artificial Sequence
  Description of Artificial Sequence: Synthetic peptide
  Seed: CVYGPAVSSGY
CMYGPAVSSGM

SEQ ID NO: 35724 - protein, 11 aa, Artificial Sequence
  Description of Artificial Sequence: Synthetic peptide
  Seed: CVYGPAVSSGY
CMYGPAVSSGF

SEQ ID NO: 35725 - protein, 11 aa, Artificial Sequence
  Description of Artificial Sequence: Synthetic peptide
  Seed: CVYGPAVSSGY
CMYGPAVSSGY

SEQ ID NO: 35726 - protein, 11 aa, Artificial Sequence
  Description of Artificial Sequence: Synthetic peptide
  Seed: CVYGPAVSSGY
CAYGPAVSSGK

SEQ ID NO: 35727 - protein, 11 aa, Artificial Sequence
  Description of Artificial Sequence: Synthetic peptide
  Seed: CVYGPAVSSGY
CAYGPAVSSGR

SEQ ID NO: 35728 - protein, 11 aa, Artificial Sequence
  Description of Artificial Sequence: Synthetic peptide
  Seed: CVYGPAVASGY
CVYGPAVASGF

SEQ ID NO: 35729 - protein, 11 aa, Artificial Sequence
  Description of Artificial Sequence: Synthetic peptide
  Seed: CVYGPAVASGY
CYYGPAVASGY

SEQ ID NO: 35730 - protein, 11 aa, Artificial Sequence
  Description of Artificial Sequence: Synthetic peptide
  Seed: CVYGPAVASGY
CAYGPAVASGF

SEQ ID NO: 35731 - protein, 11 aa, Artificial Sequence
  Description of Artificial Sequence: Synthetic peptide
  Seed: CVYGPAVASGY
CAYGPAVASGY

SEQ ID NO: 35732 - protein, 11 aa, Artificial Sequence
  Description of Artificial Sequence: Synthetic peptide
  Seed: CVYGPAVASGY
CQYGPAVASGM

SEQ ID NO: 35733 - protein, 11 aa, Artificial Sequence
  Description of Artificial Sequence: Synthetic peptide
  Seed: CVYGPAVASGY
CQYGPAVASGF

SEQ ID NO: 35734 - protein, 11 aa, Artificial Sequence
  Description of Artificial Sequence: Synthetic peptide
  Seed: CVYGPAVASGY
CQYGPAVASGY

SEQ ID NO: 35735 - protein, 11 aa, Artificial Sequence
  Description of Artificial Sequence: Synthetic peptide
  Seed: CVYGPAVASGY
CGYGPAVASGY

SEQ ID NO: 35736 - protein, 11 aa, Artificial Sequence
  Description of Artificial Sequence: Synthetic peptide
  Seed: CVYGPAVASGY
CIYGPAVASGF

SEQ ID NO: 35737 - protein, 11 aa, Artificial Sequence
  Description of Artificial Sequence: Synthetic peptide
  Seed: CVYGPAVASGY
CIYGPAVASGY

SEQ ID NO: 35738 - protein, 11 aa, Artificial Sequence
  Description of Artificial Sequence: Synthetic peptide
  Seed: CVYGPAVASGY
CLYGPAVASGF

SEQ ID NO: 35739 - protein, 11 aa, Artificial Sequence
  Description of Artificial Sequence: Synthetic peptide
  Seed: CVYGPAVASGY
CLYGPAVASGY

SEQ ID NO: 35740 - protein, 11 aa, Artificial Sequence
  Description of Artificial Sequence: Synthetic peptide
  Seed: CVYGPAVASGY
CMYGPAVASGM

SEQ ID NO: 35741 - protein, 11 aa, Artificial Sequence
  Description of Artificial Sequence: Synthetic peptide
  Seed: CVYGPAVASGY
CMYGPAVASGF

SEQ ID NO: 35742 - protein, 11 aa, Artificial Sequence
  Description of Artificial Sequence: Synthetic peptide
  Seed: CVYGPAVASGY
CMYGPAVASGY

SEQ ID NO: 35743 - protein, 11 aa, Artificial Sequence
  Description of Artificial Sequence: Synthetic peptide
  Seed: CVYGPAVASGY
CFYGPAVASGY

SEQ ID NO: 35744 - protein, 11 aa, Artificial Sequence
  Description of Artificial Sequence: Synthetic peptide
  Seed: CVYGPAVASGY
CSYGPAVASGF

SEQ ID NO: 35745 - protein, 11 aa, Artificial Sequence
  Description of Artificial Sequence: Synthetic peptide
  Seed: CVYGPAVASGY
CSYGPAVASGY

SEQ ID NO: 35746 - protein, 11 aa, Artificial Sequence
  Description of Artificial Sequence: Synthetic peptide
  Seed: CVYGPAVASGY
CTYGPAVASGF

SEQ ID NO: 35747 - protein, 11 aa, Artificial Sequence
  Description of Artificial Sequence: Synthetic peptide
  Seed: CVYGPAVASGY
CTYGPAVASGY

SEQ ID NO: 35748 - protein, 11 aa, Artificial Sequence
  Description of Artificial Sequence: Synthetic peptide
  Seed: CVYGPAVASGY
CWYGPAVASGY

SEQ ID NO: 35749 - protein, 9 aa, Artificial Sequence
  Description of Artificial Sequence: Synthetic peptide
  Seed: CSLMQGSTL
CYLMQGSTY

SEQ ID NO: 35750 - protein, 9 aa, Artificial Sequence
  Description of Artificial Sequence: Synthetic peptide
  Seed: CSLMQGSTL
CYLMQGSTF

SEQ ID NO: 35751 - protein, 9 aa, Artificial Sequence
  Description of Artificial Sequence: Synthetic peptide
  Seed: CSLMQGSTL
CYLMQGSTM

SEQ ID NO: 35752 - protein, 9 aa, Artificial Sequence
  Description of Artificial Sequence: Synthetic peptide
  Seed: CSLMQGSTL
CELMQGSTL

SEQ ID NO: 35753 - protein, 9 aa, Artificial Sequence
  Description of Artificial Sequence: Synthetic peptide
  Seed: CSLMQGSTL
CQLMQGSTG

SEQ ID NO: 35754 - protein, 9 aa, Artificial Sequence
  Description of Artificial Sequence: Synthetic peptide
  Seed: CSLMQGSTL
CQLMQGSTH

SEQ ID NO: 35755 - protein, 9 aa, Artificial Sequence
  Description of Artificial Sequence: Synthetic peptide
  Seed: CSLMQGSTL
CQLMQGSTI

SEQ ID NO: 35756 - protein, 9 aa, Artificial Sequence
  Description of Artificial Sequence: Synthetic peptide
  Seed: CSLMQGSTL
CQLMQGSTL

SEQ ID NO: 35757 - protein, 9 aa, Artificial Sequence
  Description of Artificial Sequence: Synthetic peptide
  Seed: CSLMQGSTL
CQLMQGSTM

SEQ ID NO: 35758 - protein, 9 aa, Artificial Sequence
  Description of Artificial Sequence: Synthetic peptide
  Seed: CSLMQGSTL
CQLMQGSTF

SEQ ID NO: 35759 - protein, 9 aa, Artificial Sequence
  Description of Artificial Sequence: Synthetic peptide
  Seed: CSLMQGSTL
CQLMQGSTW

SEQ ID NO: 35760 - protein, 9 aa, Artificial Sequence
  Description of Artificial Sequence: Synthetic peptide
  Seed: CSLMQGSTL
CQLMQGSTY

SEQ ID NO: 35761 - protein, 9 aa, Artificial Sequence
  Description of Artificial Sequence: Synthetic peptide
  Seed: CSLMQGSTL
CQLMQGSTV

SEQ ID NO: 35762 - protein, 9 aa, Artificial Sequence
  Description of Artificial Sequence: Synthetic peptide
  Seed: CSLMQGSTL
CELMQGSTM

SEQ ID NO: 35763 - protein, 9 aa, Artificial Sequence
  Description of Artificial Sequence: Synthetic peptide
  Seed: CSLMQGSTL
CTLMQGSTV

SEQ ID NO: 35764 - protein, 9 aa, Artificial Sequence
  Description of Artificial Sequence: Synthetic peptide
  Seed: CSLMQGSTL
CELMQGSTF

SEQ ID NO: 35765 - protein, 9 aa, Artificial Sequence
  Description of Artificial Sequence: Synthetic peptide
  Seed: CSLMQGSTL
CELMQGSTY

SEQ ID NO: 35766 - protein, 9 aa, Artificial Sequence
  Description of Artificial Sequence: Synthetic peptide
  Seed: CSLMQGSTL
CGLMQGSTM

SEQ ID NO: 35767 - protein, 9 aa, Artificial Sequence
  Description of Artificial Sequence: Synthetic peptide
  Seed: CSLMQGSTL
CGLMQGSTF

SEQ ID NO: 35768 - protein, 9 aa, Artificial Sequence
  Description of Artificial Sequence: Synthetic peptide
  Seed: CSLMQGSTL
CGLMQGSTW

SEQ ID NO: 35769 - protein, 9 aa, Artificial Sequence
  Description of Artificial Sequence: Synthetic peptide
  Seed: CSLMQGSTL
CGLMQGSTY

SEQ ID NO: 35770 - protein, 9 aa, Artificial Sequence
  Description of Artificial Sequence: Synthetic peptide
  Seed: CSLMQGSTL
CHLMQGSTI

SEQ ID NO: 35771 - protein, 9 aa, Artificial Sequence
  Description of Artificial Sequence: Synthetic peptide
  Seed: CSLMQGSTL
CHLMQGSTL

SEQ ID NO: 35772 - protein, 9 aa, Artificial Sequence
  Description of Artificial Sequence: Synthetic peptide
  Seed: CSLMQGSTL
CHLMQGSTM

SEQ ID NO: 35773 - protein, 9 aa, Artificial Sequence
  Description of Artificial Sequence: Synthetic peptide
  Seed: CSLMQGSTL
CQLMQGSTA

SEQ ID NO: 35774 - protein, 9 aa, Artificial Sequence
  Description of Artificial Sequence: Synthetic peptide
  Seed: CSLMQGSTL
CCLMQGSTY

SEQ ID NO: 35775 - protein, 9 aa, Artificial Sequence
  Description of Artificial Sequence: Synthetic peptide
  Seed: CSLMQGSTL
CCLMQGSTW

SEQ ID NO: 35776 - protein, 9 aa, Artificial Sequence
  Description of Artificial Sequence: Synthetic peptide
  Seed: CSLMQGSTL
CCLMQGSTF

SEQ ID NO: 35777 - protein, 9 aa, Artificial Sequence
  Description of Artificial Sequence: Synthetic peptide
  Seed: CSLMQGSTL
CALMQGSTI

SEQ ID NO: 35778 - protein, 9 aa, Artificial Sequence
  Description of Artificial Sequence: Synthetic peptide
  Seed: CSLMQGSTL
CALMQGSTW

SEQ ID NO: 35779 - protein, 9 aa, Artificial Sequence
  Description of Artificial Sequence: Synthetic peptide
  Seed: CSLMQGSTL
CALMQGSTV

SEQ ID NO: 35780 - protein, 9 aa, Artificial Sequence
  Description of Artificial Sequence: Synthetic peptide
  Seed: CSLMQGSTL
CRLMQGSTL

SEQ ID NO: 35781 - protein, 9 aa, Artificial Sequence
  Description of Artificial Sequence: Synthetic peptide
  Seed: CSLMQGSTL
CRLMQGSTM

SEQ ID NO: 35782 - protein, 9 aa, Artificial Sequence
  Description of Artificial Sequence: Synthetic peptide
  Seed: CSLMQGSTL
CRLMQGSTF

SEQ ID NO: 35783 - protein, 9 aa, Artificial Sequence
  Description of Artificial Sequence: Synthetic peptide
  Seed: CSLMQGSTL
CRLMQGSTY

SEQ ID NO: 35784 - protein, 9 aa, Artificial Sequence
  Description of Artificial Sequence: Synthetic peptide
  Seed: CSLMQGSTL
CNLMQGSTM

SEQ ID NO: 35785 - protein, 9 aa, Artificial Sequence
  Description of Artificial Sequence: Synthetic peptide
  Seed: CSLMQGSTL
CNLMQGSTF

SEQ ID NO: 35786 - protein, 9 aa, Artificial Sequence
  Description of Artificial Sequence: Synthetic peptide
  Seed: CSLMQGSTL
CNLMQGSTY

SEQ ID NO: 35787 - protein, 9 aa, Artificial Sequence
  Description of Artificial Sequence: Synthetic peptide
  Seed: CSLMQGSTL
CHLMQGSTF

SEQ ID NO: 35788 - protein, 9 aa, Artificial Sequence
  Description of Artificial Sequence: Synthetic peptide
  Seed: CSLMQGSTL
CHLMQGSTY

SEQ ID NO: 35789 - protein, 9 aa, Artificial Sequence
  Description of Artificial Sequence: Synthetic peptide
  Seed: CSLMQGSTL
CILMQGSTL

SEQ ID NO: 35790 - protein, 9 aa, Artificial Sequence
  Description of Artificial Sequence: Synthetic peptide
  Seed: CSLMQGSTL
CMLMQGSTF

SEQ ID NO: 35791 - protein, 9 aa, Artificial Sequence
  Description of Artificial Sequence: Synthetic peptide
  Seed: CSLMQGSTL
CMLMQGSTY

SEQ ID NO: 35792 - protein, 9 aa, Artificial Sequence
  Description of Artificial Sequence: Synthetic peptide
  Seed: CSLMQGSTL
CMLMQGSTV

SEQ ID NO: 35793 - protein, 9 aa, Artificial Sequence
  Description of Artificial Sequence: Synthetic peptide
  Seed: CSLMQGSTL
CFLMQGSTM

SEQ ID NO: 35794 - protein, 9 aa, Artificial Sequence
  Description of Artificial Sequence: Synthetic peptide
  Seed: CSLMQGSTL
CFLMQGSTF

SEQ ID NO: 35795 - protein, 9 aa, Artificial Sequence
  Description of Artificial Sequence: Synthetic peptide
  Seed: CSLMQGSTL
CFLMQGSTY

SEQ ID NO: 35796 - protein, 9 aa, Artificial Sequence
  Description of Artificial Sequence: Synthetic peptide
  Seed: CSLMQGSTL
CPLMQGSTF

SEQ ID NO: 35797 - protein, 9 aa, Artificial Sequence
  Description of Artificial Sequence: Synthetic peptide
  Seed: CSLMQGSTL
CPLMQGSTY

SEQ ID NO: 35798 - protein, 9 aa, Artificial Sequence
  Description of Artificial Sequence: Synthetic peptide
  Seed: CSLMQGSTL
CSLMQGSTI

SEQ ID NO: 35799 - protein, 9 aa, Artificial Sequence
  Description of Artificial Sequence: Synthetic peptide
  Seed: CSLMQGSTL
CSLMQGSTM

SEQ ID NO: 35800 - protein, 9 aa, Artificial Sequence
  Description of Artificial Sequence: Synthetic peptide
  Seed: CSLMQGSTL
CSLMQGSTF

SEQ ID NO: 35801 - protein, 9 aa, Artificial Sequence
  Description of Artificial Sequence: Synthetic peptide
  Seed: CSLMQGSTL
CSLMQGSTW

SEQ ID NO: 35802 - protein, 9 aa, Artificial Sequence
  Description of Artificial Sequence: Synthetic peptide
  Seed: CSLMQGSTL
CSLMQGSTY

SEQ ID NO: 35803 - protein, 9 aa, Artificial Sequence
  Description of Artificial Sequence: Synthetic peptide
  Seed: CSLMQGSTL
CSLMQGSTV

SEQ ID NO: 35804 - protein, 9 aa, Artificial Sequence
  Description of Artificial Sequence: Synthetic peptide
  Seed: CSLMQGSTL
CTLMQGSTI

SEQ ID NO: 35805 - protein, 9 aa, Artificial Sequence
  Description of Artificial Sequence: Synthetic peptide
  Seed: CSLMQGSTL
CTLMQGSTL

SEQ ID NO: 35806 - protein, 9 aa, Artificial Sequence
  Description of Artificial Sequence: Synthetic peptide
  Seed: CSLMQGSTL
CTLMQGSTM

SEQ ID NO: 35807 - protein, 9 aa, Artificial Sequence
  Description of Artificial Sequence: Synthetic peptide
  Seed: CSLMQGSTL
CTLMQGSTF

SEQ ID NO: 35808 - protein, 9 aa, Artificial Sequence
  Description of Artificial Sequence: Synthetic peptide
  Seed: CSLMQGSTL
CTLMQGSTW

SEQ ID NO: 35809 - protein, 9 aa, Artificial Sequence
  Description of Artificial Sequence: Synthetic peptide
  Seed: CSLMQGSTL
CTLMQGSTY

SEQ ID NO: 35810 - protein, 9 aa, Artificial Sequence
  Description of Artificial Sequence: Synthetic peptide
  Seed: CSLMQGSTL
CMLMQGSTW

SEQ ID NO: 35811 - protein, 9 aa, Artificial Sequence
  Description of Artificial Sequence: Synthetic peptide
  Seed: CSLMQGSTL
CMLMQGSTM

SEQ ID NO: 35812 - protein, 9 aa, Artificial Sequence
  Description of Artificial Sequence: Synthetic peptide
  Seed: CSLMQGSTL
CILMQGSTM

SEQ ID NO: 35813 - protein, 9 aa, Artificial Sequence
  Description of Artificial Sequence: Synthetic peptide
  Seed: CSLMQGSTL
CMLMQGSTL

SEQ ID NO: 35814 - protein, 9 aa, Artificial Sequence
  Description of Artificial Sequence: Synthetic peptide
  Seed: CSLMQGSTL
CILMQGSTF

SEQ ID NO: 35815 - protein, 9 aa, Artificial Sequence
  Description of Artificial Sequence: Synthetic peptide
  Seed: CSLMQGSTL
CILMQGSTW

SEQ ID NO: 35816 - protein, 9 aa, Artificial Sequence
  Description of Artificial Sequence: Synthetic peptide
  Seed: CSLMQGSTL
CILMQGSTY

SEQ ID NO: 35817 - protein, 9 aa, Artificial Sequence
  Description of Artificial Sequence: Synthetic peptide
  Seed: CSLMQGSTL
CLLMQGSTL

SEQ ID NO: 35818 - protein, 9 aa, Artificial Sequence
  Description of Artificial Sequence: Synthetic peptide
  Seed: CSLMQGSTL
CLLMQGSTM

SEQ ID NO: 35819 - protein, 9 aa, Artificial Sequence
  Description of Artificial Sequence: Synthetic peptide
  Seed: CSLMQGSTL
CLLMQGSTF

SEQ ID NO: 35820 - protein, 9 aa, Artificial Sequence
  Description of Artificial Sequence: Synthetic peptide
  Seed: CSLMQGSTL
CLLMQGSTW

SEQ ID NO: 35821 - protein, 9 aa, Artificial Sequence
  Description of Artificial Sequence: Synthetic peptide
  Seed: CSLMQGSTL
CLLMQGSTY

SEQ ID NO: 35822 - protein, 9 aa, Artificial Sequence
  Description of Artificial Sequence: Synthetic peptide
  Seed: CSLMQGSTL
CKLMQGSTH

SEQ ID NO: 35823 - protein, 9 aa, Artificial Sequence
  Description of Artificial Sequence: Synthetic peptide
  Seed: CSLMQGSTL
CKLMQGSTI

SEQ ID NO: 35824 - protein, 9 aa, Artificial Sequence
  Description of Artificial Sequence: Synthetic peptide
  Seed: CSLMQGSTL
CKLMQGSTL

SEQ ID NO: 35825 - protein, 9 aa, Artificial Sequence
  Description of Artificial Sequence: Synthetic peptide
  Seed: CSLMQGSTL
CKLMQGSTM

SEQ ID NO: 35826 - protein, 9 aa, Artificial Sequence
  Description of Artificial Sequence: Synthetic peptide
  Seed: CSLMQGSTL
CKLMQGSTF

SEQ ID NO: 35827 - protein, 9 aa, Artificial Sequence
  Description of Artificial Sequence: Synthetic peptide
  Seed: CSLMQGSTL
CKLMQGSTW

SEQ ID NO: 35828 - protein, 9 aa, Artificial Sequence
  Description of Artificial Sequence: Synthetic peptide
  Seed: CSLMQGSTL
CKLMQGSTY

SEQ ID NO: 35829 - protein, 9 aa, Artificial Sequence
  Description of Artificial Sequence: Synthetic peptide
  Seed: CSLMQGSTL
CKLMQGSTV

SEQ ID NO: 35830 - protein, 9 aa, Artificial Sequence
  Description of Artificial Sequence: Synthetic peptide
  Seed: CSLMQGSTL
CMLMQGSTA

SEQ ID NO: 35831 - protein, 9 aa, Artificial Sequence
  Description of Artificial Sequence: Synthetic peptide
  Seed: CSLMQGSTL
CMLMQGSTH

SEQ ID NO: 35832 - protein, 9 aa, Artificial Sequence
  Description of Artificial Sequence: Synthetic peptide
  Seed: CSLMQGSTL
CMLMQGSTI

SEQ ID NO: 35833 - protein, 11 aa, Artificial Sequence
  Description of Artificial Sequence: Synthetic peptide
  Seed: CVYGPAVSSGY
CFYGPAVSSGY

SEQ ID NO: 35834 - protein, 11 aa, Artificial Sequence
  Description of Artificial Sequence: Synthetic peptide
  Seed: CVYGPAVSSGY
CSYGPAVSSGK

SEQ ID NO: 35835 - protein, 10 aa, Artificial Sequence
  Description of Artificial Sequence: Synthetic peptide
  Seed: DATAGLTHLM
DCTAGLTHLM

SEQ ID NO: 35836 - protein, 10 aa, Artificial Sequence
  Description of Artificial Sequence: Synthetic peptide
  Seed: DATAGLTHIM
DTTAGLTHIF

SEQ ID NO: 35837 - protein, 10 aa, Artificial Sequence
  Description of Artificial Sequence: Synthetic peptide
  Seed: DATAGLTHIM
DSTAGLTHIL

SEQ ID NO: 35838 - protein, 10 aa, Artificial Sequence
  Description of Artificial Sequence: Synthetic peptide
  Seed: DATAGLTHIM
DSTAGLTHIM

SEQ ID NO: 35839 - protein, 10 aa, Artificial Sequence
  Description of Artificial Sequence: Synthetic peptide
  Seed: DATAGLTHIM
DSTAGLTHIF

SEQ ID NO: 35840 - protein, 10 aa, Artificial Sequence
  Description of Artificial Sequence: Synthetic peptide
  Seed: DATAGLTHIM
DSTAGLTHIY

SEQ ID NO: 35841 - protein, 10 aa, Artificial Sequence
  Description of Artificial Sequence: Synthetic peptide
  Seed: DATAGLTHIM
DSTAGLTHIV

SEQ ID NO: 35842 - protein, 10 aa, Artificial Sequence
  Description of Artificial Sequence: Synthetic peptide
  Seed: DATAGLTHIM
DTTAGLTHIA

SEQ ID NO: 35843 - protein, 10 aa, Artificial Sequence
  Description of Artificial Sequence: Synthetic peptide
  Seed: DATAGLTHIM
DTTAGLTHII

SEQ ID NO: 35844 - protein, 10 aa, Artificial Sequence
  Description of Artificial Sequence: Synthetic peptide
  Seed: DATAGLTHIM
DTTAGLTHIL

SEQ ID NO: 35845 - protein, 10 aa, Artificial Sequence
  Description of Artificial Sequence: Synthetic peptide
  Seed: DATAGLTHIM
DTTAGLTHIM

SEQ ID NO: 35846 - protein, 10 aa, Artificial Sequence
  Description of Artificial Sequence: Synthetic peptide
  Seed: DATAGLTHIM
DTTAGLTHIY

SEQ ID NO: 35847 - protein, 10 aa, Artificial Sequence
  Description of Artificial Sequence: Synthetic peptide
  Seed: DATAGLTHIM
DYTAGLTHIL

SEQ ID NO: 35848 - protein, 10 aa, Artificial Sequence
  Description of Artificial Sequence: Synthetic peptide
  Seed: DATAGLTHIM
DTTAGLTHIV

SEQ ID NO: 35849 - protein, 10 aa, Artificial Sequence
  Description of Artificial Sequence: Synthetic peptide
  Seed: DATAGLTHIM
DWTAGLTHIA

SEQ ID NO: 35850 - protein, 10 aa, Artificial Sequence
  Description of Artificial Sequence: Synthetic peptide
  Seed: DATAGLTHIM
DWTAGLTHII

SEQ ID NO: 35851 - protein, 10 aa, Artificial Sequence
  Description of Artificial Sequence: Synthetic peptide
  Seed: DATAGLTHIM
DWTAGLTHIL

SEQ ID NO: 35852 - protein, 10 aa, Artificial Sequence
  Description of Artificial Sequence: Synthetic peptide
  Seed: DATAGLTHIM
DWTAGLTHIM

SEQ ID NO: 35853 - protein, 10 aa, Artificial Sequence
  Description of Artificial Sequence: Synthetic peptide
  Seed: DATAGLTHIM
DWTAGLTHIF

SEQ ID NO: 35854 - protein, 10 aa, Artificial Sequence
  Description of Artificial Sequence: Synthetic peptide
  Seed: DATAGLTHIM
DWTAGLTHIY

SEQ ID NO: 35855 - protein, 10 aa, Artificial Sequence
  Description of Artificial Sequence: Synthetic peptide
  Seed: DATAGLTHIM
DWTAGLTHIV

SEQ ID NO: 35856 - protein, 10 aa, Artificial Sequence
  Description of Artificial Sequence: Synthetic peptide
  Seed: DATAGLTHIM
DYTAGLTHIA

SEQ ID NO: 35857 - protein, 10 aa, Artificial Sequence
  Description of Artificial Sequence: Synthetic peptide
  Seed: DATAGLTHIM
DSTAGLTHII

SEQ ID NO: 35858 - protein, 10 aa, Artificial Sequence
  Description of Artificial Sequence: Synthetic peptide
  Seed: DATAGLTHIM
DSTAGLTHIA

SEQ ID NO: 35859 - protein, 10 aa, Artificial Sequence
  Description of Artificial Sequence: Synthetic peptide
  Seed: DATAGLTHIM
DPTAGLTHIV

SEQ ID NO: 35860 - protein, 10 aa, Artificial Sequence
  Description of Artificial Sequence: Synthetic peptide
  Seed: DATAGLTHIM
DPTAGLTHIY

SEQ ID NO: 35861 - protein, 10 aa, Artificial Sequence
  Description of Artificial Sequence: Synthetic peptide
  Seed: DATAGLTHIM
DMTAGLTHIA

SEQ ID NO: 35862 - protein, 10 aa, Artificial Sequence
  Description of Artificial Sequence: Synthetic peptide
  Seed: DATAGLTHIM
DMTAGLTHII

SEQ ID NO: 35863 - protein, 10 aa, Artificial Sequence
  Description of Artificial Sequence: Synthetic peptide
  Seed: DATAGLTHIM
DMTAGLTHIL

SEQ ID NO: 35864 - protein, 10 aa, Artificial Sequence
  Description of Artificial Sequence: Synthetic peptide
  Seed: DATAGLTHIM
DMTAGLTHIM

SEQ ID NO: 35865 - protein, 10 aa, Artificial Sequence
  Description of Artificial Sequence: Synthetic peptide
  Seed: DATAGLTHIM
DMTAGLTHIF

SEQ ID NO: 35866 - protein, 10 aa, Artificial Sequence
  Description of Artificial Sequence: Synthetic peptide
  Seed: DATAGLTHIM
DMTAGLTHIY

SEQ ID NO: 35867 - protein, 10 aa, Artificial Sequence
  Description of Artificial Sequence: Synthetic peptide
  Seed: DATAGLTHIM
DMTAGLTHIV

SEQ ID NO: 35868 - protein, 10 aa, Artificial Sequence
  Description of Artificial Sequence: Synthetic peptide
  Seed: DATAGLTHIM
DFTAGLTHIA

SEQ ID NO: 35869 - protein, 10 aa, Artificial Sequence
  Description of Artificial Sequence: Synthetic peptide
  Seed: DATAGLTHIM
DFTAGLTHII

SEQ ID NO: 35870 - protein, 10 aa, Artificial Sequence
  Description of Artificial Sequence: Synthetic peptide
  Seed: DATAGLTHIM
DFTAGLTHIL

SEQ ID NO: 35871 - protein, 10 aa, Artificial Sequence
  Description of Artificial Sequence: Synthetic peptide
  Seed: DATAGLTHIM
DFTAGLTHIM

SEQ ID NO: 35872 - protein, 10 aa, Artificial Sequence
  Description of Artificial Sequence: Synthetic peptide
  Seed: DATAGLTHIM
DFTAGLTHIF

SEQ ID NO: 35873 - protein, 10 aa, Artificial Sequence
  Description of Artificial Sequence: Synthetic peptide
  Seed: DATAGLTHIM
DFTAGLTHIY

SEQ ID NO: 35874 - protein, 10 aa, Artificial Sequence
  Description of Artificial Sequence: Synthetic peptide
  Seed: DATAGLTHIM
DFTAGLTHIV

SEQ ID NO: 35875 - protein, 10 aa, Artificial Sequence
  Description of Artificial Sequence: Synthetic peptide
  Seed: DATAGLTHIM
DPTAGLTHIA

SEQ ID NO: 35876 - protein, 10 aa, Artificial Sequence
  Description of Artificial Sequence: Synthetic peptide
  Seed: DATAGLTHIM
DPTAGLTHII

SEQ ID NO: 35877 - protein, 10 aa, Artificial Sequence
  Description of Artificial Sequence: Synthetic peptide
  Seed: DATAGLTHIM
DPTAGLTHIL

SEQ ID NO: 35878 - protein, 10 aa, Artificial Sequence
  Description of Artificial Sequence: Synthetic peptide
  Seed: DATAGLTHIM
DPTAGLTHIM

SEQ ID NO: 35879 - protein, 10 aa, Artificial Sequence
  Description of Artificial Sequence: Synthetic peptide
  Seed: DATAGLTHIM
DPTAGLTHIF

SEQ ID NO: 35880 - protein, 10 aa, Artificial Sequence
  Description of Artificial Sequence: Synthetic peptide
  Seed: DATAGLTHIM
DYTAGLTHII

SEQ ID NO: 35881 - protein, 10 aa, Artificial Sequence
  Description of Artificial Sequence: Synthetic peptide
  Seed: DATAGLTHIM
DYTAGLTHIM

SEQ ID NO: 35882 - protein, 11 aa, Artificial Sequence
  Description of Artificial Sequence: Synthetic peptide
  Seed: CVYGPAVSSGY
CSYGPAVSSGF

SEQ ID NO: 35883 - protein, 10 aa, Artificial Sequence
  Description of Artificial Sequence: Synthetic peptide
  Seed: DATAGLTHLM
DDTAGLTHLA

SEQ ID NO: 35884 - protein, 10 aa, Artificial Sequence
  Description of Artificial Sequence: Synthetic peptide
  Seed: DATAGLTHLM
DRTAGLTHLV

SEQ ID NO: 35885 - protein, 10 aa, Artificial Sequence
  Description of Artificial Sequence: Synthetic peptide
  Seed: DATAGLTHLM
DNTAGLTHLA

SEQ ID NO: 35886 - protein, 10 aa, Artificial Sequence
  Description of Artificial Sequence: Synthetic peptide
  Seed: DATAGLTHLM
DNTAGLTHLI

SEQ ID NO: 35887 - protein, 10 aa, Artificial Sequence
  Description of Artificial Sequence: Synthetic peptide
  Seed: DATAGLTHLM
DNTAGLTHLL

SEQ ID NO: 35888 - protein, 10 aa, Artificial Sequence
  Description of Artificial Sequence: Synthetic peptide
  Seed: DATAGLTHLM
DNTAGLTHLM

SEQ ID NO: 35889 - protein, 10 aa, Artificial Sequence
  Description of Artificial Sequence: Synthetic peptide
  Seed: DATAGLTHLM
DNTAGLTHLF

SEQ ID NO: 35890 - protein, 10 aa, Artificial Sequence
  Description of Artificial Sequence: Synthetic peptide
  Seed: DATAGLTHLM
DNTAGLTHLT

SEQ ID NO: 35891 - protein, 10 aa, Artificial Sequence
  Description of Artificial Sequence: Synthetic peptide
  Seed: DATAGLTHLM
DNTAGLTHLY

SEQ ID NO: 35892 - protein, 10 aa, Artificial Sequence
  Description of Artificial Sequence: Synthetic peptide
  Seed: DATAGLTHLM
DNTAGLTHLV

SEQ ID NO: 35893 - protein, 10 aa, Artificial Sequence
  Description of Artificial Sequence: Synthetic peptide
  Seed: DATAGLTHLM
DDTAGLTHLI

SEQ ID NO: 35894 - protein, 10 aa, Artificial Sequence
  Description of Artificial Sequence: Synthetic peptide
  Seed: DATAGLTHIM
DYTAGLTHIF

SEQ ID NO: 35895 - protein, 10 aa, Artificial Sequence
  Description of Artificial Sequence: Synthetic peptide
  Seed: DATAGLTHLM
DDTAGLTHLL

SEQ ID NO: 35896 - protein, 10 aa, Artificial Sequence
  Description of Artificial Sequence: Synthetic peptide
  Seed: DATAGLTHLM
DDTAGLTHLM

SEQ ID NO: 35897 - protein, 10 aa, Artificial Sequence
  Description of Artificial Sequence: Synthetic peptide
  Seed: DATAGLTHLM
DDTAGLTHLF

SEQ ID NO: 35898 - protein, 10 aa, Artificial Sequence
  Description of Artificial Sequence: Synthetic peptide
  Seed: DATAGLTHLM
DDTAGLTHLT

SEQ ID NO: 35899 - protein, 10 aa, Artificial Sequence
  Description of Artificial Sequence: Synthetic peptide
  Seed: DATAGLTHLM
DDTAGLTHLY

SEQ ID NO: 35900 - protein, 10 aa, Artificial Sequence
  Description of Artificial Sequence: Synthetic peptide
  Seed: DATAGLTHLM
DDTAGLTHLV

SEQ ID NO: 35901 - protein, 10 aa, Artificial Sequence
  Description of Artificial Sequence: Synthetic peptide
  Seed: DATAGLTHLM
DCTAGLTHLA

SEQ ID NO: 35902 - protein, 10 aa, Artificial Sequence
  Description of Artificial Sequence: Synthetic peptide
  Seed: DATAGLTHLM
DCTAGLTHLI

SEQ ID NO: 35903 - protein, 10 aa, Artificial Sequence
  Description of Artificial Sequence: Synthetic peptide
  Seed: DATAGLTHLM
DCTAGLTHLL

SEQ ID NO: 35904 - protein, 10 aa, Artificial Sequence
  Description of Artificial Sequence: Synthetic peptide
  Seed: DATAGLTHLM
DRTAGLTHLY

SEQ ID NO: 35905 - protein, 10 aa, Artificial Sequence
  Description of Artificial Sequence: Synthetic peptide
  Seed: DATAGLTHLM
DRTAGLTHLT

SEQ ID NO: 35906 - protein, 10 aa, Artificial Sequence
  Description of Artificial Sequence: Synthetic peptide
  Seed: DATAGLTHLM
DRTAGLTHLF

SEQ ID NO: 35907 - protein, 10 aa, Artificial Sequence
  Description of Artificial Sequence: Synthetic peptide
  Seed: DATAGLTHLM
DRTAGLTHLM

SEQ ID NO: 35908 - protein, 10 aa, Artificial Sequence
  Description of Artificial Sequence: Synthetic peptide
  Seed: DATAGLTHIM
DYTAGLTHIY

SEQ ID NO: 35909 - protein, 10 aa, Artificial Sequence
  Description of Artificial Sequence: Synthetic peptide
  Seed: DATAGLTHIM
DYTAGLTHIV

SEQ ID NO: 35910 - protein, 10 aa, Artificial Sequence
  Description of Artificial Sequence: Synthetic peptide
  Seed: DATAGLTHIM
DVTAGLTHIA

SEQ ID NO: 35911 - protein, 10 aa, Artificial Sequence
  Description of Artificial Sequence: Synthetic peptide
  Seed: DATAGLTHIM
DVTAGLTHII

SEQ ID NO: 35912 - protein, 10 aa, Artificial Sequence
  Description of Artificial Sequence: Synthetic peptide
  Seed: DATAGLTHIM
DVTAGLTHIL

SEQ ID NO: 35913 - protein, 10 aa, Artificial Sequence
  Description of Artificial Sequence: Synthetic peptide
  Seed: DATAGLTHIM
DVTAGLTHIM

SEQ ID NO: 35914 - protein, 10 aa, Artificial Sequence
  Description of Artificial Sequence: Synthetic peptide
  Seed: DATAGLTHIM
DVTAGLTHIF

SEQ ID NO: 35915 - protein, 10 aa, Artificial Sequence
  Description of Artificial Sequence: Synthetic peptide
  Seed: DATAGLTHIM
DVTAGLTHIY

SEQ ID NO: 35916 - protein, 10 aa, Artificial Sequence
  Description of Artificial Sequence: Synthetic peptide
  Seed: DATAGLTHIM
DVTAGLTHIV

SEQ ID NO: 35917 - protein, 10 aa, Artificial Sequence
  Description of Artificial Sequence: Synthetic peptide
  Seed: DATAGLTHLM
DATAGLTHLA

SEQ ID NO: 35918 - protein, 10 aa, Artificial Sequence
  Description of Artificial Sequence: Synthetic peptide
  Seed: DATAGLTHLM
DATAGLTHLI

SEQ ID NO: 35919 - protein, 10 aa, Artificial Sequence
  Description of Artificial Sequence: Synthetic peptide
  Seed: DATAGLTHLM
DATAGLTHLL

SEQ ID NO: 35920 - protein, 10 aa, Artificial Sequence
  Description of Artificial Sequence: Synthetic peptide
  Seed: DATAGLTHLM
DATAGLTHLF

SEQ ID NO: 35921 - protein, 10 aa, Artificial Sequence
  Description of Artificial Sequence: Synthetic peptide
  Seed: DATAGLTHLM
DATAGLTHLT

SEQ ID NO: 35922 - protein, 10 aa, Artificial Sequence
  Description of Artificial Sequence: Synthetic peptide
  Seed: DATAGLTHLM
DATAGLTHLY

SEQ ID NO: 35923 - protein, 10 aa, Artificial Sequence
  Description of Artificial Sequence: Synthetic peptide
  Seed: DATAGLTHLM
DATAGLTHLV

SEQ ID NO: 35924 - protein, 10 aa, Artificial Sequence
  Description of Artificial Sequence: Synthetic peptide
  Seed: DATAGLTHLM
DRTAGLTHLA

SEQ ID NO: 35925 - protein, 10 aa, Artificial Sequence
  Description of Artificial Sequence: Synthetic peptide
  Seed: DATAGLTHLM
DRTAGLTHLI

SEQ ID NO: 35926 - protein, 10 aa, Artificial Sequence
  Description of Artificial Sequence: Synthetic peptide
  Seed: DATAGLTHLM
DRTAGLTHLL

SEQ ID NO: 35927 - protein, 10 aa, Artificial Sequence
  Description of Artificial Sequence: Synthetic peptide
  Seed: DATAGLTHIM
DKTAGLTHIV

SEQ ID NO: 35928 - protein, 10 aa, Artificial Sequence
  Description of Artificial Sequence: Synthetic peptide
  Seed: DATAGLTHIM
DKTAGLTHIY

SEQ ID NO: 35929 - protein, 10 aa, Artificial Sequence
  Description of Artificial Sequence: Synthetic peptide
  Seed: DATAGLTHIM
DKTAGLTHIF

SEQ ID NO: 35930 - protein, 10 aa, Artificial Sequence
  Description of Artificial Sequence: Synthetic peptide
  Seed: DATAGLTHIM
DDTAGLTHIL

SEQ ID NO: 35931 - protein, 10 aa, Artificial Sequence
  Description of Artificial Sequence: Synthetic peptide
  Seed: DATAGLTHIM
DNTAGLTHIA

SEQ ID NO: 35932 - protein, 10 aa, Artificial Sequence
  Description of Artificial Sequence: Synthetic peptide
  Seed: DATAGLTHIM
DNTAGLTHII

SEQ ID NO: 35933 - protein, 10 aa, Artificial Sequence
  Description of Artificial Sequence: Synthetic peptide
  Seed: DATAGLTHIM
DNTAGLTHIL

SEQ ID NO: 35934 - protein, 10 aa, Artificial Sequence
  Description of Artificial Sequence: Synthetic peptide
  Seed: DATAGLTHIM
DNTAGLTHIM

SEQ ID NO: 35935 - protein, 10 aa, Artificial Sequence
  Description of Artificial Sequence: Synthetic peptide
  Seed: DATAGLTHIM
DNTAGLTHIF

SEQ ID NO: 35936 - protein, 10 aa, Artificial Sequence
  Description of Artificial Sequence: Synthetic peptide
  Seed: DATAGLTHIM
DNTAGLTHIY

SEQ ID NO: 35937 - protein, 10 aa, Artificial Sequence
  Description of Artificial Sequence: Synthetic peptide
  Seed: DATAGLTHIM
DNTAGLTHIV

SEQ ID NO: 35938 - protein, 10 aa, Artificial Sequence
  Description of Artificial Sequence: Synthetic peptide
  Seed: DATAGLTHIM
DDTAGLTHIA

SEQ ID NO: 35939 - protein, 10 aa, Artificial Sequence
  Description of Artificial Sequence: Synthetic peptide
  Seed: DATAGLTHIM
DDTAGLTHII

SEQ ID NO: 35940 - protein, 10 aa, Artificial Sequence
  Description of Artificial Sequence: Synthetic peptide
  Seed: DATAGLTHIM
DDTAGLTHIM

SEQ ID NO: 35941 - protein, 10 aa, Artificial Sequence
  Description of Artificial Sequence: Synthetic peptide
  Seed: DATAGLTHIM
DKTAGLTHIM

SEQ ID NO: 35942 - protein, 10 aa, Artificial Sequence
  Description of Artificial Sequence: Synthetic peptide
  Seed: DATAGLTHIM
DDTAGLTHIF

SEQ ID NO: 35943 - protein, 10 aa, Artificial Sequence
  Description of Artificial Sequence: Synthetic peptide
  Seed: DATAGLTHIM
DDTAGLTHIY

SEQ ID NO: 35944 - protein, 10 aa, Artificial Sequence
  Description of Artificial Sequence: Synthetic peptide
  Seed: DATAGLTHIM
DDTAGLTHIV

SEQ ID NO: 35945 - protein, 10 aa, Artificial Sequence
  Description of Artificial Sequence: Synthetic peptide
  Seed: DATAGLTHIM
DCTAGLTHIA

SEQ ID NO: 35946 - protein, 10 aa, Artificial Sequence
  Description of Artificial Sequence: Synthetic peptide
  Seed: DATAGLTHIM
DCTAGLTHII

SEQ ID NO: 35947 - protein, 10 aa, Artificial Sequence
  Description of Artificial Sequence: Synthetic peptide
  Seed: DATAGLTHIM
DCTAGLTHIL

SEQ ID NO: 35948 - protein, 10 aa, Artificial Sequence
  Description of Artificial Sequence: Synthetic peptide
  Seed: DATAGLTHIM
DCTAGLTHIM

SEQ ID NO: 35949 - protein, 10 aa, Artificial Sequence
  Description of Artificial Sequence: Synthetic peptide
  Seed: DATAGLTHIM
DCTAGLTHIF

SEQ ID NO: 35950 - protein, 10 aa, Artificial Sequence
  Description of Artificial Sequence: Synthetic peptide
  Seed: DATAGLTHIM
DCTAGLTHIY

SEQ ID NO: 35951 - protein, 10 aa, Artificial Sequence
  Description of Artificial Sequence: Synthetic peptide
  Seed: DATAGLTHIM
DRTAGLTHIV

SEQ ID NO: 35952 - protein, 10 aa, Artificial Sequence
  Description of Artificial Sequence: Synthetic peptide
  Seed: DATAGLTHIM
DRTAGLTHIY

SEQ ID NO: 35953 - protein, 10 aa, Artificial Sequence
  Description of Artificial Sequence: Synthetic peptide
  Seed: DATAGLTHIM
DRTAGLTHIF

SEQ ID NO: 35954 - protein, 10 aa, Artificial Sequence
  Description of Artificial Sequence: Synthetic peptide
  Seed: DATAGLTHIM
DRTAGLTHIM

SEQ ID NO: 35955 - protein, 11 aa, Artificial Sequence
  Description of Artificial Sequence: Synthetic peptide
  Seed: CVYGPAVSSGY
CSYGPAVSSGY

SEQ ID NO: 35956 - protein, 11 aa, Artificial Sequence
  Description of Artificial Sequence: Synthetic peptide
  Seed: CVYGPAVSSGY
CTYGPAVSSGR

SEQ ID NO: 35957 - protein, 11 aa, Artificial Sequence
  Description of Artificial Sequence: Synthetic peptide
  Seed: CVYGPAVSSGY
CTYGPAVSSGK

SEQ ID NO: 35958 - protein, 11 aa, Artificial Sequence
  Description of Artificial Sequence: Synthetic peptide
  Seed: CVYGPAVSSGY
CTYGPAVSSGF

SEQ ID NO: 35959 - protein, 11 aa, Artificial Sequence
  Description of Artificial Sequence: Synthetic peptide
  Seed: CVYGPAVSSGY
CTYGPAVSSGY

SEQ ID NO: 35960 - protein, 11 aa, Artificial Sequence
  Description of Artificial Sequence: Synthetic peptide
  Seed: CVYGPAVSSGY
CWYGPAVSSGY

SEQ ID NO: 35961 - protein, 11 aa, Artificial Sequence
  Description of Artificial Sequence: Synthetic peptide
  Seed: CVYGPAVSSGY
CYYGPAVSSGY

SEQ ID NO: 35962 - protein, 11 aa, Artificial Sequence
  Description of Artificial Sequence: Synthetic peptide
  Seed: CVYGPAVSSGY
CVYGPAVSSGR

SEQ ID NO: 35963 - protein, 11 aa, Artificial Sequence
  Description of Artificial Sequence: Synthetic peptide
  Seed: CVYGPAVSSGY
CVYGPAVSSGK

SEQ ID NO: 35964 - protein, 11 aa, Artificial Sequence
  Description of Artificial Sequence: Synthetic peptide
  Seed: CVYGPAVSSGY
CVYGPAVSSGF

SEQ ID NO: 35965 - protein, 10 aa, Artificial Sequence
  Description of Artificial Sequence: Synthetic peptide
  Seed: DATAGLTHIM
DATAGLTHIA

SEQ ID NO: 35966 - protein, 10 aa, Artificial Sequence
  Description of Artificial Sequence: Synthetic peptide
  Seed: DATAGLTHIM
DATAGLTHII

SEQ ID NO: 35967 - protein, 10 aa, Artificial Sequence
  Description of Artificial Sequence: Synthetic peptide
  Seed: DATAGLTHIM
DATAGLTHIL

SEQ ID NO: 35968 - protein, 10 aa, Artificial Sequence
  Description of Artificial Sequence: Synthetic peptide
  Seed: DATAGLTHIM
DATAGLTHIF

SEQ ID NO: 35969 - protein, 10 aa, Artificial Sequence
  Description of Artificial Sequence: Synthetic peptide
  Seed: DATAGLTHIM
DATAGLTHIY

SEQ ID NO: 35970 - protein, 10 aa, Artificial Sequence
  Description of Artificial Sequence: Synthetic peptide
  Seed: DATAGLTHIM
DATAGLTHIV

SEQ ID NO: 35971 - protein, 10 aa, Artificial Sequence
  Description of Artificial Sequence: Synthetic peptide
  Seed: DATAGLTHIM
DRTAGLTHIA

SEQ ID NO: 35972 - protein, 10 aa, Artificial Sequence
  Description of Artificial Sequence: Synthetic peptide
  Seed: DATAGLTHIM
DRTAGLTHII

SEQ ID NO: 35973 - protein, 10 aa, Artificial Sequence
  Description of Artificial Sequence: Synthetic peptide
  Seed: DATAGLTHIM
DRTAGLTHIL

SEQ ID NO: 35974 - protein, 10 aa, Artificial Sequence
  Description of Artificial Sequence: Synthetic peptide
  Seed: DATAGLTHIM
DCTAGLTHIV

SEQ ID NO: 35975 - protein, 10 aa, Artificial Sequence
  Description of Artificial Sequence: Synthetic peptide
  Seed: DATAGLTHIM
DQTAGLTHIA

SEQ ID NO: 35976 - protein, 10 aa, Artificial Sequence
  Description of Artificial Sequence: Synthetic peptide
  Seed: DATAGLTHIM
DQTAGLTHII

SEQ ID NO: 35977 - protein, 10 aa, Artificial Sequence
  Description of Artificial Sequence: Synthetic peptide
  Seed: DATAGLTHIM
DHTAGLTHIM

SEQ ID NO: 35978 - protein, 10 aa, Artificial Sequence
  Description of Artificial Sequence: Synthetic peptide
  Seed: DATAGLTHIM
DHTAGLTHIY

SEQ ID NO: 35979 - protein, 10 aa, Artificial Sequence
  Description of Artificial Sequence: Synthetic peptide
  Seed: DATAGLTHIM
DHTAGLTHIV

SEQ ID NO: 35980 - protein, 10 aa, Artificial Sequence
  Description of Artificial Sequence: Synthetic peptide
  Seed: DATAGLTHIM
DITAGLTHIA

SEQ ID NO: 35981 - protein, 10 aa, Artificial Sequence
  Description of Artificial Sequence: Synthetic peptide
  Seed: DATAGLTHIM
DITAGLTHII

SEQ ID NO: 35982 - protein, 10 aa, Artificial Sequence
  Description of Artificial Sequence: Synthetic peptide
  Seed: DATAGLTHIM
DITAGLTHIL

SEQ ID NO: 35983 - protein, 10 aa, Artificial Sequence
  Description of Artificial Sequence: Synthetic peptide
  Seed: DATAGLTHIM
DITAGLTHIM

SEQ ID NO: 35984 - protein, 10 aa, Artificial Sequence
  Description of Artificial Sequence: Synthetic peptide
  Seed: DATAGLTHIM
DITAGLTHIF

SEQ ID NO: 35985 - protein, 10 aa, Artificial Sequence
  Description of Artificial Sequence: Synthetic peptide
  Seed: DATAGLTHIM
DITAGLTHIY

SEQ ID NO: 35986 - protein, 10 aa, Artificial Sequence
  Description of Artificial Sequence: Synthetic peptide
  Seed: DATAGLTHIM
DITAGLTHIV

SEQ ID NO: 35987 - protein, 10 aa, Artificial Sequence
  Description of Artificial Sequence: Synthetic peptide
  Seed: DATAGLTHIM
DLTAGLTHIA

SEQ ID NO: 35988 - protein, 10 aa, Artificial Sequence
  Description of Artificial Sequence: Synthetic peptide
  Seed: DATAGLTHIM
DLTAGLTHII

SEQ ID NO: 35989 - protein, 10 aa, Artificial Sequence
  Description of Artificial Sequence: Synthetic peptide
  Seed: DATAGLTHIM
DLTAGLTHIL

SEQ ID NO: 35990 - protein, 10 aa, Artificial Sequence
  Description of Artificial Sequence: Synthetic peptide
  Seed: DATAGLTHIM
DLTAGLTHIM

SEQ ID NO: 35991 - protein, 10 aa, Artificial Sequence
  Description of Artificial Sequence: Synthetic peptide
  Seed: DATAGLTHIM
DLTAGLTHIF

SEQ ID NO: 35992 - protein, 10 aa, Artificial Sequence
  Description of Artificial Sequence: Synthetic peptide
  Seed: DATAGLTHIM
DLTAGLTHIY

SEQ ID NO: 35993 - protein, 10 aa, Artificial Sequence
  Description of Artificial Sequence: Synthetic peptide
  Seed: DATAGLTHIM
DLTAGLTHIV

SEQ ID NO: 35994 - protein, 10 aa, Artificial Sequence
  Description of Artificial Sequence: Synthetic peptide
  Seed: DATAGLTHIM
DKTAGLTHIA

SEQ ID NO: 35995 - protein, 10 aa, Artificial Sequence
  Description of Artificial Sequence: Synthetic peptide
  Seed: DATAGLTHIM
DKTAGLTHII

SEQ ID NO: 35996 - protein, 10 aa, Artificial Sequence
  Description of Artificial Sequence: Synthetic peptide
  Seed: DATAGLTHIM
DKTAGLTHIL

SEQ ID NO: 35997 - protein, 10 aa, Artificial Sequence
  Description of Artificial Sequence: Synthetic peptide
  Seed: DATAGLTHIM
DHTAGLTHIF

SEQ ID NO: 35998 - protein, 10 aa, Artificial Sequence
  Description of Artificial Sequence: Synthetic peptide
  Seed: DATAGLTHIM
DHTAGLTHIL

SEQ ID NO: 35999 - protein, 10 aa, Artificial Sequence
  Description of Artificial Sequence: Synthetic peptide
  Seed: DATAGLTHIM
DQTAGLTHIL

SEQ ID NO: 36000 - protein, 10 aa, Artificial Sequence
  Description of Artificial Sequence: Synthetic peptide
  Seed: DATAGLTHIM
DHTAGLTHII

SEQ ID NO: 36001 - protein, 10 aa, Artificial Sequence
  Description of Artificial Sequence: Synthetic peptide
  Seed: DATAGLTHIM
DQTAGLTHIM

SEQ ID NO: 36002 - protein, 10 aa, Artificial Sequence
  Description of Artificial Sequence: Synthetic peptide
  Seed: DATAGLTHIM
DQTAGLTHIF

SEQ ID NO: 36003 - protein, 10 aa, Artificial Sequence
  Description of Artificial Sequence: Synthetic peptide
  Seed: DATAGLTHIM
DQTAGLTHIY

SEQ ID NO: 36004 - protein, 10 aa, Artificial Sequence
  Description of Artificial Sequence: Synthetic peptide
  Seed: DATAGLTHIM
DQTAGLTHIV

SEQ ID NO: 36005 - protein, 10 aa, Artificial Sequence
  Description of Artificial Sequence: Synthetic peptide
  Seed: DATAGLTHIM
DETAGLTHIA

SEQ ID NO: 36006 - protein, 10 aa, Artificial Sequence
  Description of Artificial Sequence: Synthetic peptide
  Seed: DATAGLTHIM
DETAGLTHII

SEQ ID NO: 36007 - protein, 10 aa, Artificial Sequence
  Description of Artificial Sequence: Synthetic peptide
  Seed: DATAGLTHIM
DETAGLTHIL

SEQ ID NO: 36008 - protein, 10 aa, Artificial Sequence
  Description of Artificial Sequence: Synthetic peptide
  Seed: DATAGLTHIM
DETAGLTHIM

SEQ ID NO: 36009 - protein, 10 aa, Artificial Sequence
  Description of Artificial Sequence: Synthetic peptide
  Seed: DATAGLTHIM
DETAGLTHIF

SEQ ID NO: 36010 - protein, 10 aa, Artificial Sequence
  Description of Artificial Sequence: Synthetic peptide
  Seed: DATAGLTHIM
DETAGLTHIY

SEQ ID NO: 36011 - protein, 10 aa, Artificial Sequence
  Description of Artificial Sequence: Synthetic peptide
  Seed: DATAGLTHIM
DETAGLTHIV

SEQ ID NO: 36012 - protein, 10 aa, Artificial Sequence
  Description of Artificial Sequence: Synthetic peptide
  Seed: DATAGLTHIM
DGTAGLTHIA

SEQ ID NO: 36013 - protein, 10 aa, Artificial Sequence
  Description of Artificial Sequence: Synthetic peptide
  Seed: DATAGLTHIM
DGTAGLTHII

SEQ ID NO: 36014 - protein, 10 aa, Artificial Sequence
  Description of Artificial Sequence: Synthetic peptide
  Seed: DATAGLTHIM
DGTAGLTHIL

SEQ ID NO: 36015 - protein, 10 aa, Artificial Sequence
  Description of Artificial Sequence: Synthetic peptide
  Seed: DATAGLTHIM
DGTAGLTHIM

SEQ ID NO: 36016 - protein, 10 aa, Artificial Sequence
  Description of Artificial Sequence: Synthetic peptide
  Seed: DATAGLTHIM
DGTAGLTHIF

SEQ ID NO: 36017 - protein, 10 aa, Artificial Sequence
  Description of Artificial Sequence: Synthetic peptide
  Seed: DATAGLTHIM
DGTAGLTHIY

SEQ ID NO: 36018 - protein, 10 aa, Artificial Sequence
  Description of Artificial Sequence: Synthetic peptide
  Seed: DATAGLTHIM
DGTAGLTHIV

SEQ ID NO: 36019 - protein, 10 aa, Artificial Sequence
  Description of Artificial Sequence: Synthetic peptide
  Seed: DATAGLTHIM
DHTAGLTHIA

SEQ ID NO: 36020 - protein, 11 aa, Artificial Sequence
  Description of Artificial Sequence: Synthetic peptide
  Seed: DRNFWRGENGR
DENFWRGENGR

SEQ ID NO: 36021 - protein, 11 aa, Artificial Sequence
  Description of Artificial Sequence: Synthetic peptide
  Seed: DRNFWRGENGR
DGNFWRGENGR

SEQ ID NO: 36022 - protein, 11 aa, Artificial Sequence
  Description of Artificial Sequence: Synthetic peptide
  Seed: DRNFWRGENGR
DHNFWRGENGR

SEQ ID NO: 36023 - protein, 10 aa, Artificial Sequence
  Description of Artificial Sequence: Synthetic peptide
  Seed: EIEDLIFSAR
ELEDLIFSAR

SEQ ID NO: 36024 - protein, 9 aa, Artificial Sequence
  Description of Artificial Sequence: Synthetic peptide
  Seed: EIEDLIFSA
ETEDLIFSV

SEQ ID NO: 36025 - protein, 9 aa, Artificial Sequence
  Description of Artificial Sequence: Synthetic peptide
  Seed: EIEDLIFSA
EVEDLIFSA

SEQ ID NO: 36026 - protein, 9 aa, Artificial Sequence
  Description of Artificial Sequence: Synthetic peptide
  Seed: EIEDLIFSA
EVEDLIFSI

SEQ ID NO: 36027 - protein, 9 aa, Artificial Sequence
  Description of Artificial Sequence: Synthetic peptide
  Seed: EIEDLIFSA
EVEDLIFSL

SEQ ID NO: 36028 - protein, 9 aa, Artificial Sequence
  Description of Artificial Sequence: Synthetic peptide
  Seed: EIEDLIFSA
EVEDLIFSM

SEQ ID NO: 36029 - protein, 9 aa, Artificial Sequence
  Description of Artificial Sequence: Synthetic peptide
  Seed: EIEDLIFSA
EVEDLIFSV

SEQ ID NO: 36030 - protein, 10 aa, Artificial Sequence
  Description of Artificial Sequence: Synthetic peptide
  Seed: EIEDLIFSAR
EAEDLIFSAR

SEQ ID NO: 36031 - protein, 10 aa, Artificial Sequence
  Description of Artificial Sequence: Synthetic peptide
  Seed: EIEDLIFSAR
EAEDLIFSAK

SEQ ID NO: 36032 - protein, 10 aa, Artificial Sequence
  Description of Artificial Sequence: Synthetic peptide
  Seed: EIEDLIFSAR
EIEDLIFSAK

SEQ ID NO: 36033 - protein, 10 aa, Artificial Sequence
  Description of Artificial Sequence: Synthetic peptide
  Seed: EIEDLIFSAR
ELEDLIFSAK

SEQ ID NO: 36034 - protein, 10 aa, Artificial Sequence
  Description of Artificial Sequence: Synthetic peptide
  Seed: EIEDLIFSAR
EVEDLIFSAK

SEQ ID NO: 36035 - protein, 10 aa, Artificial Sequence
  Description of Artificial Sequence: Synthetic peptide
  Seed: EIEDLIFSAR
EMEDLIFSAR

SEQ ID NO: 36036 - protein, 10 aa, Artificial Sequence
  Description of Artificial Sequence: Synthetic peptide
  Seed: EIEDLIFSAR
EMEDLIFSAK

SEQ ID NO: 36037 - protein, 10 aa, Artificial Sequence
  Description of Artificial Sequence: Synthetic peptide
  Seed: EIEDLIFSAR
EFEDLIFSAR

SEQ ID NO: 36038 - protein, 10 aa, Artificial Sequence
  Description of Artificial Sequence: Synthetic peptide
  Seed: EIEDLIFSAR
ESEDLIFSAR

SEQ ID NO: 36039 - protein, 10 aa, Artificial Sequence
  Description of Artificial Sequence: Synthetic peptide
  Seed: EIEDLIFSAR
ESEDLIFSAK

SEQ ID NO: 36040 - protein, 10 aa, Artificial Sequence
  Description of Artificial Sequence: Synthetic peptide
  Seed: EIEDLIFSAR
ETEDLIFSAR

SEQ ID NO: 36041 - protein, 10 aa, Artificial Sequence
  Description of Artificial Sequence: Synthetic peptide
  Seed: EIEDLIFSAR
ETEDLIFSAK

SEQ ID NO: 36042 - protein, 10 aa, Artificial Sequence
  Description of Artificial Sequence: Synthetic peptide
  Seed: EIEDLIFSAR
EWEDLIFSAR

SEQ ID NO: 36043 - protein, 10 aa, Artificial Sequence
  Description of Artificial Sequence: Synthetic peptide
  Seed: EIEDLIFSAR
EYEDLIFSAR

SEQ ID NO: 36044 - protein, 9 aa, Artificial Sequence
  Description of Artificial Sequence: Synthetic peptide
  Seed: EIEDLIFSA
ETEDLIFST

SEQ ID NO: 36045 - protein, 9 aa, Artificial Sequence
  Description of Artificial Sequence: Synthetic peptide
  Seed: EIEDLIFSA
ETEDLIFSM

SEQ ID NO: 36046 - protein, 9 aa, Artificial Sequence
  Description of Artificial Sequence: Synthetic peptide
  Seed: EIEDLIFSA
ETEDLIFSL

SEQ ID NO: 36047 - protein, 9 aa, Artificial Sequence
  Description of Artificial Sequence: Synthetic peptide
  Seed: EIEDLIFSA
ETEDLIFSI

SEQ ID NO: 36048 - protein, 9 aa, Artificial Sequence
  Description of Artificial Sequence: Synthetic peptide
  Seed: EIEDLIFSA
EAEDLIFSA

SEQ ID NO: 36049 - protein, 9 aa, Artificial Sequence
  Description of Artificial Sequence: Synthetic peptide
  Seed: EIEDLIFSA
EAEDLIFSI

SEQ ID NO: 36050 - protein, 9 aa, Artificial Sequence
  Description of Artificial Sequence: Synthetic peptide
  Seed: EIEDLIFSA
EAEDLIFSL

SEQ ID NO: 36051 - protein, 9 aa, Artificial Sequence
  Description of Artificial Sequence: Synthetic peptide
  Seed: EIEDLIFSA
EAEDLIFSV

SEQ ID NO: 36052 - protein, 9 aa, Artificial Sequence
  Description of Artificial Sequence: Synthetic peptide
  Seed: EIEDLIFSA
EIEDLIFSI

SEQ ID NO: 36053 - protein, 9 aa, Artificial Sequence
  Description of Artificial Sequence: Synthetic peptide
  Seed: EIEDLIFSA
EIEDLIFSL

SEQ ID NO: 36054 - protein, 9 aa, Artificial Sequence
  Description of Artificial Sequence: Synthetic peptide
  Seed: EIEDLIFSA
EIEDLIFSM

SEQ ID NO: 36055 - protein, 9 aa, Artificial Sequence
  Description of Artificial Sequence: Synthetic peptide
  Seed: EIEDLIFSA
EIEDLIFSV

SEQ ID NO: 36056 - protein, 9 aa, Artificial Sequence
  Description of Artificial Sequence: Synthetic peptide
  Seed: EIEDLIFSA
ELEDLIFSI

SEQ ID NO: 36057 - protein, 9 aa, Artificial Sequence
  Description of Artificial Sequence: Synthetic peptide
  Seed: EIEDLIFSA
ELEDLIFSL

SEQ ID NO: 36058 - protein, 9 aa, Artificial Sequence
  Description of Artificial Sequence: Synthetic peptide
  Seed: EIEDLIFSA
ELEDLIFSV

SEQ ID NO: 36059 - protein, 9 aa, Artificial Sequence
  Description of Artificial Sequence: Synthetic peptide
  Seed: EIEDLIFSA
EMEDLIFSI

SEQ ID NO: 36060 - protein, 9 aa, Artificial Sequence
  Description of Artificial Sequence: Synthetic peptide
  Seed: EIEDLIFSA
EMEDLIFSL

SEQ ID NO: 36061 - protein, 9 aa, Artificial Sequence
  Description of Artificial Sequence: Synthetic peptide
  Seed: EIEDLIFSA
EMEDLIFSV

SEQ ID NO: 36062 - protein, 9 aa, Artificial Sequence
  Description of Artificial Sequence: Synthetic peptide
  Seed: EIEDLIFSA
ESEDLIFSA

SEQ ID NO: 36063 - protein, 9 aa, Artificial Sequence
  Description of Artificial Sequence: Synthetic peptide
  Seed: EIEDLIFSA
ESEDLIFSI

SEQ ID NO: 36064 - protein, 9 aa, Artificial Sequence
  Description of Artificial Sequence: Synthetic peptide
  Seed: EIEDLIFSA
ESEDLIFSL

SEQ ID NO: 36065 - protein, 9 aa, Artificial Sequence
  Description of Artificial Sequence: Synthetic peptide
  Seed: EIEDLIFSA
ESEDLIFSV

SEQ ID NO: 36066 - protein, 9 aa, Artificial Sequence
  Description of Artificial Sequence: Synthetic peptide
  Seed: EIEDLIFSA
ETEDLIFSA

SEQ ID NO: 36067 - protein, 10 aa, Artificial Sequence
  Description of Artificial Sequence: Synthetic peptide
  Seed: EIEDLIFSAR
EVEDLIFSAR

SEQ ID NO: 36068 - protein, 9 aa, Artificial Sequence
  Description of Artificial Sequence: Synthetic peptide
  Seed: EIIRMMEGA
EAIRMMEGA

SEQ ID NO: 36069 - protein, 9 aa, Artificial Sequence
  Description of Artificial Sequence: Synthetic peptide
  Seed: EIIRMMEGA
EVIRMMEGL

SEQ ID NO: 36070 - protein, 9 aa, Artificial Sequence
  Description of Artificial Sequence: Synthetic peptide
  Seed: EIIRMMEGA
ETIRMMEGA

SEQ ID NO: 36071 - protein, 9 aa, Artificial Sequence
  Description of Artificial Sequence: Synthetic peptide
  Seed: EIIRMMEGA
EMIRMMEGM

SEQ ID NO: 36072 - protein, 9 aa, Artificial Sequence
  Description of Artificial Sequence: Synthetic peptide
  Seed: EIIRMMEGA
EMIRMMEGV

SEQ ID NO: 36073 - protein, 9 aa, Artificial Sequence
  Description of Artificial Sequence: Synthetic peptide
  Seed: EIIRMMEGA
EFIRMMEGV

SEQ ID NO: 36074 - protein, 9 aa, Artificial Sequence
  Description of Artificial Sequence: Synthetic peptide
  Seed: EIIRMMEGA
ESIRMMEGA

SEQ ID NO: 36075 - protein, 9 aa, Artificial Sequence
  Description of Artificial Sequence: Synthetic peptide
  Seed: EIIRMMEGA
ESIRMMEGI

SEQ ID NO: 36076 - protein, 9 aa, Artificial Sequence
  Description of Artificial Sequence: Synthetic peptide
  Seed: EIIRMMEGA
ESIRMMEGL

SEQ ID NO: 36077 - protein, 9 aa, Artificial Sequence
  Description of Artificial Sequence: Synthetic peptide
  Seed: EIIRMMEGA
ESIRMMEGM

SEQ ID NO: 36078 - protein, 9 aa, Artificial Sequence
  Description of Artificial Sequence: Synthetic peptide
  Seed: EIIRMMEGA
ESIRMMEGT

SEQ ID NO: 36079 - protein, 9 aa, Artificial Sequence
  Description of Artificial Sequence: Synthetic peptide
  Seed: EIIRMMEGA
ESIRMMEGV

SEQ ID NO: 36080 - protein, 9 aa, Artificial Sequence
  Description of Artificial Sequence: Synthetic peptide
  Seed: EIIRMMEGA
ETIRMMEGC

SEQ ID NO: 36081 - protein, 9 aa, Artificial Sequence
  Description of Artificial Sequence: Synthetic peptide
  Seed: EIIRMMEGA
EAIRMMEGI

SEQ ID NO: 36082 - protein, 9 aa, Artificial Sequence
  Description of Artificial Sequence: Synthetic peptide
  Seed: EIIRMMEGA
ETIRMMEGI

SEQ ID NO: 36083 - protein, 9 aa, Artificial Sequence
  Description of Artificial Sequence: Synthetic peptide
  Seed: EIIRMMEGA
ETIRMMEGL

SEQ ID NO: 36084 - protein, 9 aa, Artificial Sequence
  Description of Artificial Sequence: Synthetic peptide
  Seed: EIIRMMEGA
ETIRMMEGM

SEQ ID NO: 36085 - protein, 9 aa, Artificial Sequence
  Description of Artificial Sequence: Synthetic peptide
  Seed: EIIRMMEGA
ETIRMMEGF

SEQ ID NO: 36086 - protein, 9 aa, Artificial Sequence
  Description of Artificial Sequence: Synthetic peptide
  Seed: EIIRMMEGA
ETIRMMEGS

SEQ ID NO: 36087 - protein, 9 aa, Artificial Sequence
  Description of Artificial Sequence: Synthetic peptide
  Seed: EIIRMMEGA
ETIRMMEGT

SEQ ID NO: 36088 - protein, 9 aa, Artificial Sequence
  Description of Artificial Sequence: Synthetic peptide
  Seed: EIIRMMEGA
ETIRMMEGV

SEQ ID NO: 36089 - protein, 9 aa, Artificial Sequence
  Description of Artificial Sequence: Synthetic peptide
  Seed: EIIRMMEGA
EVIRMMEGA

SEQ ID NO: 36090 - protein, 9 aa, Artificial Sequence
  Description of Artificial Sequence: Synthetic peptide
  Seed: EIIRMMEGA
EVIRMMEGC

SEQ ID NO: 36091 - protein, 9 aa, Artificial Sequence
  Description of Artificial Sequence: Synthetic peptide
  Seed: EIIRMMEGA
EMIRMMEGL

SEQ ID NO: 36092 - protein, 9 aa, Artificial Sequence
  Description of Artificial Sequence: Synthetic peptide
  Seed: EIIRMMEGA
EMIRMMEGI

SEQ ID NO: 36093 - protein, 9 aa, Artificial Sequence
  Description of Artificial Sequence: Synthetic peptide
  Seed: EIIRMMEGA
EMIRMMEGA

SEQ ID NO: 36094 - protein, 9 aa, Artificial Sequence
  Description of Artificial Sequence: Synthetic peptide
  Seed: EIIRMMEGA
ELIRMMEGV

SEQ ID NO: 36095 - protein, 9 aa, Artificial Sequence
  Description of Artificial Sequence: Synthetic peptide
  Seed: EIIRMMEGA
EAIRMMEGL

SEQ ID NO: 36096 - protein, 9 aa, Artificial Sequence
  Description of Artificial Sequence: Synthetic peptide
  Seed: EIIRMMEGA
EAIRMMEGM

SEQ ID NO: 36097 - protein, 9 aa, Artificial Sequence
  Description of Artificial Sequence: Synthetic peptide
  Seed: EIIRMMEGA
EAIRMMEGT

SEQ ID NO: 36098 - protein, 9 aa, Artificial Sequence
  Description of Artificial Sequence: Synthetic peptide
  Seed: EIIRMMEGA
EAIRMMEGV

SEQ ID NO: 36099 - protein, 9 aa, Artificial Sequence
  Description of Artificial Sequence: Synthetic peptide
  Seed: EIIRMMEGA
ENIRMMEGI

SEQ ID NO: 36100 - protein, 9 aa, Artificial Sequence
  Description of Artificial Sequence: Synthetic peptide
  Seed: EIIRMMEGA
ENIRMMEGV

SEQ ID NO: 36101 - protein, 9 aa, Artificial Sequence
  Description of Artificial Sequence: Synthetic peptide
  Seed: EIIRMMEGA
ECIRMMEGV

SEQ ID NO: 36102 - protein, 9 aa, Artificial Sequence
  Description of Artificial Sequence: Synthetic peptide
  Seed: EIIRMMEGA
EQIRMMEGV

SEQ ID NO: 36103 - protein, 9 aa, Artificial Sequence
  Description of Artificial Sequence: Synthetic peptide
  Seed: EIIRMMEGA
EGIRMMEGI

SEQ ID NO: 36104 - protein, 9 aa, Artificial Sequence
  Description of Artificial Sequence: Synthetic peptide
  Seed: EIIRMMEGA
EGIRMMEGV

SEQ ID NO: 36105 - protein, 9 aa, Artificial Sequence
  Description of Artificial Sequence: Synthetic peptide
  Seed: EIIRMMEGA
EIIRMMEGI

SEQ ID NO: 36106 - protein, 9 aa, Artificial Sequence
  Description of Artificial Sequence: Synthetic peptide
  Seed: EIIRMMEGA
EIIRMMEGL

SEQ ID NO: 36107 - protein, 9 aa, Artificial Sequence
  Description of Artificial Sequence: Synthetic peptide
  Seed: EIIRMMEGA
EIIRMMEGM

SEQ ID NO: 36108 - protein, 9 aa, Artificial Sequence
  Description of Artificial Sequence: Synthetic peptide
  Seed: EIIRMMEGA
EIIRMMEGT

SEQ ID NO: 36109 - protein, 9 aa, Artificial Sequence
  Description of Artificial Sequence: Synthetic peptide
  Seed: EIIRMMEGA
EIIRMMEGV

SEQ ID NO: 36110 - protein, 9 aa, Artificial Sequence
  Description of Artificial Sequence: Synthetic peptide
  Seed: EIIRMMEGA
ELIRMMEGA

SEQ ID NO: 36111 - protein, 9 aa, Artificial Sequence
  Description of Artificial Sequence: Synthetic peptide
  Seed: EIIRMMEGA
ELIRMMEGI

SEQ ID NO: 36112 - protein, 9 aa, Artificial Sequence
  Description of Artificial Sequence: Synthetic peptide
  Seed: EIIRMMEGA
ELIRMMEGL

SEQ ID NO: 36113 - protein, 9 aa, Artificial Sequence
  Description of Artificial Sequence: Synthetic peptide
  Seed: EIIRMMEGA
ELIRMMEGM

SEQ ID NO: 36114 - protein, 10 aa, Artificial Sequence
  Description of Artificial Sequence: Synthetic peptide
  Seed: EIEDLIFLAR
EWEDLIFLAR

SEQ ID NO: 36115 - protein, 10 aa, Artificial Sequence
  Description of Artificial Sequence: Synthetic peptide
  Seed: EGSYFFGDNA
ESSYFFGDNL

SEQ ID NO: 36116 - protein, 10 aa, Artificial Sequence
  Description of Artificial Sequence: Synthetic peptide
  Seed: EGSYFFGDNA
EFSYFFGDNI

SEQ ID NO: 36117 - protein, 10 aa, Artificial Sequence
  Description of Artificial Sequence: Synthetic peptide
  Seed: EGSYFFGDNA
EFSYFFGDNL

SEQ ID NO: 36118 - protein, 10 aa, Artificial Sequence
  Description of Artificial Sequence: Synthetic peptide
  Seed: EGSYFFGDNA
EFSYFFGDNV

SEQ ID NO: 36119 - protein, 10 aa, Artificial Sequence
  Description of Artificial Sequence: Synthetic peptide
  Seed: EGSYFFGDNA
EPSYFFGDNA

SEQ ID NO: 36120 - protein, 10 aa, Artificial Sequence
  Description of Artificial Sequence: Synthetic peptide
  Seed: EGSYFFGDNA
EPSYFFGDNI

SEQ ID NO: 36121 - protein, 10 aa, Artificial Sequence
  Description of Artificial Sequence: Synthetic peptide
  Seed: EGSYFFGDNA
EPSYFFGDNL

SEQ ID NO: 36122 - protein, 10 aa, Artificial Sequence
  Description of Artificial Sequence: Synthetic peptide
  Seed: EGSYFFGDNA
EPSYFFGDNV

SEQ ID NO: 36123 - protein, 10 aa, Artificial Sequence
  Description of Artificial Sequence: Synthetic peptide
  Seed: EGSYFFGDNA
ESSYFFGDNA

SEQ ID NO: 36124 - protein, 10 aa, Artificial Sequence
  Description of Artificial Sequence: Synthetic peptide
  Seed: EGSYFFGDNA
ESSYFFGDNI

SEQ ID NO: 36125 - protein, 10 aa, Artificial Sequence
  Description of Artificial Sequence: Synthetic peptide
  Seed: EGSYFFGDNA
ESSYFFGDNV

SEQ ID NO: 36126 - protein, 10 aa, Artificial Sequence
  Description of Artificial Sequence: Synthetic peptide
  Seed: EIEDLIFLAR
ETEDLIFLAR

SEQ ID NO: 36127 - protein, 10 aa, Artificial Sequence
  Description of Artificial Sequence: Synthetic peptide
  Seed: EGSYFFGDNA
ETSYFFGDNA

SEQ ID NO: 36128 - protein, 10 aa, Artificial Sequence
  Description of Artificial Sequence: Synthetic peptide
  Seed: EGSYFFGDNA
ETSYFFGDNI

SEQ ID NO: 36129 - protein, 10 aa, Artificial Sequence
  Description of Artificial Sequence: Synthetic peptide
  Seed: EGSYFFGDNA
ETSYFFGDNL

SEQ ID NO: 36130 - protein, 10 aa, Artificial Sequence
  Description of Artificial Sequence: Synthetic peptide
  Seed: EGSYFFGDNA
ETSYFFGDNM

SEQ ID NO: 36131 - protein, 10 aa, Artificial Sequence
  Description of Artificial Sequence: Synthetic peptide
  Seed: EGSYFFGDNA
ETSYFFGDNT

SEQ ID NO: 36132 - protein, 10 aa, Artificial Sequence
  Description of Artificial Sequence: Synthetic peptide
  Seed: EGSYFFGDNA
ETSYFFGDNV

SEQ ID NO: 36133 - protein, 10 aa, Artificial Sequence
  Description of Artificial Sequence: Synthetic peptide
  Seed: EGSYFFGDNA
EWSYFFGDNA

SEQ ID NO: 36134 - protein, 10 aa, Artificial Sequence
  Description of Artificial Sequence: Synthetic peptide
  Seed: EGSYFFGDNA
EWSYFFGDNI

SEQ ID NO: 36135 - protein, 10 aa, Artificial Sequence
  Description of Artificial Sequence: Synthetic peptide
  Seed: EGSYFFGDNA
EWSYFFGDNL

SEQ ID NO: 36136 - protein, 10 aa, Artificial Sequence
  Description of Artificial Sequence: Synthetic peptide
  Seed: EGSYFFGDNA
EFSYFFGDNA

SEQ ID NO: 36137 - protein, 10 aa, Artificial Sequence
  Description of Artificial Sequence: Synthetic peptide
  Seed: EGSYFFGDNA
EMSYFFGDNV

SEQ ID NO: 36138 - protein, 10 aa, Artificial Sequence
  Description of Artificial Sequence: Synthetic peptide
  Seed: EGSYFFGDNA
EMSYFFGDNL

SEQ ID NO: 36139 - protein, 10 aa, Artificial Sequence
  Description of Artificial Sequence: Synthetic peptide
  Seed: EGSYFFGDNA
EMSYFFGDNI

SEQ ID NO: 36140 - protein, 10 aa, Artificial Sequence
  Description of Artificial Sequence: Synthetic peptide
  Seed: EGSYFFGDNA
EGSYFFGDNV

SEQ ID NO: 36141 - protein, 10 aa, Artificial Sequence
  Description of Artificial Sequence: Synthetic peptide
  Seed: EGSYFFGDNA
EHSYFFGDNA

SEQ ID NO: 36142 - protein, 10 aa, Artificial Sequence
  Description of Artificial Sequence: Synthetic peptide
  Seed: EGSYFFGDNA
EHSYFFGDNI

SEQ ID NO: 36143 - protein, 10 aa, Artificial Sequence
  Description of Artificial Sequence: Synthetic peptide
  Seed: EGSYFFGDNA
EHSYFFGDNL

SEQ ID NO: 36144 - protein, 10 aa, Artificial Sequence
  Description of Artificial Sequence: Synthetic peptide
  Seed: EGSYFFGDNA
EHSYFFGDNV

SEQ ID NO: 36145 - protein, 10 aa, Artificial Sequence
  Description of Artificial Sequence: Synthetic peptide
  Seed: EGSYFFGDNA
EISYFFGDNA

SEQ ID NO: 36146 - protein, 10 aa, Artificial Sequence
  Description of Artificial Sequence: Synthetic peptide
  Seed: EGSYFFGDNA
EISYFFGDNI

SEQ ID NO: 36147 - protein, 10 aa, Artificial Sequence
  Description of Artificial Sequence: Synthetic peptide
  Seed: EGSYFFGDNA
EISYFFGDNL

SEQ ID NO: 36148 - protein, 10 aa, Artificial Sequence
  Description of Artificial Sequence: Synthetic peptide
  Seed: EGSYFFGDNA
EISYFFGDNM

SEQ ID NO: 36149 - protein, 10 aa, Artificial Sequence
  Description of Artificial Sequence: Synthetic peptide
  Seed: EGSYFFGDNA
EISYFFGDNV

SEQ ID NO: 36150 - protein, 10 aa, Artificial Sequence
  Description of Artificial Sequence: Synthetic peptide
  Seed: EGSYFFGDNA
ELSYFFGDNA

SEQ ID NO: 36151 - protein, 10 aa, Artificial Sequence
  Description of Artificial Sequence: Synthetic peptide
  Seed: EGSYFFGDNA
ELSYFFGDNI

SEQ ID NO: 36152 - protein, 10 aa, Artificial Sequence
  Description of Artificial Sequence: Synthetic peptide
  Seed: EGSYFFGDNA
ELSYFFGDNL

SEQ ID NO: 36153 - protein, 10 aa, Artificial Sequence
  Description of Artificial Sequence: Synthetic peptide
  Seed: EGSYFFGDNA
ELSYFFGDNV

SEQ ID NO: 36154 - protein, 10 aa, Artificial Sequence
  Description of Artificial Sequence: Synthetic peptide
  Seed: EGSYFFGDNA
EKSYFFGDNA

SEQ ID NO: 36155 - protein, 10 aa, Artificial Sequence
  Description of Artificial Sequence: Synthetic peptide
  Seed: EGSYFFGDNA
EKSYFFGDNI

SEQ ID NO: 36156 - protein, 10 aa, Artificial Sequence
  Description of Artificial Sequence: Synthetic peptide
  Seed: EGSYFFGDNA
EKSYFFGDNL

SEQ ID NO: 36157 - protein, 10 aa, Artificial Sequence
  Description of Artificial Sequence: Synthetic peptide
  Seed: EGSYFFGDNA
EKSYFFGDNV

SEQ ID NO: 36158 - protein, 10 aa, Artificial Sequence
  Description of Artificial Sequence: Synthetic peptide
  Seed: EGSYFFGDNA
EMSYFFGDNA

SEQ ID NO: 36159 - protein, 10 aa, Artificial Sequence
  Description of Artificial Sequence: Synthetic peptide
  Seed: EGSYFFGDNA
EWSYFFGDNV

SEQ ID NO: 36160 - protein, 10 aa, Artificial Sequence
  Description of Artificial Sequence: Synthetic peptide
  Seed: EGSYFFGDNA
EYSYFFGDNA

SEQ ID NO: 36161 - protein, 10 aa, Artificial Sequence
  Description of Artificial Sequence: Synthetic peptide
  Seed: EGSYFFGDNA
EYSYFFGDNI

SEQ ID NO: 36162 - protein, 9 aa, Artificial Sequence
  Description of Artificial Sequence: Synthetic peptide
  Seed: EIEDLIFLA
ESEDLIFLA

SEQ ID NO: 36163 - protein, 9 aa, Artificial Sequence
  Description of Artificial Sequence: Synthetic peptide
  Seed: EIEDLIFLA
ESEDLIFLL

SEQ ID NO: 36164 - protein, 9 aa, Artificial Sequence
  Description of Artificial Sequence: Synthetic peptide
  Seed: EIEDLIFLA
ESEDLIFLV

SEQ ID NO: 36165 - protein, 9 aa, Artificial Sequence
  Description of Artificial Sequence: Synthetic peptide
  Seed: EIEDLIFLA
ETEDLIFLA

SEQ ID NO: 36166 - protein, 9 aa, Artificial Sequence
  Description of Artificial Sequence: Synthetic peptide
  Seed: EIEDLIFLA
ETEDLIFLI

SEQ ID NO: 36167 - protein, 9 aa, Artificial Sequence
  Description of Artificial Sequence: Synthetic peptide
  Seed: EIEDLIFLA
ETEDLIFLL

SEQ ID NO: 36168 - protein, 9 aa, Artificial Sequence
  Description of Artificial Sequence: Synthetic peptide
  Seed: EIEDLIFLA
ETEDLIFLM

SEQ ID NO: 36169 - protein, 9 aa, Artificial Sequence
  Description of Artificial Sequence: Synthetic peptide
  Seed: EIEDLIFLA
ETEDLIFLT

SEQ ID NO: 36170 - protein, 9 aa, Artificial Sequence
  Description of Artificial Sequence: Synthetic peptide
  Seed: EIEDLIFLA
ETEDLIFLV

SEQ ID NO: 36171 - protein, 9 aa, Artificial Sequence
  Description of Artificial Sequence: Synthetic peptide
  Seed: EIEDLIFLA
EVEDLIFLI

SEQ ID NO: 36172 - protein, 9 aa, Artificial Sequence
  Description of Artificial Sequence: Synthetic peptide
  Seed: EIEDLIFLA
EVEDLIFLL

SEQ ID NO: 36173 - protein, 9 aa, Artificial Sequence
  Description of Artificial Sequence: Synthetic peptide
  Seed: EIEDLIFLA
EVEDLIFLM

SEQ ID NO: 36174 - protein, 9 aa, Artificial Sequence
  Description of Artificial Sequence: Synthetic peptide
  Seed: EIEDLIFLA
EVEDLIFLT

SEQ ID NO: 36175 - protein, 9 aa, Artificial Sequence
  Description of Artificial Sequence: Synthetic peptide
  Seed: EIEDLIFLA
EVEDLIFLV

SEQ ID NO: 36176 - protein, 10 aa, Artificial Sequence
  Description of Artificial Sequence: Synthetic peptide
  Seed: EIEDLIFLAR
EAEDLIFLAR

SEQ ID NO: 36177 - protein, 10 aa, Artificial Sequence
  Description of Artificial Sequence: Synthetic peptide
  Seed: EIEDLIFLAR
ELEDLIFLAR

SEQ ID NO: 36178 - protein, 10 aa, Artificial Sequence
  Description of Artificial Sequence: Synthetic peptide
  Seed: EIEDLIFLAR
EMEDLIFLAR

SEQ ID NO: 36179 - protein, 10 aa, Artificial Sequence
  Description of Artificial Sequence: Synthetic peptide
  Seed: EIEDLIFLAR
ESEDLIFLAR

SEQ ID NO: 36180 - protein, 9 aa, Artificial Sequence
  Description of Artificial Sequence: Synthetic peptide
  Seed: EIEDLIFLA
ESEDLIFLI

SEQ ID NO: 36181 - protein, 9 aa, Artificial Sequence
  Description of Artificial Sequence: Synthetic peptide
  Seed: EIEDLIFLA
EMEDLIFLV

SEQ ID NO: 36182 - protein, 10 aa, Artificial Sequence
  Description of Artificial Sequence: Synthetic peptide
  Seed: EGSYFFGDNA
EYSYFFGDNL

SEQ ID NO: 36183 - protein, 9 aa, Artificial Sequence
  Description of Artificial Sequence: Synthetic peptide
  Seed: EIEDLIFLA
EMEDLIFLL

SEQ ID NO: 36184 - protein, 10 aa, Artificial Sequence
  Description of Artificial Sequence: Synthetic peptide
  Seed: EGSYFFGDNA
EYSYFFGDNV

SEQ ID NO: 36185 - protein, 10 aa, Artificial Sequence
  Description of Artificial Sequence: Synthetic peptide
  Seed: EGSYFFGDNA
EVSYFFGDNA

SEQ ID NO: 36186 - protein, 10 aa, Artificial Sequence
  Description of Artificial Sequence: Synthetic peptide
  Seed: EGSYFFGDNA
EVSYFFGDNI

SEQ ID NO: 36187 - protein, 10 aa, Artificial Sequence
  Description of Artificial Sequence: Synthetic peptide
  Seed: EGSYFFGDNA
EVSYFFGDNM

SEQ ID NO: 36188 - protein, 10 aa, Artificial Sequence
  Description of Artificial Sequence: Synthetic peptide
  Seed: EGSYFFGDNA
EVSYFFGDNT

SEQ ID NO: 36189 - protein, 10 aa, Artificial Sequence
  Description of Artificial Sequence: Synthetic peptide
  Seed: EGSYFFGDNA
EVSYFFGDNV

SEQ ID NO: 36190 - protein, 9 aa, Artificial Sequence
  Description of Artificial Sequence: Synthetic peptide
  Seed: EIEDLIFLA
EAEDLIFLA

SEQ ID NO: 36191 - protein, 9 aa, Artificial Sequence
  Description of Artificial Sequence: Synthetic peptide
  Seed: EIEDLIFLA
EAEDLIFLI

SEQ ID NO: 36192 - protein, 9 aa, Artificial Sequence
  Description of Artificial Sequence: Synthetic peptide
  Seed: EIEDLIFLA
EAEDLIFLL

SEQ ID NO: 36193 - protein, 9 aa, Artificial Sequence
  Description of Artificial Sequence: Synthetic peptide
  Seed: EIEDLIFLA
EAEDLIFLV

SEQ ID NO: 36194 - protein, 9 aa, Artificial Sequence
  Description of Artificial Sequence: Synthetic peptide
  Seed: EIEDLIFLA
EIEDLIFLI

SEQ ID NO: 36195 - protein, 9 aa, Artificial Sequence
  Description of Artificial Sequence: Synthetic peptide
  Seed: EIEDLIFLA
EIEDLIFLL

SEQ ID NO: 36196 - protein, 9 aa, Artificial Sequence
  Description of Artificial Sequence: Synthetic peptide
  Seed: EIEDLIFLA
EIEDLIFLM

SEQ ID NO: 36197 - protein, 9 aa, Artificial Sequence
  Description of Artificial Sequence: Synthetic peptide
  Seed: EIEDLIFLA
EIEDLIFLV

SEQ ID NO: 36198 - protein, 9 aa, Artificial Sequence
  Description of Artificial Sequence: Synthetic peptide
  Seed: EIEDLIFLA
ELEDLIFLI

SEQ ID NO: 36199 - protein, 9 aa, Artificial Sequence
  Description of Artificial Sequence: Synthetic peptide
  Seed: EIEDLIFLA
ELEDLIFLL

SEQ ID NO: 36200 - protein, 9 aa, Artificial Sequence
  Description of Artificial Sequence: Synthetic peptide
  Seed: EIEDLIFLA
ELEDLIFLV

SEQ ID NO: 36201 - protein, 9 aa, Artificial Sequence
  Description of Artificial Sequence: Synthetic peptide
  Seed: EIEDLIFLA
EMEDLIFLI

SEQ ID NO: 36202 - protein, 9 aa, Artificial Sequence
  Description of Artificial Sequence: Synthetic peptide
  Seed: EIIRMMEGA
EVIRMMEGI

SEQ ID NO: 36203 - protein, 9 aa, Artificial Sequence
  Description of Artificial Sequence: Synthetic peptide
  Seed: EIIRMMEGA
EVIRMMEGM

SEQ ID NO: 36204 - protein, 10 aa, Artificial Sequence
  Description of Artificial Sequence: Synthetic peptide
  Seed: EGSYFFGDNA
EGSYFFGDNI

SEQ ID NO: 36205 - protein, 9 aa, Artificial Sequence
  Description of Artificial Sequence: Synthetic peptide
  Seed: EIIRMMESA
EIIRMMESF

SEQ ID NO: 36206 - protein, 9 aa, Artificial Sequence
  Description of Artificial Sequence: Synthetic peptide
  Seed: EIIRMMESA
ENIRMMESV

SEQ ID NO: 36207 - protein, 9 aa, Artificial Sequence
  Description of Artificial Sequence: Synthetic peptide
  Seed: EIIRMMESA
ECIRMMESV

SEQ ID NO: 36208 - protein, 9 aa, Artificial Sequence
  Description of Artificial Sequence: Synthetic peptide
  Seed: EIIRMMESA
EQIRMMESV

SEQ ID NO: 36209 - protein, 9 aa, Artificial Sequence
  Description of Artificial Sequence: Synthetic peptide
  Seed: EIIRMMESA
EGIRMMESV

SEQ ID NO: 36210 - protein, 9 aa, Artificial Sequence
  Description of Artificial Sequence: Synthetic peptide
  Seed: EIIRMMESA
EIIRMMESR

SEQ ID NO: 36211 - protein, 9 aa, Artificial Sequence
  Description of Artificial Sequence: Synthetic peptide
  Seed: EIIRMMESA
EIIRMMESI

SEQ ID NO: 36212 - protein, 9 aa, Artificial Sequence
  Description of Artificial Sequence: Synthetic peptide
  Seed: EIIRMMESA
EIIRMMESL

SEQ ID NO: 36213 - protein, 9 aa, Artificial Sequence
  Description of Artificial Sequence: Synthetic peptide
  Seed: EIIRMMESA
EIIRMMESK

SEQ ID NO: 36214 - protein, 9 aa, Artificial Sequence
  Description of Artificial Sequence: Synthetic peptide
  Seed: EIIRMMESA
EIIRMMESM

SEQ ID NO: 36215 - protein, 9 aa, Artificial Sequence
  Description of Artificial Sequence: Synthetic peptide
  Seed: EIIRMMESA
EIIRMMEST

SEQ ID NO: 36216 - protein, 9 aa, Artificial Sequence
  Description of Artificial Sequence: Synthetic peptide
  Seed: EIIRMMESA
EMIRMMESA

SEQ ID NO: 36217 - protein, 9 aa, Artificial Sequence
  Description of Artificial Sequence: Synthetic peptide
  Seed: EIIRMMESA
EIIRMMESY

SEQ ID NO: 36218 - protein, 9 aa, Artificial Sequence
  Description of Artificial Sequence: Synthetic peptide
  Seed: EIIRMMESA
EIIRMMESV

SEQ ID NO: 36219 - protein, 9 aa, Artificial Sequence
  Description of Artificial Sequence: Synthetic peptide
  Seed: EIIRMMESA
ELIRMMESA

SEQ ID NO: 36220 - protein, 9 aa, Artificial Sequence
  Description of Artificial Sequence: Synthetic peptide
  Seed: EIIRMMESA
ELIRMMESR

SEQ ID NO: 36221 - protein, 9 aa, Artificial Sequence
  Description of Artificial Sequence: Synthetic peptide
  Seed: EIIRMMESA
ELIRMMESI

SEQ ID NO: 36222 - protein, 9 aa, Artificial Sequence
  Description of Artificial Sequence: Synthetic peptide
  Seed: EIIRMMESA
ELIRMMESL

SEQ ID NO: 36223 - protein, 9 aa, Artificial Sequence
  Description of Artificial Sequence: Synthetic peptide
  Seed: EIIRMMESA
ELIRMMESK

SEQ ID NO: 36224 - protein, 9 aa, Artificial Sequence
  Description of Artificial Sequence: Synthetic peptide
  Seed: EIIRMMESA
ELIRMMESM

SEQ ID NO: 36225 - protein, 9 aa, Artificial Sequence
  Description of Artificial Sequence: Synthetic peptide
  Seed: EIIRMMESA
ELIRMMESY

SEQ ID NO: 36226 - protein, 9 aa, Artificial Sequence
  Description of Artificial Sequence: Synthetic peptide
  Seed: EIIRMMESA
EAIRMMESV

SEQ ID NO: 36227 - protein, 9 aa, Artificial Sequence
  Description of Artificial Sequence: Synthetic peptide
  Seed: EIIRMMESA
EAIRMMESY

SEQ ID NO: 36228 - protein, 9 aa, Artificial Sequence
  Description of Artificial Sequence: Synthetic peptide
  Seed: EIIRMMESA
EAIRMMESF

SEQ ID NO: 36229 - protein, 9 aa, Artificial Sequence
  Description of Artificial Sequence: Synthetic peptide
  Seed: EIIRMMESA
EAIRMMESM

SEQ ID NO: 36230 - protein, 10 aa, Artificial Sequence
  Description of Artificial Sequence: Synthetic peptide
  Seed: EIIRMMENAR
EFIRMMENAK

SEQ ID NO: 36231 - protein, 10 aa, Artificial Sequence
  Description of Artificial Sequence: Synthetic peptide
  Seed: EIIRMMENAR
ESIRMMENAR

SEQ ID NO: 36232 - protein, 10 aa, Artificial Sequence
  Description of Artificial Sequence: Synthetic peptide
  Seed: EIIRMMENAR
ESIRMMENAK

SEQ ID NO: 36233 - protein, 10 aa, Artificial Sequence
  Description of Artificial Sequence: Synthetic peptide
  Seed: EIIRMMENAR
ESIRMMENAY

SEQ ID NO: 36234 - protein, 10 aa, Artificial Sequence
  Description of Artificial Sequence: Synthetic peptide
  Seed: EIIRMMENAR
ETIRMMENAR

SEQ ID NO: 36235 - protein, 10 aa, Artificial Sequence
  Description of Artificial Sequence: Synthetic peptide
  Seed: EIIRMMENAR
ETIRMMENAK

SEQ ID NO: 36236 - protein, 10 aa, Artificial Sequence
  Description of Artificial Sequence: Synthetic peptide
  Seed: EIIRMMENAR
ETIRMMENAM

SEQ ID NO: 36237 - protein, 10 aa, Artificial Sequence
  Description of Artificial Sequence: Synthetic peptide
  Seed: EIIRMMENAR
ETIRMMENAF

SEQ ID NO: 36238 - protein, 10 aa, Artificial Sequence
  Description of Artificial Sequence: Synthetic peptide
  Seed: EIIRMMENAR
ETIRMMENAY

SEQ ID NO: 36239 - protein, 10 aa, Artificial Sequence
  Description of Artificial Sequence: Synthetic peptide
  Seed: EIIRMMENAR
EVIRMMENAR

SEQ ID NO: 36240 - protein, 10 aa, Artificial Sequence
  Description of Artificial Sequence: Synthetic peptide
  Seed: EIIRMMENAR
EVIRMMENAK

SEQ ID NO: 36241 - protein, 10 aa, Artificial Sequence
  Description of Artificial Sequence: Synthetic peptide
  Seed: EIIRMMENAR
EVIRMMENAM

SEQ ID NO: 36242 - protein, 10 aa, Artificial Sequence
  Description of Artificial Sequence: Synthetic peptide
  Seed: EIIRMMENAR
EVIRMMENAF

SEQ ID NO: 36243 - protein, 10 aa, Artificial Sequence
  Description of Artificial Sequence: Synthetic peptide
  Seed: EIIRMMENAR
EVIRMMENAY

SEQ ID NO: 36244 - protein, 9 aa, Artificial Sequence
  Description of Artificial Sequence: Synthetic peptide
  Seed: EIIRMMESA
EAIRMMESA

SEQ ID NO: 36245 - protein, 9 aa, Artificial Sequence
  Description of Artificial Sequence: Synthetic peptide
  Seed: EIIRMMESA
EAIRMMESR

SEQ ID NO: 36246 - protein, 9 aa, Artificial Sequence
  Description of Artificial Sequence: Synthetic peptide
  Seed: EIIRMMESA
EAIRMMESI

SEQ ID NO: 36247 - protein, 9 aa, Artificial Sequence
  Description of Artificial Sequence: Synthetic peptide
  Seed: EIIRMMESA
EAIRMMESL

SEQ ID NO: 36248 - protein, 9 aa, Artificial Sequence
  Description of Artificial Sequence: Synthetic peptide
  Seed: EIIRMMESA
EAIRMMESK

SEQ ID NO: 36249 - protein, 9 aa, Artificial Sequence
  Description of Artificial Sequence: Synthetic peptide
  Seed: EIIRMMESA
ELIRMMESV

SEQ ID NO: 36250 - protein, 9 aa, Artificial Sequence
  Description of Artificial Sequence: Synthetic peptide
  Seed: EIIRMMESA
EMIRMMESR

SEQ ID NO: 36251 - protein, 9 aa, Artificial Sequence
  Description of Artificial Sequence: Synthetic peptide
  Seed: EIIRMMEGA
EVIRMMEGS

SEQ ID NO: 36252 - protein, 9 aa, Artificial Sequence
  Description of Artificial Sequence: Synthetic peptide
  Seed: EIIRMMESA
EVIRMMESI

SEQ ID NO: 36253 - protein, 9 aa, Artificial Sequence
  Description of Artificial Sequence: Synthetic peptide
  Seed: EIIRMMESA
ETIRMMESM

SEQ ID NO: 36254 - protein, 9 aa, Artificial Sequence
  Description of Artificial Sequence: Synthetic peptide
  Seed: EIIRMMESA
ETIRMMESF

SEQ ID NO: 36255 - protein, 9 aa, Artificial Sequence
  Description of Artificial Sequence: Synthetic peptide
  Seed: EIIRMMESA
ETIRMMESS

SEQ ID NO: 36256 - protein, 9 aa, Artificial Sequence
  Description of Artificial Sequence: Synthetic peptide
  Seed: EIIRMMESA
ETIRMMEST

SEQ ID NO: 36257 - protein, 9 aa, Artificial Sequence
  Description of Artificial Sequence: Synthetic peptide
  Seed: EIIRMMESA
ETIRMMESY

SEQ ID NO: 36258 - protein, 9 aa, Artificial Sequence
  Description of Artificial Sequence: Synthetic peptide
  Seed: EIIRMMESA
ETIRMMESV

SEQ ID NO: 36259 - protein, 9 aa, Artificial Sequence
  Description of Artificial Sequence: Synthetic peptide
  Seed: EIIRMMESA
EVIRMMESR

SEQ ID NO: 36260 - protein, 9 aa, Artificial Sequence
  Description of Artificial Sequence: Synthetic peptide
  Seed: EIIRMMESA
EVIRMMESH

SEQ ID NO: 36261 - protein, 9 aa, Artificial Sequence
  Description of Artificial Sequence: Synthetic peptide
  Seed: EIIRMMESA
EVIRMMESL

SEQ ID NO: 36262 - protein, 9 aa, Artificial Sequence
  Description of Artificial Sequence: Synthetic peptide
  Seed: EIIRMMESA
EMIRMMESI

SEQ ID NO: 36263 - protein, 9 aa, Artificial Sequence
  Description of Artificial Sequence: Synthetic peptide
  Seed: EIIRMMESA
EVIRMMESK

SEQ ID NO: 36264 - protein, 9 aa, Artificial Sequence
  Description of Artificial Sequence: Synthetic peptide
  Seed: EIIRMMESA
EVIRMMESM

SEQ ID NO: 36265 - protein, 9 aa, Artificial Sequence
  Description of Artificial Sequence: Synthetic peptide
  Seed: EIIRMMESA
EVIRMMESF

SEQ ID NO: 36266 - protein, 9 aa, Artificial Sequence
  Description of Artificial Sequence: Synthetic peptide
  Seed: EIIRMMESA
EVIRMMESS

SEQ ID NO: 36267 - protein, 9 aa, Artificial Sequence
  Description of Artificial Sequence: Synthetic peptide
  Seed: EIIRMMESA
EVIRMMEST

SEQ ID NO: 36268 - protein, 9 aa, Artificial Sequence
  Description of Artificial Sequence: Synthetic peptide
  Seed: EIIRMMESA
EVIRMMESY

SEQ ID NO: 36269 - protein, 9 aa, Artificial Sequence
  Description of Artificial Sequence: Synthetic peptide
  Seed: EIIRMMESA
EVIRMMESV

SEQ ID NO: 36270 - protein, 10 aa, Artificial Sequence
  Description of Artificial Sequence: Synthetic peptide
  Seed: EIIRMMESAR
EAIRMMESAR

SEQ ID NO: 36271 - protein, 10 aa, Artificial Sequence
  Description of Artificial Sequence: Synthetic peptide
  Seed: EIIRMMESAR
EAIRMMESAK

SEQ ID NO: 36272 - protein, 9 aa, Artificial Sequence
  Description of Artificial Sequence: Synthetic peptide
  Seed: EIIRMMESA
ETIRMMESK

SEQ ID NO: 36273 - protein, 9 aa, Artificial Sequence
  Description of Artificial Sequence: Synthetic peptide
  Seed: EIIRMMESA
ETIRMMESL

SEQ ID NO: 36274 - protein, 9 aa, Artificial Sequence
  Description of Artificial Sequence: Synthetic peptide
  Seed: EIIRMMESA
ETIRMMESI

SEQ ID NO: 36275 - protein, 9 aa, Artificial Sequence
  Description of Artificial Sequence: Synthetic peptide
  Seed: EIIRMMESA
ETIRMMESH

SEQ ID NO: 36276 - protein, 9 aa, Artificial Sequence
  Description of Artificial Sequence: Synthetic peptide
  Seed: EIIRMMESA
EMIRMMESL

SEQ ID NO: 36277 - protein, 9 aa, Artificial Sequence
  Description of Artificial Sequence: Synthetic peptide
  Seed: EIIRMMESA
EMIRMMESK

SEQ ID NO: 36278 - protein, 9 aa, Artificial Sequence
  Description of Artificial Sequence: Synthetic peptide
  Seed: EIIRMMESA
EMIRMMESM

SEQ ID NO: 36279 - protein, 9 aa, Artificial Sequence
  Description of Artificial Sequence: Synthetic peptide
  Seed: EIIRMMESA
EMIRMMESY

SEQ ID NO: 36280 - protein, 9 aa, Artificial Sequence
  Description of Artificial Sequence: Synthetic peptide
  Seed: EIIRMMESA
EMIRMMESV

SEQ ID NO: 36281 - protein, 9 aa, Artificial Sequence
  Description of Artificial Sequence: Synthetic peptide
  Seed: EIIRMMESA
EFIRMMESV

SEQ ID NO: 36282 - protein, 9 aa, Artificial Sequence
  Description of Artificial Sequence: Synthetic peptide
  Seed: EIIRMMESA
ESIRMMESA

SEQ ID NO: 36283 - protein, 9 aa, Artificial Sequence
  Description of Artificial Sequence: Synthetic peptide
  Seed: EIIRMMESA
ESIRMMESR

SEQ ID NO: 36284 - protein, 9 aa, Artificial Sequence
  Description of Artificial Sequence: Synthetic peptide
  Seed: EIIRMMESA
ESIRMMESI

SEQ ID NO: 36285 - protein, 9 aa, Artificial Sequence
  Description of Artificial Sequence: Synthetic peptide
  Seed: EIIRMMESA
ESIRMMESL

SEQ ID NO: 36286 - protein, 9 aa, Artificial Sequence
  Description of Artificial Sequence: Synthetic peptide
  Seed: EIIRMMESA
ESIRMMESK

SEQ ID NO: 36287 - protein, 9 aa, Artificial Sequence
  Description of Artificial Sequence: Synthetic peptide
  Seed: EIIRMMESA
ESIRMMESM

SEQ ID NO: 36288 - protein, 9 aa, Artificial Sequence
  Description of Artificial Sequence: Synthetic peptide
  Seed: EIIRMMESA
ESIRMMESF

SEQ ID NO: 36289 - protein, 9 aa, Artificial Sequence
  Description of Artificial Sequence: Synthetic peptide
  Seed: EIIRMMESA
ESIRMMEST

SEQ ID NO: 36290 - protein, 9 aa, Artificial Sequence
  Description of Artificial Sequence: Synthetic peptide
  Seed: EIIRMMESA
ESIRMMESY

SEQ ID NO: 36291 - protein, 9 aa, Artificial Sequence
  Description of Artificial Sequence: Synthetic peptide
  Seed: EIIRMMESA
ESIRMMESV

SEQ ID NO: 36292 - protein, 9 aa, Artificial Sequence
  Description of Artificial Sequence: Synthetic peptide
  Seed: EIIRMMESA
ETIRMMESA

SEQ ID NO: 36293 - protein, 9 aa, Artificial Sequence
  Description of Artificial Sequence: Synthetic peptide
  Seed: EIIRMMESA
ETIRMMESR

SEQ ID NO: 36294 - protein, 9 aa, Artificial Sequence
  Description of Artificial Sequence: Synthetic peptide
  Seed: EIIRMMESA
ETIRMMESC

SEQ ID NO: 36295 - protein, 10 aa, Artificial Sequence
  Description of Artificial Sequence: Synthetic peptide
  Seed: EIIRMMENAR
EFIRMMENAR

SEQ ID NO: 36296 - protein, 10 aa, Artificial Sequence
  Description of Artificial Sequence: Synthetic peptide
  Seed: EIIRMMENAR
EMIRMMENAY

SEQ ID NO: 36297 - protein, 10 aa, Artificial Sequence
  Description of Artificial Sequence: Synthetic peptide
  Seed: EIIRMMENAR
EMIRMMENAK

SEQ ID NO: 36298 - protein, 10 aa, Artificial Sequence
  Description of Artificial Sequence: Synthetic peptide
  Seed: EIIRMMEGAK
EVIRMMEGAY

SEQ ID NO: 36299 - protein, 10 aa, Artificial Sequence
  Description of Artificial Sequence: Synthetic peptide
  Seed: EIIRMMEGAK
ETIRMMEGAL

SEQ ID NO: 36300 - protein, 10 aa, Artificial Sequence
  Description of Artificial Sequence: Synthetic peptide
  Seed: EIIRMMEGAK
ETIRMMEGAK

SEQ ID NO: 36301 - protein, 10 aa, Artificial Sequence
  Description of Artificial Sequence: Synthetic peptide
  Seed: EIIRMMEGAK
ETIRMMEGAM

SEQ ID NO: 36302 - protein, 10 aa, Artificial Sequence
  Description of Artificial Sequence: Synthetic peptide
  Seed: EIIRMMEGAK
ETIRMMEGAF

SEQ ID NO: 36303 - protein, 10 aa, Artificial Sequence
  Description of Artificial Sequence: Synthetic peptide
  Seed: EIIRMMEGAK
ETIRMMEGAY

SEQ ID NO: 36304 - protein, 10 aa, Artificial Sequence
  Description of Artificial Sequence: Synthetic peptide
  Seed: EIIRMMEGAK
EVIRMMEGAR

SEQ ID NO: 36305 - protein, 10 aa, Artificial Sequence
  Description of Artificial Sequence: Synthetic peptide
  Seed: EIIRMMEGAK
EVIRMMEGAK

SEQ ID NO: 36306 - protein, 10 aa, Artificial Sequence
  Description of Artificial Sequence: Synthetic peptide
  Seed: EIIRMMEGAK
EVIRMMEGAM

SEQ ID NO: 36307 - protein, 10 aa, Artificial Sequence
  Description of Artificial Sequence: Synthetic peptide
  Seed: EIIRMMEGAK
EVIRMMEGAF

SEQ ID NO: 36308 - protein, 9 aa, Artificial Sequence
  Description of Artificial Sequence: Synthetic peptide
  Seed: EIIRMMENA
EAIRMMENA

SEQ ID NO: 36309 - protein, 10 aa, Artificial Sequence
  Description of Artificial Sequence: Synthetic peptide
  Seed: EIIRMMENAR
EMIRMMENAR

SEQ ID NO: 36310 - protein, 9 aa, Artificial Sequence
  Description of Artificial Sequence: Synthetic peptide
  Seed: EIIRMMENA
EAIRMMENI

SEQ ID NO: 36311 - protein, 9 aa, Artificial Sequence
  Description of Artificial Sequence: Synthetic peptide
  Seed: EIIRMMENA
EAIRMMENL

SEQ ID NO: 36312 - protein, 9 aa, Artificial Sequence
  Description of Artificial Sequence: Synthetic peptide
  Seed: EIIRMMENA
EAIRMMENM

SEQ ID NO: 36313 - protein, 9 aa, Artificial Sequence
  Description of Artificial Sequence: Synthetic peptide
  Seed: EIIRMMENA
EAIRMMENV

SEQ ID NO: 36314 - protein, 9 aa, Artificial Sequence
  Description of Artificial Sequence: Synthetic peptide
  Seed: EIIRMMENA
ENIRMMENV

SEQ ID NO: 36315 - protein, 9 aa, Artificial Sequence
  Description of Artificial Sequence: Synthetic peptide
  Seed: EIIRMMENA
ECIRMMENV

SEQ ID NO: 36316 - protein, 9 aa, Artificial Sequence
  Description of Artificial Sequence: Synthetic peptide
  Seed: EIIRMMENA
EQIRMMENV

SEQ ID NO: 36317 - protein, 9 aa, Artificial Sequence
  Description of Artificial Sequence: Synthetic peptide
  Seed: EIIRMMENA
EGIRMMENV

SEQ ID NO: 36318 - protein, 9 aa, Artificial Sequence
  Description of Artificial Sequence: Synthetic peptide
  Seed: EIIRMMENA
EIIRMMENI

SEQ ID NO: 36319 - protein, 10 aa, Artificial Sequence
  Description of Artificial Sequence: Synthetic peptide
  Seed: EIIRMMEGAK
ETIRMMEGAH

SEQ ID NO: 36320 - protein, 10 aa, Artificial Sequence
  Description of Artificial Sequence: Synthetic peptide
  Seed: EIIRMMEGAK
ETIRMMEGAR

SEQ ID NO: 36321 - protein, 10 aa, Artificial Sequence
  Description of Artificial Sequence: Synthetic peptide
  Seed: EIIRMMEGAK
ESIRMMEGAY

SEQ ID NO: 36322 - protein, 10 aa, Artificial Sequence
  Description of Artificial Sequence: Synthetic peptide
  Seed: EIIRMMEGAK
ESIRMMEGAK

SEQ ID NO: 36323 - protein, 9 aa, Artificial Sequence
  Description of Artificial Sequence: Synthetic peptide
  Seed: EIIRMMEGA
EVIRMMEGT

SEQ ID NO: 36324 - protein, 9 aa, Artificial Sequence
  Description of Artificial Sequence: Synthetic peptide
  Seed: EIIRMMEGA
EVIRMMEGV

SEQ ID NO: 36325 - protein, 10 aa, Artificial Sequence
  Description of Artificial Sequence: Synthetic peptide
  Seed: EIIRMMEGAK
EAIRMMEGAR

SEQ ID NO: 36326 - protein, 10 aa, Artificial Sequence
  Description of Artificial Sequence: Synthetic peptide
  Seed: EIIRMMEGAK
EAIRMMEGAK

SEQ ID NO: 36327 - protein, 10 aa, Artificial Sequence
  Description of Artificial Sequence: Synthetic peptide
  Seed: EIIRMMEGAK
EAIRMMEGAY

SEQ ID NO: 36328 - protein, 10 aa, Artificial Sequence
  Description of Artificial Sequence: Synthetic peptide
  Seed: EIIRMMEGAK
ENIRMMEGAR

SEQ ID NO: 36329 - protein, 10 aa, Artificial Sequence
  Description of Artificial Sequence: Synthetic peptide
  Seed: EIIRMMEGAK
EQIRMMEGAR

SEQ ID NO: 36330 - protein, 10 aa, Artificial Sequence
  Description of Artificial Sequence: Synthetic peptide
  Seed: EIIRMMEGAK
EGIRMMEGAR

SEQ ID NO: 36331 - protein, 10 aa, Artificial Sequence
  Description of Artificial Sequence: Synthetic peptide
  Seed: EIIRMMEGAK
EIIRMMEGAR

SEQ ID NO: 36332 - protein, 10 aa, Artificial Sequence
  Description of Artificial Sequence: Synthetic peptide
  Seed: EIIRMMEGAK
EIIRMMEGAM

SEQ ID NO: 36333 - protein, 10 aa, Artificial Sequence
  Description of Artificial Sequence: Synthetic peptide
  Seed: EIIRMMEGAK
EIIRMMEGAY

SEQ ID NO: 36334 - protein, 10 aa, Artificial Sequence
  Description of Artificial Sequence: Synthetic peptide
  Seed: EIIRMMEGAK
ELIRMMEGAR

SEQ ID NO: 36335 - protein, 10 aa, Artificial Sequence
  Description of Artificial Sequence: Synthetic peptide
  Seed: EIIRMMEGAK
ELIRMMEGAK

SEQ ID NO: 36336 - protein, 10 aa, Artificial Sequence
  Description of Artificial Sequence: Synthetic peptide
  Seed: EIIRMMEGAK
ELIRMMEGAY

SEQ ID NO: 36337 - protein, 10 aa, Artificial Sequence
  Description of Artificial Sequence: Synthetic peptide
  Seed: EIIRMMEGAK
EMIRMMEGAR

SEQ ID NO: 36338 - protein, 10 aa, Artificial Sequence
  Description of Artificial Sequence: Synthetic peptide
  Seed: EIIRMMEGAK
EMIRMMEGAK

SEQ ID NO: 36339 - protein, 10 aa, Artificial Sequence
  Description of Artificial Sequence: Synthetic peptide
  Seed: EIIRMMEGAK
EMIRMMEGAY

SEQ ID NO: 36340 - protein, 10 aa, Artificial Sequence
  Description of Artificial Sequence: Synthetic peptide
  Seed: EIIRMMEGAK
EFIRMMEGAR

SEQ ID NO: 36341 - protein, 10 aa, Artificial Sequence
  Description of Artificial Sequence: Synthetic peptide
  Seed: EIIRMMEGAK
ESIRMMEGAR

SEQ ID NO: 36342 - protein, 9 aa, Artificial Sequence
  Description of Artificial Sequence: Synthetic peptide
  Seed: EIIRMMENA
EIIRMMENL

SEQ ID NO: 36343 - protein, 9 aa, Artificial Sequence
  Description of Artificial Sequence: Synthetic peptide
  Seed: EIIRMMENA
EIIRMMENM

SEQ ID NO: 36344 - protein, 9 aa, Artificial Sequence
  Description of Artificial Sequence: Synthetic peptide
  Seed: EIIRMMENA
EIIRMMENV

SEQ ID NO: 36345 - protein, 9 aa, Artificial Sequence
  Description of Artificial Sequence: Synthetic peptide
  Seed: EIIRMMENA
EVIRMMENA

SEQ ID NO: 36346 - protein, 9 aa, Artificial Sequence
  Description of Artificial Sequence: Synthetic peptide
  Seed: EIIRMMENA
EVIRMMENL

SEQ ID NO: 36347 - protein, 9 aa, Artificial Sequence
  Description of Artificial Sequence: Synthetic peptide
  Seed: EIIRMMENA
EVIRMMENM

SEQ ID NO: 36348 - protein, 9 aa, Artificial Sequence
  Description of Artificial Sequence: Synthetic peptide
  Seed: EIIRMMENA
EVIRMMENT

SEQ ID NO: 36349 - protein, 9 aa, Artificial Sequence
  Description of Artificial Sequence: Synthetic peptide
  Seed: EIIRMMENA
EVIRMMENV

SEQ ID NO: 36350 - protein, 10 aa, Artificial Sequence
  Description of Artificial Sequence: Synthetic peptide
  Seed: EIIRMMENAR
EAIRMMENAR

SEQ ID NO: 36351 - protein, 10 aa, Artificial Sequence
  Description of Artificial Sequence: Synthetic peptide
  Seed: EIIRMMENAR
EAIRMMENAK

SEQ ID NO: 36352 - protein, 10 aa, Artificial Sequence
  Description of Artificial Sequence: Synthetic peptide
  Seed: EIIRMMENAR
EAIRMMENAY

SEQ ID NO: 36353 - protein, 10 aa, Artificial Sequence
  Description of Artificial Sequence: Synthetic peptide
  Seed: EIIRMMENAR
ERIRMMENAR

SEQ ID NO: 36354 - protein, 10 aa, Artificial Sequence
  Description of Artificial Sequence: Synthetic peptide
  Seed: EIIRMMENAR
ENIRMMENAR

SEQ ID NO: 36355 - protein, 10 aa, Artificial Sequence
  Description of Artificial Sequence: Synthetic peptide
  Seed: EIIRMMENAR
ENIRMMENAK

SEQ ID NO: 36356 - protein, 10 aa, Artificial Sequence
  Description of Artificial Sequence: Synthetic peptide
  Seed: EIIRMMENAR
EDIRMMENAR

SEQ ID NO: 36357 - protein, 10 aa, Artificial Sequence
  Description of Artificial Sequence: Synthetic peptide
  Seed: EIIRMMENAR
ECIRMMENAR

SEQ ID NO: 36358 - protein, 10 aa, Artificial Sequence
  Description of Artificial Sequence: Synthetic peptide
  Seed: EIIRMMENAR
EQIRMMENAR

SEQ ID NO: 36359 - protein, 10 aa, Artificial Sequence
  Description of Artificial Sequence: Synthetic peptide
  Seed: EIIRMMENAR
EGIRMMENAR

SEQ ID NO: 36360 - protein, 10 aa, Artificial Sequence
  Description of Artificial Sequence: Synthetic peptide
  Seed: EIIRMMENAR
EIIRMMENAM

SEQ ID NO: 36361 - protein, 10 aa, Artificial Sequence
  Description of Artificial Sequence: Synthetic peptide
  Seed: EIIRMMENAR
EIIRMMENAY

SEQ ID NO: 36362 - protein, 10 aa, Artificial Sequence
  Description of Artificial Sequence: Synthetic peptide
  Seed: EIIRMMENAR
ELIRMMENAR

SEQ ID NO: 36363 - protein, 10 aa, Artificial Sequence
  Description of Artificial Sequence: Synthetic peptide
  Seed: EIIRMMENAR
ELIRMMENAK

SEQ ID NO: 36364 - protein, 9 aa, Artificial Sequence
  Description of Artificial Sequence: Synthetic peptide
  Seed: EIIRMMENA
EVIRMMENI

SEQ ID NO: 36365 - protein, 9 aa, Artificial Sequence
  Description of Artificial Sequence: Synthetic peptide
  Seed: EIIRMMENA
ETIRMMENV

SEQ ID NO: 36366 - protein, 9 aa, Artificial Sequence
  Description of Artificial Sequence: Synthetic peptide
  Seed: EIIRMMENA
ELIRMMENA

SEQ ID NO: 36367 - protein, 9 aa, Artificial Sequence
  Description of Artificial Sequence: Synthetic peptide
  Seed: EIIRMMENA
ETIRMMENT

SEQ ID NO: 36368 - protein, 9 aa, Artificial Sequence
  Description of Artificial Sequence: Synthetic peptide
  Seed: EIIRMMENA
ELIRMMENI

SEQ ID NO: 36369 - protein, 9 aa, Artificial Sequence
  Description of Artificial Sequence: Synthetic peptide
  Seed: EIIRMMENA
ELIRMMENL

SEQ ID NO: 36370 - protein, 9 aa, Artificial Sequence
  Description of Artificial Sequence: Synthetic peptide
  Seed: EIIRMMENA
ELIRMMENV

SEQ ID NO: 36371 - protein, 9 aa, Artificial Sequence
  Description of Artificial Sequence: Synthetic peptide
  Seed: EIIRMMENA
EMIRMMENA

SEQ ID NO: 36372 - protein, 9 aa, Artificial Sequence
  Description of Artificial Sequence: Synthetic peptide
  Seed: EIIRMMENA
EMIRMMENI

SEQ ID NO: 36373 - protein, 9 aa, Artificial Sequence
  Description of Artificial Sequence: Synthetic peptide
  Seed: EIIRMMENA
EMIRMMENL

SEQ ID NO: 36374 - protein, 9 aa, Artificial Sequence
  Description of Artificial Sequence: Synthetic peptide
  Seed: EIIRMMENA
EMIRMMENV

SEQ ID NO: 36375 - protein, 9 aa, Artificial Sequence
  Description of Artificial Sequence: Synthetic peptide
  Seed: EIIRMMENA
EFIRMMENV

SEQ ID NO: 36376 - protein, 9 aa, Artificial Sequence
  Description of Artificial Sequence: Synthetic peptide
  Seed: EIIRMMENA
ESIRMMENA

SEQ ID NO: 36377 - protein, 9 aa, Artificial Sequence
  Description of Artificial Sequence: Synthetic peptide
  Seed: EIIRMMENA
ESIRMMENI

SEQ ID NO: 36378 - protein, 9 aa, Artificial Sequence
  Description of Artificial Sequence: Synthetic peptide
  Seed: EIIRMMENA
ESIRMMENL

SEQ ID NO: 36379 - protein, 9 aa, Artificial Sequence
  Description of Artificial Sequence: Synthetic peptide
  Seed: EIIRMMENA
ESIRMMENM

SEQ ID NO: 36380 - protein, 9 aa, Artificial Sequence
  Description of Artificial Sequence: Synthetic peptide
  Seed: EIIRMMENA
ESIRMMENV

SEQ ID NO: 36381 - protein, 9 aa, Artificial Sequence
  Description of Artificial Sequence: Synthetic peptide
  Seed: EIIRMMENA
ETIRMMENA

SEQ ID NO: 36382 - protein, 9 aa, Artificial Sequence
  Description of Artificial Sequence: Synthetic peptide
  Seed: EIIRMMENA
ETIRMMENC

SEQ ID NO: 36383 - protein, 9 aa, Artificial Sequence
  Description of Artificial Sequence: Synthetic peptide
  Seed: EIIRMMENA
ETIRMMENI

SEQ ID NO: 36384 - protein, 9 aa, Artificial Sequence
  Description of Artificial Sequence: Synthetic peptide
  Seed: EIIRMMENA
ETIRMMENL

SEQ ID NO: 36385 - protein, 9 aa, Artificial Sequence
  Description of Artificial Sequence: Synthetic peptide
  Seed: EIIRMMENA
ETIRMMENM

SEQ ID NO: 36386 - protein, 9 aa, Artificial Sequence
  Description of Artificial Sequence: Synthetic peptide
  Seed: EIIRMMENA
ETIRMMENS

SEQ ID NO: 36387 - protein, 10 aa, Artificial Sequence
  Description of Artificial Sequence: Synthetic peptide
  Seed: EGSYFFGDNA
EGSYFFGDNL

SEQ ID NO: 36388 - protein, 10 aa, Artificial Sequence
  Description of Artificial Sequence: Synthetic peptide
  Seed: EGSYFFGDNA
EESYFFGDNV

SEQ ID NO: 36389 - protein, 11 aa, Artificial Sequence
  Description of Artificial Sequence: Synthetic peptide
  Seed: DRNFWRGENGR
DINFWRGENGR

SEQ ID NO: 36390 - protein, 11 aa, Artificial Sequence
  Description of Artificial Sequence: Synthetic peptide
  Seed: EDATAGLTHLM
EDATAGLTHLF

SEQ ID NO: 36391 - protein, 11 aa, Artificial Sequence
  Description of Artificial Sequence: Synthetic peptide
  Seed: EDATAGLTHLM
ENATAGLTHLI

SEQ ID NO: 36392 - protein, 11 aa, Artificial Sequence
  Description of Artificial Sequence: Synthetic peptide
  Seed: EDATAGLTHLM
ENATAGLTHLL

SEQ ID NO: 36393 - protein, 11 aa, Artificial Sequence
  Description of Artificial Sequence: Synthetic peptide
  Seed: EDATAGLTHLM
ENATAGLTHLM

SEQ ID NO: 36394 - protein, 11 aa, Artificial Sequence
  Description of Artificial Sequence: Synthetic peptide
  Seed: EDATAGLTHLM
ENATAGLTHLF

SEQ ID NO: 36395 - protein, 11 aa, Artificial Sequence
  Description of Artificial Sequence: Synthetic peptide
  Seed: EDATAGLTHLM
ENATAGLTHLY

SEQ ID NO: 36396 - protein, 11 aa, Artificial Sequence
  Description of Artificial Sequence: Synthetic peptide
  Seed: EDATAGLTHLM
ENATAGLTHLV

SEQ ID NO: 36397 - protein, 11 aa, Artificial Sequence
  Description of Artificial Sequence: Synthetic peptide
  Seed: EDATAGLTHLM
EDATAGLTHLA

SEQ ID NO: 36398 - protein, 11 aa, Artificial Sequence
  Description of Artificial Sequence: Synthetic peptide
  Seed: EDATAGLTHLM
EDATAGLTHLI

SEQ ID NO: 36399 - protein, 11 aa, Artificial Sequence
  Description of Artificial Sequence: Synthetic peptide
  Seed: EDATAGLTHLM
EDATAGLTHLL

SEQ ID NO: 36400 - protein, 11 aa, Artificial Sequence
  Description of Artificial Sequence: Synthetic peptide
  Seed: EDATAGLTHLM
EDATAGLTHLY

SEQ ID NO: 36401 - protein, 11 aa, Artificial Sequence
  Description of Artificial Sequence: Synthetic peptide
  Seed: EDATAGLTHLM
EQATAGLTHLL

SEQ ID NO: 36402 - protein, 11 aa, Artificial Sequence
  Description of Artificial Sequence: Synthetic peptide
  Seed: EDATAGLTHLM
EDATAGLTHLV

SEQ ID NO: 36403 - protein, 11 aa, Artificial Sequence
  Description of Artificial Sequence: Synthetic peptide
  Seed: EDATAGLTHLM
ECATAGLTHLA

SEQ ID NO: 36404 - protein, 11 aa, Artificial Sequence
  Description of Artificial Sequence: Synthetic peptide
  Seed: EDATAGLTHLM
ECATAGLTHLI

SEQ ID NO: 36405 - protein, 11 aa, Artificial Sequence
  Description of Artificial Sequence: Synthetic peptide
  Seed: EDATAGLTHLM
ECATAGLTHLL

SEQ ID NO: 36406 - protein, 11 aa, Artificial Sequence
  Description of Artificial Sequence: Synthetic peptide
  Seed: EDATAGLTHLM
ECATAGLTHLM

SEQ ID NO: 36407 - protein, 11 aa, Artificial Sequence
  Description of Artificial Sequence: Synthetic peptide
  Seed: EDATAGLTHLM
ECATAGLTHLF

SEQ ID NO: 36408 - protein, 11 aa, Artificial Sequence
  Description of Artificial Sequence: Synthetic peptide
  Seed: EDATAGLTHLM
ECATAGLTHLY

SEQ ID NO: 36409 - protein, 11 aa, Artificial Sequence
  Description of Artificial Sequence: Synthetic peptide
  Seed: EDATAGLTHLM
ECATAGLTHLV

SEQ ID NO: 36410 - protein, 11 aa, Artificial Sequence
  Description of Artificial Sequence: Synthetic peptide
  Seed: EDATAGLTHLM
EQATAGLTHLA

SEQ ID NO: 36411 - protein, 11 aa, Artificial Sequence
  Description of Artificial Sequence: Synthetic peptide
  Seed: EDATAGLTHLM
ENATAGLTHLA

SEQ ID NO: 36412 - protein, 11 aa, Artificial Sequence
  Description of Artificial Sequence: Synthetic peptide
  Seed: EDATAGLTHLM
ERATAGLTHLV

SEQ ID NO: 36413 - protein, 11 aa, Artificial Sequence
  Description of Artificial Sequence: Synthetic peptide
  Seed: EDATAGLTHLM
ERATAGLTHLY

SEQ ID NO: 36414 - protein, 11 aa, Artificial Sequence
  Description of Artificial Sequence: Synthetic peptide
  Seed: EDATAGLTHLM
ERATAGLTHLF

SEQ ID NO: 36415 - protein, 10 aa, Artificial Sequence
  Description of Artificial Sequence: Synthetic peptide
  Seed: DVSFQGRGVF
DTSFQGRGVW

SEQ ID NO: 36416 - protein, 10 aa, Artificial Sequence
  Description of Artificial Sequence: Synthetic peptide
  Seed: DVSFQGRGVF
DWSFQGRGVF

SEQ ID NO: 36417 - protein, 10 aa, Artificial Sequence
  Description of Artificial Sequence: Synthetic peptide
  Seed: DVSFQGRGVF
DWSFQGRGVW

SEQ ID NO: 36418 - protein, 10 aa, Artificial Sequence
  Description of Artificial Sequence: Synthetic peptide
  Seed: DVSFQGRGVF
DYSFQGRGVF

SEQ ID NO: 36419 - protein, 10 aa, Artificial Sequence
  Description of Artificial Sequence: Synthetic peptide
  Seed: DVSFQGRGVF
DYSFQGRGVW

SEQ ID NO: 36420 - protein, 10 aa, Artificial Sequence
  Description of Artificial Sequence: Synthetic peptide
  Seed: DVSFQGRGVF
DYSFQGRGVY

SEQ ID NO: 36421 - protein, 10 aa, Artificial Sequence
  Description of Artificial Sequence: Synthetic peptide
  Seed: DVSFQGRGVF
DVSFQGRGVW

SEQ ID NO: 36422 - protein, 10 aa, Artificial Sequence
  Description of Artificial Sequence: Synthetic peptide
  Seed: DVSFQGRGVF
DVSFQGRGVY

SEQ ID NO: 36423 - protein, 11 aa, Artificial Sequence
  Description of Artificial Sequence: Synthetic peptide
  Seed: EDATAGLTHLM
EAATAGLTHLA

SEQ ID NO: 36424 - protein, 11 aa, Artificial Sequence
  Description of Artificial Sequence: Synthetic peptide
  Seed: EDATAGLTHLM
EAATAGLTHLI

SEQ ID NO: 36425 - protein, 11 aa, Artificial Sequence
  Description of Artificial Sequence: Synthetic peptide
  Seed: EDATAGLTHLM
EAATAGLTHLL

SEQ ID NO: 36426 - protein, 11 aa, Artificial Sequence
  Description of Artificial Sequence: Synthetic peptide
  Seed: EDATAGLTHLM
EAATAGLTHLM

SEQ ID NO: 36427 - protein, 11 aa, Artificial Sequence
  Description of Artificial Sequence: Synthetic peptide
  Seed: EDATAGLTHLM
EAATAGLTHLF

SEQ ID NO: 36428 - protein, 11 aa, Artificial Sequence
  Description of Artificial Sequence: Synthetic peptide
  Seed: EDATAGLTHLM
EAATAGLTHLY

SEQ ID NO: 36429 - protein, 11 aa, Artificial Sequence
  Description of Artificial Sequence: Synthetic peptide
  Seed: EDATAGLTHLM
EAATAGLTHLV

SEQ ID NO: 36430 - protein, 11 aa, Artificial Sequence
  Description of Artificial Sequence: Synthetic peptide
  Seed: EDATAGLTHLM
ERATAGLTHLA

SEQ ID NO: 36431 - protein, 11 aa, Artificial Sequence
  Description of Artificial Sequence: Synthetic peptide
  Seed: EDATAGLTHLM
ERATAGLTHLI

SEQ ID NO: 36432 - protein, 11 aa, Artificial Sequence
  Description of Artificial Sequence: Synthetic peptide
  Seed: EDATAGLTHLM
ERATAGLTHLL

SEQ ID NO: 36433 - protein, 11 aa, Artificial Sequence
  Description of Artificial Sequence: Synthetic peptide
  Seed: EDATAGLTHLM
ERATAGLTHLM

SEQ ID NO: 36434 - protein, 11 aa, Artificial Sequence
  Description of Artificial Sequence: Synthetic peptide
  Seed: EDATAGLTHLM
EQATAGLTHLI

SEQ ID NO: 36435 - protein, 11 aa, Artificial Sequence
  Description of Artificial Sequence: Synthetic peptide
  Seed: EDATAGLTHLM
EQATAGLTHLM

SEQ ID NO: 36436 - protein, 11 aa, Artificial Sequence
  Description of Artificial Sequence: Synthetic peptide
  Seed: EDATAGLTHLM
EMATAGLTHLA

SEQ ID NO: 36437 - protein, 11 aa, Artificial Sequence
  Description of Artificial Sequence: Synthetic peptide
  Seed: EDATAGLTHLM
ELATAGLTHLL

SEQ ID NO: 36438 - protein, 11 aa, Artificial Sequence
  Description of Artificial Sequence: Synthetic peptide
  Seed: EDATAGLTHLM
EIATAGLTHLA

SEQ ID NO: 36439 - protein, 11 aa, Artificial Sequence
  Description of Artificial Sequence: Synthetic peptide
  Seed: EDATAGLTHLM
EIATAGLTHLI

SEQ ID NO: 36440 - protein, 11 aa, Artificial Sequence
  Description of Artificial Sequence: Synthetic peptide
  Seed: EDATAGLTHLM
EIATAGLTHLL

SEQ ID NO: 36441 - protein, 11 aa, Artificial Sequence
  Description of Artificial Sequence: Synthetic peptide
  Seed: EDATAGLTHLM
EIATAGLTHLM

SEQ ID NO: 36442 - protein, 11 aa, Artificial Sequence
  Description of Artificial Sequence: Synthetic peptide
  Seed: EDATAGLTHLM
EIATAGLTHLF

SEQ ID NO: 36443 - protein, 11 aa, Artificial Sequence
  Description of Artificial Sequence: Synthetic peptide
  Seed: EDATAGLTHLM
EIATAGLTHLY

SEQ ID NO: 36444 - protein, 11 aa, Artificial Sequence
  Description of Artificial Sequence: Synthetic peptide
  Seed: EDATAGLTHLM
EIATAGLTHLV

SEQ ID NO: 36445 - protein, 11 aa, Artificial Sequence
  Description of Artificial Sequence: Synthetic peptide
  Seed: EDATAGLTHLM
ELATAGLTHLA

SEQ ID NO: 36446 - protein, 11 aa, Artificial Sequence
  Description of Artificial Sequence: Synthetic peptide
  Seed: EDATAGLTHLM
ELATAGLTHLI

SEQ ID NO: 36447 - protein, 11 aa, Artificial Sequence
  Description of Artificial Sequence: Synthetic peptide
  Seed: EDATAGLTHLM
ELATAGLTHLM

SEQ ID NO: 36448 - protein, 11 aa, Artificial Sequence
  Description of Artificial Sequence: Synthetic peptide
  Seed: EDATAGLTHLM
EQATAGLTHLF

SEQ ID NO: 36449 - protein, 11 aa, Artificial Sequence
  Description of Artificial Sequence: Synthetic peptide
  Seed: EDATAGLTHLM
ELATAGLTHLF

SEQ ID NO: 36450 - protein, 11 aa, Artificial Sequence
  Description of Artificial Sequence: Synthetic peptide
  Seed: EDATAGLTHLM
ELATAGLTHLY

SEQ ID NO: 36451 - protein, 11 aa, Artificial Sequence
  Description of Artificial Sequence: Synthetic peptide
  Seed: EDATAGLTHLM
ELATAGLTHLV

SEQ ID NO: 36452 - protein, 11 aa, Artificial Sequence
  Description of Artificial Sequence: Synthetic peptide
  Seed: EDATAGLTHLM
EKATAGLTHLA

SEQ ID NO: 36453 - protein, 11 aa, Artificial Sequence
  Description of Artificial Sequence: Synthetic peptide
  Seed: EDATAGLTHLM
EKATAGLTHLI

SEQ ID NO: 36454 - protein, 11 aa, Artificial Sequence
  Description of Artificial Sequence: Synthetic peptide
  Seed: EDATAGLTHLM
EKATAGLTHLL

SEQ ID NO: 36455 - protein, 11 aa, Artificial Sequence
  Description of Artificial Sequence: Synthetic peptide
  Seed: EDATAGLTHLM
EKATAGLTHLM

SEQ ID NO: 36456 - protein, 11 aa, Artificial Sequence
  Description of Artificial Sequence: Synthetic peptide
  Seed: EDATAGLTHLM
EKATAGLTHLF

SEQ ID NO: 36457 - protein, 11 aa, Artificial Sequence
  Description of Artificial Sequence: Synthetic peptide
  Seed: EDATAGLTHLM
EKATAGLTHLY

SEQ ID NO: 36458 - protein, 11 aa, Artificial Sequence
  Description of Artificial Sequence: Synthetic peptide
  Seed: EDATAGLTHLM
EHATAGLTHLV

SEQ ID NO: 36459 - protein, 11 aa, Artificial Sequence
  Description of Artificial Sequence: Synthetic peptide
  Seed: EDATAGLTHLM
EHATAGLTHLY

SEQ ID NO: 36460 - protein, 11 aa, Artificial Sequence
  Description of Artificial Sequence: Synthetic peptide
  Seed: EDATAGLTHLM
EHATAGLTHLF

SEQ ID NO: 36461 - protein, 11 aa, Artificial Sequence
  Description of Artificial Sequence: Synthetic peptide
  Seed: EDATAGLTHLM
EHATAGLTHLM

SEQ ID NO: 36462 - protein, 11 aa, Artificial Sequence
  Description of Artificial Sequence: Synthetic peptide
  Seed: EDATAGLTHLM
EQATAGLTHLY

SEQ ID NO: 36463 - protein, 11 aa, Artificial Sequence
  Description of Artificial Sequence: Synthetic peptide
  Seed: EDATAGLTHLM
EQATAGLTHLV

SEQ ID NO: 36464 - protein, 11 aa, Artificial Sequence
  Description of Artificial Sequence: Synthetic peptide
  Seed: EDATAGLTHLM
EEATAGLTHLA

SEQ ID NO: 36465 - protein, 11 aa, Artificial Sequence
  Description of Artificial Sequence: Synthetic peptide
  Seed: EDATAGLTHLM
EEATAGLTHLI

SEQ ID NO: 36466 - protein, 11 aa, Artificial Sequence
  Description of Artificial Sequence: Synthetic peptide
  Seed: EDATAGLTHLM
EEATAGLTHLL

SEQ ID NO: 36467 - protein, 11 aa, Artificial Sequence
  Description of Artificial Sequence: Synthetic peptide
  Seed: EDATAGLTHLM
EEATAGLTHLM

SEQ ID NO: 36468 - protein, 11 aa, Artificial Sequence
  Description of Artificial Sequence: Synthetic peptide
  Seed: EDATAGLTHLM
EEATAGLTHLF

SEQ ID NO: 36469 - protein, 11 aa, Artificial Sequence
  Description of Artificial Sequence: Synthetic peptide
  Seed: EDATAGLTHLM
EEATAGLTHLY

SEQ ID NO: 36470 - protein, 11 aa, Artificial Sequence
  Description of Artificial Sequence: Synthetic peptide
  Seed: EDATAGLTHLM
EEATAGLTHLV

SEQ ID NO: 36471 - protein, 11 aa, Artificial Sequence
  Description of Artificial Sequence: Synthetic peptide
  Seed: EDATAGLTHLM
EGATAGLTHLA

SEQ ID NO: 36472 - protein, 11 aa, Artificial Sequence
  Description of Artificial Sequence: Synthetic peptide
  Seed: EDATAGLTHLM
EGATAGLTHLI

SEQ ID NO: 36473 - protein, 11 aa, Artificial Sequence
  Description of Artificial Sequence: Synthetic peptide
  Seed: EDATAGLTHLM
EGATAGLTHLL

SEQ ID NO: 36474 - protein, 11 aa, Artificial Sequence
  Description of Artificial Sequence: Synthetic peptide
  Seed: EDATAGLTHLM
EGATAGLTHLM

SEQ ID NO: 36475 - protein, 11 aa, Artificial Sequence
  Description of Artificial Sequence: Synthetic peptide
  Seed: EDATAGLTHLM
EGATAGLTHLF

SEQ ID NO: 36476 - protein, 11 aa, Artificial Sequence
  Description of Artificial Sequence: Synthetic peptide
  Seed: EDATAGLTHLM
EGATAGLTHLY

SEQ ID NO: 36477 - protein, 11 aa, Artificial Sequence
  Description of Artificial Sequence: Synthetic peptide
  Seed: EDATAGLTHLM
EGATAGLTHLV

SEQ ID NO: 36478 - protein, 11 aa, Artificial Sequence
  Description of Artificial Sequence: Synthetic peptide
  Seed: EDATAGLTHLM
EHATAGLTHLA

SEQ ID NO: 36479 - protein, 11 aa, Artificial Sequence
  Description of Artificial Sequence: Synthetic peptide
  Seed: EDATAGLTHLM
EHATAGLTHLI

SEQ ID NO: 36480 - protein, 11 aa, Artificial Sequence
  Description of Artificial Sequence: Synthetic peptide
  Seed: EDATAGLTHLM
EHATAGLTHLL

SEQ ID NO: 36481 - protein, 10 aa, Artificial Sequence
  Description of Artificial Sequence: Synthetic peptide
  Seed: DVSFQGRGVF
DSSFQGRGVY

SEQ ID NO: 36482 - protein, 10 aa, Artificial Sequence
  Description of Artificial Sequence: Synthetic peptide
  Seed: DVSFQGRGVF
DSSFQGRGVW

SEQ ID NO: 36483 - protein, 10 aa, Artificial Sequence
  Description of Artificial Sequence: Synthetic peptide
  Seed: DVSFQGRGVF
DSSFQGRGVF

SEQ ID NO: 36484 - protein, 10 aa, Artificial Sequence
  Description of Artificial Sequence: Synthetic peptide
  Seed: DSSTLELRSR
DYSTLELRSR

SEQ ID NO: 36485 - protein, 10 aa, Artificial Sequence
  Description of Artificial Sequence: Synthetic peptide
  Seed: DSSTLELRSR
DISTLELRSR

SEQ ID NO: 36486 - protein, 10 aa, Artificial Sequence
  Description of Artificial Sequence: Synthetic peptide
  Seed: DSSTLELRSR
DISTLELRSK

SEQ ID NO: 36487 - protein, 10 aa, Artificial Sequence
  Description of Artificial Sequence: Synthetic peptide
  Seed: DSSTLELRSR
DLSTLELRSR

SEQ ID NO: 36488 - protein, 10 aa, Artificial Sequence
  Description of Artificial Sequence: Synthetic peptide
  Seed: DSSTLELRSR
DMSTLELRSR

SEQ ID NO: 36489 - protein, 10 aa, Artificial Sequence
  Description of Artificial Sequence: Synthetic peptide
  Seed: DSSTLELRSR
DFSTLELRSR

SEQ ID NO: 36490 - protein, 10 aa, Artificial Sequence
  Description of Artificial Sequence: Synthetic peptide
  Seed: DSSTLELRSR
DTSTLELRSR

SEQ ID NO: 36491 - protein, 10 aa, Artificial Sequence
  Description of Artificial Sequence: Synthetic peptide
  Seed: DSSTLELRSR
DTSTLELRSK

SEQ ID NO: 36492 - protein, 10 aa, Artificial Sequence
  Description of Artificial Sequence: Synthetic peptide
  Seed: DSSTLELRSR
DWSTLELRSR

SEQ ID NO: 36493 - protein, 10 aa, Artificial Sequence
  Description of Artificial Sequence: Synthetic peptide
  Seed: DSSTLELRSR
DVSTLELRSR

SEQ ID NO: 36494 - protein, 10 aa, Artificial Sequence
  Description of Artificial Sequence: Synthetic peptide
  Seed: DVSFQGRGVF
DFSFQGRGVY

SEQ ID NO: 36495 - protein, 10 aa, Artificial Sequence
  Description of Artificial Sequence: Synthetic peptide
  Seed: DSSTLELRSR
DVSTLELRSK

SEQ ID NO: 36496 - protein, 10 aa, Artificial Sequence
  Description of Artificial Sequence: Synthetic peptide
  Seed: DTMESSTLEL
DAMESSTLEV

SEQ ID NO: 36497 - protein, 10 aa, Artificial Sequence
  Description of Artificial Sequence: Synthetic peptide
  Seed: DTMESSTLEL
DIMESSTLEI

SEQ ID NO: 36498 - protein, 10 aa, Artificial Sequence
  Description of Artificial Sequence: Synthetic peptide
  Seed: DTMESSTLEL
DIMESSTLEV

SEQ ID NO: 36499 - protein, 10 aa, Artificial Sequence
  Description of Artificial Sequence: Synthetic peptide
  Seed: DTMESSTLEL
DLMESSTLEV

SEQ ID NO: 36500 - protein, 10 aa, Artificial Sequence
  Description of Artificial Sequence: Synthetic peptide
  Seed: DTMESSTLEL
DMMESSTLEV

SEQ ID NO: 36501 - protein, 10 aa, Artificial Sequence
  Description of Artificial Sequence: Synthetic peptide
  Seed: DTMESSTLEL
DSMESSTLEI

SEQ ID NO: 36502 - protein, 10 aa, Artificial Sequence
  Description of Artificial Sequence: Synthetic peptide
  Seed: DTMESSTLEL
DSMESSTLEV

SEQ ID NO: 36503 - protein, 10 aa, Artificial Sequence
  Description of Artificial Sequence: Synthetic peptide
  Seed: DTMESSTLEL
DTMESSTLEA

SEQ ID NO: 36504 - protein, 10 aa, Artificial Sequence
  Description of Artificial Sequence: Synthetic peptide
  Seed: DSSTLELRSR
DASTLELRSK

SEQ ID NO: 36505 - protein, 10 aa, Artificial Sequence
  Description of Artificial Sequence: Synthetic peptide
  Seed: DSSTLELRSR
DASTLELRSR

SEQ ID NO: 36506 - protein, 10 aa, Artificial Sequence
  Description of Artificial Sequence: Synthetic peptide
  Seed: DSNTLELRSR
DVNTLELRSK

SEQ ID NO: 36507 - protein, 10 aa, Artificial Sequence
  Description of Artificial Sequence: Synthetic peptide
  Seed: DSNTLELRSR
DVNTLELRSR

SEQ ID NO: 36508 - protein, 11 aa, Artificial Sequence
  Description of Artificial Sequence: Synthetic peptide
  Seed: DRNFWRGENGR
DLNFWRGENGR

SEQ ID NO: 36509 - protein, 11 aa, Artificial Sequence
  Description of Artificial Sequence: Synthetic peptide
  Seed: DRNFWRGENGR
DKNFWRGENGR

SEQ ID NO: 36510 - protein, 11 aa, Artificial Sequence
  Description of Artificial Sequence: Synthetic peptide
  Seed: DRNFWRGENGR
DMNFWRGENGR

SEQ ID NO: 36511 - protein, 11 aa, Artificial Sequence
  Description of Artificial Sequence: Synthetic peptide
  Seed: DRNFWRGENGR
DFNFWRGENGR

SEQ ID NO: 36512 - protein, 11 aa, Artificial Sequence
  Description of Artificial Sequence: Synthetic peptide
  Seed: DRNFWRGENGR
DPNFWRGENGR

SEQ ID NO: 36513 - protein, 11 aa, Artificial Sequence
  Description of Artificial Sequence: Synthetic peptide
  Seed: DRNFWRGENGR
DSNFWRGENGR

SEQ ID NO: 36514 - protein, 11 aa, Artificial Sequence
  Description of Artificial Sequence: Synthetic peptide
  Seed: DRNFWRGENGR
DTNFWRGENGR

SEQ ID NO: 36515 - protein, 11 aa, Artificial Sequence
  Description of Artificial Sequence: Synthetic peptide
  Seed: DRNFWRGENGR
DWNFWRGENGR

SEQ ID NO: 36516 - protein, 11 aa, Artificial Sequence
  Description of Artificial Sequence: Synthetic peptide
  Seed: DRNFWRGENGR
DYNFWRGENGR

SEQ ID NO: 36517 - protein, 11 aa, Artificial Sequence
  Description of Artificial Sequence: Synthetic peptide
  Seed: DRNFWRGENGR
DVNFWRGENGR

SEQ ID NO: 36518 - protein, 10 aa, Artificial Sequence
  Description of Artificial Sequence: Synthetic peptide
  Seed: DSNTLELRSR
DANTLELRSR

SEQ ID NO: 36519 - protein, 10 aa, Artificial Sequence
  Description of Artificial Sequence: Synthetic peptide
  Seed: DSNTLELRSR
DINTLELRSR

SEQ ID NO: 36520 - protein, 10 aa, Artificial Sequence
  Description of Artificial Sequence: Synthetic peptide
  Seed: DSNTLELRSR
DLNTLELRSR

SEQ ID NO: 36521 - protein, 10 aa, Artificial Sequence
  Description of Artificial Sequence: Synthetic peptide
  Seed: DSNTLELRSR
DMNTLELRSR

SEQ ID NO: 36522 - protein, 10 aa, Artificial Sequence
  Description of Artificial Sequence: Synthetic peptide
  Seed: DSNTLELRSR
DFNTLELRSR

SEQ ID NO: 36523 - protein, 10 aa, Artificial Sequence
  Description of Artificial Sequence: Synthetic peptide
  Seed: DSNTLELRSR
DTNTLELRSR

SEQ ID NO: 36524 - protein, 10 aa, Artificial Sequence
  Description of Artificial Sequence: Synthetic peptide
  Seed: DSNTLELRSR
DTNTLELRSK

SEQ ID NO: 36525 - protein, 10 aa, Artificial Sequence
  Description of Artificial Sequence: Synthetic peptide
  Seed: DSNTLELRSR
DWNTLELRSR

SEQ ID NO: 36526 - protein, 10 aa, Artificial Sequence
  Description of Artificial Sequence: Synthetic peptide
  Seed: DSNTLELRSR
DYNTLELRSR

SEQ ID NO: 36527 - protein, 10 aa, Artificial Sequence
  Description of Artificial Sequence: Synthetic peptide
  Seed: DTMESSTLEL
DTMESSTLEI

SEQ ID NO: 36528 - protein, 10 aa, Artificial Sequence
  Description of Artificial Sequence: Synthetic peptide
  Seed: DTMESSTLEL
DTMESSTLEM

SEQ ID NO: 36529 - protein, 10 aa, Artificial Sequence
  Description of Artificial Sequence: Synthetic peptide
  Seed: DTMESSTLEL
DTMESSTLEV

SEQ ID NO: 36530 - protein, 10 aa, Artificial Sequence
  Description of Artificial Sequence: Synthetic peptide
  Seed: DVSFQGRGVF
DRSFQGRGVW

SEQ ID NO: 36531 - protein, 10 aa, Artificial Sequence
  Description of Artificial Sequence: Synthetic peptide
  Seed: DVSFQGRGVF
DCSFQGRGVW

SEQ ID NO: 36532 - protein, 10 aa, Artificial Sequence
  Description of Artificial Sequence: Synthetic peptide
  Seed: DVSFQGRGVF
DQSFQGRGVW

SEQ ID NO: 36533 - protein, 10 aa, Artificial Sequence
  Description of Artificial Sequence: Synthetic peptide
  Seed: DVSFQGRGVF
DGSFQGRGVW

SEQ ID NO: 36534 - protein, 10 aa, Artificial Sequence
  Description of Artificial Sequence: Synthetic peptide
  Seed: DVSFQGRGVF
DHSFQGRGVF

SEQ ID NO: 36535 - protein, 10 aa, Artificial Sequence
  Description of Artificial Sequence: Synthetic peptide
  Seed: DVSFQGRGVF
DHSFQGRGVW

SEQ ID NO: 36536 - protein, 10 aa, Artificial Sequence
  Description of Artificial Sequence: Synthetic peptide
  Seed: DVSFQGRGVF
DISFQGRGVF

SEQ ID NO: 36537 - protein, 10 aa, Artificial Sequence
  Description of Artificial Sequence: Synthetic peptide
  Seed: DVSFQGRGVF
DISFQGRGVW

SEQ ID NO: 36538 - protein, 10 aa, Artificial Sequence
  Description of Artificial Sequence: Synthetic peptide
  Seed: DVSFQGRGVF
DISFQGRGVY

SEQ ID NO: 36539 - protein, 10 aa, Artificial Sequence
  Description of Artificial Sequence: Synthetic peptide
  Seed: DVSFQGRGVF
DLSFQGRGVW

SEQ ID NO: 36540 - protein, 10 aa, Artificial Sequence
  Description of Artificial Sequence: Synthetic peptide
  Seed: DVSFQGRGVF
DLSFQGRGVY

SEQ ID NO: 36541 - protein, 10 aa, Artificial Sequence
  Description of Artificial Sequence: Synthetic peptide
  Seed: DVSFQGRGVF
DKSFQGRGVF

SEQ ID NO: 36542 - protein, 10 aa, Artificial Sequence
  Description of Artificial Sequence: Synthetic peptide
  Seed: DVSFQGRGVF
DKSFQGRGVW

SEQ ID NO: 36543 - protein, 10 aa, Artificial Sequence
  Description of Artificial Sequence: Synthetic peptide
  Seed: DVSFQGRGVF
DKSFQGRGVY

SEQ ID NO: 36544 - protein, 10 aa, Artificial Sequence
  Description of Artificial Sequence: Synthetic peptide
  Seed: DVSFQGRGVF
DMSFQGRGVF

SEQ ID NO: 36545 - protein, 10 aa, Artificial Sequence
  Description of Artificial Sequence: Synthetic peptide
  Seed: DVSFQGRGVF
DMSFQGRGVW

SEQ ID NO: 36546 - protein, 10 aa, Artificial Sequence
  Description of Artificial Sequence: Synthetic peptide
  Seed: DVSFQGRGVF
DMSFQGRGVY

SEQ ID NO: 36547 - protein, 10 aa, Artificial Sequence
  Description of Artificial Sequence: Synthetic peptide
  Seed: DVSFQGRGVF
DFSFQGRGVF

SEQ ID NO: 36548 - protein, 10 aa, Artificial Sequence
  Description of Artificial Sequence: Synthetic peptide
  Seed: DVSFQGRGVF
DFSFQGRGVW

SEQ ID NO: 36549 - protein, 10 aa, Artificial Sequence
  Description of Artificial Sequence: Synthetic peptide
  Seed: DVSFQGRGVF
DRSFQGRGVY

SEQ ID NO: 36550 - protein, 10 aa, Artificial Sequence
  Description of Artificial Sequence: Synthetic peptide
  Seed: DVSFQGRGVF
DRSFQGRGVF

SEQ ID NO: 36551 - protein, 10 aa, Artificial Sequence
  Description of Artificial Sequence: Synthetic peptide
  Seed: DTMESSTLEL
DVMESSTLEA

SEQ ID NO: 36552 - protein, 10 aa, Artificial Sequence
  Description of Artificial Sequence: Synthetic peptide
  Seed: DVSFQGRGVF
DASFQGRGVW

SEQ ID NO: 36553 - protein, 10 aa, Artificial Sequence
  Description of Artificial Sequence: Synthetic peptide
  Seed: DTMESSTLEL
DVMESSTLEI

SEQ ID NO: 36554 - protein, 10 aa, Artificial Sequence
  Description of Artificial Sequence: Synthetic peptide
  Seed: DTMESSTLEL
DVMESSTLEL

SEQ ID NO: 36555 - protein, 10 aa, Artificial Sequence
  Description of Artificial Sequence: Synthetic peptide
  Seed: DTMESSTLEL
DVMESSTLEV

SEQ ID NO: 36556 - protein, 11 aa, Artificial Sequence
  Description of Artificial Sequence: Synthetic peptide
  Seed: DTMESSTLELR
DAMESSTLELK

SEQ ID NO: 36557 - protein, 11 aa, Artificial Sequence
  Description of Artificial Sequence: Synthetic peptide
  Seed: DTMESSTLELR
DIMESSTLELR

SEQ ID NO: 36558 - protein, 11 aa, Artificial Sequence
  Description of Artificial Sequence: Synthetic peptide
  Seed: DTMESSTLELR
DIMESSTLELK

SEQ ID NO: 36559 - protein, 11 aa, Artificial Sequence
  Description of Artificial Sequence: Synthetic peptide
  Seed: DTMESSTLELR
DLMESSTLELR

SEQ ID NO: 36560 - protein, 11 aa, Artificial Sequence
  Description of Artificial Sequence: Synthetic peptide
  Seed: DTMESSTLELR
DMMESSTLELR

SEQ ID NO: 36561 - protein, 11 aa, Artificial Sequence
  Description of Artificial Sequence: Synthetic peptide
  Seed: DTMESSTLELR
DMMESSTLELK

SEQ ID NO: 36562 - protein, 11 aa, Artificial Sequence
  Description of Artificial Sequence: Synthetic peptide
  Seed: DTMESSTLELR
DFMESSTLELR

SEQ ID NO: 36563 - protein, 11 aa, Artificial Sequence
  Description of Artificial Sequence: Synthetic peptide
  Seed: DTMESSTLELR
DSMESSTLELR

SEQ ID NO: 36564 - protein, 11 aa, Artificial Sequence
  Description of Artificial Sequence: Synthetic peptide
  Seed: DTMESSTLELR
DSMESSTLELK

SEQ ID NO: 36565 - protein, 11 aa, Artificial Sequence
  Description of Artificial Sequence: Synthetic peptide
  Seed: DTMESSTLELR
DTMESSTLELK

SEQ ID NO: 36566 - protein, 11 aa, Artificial Sequence
  Description of Artificial Sequence: Synthetic peptide
  Seed: DTMESSTLELR
DWMESSTLELR

SEQ ID NO: 36567 - protein, 11 aa, Artificial Sequence
  Description of Artificial Sequence: Synthetic peptide
  Seed: DTMESSTLELR
DYMESSTLELR

SEQ ID NO: 36568 - protein, 11 aa, Artificial Sequence
  Description of Artificial Sequence: Synthetic peptide
  Seed: DTMESSTLELR
DVMESSTLELR

SEQ ID NO: 36569 - protein, 11 aa, Artificial Sequence
  Description of Artificial Sequence: Synthetic peptide
  Seed: DTMESSTLELR
DVMESSTLELK

SEQ ID NO: 36570 - protein, 9 aa, Artificial Sequence
  Description of Artificial Sequence: Synthetic peptide
  Seed: DVSFQGRGV
DTSFQGRGV

SEQ ID NO: 36571 - protein, 11 aa, Artificial Sequence
  Description of Artificial Sequence: Synthetic peptide
  Seed: EDATAGLTHLM
EKATAGLTHLV

SEQ ID NO: 36572 - protein, 11 aa, Artificial Sequence
  Description of Artificial Sequence: Synthetic peptide
  Seed: EDATAGLTHLM
EMATAGLTHLI

SEQ ID NO: 36573 - protein, 10 aa, Artificial Sequence
  Description of Artificial Sequence: Synthetic peptide
  Seed: EGSYFFGDNA
EESYFFGDNL

SEQ ID NO: 36574 - protein, 11 aa, Artificial Sequence
  Description of Artificial Sequence: Synthetic peptide
  Seed: EGRTSDMRAEI
ECRTSDMRAEV

SEQ ID NO: 36575 - protein, 11 aa, Artificial Sequence
  Description of Artificial Sequence: Synthetic peptide
  Seed: EGRTSDMRAEI
EARTSDMRAEI

SEQ ID NO: 36576 - protein, 11 aa, Artificial Sequence
  Description of Artificial Sequence: Synthetic peptide
  Seed: EGRTSDMRAEI
EARTSDMRAEV

SEQ ID NO: 36577 - protein, 11 aa, Artificial Sequence
  Description of Artificial Sequence: Synthetic peptide
  Seed: EGRTSDMRAEI
ERRTSDMRAEI

SEQ ID NO: 36578 - protein, 11 aa, Artificial Sequence
  Description of Artificial Sequence: Synthetic peptide
  Seed: EGRTSDMRAEI
ERRTSDMRAEV

SEQ ID NO: 36579 - protein, 11 aa, Artificial Sequence
  Description of Artificial Sequence: Synthetic peptide
  Seed: EGRTSDMRAEI
ENRTSDMRAEI

SEQ ID NO: 36580 - protein, 11 aa, Artificial Sequence
  Description of Artificial Sequence: Synthetic peptide
  Seed: EGRTSDMRAEI
ENRTSDMRAEV

SEQ ID NO: 36581 - protein, 11 aa, Artificial Sequence
  Description of Artificial Sequence: Synthetic peptide
  Seed: EGRTSDMRAEI
EDRTSDMRAEI

SEQ ID NO: 36582 - protein, 11 aa, Artificial Sequence
  Description of Artificial Sequence: Synthetic peptide
  Seed: EGRTSDMRAEI
EDRTSDMRAEV

SEQ ID NO: 36583 - protein, 11 aa, Artificial Sequence
  Description of Artificial Sequence: Synthetic peptide
  Seed: EGRTSDMRAEI
ECRTSDMRAEI

SEQ ID NO: 36584 - protein, 11 aa, Artificial Sequence
  Description of Artificial Sequence: Synthetic peptide
  Seed: EGRTSDMRAEI
EQRTSDMRAEI

SEQ ID NO: 36585 - protein, 11 aa, Artificial Sequence
  Description of Artificial Sequence: Synthetic peptide
  Seed: EGRTSDMRAEI
EKRTSDMRAEI

SEQ ID NO: 36586 - protein, 11 aa, Artificial Sequence
  Description of Artificial Sequence: Synthetic peptide
  Seed: EGRTSDMRAEI
EQRTSDMRAEV

SEQ ID NO: 36587 - protein, 11 aa, Artificial Sequence
  Description of Artificial Sequence: Synthetic peptide
  Seed: EGRTSDMRAEI
EERTSDMRAEI

SEQ ID NO: 36588 - protein, 11 aa, Artificial Sequence
  Description of Artificial Sequence: Synthetic peptide
  Seed: EGRTSDMRAEI
EERTSDMRAEV

SEQ ID NO: 36589 - protein, 11 aa, Artificial Sequence
  Description of Artificial Sequence: Synthetic peptide
  Seed: EGRTSDMRAEI
EGRTSDMRAEV

SEQ ID NO: 36590 - protein, 11 aa, Artificial Sequence
  Description of Artificial Sequence: Synthetic peptide
  Seed: EGRTSDMRAEI
EHRTSDMRAEI

SEQ ID NO: 36591 - protein, 11 aa, Artificial Sequence
  Description of Artificial Sequence: Synthetic peptide
  Seed: EGRTSDMRAEI
EHRTSDMRAEV

SEQ ID NO: 36592 - protein, 11 aa, Artificial Sequence
  Description of Artificial Sequence: Synthetic peptide
  Seed: EGRTSDMRAEI
EIRTSDMRAEI

SEQ ID NO: 36593 - protein, 11 aa, Artificial Sequence
  Description of Artificial Sequence: Synthetic peptide
  Seed: EGRTSDMRAEI
EIRTSDMRAEV

SEQ ID NO: 36594 - protein, 11 aa, Artificial Sequence
  Description of Artificial Sequence: Synthetic peptide
  Seed: EGRTSDMRAEI
ELRTSDMRAEI

SEQ ID NO: 36595 - protein, 11 aa, Artificial Sequence
  Description of Artificial Sequence: Synthetic peptide
  Seed: EGAKPEEVSFR
EVAKPEEVSFK

SEQ ID NO: 36596 - protein, 11 aa, Artificial Sequence
  Description of Artificial Sequence: Synthetic peptide
  Seed: EGAKPEEVSFR
EVAKPEEVSFR

SEQ ID NO: 36597 - protein, 11 aa, Artificial Sequence
  Description of Artificial Sequence: Synthetic peptide
  Seed: EGAKPEEVSFR
ETAKPEEVSFK

SEQ ID NO: 36598 - protein, 11 aa, Artificial Sequence
  Description of Artificial Sequence: Synthetic peptide
  Seed: EGAKPEEVSFR
ETAKPEEVSFR

SEQ ID NO: 36599 - protein, 10 aa, Artificial Sequence
  Description of Artificial Sequence: Synthetic peptide
  Seed: EDLRVSSFIR
EWLRVSSFIR

SEQ ID NO: 36600 - protein, 10 aa, Artificial Sequence
  Description of Artificial Sequence: Synthetic peptide
  Seed: EDLRVSSFIR
EYLRVSSFIR

SEQ ID NO: 36601 - protein, 10 aa, Artificial Sequence
  Description of Artificial Sequence: Synthetic peptide
  Seed: EDLRVSSFIR
EYLRVSSFIK

SEQ ID NO: 36602 - protein, 10 aa, Artificial Sequence
  Description of Artificial Sequence: Synthetic peptide
  Seed: EDLRVSSFIR
EVLRVSSFIR

SEQ ID NO: 36603 - protein, 11 aa, Artificial Sequence
  Description of Artificial Sequence: Synthetic peptide
  Seed: EEVSFQGRGVF
EEVSFQGRGVY

SEQ ID NO: 36604 - protein, 11 aa, Artificial Sequence
  Description of Artificial Sequence: Synthetic peptide
  Seed: EGAKPEEVSFR
EAAKPEEVSFR

SEQ ID NO: 36605 - protein, 11 aa, Artificial Sequence
  Description of Artificial Sequence: Synthetic peptide
  Seed: EGAKPEEVSFR
EAAKPEEVSFK

SEQ ID NO: 36606 - protein, 11 aa, Artificial Sequence
  Description of Artificial Sequence: Synthetic peptide
  Seed: EGAKPEEVSFR
EQAKPEEVSFR

SEQ ID NO: 36607 - protein, 11 aa, Artificial Sequence
  Description of Artificial Sequence: Synthetic peptide
  Seed: EGAKPEEVSFR
EIAKPEEVSFR

SEQ ID NO: 36608 - protein, 11 aa, Artificial Sequence
  Description of Artificial Sequence: Synthetic peptide
  Seed: EGAKPEEVSFR
EIAKPEEVSFK

SEQ ID NO: 36609 - protein, 11 aa, Artificial Sequence
  Description of Artificial Sequence: Synthetic peptide
  Seed: EGAKPEEVSFR
ELAKPEEVSFR

SEQ ID NO: 36610 - protein, 11 aa, Artificial Sequence
  Description of Artificial Sequence: Synthetic peptide
  Seed: EGAKPEEVSFR
ELAKPEEVSFK

SEQ ID NO: 36611 - protein, 11 aa, Artificial Sequence
  Description of Artificial Sequence: Synthetic peptide
  Seed: EGAKPEEVSFR
EMAKPEEVSFR

SEQ ID NO: 36612 - protein, 11 aa, Artificial Sequence
  Description of Artificial Sequence: Synthetic peptide
  Seed: EGAKPEEVSFR
EMAKPEEVSFK

SEQ ID NO: 36613 - protein, 11 aa, Artificial Sequence
  Description of Artificial Sequence: Synthetic peptide
  Seed: EGAKPEEVSFR
EFAKPEEVSFR

SEQ ID NO: 36614 - protein, 11 aa, Artificial Sequence
  Description of Artificial Sequence: Synthetic peptide
  Seed: EGAKPEEVSFR
ESAKPEEVSFR

SEQ ID NO: 36615 - protein, 11 aa, Artificial Sequence
  Description of Artificial Sequence: Synthetic peptide
  Seed: EGAKPEEVSFR
ESAKPEEVSFK

SEQ ID NO: 36616 - protein, 11 aa, Artificial Sequence
  Description of Artificial Sequence: Synthetic peptide
  Seed: EGRTSDMRAEI
ELRTSDMRAEV

SEQ ID NO: 36617 - protein, 11 aa, Artificial Sequence
  Description of Artificial Sequence: Synthetic peptide
  Seed: EGRTSDMRAEI
EKRTSDMRAEV

SEQ ID NO: 36618 - protein, 11 aa, Artificial Sequence
  Description of Artificial Sequence: Synthetic peptide
  Seed: EDATAGLTHLM
EMATAGLTHLL

SEQ ID NO: 36619 - protein, 10 aa, Artificial Sequence
  Description of Artificial Sequence: Synthetic peptide
  Seed: EGSYFFGDNA
EDSYFFGDNV

SEQ ID NO: 36620 - protein, 10 aa, Artificial Sequence
  Description of Artificial Sequence: Synthetic peptide
  Seed: EGSYFFGDNA
ERSYFFGDNL

SEQ ID NO: 36621 - protein, 10 aa, Artificial Sequence
  Description of Artificial Sequence: Synthetic peptide
  Seed: EGSYFFGDNA
ERSYFFGDNV

SEQ ID NO: 36622 - protein, 10 aa, Artificial Sequence
  Description of Artificial Sequence: Synthetic peptide
  Seed: EGSYFFGDNA
ENSYFFGDNA

SEQ ID NO: 36623 - protein, 10 aa, Artificial Sequence
  Description of Artificial Sequence: Synthetic peptide
  Seed: EGSYFFGDNA
ENSYFFGDNI

SEQ ID NO: 36624 - protein, 10 aa, Artificial Sequence
  Description of Artificial Sequence: Synthetic peptide
  Seed: EGSYFFGDNA
ENSYFFGDNL

SEQ ID NO: 36625 - protein, 10 aa, Artificial Sequence
  Description of Artificial Sequence: Synthetic peptide
  Seed: EGSYFFGDNA
ENSYFFGDNV

SEQ ID NO: 36626 - protein, 10 aa, Artificial Sequence
  Description of Artificial Sequence: Synthetic peptide
  Seed: EGSYFFGDNA
EDSYFFGDNA

SEQ ID NO: 36627 - protein, 10 aa, Artificial Sequence
  Description of Artificial Sequence: Synthetic peptide
  Seed: EGSYFFGDNA
EDSYFFGDNI

SEQ ID NO: 36628 - protein, 10 aa, Artificial Sequence
  Description of Artificial Sequence: Synthetic peptide
  Seed: EGSYFFGDNA
EDSYFFGDNL

SEQ ID NO: 36629 - protein, 10 aa, Artificial Sequence
  Description of Artificial Sequence: Synthetic peptide
  Seed: EGSYFFGDNA
ECSYFFGDNA

SEQ ID NO: 36630 - protein, 11 aa, Artificial Sequence
  Description of Artificial Sequence: Synthetic peptide
  Seed: EGRTSDMRAEI
EMRTSDMRAEI

SEQ ID NO: 36631 - protein, 10 aa, Artificial Sequence
  Description of Artificial Sequence: Synthetic peptide
  Seed: EGSYFFGDNA
ECSYFFGDNI

SEQ ID NO: 36632 - protein, 10 aa, Artificial Sequence
  Description of Artificial Sequence: Synthetic peptide
  Seed: EGSYFFGDNA
ECSYFFGDNL

SEQ ID NO: 36633 - protein, 10 aa, Artificial Sequence
  Description of Artificial Sequence: Synthetic peptide
  Seed: EGSYFFGDNA
ECSYFFGDNV

SEQ ID NO: 36634 - protein, 10 aa, Artificial Sequence
  Description of Artificial Sequence: Synthetic peptide
  Seed: EGSYFFGDNA
EQSYFFGDNA

SEQ ID NO: 36635 - protein, 10 aa, Artificial Sequence
  Description of Artificial Sequence: Synthetic peptide
  Seed: EGSYFFGDNA
EQSYFFGDNI

SEQ ID NO: 36636 - protein, 10 aa, Artificial Sequence
  Description of Artificial Sequence: Synthetic peptide
  Seed: EGSYFFGDNA
EQSYFFGDNL

SEQ ID NO: 36637 - protein, 10 aa, Artificial Sequence
  Description of Artificial Sequence: Synthetic peptide
  Seed: EGSYFFGDNA
EQSYFFGDNV

SEQ ID NO: 36638 - protein, 10 aa, Artificial Sequence
  Description of Artificial Sequence: Synthetic peptide
  Seed: EGSYFFGDNA
EESYFFGDNA

SEQ ID NO: 36639 - protein, 10 aa, Artificial Sequence
  Description of Artificial Sequence: Synthetic peptide
  Seed: EGSYFFGDNA
EESYFFGDNI

SEQ ID NO: 36640 - protein, 10 aa, Artificial Sequence
  Description of Artificial Sequence: Synthetic peptide
  Seed: EGSYFFGDNA
ERSYFFGDNI

SEQ ID NO: 36641 - protein, 10 aa, Artificial Sequence
  Description of Artificial Sequence: Synthetic peptide
  Seed: EGSYFFGDNA
ERSYFFGDNA

SEQ ID NO: 36642 - protein, 10 aa, Artificial Sequence
  Description of Artificial Sequence: Synthetic peptide
  Seed: EGSYFFGDNA
EASYFFGDNV

SEQ ID NO: 36643 - protein, 10 aa, Artificial Sequence
  Description of Artificial Sequence: Synthetic peptide
  Seed: EGSYFFGDNA
EASYFFGDNM

SEQ ID NO: 36644 - protein, 11 aa, Artificial Sequence
  Description of Artificial Sequence: Synthetic peptide
  Seed: EGRTSDMRAEI
EMRTSDMRAEV

SEQ ID NO: 36645 - protein, 11 aa, Artificial Sequence
  Description of Artificial Sequence: Synthetic peptide
  Seed: EGRTSDMRAEI
EFRTSDMRAEI

SEQ ID NO: 36646 - protein, 11 aa, Artificial Sequence
  Description of Artificial Sequence: Synthetic peptide
  Seed: EGRTSDMRAEI
EFRTSDMRAEV

SEQ ID NO: 36647 - protein, 11 aa, Artificial Sequence
  Description of Artificial Sequence: Synthetic peptide
  Seed: EGRTSDMRAEI
EPRTSDMRAEI

SEQ ID NO: 36648 - protein, 11 aa, Artificial Sequence
  Description of Artificial Sequence: Synthetic peptide
  Seed: EGRTSDMRAEI
EPRTSDMRAEV

SEQ ID NO: 36649 - protein, 11 aa, Artificial Sequence
  Description of Artificial Sequence: Synthetic peptide
  Seed: EGRTSDMRAEI
ESRTSDMRAEI

SEQ ID NO: 36650 - protein, 11 aa, Artificial Sequence
  Description of Artificial Sequence: Synthetic peptide
  Seed: EGRTSDMRAEI
ESRTSDMRAEV

SEQ ID NO: 36651 - protein, 11 aa, Artificial Sequence
  Description of Artificial Sequence: Synthetic peptide
  Seed: EGRTSDMRAEI
ETRTSDMRAEI

SEQ ID NO: 36652 - protein, 11 aa, Artificial Sequence
  Description of Artificial Sequence: Synthetic peptide
  Seed: EGRTSDMRAEI
ETRTSDMRAEV

SEQ ID NO: 36653 - protein, 11 aa, Artificial Sequence
  Description of Artificial Sequence: Synthetic peptide
  Seed: EGRTSDMRAEI
EWRTSDMRAEI

SEQ ID NO: 36654 - protein, 11 aa, Artificial Sequence
  Description of Artificial Sequence: Synthetic peptide
  Seed: EGRTSDMRAEI
EWRTSDMRAEV

SEQ ID NO: 36655 - protein, 11 aa, Artificial Sequence
  Description of Artificial Sequence: Synthetic peptide
  Seed: EGRTSDMRAEI
EYRTSDMRAEI

SEQ ID NO: 36656 - protein, 11 aa, Artificial Sequence
  Description of Artificial Sequence: Synthetic peptide
  Seed: EGRTSDMRAEI
EYRTSDMRAEV

SEQ ID NO: 36657 - protein, 11 aa, Artificial Sequence
  Description of Artificial Sequence: Synthetic peptide
  Seed: EGRTSDMRAEI
EVRTSDMRAEI

SEQ ID NO: 36658 - protein, 11 aa, Artificial Sequence
  Description of Artificial Sequence: Synthetic peptide
  Seed: EGRTSDMRAEI
EVRTSDMRAEL

SEQ ID NO: 36659 - protein, 11 aa, Artificial Sequence
  Description of Artificial Sequence: Synthetic peptide
  Seed: EGRTSDMRAEI
EVRTSDMRAEV

SEQ ID NO: 36660 - protein, 10 aa, Artificial Sequence
  Description of Artificial Sequence: Synthetic peptide
  Seed: EGSYFFGDNA
EASYFFGDNA

SEQ ID NO: 36661 - protein, 10 aa, Artificial Sequence
  Description of Artificial Sequence: Synthetic peptide
  Seed: EGSYFFGDNA
EASYFFGDNI

SEQ ID NO: 36662 - protein, 10 aa, Artificial Sequence
  Description of Artificial Sequence: Synthetic peptide
  Seed: EGSYFFGDNA
EASYFFGDNL

SEQ ID NO: 36663 - protein, 10 aa, Artificial Sequence
  Description of Artificial Sequence: Synthetic peptide
  Seed: EDLRVSSFIR
ETLRVSSFIR

SEQ ID NO: 36664 - protein, 10 aa, Artificial Sequence
  Description of Artificial Sequence: Synthetic peptide
  Seed: EDLRVSSFIR
ESLRVSSFIR

SEQ ID NO: 36665 - protein, 10 aa, Artificial Sequence
  Description of Artificial Sequence: Synthetic peptide
  Seed: EDLRVSSFIR
EPLRVSSFIR

SEQ ID NO: 36666 - protein, 11 aa, Artificial Sequence
  Description of Artificial Sequence: Synthetic peptide
  Seed: EDATAGLTHLM
ETATAGLTHLV

SEQ ID NO: 36667 - protein, 11 aa, Artificial Sequence
  Description of Artificial Sequence: Synthetic peptide
  Seed: EDATAGLTHLM
ESATAGLTHLY

SEQ ID NO: 36668 - protein, 11 aa, Artificial Sequence
  Description of Artificial Sequence: Synthetic peptide
  Seed: EDATAGLTHLM
ESATAGLTHLV

SEQ ID NO: 36669 - protein, 11 aa, Artificial Sequence
  Description of Artificial Sequence: Synthetic peptide
  Seed: EDATAGLTHLM
ETATAGLTHLA

SEQ ID NO: 36670 - protein, 11 aa, Artificial Sequence
  Description of Artificial Sequence: Synthetic peptide
  Seed: EDATAGLTHLM
ETATAGLTHLI

SEQ ID NO: 36671 - protein, 11 aa, Artificial Sequence
  Description of Artificial Sequence: Synthetic peptide
  Seed: EDATAGLTHLM
ETATAGLTHLL

SEQ ID NO: 36672 - protein, 11 aa, Artificial Sequence
  Description of Artificial Sequence: Synthetic peptide
  Seed: EDATAGLTHLM
ETATAGLTHLM

SEQ ID NO: 36673 - protein, 11 aa, Artificial Sequence
  Description of Artificial Sequence: Synthetic peptide
  Seed: EDATAGLTHLM
ETATAGLTHLF

SEQ ID NO: 36674 - protein, 11 aa, Artificial Sequence
  Description of Artificial Sequence: Synthetic peptide
  Seed: EDATAGLTHLM
ETATAGLTHLT

SEQ ID NO: 36675 - protein, 11 aa, Artificial Sequence
  Description of Artificial Sequence: Synthetic peptide
  Seed: EDATAGLTHLM
ETATAGLTHLY

SEQ ID NO: 36676 - protein, 11 aa, Artificial Sequence
  Description of Artificial Sequence: Synthetic peptide
  Seed: EDATAGLTHLM
EWATAGLTHLA

SEQ ID NO: 36677 - protein, 10 aa, Artificial Sequence
  Description of Artificial Sequence: Synthetic peptide
  Seed: EDLRVSSFIR
EFLRVSSFIK

SEQ ID NO: 36678 - protein, 11 aa, Artificial Sequence
  Description of Artificial Sequence: Synthetic peptide
  Seed: EDATAGLTHLM
EWATAGLTHLI

SEQ ID NO: 36679 - protein, 11 aa, Artificial Sequence
  Description of Artificial Sequence: Synthetic peptide
  Seed: EDATAGLTHLM
EWATAGLTHLL

SEQ ID NO: 36680 - protein, 11 aa, Artificial Sequence
  Description of Artificial Sequence: Synthetic peptide
  Seed: EDATAGLTHLM
EWATAGLTHLM

SEQ ID NO: 36681 - protein, 11 aa, Artificial Sequence
  Description of Artificial Sequence: Synthetic peptide
  Seed: EDATAGLTHLM
EWATAGLTHLF

SEQ ID NO: 36682 - protein, 11 aa, Artificial Sequence
  Description of Artificial Sequence: Synthetic peptide
  Seed: EDATAGLTHLM
EWATAGLTHLY

SEQ ID NO: 36683 - protein, 11 aa, Artificial Sequence
  Description of Artificial Sequence: Synthetic peptide
  Seed: EDATAGLTHLM
EWATAGLTHLV

SEQ ID NO: 36684 - protein, 11 aa, Artificial Sequence
  Description of Artificial Sequence: Synthetic peptide
  Seed: EDATAGLTHLM
EYATAGLTHLA

SEQ ID NO: 36685 - protein, 11 aa, Artificial Sequence
  Description of Artificial Sequence: Synthetic peptide
  Seed: EDATAGLTHLM
EYATAGLTHLI

SEQ ID NO: 36686 - protein, 11 aa, Artificial Sequence
  Description of Artificial Sequence: Synthetic peptide
  Seed: EDATAGLTHLM
EYATAGLTHLL

SEQ ID NO: 36687 - protein, 11 aa, Artificial Sequence
  Description of Artificial Sequence: Synthetic peptide
  Seed: EDATAGLTHLM
ESATAGLTHLF

SEQ ID NO: 36688 - protein, 11 aa, Artificial Sequence
  Description of Artificial Sequence: Synthetic peptide
  Seed: EDATAGLTHLM
ESATAGLTHLM

SEQ ID NO: 36689 - protein, 11 aa, Artificial Sequence
  Description of Artificial Sequence: Synthetic peptide
  Seed: EDATAGLTHLM
ESATAGLTHLL

SEQ ID NO: 36690 - protein, 11 aa, Artificial Sequence
  Description of Artificial Sequence: Synthetic peptide
  Seed: EDATAGLTHLM
ESATAGLTHLI

SEQ ID NO: 36691 - protein, 11 aa, Artificial Sequence
  Description of Artificial Sequence: Synthetic peptide
  Seed: EDATAGLTHLM
EMATAGLTHLM

SEQ ID NO: 36692 - protein, 11 aa, Artificial Sequence
  Description of Artificial Sequence: Synthetic peptide
  Seed: EDATAGLTHLM
EMATAGLTHLF

SEQ ID NO: 36693 - protein, 11 aa, Artificial Sequence
  Description of Artificial Sequence: Synthetic peptide
  Seed: EDATAGLTHLM
EMATAGLTHLY

SEQ ID NO: 36694 - protein, 11 aa, Artificial Sequence
  Description of Artificial Sequence: Synthetic peptide
  Seed: EDATAGLTHLM
EMATAGLTHLV

SEQ ID NO: 36695 - protein, 11 aa, Artificial Sequence
  Description of Artificial Sequence: Synthetic peptide
  Seed: EDATAGLTHLM
EFATAGLTHLA

SEQ ID NO: 36696 - protein, 11 aa, Artificial Sequence
  Description of Artificial Sequence: Synthetic peptide
  Seed: EDATAGLTHLM
EFATAGLTHLI

SEQ ID NO: 36697 - protein, 11 aa, Artificial Sequence
  Description of Artificial Sequence: Synthetic peptide
  Seed: EDATAGLTHLM
EFATAGLTHLL

SEQ ID NO: 36698 - protein, 11 aa, Artificial Sequence
  Description of Artificial Sequence: Synthetic peptide
  Seed: EDATAGLTHLM
EFATAGLTHLM

SEQ ID NO: 36699 - protein, 11 aa, Artificial Sequence
  Description of Artificial Sequence: Synthetic peptide
  Seed: EDATAGLTHLM
EFATAGLTHLF

SEQ ID NO: 36700 - protein, 11 aa, Artificial Sequence
  Description of Artificial Sequence: Synthetic peptide
  Seed: EDATAGLTHLM
EFATAGLTHLY

SEQ ID NO: 36701 - protein, 11 aa, Artificial Sequence
  Description of Artificial Sequence: Synthetic peptide
  Seed: EDATAGLTHLM
EFATAGLTHLV

SEQ ID NO: 36702 - protein, 11 aa, Artificial Sequence
  Description of Artificial Sequence: Synthetic peptide
  Seed: EDATAGLTHLM
EPATAGLTHLA

SEQ ID NO: 36703 - protein, 11 aa, Artificial Sequence
  Description of Artificial Sequence: Synthetic peptide
  Seed: EDATAGLTHLM
EPATAGLTHLI

SEQ ID NO: 36704 - protein, 11 aa, Artificial Sequence
  Description of Artificial Sequence: Synthetic peptide
  Seed: EDATAGLTHLM
EPATAGLTHLL

SEQ ID NO: 36705 - protein, 11 aa, Artificial Sequence
  Description of Artificial Sequence: Synthetic peptide
  Seed: EDATAGLTHLM
EPATAGLTHLM

SEQ ID NO: 36706 - protein, 11 aa, Artificial Sequence
  Description of Artificial Sequence: Synthetic peptide
  Seed: EDATAGLTHLM
EPATAGLTHLF

SEQ ID NO: 36707 - protein, 11 aa, Artificial Sequence
  Description of Artificial Sequence: Synthetic peptide
  Seed: EDATAGLTHLM
EPATAGLTHLY

SEQ ID NO: 36708 - protein, 11 aa, Artificial Sequence
  Description of Artificial Sequence: Synthetic peptide
  Seed: EDATAGLTHLM
EPATAGLTHLV

SEQ ID NO: 36709 - protein, 11 aa, Artificial Sequence
  Description of Artificial Sequence: Synthetic peptide
  Seed: EDATAGLTHLM
ESATAGLTHLA

SEQ ID NO: 36710 - protein, 11 aa, Artificial Sequence
  Description of Artificial Sequence: Synthetic peptide
  Seed: EDATAGLTHLM
EYATAGLTHLM

SEQ ID NO: 36711 - protein, 11 aa, Artificial Sequence
  Description of Artificial Sequence: Synthetic peptide
  Seed: EDATAGLTHLM
EYATAGLTHLF

SEQ ID NO: 36712 - protein, 11 aa, Artificial Sequence
  Description of Artificial Sequence: Synthetic peptide
  Seed: EDATAGLTHLM
EYATAGLTHLY

SEQ ID NO: 36713 - protein, 10 aa, Artificial Sequence
  Description of Artificial Sequence: Synthetic peptide
  Seed: EDLRLLSFIR
EFLRLLSFIK

SEQ ID NO: 36714 - protein, 10 aa, Artificial Sequence
  Description of Artificial Sequence: Synthetic peptide
  Seed: EDLRLLSFIR
ESLRLLSFIR

SEQ ID NO: 36715 - protein, 10 aa, Artificial Sequence
  Description of Artificial Sequence: Synthetic peptide
  Seed: EDLRLLSFIR
ETLRLLSFIR

SEQ ID NO: 36716 - protein, 10 aa, Artificial Sequence
  Description of Artificial Sequence: Synthetic peptide
  Seed: EDLRLLSFIR
EWLRLLSFIR

SEQ ID NO: 36717 - protein, 10 aa, Artificial Sequence
  Description of Artificial Sequence: Synthetic peptide
  Seed: EDLRLLSFIR
EYLRLLSFIR

SEQ ID NO: 36718 - protein, 10 aa, Artificial Sequence
  Description of Artificial Sequence: Synthetic peptide
  Seed: EDLRLLSFIR
EYLRLLSFIK

SEQ ID NO: 36719 - protein, 10 aa, Artificial Sequence
  Description of Artificial Sequence: Synthetic peptide
  Seed: EDLRLLSFIR
EVLRLLSFIR

SEQ ID NO: 36720 - protein, 10 aa, Artificial Sequence
  Description of Artificial Sequence: Synthetic peptide
  Seed: EDLRVSSFIR
EALRVSSFIR

SEQ ID NO: 36721 - protein, 10 aa, Artificial Sequence
  Description of Artificial Sequence: Synthetic peptide
  Seed: EDLRVSSFIR
ERLRVSSFIR

SEQ ID NO: 36722 - protein, 10 aa, Artificial Sequence
  Description of Artificial Sequence: Synthetic peptide
  Seed: EDLRVSSFIR
ENLRVSSFIR

SEQ ID NO: 36723 - protein, 10 aa, Artificial Sequence
  Description of Artificial Sequence: Synthetic peptide
  Seed: EDLRVSSFIR
ECLRVSSFIR

SEQ ID NO: 36724 - protein, 10 aa, Artificial Sequence
  Description of Artificial Sequence: Synthetic peptide
  Seed: EDLRVSSFIR
EQLRVSSFIR

SEQ ID NO: 36725 - protein, 10 aa, Artificial Sequence
  Description of Artificial Sequence: Synthetic peptide
  Seed: EDLRVSSFIR
EELRVSSFIR

SEQ ID NO: 36726 - protein, 10 aa, Artificial Sequence
  Description of Artificial Sequence: Synthetic peptide
  Seed: EDLRVSSFIR
EGLRVSSFIR

SEQ ID NO: 36727 - protein, 10 aa, Artificial Sequence
  Description of Artificial Sequence: Synthetic peptide
  Seed: EDLRVSSFIR
EHLRVSSFIR

SEQ ID NO: 36728 - protein, 10 aa, Artificial Sequence
  Description of Artificial Sequence: Synthetic peptide
  Seed: EDLRVSSFIR
EILRVSSFIR

SEQ ID NO: 36729 - protein, 10 aa, Artificial Sequence
  Description of Artificial Sequence: Synthetic peptide
  Seed: EDLRVSSFIR
ELLRVSSFIR

SEQ ID NO: 36730 - protein, 10 aa, Artificial Sequence
  Description of Artificial Sequence: Synthetic peptide
  Seed: EDLRVSSFIR
EKLRVSSFIR

SEQ ID NO: 36731 - protein, 10 aa, Artificial Sequence
  Description of Artificial Sequence: Synthetic peptide
  Seed: EDLRVSSFIR
EMLRVSSFIR

SEQ ID NO: 36732 - protein, 10 aa, Artificial Sequence
  Description of Artificial Sequence: Synthetic peptide
  Seed: EDLRVSSFIR
EFLRVSSFIR

SEQ ID NO: 36733 - protein, 10 aa, Artificial Sequence
  Description of Artificial Sequence: Synthetic peptide
  Seed: EDLRLLSFIR
EPLRLLSFIR

SEQ ID NO: 36734 - protein, 10 aa, Artificial Sequence
  Description of Artificial Sequence: Synthetic peptide
  Seed: EDLRLLSFIR
EFLRLLSFIR

SEQ ID NO: 36735 - protein, 11 aa, Artificial Sequence
  Description of Artificial Sequence: Synthetic peptide
  Seed: EDATAGLTHLM
EYATAGLTHLV

SEQ ID NO: 36736 - protein, 10 aa, Artificial Sequence
  Description of Artificial Sequence: Synthetic peptide
  Seed: EDLRLLSFIR
EMLRLLSFIR

SEQ ID NO: 36737 - protein, 11 aa, Artificial Sequence
  Description of Artificial Sequence: Synthetic peptide
  Seed: EDATAGLTHLM
EVATAGLTHLA

SEQ ID NO: 36738 - protein, 11 aa, Artificial Sequence
  Description of Artificial Sequence: Synthetic peptide
  Seed: EDATAGLTHLM
EVATAGLTHLI

SEQ ID NO: 36739 - protein, 11 aa, Artificial Sequence
  Description of Artificial Sequence: Synthetic peptide
  Seed: EDATAGLTHLM
EVATAGLTHLL

SEQ ID NO: 36740 - protein, 11 aa, Artificial Sequence
  Description of Artificial Sequence: Synthetic peptide
  Seed: EDATAGLTHLM
EVATAGLTHLM

SEQ ID NO: 36741 - protein, 11 aa, Artificial Sequence
  Description of Artificial Sequence: Synthetic peptide
  Seed: EDATAGLTHLM
EVATAGLTHLF

SEQ ID NO: 36742 - protein, 11 aa, Artificial Sequence
  Description of Artificial Sequence: Synthetic peptide
  Seed: EDATAGLTHLM
EVATAGLTHLT

SEQ ID NO: 36743 - protein, 11 aa, Artificial Sequence
  Description of Artificial Sequence: Synthetic peptide
  Seed: EDATAGLTHLM
EVATAGLTHLY

SEQ ID NO: 36744 - protein, 11 aa, Artificial Sequence
  Description of Artificial Sequence: Synthetic peptide
  Seed: EDATAGLTHLM
EVATAGLTHLV

SEQ ID NO: 36745 - protein, 10 aa, Artificial Sequence
  Description of Artificial Sequence: Synthetic peptide
  Seed: EDLRLLSFIR
EALRLLSFIR

SEQ ID NO: 36746 - protein, 10 aa, Artificial Sequence
  Description of Artificial Sequence: Synthetic peptide
  Seed: EDLRLLSFIR
ERLRLLSFIR

SEQ ID NO: 36747 - protein, 10 aa, Artificial Sequence
  Description of Artificial Sequence: Synthetic peptide
  Seed: EDLRLLSFIR
ENLRLLSFIR

SEQ ID NO: 36748 - protein, 10 aa, Artificial Sequence
  Description of Artificial Sequence: Synthetic peptide
  Seed: EDLRLLSFIR
ECLRLLSFIR

SEQ ID NO: 36749 - protein, 10 aa, Artificial Sequence
  Description of Artificial Sequence: Synthetic peptide
  Seed: EDLRLLSFIR
EQLRLLSFIR

SEQ ID NO: 36750 - protein, 10 aa, Artificial Sequence
  Description of Artificial Sequence: Synthetic peptide
  Seed: EDLRLLSFIR
EELRLLSFIR

SEQ ID NO: 36751 - protein, 10 aa, Artificial Sequence
  Description of Artificial Sequence: Synthetic peptide
  Seed: EDLRLLSFIR
EGLRLLSFIR

SEQ ID NO: 36752 - protein, 10 aa, Artificial Sequence
  Description of Artificial Sequence: Synthetic peptide
  Seed: EDLRLLSFIR
EHLRLLSFIR

SEQ ID NO: 36753 - protein, 10 aa, Artificial Sequence
  Description of Artificial Sequence: Synthetic peptide
  Seed: EDLRLLSFIR
EILRLLSFIR

SEQ ID NO: 36754 - protein, 10 aa, Artificial Sequence
  Description of Artificial Sequence: Synthetic peptide
  Seed: EDLRLLSFIR
ELLRLLSFIR

SEQ ID NO: 36755 - protein, 10 aa, Artificial Sequence
  Description of Artificial Sequence: Synthetic peptide
  Seed: EDLRLLSFIR
EKLRLLSFIR

SEQ ID NO: 36756 - protein, 9 aa, Artificial Sequence
  Description of Artificial Sequence: Synthetic peptide
  Seed: ILKGKFQTA
ILKGKFQTM

SEQ ID NO: 36757 - protein, 9 aa, Artificial Sequence
  Description of Artificial Sequence: Synthetic peptide
  Seed: ILKGKFQTA
ILKGKFQTT

SEQ ID NO: 36758 - protein, 10 aa, Artificial Sequence
  Description of Artificial Sequence: Synthetic peptide
  Seed: QISVQPTFSV
QQSVQPTFSI

SEQ ID NO: 36759 - protein, 9 aa, Artificial Sequence
  Description of Artificial Sequence: Synthetic peptide
  Seed: LSDYEGRLI
LGDYEGRLF

SEQ ID NO: 36760 - protein, 9 aa, Artificial Sequence
  Description of Artificial Sequence: Synthetic peptide
  Seed: LSDYEGRLI
LADYEGRLM

SEQ ID NO: 36761 - protein, 9 aa, Artificial Sequence
  Description of Artificial Sequence: Synthetic peptide
  Seed: LSDYEGRLI
LADYEGRLF

SEQ ID NO: 36762 - protein, 9 aa, Artificial Sequence
  Description of Artificial Sequence: Synthetic peptide
  Seed: LSDYEGRLI
LADYEGRLV

SEQ ID NO: 36763 - protein, 9 aa, Artificial Sequence
  Description of Artificial Sequence: Synthetic peptide
  Seed: LSDYEGRLI
LCDYEGRLL

SEQ ID NO: 36764 - protein, 9 aa, Artificial Sequence
  Description of Artificial Sequence: Synthetic peptide
  Seed: LSDYEGRLI
LQDYEGRLL

SEQ ID NO: 36765 - protein, 9 aa, Artificial Sequence
  Description of Artificial Sequence: Synthetic peptide
  Seed: LSDYEGRLI
LQDYEGRLM

SEQ ID NO: 36766 - protein, 9 aa, Artificial Sequence
  Description of Artificial Sequence: Synthetic peptide
  Seed: LSDYEGRLI
LQDYEGRLF

SEQ ID NO: 36767 - protein, 9 aa, Artificial Sequence
  Description of Artificial Sequence: Synthetic peptide
  Seed: LSDYEGRLI
LGDYEGRLL

SEQ ID NO: 36768 - protein, 9 aa, Artificial Sequence
  Description of Artificial Sequence: Synthetic peptide
  Seed: LSDYEGRLI
LGDYEGRLM

SEQ ID NO: 36769 - protein, 9 aa, Artificial Sequence
  Description of Artificial Sequence: Synthetic peptide
  Seed: LSDYEGRLI
LIDYEGRLI

SEQ ID NO: 36770 - protein, 9 aa, Artificial Sequence
  Description of Artificial Sequence: Synthetic peptide
  Seed: LSDYEGRLI
LMDYEGRLL

SEQ ID NO: 36771 - protein, 9 aa, Artificial Sequence
  Description of Artificial Sequence: Synthetic peptide
  Seed: LSDYEGRLI
LIDYEGRLL

SEQ ID NO: 36772 - protein, 9 aa, Artificial Sequence
  Description of Artificial Sequence: Synthetic peptide
  Seed: LSDYEGRLI
LIDYEGRLM

SEQ ID NO: 36773 - protein, 9 aa, Artificial Sequence
  Description of Artificial Sequence: Synthetic peptide
  Seed: LSDYEGRLI
LIDYEGRLF

SEQ ID NO: 36774 - protein, 9 aa, Artificial Sequence
  Description of Artificial Sequence: Synthetic peptide
  Seed: LSDYEGRLI
LIDYEGRLV

SEQ ID NO: 36775 - protein, 9 aa, Artificial Sequence
  Description of Artificial Sequence: Synthetic peptide
  Seed: LSDYEGRLI
LLDYEGRLI

SEQ ID NO: 36776 - protein, 9 aa, Artificial Sequence
  Description of Artificial Sequence: Synthetic peptide
  Seed: LSDYEGRLI
LLDYEGRLL

SEQ ID NO: 36777 - protein, 9 aa, Artificial Sequence
  Description of Artificial Sequence: Synthetic peptide
  Seed: LSDYEGRLI
LLDYEGRLM

SEQ ID NO: 36778 - protein, 9 aa, Artificial Sequence
  Description of Artificial Sequence: Synthetic peptide
  Seed: LSDYEGRLI
LLDYEGRLF

SEQ ID NO: 36779 - protein, 9 aa, Artificial Sequence
  Description of Artificial Sequence: Synthetic peptide
  Seed: LSDYEGRLI
LLDYEGRLV

SEQ ID NO: 36780 - protein, 9 aa, Artificial Sequence
  Description of Artificial Sequence: Synthetic peptide
  Seed: LSDYEGRLI
LADYEGRLL

SEQ ID NO: 36781 - protein, 9 aa, Artificial Sequence
  Description of Artificial Sequence: Synthetic peptide
  Seed: LSDYEGRLI
LADYEGRLI

SEQ ID NO: 36782 - protein, 8 aa, Artificial Sequence
  Description of Artificial Sequence: Synthetic peptide
  Seed: LSDYEGRL
LADYEGRL

SEQ ID NO: 36783 - protein, 10 aa, Artificial Sequence
  Description of Artificial Sequence: Synthetic peptide
  Seed: LSDEKATNPI
LVDEKATNPF

SEQ ID NO: 36784 - protein, 10 aa, Artificial Sequence
  Description of Artificial Sequence: Synthetic peptide
  Seed: LSAFDERRNR
LVAFDERRNK

SEQ ID NO: 36785 - protein, 10 aa, Artificial Sequence
  Description of Artificial Sequence: Synthetic peptide
  Seed: LSDEKATNPI
LADEKATNPI

SEQ ID NO: 36786 - protein, 10 aa, Artificial Sequence
  Description of Artificial Sequence: Synthetic peptide
  Seed: LSDEKATNPI
LADEKATNPL

SEQ ID NO: 36787 - protein, 10 aa, Artificial Sequence
  Description of Artificial Sequence: Synthetic peptide
  Seed: LSDEKATNPI
LADEKATNPM

SEQ ID NO: 36788 - protein, 10 aa, Artificial Sequence
  Description of Artificial Sequence: Synthetic peptide
  Seed: LSDEKATNPI
LADEKATNPF

SEQ ID NO: 36789 - protein, 10 aa, Artificial Sequence
  Description of Artificial Sequence: Synthetic peptide
  Seed: LSDEKATNPI
LADEKATNPV

SEQ ID NO: 36790 - protein, 10 aa, Artificial Sequence
  Description of Artificial Sequence: Synthetic peptide
  Seed: LSDEKATNPI
LIDEKATNPL

SEQ ID NO: 36791 - protein, 10 aa, Artificial Sequence
  Description of Artificial Sequence: Synthetic peptide
  Seed: LSDEKATNPI
LLDEKATNPL

SEQ ID NO: 36792 - protein, 10 aa, Artificial Sequence
  Description of Artificial Sequence: Synthetic peptide
  Seed: LSDEKATNPI
LLDEKATNPF

SEQ ID NO: 36793 - protein, 10 aa, Artificial Sequence
  Description of Artificial Sequence: Synthetic peptide
  Seed: LSDEKATNPI
LMDEKATNPL

SEQ ID NO: 36794 - protein, 10 aa, Artificial Sequence
  Description of Artificial Sequence: Synthetic peptide
  Seed: LSDEKATNPI
LMDEKATNPF

SEQ ID NO: 36795 - protein, 10 aa, Artificial Sequence
  Description of Artificial Sequence: Synthetic peptide
  Seed: LSDEKATNPI
LSDEKATNPL

SEQ ID NO: 36796 - protein, 10 aa, Artificial Sequence
  Description of Artificial Sequence: Synthetic peptide
  Seed: LSDEKATNPI
LSDEKATNPM

SEQ ID NO: 36797 - protein, 10 aa, Artificial Sequence
  Description of Artificial Sequence: Synthetic peptide
  Seed: LSDEKATNPI
LSDEKATNPF

SEQ ID NO: 36798 - protein, 10 aa, Artificial Sequence
  Description of Artificial Sequence: Synthetic peptide
  Seed: LSDEKATNPI
LTDEKATNPL

SEQ ID NO: 36799 - protein, 10 aa, Artificial Sequence
  Description of Artificial Sequence: Synthetic peptide
  Seed: LSDEKATNPI
LTDEKATNPM

SEQ ID NO: 36800 - protein, 10 aa, Artificial Sequence
  Description of Artificial Sequence: Synthetic peptide
  Seed: LSDEKATNPI
LTDEKATNPF

SEQ ID NO: 36801 - protein, 10 aa, Artificial Sequence
  Description of Artificial Sequence: Synthetic peptide
  Seed: LSDEKATNPI
LVDEKATNPL

SEQ ID NO: 36802 - protein, 10 aa, Artificial Sequence
  Description of Artificial Sequence: Synthetic peptide
  Seed: LSDEKATNPI
LVDEKATNPM

SEQ ID NO: 36803 - protein, 9 aa, Artificial Sequence
  Description of Artificial Sequence: Synthetic peptide
  Seed: LSDYEGRLI
LMDYEGRLI

SEQ ID NO: 36804 - protein, 9 aa, Artificial Sequence
  Description of Artificial Sequence: Synthetic peptide
  Seed: LSDYEGRLI
LMDYEGRLM

SEQ ID NO: 36805 - protein, 10 aa, Artificial Sequence
  Description of Artificial Sequence: Synthetic peptide
  Seed: LSAFDERRNR
LYAFDERRNR

SEQ ID NO: 36806 - protein, 9 aa, Artificial Sequence
  Description of Artificial Sequence: Synthetic peptide
  Seed: LSFIRGTKV
LGFIRGTKF

SEQ ID NO: 36807 - protein, 9 aa, Artificial Sequence
  Description of Artificial Sequence: Synthetic peptide
  Seed: LSFIRGTKV
LAFIRGTKV

SEQ ID NO: 36808 - protein, 9 aa, Artificial Sequence
  Description of Artificial Sequence: Synthetic peptide
  Seed: LSFIRGTKV
LNFIRGTKW

SEQ ID NO: 36809 - protein, 9 aa, Artificial Sequence
  Description of Artificial Sequence: Synthetic peptide
  Seed: LSFIRGTKV
LCFIRGTKF

SEQ ID NO: 36810 - protein, 9 aa, Artificial Sequence
  Description of Artificial Sequence: Synthetic peptide
  Seed: LSFIRGTKV
LCFIRGTKW

SEQ ID NO: 36811 - protein, 9 aa, Artificial Sequence
  Description of Artificial Sequence: Synthetic peptide
  Seed: LSFIRGTKV
LQFIRGTKK

SEQ ID NO: 36812 - protein, 9 aa, Artificial Sequence
  Description of Artificial Sequence: Synthetic peptide
  Seed: LSFIRGTKV
LQFIRGTKW

SEQ ID NO: 36813 - protein, 9 aa, Artificial Sequence
  Description of Artificial Sequence: Synthetic peptide
  Seed: LSFIRGTKV
LGFIRGTKL

SEQ ID NO: 36814 - protein, 9 aa, Artificial Sequence
  Description of Artificial Sequence: Synthetic peptide
  Seed: LSFIRGTKV
LGFIRGTKK

SEQ ID NO: 36815 - protein, 9 aa, Artificial Sequence
  Description of Artificial Sequence: Synthetic peptide
  Seed: LSFIRGTKV
LGFIRGTKM

SEQ ID NO: 36816 - protein, 9 aa, Artificial Sequence
  Description of Artificial Sequence: Synthetic peptide
  Seed: LSFIRGTKV
LGFIRGTKW

SEQ ID NO: 36817 - protein, 9 aa, Artificial Sequence
  Description of Artificial Sequence: Synthetic peptide
  Seed: LSDYEGRLI
LMDYEGRLF

SEQ ID NO: 36818 - protein, 9 aa, Artificial Sequence
  Description of Artificial Sequence: Synthetic peptide
  Seed: LSFIRGTKV
LGFIRGTKY

SEQ ID NO: 36819 - protein, 9 aa, Artificial Sequence
  Description of Artificial Sequence: Synthetic peptide
  Seed: LSFIRGTKV
LIFIRGTKK

SEQ ID NO: 36820 - protein, 9 aa, Artificial Sequence
  Description of Artificial Sequence: Synthetic peptide
  Seed: LSFIRGTKV
LIFIRGTKM

SEQ ID NO: 36821 - protein, 9 aa, Artificial Sequence
  Description of Artificial Sequence: Synthetic peptide
  Seed: LSFIRGTKV
LIFIRGTKF

SEQ ID NO: 36822 - protein, 9 aa, Artificial Sequence
  Description of Artificial Sequence: Synthetic peptide
  Seed: LSFIRGTKV
LIFIRGTKW

SEQ ID NO: 36823 - protein, 9 aa, Artificial Sequence
  Description of Artificial Sequence: Synthetic peptide
  Seed: LSFIRGTKV
LIFIRGTKY

SEQ ID NO: 36824 - protein, 9 aa, Artificial Sequence
  Description of Artificial Sequence: Synthetic peptide
  Seed: LSFIRGTKV
LLFIRGTKK

SEQ ID NO: 36825 - protein, 9 aa, Artificial Sequence
  Description of Artificial Sequence: Synthetic peptide
  Seed: LSFIRGTKV
LLFIRGTKF

SEQ ID NO: 36826 - protein, 9 aa, Artificial Sequence
  Description of Artificial Sequence: Synthetic peptide
  Seed: LSFIRGTKV
LLFIRGTKW

SEQ ID NO: 36827 - protein, 9 aa, Artificial Sequence
  Description of Artificial Sequence: Synthetic peptide
  Seed: LSFIRGTKV
LAFIRGTKY

SEQ ID NO: 36828 - protein, 9 aa, Artificial Sequence
  Description of Artificial Sequence: Synthetic peptide
  Seed: LSFIRGTKV
LAFIRGTKW

SEQ ID NO: 36829 - protein, 9 aa, Artificial Sequence
  Description of Artificial Sequence: Synthetic peptide
  Seed: LSFIRGTKV
LAFIRGTKF

SEQ ID NO: 36830 - protein, 9 aa, Artificial Sequence
  Description of Artificial Sequence: Synthetic peptide
  Seed: LSFIRGTKV
LAFIRGTKM

SEQ ID NO: 36831 - protein, 9 aa, Artificial Sequence
  Description of Artificial Sequence: Synthetic peptide
  Seed: LSDYEGRLI
LMDYEGRLV

SEQ ID NO: 36832 - protein, 9 aa, Artificial Sequence
  Description of Artificial Sequence: Synthetic peptide
  Seed: LSDYEGRLI
LSDYEGRLL

SEQ ID NO: 36833 - protein, 9 aa, Artificial Sequence
  Description of Artificial Sequence: Synthetic peptide
  Seed: LSDYEGRLI
LSDYEGRLM

SEQ ID NO: 36834 - protein, 9 aa, Artificial Sequence
  Description of Artificial Sequence: Synthetic peptide
  Seed: LSDYEGRLI
LSDYEGRLF

SEQ ID NO: 36835 - protein, 9 aa, Artificial Sequence
  Description of Artificial Sequence: Synthetic peptide
  Seed: LSDYEGRLI
LSDYEGRLV

SEQ ID NO: 36836 - protein, 9 aa, Artificial Sequence
  Description of Artificial Sequence: Synthetic peptide
  Seed: LSDYEGRLI
LTDYEGRLI

SEQ ID NO: 36837 - protein, 9 aa, Artificial Sequence
  Description of Artificial Sequence: Synthetic peptide
  Seed: LSDYEGRLI
LTDYEGRLL

SEQ ID NO: 36838 - protein, 9 aa, Artificial Sequence
  Description of Artificial Sequence: Synthetic peptide
  Seed: LSDYEGRLI
LTDYEGRLM

SEQ ID NO: 36839 - protein, 9 aa, Artificial Sequence
  Description of Artificial Sequence: Synthetic peptide
  Seed: LSDYEGRLI
LTDYEGRLF

SEQ ID NO: 36840 - protein, 9 aa, Artificial Sequence
  Description of Artificial Sequence: Synthetic peptide
  Seed: LSDYEGRLI
LTDYEGRLV

SEQ ID NO: 36841 - protein, 9 aa, Artificial Sequence
  Description of Artificial Sequence: Synthetic peptide
  Seed: LSDYEGRLI
LVDYEGRLI

SEQ ID NO: 36842 - protein, 9 aa, Artificial Sequence
  Description of Artificial Sequence: Synthetic peptide
  Seed: LSDYEGRLI
LVDYEGRLL

SEQ ID NO: 36843 - protein, 9 aa, Artificial Sequence
  Description of Artificial Sequence: Synthetic peptide
  Seed: LSDYEGRLI
LVDYEGRLM

SEQ ID NO: 36844 - protein, 9 aa, Artificial Sequence
  Description of Artificial Sequence: Synthetic peptide
  Seed: LSDYEGRLI
LVDYEGRLF

SEQ ID NO: 36845 - protein, 9 aa, Artificial Sequence
  Description of Artificial Sequence: Synthetic peptide
  Seed: LSDYEGRLI
LVDYEGRLV

SEQ ID NO: 36846 - protein, 9 aa, Artificial Sequence
  Description of Artificial Sequence: Synthetic peptide
  Seed: LSFIRGTKV
LAFIRGTKA

SEQ ID NO: 36847 - protein, 9 aa, Artificial Sequence
  Description of Artificial Sequence: Synthetic peptide
  Seed: LSFIRGTKV
LAFIRGTKI

SEQ ID NO: 36848 - protein, 9 aa, Artificial Sequence
  Description of Artificial Sequence: Synthetic peptide
  Seed: LSFIRGTKV
LAFIRGTKL

SEQ ID NO: 36849 - protein, 9 aa, Artificial Sequence
  Description of Artificial Sequence: Synthetic peptide
  Seed: LSFIRGTKV
LAFIRGTKK

SEQ ID NO: 36850 - protein, 10 aa, Artificial Sequence
  Description of Artificial Sequence: Synthetic peptide
  Seed: LSAFDERRNR
LVAFDERRNR

SEQ ID NO: 36851 - protein, 10 aa, Artificial Sequence
  Description of Artificial Sequence: Synthetic peptide
  Seed: LSAFDERRNR
LWAFDERRNR

SEQ ID NO: 36852 - protein, 9 aa, Artificial Sequence
  Description of Artificial Sequence: Synthetic peptide
  Seed: LVRTGMDPR
LMRTGMDPK

SEQ ID NO: 36853 - protein, 11 aa, Artificial Sequence
  Description of Artificial Sequence: Synthetic peptide
  Seed: LRSRYWAIRTR
LNSRYWAIRTK

SEQ ID NO: 36854 - protein, 11 aa, Artificial Sequence
  Description of Artificial Sequence: Synthetic peptide
  Seed: LRSRYWAIRTR
LASRYWAIRTK

SEQ ID NO: 36855 - protein, 11 aa, Artificial Sequence
  Description of Artificial Sequence: Synthetic peptide
  Seed: LRSRYWAIRTR
LRSRYWAIRTA

SEQ ID NO: 36856 - protein, 11 aa, Artificial Sequence
  Description of Artificial Sequence: Synthetic peptide
  Seed: LRSRYWAIRTR
LRSRYWAIRTL

SEQ ID NO: 36857 - protein, 11 aa, Artificial Sequence
  Description of Artificial Sequence: Synthetic peptide
  Seed: LRSRYWAIRTR
LRSRYWAIRTM

SEQ ID NO: 36858 - protein, 11 aa, Artificial Sequence
  Description of Artificial Sequence: Synthetic peptide
  Seed: LRSRYWAIRTR
LRSRYWAIRTF

SEQ ID NO: 36859 - protein, 11 aa, Artificial Sequence
  Description of Artificial Sequence: Synthetic peptide
  Seed: LRSRYWAIRTR
LRSRYWAIRTY

SEQ ID NO: 36860 - protein, 11 aa, Artificial Sequence
  Description of Artificial Sequence: Synthetic peptide
  Seed: LRSRYWAIRTR
LRSRYWAIRTV

SEQ ID NO: 36861 - protein, 11 aa, Artificial Sequence
  Description of Artificial Sequence: Synthetic peptide
  Seed: LRSRYWAIRTR
LNSRYWAIRTR

SEQ ID NO: 36862 - protein, 11 aa, Artificial Sequence
  Description of Artificial Sequence: Synthetic peptide
  Seed: LRSRYWAIRTR
LDSRYWAIRTR

SEQ ID NO: 36863 - protein, 11 aa, Artificial Sequence
  Description of Artificial Sequence: Synthetic peptide
  Seed: LRSRYWAIRTR
LHSRYWAIRTK

SEQ ID NO: 36864 - protein, 11 aa, Artificial Sequence
  Description of Artificial Sequence: Synthetic peptide
  Seed: LRSRYWAIRTR
LDSRYWAIRTK

SEQ ID NO: 36865 - protein, 11 aa, Artificial Sequence
  Description of Artificial Sequence: Synthetic peptide
  Seed: LRSRYWAIRTR
LCSRYWAIRTR

SEQ ID NO: 36866 - protein, 11 aa, Artificial Sequence
  Description of Artificial Sequence: Synthetic peptide
  Seed: LRSRYWAIRTR
LCSRYWAIRTK

SEQ ID NO: 36867 - protein, 11 aa, Artificial Sequence
  Description of Artificial Sequence: Synthetic peptide
  Seed: LRSRYWAIRTR
LQSRYWAIRTR

SEQ ID NO: 36868 - protein, 11 aa, Artificial Sequence
  Description of Artificial Sequence: Synthetic peptide
  Seed: LRSRYWAIRTR
LQSRYWAIRTK

SEQ ID NO: 36869 - protein, 11 aa, Artificial Sequence
  Description of Artificial Sequence: Synthetic peptide
  Seed: LRSRYWAIRTR
LESRYWAIRTR

SEQ ID NO: 36870 - protein, 11 aa, Artificial Sequence
  Description of Artificial Sequence: Synthetic peptide
  Seed: LRSRYWAIRTR
LESRYWAIRTK

SEQ ID NO: 36871 - protein, 11 aa, Artificial Sequence
  Description of Artificial Sequence: Synthetic peptide
  Seed: LRSRYWAIRTR
LGSRYWAIRTR

SEQ ID NO: 36872 - protein, 11 aa, Artificial Sequence
  Description of Artificial Sequence: Synthetic peptide
  Seed: LRSRYWAIRTR
LGSRYWAIRTK

SEQ ID NO: 36873 - protein, 11 aa, Artificial Sequence
  Description of Artificial Sequence: Synthetic peptide
  Seed: LRSRYWAIRTR
LASRYWAIRTR

SEQ ID NO: 36874 - protein, 9 aa, Artificial Sequence
  Description of Artificial Sequence: Synthetic peptide
  Seed: LRSRYWAIR
LRSRYWAIV

SEQ ID NO: 36875 - protein, 9 aa, Artificial Sequence
  Description of Artificial Sequence: Synthetic peptide
  Seed: LRSRYWAIR
LRSRYWAIY

SEQ ID NO: 36876 - protein, 9 aa, Artificial Sequence
  Description of Artificial Sequence: Synthetic peptide
  Seed: LRSRYWAIR
LRSRYWAIW

SEQ ID NO: 36877 - protein, 8 aa, Artificial Sequence
  Description of Artificial Sequence: Synthetic peptide
  Seed: LRSRYWAI
LPSRYWAM

SEQ ID NO: 36878 - protein, 8 aa, Artificial Sequence
  Description of Artificial Sequence: Synthetic peptide
  Seed: LRSRYWAI
LPSRYWAF

SEQ ID NO: 36879 - protein, 8 aa, Artificial Sequence
  Description of Artificial Sequence: Synthetic peptide
  Seed: LRSRYWAI
LPSRYWAV

SEQ ID NO: 36880 - protein, 8 aa, Artificial Sequence
  Description of Artificial Sequence: Synthetic peptide
  Seed: LRSRYWAI
LSSRYWAL

SEQ ID NO: 36881 - protein, 8 aa, Artificial Sequence
  Description of Artificial Sequence: Synthetic peptide
  Seed: LRSRYWAI
LSSRYWAM

SEQ ID NO: 36882 - protein, 8 aa, Artificial Sequence
  Description of Artificial Sequence: Synthetic peptide
  Seed: LRSRYWAI
LTSRYWAL

SEQ ID NO: 36883 - protein, 8 aa, Artificial Sequence
  Description of Artificial Sequence: Synthetic peptide
  Seed: LRSRYWAI
LWSRYWAL

SEQ ID NO: 36884 - protein, 8 aa, Artificial Sequence
  Description of Artificial Sequence: Synthetic peptide
  Seed: LRSRYWAI
LWSRYWAM

SEQ ID NO: 36885 - protein, 8 aa, Artificial Sequence
  Description of Artificial Sequence: Synthetic peptide
  Seed: LRSRYWAI
LYSRYWAI

SEQ ID NO: 36886 - protein, 8 aa, Artificial Sequence
  Description of Artificial Sequence: Synthetic peptide
  Seed: LRSRYWAI
LYSRYWAL

SEQ ID NO: 36887 - protein, 8 aa, Artificial Sequence
  Description of Artificial Sequence: Synthetic peptide
  Seed: LRSRYWAI
LYSRYWAM

SEQ ID NO: 36888 - protein, 8 aa, Artificial Sequence
  Description of Artificial Sequence: Synthetic peptide
  Seed: LRSRYWAI
LVSRYWAL

SEQ ID NO: 36889 - protein, 8 aa, Artificial Sequence
  Description of Artificial Sequence: Synthetic peptide
  Seed: LRSRYWAI
LVSRYWAM

SEQ ID NO: 36890 - protein, 9 aa, Artificial Sequence
  Description of Artificial Sequence: Synthetic peptide
  Seed: LRSRYWAIR
LRSRYWAIH

SEQ ID NO: 36891 - protein, 9 aa, Artificial Sequence
  Description of Artificial Sequence: Synthetic peptide
  Seed: LRSRYWAIR
LRSRYWAII

SEQ ID NO: 36892 - protein, 9 aa, Artificial Sequence
  Description of Artificial Sequence: Synthetic peptide
  Seed: LRSRYWAIR
LRSRYWAIL

SEQ ID NO: 36893 - protein, 9 aa, Artificial Sequence
  Description of Artificial Sequence: Synthetic peptide
  Seed: LRSRYWAIR
LRSRYWAIM

SEQ ID NO: 36894 - protein, 9 aa, Artificial Sequence
  Description of Artificial Sequence: Synthetic peptide
  Seed: LRSRYWAIR
LRSRYWAIF

SEQ ID NO: 36895 - protein, 11 aa, Artificial Sequence
  Description of Artificial Sequence: Synthetic peptide
  Seed: LRSRYWAIRTR
LHSRYWAIRTR

SEQ ID NO: 36896 - protein, 11 aa, Artificial Sequence
  Description of Artificial Sequence: Synthetic peptide
  Seed: LRSRYWAIRTR
LISRYWAIRTR

SEQ ID NO: 36897 - protein, 10 aa, Artificial Sequence
  Description of Artificial Sequence: Synthetic peptide
  Seed: LSAFDERRNR
LTAFDERRNK

SEQ ID NO: 36898 - protein, 11 aa, Artificial Sequence
  Description of Artificial Sequence: Synthetic peptide
  Seed: LRVSSFIRGTR
LMVSSFIRGTK

SEQ ID NO: 36899 - protein, 11 aa, Artificial Sequence
  Description of Artificial Sequence: Synthetic peptide
  Seed: LRVSSFIRGTK
LIVSSFIRGTK

SEQ ID NO: 36900 - protein, 11 aa, Artificial Sequence
  Description of Artificial Sequence: Synthetic peptide
  Seed: LRVSSFIRGTK
LLVSSFIRGTK

SEQ ID NO: 36901 - protein, 11 aa, Artificial Sequence
  Description of Artificial Sequence: Synthetic peptide
  Seed: LRVSSFIRGTK
LVVSSFIRGTK

SEQ ID NO: 36902 - protein, 11 aa, Artificial Sequence
  Description of Artificial Sequence: Synthetic peptide
  Seed: LRVSSFIRGTR
LRVSSFIRGTL

SEQ ID NO: 36903 - protein, 11 aa, Artificial Sequence
  Description of Artificial Sequence: Synthetic peptide
  Seed: LRVSSFIRGTR
LRVSSFIRGTF

SEQ ID NO: 36904 - protein, 11 aa, Artificial Sequence
  Description of Artificial Sequence: Synthetic peptide
  Seed: LRSRYWAIRTR
LISRYWAIRTK

SEQ ID NO: 36905 - protein, 10 aa, Artificial Sequence
  Description of Artificial Sequence: Synthetic peptide
  Seed: LSAFDERRNR
LAAFDERRNR

SEQ ID NO: 36906 - protein, 10 aa, Artificial Sequence
  Description of Artificial Sequence: Synthetic peptide
  Seed: LSAFDERRNR
LQAFDERRNR

SEQ ID NO: 36907 - protein, 10 aa, Artificial Sequence
  Description of Artificial Sequence: Synthetic peptide
  Seed: LSAFDERRNR
LIAFDERRNR

SEQ ID NO: 36908 - protein, 10 aa, Artificial Sequence
  Description of Artificial Sequence: Synthetic peptide
  Seed: LSAFDERRNR
LLAFDERRNR

SEQ ID NO: 36909 - protein, 10 aa, Artificial Sequence
  Description of Artificial Sequence: Synthetic peptide
  Seed: LSAFDERRNR
LMAFDERRNR

SEQ ID NO: 36910 - protein, 10 aa, Artificial Sequence
  Description of Artificial Sequence: Synthetic peptide
  Seed: LSAFDERRNR
LMAFDERRNK

SEQ ID NO: 36911 - protein, 10 aa, Artificial Sequence
  Description of Artificial Sequence: Synthetic peptide
  Seed: LSAFDERRNR
LFAFDERRNR

SEQ ID NO: 36912 - protein, 10 aa, Artificial Sequence
  Description of Artificial Sequence: Synthetic peptide
  Seed: LSAFDERRNR
LFAFDERRNK

SEQ ID NO: 36913 - protein, 10 aa, Artificial Sequence
  Description of Artificial Sequence: Synthetic peptide
  Seed: LSAFDERRNR
LTAFDERRNR

SEQ ID NO: 36914 - protein, 11 aa, Artificial Sequence
  Description of Artificial Sequence: Synthetic peptide
  Seed: LRSRYWAIRTR
LVSRYWAIRTK

SEQ ID NO: 36915 - protein, 11 aa, Artificial Sequence
  Description of Artificial Sequence: Synthetic peptide
  Seed: LRSRYWAIRTR
LLSRYWAIRTR

SEQ ID NO: 36916 - protein, 11 aa, Artificial Sequence
  Description of Artificial Sequence: Synthetic peptide
  Seed: LRSRYWAIRTR
LLSRYWAIRTK

SEQ ID NO: 36917 - protein, 11 aa, Artificial Sequence
  Description of Artificial Sequence: Synthetic peptide
  Seed: LRSRYWAIRTR
LKSRYWAIRTR

SEQ ID NO: 36918 - protein, 11 aa, Artificial Sequence
  Description of Artificial Sequence: Synthetic peptide
  Seed: LRSRYWAIRTR
LKSRYWAIRTK

SEQ ID NO: 36919 - protein, 11 aa, Artificial Sequence
  Description of Artificial Sequence: Synthetic peptide
  Seed: LRSRYWAIRTR
LMSRYWAIRTR

SEQ ID NO: 36920 - protein, 11 aa, Artificial Sequence
  Description of Artificial Sequence: Synthetic peptide
  Seed: LRSRYWAIRTR
LMSRYWAIRTK

SEQ ID NO: 36921 - protein, 11 aa, Artificial Sequence
  Description of Artificial Sequence: Synthetic peptide
  Seed: LRSRYWAIRTR
LFSRYWAIRTR

SEQ ID NO: 36922 - protein, 11 aa, Artificial Sequence
  Description of Artificial Sequence: Synthetic peptide
  Seed: LRSRYWAIRTR
LFSRYWAIRTK

SEQ ID NO: 36923 - protein, 11 aa, Artificial Sequence
  Description of Artificial Sequence: Synthetic peptide
  Seed: LRSRYWAIRTR
LPSRYWAIRTR

SEQ ID NO: 36924 - protein, 11 aa, Artificial Sequence
  Description of Artificial Sequence: Synthetic peptide
  Seed: LRSRYWAIRTR
LPSRYWAIRTK

SEQ ID NO: 36925 - protein, 11 aa, Artificial Sequence
  Description of Artificial Sequence: Synthetic peptide
  Seed: LRSRYWAIRTR
LSSRYWAIRTR

SEQ ID NO: 36926 - protein, 11 aa, Artificial Sequence
  Description of Artificial Sequence: Synthetic peptide
  Seed: LRSRYWAIRTR
LSSRYWAIRTK

SEQ ID NO: 36927 - protein, 11 aa, Artificial Sequence
  Description of Artificial Sequence: Synthetic peptide
  Seed: LRSRYWAIRTR
LTSRYWAIRTR

SEQ ID NO: 36928 - protein, 11 aa, Artificial Sequence
  Description of Artificial Sequence: Synthetic peptide
  Seed: LRSRYWAIRTR
LTSRYWAIRTK

SEQ ID NO: 36929 - protein, 11 aa, Artificial Sequence
  Description of Artificial Sequence: Synthetic peptide
  Seed: LRSRYWAIRTR
LWSRYWAIRTR

SEQ ID NO: 36930 - protein, 11 aa, Artificial Sequence
  Description of Artificial Sequence: Synthetic peptide
  Seed: LRSRYWAIRTR
LWSRYWAIRTK

SEQ ID NO: 36931 - protein, 11 aa, Artificial Sequence
  Description of Artificial Sequence: Synthetic peptide
  Seed: LRSRYWAIRTR
LYSRYWAIRTR

SEQ ID NO: 36932 - protein, 11 aa, Artificial Sequence
  Description of Artificial Sequence: Synthetic peptide
  Seed: LRSRYWAIRTR
LYSRYWAIRTK

SEQ ID NO: 36933 - protein, 11 aa, Artificial Sequence
  Description of Artificial Sequence: Synthetic peptide
  Seed: LRSRYWAIRTR
LVSRYWAIRTR

SEQ ID NO: 36934 - protein, 9 aa, Artificial Sequence
  Description of Artificial Sequence: Synthetic peptide
  Seed: LSFIRGTKV
LLFIRGTKY

SEQ ID NO: 36935 - protein, 9 aa, Artificial Sequence
  Description of Artificial Sequence: Synthetic peptide
  Seed: LSFIRGTKV
LMFIRGTKL

SEQ ID NO: 36936 - protein, 9 aa, Artificial Sequence
  Description of Artificial Sequence: Synthetic peptide
  Seed: LSFIRGTKV
LMFIRGTKK

SEQ ID NO: 36937 - protein, 11 aa, Artificial Sequence
  Description of Artificial Sequence: Synthetic peptide
  Seed: LTIERMVLSAF
LSIERMVLSAL

SEQ ID NO: 36938 - protein, 11 aa, Artificial Sequence
  Description of Artificial Sequence: Synthetic peptide
  Seed: LTIERMVLSAF
LKIERMVLSAY

SEQ ID NO: 36939 - protein, 11 aa, Artificial Sequence
  Description of Artificial Sequence: Synthetic peptide
  Seed: LTIERMVLSAF
LMIERMVLSAL

SEQ ID NO: 36940 - protein, 11 aa, Artificial Sequence
  Description of Artificial Sequence: Synthetic peptide
  Seed: LTIERMVLSAF
LMIERMVLSAM

SEQ ID NO: 36941 - protein, 11 aa, Artificial Sequence
  Description of Artificial Sequence: Synthetic peptide
  Seed: LTIERMVLSAF
LMIERMVLSAF

SEQ ID NO: 36942 - protein, 11 aa, Artificial Sequence
  Description of Artificial Sequence: Synthetic peptide
  Seed: LTIERMVLSAF
LMIERMVLSAW

SEQ ID NO: 36943 - protein, 11 aa, Artificial Sequence
  Description of Artificial Sequence: Synthetic peptide
  Seed: LTIERMVLSAF
LMIERMVLSAY

SEQ ID NO: 36944 - protein, 11 aa, Artificial Sequence
  Description of Artificial Sequence: Synthetic peptide
  Seed: LTIERMVLSAF
LFIERMVLSAF

SEQ ID NO: 36945 - protein, 11 aa, Artificial Sequence
  Description of Artificial Sequence: Synthetic peptide
  Seed: LTIERMVLSAF
LPIERMVLSAF

SEQ ID NO: 36946 - protein, 11 aa, Artificial Sequence
  Description of Artificial Sequence: Synthetic peptide
  Seed: LTIERMVLSAF
LSIERMVLSAI

SEQ ID NO: 36947 - protein, 11 aa, Artificial Sequence
  Description of Artificial Sequence: Synthetic peptide
  Seed: LTIERMVLSAF
LSIERMVLSAM

SEQ ID NO: 36948 - protein, 11 aa, Artificial Sequence
  Description of Artificial Sequence: Synthetic peptide
  Seed: LTIERMVLSAF
LVIERMVLSAF

SEQ ID NO: 36949 - protein, 11 aa, Artificial Sequence
  Description of Artificial Sequence: Synthetic peptide
  Seed: LTIERMVLSAF
LSIERMVLSAF

SEQ ID NO: 36950 - protein, 11 aa, Artificial Sequence
  Description of Artificial Sequence: Synthetic peptide
  Seed: LTIERMVLSAF
LSIERMVLSAW

SEQ ID NO: 36951 - protein, 11 aa, Artificial Sequence
  Description of Artificial Sequence: Synthetic peptide
  Seed: LTIERMVLSAF
LSIERMVLSAY

SEQ ID NO: 36952 - protein, 11 aa, Artificial Sequence
  Description of Artificial Sequence: Synthetic peptide
  Seed: LTIERMVLSAF
LTIERMVLSAL

SEQ ID NO: 36953 - protein, 11 aa, Artificial Sequence
  Description of Artificial Sequence: Synthetic peptide
  Seed: LTIERMVLSAF
LTIERMVLSAM

SEQ ID NO: 36954 - protein, 11 aa, Artificial Sequence
  Description of Artificial Sequence: Synthetic peptide
  Seed: LTIERMVLSAF
LTIERMVLSAW

SEQ ID NO: 36955 - protein, 11 aa, Artificial Sequence
  Description of Artificial Sequence: Synthetic peptide
  Seed: LTIERMVLSAF
LTIERMVLSAY

SEQ ID NO: 36956 - protein, 11 aa, Artificial Sequence
  Description of Artificial Sequence: Synthetic peptide
  Seed: LTIERMVLSAF
LYIERMVLSAF

SEQ ID NO: 36957 - protein, 11 aa, Artificial Sequence
  Description of Artificial Sequence: Synthetic peptide
  Seed: LTIERMVLSAF
LYIERMVLSAY

SEQ ID NO: 36958 - protein, 11 aa, Artificial Sequence
  Description of Artificial Sequence: Synthetic peptide
  Seed: LTIERMVLSAF
LKIERMVLSAF

SEQ ID NO: 36959 - protein, 11 aa, Artificial Sequence
  Description of Artificial Sequence: Synthetic peptide
  Seed: LTIERMVLSAF
LKIERMVLSAM

SEQ ID NO: 36960 - protein, 11 aa, Artificial Sequence
  Description of Artificial Sequence: Synthetic peptide
  Seed: LTIERMVLSAF
LLIERMVLSAY

SEQ ID NO: 36961 - protein, 11 aa, Artificial Sequence
  Description of Artificial Sequence: Synthetic peptide
  Seed: LTIERMVLSAF
LLIERMVLSAF

SEQ ID NO: 36962 - protein, 11 aa, Artificial Sequence
  Description of Artificial Sequence: Synthetic peptide
  Seed: LTIERMVLSAF
LRIERMVLSAY

SEQ ID NO: 36963 - protein, 11 aa, Artificial Sequence
  Description of Artificial Sequence: Synthetic peptide
  Seed: LTIERMVLSAF
LNIERMVLSAF

SEQ ID NO: 36964 - protein, 11 aa, Artificial Sequence
  Description of Artificial Sequence: Synthetic peptide
  Seed: LTIERMVLSAF
LNIERMVLSAY

SEQ ID NO: 36965 - protein, 11 aa, Artificial Sequence
  Description of Artificial Sequence: Synthetic peptide
  Seed: LTIERMVLSAF
LQIERMVLSAI

SEQ ID NO: 36966 - protein, 11 aa, Artificial Sequence
  Description of Artificial Sequence: Synthetic peptide
  Seed: LTIERMVLSAF
LQIERMVLSAL

SEQ ID NO: 36967 - protein, 11 aa, Artificial Sequence
  Description of Artificial Sequence: Synthetic peptide
  Seed: LTIERMVLSAF
LQIERMVLSAM

SEQ ID NO: 36968 - protein, 11 aa, Artificial Sequence
  Description of Artificial Sequence: Synthetic peptide
  Seed: LTIERMVLSAF
LQIERMVLSAF

SEQ ID NO: 36969 - protein, 11 aa, Artificial Sequence
  Description of Artificial Sequence: Synthetic peptide
  Seed: LTIERMVLSAF
LQIERMVLSAW

SEQ ID NO: 36970 - protein, 11 aa, Artificial Sequence
  Description of Artificial Sequence: Synthetic peptide
  Seed: LTIERMVLSAF
LQIERMVLSAY

SEQ ID NO: 36971 - protein, 11 aa, Artificial Sequence
  Description of Artificial Sequence: Synthetic peptide
  Seed: LTIERMVLSAF
LEIERMVLSAF

SEQ ID NO: 36972 - protein, 11 aa, Artificial Sequence
  Description of Artificial Sequence: Synthetic peptide
  Seed: LTIERMVLSAF
LEIERMVLSAY

SEQ ID NO: 36973 - protein, 11 aa, Artificial Sequence
  Description of Artificial Sequence: Synthetic peptide
  Seed: LTIERMVLSAF
LGIERMVLSAF

SEQ ID NO: 36974 - protein, 11 aa, Artificial Sequence
  Description of Artificial Sequence: Synthetic peptide
  Seed: LTIERMVLSAF
LGIERMVLSAY

SEQ ID NO: 36975 - protein, 11 aa, Artificial Sequence
  Description of Artificial Sequence: Synthetic peptide
  Seed: LTIERMVLSAF
LHIERMVLSAM

SEQ ID NO: 36976 - protein, 11 aa, Artificial Sequence
  Description of Artificial Sequence: Synthetic peptide
  Seed: LTIERMVLSAF
LHIERMVLSAF

SEQ ID NO: 36977 - protein, 11 aa, Artificial Sequence
  Description of Artificial Sequence: Synthetic peptide
  Seed: LTIERMVLSAF
LHIERMVLSAY

SEQ ID NO: 36978 - protein, 11 aa, Artificial Sequence
  Description of Artificial Sequence: Synthetic peptide
  Seed: LTIERMVLSAF
LIIERMVLSAF

SEQ ID NO: 36979 - protein, 11 aa, Artificial Sequence
  Description of Artificial Sequence: Synthetic peptide
  Seed: LTIERMVLSAF
LIIERMVLSAY

SEQ ID NO: 36980 - protein, 11 aa, Artificial Sequence
  Description of Artificial Sequence: Synthetic peptide
  Seed: LTIERMVLSAF
LLIERMVLSAM

SEQ ID NO: 36981 - protein, 11 aa, Artificial Sequence
  Description of Artificial Sequence: Synthetic peptide
  Seed: LTIERMVLSAF
LVIERMVLSAM

SEQ ID NO: 36982 - protein, 11 aa, Artificial Sequence
  Description of Artificial Sequence: Synthetic peptide
  Seed: LTIERMVLSAF
LVIERMVLSAW

SEQ ID NO: 36983 - protein, 9 aa, Artificial Sequence
  Description of Artificial Sequence: Synthetic peptide
  Seed: LSFIRGTKV
LMFIRGTKM

SEQ ID NO: 36984 - protein, 10 aa, Artificial Sequence
  Description of Artificial Sequence: Synthetic peptide
  Seed: LVLYDKEEIR
LWLYDKEEIR

SEQ ID NO: 36985 - protein, 10 aa, Artificial Sequence
  Description of Artificial Sequence: Synthetic peptide
  Seed: LVLYDKEEIR
LCLYDKEEIM

SEQ ID NO: 36986 - protein, 10 aa, Artificial Sequence
  Description of Artificial Sequence: Synthetic peptide
  Seed: LVLYDKEEIR
LCLYDKEEIV

SEQ ID NO: 36987 - protein, 10 aa, Artificial Sequence
  Description of Artificial Sequence: Synthetic peptide
  Seed: LVLYDKEEIR
LQLYDKEEIA

SEQ ID NO: 36988 - protein, 10 aa, Artificial Sequence
  Description of Artificial Sequence: Synthetic peptide
  Seed: LVLYDKEEIR
LMLYDKEEIR

SEQ ID NO: 36989 - protein, 10 aa, Artificial Sequence
  Description of Artificial Sequence: Synthetic peptide
  Seed: LVLYDKEEIR
LFLYDKEEIR

SEQ ID NO: 36990 - protein, 10 aa, Artificial Sequence
  Description of Artificial Sequence: Synthetic peptide
  Seed: LVLYDKEEIR
LSLYDKEEIR

SEQ ID NO: 36991 - protein, 10 aa, Artificial Sequence
  Description of Artificial Sequence: Synthetic peptide
  Seed: LVLYDKEEIR
LYLYDKEEIR

SEQ ID NO: 36992 - protein, 11 aa, Artificial Sequence
  Description of Artificial Sequence: Synthetic peptide
  Seed: LTIERMVLSAF
LVIERMVLSAY

SEQ ID NO: 36993 - protein, 9 aa, Artificial Sequence
  Description of Artificial Sequence: Synthetic peptide
  Seed: LVRTGMDPR
LARTGMDPR

SEQ ID NO: 36994 - protein, 9 aa, Artificial Sequence
  Description of Artificial Sequence: Synthetic peptide
  Seed: LVRTGMDPR
LNRTGMDPR

SEQ ID NO: 36995 - protein, 9 aa, Artificial Sequence
  Description of Artificial Sequence: Synthetic peptide
  Seed: LVRTGMDPR
LQRTGMDPR

SEQ ID NO: 36996 - protein, 9 aa, Artificial Sequence
  Description of Artificial Sequence: Synthetic peptide
  Seed: LVRTGMDPR
LQRTGMDPK

SEQ ID NO: 36997 - protein, 9 aa, Artificial Sequence
  Description of Artificial Sequence: Synthetic peptide
  Seed: LVRTGMDPR
LGRTGMDPR

SEQ ID NO: 36998 - protein, 9 aa, Artificial Sequence
  Description of Artificial Sequence: Synthetic peptide
  Seed: LVRTGMDPR
LIRTGMDPR

SEQ ID NO: 36999 - protein, 9 aa, Artificial Sequence
  Description of Artificial Sequence: Synthetic peptide
  Seed: LVRTGMDPR
LIRTGMDPK

SEQ ID NO: 37000 - protein, 9 aa, Artificial Sequence
  Description of Artificial Sequence: Synthetic peptide
  Seed: LVRTGMDPR
LLRTGMDPR

SEQ ID NO: 37001 - protein, 9 aa, Artificial Sequence
  Description of Artificial Sequence: Synthetic peptide
  Seed: LVRTGMDPR
LLRTGMDPK

SEQ ID NO: 37002 - protein, 10 aa, Artificial Sequence
  Description of Artificial Sequence: Synthetic peptide
  Seed: LVLYDKEEIR
LCLYDKEEIL

SEQ ID NO: 37003 - protein, 10 aa, Artificial Sequence
  Description of Artificial Sequence: Synthetic peptide
  Seed: LVLYDKEEIR
LCLYDKEEII

SEQ ID NO: 37004 - protein, 10 aa, Artificial Sequence
  Description of Artificial Sequence: Synthetic peptide
  Seed: LVLYDKEEIR
LCLYDKEEIA

SEQ ID NO: 37005 - protein, 10 aa, Artificial Sequence
  Description of Artificial Sequence: Synthetic peptide
  Seed: LVLYDKEEIR
LDLYDKEEIV

SEQ ID NO: 37006 - protein, 10 aa, Artificial Sequence
  Description of Artificial Sequence: Synthetic peptide
  Seed: LVLYDKEEIR
LALYDKEEIA

SEQ ID NO: 37007 - protein, 10 aa, Artificial Sequence
  Description of Artificial Sequence: Synthetic peptide
  Seed: LVLYDKEEIR
LALYDKEEII

SEQ ID NO: 37008 - protein, 10 aa, Artificial Sequence
  Description of Artificial Sequence: Synthetic peptide
  Seed: LVLYDKEEIR
LALYDKEEIL

SEQ ID NO: 37009 - protein, 10 aa, Artificial Sequence
  Description of Artificial Sequence: Synthetic peptide
  Seed: LVLYDKEEIR
LALYDKEEIM

SEQ ID NO: 37010 - protein, 10 aa, Artificial Sequence
  Description of Artificial Sequence: Synthetic peptide
  Seed: LVLYDKEEIR
LALYDKEEIV

SEQ ID NO: 37011 - protein, 10 aa, Artificial Sequence
  Description of Artificial Sequence: Synthetic peptide
  Seed: LVLYDKEEIR
LRLYDKEEIA

SEQ ID NO: 37012 - protein, 10 aa, Artificial Sequence
  Description of Artificial Sequence: Synthetic peptide
  Seed: LVLYDKEEIR
LRLYDKEEII

SEQ ID NO: 37013 - protein, 10 aa, Artificial Sequence
  Description of Artificial Sequence: Synthetic peptide
  Seed: LVLYDKEEIR
LRLYDKEEIL

SEQ ID NO: 37014 - protein, 10 aa, Artificial Sequence
  Description of Artificial Sequence: Synthetic peptide
  Seed: LVLYDKEEIR
LRLYDKEEIM

SEQ ID NO: 37015 - protein, 10 aa, Artificial Sequence
  Description of Artificial Sequence: Synthetic peptide
  Seed: LVLYDKEEIR
LRLYDKEEIV

SEQ ID NO: 37016 - protein, 10 aa, Artificial Sequence
  Description of Artificial Sequence: Synthetic peptide
  Seed: LVLYDKEEIR
LNLYDKEEIA

SEQ ID NO: 37017 - protein, 10 aa, Artificial Sequence
  Description of Artificial Sequence: Synthetic peptide
  Seed: LVLYDKEEIR
LNLYDKEEII

SEQ ID NO: 37018 - protein, 10 aa, Artificial Sequence
  Description of Artificial Sequence: Synthetic peptide
  Seed: LVLYDKEEIR
LNLYDKEEIL

SEQ ID NO: 37019 - protein, 10 aa, Artificial Sequence
  Description of Artificial Sequence: Synthetic peptide
  Seed: LVLYDKEEIR
LNLYDKEEIM

SEQ ID NO: 37020 - protein, 10 aa, Artificial Sequence
  Description of Artificial Sequence: Synthetic peptide
  Seed: LVLYDKEEIR
LNLYDKEEIV

SEQ ID NO: 37021 - protein, 10 aa, Artificial Sequence
  Description of Artificial Sequence: Synthetic peptide
  Seed: LVLYDKEEIR
LDLYDKEEIA

SEQ ID NO: 37022 - protein, 10 aa, Artificial Sequence
  Description of Artificial Sequence: Synthetic peptide
  Seed: LVLYDKEEIR
LDLYDKEEII

SEQ ID NO: 37023 - protein, 10 aa, Artificial Sequence
  Description of Artificial Sequence: Synthetic peptide
  Seed: LVLYDKEEIR
LDLYDKEEIL

SEQ ID NO: 37024 - protein, 10 aa, Artificial Sequence
  Description of Artificial Sequence: Synthetic peptide
  Seed: LVLYDKEEIR
LDLYDKEEIM

SEQ ID NO: 37025 - protein, 11 aa, Artificial Sequence
  Description of Artificial Sequence: Synthetic peptide
  Seed: LTIERMVLSAF
LRIERMVLSAF

SEQ ID NO: 37026 - protein, 11 aa, Artificial Sequence
  Description of Artificial Sequence: Synthetic peptide
  Seed: LTIERMVLSAF
LAIERMVLSAY

SEQ ID NO: 37027 - protein, 11 aa, Artificial Sequence
  Description of Artificial Sequence: Synthetic peptide
  Seed: LTIERMVLSAF
LAIERMVLSAW

SEQ ID NO: 37028 - protein, 8 aa, Artificial Sequence
  Description of Artificial Sequence: Synthetic peptide
  Seed: LTIERMVL
LAIERMVM

SEQ ID NO: 37029 - protein, 9 aa, Artificial Sequence
  Description of Artificial Sequence: Synthetic peptide
  Seed: LSFIRGTKV
LVFIRGTKL

SEQ ID NO: 37030 - protein, 9 aa, Artificial Sequence
  Description of Artificial Sequence: Synthetic peptide
  Seed: LSFIRGTKV
LVFIRGTKK

SEQ ID NO: 37031 - protein, 9 aa, Artificial Sequence
  Description of Artificial Sequence: Synthetic peptide
  Seed: LSFIRGTKV
LVFIRGTKM

SEQ ID NO: 37032 - protein, 9 aa, Artificial Sequence
  Description of Artificial Sequence: Synthetic peptide
  Seed: LSFIRGTKV
LVFIRGTKF

SEQ ID NO: 37033 - protein, 9 aa, Artificial Sequence
  Description of Artificial Sequence: Synthetic peptide
  Seed: LSFIRGTKV
LVFIRGTKW

SEQ ID NO: 37034 - protein, 9 aa, Artificial Sequence
  Description of Artificial Sequence: Synthetic peptide
  Seed: LSFIRGTKV
LVFIRGTKY

SEQ ID NO: 37035 - protein, 9 aa, Artificial Sequence
  Description of Artificial Sequence: Synthetic peptide
  Seed: LSFIRGTKV
LVFIRGTKV

SEQ ID NO: 37036 - protein, 8 aa, Artificial Sequence
  Description of Artificial Sequence: Synthetic peptide
  Seed: LTIERMVL
LAIERMVI

SEQ ID NO: 37037 - protein, 8 aa, Artificial Sequence
  Description of Artificial Sequence: Synthetic peptide
  Seed: LTIERMVL
LAIERMVL

SEQ ID NO: 37038 - protein, 8 aa, Artificial Sequence
  Description of Artificial Sequence: Synthetic peptide
  Seed: LTIERMVL
LAIERMVF

SEQ ID NO: 37039 - protein, 11 aa, Artificial Sequence
  Description of Artificial Sequence: Synthetic peptide
  Seed: LTIERMVLSAF
LAIERMVLSAF

SEQ ID NO: 37040 - protein, 8 aa, Artificial Sequence
  Description of Artificial Sequence: Synthetic peptide
  Seed: LTIERMVL
LAIERMVY

SEQ ID NO: 37041 - protein, 8 aa, Artificial Sequence
  Description of Artificial Sequence: Synthetic peptide
  Seed: LTIERMVL
LAIERMVV

SEQ ID NO: 37042 - protein, 8 aa, Artificial Sequence
  Description of Artificial Sequence: Synthetic peptide
  Seed: LTIERMVL
LSIERMVI

SEQ ID NO: 37043 - protein, 8 aa, Artificial Sequence
  Description of Artificial Sequence: Synthetic peptide
  Seed: LTIERMVL
LSIERMVL

SEQ ID NO: 37044 - protein, 8 aa, Artificial Sequence
  Description of Artificial Sequence: Synthetic peptide
  Seed: LTIERMVL
LSIERMVM

SEQ ID NO: 37045 - protein, 8 aa, Artificial Sequence
  Description of Artificial Sequence: Synthetic peptide
  Seed: LTIERMVL
LSIERMVF

SEQ ID NO: 37046 - protein, 8 aa, Artificial Sequence
  Description of Artificial Sequence: Synthetic peptide
  Seed: LTIERMVL
LSIERMVY

SEQ ID NO: 37047 - protein, 8 aa, Artificial Sequence
  Description of Artificial Sequence: Synthetic peptide
  Seed: LTIERMVL
LSIERMVV

SEQ ID NO: 37048 - protein, 8 aa, Artificial Sequence
  Description of Artificial Sequence: Synthetic peptide
  Seed: LTIERMVL
LTIERMVM

SEQ ID NO: 37049 - protein, 9 aa, Artificial Sequence
  Description of Artificial Sequence: Synthetic peptide
  Seed: LSFIRGTKV
LVFIRGTKI

SEQ ID NO: 37050 - protein, 9 aa, Artificial Sequence
  Description of Artificial Sequence: Synthetic peptide
  Seed: LSFIRGTKV
LYFIRGTKK

SEQ ID NO: 37051 - protein, 9 aa, Artificial Sequence
  Description of Artificial Sequence: Synthetic peptide
  Seed: LSFIRGTKV
LTFIRGTKV

SEQ ID NO: 37052 - protein, 9 aa, Artificial Sequence
  Description of Artificial Sequence: Synthetic peptide
  Seed: LSFIRGTKV
LTFIRGTKY

SEQ ID NO: 37053 - protein, 9 aa, Artificial Sequence
  Description of Artificial Sequence: Synthetic peptide
  Seed: LSFIRGTKV
LMFIRGTKF

SEQ ID NO: 37054 - protein, 9 aa, Artificial Sequence
  Description of Artificial Sequence: Synthetic peptide
  Seed: LSFIRGTKV
LMFIRGTKW

SEQ ID NO: 37055 - protein, 9 aa, Artificial Sequence
  Description of Artificial Sequence: Synthetic peptide
  Seed: LSFIRGTKV
LMFIRGTKY

SEQ ID NO: 37056 - protein, 9 aa, Artificial Sequence
  Description of Artificial Sequence: Synthetic peptide
  Seed: LSFIRGTKV
LFFIRGTKK

SEQ ID NO: 37057 - protein, 9 aa, Artificial Sequence
  Description of Artificial Sequence: Synthetic peptide
  Seed: LSFIRGTKV
LSFIRGTKA

SEQ ID NO: 37058 - protein, 9 aa, Artificial Sequence
  Description of Artificial Sequence: Synthetic peptide
  Seed: LSFIRGTKV
LSFIRGTKI

SEQ ID NO: 37059 - protein, 9 aa, Artificial Sequence
  Description of Artificial Sequence: Synthetic peptide
  Seed: LSFIRGTKV
LSFIRGTKL

SEQ ID NO: 37060 - protein, 9 aa, Artificial Sequence
  Description of Artificial Sequence: Synthetic peptide
  Seed: LSFIRGTKV
LSFIRGTKK

SEQ ID NO: 37061 - protein, 9 aa, Artificial Sequence
  Description of Artificial Sequence: Synthetic peptide
  Seed: LSFIRGTKV
LSFIRGTKM

SEQ ID NO: 37062 - protein, 9 aa, Artificial Sequence
  Description of Artificial Sequence: Synthetic peptide
  Seed: LSFIRGTKV
LSFIRGTKF

SEQ ID NO: 37063 - protein, 9 aa, Artificial Sequence
  Description of Artificial Sequence: Synthetic peptide
  Seed: LSFIRGTKV
LSFIRGTKW

SEQ ID NO: 37064 - protein, 9 aa, Artificial Sequence
  Description of Artificial Sequence: Synthetic peptide
  Seed: LSFIRGTKV
LSFIRGTKY

SEQ ID NO: 37065 - protein, 9 aa, Artificial Sequence
  Description of Artificial Sequence: Synthetic peptide
  Seed: LSFIRGTKV
LTFIRGTKA

SEQ ID NO: 37066 - protein, 9 aa, Artificial Sequence
  Description of Artificial Sequence: Synthetic peptide
  Seed: LSFIRGTKV
LTFIRGTKI

SEQ ID NO: 37067 - protein, 9 aa, Artificial Sequence
  Description of Artificial Sequence: Synthetic peptide
  Seed: LSFIRGTKV
LTFIRGTKL

SEQ ID NO: 37068 - protein, 9 aa, Artificial Sequence
  Description of Artificial Sequence: Synthetic peptide
  Seed: LSFIRGTKV
LTFIRGTKK

SEQ ID NO: 37069 - protein, 9 aa, Artificial Sequence
  Description of Artificial Sequence: Synthetic peptide
  Seed: LSFIRGTKV
LTFIRGTKM

SEQ ID NO: 37070 - protein, 9 aa, Artificial Sequence
  Description of Artificial Sequence: Synthetic peptide
  Seed: LSFIRGTKV
LTFIRGTKF

SEQ ID NO: 37071 - protein, 9 aa, Artificial Sequence
  Description of Artificial Sequence: Synthetic peptide
  Seed: LSFIRGTKV
LTFIRGTKW

SEQ ID NO: 37072 - protein, 8 aa, Artificial Sequence
  Description of Artificial Sequence: Synthetic peptide
  Seed: LTIERMVL
LTIERMVF

SEQ ID NO: 37073 - protein, 8 aa, Artificial Sequence
  Description of Artificial Sequence: Synthetic peptide
  Seed: LTIERMVL
LTIERMVY

SEQ ID NO: 37074 - protein, 10 aa, Artificial Sequence
  Description of Artificial Sequence: Synthetic peptide
  Seed: LTIERMVLSA
LAIERMVLSA

SEQ ID NO: 37075 - protein, 10 aa, Artificial Sequence
  Description of Artificial Sequence: Synthetic peptide
  Seed: LTIERMVLSA
LLIERMVLST

SEQ ID NO: 37076 - protein, 10 aa, Artificial Sequence
  Description of Artificial Sequence: Synthetic peptide
  Seed: LTIERMVLSA
LMIERMVLSA

SEQ ID NO: 37077 - protein, 10 aa, Artificial Sequence
  Description of Artificial Sequence: Synthetic peptide
  Seed: LTIERMVLSA
LMIERMVLSC

SEQ ID NO: 37078 - protein, 10 aa, Artificial Sequence
  Description of Artificial Sequence: Synthetic peptide
  Seed: LTIERMVLSA
LMIERMVLSG

SEQ ID NO: 37079 - protein, 10 aa, Artificial Sequence
  Description of Artificial Sequence: Synthetic peptide
  Seed: LTIERMVLSA
LMIERMVLSI

SEQ ID NO: 37080 - protein, 10 aa, Artificial Sequence
  Description of Artificial Sequence: Synthetic peptide
  Seed: LTIERMVLSA
LMIERMVLSL

SEQ ID NO: 37081 - protein, 10 aa, Artificial Sequence
  Description of Artificial Sequence: Synthetic peptide
  Seed: LTIERMVLSA
LMIERMVLSM

SEQ ID NO: 37082 - protein, 10 aa, Artificial Sequence
  Description of Artificial Sequence: Synthetic peptide
  Seed: LTIERMVLSA
LMIERMVLSP

SEQ ID NO: 37083 - protein, 10 aa, Artificial Sequence
  Description of Artificial Sequence: Synthetic peptide
  Seed: LTIERMVLSA
LMIERMVLSS

SEQ ID NO: 37084 - protein, 10 aa, Artificial Sequence
  Description of Artificial Sequence: Synthetic peptide
  Seed: LTIERMVLSA
LMIERMVLST

SEQ ID NO: 37085 - protein, 10 aa, Artificial Sequence
  Description of Artificial Sequence: Synthetic peptide
  Seed: LTIERMVLSA
LMIERMVLSV

SEQ ID NO: 37086 - protein, 10 aa, Artificial Sequence
  Description of Artificial Sequence: Synthetic peptide
  Seed: LTIERMVLSA
LFIERMVLSV

SEQ ID NO: 37087 - protein, 10 aa, Artificial Sequence
  Description of Artificial Sequence: Synthetic peptide
  Seed: LTIERMVLSA
LSIERMVLSV

SEQ ID NO: 37088 - protein, 10 aa, Artificial Sequence
  Description of Artificial Sequence: Synthetic peptide
  Seed: LTIERMVLSA
LTIERMVLSI

SEQ ID NO: 37089 - protein, 10 aa, Artificial Sequence
  Description of Artificial Sequence: Synthetic peptide
  Seed: LTIERMVLSA
LTIERMVLSL

SEQ ID NO: 37090 - protein, 10 aa, Artificial Sequence
  Description of Artificial Sequence: Synthetic peptide
  Seed: LTIERMVLSA
LTIERMVLSV

SEQ ID NO: 37091 - protein, 10 aa, Artificial Sequence
  Description of Artificial Sequence: Synthetic peptide
  Seed: LTIERMVLSA
LVIERMVLSA

SEQ ID NO: 37092 - protein, 10 aa, Artificial Sequence
  Description of Artificial Sequence: Synthetic peptide
  Seed: LTIERMVLSA
LVIERMVLSI

SEQ ID NO: 37093 - protein, 10 aa, Artificial Sequence
  Description of Artificial Sequence: Synthetic peptide
  Seed: LTIERMVLSA
LVIERMVLSL

SEQ ID NO: 37094 - protein, 10 aa, Artificial Sequence
  Description of Artificial Sequence: Synthetic peptide
  Seed: LTIERMVLSA
LVIERMVLSV

SEQ ID NO: 37095 - protein, 10 aa, Artificial Sequence
  Description of Artificial Sequence: Synthetic peptide
  Seed: LTIERMVLSA
LLIERMVLSV

SEQ ID NO: 37096 - protein, 10 aa, Artificial Sequence
  Description of Artificial Sequence: Synthetic peptide
  Seed: LTIERMVLSA
LLIERMVLSS

SEQ ID NO: 37097 - protein, 10 aa, Artificial Sequence
  Description of Artificial Sequence: Synthetic peptide
  Seed: LTIERMVLSA
LAIERMVLSV

SEQ ID NO: 37098 - protein, 10 aa, Artificial Sequence
  Description of Artificial Sequence: Synthetic peptide
  Seed: LTIERMVLSA
LLIERMVLSM

SEQ ID NO: 37099 - protein, 10 aa, Artificial Sequence
  Description of Artificial Sequence: Synthetic peptide
  Seed: LTIERMVLSA
LQIERMVLSA

SEQ ID NO: 37100 - protein, 10 aa, Artificial Sequence
  Description of Artificial Sequence: Synthetic peptide
  Seed: LTIERMVLSA
LQIERMVLSC

SEQ ID NO: 37101 - protein, 10 aa, Artificial Sequence
  Description of Artificial Sequence: Synthetic peptide
  Seed: LTIERMVLSA
LQIERMVLSI

SEQ ID NO: 37102 - protein, 10 aa, Artificial Sequence
  Description of Artificial Sequence: Synthetic peptide
  Seed: LTIERMVLSA
LQIERMVLSL

SEQ ID NO: 37103 - protein, 10 aa, Artificial Sequence
  Description of Artificial Sequence: Synthetic peptide
  Seed: LTIERMVLSA
LQIERMVLSM

SEQ ID NO: 37104 - protein, 10 aa, Artificial Sequence
  Description of Artificial Sequence: Synthetic peptide
  Seed: LTIERMVLSA
LQIERMVLSF

SEQ ID NO: 37105 - protein, 10 aa, Artificial Sequence
  Description of Artificial Sequence: Synthetic peptide
  Seed: LTIERMVLSA
LQIERMVLSS

SEQ ID NO: 37106 - protein, 10 aa, Artificial Sequence
  Description of Artificial Sequence: Synthetic peptide
  Seed: LTIERMVLSA
LQIERMVLST

SEQ ID NO: 37107 - protein, 10 aa, Artificial Sequence
  Description of Artificial Sequence: Synthetic peptide
  Seed: LTIERMVLSA
LQIERMVLSV

SEQ ID NO: 37108 - protein, 10 aa, Artificial Sequence
  Description of Artificial Sequence: Synthetic peptide
  Seed: LTIERMVLSA
LIIERMVLSA

SEQ ID NO: 37109 - protein, 10 aa, Artificial Sequence
  Description of Artificial Sequence: Synthetic peptide
  Seed: LTIERMVLSA
LIIERMVLSI

SEQ ID NO: 37110 - protein, 10 aa, Artificial Sequence
  Description of Artificial Sequence: Synthetic peptide
  Seed: LTIERMVLSA
LIIERMVLSL

SEQ ID NO: 37111 - protein, 10 aa, Artificial Sequence
  Description of Artificial Sequence: Synthetic peptide
  Seed: LTIERMVLSA
LIIERMVLST

SEQ ID NO: 37112 - protein, 10 aa, Artificial Sequence
  Description of Artificial Sequence: Synthetic peptide
  Seed: LTIERMVLSA
LIIERMVLSV

SEQ ID NO: 37113 - protein, 10 aa, Artificial Sequence
  Description of Artificial Sequence: Synthetic peptide
  Seed: LTIERMVLSA
LLIERMVLSA

SEQ ID NO: 37114 - protein, 10 aa, Artificial Sequence
  Description of Artificial Sequence: Synthetic peptide
  Seed: LTIERMVLSA
LLIERMVLSC

SEQ ID NO: 37115 - protein, 10 aa, Artificial Sequence
  Description of Artificial Sequence: Synthetic peptide
  Seed: LTIERMVLSA
LLIERMVLSG

SEQ ID NO: 37116 - protein, 10 aa, Artificial Sequence
  Description of Artificial Sequence: Synthetic peptide
  Seed: LTIERMVLSA
LLIERMVLSI

SEQ ID NO: 37117 - protein, 10 aa, Artificial Sequence
  Description of Artificial Sequence: Synthetic peptide
  Seed: LTIERMVLSA
LLIERMVLSL

SEQ ID NO: 37118 - protein, 8 aa, Artificial Sequence
  Description of Artificial Sequence: Synthetic peptide
  Seed: LRSRYWAI
LPSRYWAL

SEQ ID NO: 37119 - protein, 8 aa, Artificial Sequence
  Description of Artificial Sequence: Synthetic peptide
  Seed: LRSRYWAI
LPSRYWAI

SEQ ID NO: 37120 - protein, 8 aa, Artificial Sequence
  Description of Artificial Sequence: Synthetic peptide
  Seed: LRSRYWAI
LFSRYWAM

SEQ ID NO: 37121 - protein, 9 aa, Artificial Sequence
  Description of Artificial Sequence: Synthetic peptide
  Seed: LQNSQVYSL
LNNSQVYSF

SEQ ID NO: 37122 - protein, 9 aa, Artificial Sequence
  Description of Artificial Sequence: Synthetic peptide
  Seed: LQNSQVYSL
LRNSQVYSA

SEQ ID NO: 37123 - protein, 9 aa, Artificial Sequence
  Description of Artificial Sequence: Synthetic peptide
  Seed: LQNSQVYSL
LRNSQVYSC

SEQ ID NO: 37124 - protein, 9 aa, Artificial Sequence
  Description of Artificial Sequence: Synthetic peptide
  Seed: LQNSQVYSL
LRNSQVYSI

SEQ ID NO: 37125 - protein, 9 aa, Artificial Sequence
  Description of Artificial Sequence: Synthetic peptide
  Seed: LQNSQVYSL
LRNSQVYSL

SEQ ID NO: 37126 - protein, 9 aa, Artificial Sequence
  Description of Artificial Sequence: Synthetic peptide
  Seed: LQNSQVYSL
LRNSQVYSM

SEQ ID NO: 37127 - protein, 9 aa, Artificial Sequence
  Description of Artificial Sequence: Synthetic peptide
  Seed: LQNSQVYSL
LRNSQVYSF

SEQ ID NO: 37128 - protein, 9 aa, Artificial Sequence
  Description of Artificial Sequence: Synthetic peptide
  Seed: LQNSQVYSL
LRNSQVYSY

SEQ ID NO: 37129 - protein, 9 aa, Artificial Sequence
  Description of Artificial Sequence: Synthetic peptide
  Seed: LQNSQVYSL
LRNSQVYSV

SEQ ID NO: 37130 - protein, 9 aa, Artificial Sequence
  Description of Artificial Sequence: Synthetic peptide
  Seed: LQNSQVYSL
LNNSQVYSM

SEQ ID NO: 37131 - protein, 9 aa, Artificial Sequence
  Description of Artificial Sequence: Synthetic peptide
  Seed: LQNSQVYSL
LNNSQVYSY

SEQ ID NO: 37132 - protein, 9 aa, Artificial Sequence
  Description of Artificial Sequence: Synthetic peptide
  Seed: LQNSQVYSL
LENSQVYSM

SEQ ID NO: 37133 - protein, 9 aa, Artificial Sequence
  Description of Artificial Sequence: Synthetic peptide
  Seed: LQNSQVYSL
LQNSQVYSA

SEQ ID NO: 37134 - protein, 9 aa, Artificial Sequence
  Description of Artificial Sequence: Synthetic peptide
  Seed: LQNSQVYSL
LQNSQVYSH

SEQ ID NO: 37135 - protein, 9 aa, Artificial Sequence
  Description of Artificial Sequence: Synthetic peptide
  Seed: LQNSQVYSL
LQNSQVYSI

SEQ ID NO: 37136 - protein, 9 aa, Artificial Sequence
  Description of Artificial Sequence: Synthetic peptide
  Seed: LQNSQVYSL
LQNSQVYSM

SEQ ID NO: 37137 - protein, 9 aa, Artificial Sequence
  Description of Artificial Sequence: Synthetic peptide
  Seed: LQNSQVYSL
LQNSQVYSF

SEQ ID NO: 37138 - protein, 9 aa, Artificial Sequence
  Description of Artificial Sequence: Synthetic peptide
  Seed: LQNSQVYSL
LQNSQVYSW

SEQ ID NO: 37139 - protein, 9 aa, Artificial Sequence
  Description of Artificial Sequence: Synthetic peptide
  Seed: LQNSQVYSL
LQNSQVYSY

SEQ ID NO: 37140 - protein, 9 aa, Artificial Sequence
  Description of Artificial Sequence: Synthetic peptide
  Seed: LQNSQVYSL
LQNSQVYSV

SEQ ID NO: 37141 - protein, 9 aa, Artificial Sequence
  Description of Artificial Sequence: Synthetic peptide
  Seed: LQNSQVYSL
LENSQVYSI

SEQ ID NO: 37142 - protein, 9 aa, Artificial Sequence
  Description of Artificial Sequence: Synthetic peptide
  Seed: LQNSQVYSL
LANSQVYSV

SEQ ID NO: 37143 - protein, 9 aa, Artificial Sequence
  Description of Artificial Sequence: Synthetic peptide
  Seed: LQNSQVYSL
LANSQVYSY

SEQ ID NO: 37144 - protein, 9 aa, Artificial Sequence
  Description of Artificial Sequence: Synthetic peptide
  Seed: LQNSQVYSL
LANSQVYSW

SEQ ID NO: 37145 - protein, 9 aa, Artificial Sequence
  Description of Artificial Sequence: Synthetic peptide
  Seed: LQNSQVYSL
LANSQVYSF

SEQ ID NO: 37146 - protein, 11 aa, Artificial Sequence
  Description of Artificial Sequence: Synthetic peptide
  Seed: LQNSQVFSLIR
LNNSQVFSLIR

SEQ ID NO: 37147 - protein, 11 aa, Artificial Sequence
  Description of Artificial Sequence: Synthetic peptide
  Seed: LQNSQVFSLIR
LGNSQVFSLIR

SEQ ID NO: 37148 - protein, 11 aa, Artificial Sequence
  Description of Artificial Sequence: Synthetic peptide
  Seed: LQNSQVFSLIR
LHNSQVFSLIR

SEQ ID NO: 37149 - protein, 11 aa, Artificial Sequence
  Description of Artificial Sequence: Synthetic peptide
  Seed: LQNSQVFSLIR
LINSQVFSLIR

SEQ ID NO: 37150 - protein, 11 aa, Artificial Sequence
  Description of Artificial Sequence: Synthetic peptide
  Seed: LQNSQVFSLIR
LLNSQVFSLIR

SEQ ID NO: 37151 - protein, 11 aa, Artificial Sequence
  Description of Artificial Sequence: Synthetic peptide
  Seed: LQNSQVFSLIR
LMNSQVFSLIR

SEQ ID NO: 37152 - protein, 11 aa, Artificial Sequence
  Description of Artificial Sequence: Synthetic peptide
  Seed: LQNSQVFSLIR
LMNSQVFSLIK

SEQ ID NO: 37153 - protein, 11 aa, Artificial Sequence
  Description of Artificial Sequence: Synthetic peptide
  Seed: LQNSQVFSLIR
LFNSQVFSLIR

SEQ ID NO: 37154 - protein, 11 aa, Artificial Sequence
  Description of Artificial Sequence: Synthetic peptide
  Seed: LQNSQVFSLIR
LFNSQVFSLIK

SEQ ID NO: 37155 - protein, 11 aa, Artificial Sequence
  Description of Artificial Sequence: Synthetic peptide
  Seed: LQNSQVFSLIR
LSNSQVFSLIR

SEQ ID NO: 37156 - protein, 11 aa, Artificial Sequence
  Description of Artificial Sequence: Synthetic peptide
  Seed: LQNSQVFSLIR
LTNSQVFSLIR

SEQ ID NO: 37157 - protein, 11 aa, Artificial Sequence
  Description of Artificial Sequence: Synthetic peptide
  Seed: LQNSQVFSLIR
LWNSQVFSLIR

SEQ ID NO: 37158 - protein, 11 aa, Artificial Sequence
  Description of Artificial Sequence: Synthetic peptide
  Seed: LQNSQVFSLIR
LWNSQVFSLIK

SEQ ID NO: 37159 - protein, 11 aa, Artificial Sequence
  Description of Artificial Sequence: Synthetic peptide
  Seed: LQNSQVFSLIR
LYNSQVFSLIR

SEQ ID NO: 37160 - protein, 11 aa, Artificial Sequence
  Description of Artificial Sequence: Synthetic peptide
  Seed: LQNSQVFSLIR
LYNSQVFSLIK

SEQ ID NO: 37161 - protein, 11 aa, Artificial Sequence
  Description of Artificial Sequence: Synthetic peptide
  Seed: LQNSQVFSLIR
LVNSQVFSLIR

SEQ ID NO: 37162 - protein, 9 aa, Artificial Sequence
  Description of Artificial Sequence: Synthetic peptide
  Seed: LQNSQVYSL
LANSQVYSI

SEQ ID NO: 37163 - protein, 9 aa, Artificial Sequence
  Description of Artificial Sequence: Synthetic peptide
  Seed: LQNSQVYSL
LANSQVYSL

SEQ ID NO: 37164 - protein, 9 aa, Artificial Sequence
  Description of Artificial Sequence: Synthetic peptide
  Seed: LQNSQVYSL
LANSQVYSM

SEQ ID NO: 37165 - protein, 9 aa, Artificial Sequence
  Description of Artificial Sequence: Synthetic peptide
  Seed: LQNSQVYSL
LENSQVYSL

SEQ ID NO: 37166 - protein, 9 aa, Artificial Sequence
  Description of Artificial Sequence: Synthetic peptide
  Seed: LQNSQVYSL
LENSQVYSF

SEQ ID NO: 37167 - protein, 9 aa, Artificial Sequence
  Description of Artificial Sequence: Synthetic peptide
  Seed: LQNSQVYSL
LMNSQVYST

SEQ ID NO: 37168 - protein, 9 aa, Artificial Sequence
  Description of Artificial Sequence: Synthetic peptide
  Seed: LQNSQVYSL
LKNSQVYSW

SEQ ID NO: 37169 - protein, 9 aa, Artificial Sequence
  Description of Artificial Sequence: Synthetic peptide
  Seed: LQNSQVYSL
LLNSQVYSS

SEQ ID NO: 37170 - protein, 9 aa, Artificial Sequence
  Description of Artificial Sequence: Synthetic peptide
  Seed: LQNSQVYSL
LLNSQVYST

SEQ ID NO: 37171 - protein, 9 aa, Artificial Sequence
  Description of Artificial Sequence: Synthetic peptide
  Seed: LQNSQVYSL
LLNSQVYSW

SEQ ID NO: 37172 - protein, 9 aa, Artificial Sequence
  Description of Artificial Sequence: Synthetic peptide
  Seed: LQNSQVYSL
LLNSQVYSY

SEQ ID NO: 37173 - protein, 9 aa, Artificial Sequence
  Description of Artificial Sequence: Synthetic peptide
  Seed: LQNSQVYSL
LLNSQVYSV

SEQ ID NO: 37174 - protein, 9 aa, Artificial Sequence
  Description of Artificial Sequence: Synthetic peptide
  Seed: LQNSQVYSL
LKNSQVYSI

SEQ ID NO: 37175 - protein, 9 aa, Artificial Sequence
  Description of Artificial Sequence: Synthetic peptide
  Seed: LQNSQVYSL
LKNSQVYSL

SEQ ID NO: 37176 - protein, 9 aa, Artificial Sequence
  Description of Artificial Sequence: Synthetic peptide
  Seed: LQNSQVYSL
LKNSQVYSM

SEQ ID NO: 37177 - protein, 9 aa, Artificial Sequence
  Description of Artificial Sequence: Synthetic peptide
  Seed: LQNSQVYSL
LKNSQVYSF

SEQ ID NO: 37178 - protein, 9 aa, Artificial Sequence
  Description of Artificial Sequence: Synthetic peptide
  Seed: LQNSQVYSL
LKNSQVYSY

SEQ ID NO: 37179 - protein, 9 aa, Artificial Sequence
  Description of Artificial Sequence: Synthetic peptide
  Seed: LQNSQVYSL
LENSQVYSY

SEQ ID NO: 37180 - protein, 9 aa, Artificial Sequence
  Description of Artificial Sequence: Synthetic peptide
  Seed: LQNSQVYSL
LKNSQVYSV

SEQ ID NO: 37181 - protein, 9 aa, Artificial Sequence
  Description of Artificial Sequence: Synthetic peptide
  Seed: LQNSQVYSL
LMNSQVYSA

SEQ ID NO: 37182 - protein, 9 aa, Artificial Sequence
  Description of Artificial Sequence: Synthetic peptide
  Seed: LQNSQVYSL
LMNSQVYSC

SEQ ID NO: 37183 - protein, 9 aa, Artificial Sequence
  Description of Artificial Sequence: Synthetic peptide
  Seed: LQNSQVYSL
LMNSQVYSG

SEQ ID NO: 37184 - protein, 9 aa, Artificial Sequence
  Description of Artificial Sequence: Synthetic peptide
  Seed: LQNSQVYSL
LMNSQVYSH

SEQ ID NO: 37185 - protein, 9 aa, Artificial Sequence
  Description of Artificial Sequence: Synthetic peptide
  Seed: LQNSQVYSL
LMNSQVYSI

SEQ ID NO: 37186 - protein, 9 aa, Artificial Sequence
  Description of Artificial Sequence: Synthetic peptide
  Seed: LQNSQVYSL
LMNSQVYSL

SEQ ID NO: 37187 - protein, 9 aa, Artificial Sequence
  Description of Artificial Sequence: Synthetic peptide
  Seed: LQNSQVYSL
LMNSQVYSM

SEQ ID NO: 37188 - protein, 9 aa, Artificial Sequence
  Description of Artificial Sequence: Synthetic peptide
  Seed: LQNSQVYSL
LMNSQVYSF

SEQ ID NO: 37189 - protein, 9 aa, Artificial Sequence
  Description of Artificial Sequence: Synthetic peptide
  Seed: LQNSQVYSL
LLNSQVYSF

SEQ ID NO: 37190 - protein, 9 aa, Artificial Sequence
  Description of Artificial Sequence: Synthetic peptide
  Seed: LQNSQVYSL
LLNSQVYSM

SEQ ID NO: 37191 - protein, 9 aa, Artificial Sequence
  Description of Artificial Sequence: Synthetic peptide
  Seed: LQNSQVYSL
LLNSQVYSL

SEQ ID NO: 37192 - protein, 9 aa, Artificial Sequence
  Description of Artificial Sequence: Synthetic peptide
  Seed: LQNSQVYSL
LLNSQVYSI

SEQ ID NO: 37193 - protein, 9 aa, Artificial Sequence
  Description of Artificial Sequence: Synthetic peptide
  Seed: LQNSQVYSL
LGNSQVYSF

SEQ ID NO: 37194 - protein, 9 aa, Artificial Sequence
  Description of Artificial Sequence: Synthetic peptide
  Seed: LQNSQVYSL
LGNSQVYSY

SEQ ID NO: 37195 - protein, 9 aa, Artificial Sequence
  Description of Artificial Sequence: Synthetic peptide
  Seed: LQNSQVYSL
LHNSQVYSA

SEQ ID NO: 37196 - protein, 9 aa, Artificial Sequence
  Description of Artificial Sequence: Synthetic peptide
  Seed: LQNSQVYSL
LHNSQVYSI

SEQ ID NO: 37197 - protein, 9 aa, Artificial Sequence
  Description of Artificial Sequence: Synthetic peptide
  Seed: LQNSQVYSL
LHNSQVYSL

SEQ ID NO: 37198 - protein, 9 aa, Artificial Sequence
  Description of Artificial Sequence: Synthetic peptide
  Seed: LQNSQVYSL
LHNSQVYSM

SEQ ID NO: 37199 - protein, 9 aa, Artificial Sequence
  Description of Artificial Sequence: Synthetic peptide
  Seed: LQNSQVYSL
LHNSQVYSF

SEQ ID NO: 37200 - protein, 9 aa, Artificial Sequence
  Description of Artificial Sequence: Synthetic peptide
  Seed: LQNSQVYSL
LHNSQVYSY

SEQ ID NO: 37201 - protein, 9 aa, Artificial Sequence
  Description of Artificial Sequence: Synthetic peptide
  Seed: LQNSQVYSL
LHNSQVYSV

SEQ ID NO: 37202 - protein, 9 aa, Artificial Sequence
  Description of Artificial Sequence: Synthetic peptide
  Seed: LQNSQVYSL
LINSQVYSA

SEQ ID NO: 37203 - protein, 9 aa, Artificial Sequence
  Description of Artificial Sequence: Synthetic peptide
  Seed: LQNSQVYSL
LINSQVYSI

SEQ ID NO: 37204 - protein, 9 aa, Artificial Sequence
  Description of Artificial Sequence: Synthetic peptide
  Seed: LQNSQVYSL
LINSQVYSL

SEQ ID NO: 37205 - protein, 9 aa, Artificial Sequence
  Description of Artificial Sequence: Synthetic peptide
  Seed: LQNSQVYSL
LINSQVYSM

SEQ ID NO: 37206 - protein, 9 aa, Artificial Sequence
  Description of Artificial Sequence: Synthetic peptide
  Seed: LQNSQVYSL
LINSQVYSF

SEQ ID NO: 37207 - protein, 9 aa, Artificial Sequence
  Description of Artificial Sequence: Synthetic peptide
  Seed: LQNSQVYSL
LINSQVYSW

SEQ ID NO: 37208 - protein, 9 aa, Artificial Sequence
  Description of Artificial Sequence: Synthetic peptide
  Seed: LQNSQVYSL
LINSQVYSY

SEQ ID NO: 37209 - protein, 9 aa, Artificial Sequence
  Description of Artificial Sequence: Synthetic peptide
  Seed: LQNSQVYSL
LINSQVYSV

SEQ ID NO: 37210 - protein, 9 aa, Artificial Sequence
  Description of Artificial Sequence: Synthetic peptide
  Seed: LQNSQVYSL
LLNSQVYSA

SEQ ID NO: 37211 - protein, 9 aa, Artificial Sequence
  Description of Artificial Sequence: Synthetic peptide
  Seed: LQNSQVYSL
LLNSQVYSC

SEQ ID NO: 37212 - protein, 11 aa, Artificial Sequence
  Description of Artificial Sequence: Synthetic peptide
  Seed: LQNSQVFSLIR
LRNSQVFSLIR

SEQ ID NO: 37213 - protein, 11 aa, Artificial Sequence
  Description of Artificial Sequence: Synthetic peptide
  Seed: LQNSQVFSLIR
LANSQVFSLIR

SEQ ID NO: 37214 - protein, 10 aa, Artificial Sequence
  Description of Artificial Sequence: Synthetic peptide
  Seed: LQNSQVFSLI
LVNSQVFSLV

SEQ ID NO: 37215 - protein, 10 aa, Artificial Sequence
  Description of Artificial Sequence: Synthetic peptide
  Seed: LQNSQVFSLI
LENSQVFSLW

SEQ ID NO: 37216 - protein, 10 aa, Artificial Sequence
  Description of Artificial Sequence: Synthetic peptide
  Seed: LQNSQVFSLI
LQNSQVFSLH

SEQ ID NO: 37217 - protein, 10 aa, Artificial Sequence
  Description of Artificial Sequence: Synthetic peptide
  Seed: LQNSQVFSLI
LQNSQVFSLL

SEQ ID NO: 37218 - protein, 10 aa, Artificial Sequence
  Description of Artificial Sequence: Synthetic peptide
  Seed: LQNSQVFSLI
LQNSQVFSLM

SEQ ID NO: 37219 - protein, 10 aa, Artificial Sequence
  Description of Artificial Sequence: Synthetic peptide
  Seed: LQNSQVFSLI
LQNSQVFSLF

SEQ ID NO: 37220 - protein, 10 aa, Artificial Sequence
  Description of Artificial Sequence: Synthetic peptide
  Seed: LQNSQVFSLI
LQNSQVFSLW

SEQ ID NO: 37221 - protein, 10 aa, Artificial Sequence
  Description of Artificial Sequence: Synthetic peptide
  Seed: LQNSQVFSLI
LQNSQVFSLY

SEQ ID NO: 37222 - protein, 10 aa, Artificial Sequence
  Description of Artificial Sequence: Synthetic peptide
  Seed: LQNSQVFSLI
LENSQVFSLM

SEQ ID NO: 37223 - protein, 10 aa, Artificial Sequence
  Description of Artificial Sequence: Synthetic peptide
  Seed: LQNSQVFSLI
LENSQVFSLF

SEQ ID NO: 37224 - protein, 10 aa, Artificial Sequence
  Description of Artificial Sequence: Synthetic peptide
  Seed: LQNSQVFSLI
LENSQVFSLY

SEQ ID NO: 37225 - protein, 10 aa, Artificial Sequence
  Description of Artificial Sequence: Synthetic peptide
  Seed: LQNSQVFSLI
LVNSQVFSLL

SEQ ID NO: 37226 - protein, 10 aa, Artificial Sequence
  Description of Artificial Sequence: Synthetic peptide
  Seed: LQNSQVFSLI
LGNSQVFSLF

SEQ ID NO: 37227 - protein, 10 aa, Artificial Sequence
  Description of Artificial Sequence: Synthetic peptide
  Seed: LQNSQVFSLI
LGNSQVFSLY

SEQ ID NO: 37228 - protein, 10 aa, Artificial Sequence
  Description of Artificial Sequence: Synthetic peptide
  Seed: LQNSQVFSLI
LINSQVFSLA

SEQ ID NO: 37229 - protein, 10 aa, Artificial Sequence
  Description of Artificial Sequence: Synthetic peptide
  Seed: LQNSQVFSLI
LINSQVFSLI

SEQ ID NO: 37230 - protein, 10 aa, Artificial Sequence
  Description of Artificial Sequence: Synthetic peptide
  Seed: LQNSQVFSLI
LINSQVFSLL

SEQ ID NO: 37231 - protein, 10 aa, Artificial Sequence
  Description of Artificial Sequence: Synthetic peptide
  Seed: LQNSQVFSLI
LINSQVFSLM

SEQ ID NO: 37232 - protein, 10 aa, Artificial Sequence
  Description of Artificial Sequence: Synthetic peptide
  Seed: LQNSQVFSLI
LINSQVFSLV

SEQ ID NO: 37233 - protein, 10 aa, Artificial Sequence
  Description of Artificial Sequence: Synthetic peptide
  Seed: LQNSQVFSLI
LLNSQVFSLA

SEQ ID NO: 37234 - protein, 10 aa, Artificial Sequence
  Description of Artificial Sequence: Synthetic peptide
  Seed: LQNSQVFSLI
LLNSQVFSLR

SEQ ID NO: 37235 - protein, 10 aa, Artificial Sequence
  Description of Artificial Sequence: Synthetic peptide
  Seed: LQNSQVFSLI
LQNSQVFSLA

SEQ ID NO: 37236 - protein, 10 aa, Artificial Sequence
  Description of Artificial Sequence: Synthetic peptide
  Seed: LQNSQVFSLI
LNNSQVFSLF

SEQ ID NO: 37237 - protein, 10 aa, Artificial Sequence
  Description of Artificial Sequence: Synthetic peptide
  Seed: LQNSQVFSLI
LRNSQVFSLY

SEQ ID NO: 37238 - protein, 10 aa, Artificial Sequence
  Description of Artificial Sequence: Synthetic peptide
  Seed: LQNSQVFSLI
LRNSQVFSLF

SEQ ID NO: 37239 - protein, 9 aa, Artificial Sequence
  Description of Artificial Sequence: Synthetic peptide
  Seed: LQNSQVFSL
LTNSQVFSV

SEQ ID NO: 37240 - protein, 9 aa, Artificial Sequence
  Description of Artificial Sequence: Synthetic peptide
  Seed: LQNSQVFSL
LWNSQVFSF

SEQ ID NO: 37241 - protein, 9 aa, Artificial Sequence
  Description of Artificial Sequence: Synthetic peptide
  Seed: LQNSQVFSL
LYNSQVFSM

SEQ ID NO: 37242 - protein, 9 aa, Artificial Sequence
  Description of Artificial Sequence: Synthetic peptide
  Seed: LQNSQVFSL
LYNSQVFSF

SEQ ID NO: 37243 - protein, 9 aa, Artificial Sequence
  Description of Artificial Sequence: Synthetic peptide
  Seed: LQNSQVFSL
LYNSQVFSY

SEQ ID NO: 37244 - protein, 9 aa, Artificial Sequence
  Description of Artificial Sequence: Synthetic peptide
  Seed: LQNSQVFSL
LVNSQVFSA

SEQ ID NO: 37245 - protein, 9 aa, Artificial Sequence
  Description of Artificial Sequence: Synthetic peptide
  Seed: LQNSQVFSL
LVNSQVFSI

SEQ ID NO: 37246 - protein, 9 aa, Artificial Sequence
  Description of Artificial Sequence: Synthetic peptide
  Seed: LQNSQVFSL
LVNSQVFSL

SEQ ID NO: 37247 - protein, 9 aa, Artificial Sequence
  Description of Artificial Sequence: Synthetic peptide
  Seed: LQNSQVFSL
LVNSQVFSM

SEQ ID NO: 37248 - protein, 9 aa, Artificial Sequence
  Description of Artificial Sequence: Synthetic peptide
  Seed: LQNSQVFSL
LVNSQVFSF

SEQ ID NO: 37249 - protein, 9 aa, Artificial Sequence
  Description of Artificial Sequence: Synthetic peptide
  Seed: LQNSQVFSL
LVNSQVFSW

SEQ ID NO: 37250 - protein, 9 aa, Artificial Sequence
  Description of Artificial Sequence: Synthetic peptide
  Seed: LQNSQVFSL
LVNSQVFSY

SEQ ID NO: 37251 - protein, 9 aa, Artificial Sequence
  Description of Artificial Sequence: Synthetic peptide
  Seed: LQNSQVFSL
LVNSQVFSV

SEQ ID NO: 37252 - protein, 10 aa, Artificial Sequence
  Description of Artificial Sequence: Synthetic peptide
  Seed: LQNSQVFSLI
LANSQVFSLL

SEQ ID NO: 37253 - protein, 10 aa, Artificial Sequence
  Description of Artificial Sequence: Synthetic peptide
  Seed: LQNSQVFSLI
LANSQVFSLF

SEQ ID NO: 37254 - protein, 10 aa, Artificial Sequence
  Description of Artificial Sequence: Synthetic peptide
  Seed: LQNSQVFSLI
LANSQVFSLW

SEQ ID NO: 37255 - protein, 10 aa, Artificial Sequence
  Description of Artificial Sequence: Synthetic peptide
  Seed: LQNSQVFSLI
LANSQVFSLY

SEQ ID NO: 37256 - protein, 10 aa, Artificial Sequence
  Description of Artificial Sequence: Synthetic peptide
  Seed: LQNSQVFSLI
LANSQVFSLV

SEQ ID NO: 37257 - protein, 10 aa, Artificial Sequence
  Description of Artificial Sequence: Synthetic peptide
  Seed: LQNSQVFSLI
LRNSQVFSLM

SEQ ID NO: 37258 - protein, 10 aa, Artificial Sequence
  Description of Artificial Sequence: Synthetic peptide
  Seed: LQNSQVFSLI
LLNSQVFSLN

SEQ ID NO: 37259 - protein, 10 aa, Artificial Sequence
  Description of Artificial Sequence: Synthetic peptide
  Seed: LQNSQVFSLI
LLNSQVFSLD

SEQ ID NO: 37260 - protein, 10 aa, Artificial Sequence
  Description of Artificial Sequence: Synthetic peptide
  Seed: LQNSQVFSLI
LLNSQVFSLC

SEQ ID NO: 37261 - protein, 10 aa, Artificial Sequence
  Description of Artificial Sequence: Synthetic peptide
  Seed: LQNSQVFSLI
LMNSQVFSLG

SEQ ID NO: 37262 - protein, 10 aa, Artificial Sequence
  Description of Artificial Sequence: Synthetic peptide
  Seed: LQNSQVFSLI
LMNSQVFSLI

SEQ ID NO: 37263 - protein, 10 aa, Artificial Sequence
  Description of Artificial Sequence: Synthetic peptide
  Seed: LQNSQVFSLI
LMNSQVFSLL

SEQ ID NO: 37264 - protein, 10 aa, Artificial Sequence
  Description of Artificial Sequence: Synthetic peptide
  Seed: LQNSQVFSLI
LMNSQVFSLK

SEQ ID NO: 37265 - protein, 10 aa, Artificial Sequence
  Description of Artificial Sequence: Synthetic peptide
  Seed: LQNSQVFSLI
LMNSQVFSLM

SEQ ID NO: 37266 - protein, 10 aa, Artificial Sequence
  Description of Artificial Sequence: Synthetic peptide
  Seed: LQNSQVFSLI
LMNSQVFSLF

SEQ ID NO: 37267 - protein, 10 aa, Artificial Sequence
  Description of Artificial Sequence: Synthetic peptide
  Seed: LQNSQVFSLI
LMNSQVFSLP

SEQ ID NO: 37268 - protein, 10 aa, Artificial Sequence
  Description of Artificial Sequence: Synthetic peptide
  Seed: LQNSQVFSLI
LMNSQVFSLS

SEQ ID NO: 37269 - protein, 10 aa, Artificial Sequence
  Description of Artificial Sequence: Synthetic peptide
  Seed: LQNSQVFSLI
LMNSQVFSLT

SEQ ID NO: 37270 - protein, 10 aa, Artificial Sequence
  Description of Artificial Sequence: Synthetic peptide
  Seed: LQNSQVFSLI
LMNSQVFSLW

SEQ ID NO: 37271 - protein, 10 aa, Artificial Sequence
  Description of Artificial Sequence: Synthetic peptide
  Seed: LQNSQVFSLI
LMNSQVFSLY

SEQ ID NO: 37272 - protein, 10 aa, Artificial Sequence
  Description of Artificial Sequence: Synthetic peptide
  Seed: LQNSQVFSLI
LMNSQVFSLV

SEQ ID NO: 37273 - protein, 10 aa, Artificial Sequence
  Description of Artificial Sequence: Synthetic peptide
  Seed: LQNSQVFSLI
LSNSQVFSLL

SEQ ID NO: 37274 - protein, 10 aa, Artificial Sequence
  Description of Artificial Sequence: Synthetic peptide
  Seed: LQNSQVFSLI
LSNSQVFSLV

SEQ ID NO: 37275 - protein, 10 aa, Artificial Sequence
  Description of Artificial Sequence: Synthetic peptide
  Seed: LQNSQVFSLI
LTNSQVFSLA

SEQ ID NO: 37276 - protein, 10 aa, Artificial Sequence
  Description of Artificial Sequence: Synthetic peptide
  Seed: LQNSQVFSLI
LTNSQVFSLI

SEQ ID NO: 37277 - protein, 10 aa, Artificial Sequence
  Description of Artificial Sequence: Synthetic peptide
  Seed: LQNSQVFSLI
LTNSQVFSLL

SEQ ID NO: 37278 - protein, 10 aa, Artificial Sequence
  Description of Artificial Sequence: Synthetic peptide
  Seed: LQNSQVFSLI
LTNSQVFSLV

SEQ ID NO: 37279 - protein, 10 aa, Artificial Sequence
  Description of Artificial Sequence: Synthetic peptide
  Seed: LQNSQVFSLI
LVNSQVFSLA

SEQ ID NO: 37280 - protein, 10 aa, Artificial Sequence
  Description of Artificial Sequence: Synthetic peptide
  Seed: LQNSQVFSLI
LVNSQVFSLI

SEQ ID NO: 37281 - protein, 10 aa, Artificial Sequence
  Description of Artificial Sequence: Synthetic peptide
  Seed: LQNSQVFSLI
LMNSQVFSLH

SEQ ID NO: 37282 - protein, 10 aa, Artificial Sequence
  Description of Artificial Sequence: Synthetic peptide
  Seed: LQNSQVFSLI
LMNSQVFSLE

SEQ ID NO: 37283 - protein, 10 aa, Artificial Sequence
  Description of Artificial Sequence: Synthetic peptide
  Seed: LQNSQVFSLI
LLNSQVFSLQ

SEQ ID NO: 37284 - protein, 10 aa, Artificial Sequence
  Description of Artificial Sequence: Synthetic peptide
  Seed: LQNSQVFSLI
LMNSQVFSLQ

SEQ ID NO: 37285 - protein, 10 aa, Artificial Sequence
  Description of Artificial Sequence: Synthetic peptide
  Seed: LQNSQVFSLI
LLNSQVFSLE

SEQ ID NO: 37286 - protein, 10 aa, Artificial Sequence
  Description of Artificial Sequence: Synthetic peptide
  Seed: LQNSQVFSLI
LLNSQVFSLG

SEQ ID NO: 37287 - protein, 10 aa, Artificial Sequence
  Description of Artificial Sequence: Synthetic peptide
  Seed: LQNSQVFSLI
LLNSQVFSLH

SEQ ID NO: 37288 - protein, 10 aa, Artificial Sequence
  Description of Artificial Sequence: Synthetic peptide
  Seed: LQNSQVFSLI
LLNSQVFSLI

SEQ ID NO: 37289 - protein, 10 aa, Artificial Sequence
  Description of Artificial Sequence: Synthetic peptide
  Seed: LQNSQVFSLI
LLNSQVFSLL

SEQ ID NO: 37290 - protein, 10 aa, Artificial Sequence
  Description of Artificial Sequence: Synthetic peptide
  Seed: LQNSQVFSLI
LLNSQVFSLK

SEQ ID NO: 37291 - protein, 10 aa, Artificial Sequence
  Description of Artificial Sequence: Synthetic peptide
  Seed: LQNSQVFSLI
LLNSQVFSLM

SEQ ID NO: 37292 - protein, 10 aa, Artificial Sequence
  Description of Artificial Sequence: Synthetic peptide
  Seed: LQNSQVFSLI
LLNSQVFSLF

SEQ ID NO: 37293 - protein, 10 aa, Artificial Sequence
  Description of Artificial Sequence: Synthetic peptide
  Seed: LQNSQVFSLI
LLNSQVFSLP

SEQ ID NO: 37294 - protein, 10 aa, Artificial Sequence
  Description of Artificial Sequence: Synthetic peptide
  Seed: LQNSQVFSLI
LLNSQVFSLS

SEQ ID NO: 37295 - protein, 10 aa, Artificial Sequence
  Description of Artificial Sequence: Synthetic peptide
  Seed: LQNSQVFSLI
LLNSQVFSLT

SEQ ID NO: 37296 - protein, 10 aa, Artificial Sequence
  Description of Artificial Sequence: Synthetic peptide
  Seed: LQNSQVFSLI
LLNSQVFSLW

SEQ ID NO: 37297 - protein, 10 aa, Artificial Sequence
  Description of Artificial Sequence: Synthetic peptide
  Seed: LQNSQVFSLI
LLNSQVFSLY

SEQ ID NO: 37298 - protein, 10 aa, Artificial Sequence
  Description of Artificial Sequence: Synthetic peptide
  Seed: LQNSQVFSLI
LLNSQVFSLV

SEQ ID NO: 37299 - protein, 10 aa, Artificial Sequence
  Description of Artificial Sequence: Synthetic peptide
  Seed: LQNSQVFSLI
LMNSQVFSLA

SEQ ID NO: 37300 - protein, 10 aa, Artificial Sequence
  Description of Artificial Sequence: Synthetic peptide
  Seed: LQNSQVFSLI
LMNSQVFSLR

SEQ ID NO: 37301 - protein, 10 aa, Artificial Sequence
  Description of Artificial Sequence: Synthetic peptide
  Seed: LQNSQVFSLI
LMNSQVFSLN

SEQ ID NO: 37302 - protein, 10 aa, Artificial Sequence
  Description of Artificial Sequence: Synthetic peptide
  Seed: LQNSQVFSLI
LMNSQVFSLD

SEQ ID NO: 37303 - protein, 10 aa, Artificial Sequence
  Description of Artificial Sequence: Synthetic peptide
  Seed: LQNSQVFSLI
LMNSQVFSLC

SEQ ID NO: 37304 - protein, 9 aa, Artificial Sequence
  Description of Artificial Sequence: Synthetic peptide
  Seed: LQNSQVYSL
LMNSQVYSS

SEQ ID NO: 37305 - protein, 9 aa, Artificial Sequence
  Description of Artificial Sequence: Synthetic peptide
  Seed: LQNSQVYSL
LMNSQVYSW

SEQ ID NO: 37306 - protein, 8 aa, Artificial Sequence
  Description of Artificial Sequence: Synthetic peptide
  Seed: LRSRYWAI
LFSRYWAL

SEQ ID NO: 37307 - protein, 11 aa, Artificial Sequence
  Description of Artificial Sequence: Synthetic peptide
  Seed: LQNSQVYSLIR
LYNSQVYSLIK

SEQ ID NO: 37308 - protein, 11 aa, Artificial Sequence
  Description of Artificial Sequence: Synthetic peptide
  Seed: LQNSQVYSLIR
LLNSQVYSLIR

SEQ ID NO: 37309 - protein, 11 aa, Artificial Sequence
  Description of Artificial Sequence: Synthetic peptide
  Seed: LQNSQVYSLIR
LMNSQVYSLIR

SEQ ID NO: 37310 - protein, 11 aa, Artificial Sequence
  Description of Artificial Sequence: Synthetic peptide
  Seed: LQNSQVYSLIR
LMNSQVYSLIK

SEQ ID NO: 37311 - protein, 11 aa, Artificial Sequence
  Description of Artificial Sequence: Synthetic peptide
  Seed: LQNSQVYSLIR
LFNSQVYSLIR

SEQ ID NO: 37312 - protein, 11 aa, Artificial Sequence
  Description of Artificial Sequence: Synthetic peptide
  Seed: LQNSQVYSLIR
LFNSQVYSLIK

SEQ ID NO: 37313 - protein, 11 aa, Artificial Sequence
  Description of Artificial Sequence: Synthetic peptide
  Seed: LQNSQVYSLIR
LSNSQVYSLIR

SEQ ID NO: 37314 - protein, 11 aa, Artificial Sequence
  Description of Artificial Sequence: Synthetic peptide
  Seed: LQNSQVYSLIR
LTNSQVYSLIR

SEQ ID NO: 37315 - protein, 11 aa, Artificial Sequence
  Description of Artificial Sequence: Synthetic peptide
  Seed: LQNSQVYSLIR
LWNSQVYSLIR

SEQ ID NO: 37316 - protein, 11 aa, Artificial Sequence
  Description of Artificial Sequence: Synthetic peptide
  Seed: LQNSQVYSLIR
LYNSQVYSLIR

SEQ ID NO: 37317 - protein, 11 aa, Artificial Sequence
  Description of Artificial Sequence: Synthetic peptide
  Seed: LQNSQVYSLIR
LVNSQVYSLIR

SEQ ID NO: 37318 - protein, 11 aa, Artificial Sequence
  Description of Artificial Sequence: Synthetic peptide
  Seed: LRLLSFIRGTK
LMLLSFIRGTK

SEQ ID NO: 37319 - protein, 11 aa, Artificial Sequence
  Description of Artificial Sequence: Synthetic peptide
  Seed: LRLLSFIRGTK
LALLSFIRGTK

SEQ ID NO: 37320 - protein, 11 aa, Artificial Sequence
  Description of Artificial Sequence: Synthetic peptide
  Seed: LRLLSFIRGTK
LRLLSFIRGTR

SEQ ID NO: 37321 - protein, 11 aa, Artificial Sequence
  Description of Artificial Sequence: Synthetic peptide
  Seed: LRLLSFIRGTK
LRLLSFIRGTL

SEQ ID NO: 37322 - protein, 11 aa, Artificial Sequence
  Description of Artificial Sequence: Synthetic peptide
  Seed: LRLLSFIRGTK
LRLLSFIRGTM

SEQ ID NO: 37323 - protein, 11 aa, Artificial Sequence
  Description of Artificial Sequence: Synthetic peptide
  Seed: LRLLSFIRGTK
LRLLSFIRGTF

SEQ ID NO: 37324 - protein, 11 aa, Artificial Sequence
  Description of Artificial Sequence: Synthetic peptide
  Seed: LRLLSFIRGTK
LGLLSFIRGTK

SEQ ID NO: 37325 - protein, 11 aa, Artificial Sequence
  Description of Artificial Sequence: Synthetic peptide
  Seed: LRLLSFIRGTK
LHLLSFIRGTK

SEQ ID NO: 37326 - protein, 11 aa, Artificial Sequence
  Description of Artificial Sequence: Synthetic peptide
  Seed: LRLLSFIRGTK
LILLSFIRGTK

SEQ ID NO: 37327 - protein, 11 aa, Artificial Sequence
  Description of Artificial Sequence: Synthetic peptide
  Seed: LRLLSFIRGTK
LLLLSFIRGTK

SEQ ID NO: 37328 - protein, 11 aa, Artificial Sequence
  Description of Artificial Sequence: Synthetic peptide
  Seed: LQNSQVYSLIR
LINSQVYSLIR

SEQ ID NO: 37329 - protein, 11 aa, Artificial Sequence
  Description of Artificial Sequence: Synthetic peptide
  Seed: LQNSQVYSLIR
LANSQVYSLIR

SEQ ID NO: 37330 - protein, 10 aa, Artificial Sequence
  Description of Artificial Sequence: Synthetic peptide
  Seed: LQNSQVYSLI
LVNSQVYSLV

SEQ ID NO: 37331 - protein, 10 aa, Artificial Sequence
  Description of Artificial Sequence: Synthetic peptide
  Seed: LQNSQVYSLI
LVNSQVYSLY

SEQ ID NO: 37332 - protein, 10 aa, Artificial Sequence
  Description of Artificial Sequence: Synthetic peptide
  Seed: LQNSQVYSLI
LMNSQVYSLP

SEQ ID NO: 37333 - protein, 10 aa, Artificial Sequence
  Description of Artificial Sequence: Synthetic peptide
  Seed: LQNSQVYSLI
LMNSQVYSLS

SEQ ID NO: 37334 - protein, 10 aa, Artificial Sequence
  Description of Artificial Sequence: Synthetic peptide
  Seed: LQNSQVYSLI
LMNSQVYSLT

SEQ ID NO: 37335 - protein, 10 aa, Artificial Sequence
  Description of Artificial Sequence: Synthetic peptide
  Seed: LQNSQVYSLI
LMNSQVYSLW

SEQ ID NO: 37336 - protein, 10 aa, Artificial Sequence
  Description of Artificial Sequence: Synthetic peptide
  Seed: LQNSQVYSLI
LMNSQVYSLY

SEQ ID NO: 37337 - protein, 10 aa, Artificial Sequence
  Description of Artificial Sequence: Synthetic peptide
  Seed: LQNSQVYSLI
LMNSQVYSLV

SEQ ID NO: 37338 - protein, 10 aa, Artificial Sequence
  Description of Artificial Sequence: Synthetic peptide
  Seed: LQNSQVYSLI
LSNSQVYSLF

SEQ ID NO: 37339 - protein, 10 aa, Artificial Sequence
  Description of Artificial Sequence: Synthetic peptide
  Seed: LQNSQVYSLI
LSNSQVYSLW

SEQ ID NO: 37340 - protein, 10 aa, Artificial Sequence
  Description of Artificial Sequence: Synthetic peptide
  Seed: LQNSQVYSLI
LSNSQVYSLY

SEQ ID NO: 37341 - protein, 10 aa, Artificial Sequence
  Description of Artificial Sequence: Synthetic peptide
  Seed: LQNSQVYSLI
LSNSQVYSLV

SEQ ID NO: 37342 - protein, 10 aa, Artificial Sequence
  Description of Artificial Sequence: Synthetic peptide
  Seed: LQNSQVYSLI
LTNSQVYSLL

SEQ ID NO: 37343 - protein, 10 aa, Artificial Sequence
  Description of Artificial Sequence: Synthetic peptide
  Seed: LQNSQVYSLI
LTNSQVYSLF

SEQ ID NO: 37344 - protein, 10 aa, Artificial Sequence
  Description of Artificial Sequence: Synthetic peptide
  Seed: LQNSQVYSLI
LTNSQVYSLW

SEQ ID NO: 37345 - protein, 10 aa, Artificial Sequence
  Description of Artificial Sequence: Synthetic peptide
  Seed: LQNSQVYSLI
LTNSQVYSLV

SEQ ID NO: 37346 - protein, 10 aa, Artificial Sequence
  Description of Artificial Sequence: Synthetic peptide
  Seed: LQNSQVYSLI
LVNSQVYSLA

SEQ ID NO: 37347 - protein, 10 aa, Artificial Sequence
  Description of Artificial Sequence: Synthetic peptide
  Seed: LQNSQVYSLI
LVNSQVYSLI

SEQ ID NO: 37348 - protein, 10 aa, Artificial Sequence
  Description of Artificial Sequence: Synthetic peptide
  Seed: LQNSQVYSLI
LVNSQVYSLL

SEQ ID NO: 37349 - protein, 10 aa, Artificial Sequence
  Description of Artificial Sequence: Synthetic peptide
  Seed: LQNSQVYSLI
LVNSQVYSLF

SEQ ID NO: 37350 - protein, 10 aa, Artificial Sequence
  Description of Artificial Sequence: Synthetic peptide
  Seed: LQNSQVYSLI
LVNSQVYSLW

SEQ ID NO: 37351 - protein, 11 aa, Artificial Sequence
  Description of Artificial Sequence: Synthetic peptide
  Seed: LRLLSFIRGTK
LKLLSFIRGTK

SEQ ID NO: 37352 - protein, 11 aa, Artificial Sequence
  Description of Artificial Sequence: Synthetic peptide
  Seed: LRLLSFIRGTK
LSLLSFIRGTK

SEQ ID NO: 37353 - protein, 9 aa, Artificial Sequence
  Description of Artificial Sequence: Synthetic peptide
  Seed: LQNSQVYSL
LMNSQVYSY

SEQ ID NO: 37354 - protein, 8 aa, Artificial Sequence
  Description of Artificial Sequence: Synthetic peptide
  Seed: LRSRYWAI
LKSRYWAL

SEQ ID NO: 37355 - protein, 8 aa, Artificial Sequence
  Description of Artificial Sequence: Synthetic peptide
  Seed: LRSRYWAI
LISRYWAM

SEQ ID NO: 37356 - protein, 8 aa, Artificial Sequence
  Description of Artificial Sequence: Synthetic peptide
  Seed: LRSRYWAI
LISRYWAV

SEQ ID NO: 37357 - protein, 8 aa, Artificial Sequence
  Description of Artificial Sequence: Synthetic peptide
  Seed: LRSRYWAI
LLSRYWAI

SEQ ID NO: 37358 - protein, 8 aa, Artificial Sequence
  Description of Artificial Sequence: Synthetic peptide
  Seed: LRSRYWAI
LLSRYWAL

SEQ ID NO: 37359 - protein, 8 aa, Artificial Sequence
  Description of Artificial Sequence: Synthetic peptide
  Seed: LRSRYWAI
LLSRYWAM

SEQ ID NO: 37360 - protein, 8 aa, Artificial Sequence
  Description of Artificial Sequence: Synthetic peptide
  Seed: LRSRYWAI
LLSRYWAF

SEQ ID NO: 37361 - protein, 8 aa, Artificial Sequence
  Description of Artificial Sequence: Synthetic peptide
  Seed: LRSRYWAI
LLSRYWAV

SEQ ID NO: 37362 - protein, 8 aa, Artificial Sequence
  Description of Artificial Sequence: Synthetic peptide
  Seed: LRSRYWAI
LKSRYWAA

SEQ ID NO: 37363 - protein, 8 aa, Artificial Sequence
  Description of Artificial Sequence: Synthetic peptide
  Seed: LRSRYWAI
LKSRYWAI

SEQ ID NO: 37364 - protein, 8 aa, Artificial Sequence
  Description of Artificial Sequence: Synthetic peptide
  Seed: LRSRYWAI
LKSRYWAM

SEQ ID NO: 37365 - protein, 11 aa, Artificial Sequence
  Description of Artificial Sequence: Synthetic peptide
  Seed: LRLLSFIRGTK
LTLLSFIRGTK

SEQ ID NO: 37366 - protein, 8 aa, Artificial Sequence
  Description of Artificial Sequence: Synthetic peptide
  Seed: LRSRYWAI
LKSRYWAF

SEQ ID NO: 37367 - protein, 8 aa, Artificial Sequence
  Description of Artificial Sequence: Synthetic peptide
  Seed: LRSRYWAI
LKSRYWAV

SEQ ID NO: 37368 - protein, 8 aa, Artificial Sequence
  Description of Artificial Sequence: Synthetic peptide
  Seed: LRSRYWAI
LMSRYWAA

SEQ ID NO: 37369 - protein, 8 aa, Artificial Sequence
  Description of Artificial Sequence: Synthetic peptide
  Seed: LRSRYWAI
LMSRYWAI

SEQ ID NO: 37370 - protein, 8 aa, Artificial Sequence
  Description of Artificial Sequence: Synthetic peptide
  Seed: LRSRYWAI
LMSRYWAL

SEQ ID NO: 37371 - protein, 8 aa, Artificial Sequence
  Description of Artificial Sequence: Synthetic peptide
  Seed: LRSRYWAI
LMSRYWAM

SEQ ID NO: 37372 - protein, 8 aa, Artificial Sequence
  Description of Artificial Sequence: Synthetic peptide
  Seed: LRSRYWAI
LMSRYWAF

SEQ ID NO: 37373 - protein, 8 aa, Artificial Sequence
  Description of Artificial Sequence: Synthetic peptide
  Seed: LRSRYWAI
LMSRYWAV

SEQ ID NO: 37374 - protein, 8 aa, Artificial Sequence
  Description of Artificial Sequence: Synthetic peptide
  Seed: LRSRYWAI
LFSRYWAI

SEQ ID NO: 37375 - protein, 8 aa, Artificial Sequence
  Description of Artificial Sequence: Synthetic peptide
  Seed: LRSRYWAI
LISRYWAL

SEQ ID NO: 37376 - protein, 8 aa, Artificial Sequence
  Description of Artificial Sequence: Synthetic peptide
  Seed: LRSRYWAI
LISRYWAI

SEQ ID NO: 37377 - protein, 8 aa, Artificial Sequence
  Description of Artificial Sequence: Synthetic peptide
  Seed: LRSRYWAI
LHSRYWAV

SEQ ID NO: 37378 - protein, 8 aa, Artificial Sequence
  Description of Artificial Sequence: Synthetic peptide
  Seed: LRSRYWAI
LHSRYWAF

SEQ ID NO: 37379 - protein, 11 aa, Artificial Sequence
  Description of Artificial Sequence: Synthetic peptide
  Seed: LRLLSFIRGTK
LVLLSFIRGTK

SEQ ID NO: 37380 - protein, 8 aa, Artificial Sequence
  Description of Artificial Sequence: Synthetic peptide
  Seed: LRSRYWAI
LASRYWAI

SEQ ID NO: 37381 - protein, 8 aa, Artificial Sequence
  Description of Artificial Sequence: Synthetic peptide
  Seed: LRSRYWAI
LASRYWAL

SEQ ID NO: 37382 - protein, 8 aa, Artificial Sequence
  Description of Artificial Sequence: Synthetic peptide
  Seed: LRSRYWAI
LASRYWAM

SEQ ID NO: 37383 - protein, 8 aa, Artificial Sequence
  Description of Artificial Sequence: Synthetic peptide
  Seed: LRSRYWAI
LASRYWAV

SEQ ID NO: 37384 - protein, 8 aa, Artificial Sequence
  Description of Artificial Sequence: Synthetic peptide
  Seed: LRSRYWAI
LRSRYWAA

SEQ ID NO: 37385 - protein, 8 aa, Artificial Sequence
  Description of Artificial Sequence: Synthetic peptide
  Seed: LRSRYWAI
LRSRYWAL

SEQ ID NO: 37386 - protein, 8 aa, Artificial Sequence
  Description of Artificial Sequence: Synthetic peptide
  Seed: LRSRYWAI
LRSRYWAM

SEQ ID NO: 37387 - protein, 8 aa, Artificial Sequence
  Description of Artificial Sequence: Synthetic peptide
  Seed: LRSRYWAI
LRSRYWAF

SEQ ID NO: 37388 - protein, 8 aa, Artificial Sequence
  Description of Artificial Sequence: Synthetic peptide
  Seed: LRSRYWAI
LRSRYWAV

SEQ ID NO: 37389 - protein, 8 aa, Artificial Sequence
  Description of Artificial Sequence: Synthetic peptide
  Seed: LRSRYWAI
LNSRYWAL

SEQ ID NO: 37390 - protein, 8 aa, Artificial Sequence
  Description of Artificial Sequence: Synthetic peptide
  Seed: LRSRYWAI
LNSRYWAM

SEQ ID NO: 37391 - protein, 8 aa, Artificial Sequence
  Description of Artificial Sequence: Synthetic peptide
  Seed: LRSRYWAI
LQSRYWAL

SEQ ID NO: 37392 - protein, 8 aa, Artificial Sequence
  Description of Artificial Sequence: Synthetic peptide
  Seed: LRSRYWAI
LQSRYWAM

SEQ ID NO: 37393 - protein, 8 aa, Artificial Sequence
  Description of Artificial Sequence: Synthetic peptide
  Seed: LRSRYWAI
LGSRYWAL

SEQ ID NO: 37394 - protein, 8 aa, Artificial Sequence
  Description of Artificial Sequence: Synthetic peptide
  Seed: LRSRYWAI
LGSRYWAM

SEQ ID NO: 37395 - protein, 8 aa, Artificial Sequence
  Description of Artificial Sequence: Synthetic peptide
  Seed: LRSRYWAI
LHSRYWAI

SEQ ID NO: 37396 - protein, 8 aa, Artificial Sequence
  Description of Artificial Sequence: Synthetic peptide
  Seed: LRSRYWAI
LHSRYWAL

SEQ ID NO: 37397 - protein, 8 aa, Artificial Sequence
  Description of Artificial Sequence: Synthetic peptide
  Seed: LRSRYWAI
LHSRYWAM

SEQ ID NO: 37398 - protein, 10 aa, Artificial Sequence
  Description of Artificial Sequence: Synthetic peptide
  Seed: LQNSQVYSLI
LMNSQVYSLF

SEQ ID NO: 37399 - protein, 10 aa, Artificial Sequence
  Description of Artificial Sequence: Synthetic peptide
  Seed: LQNSQVYSLI
LMNSQVYSLM

SEQ ID NO: 37400 - protein, 10 aa, Artificial Sequence
  Description of Artificial Sequence: Synthetic peptide
  Seed: LQNSQVYSLI
LMNSQVYSLK

SEQ ID NO: 37401 - protein, 10 aa, Artificial Sequence
  Description of Artificial Sequence: Synthetic peptide
  Seed: LQNSQVYSLI
LANSQVYSLV

SEQ ID NO: 37402 - protein, 9 aa, Artificial Sequence
  Description of Artificial Sequence: Synthetic peptide
  Seed: LQNSQVYSL
LVNSQVYSL

SEQ ID NO: 37403 - protein, 9 aa, Artificial Sequence
  Description of Artificial Sequence: Synthetic peptide
  Seed: LQNSQVYSL
LVNSQVYSM

SEQ ID NO: 37404 - protein, 9 aa, Artificial Sequence
  Description of Artificial Sequence: Synthetic peptide
  Seed: LQNSQVYSL
LVNSQVYSF

SEQ ID NO: 37405 - protein, 9 aa, Artificial Sequence
  Description of Artificial Sequence: Synthetic peptide
  Seed: LQNSQVYSL
LVNSQVYSW

SEQ ID NO: 37406 - protein, 9 aa, Artificial Sequence
  Description of Artificial Sequence: Synthetic peptide
  Seed: LQNSQVYSL
LVNSQVYSY

SEQ ID NO: 37407 - protein, 9 aa, Artificial Sequence
  Description of Artificial Sequence: Synthetic peptide
  Seed: LQNSQVYSL
LVNSQVYSV

SEQ ID NO: 37408 - protein, 10 aa, Artificial Sequence
  Description of Artificial Sequence: Synthetic peptide
  Seed: LQNSQVYSLI
LANSQVYSLF

SEQ ID NO: 37409 - protein, 10 aa, Artificial Sequence
  Description of Artificial Sequence: Synthetic peptide
  Seed: LQNSQVYSLI
LANSQVYSLW

SEQ ID NO: 37410 - protein, 10 aa, Artificial Sequence
  Description of Artificial Sequence: Synthetic peptide
  Seed: LQNSQVYSLI
LANSQVYSLY

SEQ ID NO: 37411 - protein, 10 aa, Artificial Sequence
  Description of Artificial Sequence: Synthetic peptide
  Seed: LQNSQVYSLI
LRNSQVYSLF

SEQ ID NO: 37412 - protein, 10 aa, Artificial Sequence
  Description of Artificial Sequence: Synthetic peptide
  Seed: LQNSQVYSLI
LMNSQVYSLL

SEQ ID NO: 37413 - protein, 10 aa, Artificial Sequence
  Description of Artificial Sequence: Synthetic peptide
  Seed: LQNSQVYSLI
LRNSQVYSLY

SEQ ID NO: 37414 - protein, 10 aa, Artificial Sequence
  Description of Artificial Sequence: Synthetic peptide
  Seed: LQNSQVYSLI
LQNSQVYSLA

SEQ ID NO: 37415 - protein, 10 aa, Artificial Sequence
  Description of Artificial Sequence: Synthetic peptide
  Seed: LQNSQVYSLI
LQNSQVYSLH

SEQ ID NO: 37416 - protein, 10 aa, Artificial Sequence
  Description of Artificial Sequence: Synthetic peptide
  Seed: LQNSQVYSLI
LQNSQVYSLL

SEQ ID NO: 37417 - protein, 10 aa, Artificial Sequence
  Description of Artificial Sequence: Synthetic peptide
  Seed: LQNSQVYSLI
LQNSQVYSLM

SEQ ID NO: 37418 - protein, 10 aa, Artificial Sequence
  Description of Artificial Sequence: Synthetic peptide
  Seed: LQNSQVYSLI
LQNSQVYSLF

SEQ ID NO: 37419 - protein, 10 aa, Artificial Sequence
  Description of Artificial Sequence: Synthetic peptide
  Seed: LQNSQVYSLI
LQNSQVYSLW

SEQ ID NO: 37420 - protein, 10 aa, Artificial Sequence
  Description of Artificial Sequence: Synthetic peptide
  Seed: LQNSQVYSLI
LQNSQVYSLY

SEQ ID NO: 37421 - protein, 10 aa, Artificial Sequence
  Description of Artificial Sequence: Synthetic peptide
  Seed: LQNSQVYSLI
LQNSQVYSLV

SEQ ID NO: 37422 - protein, 9 aa, Artificial Sequence
  Description of Artificial Sequence: Synthetic peptide
  Seed: LQNSQVYSL
LVNSQVYSI

SEQ ID NO: 37423 - protein, 9 aa, Artificial Sequence
  Description of Artificial Sequence: Synthetic peptide
  Seed: LQNSQVYSL
LVNSQVYSA

SEQ ID NO: 37424 - protein, 9 aa, Artificial Sequence
  Description of Artificial Sequence: Synthetic peptide
  Seed: LQNSQVYSL
LYNSQVYSF

SEQ ID NO: 37425 - protein, 9 aa, Artificial Sequence
  Description of Artificial Sequence: Synthetic peptide
  Seed: LQNSQVYSL
LTNSQVYSV

SEQ ID NO: 37426 - protein, 9 aa, Artificial Sequence
  Description of Artificial Sequence: Synthetic peptide
  Seed: LQNSQVYSL
LMNSQVYSV

SEQ ID NO: 37427 - protein, 9 aa, Artificial Sequence
  Description of Artificial Sequence: Synthetic peptide
  Seed: LQNSQVYSL
LFNSQVYSF

SEQ ID NO: 37428 - protein, 9 aa, Artificial Sequence
  Description of Artificial Sequence: Synthetic peptide
  Seed: LQNSQVYSL
LFNSQVYSY

SEQ ID NO: 37429 - protein, 9 aa, Artificial Sequence
  Description of Artificial Sequence: Synthetic peptide
  Seed: LQNSQVYSL
LFNSQVYSV

SEQ ID NO: 37430 - protein, 9 aa, Artificial Sequence
  Description of Artificial Sequence: Synthetic peptide
  Seed: LQNSQVYSL
LPNSQVYSL

SEQ ID NO: 37431 - protein, 9 aa, Artificial Sequence
  Description of Artificial Sequence: Synthetic peptide
  Seed: LQNSQVYSL
LPNSQVYSF

SEQ ID NO: 37432 - protein, 9 aa, Artificial Sequence
  Description of Artificial Sequence: Synthetic peptide
  Seed: LQNSQVYSL
LSNSQVYSI

SEQ ID NO: 37433 - protein, 9 aa, Artificial Sequence
  Description of Artificial Sequence: Synthetic peptide
  Seed: LQNSQVYSL
LSNSQVYSL

SEQ ID NO: 37434 - protein, 9 aa, Artificial Sequence
  Description of Artificial Sequence: Synthetic peptide
  Seed: LQNSQVYSL
LSNSQVYSM

SEQ ID NO: 37435 - protein, 9 aa, Artificial Sequence
  Description of Artificial Sequence: Synthetic peptide
  Seed: LQNSQVYSL
LSNSQVYSF

SEQ ID NO: 37436 - protein, 9 aa, Artificial Sequence
  Description of Artificial Sequence: Synthetic peptide
  Seed: LQNSQVYSL
LSNSQVYSW

SEQ ID NO: 37437 - protein, 9 aa, Artificial Sequence
  Description of Artificial Sequence: Synthetic peptide
  Seed: LQNSQVYSL
LSNSQVYSY

SEQ ID NO: 37438 - protein, 9 aa, Artificial Sequence
  Description of Artificial Sequence: Synthetic peptide
  Seed: LQNSQVYSL
LSNSQVYSV

SEQ ID NO: 37439 - protein, 9 aa, Artificial Sequence
  Description of Artificial Sequence: Synthetic peptide
  Seed: LQNSQVYSL
LTNSQVYSI

SEQ ID NO: 37440 - protein, 9 aa, Artificial Sequence
  Description of Artificial Sequence: Synthetic peptide
  Seed: LQNSQVYSL
LTNSQVYSL

SEQ ID NO: 37441 - protein, 9 aa, Artificial Sequence
  Description of Artificial Sequence: Synthetic peptide
  Seed: LQNSQVYSL
LTNSQVYSM

SEQ ID NO: 37442 - protein, 9 aa, Artificial Sequence
  Description of Artificial Sequence: Synthetic peptide
  Seed: LQNSQVYSL
LTNSQVYSF

SEQ ID NO: 37443 - protein, 9 aa, Artificial Sequence
  Description of Artificial Sequence: Synthetic peptide
  Seed: LQNSQVYSL
LTNSQVYSW

SEQ ID NO: 37444 - protein, 9 aa, Artificial Sequence
  Description of Artificial Sequence: Synthetic peptide
  Seed: LQNSQVYSL
LTNSQVYSY

SEQ ID NO: 37445 - protein, 10 aa, Artificial Sequence
  Description of Artificial Sequence: Synthetic peptide
  Seed: LQNSQVYSLI
LENSQVYSLM

SEQ ID NO: 37446 - protein, 10 aa, Artificial Sequence
  Description of Artificial Sequence: Synthetic peptide
  Seed: LQNSQVYSLI
LENSQVYSLF

SEQ ID NO: 37447 - protein, 10 aa, Artificial Sequence
  Description of Artificial Sequence: Synthetic peptide
  Seed: LQNSQVYSLI
LENSQVYSLY

SEQ ID NO: 37448 - protein, 10 aa, Artificial Sequence
  Description of Artificial Sequence: Synthetic peptide
  Seed: LQNSQVYSLI
LLNSQVYSLF

SEQ ID NO: 37449 - protein, 10 aa, Artificial Sequence
  Description of Artificial Sequence: Synthetic peptide
  Seed: LQNSQVYSLI
LLNSQVYSLS

SEQ ID NO: 37450 - protein, 10 aa, Artificial Sequence
  Description of Artificial Sequence: Synthetic peptide
  Seed: LQNSQVYSLI
LLNSQVYSLT

SEQ ID NO: 37451 - protein, 10 aa, Artificial Sequence
  Description of Artificial Sequence: Synthetic peptide
  Seed: LQNSQVYSLI
LLNSQVYSLW

SEQ ID NO: 37452 - protein, 10 aa, Artificial Sequence
  Description of Artificial Sequence: Synthetic peptide
  Seed: LQNSQVYSLI
LLNSQVYSLY

SEQ ID NO: 37453 - protein, 10 aa, Artificial Sequence
  Description of Artificial Sequence: Synthetic peptide
  Seed: LQNSQVYSLI
LLNSQVYSLV

SEQ ID NO: 37454 - protein, 10 aa, Artificial Sequence
  Description of Artificial Sequence: Synthetic peptide
  Seed: LQNSQVYSLI
LKNSQVYSLL

SEQ ID NO: 37455 - protein, 10 aa, Artificial Sequence
  Description of Artificial Sequence: Synthetic peptide
  Seed: LQNSQVYSLI
LKNSQVYSLM

SEQ ID NO: 37456 - protein, 10 aa, Artificial Sequence
  Description of Artificial Sequence: Synthetic peptide
  Seed: LQNSQVYSLI
LKNSQVYSLF

SEQ ID NO: 37457 - protein, 10 aa, Artificial Sequence
  Description of Artificial Sequence: Synthetic peptide
  Seed: LQNSQVYSLI
LKNSQVYSLY

SEQ ID NO: 37458 - protein, 10 aa, Artificial Sequence
  Description of Artificial Sequence: Synthetic peptide
  Seed: LQNSQVYSLI
LMNSQVYSLA

SEQ ID NO: 37459 - protein, 10 aa, Artificial Sequence
  Description of Artificial Sequence: Synthetic peptide
  Seed: LQNSQVYSLI
LMNSQVYSLR

SEQ ID NO: 37460 - protein, 10 aa, Artificial Sequence
  Description of Artificial Sequence: Synthetic peptide
  Seed: LQNSQVYSLI
LMNSQVYSLN

SEQ ID NO: 37461 - protein, 10 aa, Artificial Sequence
  Description of Artificial Sequence: Synthetic peptide
  Seed: LQNSQVYSLI
LMNSQVYSLD

SEQ ID NO: 37462 - protein, 10 aa, Artificial Sequence
  Description of Artificial Sequence: Synthetic peptide
  Seed: LQNSQVYSLI
LMNSQVYSLC

SEQ ID NO: 37463 - protein, 10 aa, Artificial Sequence
  Description of Artificial Sequence: Synthetic peptide
  Seed: LQNSQVYSLI
LMNSQVYSLQ

SEQ ID NO: 37464 - protein, 10 aa, Artificial Sequence
  Description of Artificial Sequence: Synthetic peptide
  Seed: LQNSQVYSLI
LMNSQVYSLE

SEQ ID NO: 37465 - protein, 10 aa, Artificial Sequence
  Description of Artificial Sequence: Synthetic peptide
  Seed: LQNSQVYSLI
LMNSQVYSLG

SEQ ID NO: 37466 - protein, 10 aa, Artificial Sequence
  Description of Artificial Sequence: Synthetic peptide
  Seed: LQNSQVYSLI
LMNSQVYSLH

SEQ ID NO: 37467 - protein, 10 aa, Artificial Sequence
  Description of Artificial Sequence: Synthetic peptide
  Seed: LQNSQVYSLI
LMNSQVYSLI

SEQ ID NO: 37468 - protein, 10 aa, Artificial Sequence
  Description of Artificial Sequence: Synthetic peptide
  Seed: LQNSQVYSLI
LLNSQVYSLP

SEQ ID NO: 37469 - protein, 10 aa, Artificial Sequence
  Description of Artificial Sequence: Synthetic peptide
  Seed: LQNSQVYSLI
LLNSQVYSLM

SEQ ID NO: 37470 - protein, 10 aa, Artificial Sequence
  Description of Artificial Sequence: Synthetic peptide
  Seed: LQNSQVYSLI
LHNSQVYSLM

SEQ ID NO: 37471 - protein, 10 aa, Artificial Sequence
  Description of Artificial Sequence: Synthetic peptide
  Seed: LQNSQVYSLI
LLNSQVYSLK

SEQ ID NO: 37472 - protein, 10 aa, Artificial Sequence
  Description of Artificial Sequence: Synthetic peptide
  Seed: LQNSQVYSLI
LHNSQVYSLF

SEQ ID NO: 37473 - protein, 10 aa, Artificial Sequence
  Description of Artificial Sequence: Synthetic peptide
  Seed: LQNSQVYSLI
LHNSQVYSLY

SEQ ID NO: 37474 - protein, 10 aa, Artificial Sequence
  Description of Artificial Sequence: Synthetic peptide
  Seed: LQNSQVYSLI
LINSQVYSLA

SEQ ID NO: 37475 - protein, 10 aa, Artificial Sequence
  Description of Artificial Sequence: Synthetic peptide
  Seed: LQNSQVYSLI
LINSQVYSLI

SEQ ID NO: 37476 - protein, 10 aa, Artificial Sequence
  Description of Artificial Sequence: Synthetic peptide
  Seed: LQNSQVYSLI
LINSQVYSLL

SEQ ID NO: 37477 - protein, 10 aa, Artificial Sequence
  Description of Artificial Sequence: Synthetic peptide
  Seed: LQNSQVYSLI
LINSQVYSLF

SEQ ID NO: 37478 - protein, 10 aa, Artificial Sequence
  Description of Artificial Sequence: Synthetic peptide
  Seed: LQNSQVYSLI
LINSQVYSLW

SEQ ID NO: 37479 - protein, 10 aa, Artificial Sequence
  Description of Artificial Sequence: Synthetic peptide
  Seed: LQNSQVYSLI
LINSQVYSLV

SEQ ID NO: 37480 - protein, 10 aa, Artificial Sequence
  Description of Artificial Sequence: Synthetic peptide
  Seed: LQNSQVYSLI
LLNSQVYSLA

SEQ ID NO: 37481 - protein, 10 aa, Artificial Sequence
  Description of Artificial Sequence: Synthetic peptide
  Seed: LQNSQVYSLI
LLNSQVYSLR

SEQ ID NO: 37482 - protein, 10 aa, Artificial Sequence
  Description of Artificial Sequence: Synthetic peptide
  Seed: LQNSQVYSLI
LLNSQVYSLN

SEQ ID NO: 37483 - protein, 10 aa, Artificial Sequence
  Description of Artificial Sequence: Synthetic peptide
  Seed: LQNSQVYSLI
LLNSQVYSLD

SEQ ID NO: 37484 - protein, 10 aa, Artificial Sequence
  Description of Artificial Sequence: Synthetic peptide
  Seed: LQNSQVYSLI
LLNSQVYSLC

SEQ ID NO: 37485 - protein, 10 aa, Artificial Sequence
  Description of Artificial Sequence: Synthetic peptide
  Seed: LQNSQVYSLI
LLNSQVYSLQ

SEQ ID NO: 37486 - protein, 10 aa, Artificial Sequence
  Description of Artificial Sequence: Synthetic peptide
  Seed: LQNSQVYSLI
LLNSQVYSLE

SEQ ID NO: 37487 - protein, 10 aa, Artificial Sequence
  Description of Artificial Sequence: Synthetic peptide
  Seed: LQNSQVYSLI
LLNSQVYSLG

SEQ ID NO: 37488 - protein, 10 aa, Artificial Sequence
  Description of Artificial Sequence: Synthetic peptide
  Seed: LQNSQVYSLI
LLNSQVYSLH

SEQ ID NO: 37489 - protein, 10 aa, Artificial Sequence
  Description of Artificial Sequence: Synthetic peptide
  Seed: LQNSQVYSLI
LLNSQVYSLI

SEQ ID NO: 37490 - protein, 10 aa, Artificial Sequence
  Description of Artificial Sequence: Synthetic peptide
  Seed: LQNSQVYSLI
LLNSQVYSLL

SEQ ID NO: 37491 - protein, 9 aa, Artificial Sequence
  Description of Artificial Sequence: Synthetic peptide
  Seed: LVRTGMDPR
LMRTGMDPR

SEQ ID NO: 37492 - protein, 9 aa, Artificial Sequence
  Description of Artificial Sequence: Synthetic peptide
  Seed: LVRTGMDPR
LFRTGMDPR

SEQ ID NO: 37493 - protein, 8 aa, Artificial Sequence
  Description of Artificial Sequence: Synthetic peptide
  Seed: MESSTLEL
MVSSTLEF

SEQ ID NO: 37494 - protein, 10 aa, Artificial Sequence
  Description of Artificial Sequence: Synthetic peptide
  Seed: MASQGTKRSY
MSSQGTKRSW

SEQ ID NO: 37495 - protein, 10 aa, Artificial Sequence
  Description of Artificial Sequence: Synthetic peptide
  Seed: MASQGTKRSY
MPSQGTKRSL

SEQ ID NO: 37496 - protein, 10 aa, Artificial Sequence
  Description of Artificial Sequence: Synthetic peptide
  Seed: MASQGTKRSY
MPSQGTKRSM

SEQ ID NO: 37497 - protein, 10 aa, Artificial Sequence
  Description of Artificial Sequence: Synthetic peptide
  Seed: MASQGTKRSY
MPSQGTKRSF

SEQ ID NO: 37498 - protein, 10 aa, Artificial Sequence
  Description of Artificial Sequence: Synthetic peptide
  Seed: MASQGTKRSY
MPSQGTKRSW

SEQ ID NO: 37499 - protein, 10 aa, Artificial Sequence
  Description of Artificial Sequence: Synthetic peptide
  Seed: MASQGTKRSY
MPSQGTKRSY

SEQ ID NO: 37500 - protein, 10 aa, Artificial Sequence
  Description of Artificial Sequence: Synthetic peptide
  Seed: MASQGTKRSY
MSSQGTKRSI

SEQ ID NO: 37501 - protein, 10 aa, Artificial Sequence
  Description of Artificial Sequence: Synthetic peptide
  Seed: MASQGTKRSY
MSSQGTKRSL

SEQ ID NO: 37502 - protein, 10 aa, Artificial Sequence
  Description of Artificial Sequence: Synthetic peptide
  Seed: MASQGTKRSY
MSSQGTKRSM

SEQ ID NO: 37503 - protein, 10 aa, Artificial Sequence
  Description of Artificial Sequence: Synthetic peptide
  Seed: MASQGTKRSY
MSSQGTKRSF

SEQ ID NO: 37504 - protein, 10 aa, Artificial Sequence
  Description of Artificial Sequence: Synthetic peptide
  Seed: MASQGTKRSY
MSSQGTKRSY

SEQ ID NO: 37505 - protein, 10 aa, Artificial Sequence
  Description of Artificial Sequence: Synthetic peptide
  Seed: MASQGTKRSY
MYSQGTKRSY

SEQ ID NO: 37506 - protein, 10 aa, Artificial Sequence
  Description of Artificial Sequence: Synthetic peptide
  Seed: MASQGTKRSY
MTSQGTKRSL

SEQ ID NO: 37507 - protein, 10 aa, Artificial Sequence
  Description of Artificial Sequence: Synthetic peptide
  Seed: MASQGTKRSY
MTSQGTKRSM

SEQ ID NO: 37508 - protein, 10 aa, Artificial Sequence
  Description of Artificial Sequence: Synthetic peptide
  Seed: MASQGTKRSY
MTSQGTKRSF

SEQ ID NO: 37509 - protein, 10 aa, Artificial Sequence
  Description of Artificial Sequence: Synthetic peptide
  Seed: MASQGTKRSY
MTSQGTKRSW

SEQ ID NO: 37510 - protein, 10 aa, Artificial Sequence
  Description of Artificial Sequence: Synthetic peptide
  Seed: MASQGTKRSY
MTSQGTKRSY

SEQ ID NO: 37511 - protein, 10 aa, Artificial Sequence
  Description of Artificial Sequence: Synthetic peptide
  Seed: MASQGTKRSY
MWSQGTKRSF

SEQ ID NO: 37512 - protein, 10 aa, Artificial Sequence
  Description of Artificial Sequence: Synthetic peptide
  Seed: MASQGTKRSY
MWSQGTKRSW

SEQ ID NO: 37513 - protein, 10 aa, Artificial Sequence
  Description of Artificial Sequence: Synthetic peptide
  Seed: MASQGTKRSY
MWSQGTKRSY

SEQ ID NO: 37514 - protein, 10 aa, Artificial Sequence
  Description of Artificial Sequence: Synthetic peptide
  Seed: MASQGTKRSY
MYSQGTKRSF

SEQ ID NO: 37515 - protein, 10 aa, Artificial Sequence
  Description of Artificial Sequence: Synthetic peptide
  Seed: MASQGTKRSY
MFSQGTKRSY

SEQ ID NO: 37516 - protein, 10 aa, Artificial Sequence
  Description of Artificial Sequence: Synthetic peptide
  Seed: MASQGTKRSY
MFSQGTKRSW

SEQ ID NO: 37517 - protein, 10 aa, Artificial Sequence
  Description of Artificial Sequence: Synthetic peptide
  Seed: MASQGTKRSY
MFSQGTKRSF

SEQ ID NO: 37518 - protein, 10 aa, Artificial Sequence
  Description of Artificial Sequence: Synthetic peptide
  Seed: MASQGTKRSY
MMSQGTKRSY

SEQ ID NO: 37519 - protein, 10 aa, Artificial Sequence
  Description of Artificial Sequence: Synthetic peptide
  Seed: MASQGTKRSY
MHSQGTKRSW

SEQ ID NO: 37520 - protein, 10 aa, Artificial Sequence
  Description of Artificial Sequence: Synthetic peptide
  Seed: MASQGTKRSY
MHSQGTKRSY

SEQ ID NO: 37521 - protein, 10 aa, Artificial Sequence
  Description of Artificial Sequence: Synthetic peptide
  Seed: MASQGTKRSY
MISQGTKRSM

SEQ ID NO: 37522 - protein, 10 aa, Artificial Sequence
  Description of Artificial Sequence: Synthetic peptide
  Seed: MASQGTKRSY
MISQGTKRSF

SEQ ID NO: 37523 - protein, 10 aa, Artificial Sequence
  Description of Artificial Sequence: Synthetic peptide
  Seed: MASQGTKRSY
MISQGTKRSW

SEQ ID NO: 37524 - protein, 10 aa, Artificial Sequence
  Description of Artificial Sequence: Synthetic peptide
  Seed: MASQGTKRSY
MISQGTKRSY

SEQ ID NO: 37525 - protein, 10 aa, Artificial Sequence
  Description of Artificial Sequence: Synthetic peptide
  Seed: MASQGTKRSY
MLSQGTKRSM

SEQ ID NO: 37526 - protein, 10 aa, Artificial Sequence
  Description of Artificial Sequence: Synthetic peptide
  Seed: MASQGTKRSY
MLSQGTKRSF

SEQ ID NO: 37527 - protein, 10 aa, Artificial Sequence
  Description of Artificial Sequence: Synthetic peptide
  Seed: MASQGTKRSY
MLSQGTKRSW

SEQ ID NO: 37528 - protein, 10 aa, Artificial Sequence
  Description of Artificial Sequence: Synthetic peptide
  Seed: MASQGTKRSY
MLSQGTKRSY

SEQ ID NO: 37529 - protein, 10 aa, Artificial Sequence
  Description of Artificial Sequence: Synthetic peptide
  Seed: MASQGTKRSY
MKSQGTKRSL

SEQ ID NO: 37530 - protein, 10 aa, Artificial Sequence
  Description of Artificial Sequence: Synthetic peptide
  Seed: MASQGTKRSY
MKSQGTKRSM

SEQ ID NO: 37531 - protein, 10 aa, Artificial Sequence
  Description of Artificial Sequence: Synthetic peptide
  Seed: MASQGTKRSY
MKSQGTKRSF

SEQ ID NO: 37532 - protein, 10 aa, Artificial Sequence
  Description of Artificial Sequence: Synthetic peptide
  Seed: MASQGTKRSY
MKSQGTKRSW

SEQ ID NO: 37533 - protein, 10 aa, Artificial Sequence
  Description of Artificial Sequence: Synthetic peptide
  Seed: MASQGTKRSY
MKSQGTKRSY

SEQ ID NO: 37534 - protein, 10 aa, Artificial Sequence
  Description of Artificial Sequence: Synthetic peptide
  Seed: MASQGTKRSY
MMSQGTKRSL

SEQ ID NO: 37535 - protein, 10 aa, Artificial Sequence
  Description of Artificial Sequence: Synthetic peptide
  Seed: MASQGTKRSY
MMSQGTKRSM

SEQ ID NO: 37536 - protein, 10 aa, Artificial Sequence
  Description of Artificial Sequence: Synthetic peptide
  Seed: MASQGTKRSY
MMSQGTKRSF

SEQ ID NO: 37537 - protein, 10 aa, Artificial Sequence
  Description of Artificial Sequence: Synthetic peptide
  Seed: MASQGTKRSY
MMSQGTKRSW

SEQ ID NO: 37538 - protein, 10 aa, Artificial Sequence
  Description of Artificial Sequence: Synthetic peptide
  Seed: MASQGTKRSY
MYSQGTKRSW

SEQ ID NO: 37539 - protein, 10 aa, Artificial Sequence
  Description of Artificial Sequence: Synthetic peptide
  Seed: MASQGTKRSY
MVSQGTKRSM

SEQ ID NO: 37540 - protein, 10 aa, Artificial Sequence
  Description of Artificial Sequence: Synthetic peptide
  Seed: MASQGTKRSY
MHSQGTKRSM

SEQ ID NO: 37541 - protein, 10 aa, Artificial Sequence
  Description of Artificial Sequence: Synthetic peptide
  Seed: MCSLMQGSTL
MQSLMQGSTI

SEQ ID NO: 37542 - protein, 10 aa, Artificial Sequence
  Description of Artificial Sequence: Synthetic peptide
  Seed: MCSLMQGSTL
MDSLMQGSTM

SEQ ID NO: 37543 - protein, 10 aa, Artificial Sequence
  Description of Artificial Sequence: Synthetic peptide
  Seed: MCSLMQGSTL
MDSLMQGSTF

SEQ ID NO: 37544 - protein, 10 aa, Artificial Sequence
  Description of Artificial Sequence: Synthetic peptide
  Seed: MCSLMQGSTL
MDSLMQGSTW

SEQ ID NO: 37545 - protein, 10 aa, Artificial Sequence
  Description of Artificial Sequence: Synthetic peptide
  Seed: MCSLMQGSTL
MDSLMQGSTY

SEQ ID NO: 37546 - protein, 10 aa, Artificial Sequence
  Description of Artificial Sequence: Synthetic peptide
  Seed: MCSLMQGSTL
MCSLMQGSTI

SEQ ID NO: 37547 - protein, 10 aa, Artificial Sequence
  Description of Artificial Sequence: Synthetic peptide
  Seed: MCSLMQGSTL
MCSLMQGSTM

SEQ ID NO: 37548 - protein, 10 aa, Artificial Sequence
  Description of Artificial Sequence: Synthetic peptide
  Seed: MCSLMQGSTL
MCSLMQGSTF

SEQ ID NO: 37549 - protein, 10 aa, Artificial Sequence
  Description of Artificial Sequence: Synthetic peptide
  Seed: MCSLMQGSTL
MCSLMQGSTW

SEQ ID NO: 37550 - protein, 10 aa, Artificial Sequence
  Description of Artificial Sequence: Synthetic peptide
  Seed: MCSLMQGSTL
MCSLMQGSTY

SEQ ID NO: 37551 - protein, 10 aa, Artificial Sequence
  Description of Artificial Sequence: Synthetic peptide
  Seed: MCSLMQGSTL
MQSLMQGSTL

SEQ ID NO: 37552 - protein, 10 aa, Artificial Sequence
  Description of Artificial Sequence: Synthetic peptide
  Seed: MASQGTKRSY
MVSQGTKRSF

SEQ ID NO: 37553 - protein, 10 aa, Artificial Sequence
  Description of Artificial Sequence: Synthetic peptide
  Seed: MCSLMQGSTL
MQSLMQGSTM

SEQ ID NO: 37554 - protein, 10 aa, Artificial Sequence
  Description of Artificial Sequence: Synthetic peptide
  Seed: MCSLMQGSTL
MQSLMQGSTF

SEQ ID NO: 37555 - protein, 10 aa, Artificial Sequence
  Description of Artificial Sequence: Synthetic peptide
  Seed: MCSLMQGSTL
MQSLMQGSTW

SEQ ID NO: 37556 - protein, 10 aa, Artificial Sequence
  Description of Artificial Sequence: Synthetic peptide
  Seed: MCSLMQGSTL
MQSLMQGSTY

SEQ ID NO: 37557 - protein, 10 aa, Artificial Sequence
  Description of Artificial Sequence: Synthetic peptide
  Seed: MCSLMQGSTL
MESLMQGSTI

SEQ ID NO: 37558 - protein, 10 aa, Artificial Sequence
  Description of Artificial Sequence: Synthetic peptide
  Seed: MCSLMQGSTL
MESLMQGSTL

SEQ ID NO: 37559 - protein, 10 aa, Artificial Sequence
  Description of Artificial Sequence: Synthetic peptide
  Seed: MCSLMQGSTL
MESLMQGSTM

SEQ ID NO: 37560 - protein, 10 aa, Artificial Sequence
  Description of Artificial Sequence: Synthetic peptide
  Seed: MCSLMQGSTL
MESLMQGSTF

SEQ ID NO: 37561 - protein, 10 aa, Artificial Sequence
  Description of Artificial Sequence: Synthetic peptide
  Seed: MCSLMQGSTL
MESLMQGSTW

SEQ ID NO: 37562 - protein, 10 aa, Artificial Sequence
  Description of Artificial Sequence: Synthetic peptide
  Seed: MCSLMQGSTL
MDSLMQGSTL

SEQ ID NO: 37563 - protein, 10 aa, Artificial Sequence
  Description of Artificial Sequence: Synthetic peptide
  Seed: MCSLMQGSTL
MDSLMQGSTI

SEQ ID NO: 37564 - protein, 10 aa, Artificial Sequence
  Description of Artificial Sequence: Synthetic peptide
  Seed: MCSLMQGSTL
MNSLMQGSTY

SEQ ID NO: 37565 - protein, 10 aa, Artificial Sequence
  Description of Artificial Sequence: Synthetic peptide
  Seed: MCSLMQGSTL
MNSLMQGSTW

SEQ ID NO: 37566 - protein, 10 aa, Artificial Sequence
  Description of Artificial Sequence: Synthetic peptide
  Seed: MASQGTKRSY
MVSQGTKRSW

SEQ ID NO: 37567 - protein, 10 aa, Artificial Sequence
  Description of Artificial Sequence: Synthetic peptide
  Seed: MASQGTKRSY
MVSQGTKRSY

SEQ ID NO: 37568 - protein, 10 aa, Artificial Sequence
  Description of Artificial Sequence: Synthetic peptide
  Seed: MCSLMQGSTL
MASLMQGSTI

SEQ ID NO: 37569 - protein, 10 aa, Artificial Sequence
  Description of Artificial Sequence: Synthetic peptide
  Seed: MCSLMQGSTL
MASLMQGSTL

SEQ ID NO: 37570 - protein, 10 aa, Artificial Sequence
  Description of Artificial Sequence: Synthetic peptide
  Seed: MCSLMQGSTL
MASLMQGSTM

SEQ ID NO: 37571 - protein, 10 aa, Artificial Sequence
  Description of Artificial Sequence: Synthetic peptide
  Seed: MCSLMQGSTL
MASLMQGSTF

SEQ ID NO: 37572 - protein, 10 aa, Artificial Sequence
  Description of Artificial Sequence: Synthetic peptide
  Seed: MCSLMQGSTL
MASLMQGSTW

SEQ ID NO: 37573 - protein, 10 aa, Artificial Sequence
  Description of Artificial Sequence: Synthetic peptide
  Seed: MCSLMQGSTL
MASLMQGSTY

SEQ ID NO: 37574 - protein, 10 aa, Artificial Sequence
  Description of Artificial Sequence: Synthetic peptide
  Seed: MCSLMQGSTL
MASLMQGSTV

SEQ ID NO: 37575 - protein, 10 aa, Artificial Sequence
  Description of Artificial Sequence: Synthetic peptide
  Seed: MCSLMQGSTL
MRSLMQGSTI

SEQ ID NO: 37576 - protein, 10 aa, Artificial Sequence
  Description of Artificial Sequence: Synthetic peptide
  Seed: MCSLMQGSTL
MRSLMQGSTL

SEQ ID NO: 37577 - protein, 10 aa, Artificial Sequence
  Description of Artificial Sequence: Synthetic peptide
  Seed: MCSLMQGSTL
MRSLMQGSTM

SEQ ID NO: 37578 - protein, 10 aa, Artificial Sequence
  Description of Artificial Sequence: Synthetic peptide
  Seed: MCSLMQGSTL
MRSLMQGSTF

SEQ ID NO: 37579 - protein, 10 aa, Artificial Sequence
  Description of Artificial Sequence: Synthetic peptide
  Seed: MCSLMQGSTL
MRSLMQGSTW

SEQ ID NO: 37580 - protein, 10 aa, Artificial Sequence
  Description of Artificial Sequence: Synthetic peptide
  Seed: MCSLMQGSTL
MRSLMQGSTY

SEQ ID NO: 37581 - protein, 10 aa, Artificial Sequence
  Description of Artificial Sequence: Synthetic peptide
  Seed: MCSLMQGSTL
MNSLMQGSTI

SEQ ID NO: 37582 - protein, 10 aa, Artificial Sequence
  Description of Artificial Sequence: Synthetic peptide
  Seed: MCSLMQGSTL
MNSLMQGSTL

SEQ ID NO: 37583 - protein, 10 aa, Artificial Sequence
  Description of Artificial Sequence: Synthetic peptide
  Seed: MCSLMQGSTL
MNSLMQGSTM

SEQ ID NO: 37584 - protein, 10 aa, Artificial Sequence
  Description of Artificial Sequence: Synthetic peptide
  Seed: MCSLMQGSTL
MNSLMQGSTF

SEQ ID NO: 37585 - protein, 10 aa, Artificial Sequence
  Description of Artificial Sequence: Synthetic peptide
  Seed: MASQGTKRSY
MHSQGTKRSF

SEQ ID NO: 37586 - protein, 10 aa, Artificial Sequence
  Description of Artificial Sequence: Synthetic peptide
  Seed: MASQGTKRSY
MGSQGTKRSY

SEQ ID NO: 37587 - protein, 9 aa, Artificial Sequence
  Description of Artificial Sequence: Synthetic peptide
  Seed: LVRTGMDPR
LFRTGMDPK

SEQ ID NO: 37588 - protein, 8 aa, Artificial Sequence
  Description of Artificial Sequence: Synthetic peptide
  Seed: MACNSAAF
MKCNSAAY

SEQ ID NO: 37589 - protein, 8 aa, Artificial Sequence
  Description of Artificial Sequence: Synthetic peptide
  Seed: MACNSAAF
MHCNSAAY

SEQ ID NO: 37590 - protein, 8 aa, Artificial Sequence
  Description of Artificial Sequence: Synthetic peptide
  Seed: MACNSAAF
MICNSAAF

SEQ ID NO: 37591 - protein, 8 aa, Artificial Sequence
  Description of Artificial Sequence: Synthetic peptide
  Seed: MACNSAAF
MICNSAAY

SEQ ID NO: 37592 - protein, 8 aa, Artificial Sequence
  Description of Artificial Sequence: Synthetic peptide
  Seed: MACNSAAF
MLCNSAAM

SEQ ID NO: 37593 - protein, 8 aa, Artificial Sequence
  Description of Artificial Sequence: Synthetic peptide
  Seed: MACNSAAF
MLCNSAAF

SEQ ID NO: 37594 - protein, 8 aa, Artificial Sequence
  Description of Artificial Sequence: Synthetic peptide
  Seed: MACNSAAF
MLCNSAAY

SEQ ID NO: 37595 - protein, 8 aa, Artificial Sequence
  Description of Artificial Sequence: Synthetic peptide
  Seed: MACNSAAF
MKCNSAAL

SEQ ID NO: 37596 - protein, 8 aa, Artificial Sequence
  Description of Artificial Sequence: Synthetic peptide
  Seed: MACNSAAF
MKCNSAAM

SEQ ID NO: 37597 - protein, 8 aa, Artificial Sequence
  Description of Artificial Sequence: Synthetic peptide
  Seed: MACNSAAF
MKCNSAAF

SEQ ID NO: 37598 - protein, 8 aa, Artificial Sequence
  Description of Artificial Sequence: Synthetic peptide
  Seed: MACNSAAF
MMCNSAAL

SEQ ID NO: 37599 - protein, 8 aa, Artificial Sequence
  Description of Artificial Sequence: Synthetic peptide
  Seed: MACNSAAF
MPCNSAAW

SEQ ID NO: 37600 - protein, 8 aa, Artificial Sequence
  Description of Artificial Sequence: Synthetic peptide
  Seed: MACNSAAF
MMCNSAAM

SEQ ID NO: 37601 - protein, 8 aa, Artificial Sequence
  Description of Artificial Sequence: Synthetic peptide
  Seed: MACNSAAF
MMCNSAAF

SEQ ID NO: 37602 - protein, 8 aa, Artificial Sequence
  Description of Artificial Sequence: Synthetic peptide
  Seed: MACNSAAF
MMCNSAAW

SEQ ID NO: 37603 - protein, 8 aa, Artificial Sequence
  Description of Artificial Sequence: Synthetic peptide
  Seed: MACNSAAF
MMCNSAAY

SEQ ID NO: 37604 - protein, 8 aa, Artificial Sequence
  Description of Artificial Sequence: Synthetic peptide
  Seed: MACNSAAF
MFCNSAAM

SEQ ID NO: 37605 - protein, 8 aa, Artificial Sequence
  Description of Artificial Sequence: Synthetic peptide
  Seed: MACNSAAF
MFCNSAAF

SEQ ID NO: 37606 - protein, 8 aa, Artificial Sequence
  Description of Artificial Sequence: Synthetic peptide
  Seed: MACNSAAF
MFCNSAAY

SEQ ID NO: 37607 - protein, 8 aa, Artificial Sequence
  Description of Artificial Sequence: Synthetic peptide
  Seed: MACNSAAF
MPCNSAAL

SEQ ID NO: 37608 - protein, 8 aa, Artificial Sequence
  Description of Artificial Sequence: Synthetic peptide
  Seed: MACNSAAF
MPCNSAAM

SEQ ID NO: 37609 - protein, 8 aa, Artificial Sequence
  Description of Artificial Sequence: Synthetic peptide
  Seed: MACNSAAF
MHCNSAAF

SEQ ID NO: 37610 - protein, 8 aa, Artificial Sequence
  Description of Artificial Sequence: Synthetic peptide
  Seed: MACNSAAF
MHCNSAAM

SEQ ID NO: 37611 - protein, 8 aa, Artificial Sequence
  Description of Artificial Sequence: Synthetic peptide
  Seed: MACNSAAF
MECNSAAY

SEQ ID NO: 37612 - protein, 8 aa, Artificial Sequence
  Description of Artificial Sequence: Synthetic peptide
  Seed: MACNSAAF
MECNSAAF

SEQ ID NO: 37613 - protein, 8 aa, Artificial Sequence
  Description of Artificial Sequence: Synthetic peptide
  Seed: MACHSAAF
MYCHSAAY

SEQ ID NO: 37614 - protein, 8 aa, Artificial Sequence
  Description of Artificial Sequence: Synthetic peptide
  Seed: MACHSAAF
MVCHSAAF

SEQ ID NO: 37615 - protein, 8 aa, Artificial Sequence
  Description of Artificial Sequence: Synthetic peptide
  Seed: MACHSAAF
MVCHSAAY

SEQ ID NO: 37616 - protein, 8 aa, Artificial Sequence
  Description of Artificial Sequence: Synthetic peptide
  Seed: MACNSAAF
MACNSAAL

SEQ ID NO: 37617 - protein, 8 aa, Artificial Sequence
  Description of Artificial Sequence: Synthetic peptide
  Seed: MACNSAAF
MACNSAAM

SEQ ID NO: 37618 - protein, 8 aa, Artificial Sequence
  Description of Artificial Sequence: Synthetic peptide
  Seed: MACNSAAF
MACNSAAY

SEQ ID NO: 37619 - protein, 8 aa, Artificial Sequence
  Description of Artificial Sequence: Synthetic peptide
  Seed: MACNSAAF
MRCNSAAM

SEQ ID NO: 37620 - protein, 8 aa, Artificial Sequence
  Description of Artificial Sequence: Synthetic peptide
  Seed: MACNSAAF
MRCNSAAF

SEQ ID NO: 37621 - protein, 8 aa, Artificial Sequence
  Description of Artificial Sequence: Synthetic peptide
  Seed: MACNSAAF
MRCNSAAY

SEQ ID NO: 37622 - protein, 8 aa, Artificial Sequence
  Description of Artificial Sequence: Synthetic peptide
  Seed: MACNSAAF
MNCNSAAF

SEQ ID NO: 37623 - protein, 8 aa, Artificial Sequence
  Description of Artificial Sequence: Synthetic peptide
  Seed: MACNSAAF
MNCNSAAY

SEQ ID NO: 37624 - protein, 8 aa, Artificial Sequence
  Description of Artificial Sequence: Synthetic peptide
  Seed: MACNSAAF
MQCNSAAI

SEQ ID NO: 37625 - protein, 8 aa, Artificial Sequence
  Description of Artificial Sequence: Synthetic peptide
  Seed: MACNSAAF
MQCNSAAL

SEQ ID NO: 37626 - protein, 8 aa, Artificial Sequence
  Description of Artificial Sequence: Synthetic peptide
  Seed: MACNSAAF
MQCNSAAM

SEQ ID NO: 37627 - protein, 8 aa, Artificial Sequence
  Description of Artificial Sequence: Synthetic peptide
  Seed: MACNSAAF
MQCNSAAF

SEQ ID NO: 37628 - protein, 8 aa, Artificial Sequence
  Description of Artificial Sequence: Synthetic peptide
  Seed: MACNSAAF
MQCNSAAW

SEQ ID NO: 37629 - protein, 8 aa, Artificial Sequence
  Description of Artificial Sequence: Synthetic peptide
  Seed: MACNSAAF
MQCNSAAY

SEQ ID NO: 37630 - protein, 8 aa, Artificial Sequence
  Description of Artificial Sequence: Synthetic peptide
  Seed: MACNSAAF
MQCNSAAV

SEQ ID NO: 37631 - protein, 8 aa, Artificial Sequence
  Description of Artificial Sequence: Synthetic peptide
  Seed: MACNSAAF
MECNSAAM

SEQ ID NO: 37632 - protein, 8 aa, Artificial Sequence
  Description of Artificial Sequence: Synthetic peptide
  Seed: MACNSAAF
MPCNSAAF

SEQ ID NO: 37633 - protein, 8 aa, Artificial Sequence
  Description of Artificial Sequence: Synthetic peptide
  Seed: MACNSAAF
MPCNSAAY

SEQ ID NO: 37634 - protein, 10 aa, Artificial Sequence
  Description of Artificial Sequence: Synthetic peptide
  Seed: MASQGTKRSY
MGSQGTKRSW

SEQ ID NO: 37635 - protein, 10 aa, Artificial Sequence
  Description of Artificial Sequence: Synthetic peptide
  Seed: MASQGTKRSY
MQSQGTKRSI

SEQ ID NO: 37636 - protein, 10 aa, Artificial Sequence
  Description of Artificial Sequence: Synthetic peptide
  Seed: MASQGTKRSY
MNSQGTKRSW

SEQ ID NO: 37637 - protein, 10 aa, Artificial Sequence
  Description of Artificial Sequence: Synthetic peptide
  Seed: MASQGTKRSY
MNSQGTKRSY

SEQ ID NO: 37638 - protein, 10 aa, Artificial Sequence
  Description of Artificial Sequence: Synthetic peptide
  Seed: MASQGTKRSY
MDSQGTKRSF

SEQ ID NO: 37639 - protein, 10 aa, Artificial Sequence
  Description of Artificial Sequence: Synthetic peptide
  Seed: MASQGTKRSY
MDSQGTKRSW

SEQ ID NO: 37640 - protein, 10 aa, Artificial Sequence
  Description of Artificial Sequence: Synthetic peptide
  Seed: MASQGTKRSY
MDSQGTKRSY

SEQ ID NO: 37641 - protein, 10 aa, Artificial Sequence
  Description of Artificial Sequence: Synthetic peptide
  Seed: MASQGTKRSY
MCSQGTKRSF

SEQ ID NO: 37642 - protein, 10 aa, Artificial Sequence
  Description of Artificial Sequence: Synthetic peptide
  Seed: MASQGTKRSY
MCSQGTKRSW

SEQ ID NO: 37643 - protein, 10 aa, Artificial Sequence
  Description of Artificial Sequence: Synthetic peptide
  Seed: MASQGTKRSY
MCSQGTKRSY

SEQ ID NO: 37644 - protein, 10 aa, Artificial Sequence
  Description of Artificial Sequence: Synthetic peptide
  Seed: MASQGTKRSY
MQSQGTKRSH

SEQ ID NO: 37645 - protein, 10 aa, Artificial Sequence
  Description of Artificial Sequence: Synthetic peptide
  Seed: MASQGTKRSY
MQSQGTKRSL

SEQ ID NO: 37646 - protein, 8 aa, Artificial Sequence
  Description of Artificial Sequence: Synthetic peptide
  Seed: MACNSAAF
MSCNSAAL

SEQ ID NO: 37647 - protein, 10 aa, Artificial Sequence
  Description of Artificial Sequence: Synthetic peptide
  Seed: MASQGTKRSY
MQSQGTKRSM

SEQ ID NO: 37648 - protein, 10 aa, Artificial Sequence
  Description of Artificial Sequence: Synthetic peptide
  Seed: MASQGTKRSY
MQSQGTKRSF

SEQ ID NO: 37649 - protein, 10 aa, Artificial Sequence
  Description of Artificial Sequence: Synthetic peptide
  Seed: MASQGTKRSY
MQSQGTKRSW

SEQ ID NO: 37650 - protein, 10 aa, Artificial Sequence
  Description of Artificial Sequence: Synthetic peptide
  Seed: MASQGTKRSY
MQSQGTKRSY

SEQ ID NO: 37651 - protein, 10 aa, Artificial Sequence
  Description of Artificial Sequence: Synthetic peptide
  Seed: MASQGTKRSY
MESQGTKRSM

SEQ ID NO: 37652 - protein, 10 aa, Artificial Sequence
  Description of Artificial Sequence: Synthetic peptide
  Seed: MASQGTKRSY
MESQGTKRSF

SEQ ID NO: 37653 - protein, 10 aa, Artificial Sequence
  Description of Artificial Sequence: Synthetic peptide
  Seed: MASQGTKRSY
MESQGTKRSW

SEQ ID NO: 37654 - protein, 10 aa, Artificial Sequence
  Description of Artificial Sequence: Synthetic peptide
  Seed: MASQGTKRSY
MESQGTKRSY

SEQ ID NO: 37655 - protein, 10 aa, Artificial Sequence
  Description of Artificial Sequence: Synthetic peptide
  Seed: MASQGTKRSY
MGSQGTKRSF

SEQ ID NO: 37656 - protein, 10 aa, Artificial Sequence
  Description of Artificial Sequence: Synthetic peptide
  Seed: MASQGTKRSY
MNSQGTKRSF

SEQ ID NO: 37657 - protein, 10 aa, Artificial Sequence
  Description of Artificial Sequence: Synthetic peptide
  Seed: MASQGTKRSY
MRSQGTKRSY

SEQ ID NO: 37658 - protein, 10 aa, Artificial Sequence
  Description of Artificial Sequence: Synthetic peptide
  Seed: MASQGTKRSY
MRSQGTKRSW

SEQ ID NO: 37659 - protein, 10 aa, Artificial Sequence
  Description of Artificial Sequence: Synthetic peptide
  Seed: MASQGTKRSY
MRSQGTKRSF

SEQ ID NO: 37660 - protein, 8 aa, Artificial Sequence
  Description of Artificial Sequence: Synthetic peptide
  Seed: MACNSAAF
MSCNSAAM

SEQ ID NO: 37661 - protein, 8 aa, Artificial Sequence
  Description of Artificial Sequence: Synthetic peptide
  Seed: MACNSAAF
MSCNSAAF

SEQ ID NO: 37662 - protein, 8 aa, Artificial Sequence
  Description of Artificial Sequence: Synthetic peptide
  Seed: MACNSAAF
MSCNSAAY

SEQ ID NO: 37663 - protein, 8 aa, Artificial Sequence
  Description of Artificial Sequence: Synthetic peptide
  Seed: MACNSAAF
MTCNSAAL

SEQ ID NO: 37664 - protein, 8 aa, Artificial Sequence
  Description of Artificial Sequence: Synthetic peptide
  Seed: MACNSAAF
MTCNSAAM

SEQ ID NO: 37665 - protein, 8 aa, Artificial Sequence
  Description of Artificial Sequence: Synthetic peptide
  Seed: MACNSAAF
MTCNSAAF

SEQ ID NO: 37666 - protein, 8 aa, Artificial Sequence
  Description of Artificial Sequence: Synthetic peptide
  Seed: MACNSAAF
MTCNSAAY

SEQ ID NO: 37667 - protein, 8 aa, Artificial Sequence
  Description of Artificial Sequence: Synthetic peptide
  Seed: MACNSAAF
MWCNSAAF

SEQ ID NO: 37668 - protein, 8 aa, Artificial Sequence
  Description of Artificial Sequence: Synthetic peptide
  Seed: MACNSAAF
MWCNSAAY

SEQ ID NO: 37669 - protein, 8 aa, Artificial Sequence
  Description of Artificial Sequence: Synthetic peptide
  Seed: MACNSAAF
MYCNSAAM

SEQ ID NO: 37670 - protein, 8 aa, Artificial Sequence
  Description of Artificial Sequence: Synthetic peptide
  Seed: MACNSAAF
MYCNSAAF

SEQ ID NO: 37671 - protein, 8 aa, Artificial Sequence
  Description of Artificial Sequence: Synthetic peptide
  Seed: MACNSAAF
MYCNSAAY

SEQ ID NO: 37672 - protein, 8 aa, Artificial Sequence
  Description of Artificial Sequence: Synthetic peptide
  Seed: MACNSAAF
MVCNSAAF

SEQ ID NO: 37673 - protein, 8 aa, Artificial Sequence
  Description of Artificial Sequence: Synthetic peptide
  Seed: MACNSAAF
MVCNSAAY

SEQ ID NO: 37674 - protein, 10 aa, Artificial Sequence
  Description of Artificial Sequence: Synthetic peptide
  Seed: MASQGTKRSY
MASQGTKRSL

SEQ ID NO: 37675 - protein, 10 aa, Artificial Sequence
  Description of Artificial Sequence: Synthetic peptide
  Seed: MASQGTKRSY
MASQGTKRSM

SEQ ID NO: 37676 - protein, 10 aa, Artificial Sequence
  Description of Artificial Sequence: Synthetic peptide
  Seed: MASQGTKRSY
MASQGTKRSF

SEQ ID NO: 37677 - protein, 10 aa, Artificial Sequence
  Description of Artificial Sequence: Synthetic peptide
  Seed: MASQGTKRSY
MASQGTKRSW

SEQ ID NO: 37678 - protein, 10 aa, Artificial Sequence
  Description of Artificial Sequence: Synthetic peptide
  Seed: MASQGTKRSY
MRSQGTKRSM

SEQ ID NO: 37679 - protein, 10 aa, Artificial Sequence
  Description of Artificial Sequence: Synthetic peptide
  Seed: MCSLMQGSTL
MESLMQGSTY

SEQ ID NO: 37680 - protein, 10 aa, Artificial Sequence
  Description of Artificial Sequence: Synthetic peptide
  Seed: MCSLMQGSTL
MGSLMQGSTI

SEQ ID NO: 37681 - protein, 10 aa, Artificial Sequence
  Description of Artificial Sequence: Synthetic peptide
  Seed: MCSLMQGSTL
MGSLMQGSTL

SEQ ID NO: 37682 - protein, 9 aa, Artificial Sequence
  Description of Artificial Sequence: Synthetic peptide
  Seed: MDSSTLELR
MLSSTLELY

SEQ ID NO: 37683 - protein, 9 aa, Artificial Sequence
  Description of Artificial Sequence: Synthetic peptide
  Seed: MDSSTLELR
MKSSTLELR

SEQ ID NO: 37684 - protein, 9 aa, Artificial Sequence
  Description of Artificial Sequence: Synthetic peptide
  Seed: MDSSTLELR
MMSSTLELR

SEQ ID NO: 37685 - protein, 9 aa, Artificial Sequence
  Description of Artificial Sequence: Synthetic peptide
  Seed: MDSSTLELR
MMSSTLELK

SEQ ID NO: 37686 - protein, 9 aa, Artificial Sequence
  Description of Artificial Sequence: Synthetic peptide
  Seed: MDSSTLELR
MMSSTLELY

SEQ ID NO: 37687 - protein, 9 aa, Artificial Sequence
  Description of Artificial Sequence: Synthetic peptide
  Seed: MDSSTLELR
MFSSTLELR

SEQ ID NO: 37688 - protein, 9 aa, Artificial Sequence
  Description of Artificial Sequence: Synthetic peptide
  Seed: MDSSTLELR
MFSSTLELK

SEQ ID NO: 37689 - protein, 9 aa, Artificial Sequence
  Description of Artificial Sequence: Synthetic peptide
  Seed: MDSSTLELR
MPSSTLELR

SEQ ID NO: 37690 - protein, 9 aa, Artificial Sequence
  Description of Artificial Sequence: Synthetic peptide
  Seed: MDSSTLELR
MPSSTLELK

SEQ ID NO: 37691 - protein, 9 aa, Artificial Sequence
  Description of Artificial Sequence: Synthetic peptide
  Seed: MDSSTLELR
MSSSTLELK

SEQ ID NO: 37692 - protein, 9 aa, Artificial Sequence
  Description of Artificial Sequence: Synthetic peptide
  Seed: MDSSTLELR
MYSSTLELR

SEQ ID NO: 37693 - protein, 9 aa, Artificial Sequence
  Description of Artificial Sequence: Synthetic peptide
  Seed: MDSSTLELR
MSSSTLELY

SEQ ID NO: 37694 - protein, 9 aa, Artificial Sequence
  Description of Artificial Sequence: Synthetic peptide
  Seed: MDSSTLELR
MTSSTLELR

SEQ ID NO: 37695 - protein, 9 aa, Artificial Sequence
  Description of Artificial Sequence: Synthetic peptide
  Seed: MDSSTLELR
MTSSTLELQ

SEQ ID NO: 37696 - protein, 9 aa, Artificial Sequence
  Description of Artificial Sequence: Synthetic peptide
  Seed: MDSSTLELR
MTSSTLELH

SEQ ID NO: 37697 - protein, 9 aa, Artificial Sequence
  Description of Artificial Sequence: Synthetic peptide
  Seed: MDSSTLELR
MTSSTLELK

SEQ ID NO: 37698 - protein, 9 aa, Artificial Sequence
  Description of Artificial Sequence: Synthetic peptide
  Seed: MDSSTLELR
MTSSTLELM

SEQ ID NO: 37699 - protein, 9 aa, Artificial Sequence
  Description of Artificial Sequence: Synthetic peptide
  Seed: MDSSTLELR
MTSSTLELF

SEQ ID NO: 37700 - protein, 9 aa, Artificial Sequence
  Description of Artificial Sequence: Synthetic peptide
  Seed: MDSSTLELR
MTSSTLELY

SEQ ID NO: 37701 - protein, 9 aa, Artificial Sequence
  Description of Artificial Sequence: Synthetic peptide
  Seed: MDSSTLELR
MWSSTLELR

SEQ ID NO: 37702 - protein, 9 aa, Artificial Sequence
  Description of Artificial Sequence: Synthetic peptide
  Seed: MDSSTLELR
MLSSTLELK

SEQ ID NO: 37703 - protein, 9 aa, Artificial Sequence
  Description of Artificial Sequence: Synthetic peptide
  Seed: MDSSTLELR
MLSSTLELR

SEQ ID NO: 37704 - protein, 9 aa, Artificial Sequence
  Description of Artificial Sequence: Synthetic peptide
  Seed: MDSSTLELR
MISSTLELY

SEQ ID NO: 37705 - protein, 9 aa, Artificial Sequence
  Description of Artificial Sequence: Synthetic peptide
  Seed: MDSSTLELR
MISSTLELM

SEQ ID NO: 37706 - protein, 10 aa, Artificial Sequence
  Description of Artificial Sequence: Synthetic peptide
  Seed: MCTELKLSDY
MWTELKLSDY

SEQ ID NO: 37707 - protein, 10 aa, Artificial Sequence
  Description of Artificial Sequence: Synthetic peptide
  Seed: MCTELKLSDY
MYTELKLSDY

SEQ ID NO: 37708 - protein, 10 aa, Artificial Sequence
  Description of Artificial Sequence: Synthetic peptide
  Seed: MCTELKLSDY
MVTELKLSDY

SEQ ID NO: 37709 - protein, 9 aa, Artificial Sequence
  Description of Artificial Sequence: Synthetic peptide
  Seed: MDSSTLELR
MASSTLELR

SEQ ID NO: 37710 - protein, 9 aa, Artificial Sequence
  Description of Artificial Sequence: Synthetic peptide
  Seed: MDSSTLELR
MASSTLELK

SEQ ID NO: 37711 - protein, 9 aa, Artificial Sequence
  Description of Artificial Sequence: Synthetic peptide
  Seed: MDSSTLELR
MASSTLELY

SEQ ID NO: 37712 - protein, 9 aa, Artificial Sequence
  Description of Artificial Sequence: Synthetic peptide
  Seed: MDSSTLELR
MRSSTLELR

SEQ ID NO: 37713 - protein, 9 aa, Artificial Sequence
  Description of Artificial Sequence: Synthetic peptide
  Seed: MDSSTLELR
MNSSTLELK

SEQ ID NO: 37714 - protein, 9 aa, Artificial Sequence
  Description of Artificial Sequence: Synthetic peptide
  Seed: MDSSTLELR
MCSSTLELR

SEQ ID NO: 37715 - protein, 9 aa, Artificial Sequence
  Description of Artificial Sequence: Synthetic peptide
  Seed: MDSSTLELR
MCSSTLELK

SEQ ID NO: 37716 - protein, 9 aa, Artificial Sequence
  Description of Artificial Sequence: Synthetic peptide
  Seed: MDSSTLELR
MQSSTLELR

SEQ ID NO: 37717 - protein, 9 aa, Artificial Sequence
  Description of Artificial Sequence: Synthetic peptide
  Seed: MDSSTLELR
MQSSTLELK

SEQ ID NO: 37718 - protein, 9 aa, Artificial Sequence
  Description of Artificial Sequence: Synthetic peptide
  Seed: MDSSTLELR
MGSSTLELK

SEQ ID NO: 37719 - protein, 9 aa, Artificial Sequence
  Description of Artificial Sequence: Synthetic peptide
  Seed: MDSSTLELR
MHSSTLELR

SEQ ID NO: 37720 - protein, 9 aa, Artificial Sequence
  Description of Artificial Sequence: Synthetic peptide
  Seed: MDSSTLELR
MISSTLELR

SEQ ID NO: 37721 - protein, 9 aa, Artificial Sequence
  Description of Artificial Sequence: Synthetic peptide
  Seed: MDSSTLELR
MISSTLELK

SEQ ID NO: 37722 - protein, 9 aa, Artificial Sequence
  Description of Artificial Sequence: Synthetic peptide
  Seed: MDSSTLELR
MWSSTLELK

SEQ ID NO: 37723 - protein, 9 aa, Artificial Sequence
  Description of Artificial Sequence: Synthetic peptide
  Seed: MDSSTLELR
MYSSTLELK

SEQ ID NO: 37724 - protein, 10 aa, Artificial Sequence
  Description of Artificial Sequence: Synthetic peptide
  Seed: MCSLMQGSTL
MGSLMQGSTM

SEQ ID NO: 37725 - protein, 8 aa, Artificial Sequence
  Description of Artificial Sequence: Synthetic peptide
  Seed: MESSTLEL
MSSSTLEI

SEQ ID NO: 37726 - protein, 11 aa, Artificial Sequence
  Description of Artificial Sequence: Synthetic peptide
  Seed: MESARPEDVSF
MMSARPEDVSF

SEQ ID NO: 37727 - protein, 11 aa, Artificial Sequence
  Description of Artificial Sequence: Synthetic peptide
  Seed: MESARPEDVSF
MMSARPEDVSY

SEQ ID NO: 37728 - protein, 8 aa, Artificial Sequence
  Description of Artificial Sequence: Synthetic peptide
  Seed: MESSTLEL
MASSTLEI

SEQ ID NO: 37729 - protein, 8 aa, Artificial Sequence
  Description of Artificial Sequence: Synthetic peptide
  Seed: MESSTLEL
MASSTLEL

SEQ ID NO: 37730 - protein, 8 aa, Artificial Sequence
  Description of Artificial Sequence: Synthetic peptide
  Seed: MESSTLEL
MASSTLEM

SEQ ID NO: 37731 - protein, 8 aa, Artificial Sequence
  Description of Artificial Sequence: Synthetic peptide
  Seed: MESSTLEL
MASSTLEF

SEQ ID NO: 37732 - protein, 8 aa, Artificial Sequence
  Description of Artificial Sequence: Synthetic peptide
  Seed: MESSTLEL
MASSTLEY

SEQ ID NO: 37733 - protein, 8 aa, Artificial Sequence
  Description of Artificial Sequence: Synthetic peptide
  Seed: MESSTLEL
MASSTLEV

SEQ ID NO: 37734 - protein, 8 aa, Artificial Sequence
  Description of Artificial Sequence: Synthetic peptide
  Seed: MESSTLEL
MMSSTLEM

SEQ ID NO: 37735 - protein, 8 aa, Artificial Sequence
  Description of Artificial Sequence: Synthetic peptide
  Seed: MESSTLEL
MSSSTLEM

SEQ ID NO: 37736 - protein, 8 aa, Artificial Sequence
  Description of Artificial Sequence: Synthetic peptide
  Seed: MESSTLEL
MSSSTLEF

SEQ ID NO: 37737 - protein, 8 aa, Artificial Sequence
  Description of Artificial Sequence: Synthetic peptide
  Seed: MESSTLEL
MSSSTLEY

SEQ ID NO: 37738 - protein, 8 aa, Artificial Sequence
  Description of Artificial Sequence: Synthetic peptide
  Seed: MESSTLEL
MSSSTLEV

SEQ ID NO: 37739 - protein, 8 aa, Artificial Sequence
  Description of Artificial Sequence: Synthetic peptide
  Seed: MESSTLEL
MTSSTLEL

SEQ ID NO: 37740 - protein, 8 aa, Artificial Sequence
  Description of Artificial Sequence: Synthetic peptide
  Seed: MESSTLEL
MTSSTLEM

SEQ ID NO: 37741 - protein, 8 aa, Artificial Sequence
  Description of Artificial Sequence: Synthetic peptide
  Seed: MESSTLEL
MTSSTLEF

SEQ ID NO: 37742 - protein, 8 aa, Artificial Sequence
  Description of Artificial Sequence: Synthetic peptide
  Seed: MESSTLEL
MTSSTLEY

SEQ ID NO: 37743 - protein, 11 aa, Artificial Sequence
  Description of Artificial Sequence: Synthetic peptide
  Seed: MESARPEDVSF
MMSARPEDVSM

SEQ ID NO: 37744 - protein, 11 aa, Artificial Sequence
  Description of Artificial Sequence: Synthetic peptide
  Seed: MESARPEDVSF
MKSARPEDVSY

SEQ ID NO: 37745 - protein, 11 aa, Artificial Sequence
  Description of Artificial Sequence: Synthetic peptide
  Seed: MESARPEDVSF
MKSARPEDVSF

SEQ ID NO: 37746 - protein, 11 aa, Artificial Sequence
  Description of Artificial Sequence: Synthetic peptide
  Seed: MESARPEDVSF
MKSARPEDVSM

SEQ ID NO: 37747 - protein, 9 aa, Artificial Sequence
  Description of Artificial Sequence: Synthetic peptide
  Seed: MDSSTLELR
MVSSTLELQ

SEQ ID NO: 37748 - protein, 9 aa, Artificial Sequence
  Description of Artificial Sequence: Synthetic peptide
  Seed: MDSSTLELR
MVSSTLELH

SEQ ID NO: 37749 - protein, 9 aa, Artificial Sequence
  Description of Artificial Sequence: Synthetic peptide
  Seed: MDSSTLELR
MVSSTLELK

SEQ ID NO: 37750 - protein, 9 aa, Artificial Sequence
  Description of Artificial Sequence: Synthetic peptide
  Seed: MDSSTLELR
MVSSTLELM

SEQ ID NO: 37751 - protein, 9 aa, Artificial Sequence
  Description of Artificial Sequence: Synthetic peptide
  Seed: MDSSTLELR
MVSSTLELF

SEQ ID NO: 37752 - protein, 9 aa, Artificial Sequence
  Description of Artificial Sequence: Synthetic peptide
  Seed: MDSSTLELR
MVSSTLELY

SEQ ID NO: 37753 - protein, 11 aa, Artificial Sequence
  Description of Artificial Sequence: Synthetic peptide
  Seed: MESARPEDVSF
MASARPEDVSF

SEQ ID NO: 37754 - protein, 11 aa, Artificial Sequence
  Description of Artificial Sequence: Synthetic peptide
  Seed: MESARPEDVSF
MASARPEDVSY

SEQ ID NO: 37755 - protein, 11 aa, Artificial Sequence
  Description of Artificial Sequence: Synthetic peptide
  Seed: MESARPEDVSF
MRSARPEDVSF

SEQ ID NO: 37756 - protein, 11 aa, Artificial Sequence
  Description of Artificial Sequence: Synthetic peptide
  Seed: MESARPEDVSF
MRSARPEDVSY

SEQ ID NO: 37757 - protein, 11 aa, Artificial Sequence
  Description of Artificial Sequence: Synthetic peptide
  Seed: MESARPEDVSF
MQSARPEDVSL

SEQ ID NO: 37758 - protein, 11 aa, Artificial Sequence
  Description of Artificial Sequence: Synthetic peptide
  Seed: MESARPEDVSF
MQSARPEDVSM

SEQ ID NO: 37759 - protein, 11 aa, Artificial Sequence
  Description of Artificial Sequence: Synthetic peptide
  Seed: MESARPEDVSF
MQSARPEDVSF

SEQ ID NO: 37760 - protein, 11 aa, Artificial Sequence
  Description of Artificial Sequence: Synthetic peptide
  Seed: MESARPEDVSF
MQSARPEDVSY

SEQ ID NO: 37761 - protein, 11 aa, Artificial Sequence
  Description of Artificial Sequence: Synthetic peptide
  Seed: MESARPEDVSF
MESARPEDVSY

SEQ ID NO: 37762 - protein, 11 aa, Artificial Sequence
  Description of Artificial Sequence: Synthetic peptide
  Seed: MESARPEDVSF
MHSARPEDVSF

SEQ ID NO: 37763 - protein, 11 aa, Artificial Sequence
  Description of Artificial Sequence: Synthetic peptide
  Seed: MESARPEDVSF
MHSARPEDVSY

SEQ ID NO: 37764 - protein, 11 aa, Artificial Sequence
  Description of Artificial Sequence: Synthetic peptide
  Seed: MESARPEDVSF
MLSARPEDVSF

SEQ ID NO: 37765 - protein, 11 aa, Artificial Sequence
  Description of Artificial Sequence: Synthetic peptide
  Seed: MESARPEDVSF
MLSARPEDVSY

SEQ ID NO: 37766 - protein, 10 aa, Artificial Sequence
  Description of Artificial Sequence: Synthetic peptide
  Seed: MCTELKLSDY
MTTELKLSDY

SEQ ID NO: 37767 - protein, 10 aa, Artificial Sequence
  Description of Artificial Sequence: Synthetic peptide
  Seed: MCTELKLSDY
MSTELKLSDY

SEQ ID NO: 37768 - protein, 10 aa, Artificial Sequence
  Description of Artificial Sequence: Synthetic peptide
  Seed: MCTELKLSDY
MPTELKLSDY

SEQ ID NO: 37769 - protein, 10 aa, Artificial Sequence
  Description of Artificial Sequence: Synthetic peptide
  Seed: MCSLMQGSTL
MMSLMQGSTY

SEQ ID NO: 37770 - protein, 10 aa, Artificial Sequence
  Description of Artificial Sequence: Synthetic peptide
  Seed: MCSLMQGSTL
MKSLMQGSTM

SEQ ID NO: 37771 - protein, 10 aa, Artificial Sequence
  Description of Artificial Sequence: Synthetic peptide
  Seed: MCSLMQGSTL
MKSLMQGSTF

SEQ ID NO: 37772 - protein, 10 aa, Artificial Sequence
  Description of Artificial Sequence: Synthetic peptide
  Seed: MCSLMQGSTL
MKSLMQGSTW

SEQ ID NO: 37773 - protein, 10 aa, Artificial Sequence
  Description of Artificial Sequence: Synthetic peptide
  Seed: MCSLMQGSTL
MKSLMQGSTY

SEQ ID NO: 37774 - protein, 10 aa, Artificial Sequence
  Description of Artificial Sequence: Synthetic peptide
  Seed: MCSLMQGSTL
MMSLMQGSTI

SEQ ID NO: 37775 - protein, 10 aa, Artificial Sequence
  Description of Artificial Sequence: Synthetic peptide
  Seed: MCSLMQGSTL
MMSLMQGSTL

SEQ ID NO: 37776 - protein, 10 aa, Artificial Sequence
  Description of Artificial Sequence: Synthetic peptide
  Seed: MCSLMQGSTL
MMSLMQGSTM

SEQ ID NO: 37777 - protein, 10 aa, Artificial Sequence
  Description of Artificial Sequence: Synthetic peptide
  Seed: MCSLMQGSTL
MMSLMQGSTF

SEQ ID NO: 37778 - protein, 10 aa, Artificial Sequence
  Description of Artificial Sequence: Synthetic peptide
  Seed: MCSLMQGSTL
MMSLMQGSTW

SEQ ID NO: 37779 - protein, 10 aa, Artificial Sequence
  Description of Artificial Sequence: Synthetic peptide
  Seed: MCSLMQGSTL
MFSLMQGSTI

SEQ ID NO: 37780 - protein, 10 aa, Artificial Sequence
  Description of Artificial Sequence: Synthetic peptide
  Seed: MCTELKLSDY
MFTELKLSDY

SEQ ID NO: 37781 - protein, 10 aa, Artificial Sequence
  Description of Artificial Sequence: Synthetic peptide
  Seed: MCSLMQGSTL
MFSLMQGSTL

SEQ ID NO: 37782 - protein, 10 aa, Artificial Sequence
  Description of Artificial Sequence: Synthetic peptide
  Seed: MCSLMQGSTL
MFSLMQGSTM

SEQ ID NO: 37783 - protein, 10 aa, Artificial Sequence
  Description of Artificial Sequence: Synthetic peptide
  Seed: MCSLMQGSTL
MFSLMQGSTF

SEQ ID NO: 37784 - protein, 10 aa, Artificial Sequence
  Description of Artificial Sequence: Synthetic peptide
  Seed: MCSLMQGSTL
MFSLMQGSTW

SEQ ID NO: 37785 - protein, 10 aa, Artificial Sequence
  Description of Artificial Sequence: Synthetic peptide
  Seed: MCSLMQGSTL
MFSLMQGSTY

SEQ ID NO: 37786 - protein, 10 aa, Artificial Sequence
  Description of Artificial Sequence: Synthetic peptide
  Seed: MCSLMQGSTL
MPSLMQGSTI

SEQ ID NO: 37787 - protein, 10 aa, Artificial Sequence
  Description of Artificial Sequence: Synthetic peptide
  Seed: MCSLMQGSTL
MPSLMQGSTL

SEQ ID NO: 37788 - protein, 10 aa, Artificial Sequence
  Description of Artificial Sequence: Synthetic peptide
  Seed: MCSLMQGSTL
MPSLMQGSTM

SEQ ID NO: 37789 - protein, 10 aa, Artificial Sequence
  Description of Artificial Sequence: Synthetic peptide
  Seed: MCSLMQGSTL
MPSLMQGSTF

SEQ ID NO: 37790 - protein, 10 aa, Artificial Sequence
  Description of Artificial Sequence: Synthetic peptide
  Seed: MCSLMQGSTL
MKSLMQGSTL

SEQ ID NO: 37791 - protein, 10 aa, Artificial Sequence
  Description of Artificial Sequence: Synthetic peptide
  Seed: MCSLMQGSTL
MKSLMQGSTI

SEQ ID NO: 37792 - protein, 10 aa, Artificial Sequence
  Description of Artificial Sequence: Synthetic peptide
  Seed: MCSLMQGSTL
MLSLMQGSTY

SEQ ID NO: 37793 - protein, 10 aa, Artificial Sequence
  Description of Artificial Sequence: Synthetic peptide
  Seed: MCSLMQGSTL
MLSLMQGSTW

SEQ ID NO: 37794 - protein, 10 aa, Artificial Sequence
  Description of Artificial Sequence: Synthetic peptide
  Seed: MCSLMQGSTL
MGSLMQGSTF

SEQ ID NO: 37795 - protein, 10 aa, Artificial Sequence
  Description of Artificial Sequence: Synthetic peptide
  Seed: MCSLMQGSTL
MGSLMQGSTW

SEQ ID NO: 37796 - protein, 10 aa, Artificial Sequence
  Description of Artificial Sequence: Synthetic peptide
  Seed: MCSLMQGSTL
MGSLMQGSTY

SEQ ID NO: 37797 - protein, 10 aa, Artificial Sequence
  Description of Artificial Sequence: Synthetic peptide
  Seed: MCSLMQGSTL
MHSLMQGSTI

SEQ ID NO: 37798 - protein, 10 aa, Artificial Sequence
  Description of Artificial Sequence: Synthetic peptide
  Seed: MCSLMQGSTL
MHSLMQGSTL

SEQ ID NO: 37799 - protein, 10 aa, Artificial Sequence
  Description of Artificial Sequence: Synthetic peptide
  Seed: MCSLMQGSTL
MHSLMQGSTM

SEQ ID NO: 37800 - protein, 10 aa, Artificial Sequence
  Description of Artificial Sequence: Synthetic peptide
  Seed: MCSLMQGSTL
MHSLMQGSTF

SEQ ID NO: 37801 - protein, 10 aa, Artificial Sequence
  Description of Artificial Sequence: Synthetic peptide
  Seed: MCSLMQGSTL
MHSLMQGSTW

SEQ ID NO: 37802 - protein, 10 aa, Artificial Sequence
  Description of Artificial Sequence: Synthetic peptide
  Seed: MCSLMQGSTL
MHSLMQGSTY

SEQ ID NO: 37803 - protein, 10 aa, Artificial Sequence
  Description of Artificial Sequence: Synthetic peptide
  Seed: MCSLMQGSTL
MISLMQGSTI

SEQ ID NO: 37804 - protein, 10 aa, Artificial Sequence
  Description of Artificial Sequence: Synthetic peptide
  Seed: MCSLMQGSTL
MISLMQGSTL

SEQ ID NO: 37805 - protein, 10 aa, Artificial Sequence
  Description of Artificial Sequence: Synthetic peptide
  Seed: MCSLMQGSTL
MISLMQGSTM

SEQ ID NO: 37806 - protein, 10 aa, Artificial Sequence
  Description of Artificial Sequence: Synthetic peptide
  Seed: MCSLMQGSTL
MISLMQGSTF

SEQ ID NO: 37807 - protein, 10 aa, Artificial Sequence
  Description of Artificial Sequence: Synthetic peptide
  Seed: MCSLMQGSTL
MISLMQGSTW

SEQ ID NO: 37808 - protein, 10 aa, Artificial Sequence
  Description of Artificial Sequence: Synthetic peptide
  Seed: MCSLMQGSTL
MISLMQGSTY

SEQ ID NO: 37809 - protein, 10 aa, Artificial Sequence
  Description of Artificial Sequence: Synthetic peptide
  Seed: MCSLMQGSTL
MLSLMQGSTI

SEQ ID NO: 37810 - protein, 10 aa, Artificial Sequence
  Description of Artificial Sequence: Synthetic peptide
  Seed: MCSLMQGSTL
MLSLMQGSTL

SEQ ID NO: 37811 - protein, 10 aa, Artificial Sequence
  Description of Artificial Sequence: Synthetic peptide
  Seed: MCSLMQGSTL
MLSLMQGSTM

SEQ ID NO: 37812 - protein, 10 aa, Artificial Sequence
  Description of Artificial Sequence: Synthetic peptide
  Seed: MCSLMQGSTL
MLSLMQGSTF

SEQ ID NO: 37813 - protein, 10 aa, Artificial Sequence
  Description of Artificial Sequence: Synthetic peptide
  Seed: MCSLMQGSTL
MPSLMQGSTW

SEQ ID NO: 37814 - protein, 10 aa, Artificial Sequence
  Description of Artificial Sequence: Synthetic peptide
  Seed: MCSLMQGSTL
MPSLMQGSTY

SEQ ID NO: 37815 - protein, 10 aa, Artificial Sequence
  Description of Artificial Sequence: Synthetic peptide
  Seed: MCSLMQGSTL
MSSLMQGSTI

SEQ ID NO: 37816 - protein, 10 aa, Artificial Sequence
  Description of Artificial Sequence: Synthetic peptide
  Seed: MCSLMQGSTL
MYSLMQGSTF

SEQ ID NO: 37817 - protein, 10 aa, Artificial Sequence
  Description of Artificial Sequence: Synthetic peptide
  Seed: MCSLMQGSTL
MYSLMQGSTY

SEQ ID NO: 37818 - protein, 10 aa, Artificial Sequence
  Description of Artificial Sequence: Synthetic peptide
  Seed: MCSLMQGSTL
MVSLMQGSTI

SEQ ID NO: 37819 - protein, 10 aa, Artificial Sequence
  Description of Artificial Sequence: Synthetic peptide
  Seed: MCSLMQGSTL
MVSLMQGSTL

SEQ ID NO: 37820 - protein, 10 aa, Artificial Sequence
  Description of Artificial Sequence: Synthetic peptide
  Seed: MCSLMQGSTL
MVSLMQGSTM

SEQ ID NO: 37821 - protein, 10 aa, Artificial Sequence
  Description of Artificial Sequence: Synthetic peptide
  Seed: MCSLMQGSTL
MVSLMQGSTF

SEQ ID NO: 37822 - protein, 10 aa, Artificial Sequence
  Description of Artificial Sequence: Synthetic peptide
  Seed: MCSLMQGSTL
MVSLMQGSTW

SEQ ID NO: 37823 - protein, 10 aa, Artificial Sequence
  Description of Artificial Sequence: Synthetic peptide
  Seed: MCSLMQGSTL
MVSLMQGSTY

SEQ ID NO: 37824 - protein, 10 aa, Artificial Sequence
  Description of Artificial Sequence: Synthetic peptide
  Seed: MCTELKLSDY
MATELKLSDY

SEQ ID NO: 37825 - protein, 10 aa, Artificial Sequence
  Description of Artificial Sequence: Synthetic peptide
  Seed: MCTELKLSDY
MRTELKLSDY

SEQ ID NO: 37826 - protein, 10 aa, Artificial Sequence
  Description of Artificial Sequence: Synthetic peptide
  Seed: MCTELKLSDY
MNTELKLSDY

SEQ ID NO: 37827 - protein, 10 aa, Artificial Sequence
  Description of Artificial Sequence: Synthetic peptide
  Seed: MCTELKLSDY
MDTELKLSDY

SEQ ID NO: 37828 - protein, 10 aa, Artificial Sequence
  Description of Artificial Sequence: Synthetic peptide
  Seed: MCTELKLSDY
MQTELKLSDY

SEQ ID NO: 37829 - protein, 10 aa, Artificial Sequence
  Description of Artificial Sequence: Synthetic peptide
  Seed: MCTELKLSDY
METELKLSDY

SEQ ID NO: 37830 - protein, 10 aa, Artificial Sequence
  Description of Artificial Sequence: Synthetic peptide
  Seed: MCTELKLSDY
MGTELKLSDY

SEQ ID NO: 37831 - protein, 10 aa, Artificial Sequence
  Description of Artificial Sequence: Synthetic peptide
  Seed: MCTELKLSDY
MHTELKLSDY

SEQ ID NO: 37832 - protein, 10 aa, Artificial Sequence
  Description of Artificial Sequence: Synthetic peptide
  Seed: MCTELKLSDY
MITELKLSDY

SEQ ID NO: 37833 - protein, 10 aa, Artificial Sequence
  Description of Artificial Sequence: Synthetic peptide
  Seed: MCTELKLSDY
MLTELKLSDY

SEQ ID NO: 37834 - protein, 10 aa, Artificial Sequence
  Description of Artificial Sequence: Synthetic peptide
  Seed: MCTELKLSDY
MKTELKLSDY

SEQ ID NO: 37835 - protein, 10 aa, Artificial Sequence
  Description of Artificial Sequence: Synthetic peptide
  Seed: MCTELKLSDY
MMTELKLSDY

SEQ ID NO: 37836 - protein, 10 aa, Artificial Sequence
  Description of Artificial Sequence: Synthetic peptide
  Seed: MCSLMQGSTL
MYSLMQGSTW

SEQ ID NO: 37837 - protein, 10 aa, Artificial Sequence
  Description of Artificial Sequence: Synthetic peptide
  Seed: MCSLMQGSTL
MYSLMQGSTM

SEQ ID NO: 37838 - protein, 10 aa, Artificial Sequence
  Description of Artificial Sequence: Synthetic peptide
  Seed: MCSLMQGSTL
MSSLMQGSTL

SEQ ID NO: 37839 - protein, 10 aa, Artificial Sequence
  Description of Artificial Sequence: Synthetic peptide
  Seed: MCSLMQGSTL
MYSLMQGSTL

SEQ ID NO: 37840 - protein, 10 aa, Artificial Sequence
  Description of Artificial Sequence: Synthetic peptide
  Seed: MCSLMQGSTL
MSSLMQGSTM

SEQ ID NO: 37841 - protein, 10 aa, Artificial Sequence
  Description of Artificial Sequence: Synthetic peptide
  Seed: MCSLMQGSTL
MSSLMQGSTF

SEQ ID NO: 37842 - protein, 10 aa, Artificial Sequence
  Description of Artificial Sequence: Synthetic peptide
  Seed: MCSLMQGSTL
MSSLMQGSTW

SEQ ID NO: 37843 - protein, 10 aa, Artificial Sequence
  Description of Artificial Sequence: Synthetic peptide
  Seed: MCSLMQGSTL
MSSLMQGSTY

SEQ ID NO: 37844 - protein, 10 aa, Artificial Sequence
  Description of Artificial Sequence: Synthetic peptide
  Seed: MCSLMQGSTL
MSSLMQGSTV

SEQ ID NO: 37845 - protein, 10 aa, Artificial Sequence
  Description of Artificial Sequence: Synthetic peptide
  Seed: MCSLMQGSTL
MTSLMQGSTI

SEQ ID NO: 37846 - protein, 10 aa, Artificial Sequence
  Description of Artificial Sequence: Synthetic peptide
  Seed: MCSLMQGSTL
MTSLMQGSTL

SEQ ID NO: 37847 - protein, 10 aa, Artificial Sequence
  Description of Artificial Sequence: Synthetic peptide
  Seed: MCSLMQGSTL
MTSLMQGSTM

SEQ ID NO: 37848 - protein, 10 aa, Artificial Sequence
  Description of Artificial Sequence: Synthetic peptide
  Seed: MCSLMQGSTL
MTSLMQGSTF

SEQ ID NO: 37849 - protein, 10 aa, Artificial Sequence
  Description of Artificial Sequence: Synthetic peptide
  Seed: MCSLMQGSTL
MTSLMQGSTW

SEQ ID NO: 37850 - protein, 10 aa, Artificial Sequence
  Description of Artificial Sequence: Synthetic peptide
  Seed: MCSLMQGSTL
MTSLMQGSTY

SEQ ID NO: 37851 - protein, 10 aa, Artificial Sequence
  Description of Artificial Sequence: Synthetic peptide
  Seed: MCSLMQGSTL
MTSLMQGSTV

SEQ ID NO: 37852 - protein, 10 aa, Artificial Sequence
  Description of Artificial Sequence: Synthetic peptide
  Seed: MCSLMQGSTL
MWSLMQGSTI

SEQ ID NO: 37853 - protein, 10 aa, Artificial Sequence
  Description of Artificial Sequence: Synthetic peptide
  Seed: MCSLMQGSTL
MWSLMQGSTL

SEQ ID NO: 37854 - protein, 10 aa, Artificial Sequence
  Description of Artificial Sequence: Synthetic peptide
  Seed: MCSLMQGSTL
MWSLMQGSTM

SEQ ID NO: 37855 - protein, 10 aa, Artificial Sequence
  Description of Artificial Sequence: Synthetic peptide
  Seed: MCSLMQGSTL
MWSLMQGSTF

SEQ ID NO: 37856 - protein, 10 aa, Artificial Sequence
  Description of Artificial Sequence: Synthetic peptide
  Seed: MCSLMQGSTL
MWSLMQGSTW

SEQ ID NO: 37857 - protein, 10 aa, Artificial Sequence
  Description of Artificial Sequence: Synthetic peptide
  Seed: MCSLMQGSTL
MWSLMQGSTY

SEQ ID NO: 37858 - protein, 10 aa, Artificial Sequence
  Description of Artificial Sequence: Synthetic peptide
  Seed: MCSLMQGSTL
MYSLMQGSTI

SEQ ID NO: 37859 - protein, 8 aa, Artificial Sequence
  Description of Artificial Sequence: Synthetic peptide
  Seed: MACHSAAF
MYCHSAAF

SEQ ID NO: 37860 - protein, 8 aa, Artificial Sequence
  Description of Artificial Sequence: Synthetic peptide
  Seed: MACHSAAF
MYCHSAAM

SEQ ID NO: 37861 - protein, 8 aa, Artificial Sequence
  Description of Artificial Sequence: Synthetic peptide
  Seed: MACHSAAF
MWCHSAAY

SEQ ID NO: 37862 - protein, 11 aa, Artificial Sequence
  Description of Artificial Sequence: Synthetic peptide
  Seed: LVWMACHSAAF
LFWMACHSAAF

SEQ ID NO: 37863 - protein, 11 aa, Artificial Sequence
  Description of Artificial Sequence: Synthetic peptide
  Seed: LVWMACHSAAF
LKWMACHSAAY

SEQ ID NO: 37864 - protein, 11 aa, Artificial Sequence
  Description of Artificial Sequence: Synthetic peptide
  Seed: LVWMACHSAAF
LMWMACHSAAI

SEQ ID NO: 37865 - protein, 11 aa, Artificial Sequence
  Description of Artificial Sequence: Synthetic peptide
  Seed: LVWMACHSAAF
LMWMACHSAAL

SEQ ID NO: 37866 - protein, 11 aa, Artificial Sequence
  Description of Artificial Sequence: Synthetic peptide
  Seed: LVWMACHSAAF
LMWMACHSAAM

SEQ ID NO: 37867 - protein, 11 aa, Artificial Sequence
  Description of Artificial Sequence: Synthetic peptide
  Seed: LVWMACHSAAF
LMWMACHSAAF

SEQ ID NO: 37868 - protein, 11 aa, Artificial Sequence
  Description of Artificial Sequence: Synthetic peptide
  Seed: LVWMACHSAAF
LMWMACHSAAW

SEQ ID NO: 37869 - protein, 11 aa, Artificial Sequence
  Description of Artificial Sequence: Synthetic peptide
  Seed: LVWMACHSAAF
LMWMACHSAAY

SEQ ID NO: 37870 - protein, 11 aa, Artificial Sequence
  Description of Artificial Sequence: Synthetic peptide
  Seed: LVWMACHSAAF
LFWMACHSAAL

SEQ ID NO: 37871 - protein, 11 aa, Artificial Sequence
  Description of Artificial Sequence: Synthetic peptide
  Seed: LVWMACHSAAF
LFWMACHSAAM

SEQ ID NO: 37872 - protein, 11 aa, Artificial Sequence
  Description of Artificial Sequence: Synthetic peptide
  Seed: LVWMACHSAAF
LFWMACHSAAY

SEQ ID NO: 37873 - protein, 11 aa, Artificial Sequence
  Description of Artificial Sequence: Synthetic peptide
  Seed: LVWMACHSAAF
LSWMACHSAAF

SEQ ID NO: 37874 - protein, 11 aa, Artificial Sequence
  Description of Artificial Sequence: Synthetic peptide
  Seed: LVWMACHSAAF
LPWMACHSAAA

SEQ ID NO: 37875 - protein, 11 aa, Artificial Sequence
  Description of Artificial Sequence: Synthetic peptide
  Seed: LVWMACHSAAF
LPWMACHSAAH

SEQ ID NO: 37876 - protein, 11 aa, Artificial Sequence
  Description of Artificial Sequence: Synthetic peptide
  Seed: LVWMACHSAAF
LPWMACHSAAL

SEQ ID NO: 37877 - protein, 11 aa, Artificial Sequence
  Description of Artificial Sequence: Synthetic peptide
  Seed: LVWMACHSAAF
LPWMACHSAAM

SEQ ID NO: 37878 - protein, 11 aa, Artificial Sequence
  Description of Artificial Sequence: Synthetic peptide
  Seed: LVWMACHSAAF
LPWMACHSAAF

SEQ ID NO: 37879 - protein, 11 aa, Artificial Sequence
  Description of Artificial Sequence: Synthetic peptide
  Seed: LVWMACHSAAF
LPWMACHSAAW

SEQ ID NO: 37880 - protein, 11 aa, Artificial Sequence
  Description of Artificial Sequence: Synthetic peptide
  Seed: LVWMACHSAAF
LPWMACHSAAY

SEQ ID NO: 37881 - protein, 11 aa, Artificial Sequence
  Description of Artificial Sequence: Synthetic peptide
  Seed: LVWMACHSAAF
LSWMACHSAAI

SEQ ID NO: 37882 - protein, 11 aa, Artificial Sequence
  Description of Artificial Sequence: Synthetic peptide
  Seed: LVWMACHSAAF
LSWMACHSAAL

SEQ ID NO: 37883 - protein, 11 aa, Artificial Sequence
  Description of Artificial Sequence: Synthetic peptide
  Seed: LVWMACHSAAF
LKWMACHSAAW

SEQ ID NO: 37884 - protein, 11 aa, Artificial Sequence
  Description of Artificial Sequence: Synthetic peptide
  Seed: LVWMACHSAAF
LKWMACHSAAF

SEQ ID NO: 37885 - protein, 11 aa, Artificial Sequence
  Description of Artificial Sequence: Synthetic peptide
  Seed: LVWMACHSAAF
LKWMACHSAAM

SEQ ID NO: 37886 - protein, 11 aa, Artificial Sequence
  Description of Artificial Sequence: Synthetic peptide
  Seed: LVWMACHSAAF
LKWMACHSAAL

SEQ ID NO: 37887 - protein, 11 aa, Artificial Sequence
  Description of Artificial Sequence: Synthetic peptide
  Seed: LVWMACHSAAF
LGWMACHSAAM

SEQ ID NO: 37888 - protein, 11 aa, Artificial Sequence
  Description of Artificial Sequence: Synthetic peptide
  Seed: LVWMACHSAAF
LGWMACHSAAF

SEQ ID NO: 37889 - protein, 11 aa, Artificial Sequence
  Description of Artificial Sequence: Synthetic peptide
  Seed: LVWMACHSAAF
LGWMACHSAAW

SEQ ID NO: 37890 - protein, 11 aa, Artificial Sequence
  Description of Artificial Sequence: Synthetic peptide
  Seed: LVWMACHSAAF
LGWMACHSAAY

SEQ ID NO: 37891 - protein, 11 aa, Artificial Sequence
  Description of Artificial Sequence: Synthetic peptide
  Seed: LVWMACHSAAF
LHWMACHSAAL

SEQ ID NO: 37892 - protein, 11 aa, Artificial Sequence
  Description of Artificial Sequence: Synthetic peptide
  Seed: LVWMACHSAAF
LHWMACHSAAM

SEQ ID NO: 37893 - protein, 11 aa, Artificial Sequence
  Description of Artificial Sequence: Synthetic peptide
  Seed: LVWMACHSAAF
LHWMACHSAAF

SEQ ID NO: 37894 - protein, 11 aa, Artificial Sequence
  Description of Artificial Sequence: Synthetic peptide
  Seed: LVWMACHSAAF
LHWMACHSAAW

SEQ ID NO: 37895 - protein, 11 aa, Artificial Sequence
  Description of Artificial Sequence: Synthetic peptide
  Seed: LVWMACHSAAF
LHWMACHSAAY

SEQ ID NO: 37896 - protein, 11 aa, Artificial Sequence
  Description of Artificial Sequence: Synthetic peptide
  Seed: LVWMACHSAAF
LIWMACHSAAL

SEQ ID NO: 37897 - protein, 11 aa, Artificial Sequence
  Description of Artificial Sequence: Synthetic peptide
  Seed: LVWMACHSAAF
LIWMACHSAAM

SEQ ID NO: 37898 - protein, 11 aa, Artificial Sequence
  Description of Artificial Sequence: Synthetic peptide
  Seed: LVWMACHSAAF
LIWMACHSAAF

SEQ ID NO: 37899 - protein, 11 aa, Artificial Sequence
  Description of Artificial Sequence: Synthetic peptide
  Seed: LVWMACHSAAF
LIWMACHSAAW

SEQ ID NO: 37900 - protein, 11 aa, Artificial Sequence
  Description of Artificial Sequence: Synthetic peptide
  Seed: LVWMACHSAAF
LIWMACHSAAY

SEQ ID NO: 37901 - protein, 11 aa, Artificial Sequence
  Description of Artificial Sequence: Synthetic peptide
  Seed: LVWMACHSAAF
LLWMACHSAAL

SEQ ID NO: 37902 - protein, 11 aa, Artificial Sequence
  Description of Artificial Sequence: Synthetic peptide
  Seed: LVWMACHSAAF
LLWMACHSAAM

SEQ ID NO: 37903 - protein, 11 aa, Artificial Sequence
  Description of Artificial Sequence: Synthetic peptide
  Seed: LVWMACHSAAF
LLWMACHSAAF

SEQ ID NO: 37904 - protein, 11 aa, Artificial Sequence
  Description of Artificial Sequence: Synthetic peptide
  Seed: LVWMACHSAAF
LLWMACHSAAY

SEQ ID NO: 37905 - protein, 11 aa, Artificial Sequence
  Description of Artificial Sequence: Synthetic peptide
  Seed: LVWMACHSAAF
LKWMACHSAAI

SEQ ID NO: 37906 - protein, 11 aa, Artificial Sequence
  Description of Artificial Sequence: Synthetic peptide
  Seed: LVWMACHSAAF
LSWMACHSAAM

SEQ ID NO: 37907 - protein, 11 aa, Artificial Sequence
  Description of Artificial Sequence: Synthetic peptide
  Seed: LVWMACHSAAF
LSWMACHSAAW

SEQ ID NO: 37908 - protein, 9 aa, Artificial Sequence
  Description of Artificial Sequence: Synthetic peptide
  Seed: LVWMACNSA
LVWMACNSI

SEQ ID NO: 37909 - protein, 9 aa, Artificial Sequence
  Description of Artificial Sequence: Synthetic peptide
  Seed: LVWMACNSA
LLWMACNSV

SEQ ID NO: 37910 - protein, 9 aa, Artificial Sequence
  Description of Artificial Sequence: Synthetic peptide
  Seed: LVWMACNSA
LQWMACNST

SEQ ID NO: 37911 - protein, 9 aa, Artificial Sequence
  Description of Artificial Sequence: Synthetic peptide
  Seed: LVWMACNSA
LQWMACNSV

SEQ ID NO: 37912 - protein, 9 aa, Artificial Sequence
  Description of Artificial Sequence: Synthetic peptide
  Seed: LVWMACNSA
LIWMACNSA

SEQ ID NO: 37913 - protein, 9 aa, Artificial Sequence
  Description of Artificial Sequence: Synthetic peptide
  Seed: LVWMACNSA
LIWMACNSI

SEQ ID NO: 37914 - protein, 9 aa, Artificial Sequence
  Description of Artificial Sequence: Synthetic peptide
  Seed: LVWMACNSA
LIWMACNSL

SEQ ID NO: 37915 - protein, 9 aa, Artificial Sequence
  Description of Artificial Sequence: Synthetic peptide
  Seed: LVWMACNSA
LIWMACNSV

SEQ ID NO: 37916 - protein, 9 aa, Artificial Sequence
  Description of Artificial Sequence: Synthetic peptide
  Seed: LVWMACNSA
LLWMACNSA

SEQ ID NO: 37917 - protein, 9 aa, Artificial Sequence
  Description of Artificial Sequence: Synthetic peptide
  Seed: LVWMACNSA
LLWMACNSI

SEQ ID NO: 37918 - protein, 9 aa, Artificial Sequence
  Description of Artificial Sequence: Synthetic peptide
  Seed: LVWMACNSA
LLWMACNSL

SEQ ID NO: 37919 - protein, 9 aa, Artificial Sequence
  Description of Artificial Sequence: Synthetic peptide
  Seed: LVWMACNSA
LMWMACNSA

SEQ ID NO: 37920 - protein, 11 aa, Artificial Sequence
  Description of Artificial Sequence: Synthetic peptide
  Seed: LVWMACHSAAF
LSWMACHSAAY

SEQ ID NO: 37921 - protein, 9 aa, Artificial Sequence
  Description of Artificial Sequence: Synthetic peptide
  Seed: LVWMACNSA
LMWMACNSI

SEQ ID NO: 37922 - protein, 9 aa, Artificial Sequence
  Description of Artificial Sequence: Synthetic peptide
  Seed: LVWMACNSA
LMWMACNSL

SEQ ID NO: 37923 - protein, 9 aa, Artificial Sequence
  Description of Artificial Sequence: Synthetic peptide
  Seed: LVWMACNSA
LMWMACNSM

SEQ ID NO: 37924 - protein, 9 aa, Artificial Sequence
  Description of Artificial Sequence: Synthetic peptide
  Seed: LVWMACNSA
LMWMACNSV

SEQ ID NO: 37925 - protein, 9 aa, Artificial Sequence
  Description of Artificial Sequence: Synthetic peptide
  Seed: LVWMACNSA
LSWMACNSI

SEQ ID NO: 37926 - protein, 9 aa, Artificial Sequence
  Description of Artificial Sequence: Synthetic peptide
  Seed: LVWMACNSA
LSWMACNSV

SEQ ID NO: 37927 - protein, 9 aa, Artificial Sequence
  Description of Artificial Sequence: Synthetic peptide
  Seed: LVWMACNSA
LTWMACNSA

SEQ ID NO: 37928 - protein, 9 aa, Artificial Sequence
  Description of Artificial Sequence: Synthetic peptide
  Seed: LVWMACNSA
LTWMACNSI

SEQ ID NO: 37929 - protein, 9 aa, Artificial Sequence
  Description of Artificial Sequence: Synthetic peptide
  Seed: LVWMACNSA
LTWMACNSL

SEQ ID NO: 37930 - protein, 9 aa, Artificial Sequence
  Description of Artificial Sequence: Synthetic peptide
  Seed: LVWMACNSA
LQWMACNSM

SEQ ID NO: 37931 - protein, 9 aa, Artificial Sequence
  Description of Artificial Sequence: Synthetic peptide
  Seed: LVWMACNSA
LQWMACNSL

SEQ ID NO: 37932 - protein, 9 aa, Artificial Sequence
  Description of Artificial Sequence: Synthetic peptide
  Seed: LVWMACNSA
LQWMACNSI

SEQ ID NO: 37933 - protein, 9 aa, Artificial Sequence
  Description of Artificial Sequence: Synthetic peptide
  Seed: LVWMACNSA
LQWMACNSA

SEQ ID NO: 37934 - protein, 11 aa, Artificial Sequence
  Description of Artificial Sequence: Synthetic peptide
  Seed: LVWMACHSAAF
LTWMACHSAAL

SEQ ID NO: 37935 - protein, 11 aa, Artificial Sequence
  Description of Artificial Sequence: Synthetic peptide
  Seed: LVWMACHSAAF
LTWMACHSAAM

SEQ ID NO: 37936 - protein, 11 aa, Artificial Sequence
  Description of Artificial Sequence: Synthetic peptide
  Seed: LVWMACHSAAF
LTWMACHSAAF

SEQ ID NO: 37937 - protein, 11 aa, Artificial Sequence
  Description of Artificial Sequence: Synthetic peptide
  Seed: LVWMACHSAAF
LTWMACHSAAW

SEQ ID NO: 37938 - protein, 11 aa, Artificial Sequence
  Description of Artificial Sequence: Synthetic peptide
  Seed: LVWMACHSAAF
LTWMACHSAAY

SEQ ID NO: 37939 - protein, 11 aa, Artificial Sequence
  Description of Artificial Sequence: Synthetic peptide
  Seed: LVWMACHSAAF
LWWMACHSAAL

SEQ ID NO: 37940 - protein, 11 aa, Artificial Sequence
  Description of Artificial Sequence: Synthetic peptide
  Seed: LVWMACHSAAF
LWWMACHSAAM

SEQ ID NO: 37941 - protein, 11 aa, Artificial Sequence
  Description of Artificial Sequence: Synthetic peptide
  Seed: LVWMACHSAAF
LWWMACHSAAF

SEQ ID NO: 37942 - protein, 11 aa, Artificial Sequence
  Description of Artificial Sequence: Synthetic peptide
  Seed: LVWMACHSAAF
LWWMACHSAAY

SEQ ID NO: 37943 - protein, 11 aa, Artificial Sequence
  Description of Artificial Sequence: Synthetic peptide
  Seed: LVWMACHSAAF
LYWMACHSAAL

SEQ ID NO: 37944 - protein, 11 aa, Artificial Sequence
  Description of Artificial Sequence: Synthetic peptide
  Seed: LVWMACHSAAF
LYWMACHSAAM

SEQ ID NO: 37945 - protein, 11 aa, Artificial Sequence
  Description of Artificial Sequence: Synthetic peptide
  Seed: LVWMACHSAAF
LYWMACHSAAF

SEQ ID NO: 37946 - protein, 11 aa, Artificial Sequence
  Description of Artificial Sequence: Synthetic peptide
  Seed: LVWMACHSAAF
LYWMACHSAAY

SEQ ID NO: 37947 - protein, 11 aa, Artificial Sequence
  Description of Artificial Sequence: Synthetic peptide
  Seed: LVWMACHSAAF
LVWMACHSAAL

SEQ ID NO: 37948 - protein, 11 aa, Artificial Sequence
  Description of Artificial Sequence: Synthetic peptide
  Seed: LVWMACHSAAF
LVWMACHSAAM

SEQ ID NO: 37949 - protein, 11 aa, Artificial Sequence
  Description of Artificial Sequence: Synthetic peptide
  Seed: LVWMACHSAAF
LVWMACHSAAW

SEQ ID NO: 37950 - protein, 11 aa, Artificial Sequence
  Description of Artificial Sequence: Synthetic peptide
  Seed: LVWMACHSAAF
LVWMACHSAAY

SEQ ID NO: 37951 - protein, 9 aa, Artificial Sequence
  Description of Artificial Sequence: Synthetic peptide
  Seed: LVWMACNSA
LAWMACNSI

SEQ ID NO: 37952 - protein, 9 aa, Artificial Sequence
  Description of Artificial Sequence: Synthetic peptide
  Seed: LVWMACNSA
LAWMACNSV

SEQ ID NO: 37953 - protein, 11 aa, Artificial Sequence
  Description of Artificial Sequence: Synthetic peptide
  Seed: LVWMACHSAAF
LGWMACHSAAL

SEQ ID NO: 37954 - protein, 11 aa, Artificial Sequence
  Description of Artificial Sequence: Synthetic peptide
  Seed: LVWMACHSAAF
LEWMACHSAAY

SEQ ID NO: 37955 - protein, 11 aa, Artificial Sequence
  Description of Artificial Sequence: Synthetic peptide
  Seed: LVWMACHSAAF
LEWMACHSAAW

SEQ ID NO: 37956 - protein, 9 aa, Artificial Sequence
  Description of Artificial Sequence: Synthetic peptide
  Seed: LVWMACHSA
LMWMACHSM

SEQ ID NO: 37957 - protein, 9 aa, Artificial Sequence
  Description of Artificial Sequence: Synthetic peptide
  Seed: LVWMACHSA
LIWMACHSV

SEQ ID NO: 37958 - protein, 9 aa, Artificial Sequence
  Description of Artificial Sequence: Synthetic peptide
  Seed: LVWMACHSA
LLWMACHSA

SEQ ID NO: 37959 - protein, 9 aa, Artificial Sequence
  Description of Artificial Sequence: Synthetic peptide
  Seed: LVWMACHSA
LLWMACHSI

SEQ ID NO: 37960 - protein, 9 aa, Artificial Sequence
  Description of Artificial Sequence: Synthetic peptide
  Seed: LVWMACHSA
LLWMACHSL

SEQ ID NO: 37961 - protein, 9 aa, Artificial Sequence
  Description of Artificial Sequence: Synthetic peptide
  Seed: LVWMACHSA
LLWMACHSM

SEQ ID NO: 37962 - protein, 9 aa, Artificial Sequence
  Description of Artificial Sequence: Synthetic peptide
  Seed: LVWMACHSA
LLWMACHSV

SEQ ID NO: 37963 - protein, 9 aa, Artificial Sequence
  Description of Artificial Sequence: Synthetic peptide
  Seed: LVWMACHSA
LMWMACHSA

SEQ ID NO: 37964 - protein, 9 aa, Artificial Sequence
  Description of Artificial Sequence: Synthetic peptide
  Seed: LVWMACHSA
LMWMACHSI

SEQ ID NO: 37965 - protein, 9 aa, Artificial Sequence
  Description of Artificial Sequence: Synthetic peptide
  Seed: LVWMACHSA
LMWMACHSL

SEQ ID NO: 37966 - protein, 9 aa, Artificial Sequence
  Description of Artificial Sequence: Synthetic peptide
  Seed: LVWMACHSA
LMWMACHST

SEQ ID NO: 37967 - protein, 11 aa, Artificial Sequence
  Description of Artificial Sequence: Synthetic peptide
  Seed: LVWMACHSAAF
LEWMACHSAAF

SEQ ID NO: 37968 - protein, 9 aa, Artificial Sequence
  Description of Artificial Sequence: Synthetic peptide
  Seed: LVWMACHSA
LMWMACHSV

SEQ ID NO: 37969 - protein, 9 aa, Artificial Sequence
  Description of Artificial Sequence: Synthetic peptide
  Seed: LVWMACHSA
LPWMACHSA

SEQ ID NO: 37970 - protein, 9 aa, Artificial Sequence
  Description of Artificial Sequence: Synthetic peptide
  Seed: LVWMACHSA
LPWMACHSC

SEQ ID NO: 37971 - protein, 9 aa, Artificial Sequence
  Description of Artificial Sequence: Synthetic peptide
  Seed: LVWMACHSA
LPWMACHSG

SEQ ID NO: 37972 - protein, 9 aa, Artificial Sequence
  Description of Artificial Sequence: Synthetic peptide
  Seed: LVWMACHSA
LPWMACHSI

SEQ ID NO: 37973 - protein, 9 aa, Artificial Sequence
  Description of Artificial Sequence: Synthetic peptide
  Seed: LVWMACHSA
LPWMACHSL

SEQ ID NO: 37974 - protein, 9 aa, Artificial Sequence
  Description of Artificial Sequence: Synthetic peptide
  Seed: LVWMACHSA
LPWMACHSM

SEQ ID NO: 37975 - protein, 9 aa, Artificial Sequence
  Description of Artificial Sequence: Synthetic peptide
  Seed: LVWMACHSA
LPWMACHSP

SEQ ID NO: 37976 - protein, 9 aa, Artificial Sequence
  Description of Artificial Sequence: Synthetic peptide
  Seed: LVWMACHSA
LPWMACHSS

SEQ ID NO: 37977 - protein, 9 aa, Artificial Sequence
  Description of Artificial Sequence: Synthetic peptide
  Seed: LVWMACHSA
LIWMACHSL

SEQ ID NO: 37978 - protein, 9 aa, Artificial Sequence
  Description of Artificial Sequence: Synthetic peptide
  Seed: LVWMACHSA
LIWMACHSI

SEQ ID NO: 37979 - protein, 9 aa, Artificial Sequence
  Description of Artificial Sequence: Synthetic peptide
  Seed: LVWMACHSA
LIWMACHSA

SEQ ID NO: 37980 - protein, 9 aa, Artificial Sequence
  Description of Artificial Sequence: Synthetic peptide
  Seed: LVWMACHSA
LGWMACHSV

SEQ ID NO: 37981 - protein, 9 aa, Artificial Sequence
  Description of Artificial Sequence: Synthetic peptide
  Seed: LVRTGMDPR
LSRTGMDPR

SEQ ID NO: 37982 - protein, 9 aa, Artificial Sequence
  Description of Artificial Sequence: Synthetic peptide
  Seed: LVRTGMDPR
LSRTGMDPK

SEQ ID NO: 37983 - protein, 9 aa, Artificial Sequence
  Description of Artificial Sequence: Synthetic peptide
  Seed: LVRTGMDPR
LTRTGMDPR

SEQ ID NO: 37984 - protein, 9 aa, Artificial Sequence
  Description of Artificial Sequence: Synthetic peptide
  Seed: LVRTGMDPR
LTRTGMDPK

SEQ ID NO: 37985 - protein, 9 aa, Artificial Sequence
  Description of Artificial Sequence: Synthetic peptide
  Seed: LVRTGMDPR
LWRTGMDPR

SEQ ID NO: 37986 - protein, 9 aa, Artificial Sequence
  Description of Artificial Sequence: Synthetic peptide
  Seed: LVRTGMDPR
LWRTGMDPK

SEQ ID NO: 37987 - protein, 9 aa, Artificial Sequence
  Description of Artificial Sequence: Synthetic peptide
  Seed: LVRTGMDPR
LYRTGMDPR

SEQ ID NO: 37988 - protein, 9 aa, Artificial Sequence
  Description of Artificial Sequence: Synthetic peptide
  Seed: LVRTGMDPR
LYRTGMDPK

SEQ ID NO: 37989 - protein, 9 aa, Artificial Sequence
  Description of Artificial Sequence: Synthetic peptide
  Seed: LVRTGMDPR
LVRTGMDPK

SEQ ID NO: 37990 - protein, 9 aa, Artificial Sequence
  Description of Artificial Sequence: Synthetic peptide
  Seed: LVWMACHSA
LAWMACHSI

SEQ ID NO: 37991 - protein, 9 aa, Artificial Sequence
  Description of Artificial Sequence: Synthetic peptide
  Seed: LVWMACHSA
LAWMACHSL

SEQ ID NO: 37992 - protein, 9 aa, Artificial Sequence
  Description of Artificial Sequence: Synthetic peptide
  Seed: LVWMACHSA
LAWMACHSV

SEQ ID NO: 37993 - protein, 9 aa, Artificial Sequence
  Description of Artificial Sequence: Synthetic peptide
  Seed: LVWMACHSA
LQWMACHSA

SEQ ID NO: 37994 - protein, 9 aa, Artificial Sequence
  Description of Artificial Sequence: Synthetic peptide
  Seed: LVWMACHSA
LQWMACHSI

SEQ ID NO: 37995 - protein, 9 aa, Artificial Sequence
  Description of Artificial Sequence: Synthetic peptide
  Seed: LVWMACHSA
LQWMACHSL

SEQ ID NO: 37996 - protein, 9 aa, Artificial Sequence
  Description of Artificial Sequence: Synthetic peptide
  Seed: LVWMACHSA
LQWMACHSM

SEQ ID NO: 37997 - protein, 9 aa, Artificial Sequence
  Description of Artificial Sequence: Synthetic peptide
  Seed: LVWMACHSA
LQWMACHST

SEQ ID NO: 37998 - protein, 9 aa, Artificial Sequence
  Description of Artificial Sequence: Synthetic peptide
  Seed: LVWMACHSA
LQWMACHSV

SEQ ID NO: 37999 - protein, 9 aa, Artificial Sequence
  Description of Artificial Sequence: Synthetic peptide
  Seed: LVWMACHSA
LPWMACHST

SEQ ID NO: 38000 - protein, 9 aa, Artificial Sequence
  Description of Artificial Sequence: Synthetic peptide
  Seed: LVWMACHSA
LPWMACHSV

SEQ ID NO: 38001 - protein, 9 aa, Artificial Sequence
  Description of Artificial Sequence: Synthetic peptide
  Seed: LVWMACHSA
LSWMACHSA

SEQ ID NO: 38002 - protein, 11 aa, Artificial Sequence
  Description of Artificial Sequence: Synthetic peptide
  Seed: LVWMACHSAAF
LNWMACHSAAF

SEQ ID NO: 38003 - protein, 11 aa, Artificial Sequence
  Description of Artificial Sequence: Synthetic peptide
  Seed: LVWMACHSAAF
LDWMACHSAAL

SEQ ID NO: 38004 - protein, 11 aa, Artificial Sequence
  Description of Artificial Sequence: Synthetic peptide
  Seed: LVWMACHSAAF
LDWMACHSAAM

SEQ ID NO: 38005 - protein, 11 aa, Artificial Sequence
  Description of Artificial Sequence: Synthetic peptide
  Seed: LVWMACHSAAF
LDWMACHSAAF

SEQ ID NO: 38006 - protein, 11 aa, Artificial Sequence
  Description of Artificial Sequence: Synthetic peptide
  Seed: LVWMACHSAAF
LDWMACHSAAY

SEQ ID NO: 38007 - protein, 11 aa, Artificial Sequence
  Description of Artificial Sequence: Synthetic peptide
  Seed: LVWMACHSAAF
LCWMACHSAAL

SEQ ID NO: 38008 - protein, 11 aa, Artificial Sequence
  Description of Artificial Sequence: Synthetic peptide
  Seed: LVWMACHSAAF
LCWMACHSAAM

SEQ ID NO: 38009 - protein, 11 aa, Artificial Sequence
  Description of Artificial Sequence: Synthetic peptide
  Seed: LVWMACHSAAF
LCWMACHSAAF

SEQ ID NO: 38010 - protein, 11 aa, Artificial Sequence
  Description of Artificial Sequence: Synthetic peptide
  Seed: LVWMACHSAAF
LCWMACHSAAY

SEQ ID NO: 38011 - protein, 11 aa, Artificial Sequence
  Description of Artificial Sequence: Synthetic peptide
  Seed: LVWMACHSAAF
LQWMACHSAAA

SEQ ID NO: 38012 - protein, 11 aa, Artificial Sequence
  Description of Artificial Sequence: Synthetic peptide
  Seed: LVWMACHSAAF
LQWMACHSAAH

SEQ ID NO: 38013 - protein, 11 aa, Artificial Sequence
  Description of Artificial Sequence: Synthetic peptide
  Seed: LVWMACHSAAF
LQWMACHSAAI

SEQ ID NO: 38014 - protein, 11 aa, Artificial Sequence
  Description of Artificial Sequence: Synthetic peptide
  Seed: LVWMACHSAAF
LQWMACHSAAL

SEQ ID NO: 38015 - protein, 11 aa, Artificial Sequence
  Description of Artificial Sequence: Synthetic peptide
  Seed: LVWMACHSAAF
LQWMACHSAAM

SEQ ID NO: 38016 - protein, 11 aa, Artificial Sequence
  Description of Artificial Sequence: Synthetic peptide
  Seed: LVWMACHSAAF
LQWMACHSAAF

SEQ ID NO: 38017 - protein, 11 aa, Artificial Sequence
  Description of Artificial Sequence: Synthetic peptide
  Seed: LVWMACHSAAF
LQWMACHSAAW

SEQ ID NO: 38018 - protein, 11 aa, Artificial Sequence
  Description of Artificial Sequence: Synthetic peptide
  Seed: LVWMACHSAAF
LQWMACHSAAY

SEQ ID NO: 38019 - protein, 11 aa, Artificial Sequence
  Description of Artificial Sequence: Synthetic peptide
  Seed: LVWMACHSAAF
LQWMACHSAAV

SEQ ID NO: 38020 - protein, 11 aa, Artificial Sequence
  Description of Artificial Sequence: Synthetic peptide
  Seed: LVWMACHSAAF
LEWMACHSAAL

SEQ ID NO: 38021 - protein, 11 aa, Artificial Sequence
  Description of Artificial Sequence: Synthetic peptide
  Seed: LVWMACHSAAF
LEWMACHSAAM

SEQ ID NO: 38022 - protein, 11 aa, Artificial Sequence
  Description of Artificial Sequence: Synthetic peptide
  Seed: LVWMACHSAAF
LNWMACHSAAY

SEQ ID NO: 38023 - protein, 11 aa, Artificial Sequence
  Description of Artificial Sequence: Synthetic peptide
  Seed: LVWMACHSAAF
LNWMACHSAAM

SEQ ID NO: 38024 - protein, 9 aa, Artificial Sequence
  Description of Artificial Sequence: Synthetic peptide
  Seed: LVWMACHSA
LSWMACHSI

SEQ ID NO: 38025 - protein, 11 aa, Artificial Sequence
  Description of Artificial Sequence: Synthetic peptide
  Seed: LVWMACHSAAF
LNWMACHSAAL

SEQ ID NO: 38026 - protein, 9 aa, Artificial Sequence
  Description of Artificial Sequence: Synthetic peptide
  Seed: LVWMACHSA
LSWMACHSL

SEQ ID NO: 38027 - protein, 9 aa, Artificial Sequence
  Description of Artificial Sequence: Synthetic peptide
  Seed: LVWMACHSA
LSWMACHSV

SEQ ID NO: 38028 - protein, 9 aa, Artificial Sequence
  Description of Artificial Sequence: Synthetic peptide
  Seed: LVWMACHSA
LTWMACHSA

SEQ ID NO: 38029 - protein, 9 aa, Artificial Sequence
  Description of Artificial Sequence: Synthetic peptide
  Seed: LVWMACHSA
LTWMACHSI

SEQ ID NO: 38030 - protein, 9 aa, Artificial Sequence
  Description of Artificial Sequence: Synthetic peptide
  Seed: LVWMACHSA
LTWMACHSL

SEQ ID NO: 38031 - protein, 9 aa, Artificial Sequence
  Description of Artificial Sequence: Synthetic peptide
  Seed: LVWMACHSA
LTWMACHSV

SEQ ID NO: 38032 - protein, 9 aa, Artificial Sequence
  Description of Artificial Sequence: Synthetic peptide
  Seed: LVWMACHSA
LVWMACHSI

SEQ ID NO: 38033 - protein, 9 aa, Artificial Sequence
  Description of Artificial Sequence: Synthetic peptide
  Seed: LVWMACHSA
LVWMACHSL

SEQ ID NO: 38034 - protein, 9 aa, Artificial Sequence
  Description of Artificial Sequence: Synthetic peptide
  Seed: LVWMACHSA
LVWMACHSV

SEQ ID NO: 38035 - protein, 11 aa, Artificial Sequence
  Description of Artificial Sequence: Synthetic peptide
  Seed: LVWMACHSAAF
LAWMACHSAAL

SEQ ID NO: 38036 - protein, 11 aa, Artificial Sequence
  Description of Artificial Sequence: Synthetic peptide
  Seed: LVWMACHSAAF
LAWMACHSAAM

SEQ ID NO: 38037 - protein, 11 aa, Artificial Sequence
  Description of Artificial Sequence: Synthetic peptide
  Seed: LVWMACHSAAF
LAWMACHSAAW

SEQ ID NO: 38038 - protein, 11 aa, Artificial Sequence
  Description of Artificial Sequence: Synthetic peptide
  Seed: LVWMACHSAAF
LAWMACHSAAY

SEQ ID NO: 38039 - protein, 11 aa, Artificial Sequence
  Description of Artificial Sequence: Synthetic peptide
  Seed: LVWMACHSAAF
LRWMACHSAAL

SEQ ID NO: 38040 - protein, 11 aa, Artificial Sequence
  Description of Artificial Sequence: Synthetic peptide
  Seed: LVWMACHSAAF
LRWMACHSAAM

SEQ ID NO: 38041 - protein, 11 aa, Artificial Sequence
  Description of Artificial Sequence: Synthetic peptide
  Seed: LVWMACHSAAF
LRWMACHSAAF

SEQ ID NO: 38042 - protein, 11 aa, Artificial Sequence
  Description of Artificial Sequence: Synthetic peptide
  Seed: LVWMACHSAAF
LRWMACHSAAW

SEQ ID NO: 38043 - protein, 11 aa, Artificial Sequence
  Description of Artificial Sequence: Synthetic peptide
  Seed: LVWMACHSAAF
LRWMACHSAAY

SEQ ID NO: 38044 - protein, 9 aa, Artificial Sequence
  Description of Artificial Sequence: Synthetic peptide
  Seed: LVWMACNSA
LTWMACNSV

SEQ ID NO: 38045 - protein, 9 aa, Artificial Sequence
  Description of Artificial Sequence: Synthetic peptide
  Seed: LVWMACNSA
LVWMACNSL

SEQ ID NO: 38046 - protein, 8 aa, Artificial Sequence
  Description of Artificial Sequence: Synthetic peptide
  Seed: MACHSAAF
MWCHSAAF

SEQ ID NO: 38047 - protein, 11 aa, Artificial Sequence
  Description of Artificial Sequence: Synthetic peptide
  Seed: MAAFTGNTEGR
MYAFTGNTEGR

SEQ ID NO: 38048 - protein, 11 aa, Artificial Sequence
  Description of Artificial Sequence: Synthetic peptide
  Seed: MAAFTGNTEGR
MFAFTGNTEGR

SEQ ID NO: 38049 - protein, 11 aa, Artificial Sequence
  Description of Artificial Sequence: Synthetic peptide
  Seed: MAAFTGNTEGR
MFAFTGNTEGK

SEQ ID NO: 38050 - protein, 11 aa, Artificial Sequence
  Description of Artificial Sequence: Synthetic peptide
  Seed: MAAFTGNTEGR
MPAFTGNTEGR

SEQ ID NO: 38051 - protein, 11 aa, Artificial Sequence
  Description of Artificial Sequence: Synthetic peptide
  Seed: MAAFTGNTEGR
MSAFTGNTEGR

SEQ ID NO: 38052 - protein, 11 aa, Artificial Sequence
  Description of Artificial Sequence: Synthetic peptide
  Seed: MAAFTGNTEGR
MSAFTGNTEGK

SEQ ID NO: 38053 - protein, 11 aa, Artificial Sequence
  Description of Artificial Sequence: Synthetic peptide
  Seed: MAAFTGNTEGR
MTAFTGNTEGR

SEQ ID NO: 38054 - protein, 11 aa, Artificial Sequence
  Description of Artificial Sequence: Synthetic peptide
  Seed: MAAFTGNTEGR
MTAFTGNTEGK

SEQ ID NO: 38055 - protein, 11 aa, Artificial Sequence
  Description of Artificial Sequence: Synthetic peptide
  Seed: MAAFTGNTEGR
MTAFTGNTEGY

SEQ ID NO: 38056 - protein, 11 aa, Artificial Sequence
  Description of Artificial Sequence: Synthetic peptide
  Seed: MAAFTGNTEGR
MWAFTGNTEGR

SEQ ID NO: 38057 - protein, 11 aa, Artificial Sequence
  Description of Artificial Sequence: Synthetic peptide
  Seed: MAAFTGNTEGR
MVAFTGNTEGR

SEQ ID NO: 38058 - protein, 8 aa, Artificial Sequence
  Description of Artificial Sequence: Synthetic peptide
  Seed: MACHSAAF
MQCHSAAH

SEQ ID NO: 38059 - protein, 11 aa, Artificial Sequence
  Description of Artificial Sequence: Synthetic peptide
  Seed: MAAFTGNTEGR
MVAFTGNTEGK

SEQ ID NO: 38060 - protein, 8 aa, Artificial Sequence
  Description of Artificial Sequence: Synthetic peptide
  Seed: MACHSAAF
MACHSAAI

SEQ ID NO: 38061 - protein, 8 aa, Artificial Sequence
  Description of Artificial Sequence: Synthetic peptide
  Seed: MACHSAAF
MACHSAAL

SEQ ID NO: 38062 - protein, 8 aa, Artificial Sequence
  Description of Artificial Sequence: Synthetic peptide
  Seed: MACHSAAF
MACHSAAM

SEQ ID NO: 38063 - protein, 8 aa, Artificial Sequence
  Description of Artificial Sequence: Synthetic peptide
  Seed: MACHSAAF
MACHSAAY

SEQ ID NO: 38064 - protein, 8 aa, Artificial Sequence
  Description of Artificial Sequence: Synthetic peptide
  Seed: MACHSAAF
MRCHSAAM

SEQ ID NO: 38065 - protein, 8 aa, Artificial Sequence
  Description of Artificial Sequence: Synthetic peptide
  Seed: MACHSAAF
MRCHSAAF

SEQ ID NO: 38066 - protein, 8 aa, Artificial Sequence
  Description of Artificial Sequence: Synthetic peptide
  Seed: MACHSAAF
MRCHSAAY

SEQ ID NO: 38067 - protein, 8 aa, Artificial Sequence
  Description of Artificial Sequence: Synthetic peptide
  Seed: MACHSAAF
MNCHSAAF

SEQ ID NO: 38068 - protein, 11 aa, Artificial Sequence
  Description of Artificial Sequence: Synthetic peptide
  Seed: MAAFTGNTEGR
MMAFTGNTEGK

SEQ ID NO: 38069 - protein, 11 aa, Artificial Sequence
  Description of Artificial Sequence: Synthetic peptide
  Seed: MAAFTGNTEGR
MMAFTGNTEGR

SEQ ID NO: 38070 - protein, 11 aa, Artificial Sequence
  Description of Artificial Sequence: Synthetic peptide
  Seed: MAAFTGNTEGR
MLAFTGNTEGR

SEQ ID NO: 38071 - protein, 11 aa, Artificial Sequence
  Description of Artificial Sequence: Synthetic peptide
  Seed: MAAFTGNTEGR
MIAFTGNTEGK

SEQ ID NO: 38072 - protein, 11 aa, Artificial Sequence
  Description of Artificial Sequence: Synthetic peptide
  Seed: MAAFTGNAEGR
MFAFTGNAEGR

SEQ ID NO: 38073 - protein, 11 aa, Artificial Sequence
  Description of Artificial Sequence: Synthetic peptide
  Seed: MAAFTGNAEGR
MPAFTGNAEGR

SEQ ID NO: 38074 - protein, 11 aa, Artificial Sequence
  Description of Artificial Sequence: Synthetic peptide
  Seed: MAAFTGNAEGR
MSAFTGNAEGR

SEQ ID NO: 38075 - protein, 11 aa, Artificial Sequence
  Description of Artificial Sequence: Synthetic peptide
  Seed: MAAFTGNAEGR
MSAFTGNAEGK

SEQ ID NO: 38076 - protein, 11 aa, Artificial Sequence
  Description of Artificial Sequence: Synthetic peptide
  Seed: MAAFTGNAEGR
MTAFTGNAEGR

SEQ ID NO: 38077 - protein, 11 aa, Artificial Sequence
  Description of Artificial Sequence: Synthetic peptide
  Seed: MAAFTGNAEGR
MTAFTGNAEGK

SEQ ID NO: 38078 - protein, 11 aa, Artificial Sequence
  Description of Artificial Sequence: Synthetic peptide
  Seed: MAAFTGNAEGR
MTAFTGNAEGY

SEQ ID NO: 38079 - protein, 11 aa, Artificial Sequence
  Description of Artificial Sequence: Synthetic peptide
  Seed: MAAFTGNAEGR
MWAFTGNAEGR

SEQ ID NO: 38080 - protein, 11 aa, Artificial Sequence
  Description of Artificial Sequence: Synthetic peptide
  Seed: MAAFTGNAEGR
MYAFTGNAEGR

SEQ ID NO: 38081 - protein, 11 aa, Artificial Sequence
  Description of Artificial Sequence: Synthetic peptide
  Seed: MAAFTGNAEGR
MVAFTGNAEGR

SEQ ID NO: 38082 - protein, 11 aa, Artificial Sequence
  Description of Artificial Sequence: Synthetic peptide
  Seed: MAAFTGNAEGR
MVAFTGNAEGK

SEQ ID NO: 38083 - protein, 11 aa, Artificial Sequence
  Description of Artificial Sequence: Synthetic peptide
  Seed: MAAFTGNTEGR
MAAFTGNTEGK

SEQ ID NO: 38084 - protein, 11 aa, Artificial Sequence
  Description of Artificial Sequence: Synthetic peptide
  Seed: MAAFTGNTEGR
MRAFTGNTEGR

SEQ ID NO: 38085 - protein, 11 aa, Artificial Sequence
  Description of Artificial Sequence: Synthetic peptide
  Seed: MAAFTGNTEGR
MNAFTGNTEGR

SEQ ID NO: 38086 - protein, 11 aa, Artificial Sequence
  Description of Artificial Sequence: Synthetic peptide
  Seed: MAAFTGNTEGR
MQAFTGNTEGR

SEQ ID NO: 38087 - protein, 11 aa, Artificial Sequence
  Description of Artificial Sequence: Synthetic peptide
  Seed: MAAFTGNTEGR
MEAFTGNTEGR

SEQ ID NO: 38088 - protein, 11 aa, Artificial Sequence
  Description of Artificial Sequence: Synthetic peptide
  Seed: MAAFTGNTEGR
MGAFTGNTEGR

SEQ ID NO: 38089 - protein, 11 aa, Artificial Sequence
  Description of Artificial Sequence: Synthetic peptide
  Seed: MAAFTGNTEGR
MHAFTGNTEGR

SEQ ID NO: 38090 - protein, 11 aa, Artificial Sequence
  Description of Artificial Sequence: Synthetic peptide
  Seed: MAAFTGNTEGR
MIAFTGNTEGR

SEQ ID NO: 38091 - protein, 8 aa, Artificial Sequence
  Description of Artificial Sequence: Synthetic peptide
  Seed: MACHSAAF
MNCHSAAY

SEQ ID NO: 38092 - protein, 8 aa, Artificial Sequence
  Description of Artificial Sequence: Synthetic peptide
  Seed: MACHSAAF
MQCHSAAI

SEQ ID NO: 38093 - protein, 9 aa, Artificial Sequence
  Description of Artificial Sequence: Synthetic peptide
  Seed: LVWMACNSA
LVWMACNSV

SEQ ID NO: 38094 - protein, 8 aa, Artificial Sequence
  Description of Artificial Sequence: Synthetic peptide
  Seed: MACHSAAF
MPCHSAAF

SEQ ID NO: 38095 - protein, 8 aa, Artificial Sequence
  Description of Artificial Sequence: Synthetic peptide
  Seed: MACHSAAF
MMCHSAAM

SEQ ID NO: 38096 - protein, 8 aa, Artificial Sequence
  Description of Artificial Sequence: Synthetic peptide
  Seed: MACHSAAF
MMCHSAAF

SEQ ID NO: 38097 - protein, 8 aa, Artificial Sequence
  Description of Artificial Sequence: Synthetic peptide
  Seed: MACHSAAF
MMCHSAAW

SEQ ID NO: 38098 - protein, 8 aa, Artificial Sequence
  Description of Artificial Sequence: Synthetic peptide
  Seed: MACHSAAF
MMCHSAAY

SEQ ID NO: 38099 - protein, 8 aa, Artificial Sequence
  Description of Artificial Sequence: Synthetic peptide
  Seed: MACHSAAF
MFCHSAAM

SEQ ID NO: 38100 - protein, 8 aa, Artificial Sequence
  Description of Artificial Sequence: Synthetic peptide
  Seed: MACHSAAF
MFCHSAAF

SEQ ID NO: 38101 - protein, 8 aa, Artificial Sequence
  Description of Artificial Sequence: Synthetic peptide
  Seed: MACHSAAF
MFCHSAAY

SEQ ID NO: 38102 - protein, 8 aa, Artificial Sequence
  Description of Artificial Sequence: Synthetic peptide
  Seed: MACHSAAF
MPCHSAAL

SEQ ID NO: 38103 - protein, 8 aa, Artificial Sequence
  Description of Artificial Sequence: Synthetic peptide
  Seed: MACHSAAF
MPCHSAAM

SEQ ID NO: 38104 - protein, 8 aa, Artificial Sequence
  Description of Artificial Sequence: Synthetic peptide
  Seed: MACHSAAF
MPCHSAAW

SEQ ID NO: 38105 - protein, 8 aa, Artificial Sequence
  Description of Artificial Sequence: Synthetic peptide
  Seed: MACHSAAF
MQCHSAAL

SEQ ID NO: 38106 - protein, 8 aa, Artificial Sequence
  Description of Artificial Sequence: Synthetic peptide
  Seed: MACHSAAF
MPCHSAAY

SEQ ID NO: 38107 - protein, 8 aa, Artificial Sequence
  Description of Artificial Sequence: Synthetic peptide
  Seed: MACHSAAF
MSCHSAAL

SEQ ID NO: 38108 - protein, 8 aa, Artificial Sequence
  Description of Artificial Sequence: Synthetic peptide
  Seed: MACHSAAF
MSCHSAAM

SEQ ID NO: 38109 - protein, 8 aa, Artificial Sequence
  Description of Artificial Sequence: Synthetic peptide
  Seed: MACHSAAF
MSCHSAAF

SEQ ID NO: 38110 - protein, 8 aa, Artificial Sequence
  Description of Artificial Sequence: Synthetic peptide
  Seed: MACHSAAF
MSCHSAAY

SEQ ID NO: 38111 - protein, 8 aa, Artificial Sequence
  Description of Artificial Sequence: Synthetic peptide
  Seed: MACHSAAF
MTCHSAAL

SEQ ID NO: 38112 - protein, 8 aa, Artificial Sequence
  Description of Artificial Sequence: Synthetic peptide
  Seed: MACHSAAF
MTCHSAAM

SEQ ID NO: 38113 - protein, 8 aa, Artificial Sequence
  Description of Artificial Sequence: Synthetic peptide
  Seed: MACHSAAF
MTCHSAAF

SEQ ID NO: 38114 - protein, 8 aa, Artificial Sequence
  Description of Artificial Sequence: Synthetic peptide
  Seed: MACHSAAF
MTCHSAAY

SEQ ID NO: 38115 - protein, 8 aa, Artificial Sequence
  Description of Artificial Sequence: Synthetic peptide
  Seed: MACHSAAF
MMCHSAAL

SEQ ID NO: 38116 - protein, 8 aa, Artificial Sequence
  Description of Artificial Sequence: Synthetic peptide
  Seed: MACHSAAF
MKCHSAAY

SEQ ID NO: 38117 - protein, 8 aa, Artificial Sequence
  Description of Artificial Sequence: Synthetic peptide
  Seed: MACHSAAF
MKCHSAAF

SEQ ID NO: 38118 - protein, 8 aa, Artificial Sequence
  Description of Artificial Sequence: Synthetic peptide
  Seed: MACHSAAF
MKCHSAAM

SEQ ID NO: 38119 - protein, 8 aa, Artificial Sequence
  Description of Artificial Sequence: Synthetic peptide
  Seed: MACHSAAF
MQCHSAAM

SEQ ID NO: 38120 - protein, 8 aa, Artificial Sequence
  Description of Artificial Sequence: Synthetic peptide
  Seed: MACHSAAF
MQCHSAAF

SEQ ID NO: 38121 - protein, 8 aa, Artificial Sequence
  Description of Artificial Sequence: Synthetic peptide
  Seed: MACHSAAF
MQCHSAAW

SEQ ID NO: 38122 - protein, 8 aa, Artificial Sequence
  Description of Artificial Sequence: Synthetic peptide
  Seed: MACHSAAF
MQCHSAAY

SEQ ID NO: 38123 - protein, 8 aa, Artificial Sequence
  Description of Artificial Sequence: Synthetic peptide
  Seed: MACHSAAF
MQCHSAAV

SEQ ID NO: 38124 - protein, 8 aa, Artificial Sequence
  Description of Artificial Sequence: Synthetic peptide
  Seed: MACHSAAF
MECHSAAM

SEQ ID NO: 38125 - protein, 8 aa, Artificial Sequence
  Description of Artificial Sequence: Synthetic peptide
  Seed: MACHSAAF
MECHSAAF

SEQ ID NO: 38126 - protein, 8 aa, Artificial Sequence
  Description of Artificial Sequence: Synthetic peptide
  Seed: MACHSAAF
MECHSAAY

SEQ ID NO: 38127 - protein, 8 aa, Artificial Sequence
  Description of Artificial Sequence: Synthetic peptide
  Seed: MACHSAAF
MGCHSAAF

SEQ ID NO: 38128 - protein, 8 aa, Artificial Sequence
  Description of Artificial Sequence: Synthetic peptide
  Seed: MACHSAAF
MGCHSAAY

SEQ ID NO: 38129 - protein, 8 aa, Artificial Sequence
  Description of Artificial Sequence: Synthetic peptide
  Seed: MACHSAAF
MHCHSAAM

SEQ ID NO: 38130 - protein, 8 aa, Artificial Sequence
  Description of Artificial Sequence: Synthetic peptide
  Seed: MACHSAAF
MHCHSAAF

SEQ ID NO: 38131 - protein, 8 aa, Artificial Sequence
  Description of Artificial Sequence: Synthetic peptide
  Seed: MACHSAAF
MHCHSAAY

SEQ ID NO: 38132 - protein, 8 aa, Artificial Sequence
  Description of Artificial Sequence: Synthetic peptide
  Seed: MACHSAAF
MICHSAAF

SEQ ID NO: 38133 - protein, 8 aa, Artificial Sequence
  Description of Artificial Sequence: Synthetic peptide
  Seed: MACHSAAF
MICHSAAY

SEQ ID NO: 38134 - protein, 8 aa, Artificial Sequence
  Description of Artificial Sequence: Synthetic peptide
  Seed: MACHSAAF
MLCHSAAM

SEQ ID NO: 38135 - protein, 8 aa, Artificial Sequence
  Description of Artificial Sequence: Synthetic peptide
  Seed: MACHSAAF
MLCHSAAF

SEQ ID NO: 38136 - protein, 8 aa, Artificial Sequence
  Description of Artificial Sequence: Synthetic peptide
  Seed: MACHSAAF
MLCHSAAY

SEQ ID NO: 38137 - protein, 8 aa, Artificial Sequence
  Description of Artificial Sequence: Synthetic peptide
  Seed: MACHSAAF
MKCHSAAL

SEQ ID NO: 38138 - protein, 11 aa, Artificial Sequence
  Description of Artificial Sequence: Synthetic peptide
  Seed: MAAFTGNAEGR
MMAFTGNAEGK

SEQ ID NO: 38139 - protein, 11 aa, Artificial Sequence
  Description of Artificial Sequence: Synthetic peptide
  Seed: MAAFTGNAEGR
MMAFTGNAEGR

SEQ ID NO: 38140 - protein, 11 aa, Artificial Sequence
  Description of Artificial Sequence: Synthetic peptide
  Seed: MAAFTGNAEGR
MLAFTGNAEGR

SEQ ID NO: 38141 - protein, 11 aa, Artificial Sequence
  Description of Artificial Sequence: Synthetic peptide
  Seed: LVWMACNSAAF
LGWMACNSAAY

SEQ ID NO: 38142 - protein, 11 aa, Artificial Sequence
  Description of Artificial Sequence: Synthetic peptide
  Seed: LVWMACNSAAF
LQWMACNSAAW

SEQ ID NO: 38143 - protein, 11 aa, Artificial Sequence
  Description of Artificial Sequence: Synthetic peptide
  Seed: LVWMACNSAAF
LQWMACNSAAY

SEQ ID NO: 38144 - protein, 11 aa, Artificial Sequence
  Description of Artificial Sequence: Synthetic peptide
  Seed: LVWMACNSAAF
LQWMACNSAAV

SEQ ID NO: 38145 - protein, 11 aa, Artificial Sequence
  Description of Artificial Sequence: Synthetic peptide
  Seed: LVWMACNSAAF
LEWMACNSAAL

SEQ ID NO: 38146 - protein, 11 aa, Artificial Sequence
  Description of Artificial Sequence: Synthetic peptide
  Seed: LVWMACNSAAF
LEWMACNSAAM

SEQ ID NO: 38147 - protein, 11 aa, Artificial Sequence
  Description of Artificial Sequence: Synthetic peptide
  Seed: LVWMACNSAAF
LEWMACNSAAF

SEQ ID NO: 38148 - protein, 11 aa, Artificial Sequence
  Description of Artificial Sequence: Synthetic peptide
  Seed: LVWMACNSAAF
LEWMACNSAAY

SEQ ID NO: 38149 - protein, 11 aa, Artificial Sequence
  Description of Artificial Sequence: Synthetic peptide
  Seed: LVWMACNSAAF
LGWMACNSAAM

SEQ ID NO: 38150 - protein, 11 aa, Artificial Sequence
  Description of Artificial Sequence: Synthetic peptide
  Seed: LVWMACNSAAF
LGWMACNSAAF

SEQ ID NO: 38151 - protein, 11 aa, Artificial Sequence
  Description of Artificial Sequence: Synthetic peptide
  Seed: LVWMACNSAAF
LHWMACNSAAL

SEQ ID NO: 38152 - protein, 11 aa, Artificial Sequence
  Description of Artificial Sequence: Synthetic peptide
  Seed: MAAFTGNAEGR
MIAFTGNAEGK

SEQ ID NO: 38153 - protein, 11 aa, Artificial Sequence
  Description of Artificial Sequence: Synthetic peptide
  Seed: LVWMACNSAAF
LHWMACNSAAM

SEQ ID NO: 38154 - protein, 11 aa, Artificial Sequence
  Description of Artificial Sequence: Synthetic peptide
  Seed: LVWMACNSAAF
LHWMACNSAAF

SEQ ID NO: 38155 - protein, 11 aa, Artificial Sequence
  Description of Artificial Sequence: Synthetic peptide
  Seed: LVWMACNSAAF
LHWMACNSAAY

SEQ ID NO: 38156 - protein, 11 aa, Artificial Sequence
  Description of Artificial Sequence: Synthetic peptide
  Seed: LVWMACNSAAF
LIWMACNSAAM

SEQ ID NO: 38157 - protein, 11 aa, Artificial Sequence
  Description of Artificial Sequence: Synthetic peptide
  Seed: LVWMACNSAAF
LIWMACNSAAF

SEQ ID NO: 38158 - protein, 11 aa, Artificial Sequence
  Description of Artificial Sequence: Synthetic peptide
  Seed: LVWMACNSAAF
LIWMACNSAAY

SEQ ID NO: 38159 - protein, 11 aa, Artificial Sequence
  Description of Artificial Sequence: Synthetic peptide
  Seed: LVWMACNSAAF
LLWMACNSAAL

SEQ ID NO: 38160 - protein, 11 aa, Artificial Sequence
  Description of Artificial Sequence: Synthetic peptide
  Seed: LVWMACNSAAF
LLWMACNSAAM

SEQ ID NO: 38161 - protein, 11 aa, Artificial Sequence
  Description of Artificial Sequence: Synthetic peptide
  Seed: LVWMACNSAAF
LLWMACNSAAF

SEQ ID NO: 38162 - protein, 11 aa, Artificial Sequence
  Description of Artificial Sequence: Synthetic peptide
  Seed: LVWMACNSAAF
LQWMACNSAAF

SEQ ID NO: 38163 - protein, 11 aa, Artificial Sequence
  Description of Artificial Sequence: Synthetic peptide
  Seed: LVWMACNSAAF
LQWMACNSAAM

SEQ ID NO: 38164 - protein, 11 aa, Artificial Sequence
  Description of Artificial Sequence: Synthetic peptide
  Seed: LVWMACNSAAF
LQWMACNSAAL

SEQ ID NO: 38165 - protein, 11 aa, Artificial Sequence
  Description of Artificial Sequence: Synthetic peptide
  Seed: LVWMACNSAAF
LQWMACNSAAI

SEQ ID NO: 38166 - protein, 11 aa, Artificial Sequence
  Description of Artificial Sequence: Synthetic peptide
  Seed: LVWMACNSAAF
LAWMACNSAAL

SEQ ID NO: 38167 - protein, 11 aa, Artificial Sequence
  Description of Artificial Sequence: Synthetic peptide
  Seed: LVWMACNSAAF
LAWMACNSAAM

SEQ ID NO: 38168 - protein, 11 aa, Artificial Sequence
  Description of Artificial Sequence: Synthetic peptide
  Seed: LVWMACNSAAF
LAWMACNSAAF

SEQ ID NO: 38169 - protein, 11 aa, Artificial Sequence
  Description of Artificial Sequence: Synthetic peptide
  Seed: LVWMACNSAAF
LAWMACNSAAY

SEQ ID NO: 38170 - protein, 11 aa, Artificial Sequence
  Description of Artificial Sequence: Synthetic peptide
  Seed: LVWMACNSAAF
LRWMACNSAAL

SEQ ID NO: 38171 - protein, 11 aa, Artificial Sequence
  Description of Artificial Sequence: Synthetic peptide
  Seed: LVWMACNSAAF
LRWMACNSAAM

SEQ ID NO: 38172 - protein, 11 aa, Artificial Sequence
  Description of Artificial Sequence: Synthetic peptide
  Seed: LVWMACNSAAF
LRWMACNSAAF

SEQ ID NO: 38173 - protein, 11 aa, Artificial Sequence
  Description of Artificial Sequence: Synthetic peptide
  Seed: LVWMACNSAAF
LRWMACNSAAW

SEQ ID NO: 38174 - protein, 11 aa, Artificial Sequence
  Description of Artificial Sequence: Synthetic peptide
  Seed: LVWMACNSAAF
LRWMACNSAAY

SEQ ID NO: 38175 - protein, 11 aa, Artificial Sequence
  Description of Artificial Sequence: Synthetic peptide
  Seed: LVWMACNSAAF
LNWMACNSAAM

SEQ ID NO: 38176 - protein, 11 aa, Artificial Sequence
  Description of Artificial Sequence: Synthetic peptide
  Seed: LVWMACNSAAF
LNWMACNSAAF

SEQ ID NO: 38177 - protein, 11 aa, Artificial Sequence
  Description of Artificial Sequence: Synthetic peptide
  Seed: LVWMACNSAAF
LNWMACNSAAY

SEQ ID NO: 38178 - protein, 11 aa, Artificial Sequence
  Description of Artificial Sequence: Synthetic peptide
  Seed: LVWMACNSAAF
LDWMACNSAAM

SEQ ID NO: 38179 - protein, 11 aa, Artificial Sequence
  Description of Artificial Sequence: Synthetic peptide
  Seed: LVWMACNSAAF
LDWMACNSAAF

SEQ ID NO: 38180 - protein, 11 aa, Artificial Sequence
  Description of Artificial Sequence: Synthetic peptide
  Seed: LVWMACNSAAF
LDWMACNSAAY

SEQ ID NO: 38181 - protein, 11 aa, Artificial Sequence
  Description of Artificial Sequence: Synthetic peptide
  Seed: LVWMACNSAAF
LCWMACNSAAM

SEQ ID NO: 38182 - protein, 11 aa, Artificial Sequence
  Description of Artificial Sequence: Synthetic peptide
  Seed: LVWMACNSAAF
LCWMACNSAAF

SEQ ID NO: 38183 - protein, 11 aa, Artificial Sequence
  Description of Artificial Sequence: Synthetic peptide
  Seed: LVWMACNSAAF
LCWMACNSAAY

SEQ ID NO: 38184 - protein, 11 aa, Artificial Sequence
  Description of Artificial Sequence: Synthetic peptide
  Seed: LVWMACNSAAF
LQWMACNSAAH

SEQ ID NO: 38185 - protein, 11 aa, Artificial Sequence
  Description of Artificial Sequence: Synthetic peptide
  Seed: LVWMACNSAAF
LLWMACNSAAY

SEQ ID NO: 38186 - protein, 11 aa, Artificial Sequence
  Description of Artificial Sequence: Synthetic peptide
  Seed: LVWMACNSAAF
LKWMACNSAAI

SEQ ID NO: 38187 - protein, 11 aa, Artificial Sequence
  Description of Artificial Sequence: Synthetic peptide
  Seed: LVWMACNSAAF
LKWMACNSAAL

SEQ ID NO: 38188 - protein, 11 aa, Artificial Sequence
  Description of Artificial Sequence: Synthetic peptide
  Seed: LVWMACNSAAF
LTWMACNSAAY

SEQ ID NO: 38189 - protein, 11 aa, Artificial Sequence
  Description of Artificial Sequence: Synthetic peptide
  Seed: LVWMACNSAAF
LWWMACNSAAF

SEQ ID NO: 38190 - protein, 11 aa, Artificial Sequence
  Description of Artificial Sequence: Synthetic peptide
  Seed: LVWMACNSAAF
LWWMACNSAAW

SEQ ID NO: 38191 - protein, 11 aa, Artificial Sequence
  Description of Artificial Sequence: Synthetic peptide
  Seed: LVWMACNSAAF
LWWMACNSAAY

SEQ ID NO: 38192 - protein, 11 aa, Artificial Sequence
  Description of Artificial Sequence: Synthetic peptide
  Seed: LVWMACNSAAF
LYWMACNSAAI

SEQ ID NO: 38193 - protein, 11 aa, Artificial Sequence
  Description of Artificial Sequence: Synthetic peptide
  Seed: LVWMACNSAAF
LYWMACNSAAL

SEQ ID NO: 38194 - protein, 11 aa, Artificial Sequence
  Description of Artificial Sequence: Synthetic peptide
  Seed: LVWMACNSAAF
LYWMACNSAAM

SEQ ID NO: 38195 - protein, 11 aa, Artificial Sequence
  Description of Artificial Sequence: Synthetic peptide
  Seed: LVWMACNSAAF
LYWMACNSAAF

SEQ ID NO: 38196 - protein, 11 aa, Artificial Sequence
  Description of Artificial Sequence: Synthetic peptide
  Seed: LVWMACNSAAF
LYWMACNSAAW

SEQ ID NO: 38197 - protein, 11 aa, Artificial Sequence
  Description of Artificial Sequence: Synthetic peptide
  Seed: LVWMACNSAAF
LYWMACNSAAY

SEQ ID NO: 38198 - protein, 11 aa, Artificial Sequence
  Description of Artificial Sequence: Synthetic peptide
  Seed: LVWMACNSAAF
LVWMACNSAAM

SEQ ID NO: 38199 - protein, 11 aa, Artificial Sequence
  Description of Artificial Sequence: Synthetic peptide
  Seed: LVWMACNSAAF
LVWMACNSAAY

SEQ ID NO: 38200 - protein, 11 aa, Artificial Sequence
  Description of Artificial Sequence: Synthetic peptide
  Seed: MAAFTGNAEGR
MAAFTGNAEGK

SEQ ID NO: 38201 - protein, 11 aa, Artificial Sequence
  Description of Artificial Sequence: Synthetic peptide
  Seed: MAAFTGNAEGR
MRAFTGNAEGR

SEQ ID NO: 38202 - protein, 11 aa, Artificial Sequence
  Description of Artificial Sequence: Synthetic peptide
  Seed: MAAFTGNAEGR
MNAFTGNAEGR

SEQ ID NO: 38203 - protein, 11 aa, Artificial Sequence
  Description of Artificial Sequence: Synthetic peptide
  Seed: MAAFTGNAEGR
MQAFTGNAEGR

SEQ ID NO: 38204 - protein, 11 aa, Artificial Sequence
  Description of Artificial Sequence: Synthetic peptide
  Seed: MAAFTGNAEGR
MEAFTGNAEGR

SEQ ID NO: 38205 - protein, 11 aa, Artificial Sequence
  Description of Artificial Sequence: Synthetic peptide
  Seed: MAAFTGNAEGR
MGAFTGNAEGR

SEQ ID NO: 38206 - protein, 11 aa, Artificial Sequence
  Description of Artificial Sequence: Synthetic peptide
  Seed: MAAFTGNAEGR
MHAFTGNAEGR

SEQ ID NO: 38207 - protein, 11 aa, Artificial Sequence
  Description of Artificial Sequence: Synthetic peptide
  Seed: MAAFTGNAEGR
MIAFTGNAEGR

SEQ ID NO: 38208 - protein, 11 aa, Artificial Sequence
  Description of Artificial Sequence: Synthetic peptide
  Seed: LVWMACNSAAF
LWWMACNSAAM

SEQ ID NO: 38209 - protein, 11 aa, Artificial Sequence
  Description of Artificial Sequence: Synthetic peptide
  Seed: LVWMACNSAAF
LTWMACNSAAF

SEQ ID NO: 38210 - protein, 11 aa, Artificial Sequence
  Description of Artificial Sequence: Synthetic peptide
  Seed: LVWMACNSAAF
LKWMACNSAAM

SEQ ID NO: 38211 - protein, 11 aa, Artificial Sequence
  Description of Artificial Sequence: Synthetic peptide
  Seed: LVWMACNSAAF
LTWMACNSAAM

SEQ ID NO: 38212 - protein, 11 aa, Artificial Sequence
  Description of Artificial Sequence: Synthetic peptide
  Seed: LVWMACNSAAF
LKWMACNSAAF

SEQ ID NO: 38213 - protein, 11 aa, Artificial Sequence
  Description of Artificial Sequence: Synthetic peptide
  Seed: LVWMACNSAAF
LKWMACNSAAW

SEQ ID NO: 38214 - protein, 11 aa, Artificial Sequence
  Description of Artificial Sequence: Synthetic peptide
  Seed: LVWMACNSAAF
LKWMACNSAAY

SEQ ID NO: 38215 - protein, 11 aa, Artificial Sequence
  Description of Artificial Sequence: Synthetic peptide
  Seed: LVWMACNSAAF
LMWMACNSAAL

SEQ ID NO: 38216 - protein, 11 aa, Artificial Sequence
  Description of Artificial Sequence: Synthetic peptide
  Seed: LVWMACNSAAF
LMWMACNSAAM

SEQ ID NO: 38217 - protein, 11 aa, Artificial Sequence
  Description of Artificial Sequence: Synthetic peptide
  Seed: LVWMACNSAAF
LMWMACNSAAF

SEQ ID NO: 38218 - protein, 11 aa, Artificial Sequence
  Description of Artificial Sequence: Synthetic peptide
  Seed: LVWMACNSAAF
LMWMACNSAAW

SEQ ID NO: 38219 - protein, 11 aa, Artificial Sequence
  Description of Artificial Sequence: Synthetic peptide
  Seed: LVWMACNSAAF
LMWMACNSAAY

SEQ ID NO: 38220 - protein, 11 aa, Artificial Sequence
  Description of Artificial Sequence: Synthetic peptide
  Seed: LVWMACNSAAF
LFWMACNSAAM

SEQ ID NO: 38221 - protein, 11 aa, Artificial Sequence
  Description of Artificial Sequence: Synthetic peptide
  Seed: LVWMACNSAAF
LFWMACNSAAF

SEQ ID NO: 38222 - protein, 11 aa, Artificial Sequence
  Description of Artificial Sequence: Synthetic peptide
  Seed: LVWMACNSAAF
LFWMACNSAAW

SEQ ID NO: 38223 - protein, 11 aa, Artificial Sequence
  Description of Artificial Sequence: Synthetic peptide
  Seed: LVWMACNSAAF
LFWMACNSAAY

SEQ ID NO: 38224 - protein, 11 aa, Artificial Sequence
  Description of Artificial Sequence: Synthetic peptide
  Seed: LVWMACNSAAF
LPWMACNSAAM

SEQ ID NO: 38225 - protein, 11 aa, Artificial Sequence
  Description of Artificial Sequence: Synthetic peptide
  Seed: LVWMACNSAAF
LPWMACNSAAF

SEQ ID NO: 38226 - protein, 11 aa, Artificial Sequence
  Description of Artificial Sequence: Synthetic peptide
  Seed: LVWMACNSAAF
LPWMACNSAAY

SEQ ID NO: 38227 - protein, 11 aa, Artificial Sequence
  Description of Artificial Sequence: Synthetic peptide
  Seed: LVWMACNSAAF
LSWMACNSAAL

SEQ ID NO: 38228 - protein, 11 aa, Artificial Sequence
  Description of Artificial Sequence: Synthetic peptide
  Seed: LVWMACNSAAF
LSWMACNSAAM

SEQ ID NO: 38229 - protein, 11 aa, Artificial Sequence
  Description of Artificial Sequence: Synthetic peptide
  Seed: LVWMACNSAAF
LSWMACNSAAF

SEQ ID NO: 38230 - protein, 11 aa, Artificial Sequence
  Description of Artificial Sequence: Synthetic peptide
  Seed: LVWMACNSAAF
LSWMACNSAAY

SEQ ID NO: 38231 - protein, 9 aa, Artificial Sequence
  Description of Artificial Sequence: Synthetic peptide
  Seed: LQNSQVFSL
LTNSQVFSY

SEQ ID NO: 38232 - protein, 9 aa, Artificial Sequence
  Description of Artificial Sequence: Synthetic peptide
  Seed: LQNSQVFSL
LTNSQVFSW

SEQ ID NO: 38233 - protein, 9 aa, Artificial Sequence
  Description of Artificial Sequence: Synthetic peptide
  Seed: LQNSQVFSL
LTNSQVFSF

SEQ ID NO: 38234 - protein, 9 aa, Artificial Sequence
  Description of Artificial Sequence: Synthetic peptide
  Seed: LPACVYGPA
LVACVYGPM

SEQ ID NO: 38235 - protein, 9 aa, Artificial Sequence
  Description of Artificial Sequence: Synthetic peptide
  Seed: LPACVYGPA
LPACVYGPY

SEQ ID NO: 38236 - protein, 9 aa, Artificial Sequence
  Description of Artificial Sequence: Synthetic peptide
  Seed: LPACVYGPA
LPACVYGPV

SEQ ID NO: 38237 - protein, 9 aa, Artificial Sequence
  Description of Artificial Sequence: Synthetic peptide
  Seed: LPACVYGPA
LSACVYGPM

SEQ ID NO: 38238 - protein, 9 aa, Artificial Sequence
  Description of Artificial Sequence: Synthetic peptide
  Seed: LPACVYGPA
LSACVYGPF

SEQ ID NO: 38239 - protein, 9 aa, Artificial Sequence
  Description of Artificial Sequence: Synthetic peptide
  Seed: LPACVYGPA
LSACVYGPY

SEQ ID NO: 38240 - protein, 9 aa, Artificial Sequence
  Description of Artificial Sequence: Synthetic peptide
  Seed: LPACVYGPA
LTACVYGPM

SEQ ID NO: 38241 - protein, 9 aa, Artificial Sequence
  Description of Artificial Sequence: Synthetic peptide
  Seed: LPACVYGPA
LTACVYGPF

SEQ ID NO: 38242 - protein, 9 aa, Artificial Sequence
  Description of Artificial Sequence: Synthetic peptide
  Seed: LPACVYGPA
LTACVYGPY

SEQ ID NO: 38243 - protein, 9 aa, Artificial Sequence
  Description of Artificial Sequence: Synthetic peptide
  Seed: LPACVYGPA
LVACVYGPL

SEQ ID NO: 38244 - protein, 9 aa, Artificial Sequence
  Description of Artificial Sequence: Synthetic peptide
  Seed: LPACVYGPA
LVACVYGPF

SEQ ID NO: 38245 - protein, 10 aa, Artificial Sequence
  Description of Artificial Sequence: Synthetic peptide
  Seed: LPACVYGPAV
LLACVYGPAY

SEQ ID NO: 38246 - protein, 9 aa, Artificial Sequence
  Description of Artificial Sequence: Synthetic peptide
  Seed: LPACVYGPA
LVACVYGPY

SEQ ID NO: 38247 - protein, 10 aa, Artificial Sequence
  Description of Artificial Sequence: Synthetic peptide
  Seed: LPACVYGPAV
LAACVYGPAA

SEQ ID NO: 38248 - protein, 10 aa, Artificial Sequence
  Description of Artificial Sequence: Synthetic peptide
  Seed: LPACVYGPAV
LAACVYGPAL

SEQ ID NO: 38249 - protein, 10 aa, Artificial Sequence
  Description of Artificial Sequence: Synthetic peptide
  Seed: LPACVYGPAV
LAACVYGPAM

SEQ ID NO: 38250 - protein, 10 aa, Artificial Sequence
  Description of Artificial Sequence: Synthetic peptide
  Seed: LPACVYGPAV
LAACVYGPAF

SEQ ID NO: 38251 - protein, 10 aa, Artificial Sequence
  Description of Artificial Sequence: Synthetic peptide
  Seed: LPACVYGPAV
LAACVYGPAY

SEQ ID NO: 38252 - protein, 10 aa, Artificial Sequence
  Description of Artificial Sequence: Synthetic peptide
  Seed: LPACVYGPAV
LCACVYGPAY

SEQ ID NO: 38253 - protein, 10 aa, Artificial Sequence
  Description of Artificial Sequence: Synthetic peptide
  Seed: LPACVYGPAV
LQACVYGPAY

SEQ ID NO: 38254 - protein, 10 aa, Artificial Sequence
  Description of Artificial Sequence: Synthetic peptide
  Seed: LPACVYGPAV
LGACVYGPAY

SEQ ID NO: 38255 - protein, 9 aa, Artificial Sequence
  Description of Artificial Sequence: Synthetic peptide
  Seed: LPACVYGPA
LPACVYGPW

SEQ ID NO: 38256 - protein, 9 aa, Artificial Sequence
  Description of Artificial Sequence: Synthetic peptide
  Seed: LPACVYGPA
LPACVYGPT

SEQ ID NO: 38257 - protein, 9 aa, Artificial Sequence
  Description of Artificial Sequence: Synthetic peptide
  Seed: LPACVYGPA
LPACVYGPS

SEQ ID NO: 38258 - protein, 9 aa, Artificial Sequence
  Description of Artificial Sequence: Synthetic peptide
  Seed: LPACVYGPA
LPACVYGPP

SEQ ID NO: 38259 - protein, 9 aa, Artificial Sequence
  Description of Artificial Sequence: Synthetic peptide
  Seed: LPACVYGPA
LGACVYGPY

SEQ ID NO: 38260 - protein, 9 aa, Artificial Sequence
  Description of Artificial Sequence: Synthetic peptide
  Seed: LPACVYGPA
LIACVYGPM

SEQ ID NO: 38261 - protein, 9 aa, Artificial Sequence
  Description of Artificial Sequence: Synthetic peptide
  Seed: LPACVYGPA
LIACVYGPF

SEQ ID NO: 38262 - protein, 9 aa, Artificial Sequence
  Description of Artificial Sequence: Synthetic peptide
  Seed: LPACVYGPA
LIACVYGPY

SEQ ID NO: 38263 - protein, 9 aa, Artificial Sequence
  Description of Artificial Sequence: Synthetic peptide
  Seed: LPACVYGPA
LLACVYGPF

SEQ ID NO: 38264 - protein, 9 aa, Artificial Sequence
  Description of Artificial Sequence: Synthetic peptide
  Seed: LPACVYGPA
LLACVYGPY

SEQ ID NO: 38265 - protein, 9 aa, Artificial Sequence
  Description of Artificial Sequence: Synthetic peptide
  Seed: LPACVYGPA
LMACVYGPL

SEQ ID NO: 38266 - protein, 9 aa, Artificial Sequence
  Description of Artificial Sequence: Synthetic peptide
  Seed: LPACVYGPA
LMACVYGPM

SEQ ID NO: 38267 - protein, 9 aa, Artificial Sequence
  Description of Artificial Sequence: Synthetic peptide
  Seed: LPACVYGPA
LMACVYGPF

SEQ ID NO: 38268 - protein, 9 aa, Artificial Sequence
  Description of Artificial Sequence: Synthetic peptide
  Seed: LPACVYGPA
LMACVYGPY

SEQ ID NO: 38269 - protein, 9 aa, Artificial Sequence
  Description of Artificial Sequence: Synthetic peptide
  Seed: LPACVYGPA
LFACVYGPY

SEQ ID NO: 38270 - protein, 9 aa, Artificial Sequence
  Description of Artificial Sequence: Synthetic peptide
  Seed: LPACVYGPA
LPACVYGPC

SEQ ID NO: 38271 - protein, 9 aa, Artificial Sequence
  Description of Artificial Sequence: Synthetic peptide
  Seed: LPACVYGPA
LPACVYGPQ

SEQ ID NO: 38272 - protein, 9 aa, Artificial Sequence
  Description of Artificial Sequence: Synthetic peptide
  Seed: LPACVYGPA
LPACVYGPG

SEQ ID NO: 38273 - protein, 9 aa, Artificial Sequence
  Description of Artificial Sequence: Synthetic peptide
  Seed: LPACVYGPA
LPACVYGPH

SEQ ID NO: 38274 - protein, 9 aa, Artificial Sequence
  Description of Artificial Sequence: Synthetic peptide
  Seed: LPACVYGPA
LPACVYGPI

SEQ ID NO: 38275 - protein, 9 aa, Artificial Sequence
  Description of Artificial Sequence: Synthetic peptide
  Seed: LPACVYGPA
LPACVYGPL

SEQ ID NO: 38276 - protein, 9 aa, Artificial Sequence
  Description of Artificial Sequence: Synthetic peptide
  Seed: LPACVYGPA
LPACVYGPM

SEQ ID NO: 38277 - protein, 9 aa, Artificial Sequence
  Description of Artificial Sequence: Synthetic peptide
  Seed: LPACVYGPA
LPACVYGPF

SEQ ID NO: 38278 - protein, 10 aa, Artificial Sequence
  Description of Artificial Sequence: Synthetic peptide
  Seed: LPACVYGPAV
LIACVYGPAY

SEQ ID NO: 38279 - protein, 10 aa, Artificial Sequence
  Description of Artificial Sequence: Synthetic peptide
  Seed: LPACVYGPAV
LMACVYGPAF

SEQ ID NO: 38280 - protein, 9 aa, Artificial Sequence
  Description of Artificial Sequence: Synthetic peptide
  Seed: LPACVYGPA
LCACVYGPY

SEQ ID NO: 38281 - protein, 9 aa, Artificial Sequence
  Description of Artificial Sequence: Synthetic peptide
  Seed: LPFEKSTVM
LAFEKSTVL

SEQ ID NO: 38282 - protein, 11 aa, Artificial Sequence
  Description of Artificial Sequence: Synthetic peptide
  Seed: LPACVYGPAVA
LPACVYGPAVV

SEQ ID NO: 38283 - protein, 8 aa, Artificial Sequence
  Description of Artificial Sequence: Synthetic peptide
  Seed: LPFEKSTV
LPFEKSTI

SEQ ID NO: 38284 - protein, 8 aa, Artificial Sequence
  Description of Artificial Sequence: Synthetic peptide
  Seed: LPFEKSTV
LPFEKSTL

SEQ ID NO: 38285 - protein, 8 aa, Artificial Sequence
  Description of Artificial Sequence: Synthetic peptide
  Seed: LPFEKSTV
LPFEKSTM

SEQ ID NO: 38286 - protein, 8 aa, Artificial Sequence
  Description of Artificial Sequence: Synthetic peptide
  Seed: LPFEKSTV
LPFEKSTF

SEQ ID NO: 38287 - protein, 9 aa, Artificial Sequence
  Description of Artificial Sequence: Synthetic peptide
  Seed: LPFEKSTVM
LAFEKSTVA

SEQ ID NO: 38288 - protein, 9 aa, Artificial Sequence
  Description of Artificial Sequence: Synthetic peptide
  Seed: LPFEKSTVM
LAFEKSTVC

SEQ ID NO: 38289 - protein, 9 aa, Artificial Sequence
  Description of Artificial Sequence: Synthetic peptide
  Seed: LPFEKSTVM
LAFEKSTVH

SEQ ID NO: 38290 - protein, 9 aa, Artificial Sequence
  Description of Artificial Sequence: Synthetic peptide
  Seed: LPFEKSTVM
LAFEKSTVI

SEQ ID NO: 38291 - protein, 9 aa, Artificial Sequence
  Description of Artificial Sequence: Synthetic peptide
  Seed: LPFEKSTVM
LAFEKSTVM

SEQ ID NO: 38292 - protein, 10 aa, Artificial Sequence
  Description of Artificial Sequence: Synthetic peptide
  Seed: LPACVYGPAV
LMACVYGPAY

SEQ ID NO: 38293 - protein, 9 aa, Artificial Sequence
  Description of Artificial Sequence: Synthetic peptide
  Seed: LPFEKSTVM
LAFEKSTVF

SEQ ID NO: 38294 - protein, 9 aa, Artificial Sequence
  Description of Artificial Sequence: Synthetic peptide
  Seed: LPFEKSTVM
LAFEKSTVT

SEQ ID NO: 38295 - protein, 9 aa, Artificial Sequence
  Description of Artificial Sequence: Synthetic peptide
  Seed: LPFEKSTVM
LAFEKSTVW

SEQ ID NO: 38296 - protein, 9 aa, Artificial Sequence
  Description of Artificial Sequence: Synthetic peptide
  Seed: LPFEKSTVM
LAFEKSTVY

SEQ ID NO: 38297 - protein, 9 aa, Artificial Sequence
  Description of Artificial Sequence: Synthetic peptide
  Seed: LPFEKSTVM
LAFEKSTVV

SEQ ID NO: 38298 - protein, 9 aa, Artificial Sequence
  Description of Artificial Sequence: Synthetic peptide
  Seed: LPFEKSTVM
LRFEKSTVA

SEQ ID NO: 38299 - protein, 9 aa, Artificial Sequence
  Description of Artificial Sequence: Synthetic peptide
  Seed: LPFEKSTVM
LRFEKSTVH

SEQ ID NO: 38300 - protein, 9 aa, Artificial Sequence
  Description of Artificial Sequence: Synthetic peptide
  Seed: LPFEKSTVM
LRFEKSTVI

SEQ ID NO: 38301 - protein, 9 aa, Artificial Sequence
  Description of Artificial Sequence: Synthetic peptide
  Seed: LPFEKSTVM
LRFEKSTVL

SEQ ID NO: 38302 - protein, 11 aa, Artificial Sequence
  Description of Artificial Sequence: Synthetic peptide
  Seed: LPACVYGPAVA
LPACVYGPAVF

SEQ ID NO: 38303 - protein, 11 aa, Artificial Sequence
  Description of Artificial Sequence: Synthetic peptide
  Seed: LPACVYGPAVA
LPACVYGPAVM

SEQ ID NO: 38304 - protein, 11 aa, Artificial Sequence
  Description of Artificial Sequence: Synthetic peptide
  Seed: LPACVYGPAVA
LPACVYGPAVL

SEQ ID NO: 38305 - protein, 11 aa, Artificial Sequence
  Description of Artificial Sequence: Synthetic peptide
  Seed: LPACVYGPAVA
LPACVYGPAVI

SEQ ID NO: 38306 - protein, 10 aa, Artificial Sequence
  Description of Artificial Sequence: Synthetic peptide
  Seed: LPACVYGPAV
LFACVYGPAY

SEQ ID NO: 38307 - protein, 10 aa, Artificial Sequence
  Description of Artificial Sequence: Synthetic peptide
  Seed: LPACVYGPAV
LPACVYGPAA

SEQ ID NO: 38308 - protein, 10 aa, Artificial Sequence
  Description of Artificial Sequence: Synthetic peptide
  Seed: LPACVYGPAV
LPACVYGPAC

SEQ ID NO: 38309 - protein, 10 aa, Artificial Sequence
  Description of Artificial Sequence: Synthetic peptide
  Seed: LPACVYGPAV
LPACVYGPAG

SEQ ID NO: 38310 - protein, 10 aa, Artificial Sequence
  Description of Artificial Sequence: Synthetic peptide
  Seed: LPACVYGPAV
LPACVYGPAH

SEQ ID NO: 38311 - protein, 10 aa, Artificial Sequence
  Description of Artificial Sequence: Synthetic peptide
  Seed: LPACVYGPAV
LPACVYGPAI

SEQ ID NO: 38312 - protein, 10 aa, Artificial Sequence
  Description of Artificial Sequence: Synthetic peptide
  Seed: LPACVYGPAV
LPACVYGPAL

SEQ ID NO: 38313 - protein, 10 aa, Artificial Sequence
  Description of Artificial Sequence: Synthetic peptide
  Seed: LPACVYGPAV
LPACVYGPAM

SEQ ID NO: 38314 - protein, 10 aa, Artificial Sequence
  Description of Artificial Sequence: Synthetic peptide
  Seed: LPACVYGPAV
LPACVYGPAF

SEQ ID NO: 38315 - protein, 10 aa, Artificial Sequence
  Description of Artificial Sequence: Synthetic peptide
  Seed: LPACVYGPAV
LPACVYGPAP

SEQ ID NO: 38316 - protein, 10 aa, Artificial Sequence
  Description of Artificial Sequence: Synthetic peptide
  Seed: LPACVYGPAV
LPACVYGPAS

SEQ ID NO: 38317 - protein, 10 aa, Artificial Sequence
  Description of Artificial Sequence: Synthetic peptide
  Seed: LPACVYGPAV
LPACVYGPAT

SEQ ID NO: 38318 - protein, 10 aa, Artificial Sequence
  Description of Artificial Sequence: Synthetic peptide
  Seed: LPACVYGPAV
LPACVYGPAW

SEQ ID NO: 38319 - protein, 10 aa, Artificial Sequence
  Description of Artificial Sequence: Synthetic peptide
  Seed: LPACVYGPAV
LPACVYGPAY

SEQ ID NO: 38320 - protein, 10 aa, Artificial Sequence
  Description of Artificial Sequence: Synthetic peptide
  Seed: LPACVYGPAV
LSACVYGPAY

SEQ ID NO: 38321 - protein, 10 aa, Artificial Sequence
  Description of Artificial Sequence: Synthetic peptide
  Seed: LPACVYGPAV
LTACVYGPAY

SEQ ID NO: 38322 - protein, 10 aa, Artificial Sequence
  Description of Artificial Sequence: Synthetic peptide
  Seed: LPACVYGPAV
LYACVYGPAY

SEQ ID NO: 38323 - protein, 10 aa, Artificial Sequence
  Description of Artificial Sequence: Synthetic peptide
  Seed: LPACVYGPAV
LVACVYGPAF

SEQ ID NO: 38324 - protein, 10 aa, Artificial Sequence
  Description of Artificial Sequence: Synthetic peptide
  Seed: LPACVYGPAV
LVACVYGPAY

SEQ ID NO: 38325 - protein, 9 aa, Artificial Sequence
  Description of Artificial Sequence: Synthetic peptide
  Seed: LPACVYGPA
LQACVYGPY

SEQ ID NO: 38326 - protein, 9 aa, Artificial Sequence
  Description of Artificial Sequence: Synthetic peptide
  Seed: LPACVYGPA
LAACVYGPV

SEQ ID NO: 38327 - protein, 9 aa, Artificial Sequence
  Description of Artificial Sequence: Synthetic peptide
  Seed: LQNSQVFSL
LTNSQVFSM

SEQ ID NO: 38328 - protein, 9 aa, Artificial Sequence
  Description of Artificial Sequence: Synthetic peptide
  Seed: LPACVYGLA
LSACVYGLM

SEQ ID NO: 38329 - protein, 9 aa, Artificial Sequence
  Description of Artificial Sequence: Synthetic peptide
  Seed: LPACVYGLA
LPACVYGLP

SEQ ID NO: 38330 - protein, 9 aa, Artificial Sequence
  Description of Artificial Sequence: Synthetic peptide
  Seed: LPACVYGLA
LPACVYGLW

SEQ ID NO: 38331 - protein, 9 aa, Artificial Sequence
  Description of Artificial Sequence: Synthetic peptide
  Seed: LPACVYGLA
LPACVYGLY

SEQ ID NO: 38332 - protein, 9 aa, Artificial Sequence
  Description of Artificial Sequence: Synthetic peptide
  Seed: LPACVYGLA
LSACVYGLA

SEQ ID NO: 38333 - protein, 9 aa, Artificial Sequence
  Description of Artificial Sequence: Synthetic peptide
  Seed: LPACVYGLA
LSACVYGLI

SEQ ID NO: 38334 - protein, 9 aa, Artificial Sequence
  Description of Artificial Sequence: Synthetic peptide
  Seed: LPACVYGLA
LSACVYGLL

SEQ ID NO: 38335 - protein, 9 aa, Artificial Sequence
  Description of Artificial Sequence: Synthetic peptide
  Seed: LPACVYGLA
LSACVYGLW

SEQ ID NO: 38336 - protein, 9 aa, Artificial Sequence
  Description of Artificial Sequence: Synthetic peptide
  Seed: LPACVYGLA
LVACVYGLL

SEQ ID NO: 38337 - protein, 9 aa, Artificial Sequence
  Description of Artificial Sequence: Synthetic peptide
  Seed: LPACVYGLA
LSACVYGLV

SEQ ID NO: 38338 - protein, 9 aa, Artificial Sequence
  Description of Artificial Sequence: Synthetic peptide
  Seed: LPACVYGLA
LTACVYGLA

SEQ ID NO: 38339 - protein, 9 aa, Artificial Sequence
  Description of Artificial Sequence: Synthetic peptide
  Seed: LPACVYGLA
LTACVYGLI

SEQ ID NO: 38340 - protein, 9 aa, Artificial Sequence
  Description of Artificial Sequence: Synthetic peptide
  Seed: LPACVYGLA
LTACVYGLL

SEQ ID NO: 38341 - protein, 9 aa, Artificial Sequence
  Description of Artificial Sequence: Synthetic peptide
  Seed: LPACVYGLA
LTACVYGLM

SEQ ID NO: 38342 - protein, 9 aa, Artificial Sequence
  Description of Artificial Sequence: Synthetic peptide
  Seed: LPACVYGLA
LTACVYGLT

SEQ ID NO: 38343 - protein, 9 aa, Artificial Sequence
  Description of Artificial Sequence: Synthetic peptide
  Seed: LPACVYGLA
LTACVYGLW

SEQ ID NO: 38344 - protein, 9 aa, Artificial Sequence
  Description of Artificial Sequence: Synthetic peptide
  Seed: LPACVYGLA
LTACVYGLV

SEQ ID NO: 38345 - protein, 9 aa, Artificial Sequence
  Description of Artificial Sequence: Synthetic peptide
  Seed: LPACVYGLA
LVACVYGLA

SEQ ID NO: 38346 - protein, 9 aa, Artificial Sequence
  Description of Artificial Sequence: Synthetic peptide
  Seed: LPACVYGLA
LPACVYGLF

SEQ ID NO: 38347 - protein, 9 aa, Artificial Sequence
  Description of Artificial Sequence: Synthetic peptide
  Seed: LPACVYGLA
LPACVYGLM

SEQ ID NO: 38348 - protein, 9 aa, Artificial Sequence
  Description of Artificial Sequence: Synthetic peptide
  Seed: LPACVYGLA
LPACVYGLL

SEQ ID NO: 38349 - protein, 9 aa, Artificial Sequence
  Description of Artificial Sequence: Synthetic peptide
  Seed: LPACVYGLA
LAACVYGLL

SEQ ID NO: 38350 - protein, 9 aa, Artificial Sequence
  Description of Artificial Sequence: Synthetic peptide
  Seed: LPACVYGLA
LAACVYGLM

SEQ ID NO: 38351 - protein, 9 aa, Artificial Sequence
  Description of Artificial Sequence: Synthetic peptide
  Seed: LPACVYGLA
LAACVYGLF

SEQ ID NO: 38352 - protein, 9 aa, Artificial Sequence
  Description of Artificial Sequence: Synthetic peptide
  Seed: LPACVYGLA
LAACVYGLW

SEQ ID NO: 38353 - protein, 9 aa, Artificial Sequence
  Description of Artificial Sequence: Synthetic peptide
  Seed: LPACVYGLA
LAACVYGLV

SEQ ID NO: 38354 - protein, 9 aa, Artificial Sequence
  Description of Artificial Sequence: Synthetic peptide
  Seed: LPACVYGLA
LNACVYGLV

SEQ ID NO: 38355 - protein, 9 aa, Artificial Sequence
  Description of Artificial Sequence: Synthetic peptide
  Seed: LPACVYGLA
LGACVYGLV

SEQ ID NO: 38356 - protein, 9 aa, Artificial Sequence
  Description of Artificial Sequence: Synthetic peptide
  Seed: LPACVYGLA
LIACVYGLA

SEQ ID NO: 38357 - protein, 9 aa, Artificial Sequence
  Description of Artificial Sequence: Synthetic peptide
  Seed: LPACVYGLA
LIACVYGLI

SEQ ID NO: 38358 - protein, 9 aa, Artificial Sequence
  Description of Artificial Sequence: Synthetic peptide
  Seed: LPACVYGLA
LIACVYGLL

SEQ ID NO: 38359 - protein, 9 aa, Artificial Sequence
  Description of Artificial Sequence: Synthetic peptide
  Seed: LPACVYGLA
LIACVYGLM

SEQ ID NO: 38360 - protein, 9 aa, Artificial Sequence
  Description of Artificial Sequence: Synthetic peptide
  Seed: LPACVYGLA
LIACVYGLW

SEQ ID NO: 38361 - protein, 9 aa, Artificial Sequence
  Description of Artificial Sequence: Synthetic peptide
  Seed: LPACVYGLA
LIACVYGLV

SEQ ID NO: 38362 - protein, 9 aa, Artificial Sequence
  Description of Artificial Sequence: Synthetic peptide
  Seed: LPACVYGLA
LLACVYGLV

SEQ ID NO: 38363 - protein, 9 aa, Artificial Sequence
  Description of Artificial Sequence: Synthetic peptide
  Seed: LPACVYGLA
LMACVYGLI

SEQ ID NO: 38364 - protein, 9 aa, Artificial Sequence
  Description of Artificial Sequence: Synthetic peptide
  Seed: LPACVYGLA
LMACVYGLW

SEQ ID NO: 38365 - protein, 9 aa, Artificial Sequence
  Description of Artificial Sequence: Synthetic peptide
  Seed: LPACVYGLA
LMACVYGLV

SEQ ID NO: 38366 - protein, 9 aa, Artificial Sequence
  Description of Artificial Sequence: Synthetic peptide
  Seed: LPACVYGLA
LPACVYGLC

SEQ ID NO: 38367 - protein, 9 aa, Artificial Sequence
  Description of Artificial Sequence: Synthetic peptide
  Seed: LPACVYGLA
LPACVYGLG

SEQ ID NO: 38368 - protein, 9 aa, Artificial Sequence
  Description of Artificial Sequence: Synthetic peptide
  Seed: LPACVYGLA
LVACVYGLI

SEQ ID NO: 38369 - protein, 9 aa, Artificial Sequence
  Description of Artificial Sequence: Synthetic peptide
  Seed: LPACVYGLA
LVACVYGLM

SEQ ID NO: 38370 - protein, 9 aa, Artificial Sequence
  Description of Artificial Sequence: Synthetic peptide
  Seed: LPACVYGPA
LAACVYGPY

SEQ ID NO: 38371 - protein, 10 aa, Artificial Sequence
  Description of Artificial Sequence: Synthetic peptide
  Seed: LPACVYGLAV
LVACVYGLAY

SEQ ID NO: 38372 - protein, 10 aa, Artificial Sequence
  Description of Artificial Sequence: Synthetic peptide
  Seed: LPACVYGLAV
LPACVYGLAF

SEQ ID NO: 38373 - protein, 10 aa, Artificial Sequence
  Description of Artificial Sequence: Synthetic peptide
  Seed: LPACVYGLAV
LPACVYGLAP

SEQ ID NO: 38374 - protein, 10 aa, Artificial Sequence
  Description of Artificial Sequence: Synthetic peptide
  Seed: LPACVYGLAV
LPACVYGLAS

SEQ ID NO: 38375 - protein, 10 aa, Artificial Sequence
  Description of Artificial Sequence: Synthetic peptide
  Seed: LPACVYGLAV
LPACVYGLAT

SEQ ID NO: 38376 - protein, 10 aa, Artificial Sequence
  Description of Artificial Sequence: Synthetic peptide
  Seed: LPACVYGLAV
LPACVYGLAW

SEQ ID NO: 38377 - protein, 10 aa, Artificial Sequence
  Description of Artificial Sequence: Synthetic peptide
  Seed: LPACVYGLAV
LPACVYGLAY

SEQ ID NO: 38378 - protein, 10 aa, Artificial Sequence
  Description of Artificial Sequence: Synthetic peptide
  Seed: LPACVYGLAV
LSACVYGLAY

SEQ ID NO: 38379 - protein, 10 aa, Artificial Sequence
  Description of Artificial Sequence: Synthetic peptide
  Seed: LPACVYGLAV
LTACVYGLAY

SEQ ID NO: 38380 - protein, 10 aa, Artificial Sequence
  Description of Artificial Sequence: Synthetic peptide
  Seed: LPACVYGLAV
LYACVYGLAY

SEQ ID NO: 38381 - protein, 11 aa, Artificial Sequence
  Description of Artificial Sequence: Synthetic peptide
  Seed: LPACVYGLAVA
LPACVYGLAVI

SEQ ID NO: 38382 - protein, 9 aa, Artificial Sequence
  Description of Artificial Sequence: Synthetic peptide
  Seed: LPACVYGLA
LVACVYGLT

SEQ ID NO: 38383 - protein, 11 aa, Artificial Sequence
  Description of Artificial Sequence: Synthetic peptide
  Seed: LPACVYGLAVA
LPACVYGLAVL

SEQ ID NO: 38384 - protein, 11 aa, Artificial Sequence
  Description of Artificial Sequence: Synthetic peptide
  Seed: LPACVYGLAVA
LPACVYGLAVM

SEQ ID NO: 38385 - protein, 11 aa, Artificial Sequence
  Description of Artificial Sequence: Synthetic peptide
  Seed: LPACVYGLAVA
LPACVYGLAVF

SEQ ID NO: 38386 - protein, 11 aa, Artificial Sequence
  Description of Artificial Sequence: Synthetic peptide
  Seed: LPACVYGLAVA
LPACVYGLAVV

SEQ ID NO: 38387 - protein, 9 aa, Artificial Sequence
  Description of Artificial Sequence: Synthetic peptide
  Seed: LPACVYGPA
LAACVYGPA

SEQ ID NO: 38388 - protein, 9 aa, Artificial Sequence
  Description of Artificial Sequence: Synthetic peptide
  Seed: LPACVYGPA
LAACVYGPL

SEQ ID NO: 38389 - protein, 9 aa, Artificial Sequence
  Description of Artificial Sequence: Synthetic peptide
  Seed: LPACVYGPA
LAACVYGPM

SEQ ID NO: 38390 - protein, 9 aa, Artificial Sequence
  Description of Artificial Sequence: Synthetic peptide
  Seed: LPACVYGPA
LAACVYGPF

SEQ ID NO: 38391 - protein, 9 aa, Artificial Sequence
  Description of Artificial Sequence: Synthetic peptide
  Seed: LPACVYGPA
LAACVYGPW

SEQ ID NO: 38392 - protein, 10 aa, Artificial Sequence
  Description of Artificial Sequence: Synthetic peptide
  Seed: LPACVYGLAV
LPACVYGLAM

SEQ ID NO: 38393 - protein, 10 aa, Artificial Sequence
  Description of Artificial Sequence: Synthetic peptide
  Seed: LPACVYGLAV
LPACVYGLAL

SEQ ID NO: 38394 - protein, 10 aa, Artificial Sequence
  Description of Artificial Sequence: Synthetic peptide
  Seed: LPACVYGLAV
LPACVYGLAI

SEQ ID NO: 38395 - protein, 10 aa, Artificial Sequence
  Description of Artificial Sequence: Synthetic peptide
  Seed: LPACVYGLAV
LPACVYGLAH

SEQ ID NO: 38396 - protein, 9 aa, Artificial Sequence
  Description of Artificial Sequence: Synthetic peptide
  Seed: LPACVYGLA
LVACVYGLW

SEQ ID NO: 38397 - protein, 9 aa, Artificial Sequence
  Description of Artificial Sequence: Synthetic peptide
  Seed: LPACVYGLA
LVACVYGLV

SEQ ID NO: 38398 - protein, 10 aa, Artificial Sequence
  Description of Artificial Sequence: Synthetic peptide
  Seed: LPACVYGLAV
LAACVYGLAA

SEQ ID NO: 38399 - protein, 10 aa, Artificial Sequence
  Description of Artificial Sequence: Synthetic peptide
  Seed: LPACVYGLAV
LAACVYGLAL

SEQ ID NO: 38400 - protein, 10 aa, Artificial Sequence
  Description of Artificial Sequence: Synthetic peptide
  Seed: LPACVYGLAV
LAACVYGLAM

SEQ ID NO: 38401 - protein, 10 aa, Artificial Sequence
  Description of Artificial Sequence: Synthetic peptide
  Seed: LPACVYGLAV
LAACVYGLAF

SEQ ID NO: 38402 - protein, 10 aa, Artificial Sequence
  Description of Artificial Sequence: Synthetic peptide
  Seed: LPACVYGLAV
LAACVYGLAY

SEQ ID NO: 38403 - protein, 10 aa, Artificial Sequence
  Description of Artificial Sequence: Synthetic peptide
  Seed: LPACVYGLAV
LCACVYGLAY

SEQ ID NO: 38404 - protein, 10 aa, Artificial Sequence
  Description of Artificial Sequence: Synthetic peptide
  Seed: LPACVYGLAV
LQACVYGLAY

SEQ ID NO: 38405 - protein, 10 aa, Artificial Sequence
  Description of Artificial Sequence: Synthetic peptide
  Seed: LPACVYGLAV
LGACVYGLAY

SEQ ID NO: 38406 - protein, 10 aa, Artificial Sequence
  Description of Artificial Sequence: Synthetic peptide
  Seed: LPACVYGLAV
LHACVYGLAY

SEQ ID NO: 38407 - protein, 10 aa, Artificial Sequence
  Description of Artificial Sequence: Synthetic peptide
  Seed: LPACVYGLAV
LIACVYGLAY

SEQ ID NO: 38408 - protein, 10 aa, Artificial Sequence
  Description of Artificial Sequence: Synthetic peptide
  Seed: LPACVYGLAV
LLACVYGLAY

SEQ ID NO: 38409 - protein, 10 aa, Artificial Sequence
  Description of Artificial Sequence: Synthetic peptide
  Seed: LPACVYGLAV
LMACVYGLAF

SEQ ID NO: 38410 - protein, 10 aa, Artificial Sequence
  Description of Artificial Sequence: Synthetic peptide
  Seed: LPACVYGLAV
LMACVYGLAY

SEQ ID NO: 38411 - protein, 10 aa, Artificial Sequence
  Description of Artificial Sequence: Synthetic peptide
  Seed: LPACVYGLAV
LFACVYGLAY

SEQ ID NO: 38412 - protein, 10 aa, Artificial Sequence
  Description of Artificial Sequence: Synthetic peptide
  Seed: LPACVYGLAV
LPACVYGLAA

SEQ ID NO: 38413 - protein, 10 aa, Artificial Sequence
  Description of Artificial Sequence: Synthetic peptide
  Seed: LPACVYGLAV
LPACVYGLAC

SEQ ID NO: 38414 - protein, 10 aa, Artificial Sequence
  Description of Artificial Sequence: Synthetic peptide
  Seed: LPACVYGLAV
LPACVYGLAG

SEQ ID NO: 38415 - protein, 9 aa, Artificial Sequence
  Description of Artificial Sequence: Synthetic peptide
  Seed: LPFEKSTVM
LRFEKSTVM

SEQ ID NO: 38416 - protein, 9 aa, Artificial Sequence
  Description of Artificial Sequence: Synthetic peptide
  Seed: LPFEKSTVM
LRFEKSTVF

SEQ ID NO: 38417 - protein, 9 aa, Artificial Sequence
  Description of Artificial Sequence: Synthetic peptide
  Seed: LPFEKSTVM
LRFEKSTVW

SEQ ID NO: 38418 - protein, 9 aa, Artificial Sequence
  Description of Artificial Sequence: Synthetic peptide
  Seed: LPFEKSTVM
LPFEKSTVT

SEQ ID NO: 38419 - protein, 9 aa, Artificial Sequence
  Description of Artificial Sequence: Synthetic peptide
  Seed: LPFEKSTVM
LPFEKSTVC

SEQ ID NO: 38420 - protein, 9 aa, Artificial Sequence
  Description of Artificial Sequence: Synthetic peptide
  Seed: LPFEKSTVM
LPFEKSTVQ

SEQ ID NO: 38421 - protein, 9 aa, Artificial Sequence
  Description of Artificial Sequence: Synthetic peptide
  Seed: LPFEKSTVM
LPFEKSTVE

SEQ ID NO: 38422 - protein, 9 aa, Artificial Sequence
  Description of Artificial Sequence: Synthetic peptide
  Seed: LPFEKSTVM
LPFEKSTVG

SEQ ID NO: 38423 - protein, 9 aa, Artificial Sequence
  Description of Artificial Sequence: Synthetic peptide
  Seed: LPFEKSTVM
LPFEKSTVH

SEQ ID NO: 38424 - protein, 9 aa, Artificial Sequence
  Description of Artificial Sequence: Synthetic peptide
  Seed: LPFEKSTVM
LPFEKSTVI

SEQ ID NO: 38425 - protein, 9 aa, Artificial Sequence
  Description of Artificial Sequence: Synthetic peptide
  Seed: LPFEKSTVM
LPFEKSTVL

SEQ ID NO: 38426 - protein, 9 aa, Artificial Sequence
  Description of Artificial Sequence: Synthetic peptide
  Seed: LPFEKSTVM
LPFEKSTVF

SEQ ID NO: 38427 - protein, 9 aa, Artificial Sequence
  Description of Artificial Sequence: Synthetic peptide
  Seed: LPFEKSTVM
LPFEKSTVS

SEQ ID NO: 38428 - protein, 9 aa, Artificial Sequence
  Description of Artificial Sequence: Synthetic peptide
  Seed: LPFEKSTVM
LPFEKSTVW

SEQ ID NO: 38429 - protein, 9 aa, Artificial Sequence
  Description of Artificial Sequence: Synthetic peptide
  Seed: LPFEKSTVM
LSFEKSTVY

SEQ ID NO: 38430 - protein, 9 aa, Artificial Sequence
  Description of Artificial Sequence: Synthetic peptide
  Seed: LPFEKSTVM
LPFEKSTVY

SEQ ID NO: 38431 - protein, 9 aa, Artificial Sequence
  Description of Artificial Sequence: Synthetic peptide
  Seed: LPFEKSTVM
LPFEKSTVV

SEQ ID NO: 38432 - protein, 9 aa, Artificial Sequence
  Description of Artificial Sequence: Synthetic peptide
  Seed: LPFEKSTVM
LSFEKSTVA

SEQ ID NO: 38433 - protein, 9 aa, Artificial Sequence
  Description of Artificial Sequence: Synthetic peptide
  Seed: LPFEKSTVM
LSFEKSTVC

SEQ ID NO: 38434 - protein, 9 aa, Artificial Sequence
  Description of Artificial Sequence: Synthetic peptide
  Seed: LPFEKSTVM
LSFEKSTVH

SEQ ID NO: 38435 - protein, 9 aa, Artificial Sequence
  Description of Artificial Sequence: Synthetic peptide
  Seed: LPFEKSTVM
LSFEKSTVI

SEQ ID NO: 38436 - protein, 9 aa, Artificial Sequence
  Description of Artificial Sequence: Synthetic peptide
  Seed: LPFEKSTVM
LSFEKSTVL

SEQ ID NO: 38437 - protein, 9 aa, Artificial Sequence
  Description of Artificial Sequence: Synthetic peptide
  Seed: LPFEKSTVM
LSFEKSTVM

SEQ ID NO: 38438 - protein, 9 aa, Artificial Sequence
  Description of Artificial Sequence: Synthetic peptide
  Seed: LPFEKSTVM
LSFEKSTVF

SEQ ID NO: 38439 - protein, 9 aa, Artificial Sequence
  Description of Artificial Sequence: Synthetic peptide
  Seed: LPFEKSTVM
LPFEKSTVN

SEQ ID NO: 38440 - protein, 9 aa, Artificial Sequence
  Description of Artificial Sequence: Synthetic peptide
  Seed: LPFEKSTVM
LPFEKSTVA

SEQ ID NO: 38441 - protein, 9 aa, Artificial Sequence
  Description of Artificial Sequence: Synthetic peptide
  Seed: LPFEKSTVM
LFFEKSTVV

SEQ ID NO: 38442 - protein, 9 aa, Artificial Sequence
  Description of Artificial Sequence: Synthetic peptide
  Seed: LPFEKSTVM
LFFEKSTVY

SEQ ID NO: 38443 - protein, 9 aa, Artificial Sequence
  Description of Artificial Sequence: Synthetic peptide
  Seed: LPFEKSTVM
LMFEKSTVI

SEQ ID NO: 38444 - protein, 9 aa, Artificial Sequence
  Description of Artificial Sequence: Synthetic peptide
  Seed: LPFEKSTVM
LMFEKSTVL

SEQ ID NO: 38445 - protein, 9 aa, Artificial Sequence
  Description of Artificial Sequence: Synthetic peptide
  Seed: LPFEKSTVM
LMFEKSTVM

SEQ ID NO: 38446 - protein, 9 aa, Artificial Sequence
  Description of Artificial Sequence: Synthetic peptide
  Seed: LPFEKSTVM
LMFEKSTVF

SEQ ID NO: 38447 - protein, 9 aa, Artificial Sequence
  Description of Artificial Sequence: Synthetic peptide
  Seed: LPFEKSTVM
LMFEKSTVP

SEQ ID NO: 38448 - protein, 9 aa, Artificial Sequence
  Description of Artificial Sequence: Synthetic peptide
  Seed: LPFEKSTVM
LMFEKSTVS

SEQ ID NO: 38449 - protein, 9 aa, Artificial Sequence
  Description of Artificial Sequence: Synthetic peptide
  Seed: LPFEKSTVM
LMFEKSTVT

SEQ ID NO: 38450 - protein, 9 aa, Artificial Sequence
  Description of Artificial Sequence: Synthetic peptide
  Seed: LPFEKSTVM
LMFEKSTVW

SEQ ID NO: 38451 - protein, 9 aa, Artificial Sequence
  Description of Artificial Sequence: Synthetic peptide
  Seed: LPFEKSTVM
LMFEKSTVY

SEQ ID NO: 38452 - protein, 9 aa, Artificial Sequence
  Description of Artificial Sequence: Synthetic peptide
  Seed: LPFEKSTVM
LMFEKSTVV

SEQ ID NO: 38453 - protein, 9 aa, Artificial Sequence
  Description of Artificial Sequence: Synthetic peptide
  Seed: LPFEKSTVM
LFFEKSTVA

SEQ ID NO: 38454 - protein, 9 aa, Artificial Sequence
  Description of Artificial Sequence: Synthetic peptide
  Seed: LPFEKSTVM
LFFEKSTVC

SEQ ID NO: 38455 - protein, 9 aa, Artificial Sequence
  Description of Artificial Sequence: Synthetic peptide
  Seed: LPFEKSTVM
LFFEKSTVH

SEQ ID NO: 38456 - protein, 9 aa, Artificial Sequence
  Description of Artificial Sequence: Synthetic peptide
  Seed: LPFEKSTVM
LFFEKSTVI

SEQ ID NO: 38457 - protein, 9 aa, Artificial Sequence
  Description of Artificial Sequence: Synthetic peptide
  Seed: LPFEKSTVM
LFFEKSTVL

SEQ ID NO: 38458 - protein, 9 aa, Artificial Sequence
  Description of Artificial Sequence: Synthetic peptide
  Seed: LPFEKSTVM
LFFEKSTVM

SEQ ID NO: 38459 - protein, 9 aa, Artificial Sequence
  Description of Artificial Sequence: Synthetic peptide
  Seed: LPFEKSTVM
LFFEKSTVF

SEQ ID NO: 38460 - protein, 9 aa, Artificial Sequence
  Description of Artificial Sequence: Synthetic peptide
  Seed: LPFEKSTVM
LFFEKSTVT

SEQ ID NO: 38461 - protein, 9 aa, Artificial Sequence
  Description of Artificial Sequence: Synthetic peptide
  Seed: LPFEKSTVM
LFFEKSTVW

SEQ ID NO: 38462 - protein, 9 aa, Artificial Sequence
  Description of Artificial Sequence: Synthetic peptide
  Seed: LPFEKSTVM
LSFEKSTVW

SEQ ID NO: 38463 - protein, 9 aa, Artificial Sequence
  Description of Artificial Sequence: Synthetic peptide
  Seed: LPFEKSTVM
LSFEKSTVV

SEQ ID NO: 38464 - protein, 9 aa, Artificial Sequence
  Description of Artificial Sequence: Synthetic peptide
  Seed: LPFEKSTVM
LRFEKSTVY

SEQ ID NO: 38465 - protein, 9 aa, Artificial Sequence
  Description of Artificial Sequence: Synthetic peptide
  Seed: LPFEKSTVM
LVFEKSTVM

SEQ ID NO: 38466 - protein, 9 aa, Artificial Sequence
  Description of Artificial Sequence: Synthetic peptide
  Seed: LPFEKSTVM
LYFEKSTVF

SEQ ID NO: 38467 - protein, 9 aa, Artificial Sequence
  Description of Artificial Sequence: Synthetic peptide
  Seed: LPFEKSTVM
LYFEKSTVS

SEQ ID NO: 38468 - protein, 9 aa, Artificial Sequence
  Description of Artificial Sequence: Synthetic peptide
  Seed: LPFEKSTVM
LYFEKSTVT

SEQ ID NO: 38469 - protein, 9 aa, Artificial Sequence
  Description of Artificial Sequence: Synthetic peptide
  Seed: LPFEKSTVM
LYFEKSTVW

SEQ ID NO: 38470 - protein, 9 aa, Artificial Sequence
  Description of Artificial Sequence: Synthetic peptide
  Seed: LPFEKSTVM
LYFEKSTVY

SEQ ID NO: 38471 - protein, 9 aa, Artificial Sequence
  Description of Artificial Sequence: Synthetic peptide
  Seed: LPFEKSTVM
LYFEKSTVV

SEQ ID NO: 38472 - protein, 9 aa, Artificial Sequence
  Description of Artificial Sequence: Synthetic peptide
  Seed: LPFEKSTVM
LVFEKSTVH

SEQ ID NO: 38473 - protein, 9 aa, Artificial Sequence
  Description of Artificial Sequence: Synthetic peptide
  Seed: LPFEKSTVM
LVFEKSTVI

SEQ ID NO: 38474 - protein, 9 aa, Artificial Sequence
  Description of Artificial Sequence: Synthetic peptide
  Seed: LPFEKSTVM
LVFEKSTVL

SEQ ID NO: 38475 - protein, 9 aa, Artificial Sequence
  Description of Artificial Sequence: Synthetic peptide
  Seed: LPFEKSTVM
LVFEKSTVF

SEQ ID NO: 38476 - protein, 9 aa, Artificial Sequence
  Description of Artificial Sequence: Synthetic peptide
  Seed: LPFEKSTVM
LTFEKSTVA

SEQ ID NO: 38477 - protein, 9 aa, Artificial Sequence
  Description of Artificial Sequence: Synthetic peptide
  Seed: LPFEKSTVM
LVFEKSTVW

SEQ ID NO: 38478 - protein, 9 aa, Artificial Sequence
  Description of Artificial Sequence: Synthetic peptide
  Seed: LPFEKSTVM
LVFEKSTVY

SEQ ID NO: 38479 - protein, 9 aa, Artificial Sequence
  Description of Artificial Sequence: Synthetic peptide
  Seed: LPFEKSTVM
LVFEKSTVV

SEQ ID NO: 38480 - protein, 10 aa, Artificial Sequence
  Description of Artificial Sequence: Synthetic peptide
  Seed: LPFEKSTVMA
LAFEKSTVMM

SEQ ID NO: 38481 - protein, 10 aa, Artificial Sequence
  Description of Artificial Sequence: Synthetic peptide
  Seed: LPFEKSTVMA
LAFEKSTVMF

SEQ ID NO: 38482 - protein, 10 aa, Artificial Sequence
  Description of Artificial Sequence: Synthetic peptide
  Seed: LPFEKSTVMA
LAFEKSTVMY

SEQ ID NO: 38483 - protein, 10 aa, Artificial Sequence
  Description of Artificial Sequence: Synthetic peptide
  Seed: LPFEKSTVMA
LIFEKSTVMY

SEQ ID NO: 38484 - protein, 10 aa, Artificial Sequence
  Description of Artificial Sequence: Synthetic peptide
  Seed: LPFEKSTVMA
LLFEKSTVMY

SEQ ID NO: 38485 - protein, 10 aa, Artificial Sequence
  Description of Artificial Sequence: Synthetic peptide
  Seed: LPFEKSTVMA
LMFEKSTVMY

SEQ ID NO: 38486 - protein, 9 aa, Artificial Sequence
  Description of Artificial Sequence: Synthetic peptide
  Seed: LPFEKSTVM
LYFEKSTVM

SEQ ID NO: 38487 - protein, 9 aa, Artificial Sequence
  Description of Artificial Sequence: Synthetic peptide
  Seed: LPFEKSTVM
LYFEKSTVL

SEQ ID NO: 38488 - protein, 9 aa, Artificial Sequence
  Description of Artificial Sequence: Synthetic peptide
  Seed: LPFEKSTVM
LYFEKSTVI

SEQ ID NO: 38489 - protein, 9 aa, Artificial Sequence
  Description of Artificial Sequence: Synthetic peptide
  Seed: LPFEKSTVM
LYFEKSTVH

SEQ ID NO: 38490 - protein, 9 aa, Artificial Sequence
  Description of Artificial Sequence: Synthetic peptide
  Seed: LPFEKSTVM
LTFEKSTVH

SEQ ID NO: 38491 - protein, 9 aa, Artificial Sequence
  Description of Artificial Sequence: Synthetic peptide
  Seed: LPFEKSTVM
LTFEKSTVI

SEQ ID NO: 38492 - protein, 9 aa, Artificial Sequence
  Description of Artificial Sequence: Synthetic peptide
  Seed: LPFEKSTVM
LTFEKSTVL

SEQ ID NO: 38493 - protein, 9 aa, Artificial Sequence
  Description of Artificial Sequence: Synthetic peptide
  Seed: LPFEKSTVM
LTFEKSTVM

SEQ ID NO: 38494 - protein, 9 aa, Artificial Sequence
  Description of Artificial Sequence: Synthetic peptide
  Seed: LPFEKSTVM
LTFEKSTVF

SEQ ID NO: 38495 - protein, 9 aa, Artificial Sequence
  Description of Artificial Sequence: Synthetic peptide
  Seed: LPFEKSTVM
LTFEKSTVW

SEQ ID NO: 38496 - protein, 9 aa, Artificial Sequence
  Description of Artificial Sequence: Synthetic peptide
  Seed: LPFEKSTVM
LTFEKSTVY

SEQ ID NO: 38497 - protein, 9 aa, Artificial Sequence
  Description of Artificial Sequence: Synthetic peptide
  Seed: LPFEKSTVM
LTFEKSTVV

SEQ ID NO: 38498 - protein, 9 aa, Artificial Sequence
  Description of Artificial Sequence: Synthetic peptide
  Seed: LPFEKSTVM
LWFEKSTVI

SEQ ID NO: 38499 - protein, 9 aa, Artificial Sequence
  Description of Artificial Sequence: Synthetic peptide
  Seed: LPFEKSTVM
LWFEKSTVL

SEQ ID NO: 38500 - protein, 9 aa, Artificial Sequence
  Description of Artificial Sequence: Synthetic peptide
  Seed: LPFEKSTVM
LWFEKSTVM

SEQ ID NO: 38501 - protein, 9 aa, Artificial Sequence
  Description of Artificial Sequence: Synthetic peptide
  Seed: LPFEKSTVM
LWFEKSTVF

SEQ ID NO: 38502 - protein, 9 aa, Artificial Sequence
  Description of Artificial Sequence: Synthetic peptide
  Seed: LPFEKSTVM
LWFEKSTVW

SEQ ID NO: 38503 - protein, 9 aa, Artificial Sequence
  Description of Artificial Sequence: Synthetic peptide
  Seed: LPFEKSTVM
LWFEKSTVY

SEQ ID NO: 38504 - protein, 9 aa, Artificial Sequence
  Description of Artificial Sequence: Synthetic peptide
  Seed: LPFEKSTVM
LWFEKSTVV

SEQ ID NO: 38505 - protein, 9 aa, Artificial Sequence
  Description of Artificial Sequence: Synthetic peptide
  Seed: LPFEKSTVM
LYFEKSTVA

SEQ ID NO: 38506 - protein, 9 aa, Artificial Sequence
  Description of Artificial Sequence: Synthetic peptide
  Seed: LPFEKSTVM
LYFEKSTVC

SEQ ID NO: 38507 - protein, 9 aa, Artificial Sequence
  Description of Artificial Sequence: Synthetic peptide
  Seed: LPFEKSTVM
LYFEKSTVQ

SEQ ID NO: 38508 - protein, 9 aa, Artificial Sequence
  Description of Artificial Sequence: Synthetic peptide
  Seed: LPFEKSTVM
LYFEKSTVG

SEQ ID NO: 38509 - protein, 9 aa, Artificial Sequence
  Description of Artificial Sequence: Synthetic peptide
  Seed: LPFEKSTVM
LMFEKSTVH

SEQ ID NO: 38510 - protein, 9 aa, Artificial Sequence
  Description of Artificial Sequence: Synthetic peptide
  Seed: LPFEKSTVM
LMFEKSTVG

SEQ ID NO: 38511 - protein, 9 aa, Artificial Sequence
  Description of Artificial Sequence: Synthetic peptide
  Seed: LPFEKSTVM
LMFEKSTVQ

SEQ ID NO: 38512 - protein, 9 aa, Artificial Sequence
  Description of Artificial Sequence: Synthetic peptide
  Seed: LPFEKSTVM
LEFEKSTVI

SEQ ID NO: 38513 - protein, 9 aa, Artificial Sequence
  Description of Artificial Sequence: Synthetic peptide
  Seed: LPFEKSTVM
LQFEKSTVM

SEQ ID NO: 38514 - protein, 9 aa, Artificial Sequence
  Description of Artificial Sequence: Synthetic peptide
  Seed: LPFEKSTVM
LQFEKSTVF

SEQ ID NO: 38515 - protein, 9 aa, Artificial Sequence
  Description of Artificial Sequence: Synthetic peptide
  Seed: LPFEKSTVM
LQFEKSTVP

SEQ ID NO: 38516 - protein, 9 aa, Artificial Sequence
  Description of Artificial Sequence: Synthetic peptide
  Seed: LPFEKSTVM
LQFEKSTVS

SEQ ID NO: 38517 - protein, 9 aa, Artificial Sequence
  Description of Artificial Sequence: Synthetic peptide
  Seed: LPFEKSTVM
LQFEKSTVT

SEQ ID NO: 38518 - protein, 9 aa, Artificial Sequence
  Description of Artificial Sequence: Synthetic peptide
  Seed: LPFEKSTVM
LQFEKSTVW

SEQ ID NO: 38519 - protein, 9 aa, Artificial Sequence
  Description of Artificial Sequence: Synthetic peptide
  Seed: LPFEKSTVM
LQFEKSTVY

SEQ ID NO: 38520 - protein, 9 aa, Artificial Sequence
  Description of Artificial Sequence: Synthetic peptide
  Seed: LPFEKSTVM
LQFEKSTVV

SEQ ID NO: 38521 - protein, 9 aa, Artificial Sequence
  Description of Artificial Sequence: Synthetic peptide
  Seed: LPFEKSTVM
LEFEKSTVH

SEQ ID NO: 38522 - protein, 9 aa, Artificial Sequence
  Description of Artificial Sequence: Synthetic peptide
  Seed: LPFEKSTVM
LEFEKSTVL

SEQ ID NO: 38523 - protein, 9 aa, Artificial Sequence
  Description of Artificial Sequence: Synthetic peptide
  Seed: LPFEKSTVM
LMFEKSTVC

SEQ ID NO: 38524 - protein, 9 aa, Artificial Sequence
  Description of Artificial Sequence: Synthetic peptide
  Seed: LPFEKSTVM
LEFEKSTVM

SEQ ID NO: 38525 - protein, 9 aa, Artificial Sequence
  Description of Artificial Sequence: Synthetic peptide
  Seed: LPFEKSTVM
LEFEKSTVF

SEQ ID NO: 38526 - protein, 9 aa, Artificial Sequence
  Description of Artificial Sequence: Synthetic peptide
  Seed: LPFEKSTVM
LEFEKSTVW

SEQ ID NO: 38527 - protein, 9 aa, Artificial Sequence
  Description of Artificial Sequence: Synthetic peptide
  Seed: LPFEKSTVM
LEFEKSTVY

SEQ ID NO: 38528 - protein, 9 aa, Artificial Sequence
  Description of Artificial Sequence: Synthetic peptide
  Seed: LPFEKSTVM
LEFEKSTVV

SEQ ID NO: 38529 - protein, 9 aa, Artificial Sequence
  Description of Artificial Sequence: Synthetic peptide
  Seed: LPFEKSTVM
LGFEKSTVI

SEQ ID NO: 38530 - protein, 9 aa, Artificial Sequence
  Description of Artificial Sequence: Synthetic peptide
  Seed: LPFEKSTVM
LGFEKSTVL

SEQ ID NO: 38531 - protein, 9 aa, Artificial Sequence
  Description of Artificial Sequence: Synthetic peptide
  Seed: LPFEKSTVM
LGFEKSTVM

SEQ ID NO: 38532 - protein, 9 aa, Artificial Sequence
  Description of Artificial Sequence: Synthetic peptide
  Seed: LPFEKSTVM
LGFEKSTVF

SEQ ID NO: 38533 - protein, 9 aa, Artificial Sequence
  Description of Artificial Sequence: Synthetic peptide
  Seed: LPFEKSTVM
LQFEKSTVK

SEQ ID NO: 38534 - protein, 9 aa, Artificial Sequence
  Description of Artificial Sequence: Synthetic peptide
  Seed: LPFEKSTVM
LQFEKSTVL

SEQ ID NO: 38535 - protein, 9 aa, Artificial Sequence
  Description of Artificial Sequence: Synthetic peptide
  Seed: LPFEKSTVM
LQFEKSTVI

SEQ ID NO: 38536 - protein, 9 aa, Artificial Sequence
  Description of Artificial Sequence: Synthetic peptide
  Seed: LPFEKSTVM
LQFEKSTVH

SEQ ID NO: 38537 - protein, 9 aa, Artificial Sequence
  Description of Artificial Sequence: Synthetic peptide
  Seed: LPFEKSTVM
LRFEKSTVV

SEQ ID NO: 38538 - protein, 9 aa, Artificial Sequence
  Description of Artificial Sequence: Synthetic peptide
  Seed: LPFEKSTVM
LNFEKSTVI

SEQ ID NO: 38539 - protein, 9 aa, Artificial Sequence
  Description of Artificial Sequence: Synthetic peptide
  Seed: LPFEKSTVM
LNFEKSTVL

SEQ ID NO: 38540 - protein, 9 aa, Artificial Sequence
  Description of Artificial Sequence: Synthetic peptide
  Seed: LPFEKSTVM
LNFEKSTVM

SEQ ID NO: 38541 - protein, 9 aa, Artificial Sequence
  Description of Artificial Sequence: Synthetic peptide
  Seed: LPFEKSTVM
LNFEKSTVF

SEQ ID NO: 38542 - protein, 9 aa, Artificial Sequence
  Description of Artificial Sequence: Synthetic peptide
  Seed: LPFEKSTVM
LNFEKSTVW

SEQ ID NO: 38543 - protein, 9 aa, Artificial Sequence
  Description of Artificial Sequence: Synthetic peptide
  Seed: LPFEKSTVM
LNFEKSTVY

SEQ ID NO: 38544 - protein, 9 aa, Artificial Sequence
  Description of Artificial Sequence: Synthetic peptide
  Seed: LPFEKSTVM
LDFEKSTVF

SEQ ID NO: 38545 - protein, 9 aa, Artificial Sequence
  Description of Artificial Sequence: Synthetic peptide
  Seed: LPFEKSTVM
LDFEKSTVY

SEQ ID NO: 38546 - protein, 9 aa, Artificial Sequence
  Description of Artificial Sequence: Synthetic peptide
  Seed: LPFEKSTVM
LCFEKSTVL

SEQ ID NO: 38547 - protein, 9 aa, Artificial Sequence
  Description of Artificial Sequence: Synthetic peptide
  Seed: LPFEKSTVM
LCFEKSTVM

SEQ ID NO: 38548 - protein, 9 aa, Artificial Sequence
  Description of Artificial Sequence: Synthetic peptide
  Seed: LPFEKSTVM
LCFEKSTVF

SEQ ID NO: 38549 - protein, 9 aa, Artificial Sequence
  Description of Artificial Sequence: Synthetic peptide
  Seed: LPFEKSTVM
LCFEKSTVY

SEQ ID NO: 38550 - protein, 9 aa, Artificial Sequence
  Description of Artificial Sequence: Synthetic peptide
  Seed: LPFEKSTVM
LQFEKSTVA

SEQ ID NO: 38551 - protein, 9 aa, Artificial Sequence
  Description of Artificial Sequence: Synthetic peptide
  Seed: LPFEKSTVM
LQFEKSTVN

SEQ ID NO: 38552 - protein, 9 aa, Artificial Sequence
  Description of Artificial Sequence: Synthetic peptide
  Seed: LPFEKSTVM
LQFEKSTVC

SEQ ID NO: 38553 - protein, 9 aa, Artificial Sequence
  Description of Artificial Sequence: Synthetic peptide
  Seed: LPFEKSTVM
LQFEKSTVQ

SEQ ID NO: 38554 - protein, 9 aa, Artificial Sequence
  Description of Artificial Sequence: Synthetic peptide
  Seed: LPFEKSTVM
LQFEKSTVE

SEQ ID NO: 38555 - protein, 9 aa, Artificial Sequence
  Description of Artificial Sequence: Synthetic peptide
  Seed: LPFEKSTVM
LQFEKSTVG

SEQ ID NO: 38556 - protein, 9 aa, Artificial Sequence
  Description of Artificial Sequence: Synthetic peptide
  Seed: LPFEKSTVM
LGFEKSTVW

SEQ ID NO: 38557 - protein, 9 aa, Artificial Sequence
  Description of Artificial Sequence: Synthetic peptide
  Seed: LPFEKSTVM
LGFEKSTVY

SEQ ID NO: 38558 - protein, 9 aa, Artificial Sequence
  Description of Artificial Sequence: Synthetic peptide
  Seed: LPFEKSTVM
LGFEKSTVV

SEQ ID NO: 38559 - protein, 9 aa, Artificial Sequence
  Description of Artificial Sequence: Synthetic peptide
  Seed: LPFEKSTVM
LLFEKSTVL

SEQ ID NO: 38560 - protein, 9 aa, Artificial Sequence
  Description of Artificial Sequence: Synthetic peptide
  Seed: LPFEKSTVM
LLFEKSTVF

SEQ ID NO: 38561 - protein, 9 aa, Artificial Sequence
  Description of Artificial Sequence: Synthetic peptide
  Seed: LPFEKSTVM
LLFEKSTVW

SEQ ID NO: 38562 - protein, 9 aa, Artificial Sequence
  Description of Artificial Sequence: Synthetic peptide
  Seed: LPFEKSTVM
LLFEKSTVY

SEQ ID NO: 38563 - protein, 9 aa, Artificial Sequence
  Description of Artificial Sequence: Synthetic peptide
  Seed: LPFEKSTVM
LLFEKSTVV

SEQ ID NO: 38564 - protein, 9 aa, Artificial Sequence
  Description of Artificial Sequence: Synthetic peptide
  Seed: LPFEKSTVM
LKFEKSTVA

SEQ ID NO: 38565 - protein, 9 aa, Artificial Sequence
  Description of Artificial Sequence: Synthetic peptide
  Seed: LPFEKSTVM
LKFEKSTVC

SEQ ID NO: 38566 - protein, 9 aa, Artificial Sequence
  Description of Artificial Sequence: Synthetic peptide
  Seed: LPFEKSTVM
LKFEKSTVG

SEQ ID NO: 38567 - protein, 9 aa, Artificial Sequence
  Description of Artificial Sequence: Synthetic peptide
  Seed: LPFEKSTVM
LKFEKSTVH

SEQ ID NO: 38568 - protein, 9 aa, Artificial Sequence
  Description of Artificial Sequence: Synthetic peptide
  Seed: LPFEKSTVM
LKFEKSTVI

SEQ ID NO: 38569 - protein, 9 aa, Artificial Sequence
  Description of Artificial Sequence: Synthetic peptide
  Seed: LPFEKSTVM
LKFEKSTVL

SEQ ID NO: 38570 - protein, 9 aa, Artificial Sequence
  Description of Artificial Sequence: Synthetic peptide
  Seed: LPFEKSTVM
LKFEKSTVM

SEQ ID NO: 38571 - protein, 9 aa, Artificial Sequence
  Description of Artificial Sequence: Synthetic peptide
  Seed: LPFEKSTVM
LKFEKSTVF

SEQ ID NO: 38572 - protein, 9 aa, Artificial Sequence
  Description of Artificial Sequence: Synthetic peptide
  Seed: LPFEKSTVM
LKFEKSTVS

SEQ ID NO: 38573 - protein, 9 aa, Artificial Sequence
  Description of Artificial Sequence: Synthetic peptide
  Seed: LPFEKSTVM
LKFEKSTVT

SEQ ID NO: 38574 - protein, 9 aa, Artificial Sequence
  Description of Artificial Sequence: Synthetic peptide
  Seed: LPFEKSTVM
LKFEKSTVW

SEQ ID NO: 38575 - protein, 9 aa, Artificial Sequence
  Description of Artificial Sequence: Synthetic peptide
  Seed: LPFEKSTVM
LKFEKSTVY

SEQ ID NO: 38576 - protein, 9 aa, Artificial Sequence
  Description of Artificial Sequence: Synthetic peptide
  Seed: LPFEKSTVM
LKFEKSTVV

SEQ ID NO: 38577 - protein, 9 aa, Artificial Sequence
  Description of Artificial Sequence: Synthetic peptide
  Seed: LPFEKSTVM
LMFEKSTVA

SEQ ID NO: 38578 - protein, 9 aa, Artificial Sequence
  Description of Artificial Sequence: Synthetic peptide
  Seed: LPFEKSTVM
LMFEKSTVN

SEQ ID NO: 38579 - protein, 9 aa, Artificial Sequence
  Description of Artificial Sequence: Synthetic peptide
  Seed: LPFEKSTVM
LLFEKSTVM

SEQ ID NO: 38580 - protein, 9 aa, Artificial Sequence
  Description of Artificial Sequence: Synthetic peptide
  Seed: LPFEKSTVM
LLFEKSTVI

SEQ ID NO: 38581 - protein, 9 aa, Artificial Sequence
  Description of Artificial Sequence: Synthetic peptide
  Seed: LPFEKSTVM
LHFEKSTVA

SEQ ID NO: 38582 - protein, 9 aa, Artificial Sequence
  Description of Artificial Sequence: Synthetic peptide
  Seed: LPFEKSTVM
LLFEKSTVH

SEQ ID NO: 38583 - protein, 9 aa, Artificial Sequence
  Description of Artificial Sequence: Synthetic peptide
  Seed: LPFEKSTVM
LHFEKSTVC

SEQ ID NO: 38584 - protein, 9 aa, Artificial Sequence
  Description of Artificial Sequence: Synthetic peptide
  Seed: LPFEKSTVM
LHFEKSTVH

SEQ ID NO: 38585 - protein, 9 aa, Artificial Sequence
  Description of Artificial Sequence: Synthetic peptide
  Seed: LPFEKSTVM
LHFEKSTVI

SEQ ID NO: 38586 - protein, 9 aa, Artificial Sequence
  Description of Artificial Sequence: Synthetic peptide
  Seed: LPFEKSTVM
LHFEKSTVL

SEQ ID NO: 38587 - protein, 9 aa, Artificial Sequence
  Description of Artificial Sequence: Synthetic peptide
  Seed: LPFEKSTVM
LHFEKSTVM

SEQ ID NO: 38588 - protein, 9 aa, Artificial Sequence
  Description of Artificial Sequence: Synthetic peptide
  Seed: LPFEKSTVM
LHFEKSTVF

SEQ ID NO: 38589 - protein, 9 aa, Artificial Sequence
  Description of Artificial Sequence: Synthetic peptide
  Seed: LPFEKSTVM
LHFEKSTVW

SEQ ID NO: 38590 - protein, 9 aa, Artificial Sequence
  Description of Artificial Sequence: Synthetic peptide
  Seed: LPFEKSTVM
LHFEKSTVY

SEQ ID NO: 38591 - protein, 9 aa, Artificial Sequence
  Description of Artificial Sequence: Synthetic peptide
  Seed: LPFEKSTVM
LHFEKSTVV

SEQ ID NO: 38592 - protein, 9 aa, Artificial Sequence
  Description of Artificial Sequence: Synthetic peptide
  Seed: LPFEKSTVM
LIFEKSTVH

SEQ ID NO: 38593 - protein, 9 aa, Artificial Sequence
  Description of Artificial Sequence: Synthetic peptide
  Seed: LPFEKSTVM
LIFEKSTVI

SEQ ID NO: 38594 - protein, 9 aa, Artificial Sequence
  Description of Artificial Sequence: Synthetic peptide
  Seed: LPFEKSTVM
LIFEKSTVL

SEQ ID NO: 38595 - protein, 9 aa, Artificial Sequence
  Description of Artificial Sequence: Synthetic peptide
  Seed: LPFEKSTVM
LIFEKSTVM

SEQ ID NO: 38596 - protein, 9 aa, Artificial Sequence
  Description of Artificial Sequence: Synthetic peptide
  Seed: LPFEKSTVM
LIFEKSTVF

SEQ ID NO: 38597 - protein, 9 aa, Artificial Sequence
  Description of Artificial Sequence: Synthetic peptide
  Seed: LPFEKSTVM
LIFEKSTVW

SEQ ID NO: 38598 - protein, 9 aa, Artificial Sequence
  Description of Artificial Sequence: Synthetic peptide
  Seed: LPFEKSTVM
LIFEKSTVY

SEQ ID NO: 38599 - protein, 9 aa, Artificial Sequence
  Description of Artificial Sequence: Synthetic peptide
  Seed: LPFEKSTVM
LIFEKSTVV

SEQ ID NO: 38600 - protein, 9 aa, Artificial Sequence
  Description of Artificial Sequence: Synthetic peptide
  Seed: LPFEKSTVM
LLFEKSTVA

SEQ ID NO: 38601 - protein, 9 aa, Artificial Sequence
  Description of Artificial Sequence: Synthetic peptide
  Seed: LPFEKSTVM
LLFEKSTVG

SEQ ID NO: 38602 - protein, 9 aa, Artificial Sequence
  Description of Artificial Sequence: Synthetic peptide
  Seed: LPACVYGLA
LAACVYGLI

SEQ ID NO: 38603 - protein, 9 aa, Artificial Sequence
  Description of Artificial Sequence: Synthetic peptide
  Seed: LPACVYGLA
LAACVYGLA

SEQ ID NO: 38604 - protein, 8 aa, Artificial Sequence
  Description of Artificial Sequence: Synthetic peptide
  Seed: LPACVYGL
LPACVYGM

SEQ ID NO: 38605 - protein, 10 aa, Artificial Sequence
  Description of Artificial Sequence: Synthetic peptide
  Seed: LLQNSQVYSL
LEQNSQVYSY

SEQ ID NO: 38606 - protein, 10 aa, Artificial Sequence
  Description of Artificial Sequence: Synthetic peptide
  Seed: LLQNSQVYSL
LQQNSQVYSL

SEQ ID NO: 38607 - protein, 10 aa, Artificial Sequence
  Description of Artificial Sequence: Synthetic peptide
  Seed: LLQNSQVYSL
LQQNSQVYSM

SEQ ID NO: 38608 - protein, 10 aa, Artificial Sequence
  Description of Artificial Sequence: Synthetic peptide
  Seed: LLQNSQVYSL
LQQNSQVYSF

SEQ ID NO: 38609 - protein, 10 aa, Artificial Sequence
  Description of Artificial Sequence: Synthetic peptide
  Seed: LLQNSQVYSL
LQQNSQVYSW

SEQ ID NO: 38610 - protein, 10 aa, Artificial Sequence
  Description of Artificial Sequence: Synthetic peptide
  Seed: LLQNSQVYSL
LQQNSQVYSY

SEQ ID NO: 38611 - protein, 10 aa, Artificial Sequence
  Description of Artificial Sequence: Synthetic peptide
  Seed: LLQNSQVYSL
LQQNSQVYSV

SEQ ID NO: 38612 - protein, 10 aa, Artificial Sequence
  Description of Artificial Sequence: Synthetic peptide
  Seed: LLQNSQVYSL
LEQNSQVYSL

SEQ ID NO: 38613 - protein, 10 aa, Artificial Sequence
  Description of Artificial Sequence: Synthetic peptide
  Seed: LLQNSQVYSL
LEQNSQVYSM

SEQ ID NO: 38614 - protein, 10 aa, Artificial Sequence
  Description of Artificial Sequence: Synthetic peptide
  Seed: LLQNSQVYSL
LEQNSQVYSF

SEQ ID NO: 38615 - protein, 10 aa, Artificial Sequence
  Description of Artificial Sequence: Synthetic peptide
  Seed: LLQNSQVYSL
LEQNSQVYSV

SEQ ID NO: 38616 - protein, 10 aa, Artificial Sequence
  Description of Artificial Sequence: Synthetic peptide
  Seed: LLQNSQVYSL
LIQNSQVYSI

SEQ ID NO: 38617 - protein, 10 aa, Artificial Sequence
  Description of Artificial Sequence: Synthetic peptide
  Seed: LLQNSQVYSL
LGQNSQVYSL

SEQ ID NO: 38618 - protein, 10 aa, Artificial Sequence
  Description of Artificial Sequence: Synthetic peptide
  Seed: LLQNSQVYSL
LGQNSQVYSM

SEQ ID NO: 38619 - protein, 10 aa, Artificial Sequence
  Description of Artificial Sequence: Synthetic peptide
  Seed: LLQNSQVYSL
LGQNSQVYSF

SEQ ID NO: 38620 - protein, 10 aa, Artificial Sequence
  Description of Artificial Sequence: Synthetic peptide
  Seed: LLQNSQVYSL
LGQNSQVYSY

SEQ ID NO: 38621 - protein, 10 aa, Artificial Sequence
  Description of Artificial Sequence: Synthetic peptide
  Seed: LLQNSQVYSL
LGQNSQVYSV

SEQ ID NO: 38622 - protein, 10 aa, Artificial Sequence
  Description of Artificial Sequence: Synthetic peptide
  Seed: LLQNSQVYSL
LHQNSQVYSL

SEQ ID NO: 38623 - protein, 10 aa, Artificial Sequence
  Description of Artificial Sequence: Synthetic peptide
  Seed: LLQNSQVYSL
LHQNSQVYSM

SEQ ID NO: 38624 - protein, 10 aa, Artificial Sequence
  Description of Artificial Sequence: Synthetic peptide
  Seed: LLQNSQVYSL
LHQNSQVYSF

SEQ ID NO: 38625 - protein, 10 aa, Artificial Sequence
  Description of Artificial Sequence: Synthetic peptide
  Seed: LLQNSQVYSL
LHQNSQVYSY

SEQ ID NO: 38626 - protein, 10 aa, Artificial Sequence
  Description of Artificial Sequence: Synthetic peptide
  Seed: LLQNSQVYSL
LQQNSQVYSI

SEQ ID NO: 38627 - protein, 10 aa, Artificial Sequence
  Description of Artificial Sequence: Synthetic peptide
  Seed: LLQNSQVYSL
LCQNSQVYSV

SEQ ID NO: 38628 - protein, 10 aa, Artificial Sequence
  Description of Artificial Sequence: Synthetic peptide
  Seed: LLQNSQVYSL
LCQNSQVYSY

SEQ ID NO: 38629 - protein, 10 aa, Artificial Sequence
  Description of Artificial Sequence: Synthetic peptide
  Seed: LLQNSQVYSL
LCQNSQVYSF

SEQ ID NO: 38630 - protein, 10 aa, Artificial Sequence
  Description of Artificial Sequence: Synthetic peptide
  Seed: LLQNSQVYSL
LAQNSQVYSY

SEQ ID NO: 38631 - protein, 10 aa, Artificial Sequence
  Description of Artificial Sequence: Synthetic peptide
  Seed: LLQNSQVYSL
LAQNSQVYSV

SEQ ID NO: 38632 - protein, 10 aa, Artificial Sequence
  Description of Artificial Sequence: Synthetic peptide
  Seed: LLQNSQVYSL
LRQNSQVYSL

SEQ ID NO: 38633 - protein, 10 aa, Artificial Sequence
  Description of Artificial Sequence: Synthetic peptide
  Seed: LLQNSQVYSL
LRQNSQVYSM

SEQ ID NO: 38634 - protein, 10 aa, Artificial Sequence
  Description of Artificial Sequence: Synthetic peptide
  Seed: LLQNSQVYSL
LRQNSQVYSF

SEQ ID NO: 38635 - protein, 10 aa, Artificial Sequence
  Description of Artificial Sequence: Synthetic peptide
  Seed: LLQNSQVYSL
LRQNSQVYSY

SEQ ID NO: 38636 - protein, 10 aa, Artificial Sequence
  Description of Artificial Sequence: Synthetic peptide
  Seed: LLQNSQVYSL
LRQNSQVYSV

SEQ ID NO: 38637 - protein, 10 aa, Artificial Sequence
  Description of Artificial Sequence: Synthetic peptide
  Seed: LLQNSQVYSL
LNQNSQVYSL

SEQ ID NO: 38638 - protein, 10 aa, Artificial Sequence
  Description of Artificial Sequence: Synthetic peptide
  Seed: LLQNSQVYSL
LNQNSQVYSM

SEQ ID NO: 38639 - protein, 10 aa, Artificial Sequence
  Description of Artificial Sequence: Synthetic peptide
  Seed: LLQNSQVYSL
LNQNSQVYSF

SEQ ID NO: 38640 - protein, 10 aa, Artificial Sequence
  Description of Artificial Sequence: Synthetic peptide
  Seed: LLQNSQVYSL
LNQNSQVYSY

SEQ ID NO: 38641 - protein, 10 aa, Artificial Sequence
  Description of Artificial Sequence: Synthetic peptide
  Seed: LLQNSQVYSL
LNQNSQVYSV

SEQ ID NO: 38642 - protein, 10 aa, Artificial Sequence
  Description of Artificial Sequence: Synthetic peptide
  Seed: LLQNSQVYSL
LDQNSQVYSL

SEQ ID NO: 38643 - protein, 10 aa, Artificial Sequence
  Description of Artificial Sequence: Synthetic peptide
  Seed: LLQNSQVYSL
LDQNSQVYSM

SEQ ID NO: 38644 - protein, 10 aa, Artificial Sequence
  Description of Artificial Sequence: Synthetic peptide
  Seed: LLQNSQVYSL
LDQNSQVYSF

SEQ ID NO: 38645 - protein, 10 aa, Artificial Sequence
  Description of Artificial Sequence: Synthetic peptide
  Seed: LLQNSQVYSL
LDQNSQVYSY

SEQ ID NO: 38646 - protein, 10 aa, Artificial Sequence
  Description of Artificial Sequence: Synthetic peptide
  Seed: LLQNSQVYSL
LDQNSQVYSV

SEQ ID NO: 38647 - protein, 10 aa, Artificial Sequence
  Description of Artificial Sequence: Synthetic peptide
  Seed: LLQNSQVYSL
LCQNSQVYSL

SEQ ID NO: 38648 - protein, 10 aa, Artificial Sequence
  Description of Artificial Sequence: Synthetic peptide
  Seed: LLQNSQVYSL
LCQNSQVYSM

SEQ ID NO: 38649 - protein, 10 aa, Artificial Sequence
  Description of Artificial Sequence: Synthetic peptide
  Seed: LLQNSQVYSL
LHQNSQVYSV

SEQ ID NO: 38650 - protein, 10 aa, Artificial Sequence
  Description of Artificial Sequence: Synthetic peptide
  Seed: LLQNSQVYSL
LIQNSQVYSL

SEQ ID NO: 38651 - protein, 10 aa, Artificial Sequence
  Description of Artificial Sequence: Synthetic peptide
  Seed: LLQNSQVYSL
LTQNSQVYSV

SEQ ID NO: 38652 - protein, 10 aa, Artificial Sequence
  Description of Artificial Sequence: Synthetic peptide
  Seed: LLQNSQVYSL
LPQNSQVYSF

SEQ ID NO: 38653 - protein, 10 aa, Artificial Sequence
  Description of Artificial Sequence: Synthetic peptide
  Seed: LLQNSQVYSL
LMQNSQVYSV

SEQ ID NO: 38654 - protein, 10 aa, Artificial Sequence
  Description of Artificial Sequence: Synthetic peptide
  Seed: LLQNSQVYSL
LFQNSQVYSI

SEQ ID NO: 38655 - protein, 10 aa, Artificial Sequence
  Description of Artificial Sequence: Synthetic peptide
  Seed: LLQNSQVYSL
LFQNSQVYSL

SEQ ID NO: 38656 - protein, 10 aa, Artificial Sequence
  Description of Artificial Sequence: Synthetic peptide
  Seed: LLQNSQVYSL
LFQNSQVYSM

SEQ ID NO: 38657 - protein, 10 aa, Artificial Sequence
  Description of Artificial Sequence: Synthetic peptide
  Seed: LLQNSQVYSL
LFQNSQVYSF

SEQ ID NO: 38658 - protein, 10 aa, Artificial Sequence
  Description of Artificial Sequence: Synthetic peptide
  Seed: LLQNSQVYSL
LFQNSQVYSY

SEQ ID NO: 38659 - protein, 10 aa, Artificial Sequence
  Description of Artificial Sequence: Synthetic peptide
  Seed: LLQNSQVYSL
LFQNSQVYSV

SEQ ID NO: 38660 - protein, 10 aa, Artificial Sequence
  Description of Artificial Sequence: Synthetic peptide
  Seed: LLQNSQVYSL
LPQNSQVYSL

SEQ ID NO: 38661 - protein, 10 aa, Artificial Sequence
  Description of Artificial Sequence: Synthetic peptide
  Seed: LLQNSQVYSL
LPQNSQVYSM

SEQ ID NO: 38662 - protein, 10 aa, Artificial Sequence
  Description of Artificial Sequence: Synthetic peptide
  Seed: LLQNSQVYSL
LPQNSQVYSY

SEQ ID NO: 38663 - protein, 10 aa, Artificial Sequence
  Description of Artificial Sequence: Synthetic peptide
  Seed: LLQNSQVYSL
LIQNSQVYSM

SEQ ID NO: 38664 - protein, 10 aa, Artificial Sequence
  Description of Artificial Sequence: Synthetic peptide
  Seed: LLQNSQVYSL
LPQNSQVYSV

SEQ ID NO: 38665 - protein, 10 aa, Artificial Sequence
  Description of Artificial Sequence: Synthetic peptide
  Seed: LLQNSQVYSL
LSQNSQVYSL

SEQ ID NO: 38666 - protein, 10 aa, Artificial Sequence
  Description of Artificial Sequence: Synthetic peptide
  Seed: LLQNSQVYSL
LSQNSQVYSM

SEQ ID NO: 38667 - protein, 10 aa, Artificial Sequence
  Description of Artificial Sequence: Synthetic peptide
  Seed: LLQNSQVYSL
LSQNSQVYSF

SEQ ID NO: 38668 - protein, 10 aa, Artificial Sequence
  Description of Artificial Sequence: Synthetic peptide
  Seed: LLQNSQVYSL
LSQNSQVYSY

SEQ ID NO: 38669 - protein, 10 aa, Artificial Sequence
  Description of Artificial Sequence: Synthetic peptide
  Seed: LLQNSQVYSL
LSQNSQVYSV

SEQ ID NO: 38670 - protein, 10 aa, Artificial Sequence
  Description of Artificial Sequence: Synthetic peptide
  Seed: LLQNSQVYSL
LTQNSQVYSL

SEQ ID NO: 38671 - protein, 10 aa, Artificial Sequence
  Description of Artificial Sequence: Synthetic peptide
  Seed: LLQNSQVYSL
LTQNSQVYSM

SEQ ID NO: 38672 - protein, 10 aa, Artificial Sequence
  Description of Artificial Sequence: Synthetic peptide
  Seed: LLQNSQVYSL
LTQNSQVYSF

SEQ ID NO: 38673 - protein, 10 aa, Artificial Sequence
  Description of Artificial Sequence: Synthetic peptide
  Seed: LLQNSQVYSL
LMQNSQVYSY

SEQ ID NO: 38674 - protein, 10 aa, Artificial Sequence
  Description of Artificial Sequence: Synthetic peptide
  Seed: LLQNSQVYSL
LMQNSQVYST

SEQ ID NO: 38675 - protein, 10 aa, Artificial Sequence
  Description of Artificial Sequence: Synthetic peptide
  Seed: LLQNSQVYSL
LMQNSQVYSF

SEQ ID NO: 38676 - protein, 10 aa, Artificial Sequence
  Description of Artificial Sequence: Synthetic peptide
  Seed: LLQNSQVYSL
LMQNSQVYSM

SEQ ID NO: 38677 - protein, 10 aa, Artificial Sequence
  Description of Artificial Sequence: Synthetic peptide
  Seed: LLQNSQVYSL
LIQNSQVYSF

SEQ ID NO: 38678 - protein, 10 aa, Artificial Sequence
  Description of Artificial Sequence: Synthetic peptide
  Seed: LLQNSQVYSL
LIQNSQVYSY

SEQ ID NO: 38679 - protein, 10 aa, Artificial Sequence
  Description of Artificial Sequence: Synthetic peptide
  Seed: LLQNSQVYSL
LIQNSQVYSV

SEQ ID NO: 38680 - protein, 10 aa, Artificial Sequence
  Description of Artificial Sequence: Synthetic peptide
  Seed: LLQNSQVYSL
LLQNSQVYSA

SEQ ID NO: 38681 - protein, 10 aa, Artificial Sequence
  Description of Artificial Sequence: Synthetic peptide
  Seed: LLQNSQVYSL
LLQNSQVYSC

SEQ ID NO: 38682 - protein, 10 aa, Artificial Sequence
  Description of Artificial Sequence: Synthetic peptide
  Seed: LLQNSQVYSL
LLQNSQVYSI

SEQ ID NO: 38683 - protein, 10 aa, Artificial Sequence
  Description of Artificial Sequence: Synthetic peptide
  Seed: LLQNSQVYSL
LLQNSQVYSM

SEQ ID NO: 38684 - protein, 10 aa, Artificial Sequence
  Description of Artificial Sequence: Synthetic peptide
  Seed: LLQNSQVYSL
LLQNSQVYSF

SEQ ID NO: 38685 - protein, 10 aa, Artificial Sequence
  Description of Artificial Sequence: Synthetic peptide
  Seed: LLQNSQVYSL
LLQNSQVYST

SEQ ID NO: 38686 - protein, 10 aa, Artificial Sequence
  Description of Artificial Sequence: Synthetic peptide
  Seed: LLQNSQVYSL
LLQNSQVYSY

SEQ ID NO: 38687 - protein, 10 aa, Artificial Sequence
  Description of Artificial Sequence: Synthetic peptide
  Seed: LLQNSQVYSL
LLQNSQVYSV

SEQ ID NO: 38688 - protein, 10 aa, Artificial Sequence
  Description of Artificial Sequence: Synthetic peptide
  Seed: LLQNSQVYSL
LKQNSQVYSL

SEQ ID NO: 38689 - protein, 10 aa, Artificial Sequence
  Description of Artificial Sequence: Synthetic peptide
  Seed: LLQNSQVYSL
LKQNSQVYSM

SEQ ID NO: 38690 - protein, 10 aa, Artificial Sequence
  Description of Artificial Sequence: Synthetic peptide
  Seed: LLQNSQVYSL
LKQNSQVYSF

SEQ ID NO: 38691 - protein, 10 aa, Artificial Sequence
  Description of Artificial Sequence: Synthetic peptide
  Seed: LLQNSQVYSL
LKQNSQVYSY

SEQ ID NO: 38692 - protein, 10 aa, Artificial Sequence
  Description of Artificial Sequence: Synthetic peptide
  Seed: LLQNSQVYSL
LKQNSQVYSV

SEQ ID NO: 38693 - protein, 10 aa, Artificial Sequence
  Description of Artificial Sequence: Synthetic peptide
  Seed: LLQNSQVYSL
LMQNSQVYSA

SEQ ID NO: 38694 - protein, 10 aa, Artificial Sequence
  Description of Artificial Sequence: Synthetic peptide
  Seed: LLQNSQVYSL
LMQNSQVYSI

SEQ ID NO: 38695 - protein, 10 aa, Artificial Sequence
  Description of Artificial Sequence: Synthetic peptide
  Seed: LLQNSQVYSL
LMQNSQVYSL

SEQ ID NO: 38696 - protein, 10 aa, Artificial Sequence
  Description of Artificial Sequence: Synthetic peptide
  Seed: LLQNSQVYSL
LAQNSQVYSF

SEQ ID NO: 38697 - protein, 10 aa, Artificial Sequence
  Description of Artificial Sequence: Synthetic peptide
  Seed: LLQNSQVYSL
LAQNSQVYSM

SEQ ID NO: 38698 - protein, 10 aa, Artificial Sequence
  Description of Artificial Sequence: Synthetic peptide
  Seed: LLQNSQVYSL
LAQNSQVYSL

SEQ ID NO: 38699 - protein, 10 aa, Artificial Sequence
  Description of Artificial Sequence: Synthetic peptide
  Seed: LLQNSQVFSL
LYQNSQVFSL

SEQ ID NO: 38700 - protein, 10 aa, Artificial Sequence
  Description of Artificial Sequence: Synthetic peptide
  Seed: LLQNSQVFSL
LTQNSQVFSY

SEQ ID NO: 38701 - protein, 10 aa, Artificial Sequence
  Description of Artificial Sequence: Synthetic peptide
  Seed: LLQNSQVFSL
LTQNSQVFSV

SEQ ID NO: 38702 - protein, 10 aa, Artificial Sequence
  Description of Artificial Sequence: Synthetic peptide
  Seed: LLQNSQVFSL
LWQNSQVFSI

SEQ ID NO: 38703 - protein, 10 aa, Artificial Sequence
  Description of Artificial Sequence: Synthetic peptide
  Seed: LLQNSQVFSL
LWQNSQVFSL

SEQ ID NO: 38704 - protein, 10 aa, Artificial Sequence
  Description of Artificial Sequence: Synthetic peptide
  Seed: LLQNSQVFSL
LWQNSQVFSM

SEQ ID NO: 38705 - protein, 10 aa, Artificial Sequence
  Description of Artificial Sequence: Synthetic peptide
  Seed: LLQNSQVFSL
LWQNSQVFSF

SEQ ID NO: 38706 - protein, 10 aa, Artificial Sequence
  Description of Artificial Sequence: Synthetic peptide
  Seed: LLQNSQVFSL
LWQNSQVFSY

SEQ ID NO: 38707 - protein, 10 aa, Artificial Sequence
  Description of Artificial Sequence: Synthetic peptide
  Seed: LLQNSQVFSL
LWQNSQVFSV

SEQ ID NO: 38708 - protein, 10 aa, Artificial Sequence
  Description of Artificial Sequence: Synthetic peptide
  Seed: LLQNSQVFSL
LYQNSQVFSI

SEQ ID NO: 38709 - protein, 10 aa, Artificial Sequence
  Description of Artificial Sequence: Synthetic peptide
  Seed: LLQNSQVFSL
LYQNSQVFSM

SEQ ID NO: 38710 - protein, 8 aa, Artificial Sequence
  Description of Artificial Sequence: Synthetic peptide
  Seed: LLQNSQVY
LYQNSQVY

SEQ ID NO: 38711 - protein, 10 aa, Artificial Sequence
  Description of Artificial Sequence: Synthetic peptide
  Seed: LLQNSQVFSL
LYQNSQVFSF

SEQ ID NO: 38712 - protein, 10 aa, Artificial Sequence
  Description of Artificial Sequence: Synthetic peptide
  Seed: LLQNSQVFSL
LYQNSQVFSY

SEQ ID NO: 38713 - protein, 10 aa, Artificial Sequence
  Description of Artificial Sequence: Synthetic peptide
  Seed: LLQNSQVFSL
LYQNSQVFSV

SEQ ID NO: 38714 - protein, 10 aa, Artificial Sequence
  Description of Artificial Sequence: Synthetic peptide
  Seed: LLQNSQVFSL
LVQNSQVFSI

SEQ ID NO: 38715 - protein, 10 aa, Artificial Sequence
  Description of Artificial Sequence: Synthetic peptide
  Seed: LLQNSQVFSL
LVQNSQVFSL

SEQ ID NO: 38716 - protein, 10 aa, Artificial Sequence
  Description of Artificial Sequence: Synthetic peptide
  Seed: LLQNSQVFSL
LVQNSQVFSM

SEQ ID NO: 38717 - protein, 10 aa, Artificial Sequence
  Description of Artificial Sequence: Synthetic peptide
  Seed: LLQNSQVFSL
LVQNSQVFSF

SEQ ID NO: 38718 - protein, 10 aa, Artificial Sequence
  Description of Artificial Sequence: Synthetic peptide
  Seed: LLQNSQVFSL
LVQNSQVFSY

SEQ ID NO: 38719 - protein, 10 aa, Artificial Sequence
  Description of Artificial Sequence: Synthetic peptide
  Seed: LLQNSQVFSL
LVQNSQVFSV

SEQ ID NO: 38720 - protein, 10 aa, Artificial Sequence
  Description of Artificial Sequence: Synthetic peptide
  Seed: LLQNSQVFSL
LTQNSQVFSF

SEQ ID NO: 38721 - protein, 10 aa, Artificial Sequence
  Description of Artificial Sequence: Synthetic peptide
  Seed: LLQNSQVFSL
LTQNSQVFSM

SEQ ID NO: 38722 - protein, 10 aa, Artificial Sequence
  Description of Artificial Sequence: Synthetic peptide
  Seed: LLQNSQVFSL
LTQNSQVFSL

SEQ ID NO: 38723 - protein, 10 aa, Artificial Sequence
  Description of Artificial Sequence: Synthetic peptide
  Seed: LLQNSQVFSL
LTQNSQVFSI

SEQ ID NO: 38724 - protein, 10 aa, Artificial Sequence
  Description of Artificial Sequence: Synthetic peptide
  Seed: LLQNSQVFSL
LMQNSQVFSV

SEQ ID NO: 38725 - protein, 10 aa, Artificial Sequence
  Description of Artificial Sequence: Synthetic peptide
  Seed: LLQNSQVFSL
LFQNSQVFSI

SEQ ID NO: 38726 - protein, 10 aa, Artificial Sequence
  Description of Artificial Sequence: Synthetic peptide
  Seed: LLQNSQVFSL
LFQNSQVFSL

SEQ ID NO: 38727 - protein, 10 aa, Artificial Sequence
  Description of Artificial Sequence: Synthetic peptide
  Seed: LLQNSQVFSL
LFQNSQVFSM

SEQ ID NO: 38728 - protein, 10 aa, Artificial Sequence
  Description of Artificial Sequence: Synthetic peptide
  Seed: LLQNSQVFSL
LFQNSQVFSF

SEQ ID NO: 38729 - protein, 10 aa, Artificial Sequence
  Description of Artificial Sequence: Synthetic peptide
  Seed: LLQNSQVFSL
LFQNSQVFSY

SEQ ID NO: 38730 - protein, 10 aa, Artificial Sequence
  Description of Artificial Sequence: Synthetic peptide
  Seed: LLQNSQVFSL
LFQNSQVFSV

SEQ ID NO: 38731 - protein, 10 aa, Artificial Sequence
  Description of Artificial Sequence: Synthetic peptide
  Seed: LLQNSQVFSL
LPQNSQVFSI

SEQ ID NO: 38732 - protein, 10 aa, Artificial Sequence
  Description of Artificial Sequence: Synthetic peptide
  Seed: LLQNSQVFSL
LPQNSQVFSL

SEQ ID NO: 38733 - protein, 10 aa, Artificial Sequence
  Description of Artificial Sequence: Synthetic peptide
  Seed: LLQNSQVFSL
LPQNSQVFSM

SEQ ID NO: 38734 - protein, 10 aa, Artificial Sequence
  Description of Artificial Sequence: Synthetic peptide
  Seed: LLQNSQVFSL
LPQNSQVFSF

SEQ ID NO: 38735 - protein, 10 aa, Artificial Sequence
  Description of Artificial Sequence: Synthetic peptide
  Seed: LLQNSQVFSL
LPQNSQVFSY

SEQ ID NO: 38736 - protein, 10 aa, Artificial Sequence
  Description of Artificial Sequence: Synthetic peptide
  Seed: LLQNSQVFSL
LPQNSQVFSV

SEQ ID NO: 38737 - protein, 10 aa, Artificial Sequence
  Description of Artificial Sequence: Synthetic peptide
  Seed: LLQNSQVFSL
LSQNSQVFSI

SEQ ID NO: 38738 - protein, 10 aa, Artificial Sequence
  Description of Artificial Sequence: Synthetic peptide
  Seed: LLQNSQVFSL
LSQNSQVFSL

SEQ ID NO: 38739 - protein, 10 aa, Artificial Sequence
  Description of Artificial Sequence: Synthetic peptide
  Seed: LLQNSQVFSL
LSQNSQVFSM

SEQ ID NO: 38740 - protein, 10 aa, Artificial Sequence
  Description of Artificial Sequence: Synthetic peptide
  Seed: LLQNSQVFSL
LSQNSQVFSF

SEQ ID NO: 38741 - protein, 10 aa, Artificial Sequence
  Description of Artificial Sequence: Synthetic peptide
  Seed: LLQNSQVFSL
LSQNSQVFSY

SEQ ID NO: 38742 - protein, 10 aa, Artificial Sequence
  Description of Artificial Sequence: Synthetic peptide
  Seed: LLQNSQVFSL
LSQNSQVFSV

SEQ ID NO: 38743 - protein, 11 aa, Artificial Sequence
  Description of Artificial Sequence: Synthetic peptide
  Seed: LLQNSQVFSLI
LLQNSQVFSLA

SEQ ID NO: 38744 - protein, 11 aa, Artificial Sequence
  Description of Artificial Sequence: Synthetic peptide
  Seed: LLQNSQVFSLI
LLQNSQVFSLR

SEQ ID NO: 38745 - protein, 11 aa, Artificial Sequence
  Description of Artificial Sequence: Synthetic peptide
  Seed: LLQNSQVFSLI
LLQNSQVFSLN

SEQ ID NO: 38746 - protein, 11 aa, Artificial Sequence
  Description of Artificial Sequence: Synthetic peptide
  Seed: LLQNSQVFSLI
LYQNSQVFSLV

SEQ ID NO: 38747 - protein, 8 aa, Artificial Sequence
  Description of Artificial Sequence: Synthetic peptide
  Seed: LLQNSQVY
LAQNSQVY

SEQ ID NO: 38748 - protein, 8 aa, Artificial Sequence
  Description of Artificial Sequence: Synthetic peptide
  Seed: LLQNSQVY
LRQNSQVF

SEQ ID NO: 38749 - protein, 8 aa, Artificial Sequence
  Description of Artificial Sequence: Synthetic peptide
  Seed: LLQNSQVY
LRQNSQVY

SEQ ID NO: 38750 - protein, 8 aa, Artificial Sequence
  Description of Artificial Sequence: Synthetic peptide
  Seed: LLQNSQVY
LQQNSQVL

SEQ ID NO: 38751 - protein, 8 aa, Artificial Sequence
  Description of Artificial Sequence: Synthetic peptide
  Seed: LLQNSQVY
LQQNSQVM

SEQ ID NO: 38752 - protein, 8 aa, Artificial Sequence
  Description of Artificial Sequence: Synthetic peptide
  Seed: LLQNSQVY
LQQNSQVF

SEQ ID NO: 38753 - protein, 8 aa, Artificial Sequence
  Description of Artificial Sequence: Synthetic peptide
  Seed: LLQNSQVY
LQQNSQVY

SEQ ID NO: 38754 - protein, 8 aa, Artificial Sequence
  Description of Artificial Sequence: Synthetic peptide
  Seed: LLQNSQVY
LHQNSQVF

SEQ ID NO: 38755 - protein, 8 aa, Artificial Sequence
  Description of Artificial Sequence: Synthetic peptide
  Seed: LLQNSQVY
LHQNSQVY

SEQ ID NO: 38756 - protein, 8 aa, Artificial Sequence
  Description of Artificial Sequence: Synthetic peptide
  Seed: LLQNSQVY
LKQNSQVM

SEQ ID NO: 38757 - protein, 8 aa, Artificial Sequence
  Description of Artificial Sequence: Synthetic peptide
  Seed: LLQNSQVY
LKQNSQVF

SEQ ID NO: 38758 - protein, 8 aa, Artificial Sequence
  Description of Artificial Sequence: Synthetic peptide
  Seed: LLQNSQVY
LKQNSQVY

SEQ ID NO: 38759 - protein, 8 aa, Artificial Sequence
  Description of Artificial Sequence: Synthetic peptide
  Seed: LLQNSQVY
LMQNSQVM

SEQ ID NO: 38760 - protein, 8 aa, Artificial Sequence
  Description of Artificial Sequence: Synthetic peptide
  Seed: LLQNSQVY
LMQNSQVF

SEQ ID NO: 38761 - protein, 8 aa, Artificial Sequence
  Description of Artificial Sequence: Synthetic peptide
  Seed: LLQNSQVY
LMQNSQVY

SEQ ID NO: 38762 - protein, 8 aa, Artificial Sequence
  Description of Artificial Sequence: Synthetic peptide
  Seed: LLQNSQVY
LFQNSQVF

SEQ ID NO: 38763 - protein, 8 aa, Artificial Sequence
  Description of Artificial Sequence: Synthetic peptide
  Seed: LLQNSQVY
LFQNSQVY

SEQ ID NO: 38764 - protein, 8 aa, Artificial Sequence
  Description of Artificial Sequence: Synthetic peptide
  Seed: LLQNSQVY
LYQNSQVF

SEQ ID NO: 38765 - protein, 8 aa, Artificial Sequence
  Description of Artificial Sequence: Synthetic peptide
  Seed: LLQNSQVY
LAQNSQVF

SEQ ID NO: 38766 - protein, 11 aa, Artificial Sequence
  Description of Artificial Sequence: Synthetic peptide
  Seed: LLQNSQVFSLI
LFQNSQVFSLV

SEQ ID NO: 38767 - protein, 11 aa, Artificial Sequence
  Description of Artificial Sequence: Synthetic peptide
  Seed: LLQNSQVFSLI
LLQNSQVFSLD

SEQ ID NO: 38768 - protein, 11 aa, Artificial Sequence
  Description of Artificial Sequence: Synthetic peptide
  Seed: LLQNSQVFSLI
LMQNSQVFSLV

SEQ ID NO: 38769 - protein, 11 aa, Artificial Sequence
  Description of Artificial Sequence: Synthetic peptide
  Seed: LLQNSQVFSLI
LLQNSQVFSLC

SEQ ID NO: 38770 - protein, 11 aa, Artificial Sequence
  Description of Artificial Sequence: Synthetic peptide
  Seed: LLQNSQVFSLI
LLQNSQVFSLQ

SEQ ID NO: 38771 - protein, 11 aa, Artificial Sequence
  Description of Artificial Sequence: Synthetic peptide
  Seed: LLQNSQVFSLI
LLQNSQVFSLE

SEQ ID NO: 38772 - protein, 11 aa, Artificial Sequence
  Description of Artificial Sequence: Synthetic peptide
  Seed: LLQNSQVFSLI
LLQNSQVFSLG

SEQ ID NO: 38773 - protein, 11 aa, Artificial Sequence
  Description of Artificial Sequence: Synthetic peptide
  Seed: LLQNSQVFSLI
LLQNSQVFSLH

SEQ ID NO: 38774 - protein, 11 aa, Artificial Sequence
  Description of Artificial Sequence: Synthetic peptide
  Seed: LLQNSQVFSLI
LLQNSQVFSLL

SEQ ID NO: 38775 - protein, 11 aa, Artificial Sequence
  Description of Artificial Sequence: Synthetic peptide
  Seed: LLQNSQVFSLI
LLQNSQVFSLK

SEQ ID NO: 38776 - protein, 11 aa, Artificial Sequence
  Description of Artificial Sequence: Synthetic peptide
  Seed: LLQNSQVFSLI
LLQNSQVFSLM

SEQ ID NO: 38777 - protein, 11 aa, Artificial Sequence
  Description of Artificial Sequence: Synthetic peptide
  Seed: LLQNSQVFSLI
LLQNSQVFSLF

SEQ ID NO: 38778 - protein, 11 aa, Artificial Sequence
  Description of Artificial Sequence: Synthetic peptide
  Seed: LLQNSQVFSLI
LLQNSQVFSLP

SEQ ID NO: 38779 - protein, 11 aa, Artificial Sequence
  Description of Artificial Sequence: Synthetic peptide
  Seed: LLQNSQVFSLI
LLQNSQVFSLS

SEQ ID NO: 38780 - protein, 11 aa, Artificial Sequence
  Description of Artificial Sequence: Synthetic peptide
  Seed: LLQNSQVFSLI
LLQNSQVFSLT

SEQ ID NO: 38781 - protein, 11 aa, Artificial Sequence
  Description of Artificial Sequence: Synthetic peptide
  Seed: LLQNSQVFSLI
LLQNSQVFSLW

SEQ ID NO: 38782 - protein, 11 aa, Artificial Sequence
  Description of Artificial Sequence: Synthetic peptide
  Seed: LLQNSQVFSLI
LLQNSQVFSLY

SEQ ID NO: 38783 - protein, 11 aa, Artificial Sequence
  Description of Artificial Sequence: Synthetic peptide
  Seed: LLQNSQVFSLI
LMQNSQVFSLA

SEQ ID NO: 38784 - protein, 11 aa, Artificial Sequence
  Description of Artificial Sequence: Synthetic peptide
  Seed: LLQNSQVFSLI
LMQNSQVFSLI

SEQ ID NO: 38785 - protein, 11 aa, Artificial Sequence
  Description of Artificial Sequence: Synthetic peptide
  Seed: LLQNSQVFSLI
LMQNSQVFSLL

SEQ ID NO: 38786 - protein, 11 aa, Artificial Sequence
  Description of Artificial Sequence: Synthetic peptide
  Seed: LLQNSQVFSLI
LMQNSQVFSLM

SEQ ID NO: 38787 - protein, 10 aa, Artificial Sequence
  Description of Artificial Sequence: Synthetic peptide
  Seed: LLQNSQVYSL
LTQNSQVYSY

SEQ ID NO: 38788 - protein, 10 aa, Artificial Sequence
  Description of Artificial Sequence: Synthetic peptide
  Seed: LLQNSQVYSL
LWQNSQVYSI

SEQ ID NO: 38789 - protein, 10 aa, Artificial Sequence
  Description of Artificial Sequence: Synthetic peptide
  Seed: LMQGSTLPRR
LVQGSTLPRY

SEQ ID NO: 38790 - protein, 10 aa, Artificial Sequence
  Description of Artificial Sequence: Synthetic peptide
  Seed: LMQGSTLPRR
LQQGSTLPRR

SEQ ID NO: 38791 - protein, 9 aa, Artificial Sequence
  Description of Artificial Sequence: Synthetic peptide
  Seed: LMQGSTLPR
LYQGSTLPK

SEQ ID NO: 38792 - protein, 9 aa, Artificial Sequence
  Description of Artificial Sequence: Synthetic peptide
  Seed: LMQGSTLPR
LVQGSTLPR

SEQ ID NO: 38793 - protein, 9 aa, Artificial Sequence
  Description of Artificial Sequence: Synthetic peptide
  Seed: LMQGSTLPR
LVQGSTLPK

SEQ ID NO: 38794 - protein, 9 aa, Artificial Sequence
  Description of Artificial Sequence: Synthetic peptide
  Seed: LMQGSTLPR
LVQGSTLPY

SEQ ID NO: 38795 - protein, 10 aa, Artificial Sequence
  Description of Artificial Sequence: Synthetic peptide
  Seed: LMQGSTLPRR
LAQGSTLPRR

SEQ ID NO: 38796 - protein, 10 aa, Artificial Sequence
  Description of Artificial Sequence: Synthetic peptide
  Seed: LMQGSTLPRR
LAQGSTLPRK

SEQ ID NO: 38797 - protein, 10 aa, Artificial Sequence
  Description of Artificial Sequence: Synthetic peptide
  Seed: LMQGSTLPRR
LRQGSTLPRR

SEQ ID NO: 38798 - protein, 10 aa, Artificial Sequence
  Description of Artificial Sequence: Synthetic peptide
  Seed: LMQGSTLPRR
LNQGSTLPRR

SEQ ID NO: 38799 - protein, 10 aa, Artificial Sequence
  Description of Artificial Sequence: Synthetic peptide
  Seed: LMQGSTLPRR
LCQGSTLPRR

SEQ ID NO: 38800 - protein, 10 aa, Artificial Sequence
  Description of Artificial Sequence: Synthetic peptide
  Seed: LMQGSTLPRR
LQQGSTLPRK

SEQ ID NO: 38801 - protein, 10 aa, Artificial Sequence
  Description of Artificial Sequence: Synthetic peptide
  Seed: LMQGSTLPRR
LMQGSTLPRQ

SEQ ID NO: 38802 - protein, 10 aa, Artificial Sequence
  Description of Artificial Sequence: Synthetic peptide
  Seed: LMQGSTLPRR
LGQGSTLPRR

SEQ ID NO: 38803 - protein, 10 aa, Artificial Sequence
  Description of Artificial Sequence: Synthetic peptide
  Seed: LMQGSTLPRR
LHQGSTLPRR

SEQ ID NO: 38804 - protein, 10 aa, Artificial Sequence
  Description of Artificial Sequence: Synthetic peptide
  Seed: LMQGSTLPRR
LIQGSTLPRR

SEQ ID NO: 38805 - protein, 10 aa, Artificial Sequence
  Description of Artificial Sequence: Synthetic peptide
  Seed: LMQGSTLPRR
LIQGSTLPRK

SEQ ID NO: 38806 - protein, 10 aa, Artificial Sequence
  Description of Artificial Sequence: Synthetic peptide
  Seed: LMQGSTLPRR
LLQGSTLPRR

SEQ ID NO: 38807 - protein, 10 aa, Artificial Sequence
  Description of Artificial Sequence: Synthetic peptide
  Seed: LMQGSTLPRR
LLQGSTLPRK

SEQ ID NO: 38808 - protein, 10 aa, Artificial Sequence
  Description of Artificial Sequence: Synthetic peptide
  Seed: LMQGSTLPRR
LMQGSTLPRA

SEQ ID NO: 38809 - protein, 10 aa, Artificial Sequence
  Description of Artificial Sequence: Synthetic peptide
  Seed: LMQGSTLPRR
LMQGSTLPRN

SEQ ID NO: 38810 - protein, 10 aa, Artificial Sequence
  Description of Artificial Sequence: Synthetic peptide
  Seed: LMQGSTLPRR
LMQGSTLPRD

SEQ ID NO: 38811 - protein, 9 aa, Artificial Sequence
  Description of Artificial Sequence: Synthetic peptide
  Seed: LMQGSTLPR
LYQGSTLPR

SEQ ID NO: 38812 - protein, 9 aa, Artificial Sequence
  Description of Artificial Sequence: Synthetic peptide
  Seed: LMQGSTLPR
LWQGSTLPK

SEQ ID NO: 38813 - protein, 9 aa, Artificial Sequence
  Description of Artificial Sequence: Synthetic peptide
  Seed: LMQGSTLPR
LWQGSTLPR

SEQ ID NO: 38814 - protein, 9 aa, Artificial Sequence
  Description of Artificial Sequence: Synthetic peptide
  Seed: LMQGSTLPR
LTQGSTLPY

SEQ ID NO: 38815 - protein, 9 aa, Artificial Sequence
  Description of Artificial Sequence: Synthetic peptide
  Seed: LMQGSTLPR
LGQGSTLPR

SEQ ID NO: 38816 - protein, 9 aa, Artificial Sequence
  Description of Artificial Sequence: Synthetic peptide
  Seed: LMQGSTLPR
LGQGSTLPK

SEQ ID NO: 38817 - protein, 9 aa, Artificial Sequence
  Description of Artificial Sequence: Synthetic peptide
  Seed: LMQGSTLPR
LHQGSTLPR

SEQ ID NO: 38818 - protein, 9 aa, Artificial Sequence
  Description of Artificial Sequence: Synthetic peptide
  Seed: LMQGSTLPR
LIQGSTLPR

SEQ ID NO: 38819 - protein, 9 aa, Artificial Sequence
  Description of Artificial Sequence: Synthetic peptide
  Seed: LMQGSTLPR
LIQGSTLPK

SEQ ID NO: 38820 - protein, 9 aa, Artificial Sequence
  Description of Artificial Sequence: Synthetic peptide
  Seed: LMQGSTLPR
LIQGSTLPY

SEQ ID NO: 38821 - protein, 9 aa, Artificial Sequence
  Description of Artificial Sequence: Synthetic peptide
  Seed: LMQGSTLPR
LLQGSTLPR

SEQ ID NO: 38822 - protein, 9 aa, Artificial Sequence
  Description of Artificial Sequence: Synthetic peptide
  Seed: LMQGSTLPR
LLQGSTLPK

SEQ ID NO: 38823 - protein, 9 aa, Artificial Sequence
  Description of Artificial Sequence: Synthetic peptide
  Seed: LMQGSTLPR
LLQGSTLPY

SEQ ID NO: 38824 - protein, 9 aa, Artificial Sequence
  Description of Artificial Sequence: Synthetic peptide
  Seed: LMQGSTLPR
LMQGSTLPH

SEQ ID NO: 38825 - protein, 9 aa, Artificial Sequence
  Description of Artificial Sequence: Synthetic peptide
  Seed: LMQGSTLPR
LMQGSTLPK

SEQ ID NO: 38826 - protein, 9 aa, Artificial Sequence
  Description of Artificial Sequence: Synthetic peptide
  Seed: LMQGSTLPR
LMQGSTLPY

SEQ ID NO: 38827 - protein, 9 aa, Artificial Sequence
  Description of Artificial Sequence: Synthetic peptide
  Seed: LMQGSTLPR
LFQGSTLPR

SEQ ID NO: 38828 - protein, 9 aa, Artificial Sequence
  Description of Artificial Sequence: Synthetic peptide
  Seed: LMQGSTLPR
LFQGSTLPK

SEQ ID NO: 38829 - protein, 9 aa, Artificial Sequence
  Description of Artificial Sequence: Synthetic peptide
  Seed: LMQGSTLPR
LSQGSTLPR

SEQ ID NO: 38830 - protein, 9 aa, Artificial Sequence
  Description of Artificial Sequence: Synthetic peptide
  Seed: LMQGSTLPR
LSQGSTLPK

SEQ ID NO: 38831 - protein, 9 aa, Artificial Sequence
  Description of Artificial Sequence: Synthetic peptide
  Seed: LMQGSTLPR
LSQGSTLPY

SEQ ID NO: 38832 - protein, 9 aa, Artificial Sequence
  Description of Artificial Sequence: Synthetic peptide
  Seed: LMQGSTLPR
LTQGSTLPR

SEQ ID NO: 38833 - protein, 9 aa, Artificial Sequence
  Description of Artificial Sequence: Synthetic peptide
  Seed: LMQGSTLPR
LTQGSTLPK

SEQ ID NO: 38834 - protein, 10 aa, Artificial Sequence
  Description of Artificial Sequence: Synthetic peptide
  Seed: LMQGSTLPRR
LMQGSTLPRC

SEQ ID NO: 38835 - protein, 10 aa, Artificial Sequence
  Description of Artificial Sequence: Synthetic peptide
  Seed: LMQGSTLPRR
LMQGSTLPRE

SEQ ID NO: 38836 - protein, 10 aa, Artificial Sequence
  Description of Artificial Sequence: Synthetic peptide
  Seed: LLQNSQVYSL
LWQNSQVYSL

SEQ ID NO: 38837 - protein, 10 aa, Artificial Sequence
  Description of Artificial Sequence: Synthetic peptide
  Seed: LMQGSTLPRR
LSQGSTLPRR

SEQ ID NO: 38838 - protein, 10 aa, Artificial Sequence
  Description of Artificial Sequence: Synthetic peptide
  Seed: LMQGSTLPRR
LFQGSTLPRK

SEQ ID NO: 38839 - protein, 10 aa, Artificial Sequence
  Description of Artificial Sequence: Synthetic peptide
  Seed: LMQGSTLPRR
LFQGSTLPRM

SEQ ID NO: 38840 - protein, 10 aa, Artificial Sequence
  Description of Artificial Sequence: Synthetic peptide
  Seed: LMQGSTLPRR
LFQGSTLPRF

SEQ ID NO: 38841 - protein, 10 aa, Artificial Sequence
  Description of Artificial Sequence: Synthetic peptide
  Seed: LMQGSTLPRR
LFQGSTLPRP

SEQ ID NO: 38842 - protein, 10 aa, Artificial Sequence
  Description of Artificial Sequence: Synthetic peptide
  Seed: LMQGSTLPRR
LFQGSTLPRS

SEQ ID NO: 38843 - protein, 10 aa, Artificial Sequence
  Description of Artificial Sequence: Synthetic peptide
  Seed: LMQGSTLPRR
LFQGSTLPRT

SEQ ID NO: 38844 - protein, 10 aa, Artificial Sequence
  Description of Artificial Sequence: Synthetic peptide
  Seed: LMQGSTLPRR
LFQGSTLPRW

SEQ ID NO: 38845 - protein, 10 aa, Artificial Sequence
  Description of Artificial Sequence: Synthetic peptide
  Seed: LMQGSTLPRR
LFQGSTLPRY

SEQ ID NO: 38846 - protein, 10 aa, Artificial Sequence
  Description of Artificial Sequence: Synthetic peptide
  Seed: LMQGSTLPRR
LFQGSTLPRV

SEQ ID NO: 38847 - protein, 10 aa, Artificial Sequence
  Description of Artificial Sequence: Synthetic peptide
  Seed: LMQGSTLPRR
LSQGSTLPRK

SEQ ID NO: 38848 - protein, 10 aa, Artificial Sequence
  Description of Artificial Sequence: Synthetic peptide
  Seed: LMQGSTLPRR
LMQGSTLPRG

SEQ ID NO: 38849 - protein, 10 aa, Artificial Sequence
  Description of Artificial Sequence: Synthetic peptide
  Seed: LMQGSTLPRR
LTQGSTLPRR

SEQ ID NO: 38850 - protein, 10 aa, Artificial Sequence
  Description of Artificial Sequence: Synthetic peptide
  Seed: LMQGSTLPRR
LTQGSTLPRK

SEQ ID NO: 38851 - protein, 10 aa, Artificial Sequence
  Description of Artificial Sequence: Synthetic peptide
  Seed: LMQGSTLPRR
LTQGSTLPRY

SEQ ID NO: 38852 - protein, 10 aa, Artificial Sequence
  Description of Artificial Sequence: Synthetic peptide
  Seed: LMQGSTLPRR
LWQGSTLPRR

SEQ ID NO: 38853 - protein, 10 aa, Artificial Sequence
  Description of Artificial Sequence: Synthetic peptide
  Seed: LMQGSTLPRR
LWQGSTLPRK

SEQ ID NO: 38854 - protein, 10 aa, Artificial Sequence
  Description of Artificial Sequence: Synthetic peptide
  Seed: LMQGSTLPRR
LYQGSTLPRR

SEQ ID NO: 38855 - protein, 10 aa, Artificial Sequence
  Description of Artificial Sequence: Synthetic peptide
  Seed: LMQGSTLPRR
LYQGSTLPRK

SEQ ID NO: 38856 - protein, 10 aa, Artificial Sequence
  Description of Artificial Sequence: Synthetic peptide
  Seed: LMQGSTLPRR
LVQGSTLPRR

SEQ ID NO: 38857 - protein, 10 aa, Artificial Sequence
  Description of Artificial Sequence: Synthetic peptide
  Seed: LMQGSTLPRR
LVQGSTLPRK

SEQ ID NO: 38858 - protein, 10 aa, Artificial Sequence
  Description of Artificial Sequence: Synthetic peptide
  Seed: LMQGSTLPRR
LFQGSTLPRL

SEQ ID NO: 38859 - protein, 10 aa, Artificial Sequence
  Description of Artificial Sequence: Synthetic peptide
  Seed: LMQGSTLPRR
LFQGSTLPRI

SEQ ID NO: 38860 - protein, 10 aa, Artificial Sequence
  Description of Artificial Sequence: Synthetic peptide
  Seed: LMQGSTLPRR
LFQGSTLPRH

SEQ ID NO: 38861 - protein, 10 aa, Artificial Sequence
  Description of Artificial Sequence: Synthetic peptide
  Seed: LMQGSTLPRR
LFQGSTLPRG

SEQ ID NO: 38862 - protein, 10 aa, Artificial Sequence
  Description of Artificial Sequence: Synthetic peptide
  Seed: LMQGSTLPRR
LMQGSTLPRH

SEQ ID NO: 38863 - protein, 10 aa, Artificial Sequence
  Description of Artificial Sequence: Synthetic peptide
  Seed: LMQGSTLPRR
LMQGSTLPRI

SEQ ID NO: 38864 - protein, 10 aa, Artificial Sequence
  Description of Artificial Sequence: Synthetic peptide
  Seed: LMQGSTLPRR
LMQGSTLPRL

SEQ ID NO: 38865 - protein, 10 aa, Artificial Sequence
  Description of Artificial Sequence: Synthetic peptide
  Seed: LMQGSTLPRR
LMQGSTLPRK

SEQ ID NO: 38866 - protein, 10 aa, Artificial Sequence
  Description of Artificial Sequence: Synthetic peptide
  Seed: LMQGSTLPRR
LMQGSTLPRM

SEQ ID NO: 38867 - protein, 10 aa, Artificial Sequence
  Description of Artificial Sequence: Synthetic peptide
  Seed: LMQGSTLPRR
LMQGSTLPRF

SEQ ID NO: 38868 - protein, 10 aa, Artificial Sequence
  Description of Artificial Sequence: Synthetic peptide
  Seed: LMQGSTLPRR
LMQGSTLPRP

SEQ ID NO: 38869 - protein, 10 aa, Artificial Sequence
  Description of Artificial Sequence: Synthetic peptide
  Seed: LMQGSTLPRR
LMQGSTLPRS

SEQ ID NO: 38870 - protein, 10 aa, Artificial Sequence
  Description of Artificial Sequence: Synthetic peptide
  Seed: LMQGSTLPRR
LMQGSTLPRT

SEQ ID NO: 38871 - protein, 10 aa, Artificial Sequence
  Description of Artificial Sequence: Synthetic peptide
  Seed: LMQGSTLPRR
LMQGSTLPRW

SEQ ID NO: 38872 - protein, 10 aa, Artificial Sequence
  Description of Artificial Sequence: Synthetic peptide
  Seed: LMQGSTLPRR
LMQGSTLPRY

SEQ ID NO: 38873 - protein, 10 aa, Artificial Sequence
  Description of Artificial Sequence: Synthetic peptide
  Seed: LMQGSTLPRR
LMQGSTLPRV

SEQ ID NO: 38874 - protein, 10 aa, Artificial Sequence
  Description of Artificial Sequence: Synthetic peptide
  Seed: LMQGSTLPRR
LFQGSTLPRA

SEQ ID NO: 38875 - protein, 10 aa, Artificial Sequence
  Description of Artificial Sequence: Synthetic peptide
  Seed: LMQGSTLPRR
LFQGSTLPRR

SEQ ID NO: 38876 - protein, 10 aa, Artificial Sequence
  Description of Artificial Sequence: Synthetic peptide
  Seed: LMQGSTLPRR
LFQGSTLPRN

SEQ ID NO: 38877 - protein, 10 aa, Artificial Sequence
  Description of Artificial Sequence: Synthetic peptide
  Seed: LMQGSTLPRR
LFQGSTLPRD

SEQ ID NO: 38878 - protein, 10 aa, Artificial Sequence
  Description of Artificial Sequence: Synthetic peptide
  Seed: LMQGSTLPRR
LFQGSTLPRC

SEQ ID NO: 38879 - protein, 10 aa, Artificial Sequence
  Description of Artificial Sequence: Synthetic peptide
  Seed: LMQGSTLPRR
LFQGSTLPRQ

SEQ ID NO: 38880 - protein, 10 aa, Artificial Sequence
  Description of Artificial Sequence: Synthetic peptide
  Seed: LMQGSTLPRR
LFQGSTLPRE

SEQ ID NO: 38881 - protein, 9 aa, Artificial Sequence
  Description of Artificial Sequence: Synthetic peptide
  Seed: LMQGSTLPR
LQQGSTLPK

SEQ ID NO: 38882 - protein, 9 aa, Artificial Sequence
  Description of Artificial Sequence: Synthetic peptide
  Seed: LMQGSTLPR
LQQGSTLPR

SEQ ID NO: 38883 - protein, 9 aa, Artificial Sequence
  Description of Artificial Sequence: Synthetic peptide
  Seed: LMQGSTLPR
LCQGSTLPR

SEQ ID NO: 38884 - protein, 9 aa, Artificial Sequence
  Description of Artificial Sequence: Synthetic peptide
  Seed: LLSFIRGTK
LGSFIRGTR

SEQ ID NO: 38885 - protein, 11 aa, Artificial Sequence
  Description of Artificial Sequence: Synthetic peptide
  Seed: LLQNSQVYSLI
LMQNSQVYSLV

SEQ ID NO: 38886 - protein, 9 aa, Artificial Sequence
  Description of Artificial Sequence: Synthetic peptide
  Seed: LLSFIRGTK
LASFIRGTR

SEQ ID NO: 38887 - protein, 9 aa, Artificial Sequence
  Description of Artificial Sequence: Synthetic peptide
  Seed: LLSFIRGTK
LASFIRGTK

SEQ ID NO: 38888 - protein, 9 aa, Artificial Sequence
  Description of Artificial Sequence: Synthetic peptide
  Seed: LLSFIRGTK
LASFIRGTY

SEQ ID NO: 38889 - protein, 9 aa, Artificial Sequence
  Description of Artificial Sequence: Synthetic peptide
  Seed: LLSFIRGTK
LNSFIRGTR

SEQ ID NO: 38890 - protein, 9 aa, Artificial Sequence
  Description of Artificial Sequence: Synthetic peptide
  Seed: LLSFIRGTK
LNSFIRGTK

SEQ ID NO: 38891 - protein, 9 aa, Artificial Sequence
  Description of Artificial Sequence: Synthetic peptide
  Seed: LLSFIRGTK
LCSFIRGTR

SEQ ID NO: 38892 - protein, 9 aa, Artificial Sequence
  Description of Artificial Sequence: Synthetic peptide
  Seed: LLSFIRGTK
LQSFIRGTR

SEQ ID NO: 38893 - protein, 9 aa, Artificial Sequence
  Description of Artificial Sequence: Synthetic peptide
  Seed: LLSFIRGTK
LQSFIRGTK

SEQ ID NO: 38894 - protein, 9 aa, Artificial Sequence
  Description of Artificial Sequence: Synthetic peptide
  Seed: LLSFIRGTK
LGSFIRGTK

SEQ ID NO: 38895 - protein, 9 aa, Artificial Sequence
  Description of Artificial Sequence: Synthetic peptide
  Seed: LMQGSTLPR
LNQGSTLPK

SEQ ID NO: 38896 - protein, 9 aa, Artificial Sequence
  Description of Artificial Sequence: Synthetic peptide
  Seed: LLSFIRGTK
LHSFIRGTR

SEQ ID NO: 38897 - protein, 9 aa, Artificial Sequence
  Description of Artificial Sequence: Synthetic peptide
  Seed: LLSFIRGTK
LISFIRGTR

SEQ ID NO: 38898 - protein, 9 aa, Artificial Sequence
  Description of Artificial Sequence: Synthetic peptide
  Seed: LLSFIRGTK
LISFIRGTK

SEQ ID NO: 38899 - protein, 9 aa, Artificial Sequence
  Description of Artificial Sequence: Synthetic peptide
  Seed: LLSFIRGTK
LISFIRGTY

SEQ ID NO: 38900 - protein, 9 aa, Artificial Sequence
  Description of Artificial Sequence: Synthetic peptide
  Seed: LLSFIRGTK
LLSFIRGTR

SEQ ID NO: 38901 - protein, 9 aa, Artificial Sequence
  Description of Artificial Sequence: Synthetic peptide
  Seed: LLSFIRGTK
LMSFIRGTR

SEQ ID NO: 38902 - protein, 9 aa, Artificial Sequence
  Description of Artificial Sequence: Synthetic peptide
  Seed: LLSFIRGTK
LMSFIRGTK

SEQ ID NO: 38903 - protein, 9 aa, Artificial Sequence
  Description of Artificial Sequence: Synthetic peptide
  Seed: LLSFIRGTK
LMSFIRGTY

SEQ ID NO: 38904 - protein, 9 aa, Artificial Sequence
  Description of Artificial Sequence: Synthetic peptide
  Seed: LLSFIRGTK
LFSFIRGTR

SEQ ID NO: 38905 - protein, 11 aa, Artificial Sequence
  Description of Artificial Sequence: Synthetic peptide
  Seed: LLQNSQVYSLI
LMQNSQVYSLL

SEQ ID NO: 38906 - protein, 11 aa, Artificial Sequence
  Description of Artificial Sequence: Synthetic peptide
  Seed: LLQNSQVYSLI
LMQNSQVYSLI

SEQ ID NO: 38907 - protein, 11 aa, Artificial Sequence
  Description of Artificial Sequence: Synthetic peptide
  Seed: LLQNSQVYSLI
LMQNSQVYSLA

SEQ ID NO: 38908 - protein, 11 aa, Artificial Sequence
  Description of Artificial Sequence: Synthetic peptide
  Seed: LLQNSQVYSLI
LLQNSQVYSLV

SEQ ID NO: 38909 - protein, 10 aa, Artificial Sequence
  Description of Artificial Sequence: Synthetic peptide
  Seed: LLQNSQVYSL
LWQNSQVYSM

SEQ ID NO: 38910 - protein, 10 aa, Artificial Sequence
  Description of Artificial Sequence: Synthetic peptide
  Seed: LLQNSQVYSL
LWQNSQVYSF

SEQ ID NO: 38911 - protein, 10 aa, Artificial Sequence
  Description of Artificial Sequence: Synthetic peptide
  Seed: LLQNSQVYSL
LWQNSQVYSY

SEQ ID NO: 38912 - protein, 10 aa, Artificial Sequence
  Description of Artificial Sequence: Synthetic peptide
  Seed: LLQNSQVYSL
LWQNSQVYSV

SEQ ID NO: 38913 - protein, 10 aa, Artificial Sequence
  Description of Artificial Sequence: Synthetic peptide
  Seed: LLQNSQVYSL
LYQNSQVYSI

SEQ ID NO: 38914 - protein, 10 aa, Artificial Sequence
  Description of Artificial Sequence: Synthetic peptide
  Seed: LLQNSQVYSL
LYQNSQVYSL

SEQ ID NO: 38915 - protein, 10 aa, Artificial Sequence
  Description of Artificial Sequence: Synthetic peptide
  Seed: LLQNSQVYSL
LYQNSQVYSM

SEQ ID NO: 38916 - protein, 10 aa, Artificial Sequence
  Description of Artificial Sequence: Synthetic peptide
  Seed: LLQNSQVYSL
LYQNSQVYSF

SEQ ID NO: 38917 - protein, 10 aa, Artificial Sequence
  Description of Artificial Sequence: Synthetic peptide
  Seed: LLQNSQVYSL
LYQNSQVYSY

SEQ ID NO: 38918 - protein, 10 aa, Artificial Sequence
  Description of Artificial Sequence: Synthetic peptide
  Seed: LLQNSQVYSL
LYQNSQVYSV

SEQ ID NO: 38919 - protein, 10 aa, Artificial Sequence
  Description of Artificial Sequence: Synthetic peptide
  Seed: LLQNSQVYSL
LVQNSQVYSI

SEQ ID NO: 38920 - protein, 10 aa, Artificial Sequence
  Description of Artificial Sequence: Synthetic peptide
  Seed: LLQNSQVYSL
LVQNSQVYSL

SEQ ID NO: 38921 - protein, 10 aa, Artificial Sequence
  Description of Artificial Sequence: Synthetic peptide
  Seed: LLQNSQVYSL
LVQNSQVYSM

SEQ ID NO: 38922 - protein, 10 aa, Artificial Sequence
  Description of Artificial Sequence: Synthetic peptide
  Seed: LLQNSQVYSL
LVQNSQVYSF

SEQ ID NO: 38923 - protein, 10 aa, Artificial Sequence
  Description of Artificial Sequence: Synthetic peptide
  Seed: LLQNSQVYSL
LVQNSQVYSY

SEQ ID NO: 38924 - protein, 10 aa, Artificial Sequence
  Description of Artificial Sequence: Synthetic peptide
  Seed: LLQNSQVYSL
LVQNSQVYSV

SEQ ID NO: 38925 - protein, 11 aa, Artificial Sequence
  Description of Artificial Sequence: Synthetic peptide
  Seed: LLQNSQVYSLI
LLQNSQVYSLA

SEQ ID NO: 38926 - protein, 11 aa, Artificial Sequence
  Description of Artificial Sequence: Synthetic peptide
  Seed: LLQNSQVYSLI
LLQNSQVYSLL

SEQ ID NO: 38927 - protein, 11 aa, Artificial Sequence
  Description of Artificial Sequence: Synthetic peptide
  Seed: LLQNSQVYSLI
LLQNSQVYSLM

SEQ ID NO: 38928 - protein, 9 aa, Artificial Sequence
  Description of Artificial Sequence: Synthetic peptide
  Seed: LLSFIRGTK
LPSFIRGTR

SEQ ID NO: 38929 - protein, 9 aa, Artificial Sequence
  Description of Artificial Sequence: Synthetic peptide
  Seed: LLSFIRGTK
LPSFIRGTK

SEQ ID NO: 38930 - protein, 10 aa, Artificial Sequence
  Description of Artificial Sequence: Synthetic peptide
  Seed: LLSFIRGTKV
LLSFIRGTKL

SEQ ID NO: 38931 - protein, 10 aa, Artificial Sequence
  Description of Artificial Sequence: Synthetic peptide
  Seed: LLSFIRGTKV
LLSFIRGTKT

SEQ ID NO: 38932 - protein, 10 aa, Artificial Sequence
  Description of Artificial Sequence: Synthetic peptide
  Seed: LLSFIRGTKV
LMSFIRGTKA

SEQ ID NO: 38933 - protein, 10 aa, Artificial Sequence
  Description of Artificial Sequence: Synthetic peptide
  Seed: LLSFIRGTKV
LMSFIRGTKI

SEQ ID NO: 38934 - protein, 10 aa, Artificial Sequence
  Description of Artificial Sequence: Synthetic peptide
  Seed: LLSFIRGTKV
LMSFIRGTKL

SEQ ID NO: 38935 - protein, 10 aa, Artificial Sequence
  Description of Artificial Sequence: Synthetic peptide
  Seed: LLSFIRGTKV
LMSFIRGTKM

SEQ ID NO: 38936 - protein, 10 aa, Artificial Sequence
  Description of Artificial Sequence: Synthetic peptide
  Seed: LLSFIRGTKV
LMSFIRGTKT

SEQ ID NO: 38937 - protein, 10 aa, Artificial Sequence
  Description of Artificial Sequence: Synthetic peptide
  Seed: LLSFIRGTKV
LMSFIRGTKV

SEQ ID NO: 38938 - protein, 10 aa, Artificial Sequence
  Description of Artificial Sequence: Synthetic peptide
  Seed: LLSFIRGTKV
LVSFIRGTKV

SEQ ID NO: 38939 - protein, 11 aa, Artificial Sequence
  Description of Artificial Sequence: Synthetic peptide
  Seed: LMIWHSNLNDA
LLIWHSNLNDA

SEQ ID NO: 38940 - protein, 11 aa, Artificial Sequence
  Description of Artificial Sequence: Synthetic peptide
  Seed: LMIWHSNLNDA
LLIWHSNLNDI

SEQ ID NO: 38941 - protein, 11 aa, Artificial Sequence
  Description of Artificial Sequence: Synthetic peptide
  Seed: LMIWHSNLNDA
LLIWHSNLNDL

SEQ ID NO: 38942 - protein, 11 aa, Artificial Sequence
  Description of Artificial Sequence: Synthetic peptide
  Seed: LMIWHSNLNDA
LLIWHSNLNDV

SEQ ID NO: 38943 - protein, 11 aa, Artificial Sequence
  Description of Artificial Sequence: Synthetic peptide
  Seed: LMIWHSNLNDA
LMIWHSNLNDI

SEQ ID NO: 38944 - protein, 11 aa, Artificial Sequence
  Description of Artificial Sequence: Synthetic peptide
  Seed: LMIWHSNLNDA
LMIWHSNLNDL

SEQ ID NO: 38945 - protein, 11 aa, Artificial Sequence
  Description of Artificial Sequence: Synthetic peptide
  Seed: LMIWHSNLNDA
LMIWHSNLNDV

SEQ ID NO: 38946 - protein, 9 aa, Artificial Sequence
  Description of Artificial Sequence: Synthetic peptide
  Seed: LMQGSTLPR
LAQGSTLPR

SEQ ID NO: 38947 - protein, 9 aa, Artificial Sequence
  Description of Artificial Sequence: Synthetic peptide
  Seed: LMQGSTLPR
LAQGSTLPK

SEQ ID NO: 38948 - protein, 9 aa, Artificial Sequence
  Description of Artificial Sequence: Synthetic peptide
  Seed: LMQGSTLPR
LNQGSTLPR

SEQ ID NO: 38949 - protein, 10 aa, Artificial Sequence
  Description of Artificial Sequence: Synthetic peptide
  Seed: LLSFIRGTKV
LLSFIRGTKM

SEQ ID NO: 38950 - protein, 10 aa, Artificial Sequence
  Description of Artificial Sequence: Synthetic peptide
  Seed: LLSFIRGTKV
LLSFIRGTKI

SEQ ID NO: 38951 - protein, 9 aa, Artificial Sequence
  Description of Artificial Sequence: Synthetic peptide
  Seed: LLSFIRGTK
LSSFIRGTA

SEQ ID NO: 38952 - protein, 10 aa, Artificial Sequence
  Description of Artificial Sequence: Synthetic peptide
  Seed: LLSFIRGTKV
LLSFIRGTKA

SEQ ID NO: 38953 - protein, 9 aa, Artificial Sequence
  Description of Artificial Sequence: Synthetic peptide
  Seed: LLSFIRGTK
LSSFIRGTR

SEQ ID NO: 38954 - protein, 9 aa, Artificial Sequence
  Description of Artificial Sequence: Synthetic peptide
  Seed: LLSFIRGTK
LSSFIRGTY

SEQ ID NO: 38955 - protein, 9 aa, Artificial Sequence
  Description of Artificial Sequence: Synthetic peptide
  Seed: LLSFIRGTK
LTSFIRGTA

SEQ ID NO: 38956 - protein, 9 aa, Artificial Sequence
  Description of Artificial Sequence: Synthetic peptide
  Seed: LLSFIRGTK
LTSFIRGTR

SEQ ID NO: 38957 - protein, 9 aa, Artificial Sequence
  Description of Artificial Sequence: Synthetic peptide
  Seed: LLSFIRGTK
LTSFIRGTK

SEQ ID NO: 38958 - protein, 9 aa, Artificial Sequence
  Description of Artificial Sequence: Synthetic peptide
  Seed: LLSFIRGTK
LTSFIRGTY

SEQ ID NO: 38959 - protein, 9 aa, Artificial Sequence
  Description of Artificial Sequence: Synthetic peptide
  Seed: LLSFIRGTK
LWSFIRGTR

SEQ ID NO: 38960 - protein, 9 aa, Artificial Sequence
  Description of Artificial Sequence: Synthetic peptide
  Seed: LLSFIRGTK
LWSFIRGTK

SEQ ID NO: 38961 - protein, 9 aa, Artificial Sequence
  Description of Artificial Sequence: Synthetic peptide
  Seed: LLSFIRGTK
LYSFIRGTR

SEQ ID NO: 38962 - protein, 9 aa, Artificial Sequence
  Description of Artificial Sequence: Synthetic peptide
  Seed: LLSFIRGTK
LYSFIRGTK

SEQ ID NO: 38963 - protein, 9 aa, Artificial Sequence
  Description of Artificial Sequence: Synthetic peptide
  Seed: LLSFIRGTK
LVSFIRGTR

SEQ ID NO: 38964 - protein, 9 aa, Artificial Sequence
  Description of Artificial Sequence: Synthetic peptide
  Seed: LLSFIRGTK
LVSFIRGTK

SEQ ID NO: 38965 - protein, 9 aa, Artificial Sequence
  Description of Artificial Sequence: Synthetic peptide
  Seed: LLSFIRGTK
LVSFIRGTY

SEQ ID NO: 38966 - protein, 10 aa, Artificial Sequence
  Description of Artificial Sequence: Synthetic peptide
  Seed: LLSFIRGTKV
LQSFIRGTKL

SEQ ID NO: 38967 - protein, 10 aa, Artificial Sequence
  Description of Artificial Sequence: Synthetic peptide
  Seed: LLSFIRGTKV
LQSFIRGTKV

SEQ ID NO: 38968 - protein, 10 aa, Artificial Sequence
  Description of Artificial Sequence: Synthetic peptide
  Seed: LLSFIRGTKV
LISFIRGTKI

SEQ ID NO: 38969 - protein, 10 aa, Artificial Sequence
  Description of Artificial Sequence: Synthetic peptide
  Seed: LLSFIRGTKV
LISFIRGTKL

SEQ ID NO: 38970 - protein, 10 aa, Artificial Sequence
  Description of Artificial Sequence: Synthetic peptide
  Seed: LLSFIRGTKV
LISFIRGTKV

SEQ ID NO: 38971 - protein, 10 aa, Artificial Sequence
  Description of Artificial Sequence: Synthetic peptide
  Seed: LPFEKSTVMA
LPFEKSTVMR

SEQ ID NO: 38972 - protein, 10 aa, Artificial Sequence
  Description of Artificial Sequence: Synthetic peptide
  Seed: LPFEKSTVMA
LPFEKSTVMN

SEQ ID NO: 38973 - protein, 10 aa, Artificial Sequence
  Description of Artificial Sequence: Synthetic peptide
  Seed: LPFEKSTVMA
LPFEKSTVMD

SEQ ID NO: 38974 - protein, 8 aa, Artificial Sequence
  Description of Artificial Sequence: Synthetic peptide
  Seed: LPRRSGAA
LPRRSGAY

SEQ ID NO: 38975 - protein, 8 aa, Artificial Sequence
  Description of Artificial Sequence: Synthetic peptide
  Seed: LPRRSGAA
LPRRSGAC

SEQ ID NO: 38976 - protein, 8 aa, Artificial Sequence
  Description of Artificial Sequence: Synthetic peptide
  Seed: LPRRSGAA
LPRRSGAI

SEQ ID NO: 38977 - protein, 8 aa, Artificial Sequence
  Description of Artificial Sequence: Synthetic peptide
  Seed: LPRRSGAA
LPRRSGAL

SEQ ID NO: 38978 - protein, 8 aa, Artificial Sequence
  Description of Artificial Sequence: Synthetic peptide
  Seed: LPRRSGAA
LPRRSGAM

SEQ ID NO: 38979 - protein, 8 aa, Artificial Sequence
  Description of Artificial Sequence: Synthetic peptide
  Seed: LPRRSGAA
LPRRSGAF

SEQ ID NO: 38980 - protein, 8 aa, Artificial Sequence
  Description of Artificial Sequence: Synthetic peptide
  Seed: LPRRSGAA
LPRRSGAP

SEQ ID NO: 38981 - protein, 8 aa, Artificial Sequence
  Description of Artificial Sequence: Synthetic peptide
  Seed: LPRRSGAA
LPRRSGAS

SEQ ID NO: 38982 - protein, 8 aa, Artificial Sequence
  Description of Artificial Sequence: Synthetic peptide
  Seed: LPRRSGAA
LPRRSGAT

SEQ ID NO: 38983 - protein, 8 aa, Artificial Sequence
  Description of Artificial Sequence: Synthetic peptide
  Seed: LPRRSGAA
LPRRSGAW

SEQ ID NO: 38984 - protein, 8 aa, Artificial Sequence
  Description of Artificial Sequence: Synthetic peptide
  Seed: LPRRSGAA
LPRRSGAV

SEQ ID NO: 38985 - protein, 9 aa, Artificial Sequence
  Description of Artificial Sequence: Synthetic peptide
  Seed: LPRRSGAAG
LARRSGAAV

SEQ ID NO: 38986 - protein, 8 aa, Artificial Sequence
  Description of Artificial Sequence: Synthetic peptide
  Seed: LPRRSGAA
LTRRSGAL

SEQ ID NO: 38987 - protein, 8 aa, Artificial Sequence
  Description of Artificial Sequence: Synthetic peptide
  Seed: LPRRSGAA
LVRRSGAL

SEQ ID NO: 38988 - protein, 8 aa, Artificial Sequence
  Description of Artificial Sequence: Synthetic peptide
  Seed: LPRRSGAA
LVRRSGAM

SEQ ID NO: 38989 - protein, 9 aa, Artificial Sequence
  Description of Artificial Sequence: Synthetic peptide
  Seed: LPRRSGAAG
LARRSGAAA

SEQ ID NO: 38990 - protein, 9 aa, Artificial Sequence
  Description of Artificial Sequence: Synthetic peptide
  Seed: LPRRSGAAG
LARRSGAAC

SEQ ID NO: 38991 - protein, 9 aa, Artificial Sequence
  Description of Artificial Sequence: Synthetic peptide
  Seed: LPRRSGAAG
LARRSGAAI

SEQ ID NO: 38992 - protein, 9 aa, Artificial Sequence
  Description of Artificial Sequence: Synthetic peptide
  Seed: LPRRSGAAG
LARRSGAAL

SEQ ID NO: 38993 - protein, 9 aa, Artificial Sequence
  Description of Artificial Sequence: Synthetic peptide
  Seed: LPRRSGAAG
LARRSGAAM

SEQ ID NO: 38994 - protein, 9 aa, Artificial Sequence
  Description of Artificial Sequence: Synthetic peptide
  Seed: LPRRSGAAG
LARRSGAAF

SEQ ID NO: 38995 - protein, 8 aa, Artificial Sequence
  Description of Artificial Sequence: Synthetic peptide
  Seed: LPRRSGAA
LMRRSGAL

SEQ ID NO: 38996 - protein, 8 aa, Artificial Sequence
  Description of Artificial Sequence: Synthetic peptide
  Seed: LPRRSGAA
LLRRSGAL

SEQ ID NO: 38997 - protein, 8 aa, Artificial Sequence
  Description of Artificial Sequence: Synthetic peptide
  Seed: LPRRSGAA
LIRRSGAM

SEQ ID NO: 38998 - protein, 8 aa, Artificial Sequence
  Description of Artificial Sequence: Synthetic peptide
  Seed: LPRRSGAA
LIRRSGAL

SEQ ID NO: 38999 - protein, 11 aa, Artificial Sequence
  Description of Artificial Sequence: Synthetic peptide
  Seed: LPFERATVMAA
LAFERATVMAY

SEQ ID NO: 39000 - protein, 11 aa, Artificial Sequence
  Description of Artificial Sequence: Synthetic peptide
  Seed: LPFERATVMAA
LIFERATVMAY

SEQ ID NO: 39001 - protein, 11 aa, Artificial Sequence
  Description of Artificial Sequence: Synthetic peptide
  Seed: LPFERATVMAA
LMFERATVMAY

SEQ ID NO: 39002 - protein, 11 aa, Artificial Sequence
  Description of Artificial Sequence: Synthetic peptide
  Seed: LPFERATVMAA
LPFERATVMAC

SEQ ID NO: 39003 - protein, 11 aa, Artificial Sequence
  Description of Artificial Sequence: Synthetic peptide
  Seed: LPFERATVMAA
LPFERATVMAH

SEQ ID NO: 39004 - protein, 11 aa, Artificial Sequence
  Description of Artificial Sequence: Synthetic peptide
  Seed: LPFERATVMAA
LPFERATVMAI

SEQ ID NO: 39005 - protein, 11 aa, Artificial Sequence
  Description of Artificial Sequence: Synthetic peptide
  Seed: LPFERATVMAA
LPFERATVMAL

SEQ ID NO: 39006 - protein, 11 aa, Artificial Sequence
  Description of Artificial Sequence: Synthetic peptide
  Seed: LPFERATVMAA
LPFERATVMAM

SEQ ID NO: 39007 - protein, 11 aa, Artificial Sequence
  Description of Artificial Sequence: Synthetic peptide
  Seed: LPFERATVMAA
LPFERATVMAF

SEQ ID NO: 39008 - protein, 11 aa, Artificial Sequence
  Description of Artificial Sequence: Synthetic peptide
  Seed: LPFERATVMAA
LPFERATVMAP

SEQ ID NO: 39009 - protein, 11 aa, Artificial Sequence
  Description of Artificial Sequence: Synthetic peptide
  Seed: LPFERATVMAA
LPFERATVMAS

SEQ ID NO: 39010 - protein, 11 aa, Artificial Sequence
  Description of Artificial Sequence: Synthetic peptide
  Seed: LPFERATVMAA
LPFERATVMAT

SEQ ID NO: 39011 - protein, 11 aa, Artificial Sequence
  Description of Artificial Sequence: Synthetic peptide
  Seed: LPFERATVMAA
LPFERATVMAW

SEQ ID NO: 39012 - protein, 11 aa, Artificial Sequence
  Description of Artificial Sequence: Synthetic peptide
  Seed: LPFERATVMAA
LPFERATVMAY

SEQ ID NO: 39013 - protein, 11 aa, Artificial Sequence
  Description of Artificial Sequence: Synthetic peptide
  Seed: LPFERATVMAA
LPFERATVMAV

SEQ ID NO: 39014 - protein, 11 aa, Artificial Sequence
  Description of Artificial Sequence: Synthetic peptide
  Seed: LPFERATVMAA
LSFERATVMAY

SEQ ID NO: 39015 - protein, 11 aa, Artificial Sequence
  Description of Artificial Sequence: Synthetic peptide
  Seed: LPFERATVMAA
LTFERATVMAY

SEQ ID NO: 39016 - protein, 11 aa, Artificial Sequence
  Description of Artificial Sequence: Synthetic peptide
  Seed: LPFERATVMAA
LVFERATVMAY

SEQ ID NO: 39017 - protein, 8 aa, Artificial Sequence
  Description of Artificial Sequence: Synthetic peptide
  Seed: LPRRSGAA
LARRSGAL

SEQ ID NO: 39018 - protein, 9 aa, Artificial Sequence
  Description of Artificial Sequence: Synthetic peptide
  Seed: LPRRSGAAG
LARRSGAAT

SEQ ID NO: 39019 - protein, 9 aa, Artificial Sequence
  Description of Artificial Sequence: Synthetic peptide
  Seed: LPRRSGAAG
LRRRSGAAL

SEQ ID NO: 39020 - protein, 9 aa, Artificial Sequence
  Description of Artificial Sequence: Synthetic peptide
  Seed: LPRRSGAAG
LPRRSGAAI

SEQ ID NO: 39021 - protein, 9 aa, Artificial Sequence
  Description of Artificial Sequence: Synthetic peptide
  Seed: LPRRSGAAG
LMRRSGAAV

SEQ ID NO: 39022 - protein, 9 aa, Artificial Sequence
  Description of Artificial Sequence: Synthetic peptide
  Seed: LPRRSGAAG
LLRRSGAAM

SEQ ID NO: 39023 - protein, 9 aa, Artificial Sequence
  Description of Artificial Sequence: Synthetic peptide
  Seed: LPRRSGAAG
LLRRSGAAF

SEQ ID NO: 39024 - protein, 9 aa, Artificial Sequence
  Description of Artificial Sequence: Synthetic peptide
  Seed: LPRRSGAAG
LLRRSGAAV

SEQ ID NO: 39025 - protein, 9 aa, Artificial Sequence
  Description of Artificial Sequence: Synthetic peptide
  Seed: LPRRSGAAG
LKRRSGAAL

SEQ ID NO: 39026 - protein, 9 aa, Artificial Sequence
  Description of Artificial Sequence: Synthetic peptide
  Seed: LPRRSGAAG
LMRRSGAAA

SEQ ID NO: 39027 - protein, 9 aa, Artificial Sequence
  Description of Artificial Sequence: Synthetic peptide
  Seed: LPRRSGAAG
LMRRSGAAI

SEQ ID NO: 39028 - protein, 9 aa, Artificial Sequence
  Description of Artificial Sequence: Synthetic peptide
  Seed: LPRRSGAAG
LMRRSGAAL

SEQ ID NO: 39029 - protein, 9 aa, Artificial Sequence
  Description of Artificial Sequence: Synthetic peptide
  Seed: LPRRSGAAG
LMRRSGAAM

SEQ ID NO: 39030 - protein, 9 aa, Artificial Sequence
  Description of Artificial Sequence: Synthetic peptide
  Seed: LPRRSGAAG
LMRRSGAAF

SEQ ID NO: 39031 - protein, 9 aa, Artificial Sequence
  Description of Artificial Sequence: Synthetic peptide
  Seed: LPRRSGAAG
LFRRSGAAI

SEQ ID NO: 39032 - protein, 9 aa, Artificial Sequence
  Description of Artificial Sequence: Synthetic peptide
  Seed: LPRRSGAAG
LNRRSGAAL

SEQ ID NO: 39033 - protein, 9 aa, Artificial Sequence
  Description of Artificial Sequence: Synthetic peptide
  Seed: LPRRSGAAG
LFRRSGAAL

SEQ ID NO: 39034 - protein, 9 aa, Artificial Sequence
  Description of Artificial Sequence: Synthetic peptide
  Seed: LPRRSGAAG
LFRRSGAAM

SEQ ID NO: 39035 - protein, 9 aa, Artificial Sequence
  Description of Artificial Sequence: Synthetic peptide
  Seed: LPRRSGAAG
LPRRSGAAR

SEQ ID NO: 39036 - protein, 9 aa, Artificial Sequence
  Description of Artificial Sequence: Synthetic peptide
  Seed: LPRRSGAAG
LPRRSGAAN

SEQ ID NO: 39037 - protein, 9 aa, Artificial Sequence
  Description of Artificial Sequence: Synthetic peptide
  Seed: LPRRSGAAG
LPRRSGAAD

SEQ ID NO: 39038 - protein, 9 aa, Artificial Sequence
  Description of Artificial Sequence: Synthetic peptide
  Seed: LPRRSGAAG
LPRRSGAAC

SEQ ID NO: 39039 - protein, 9 aa, Artificial Sequence
  Description of Artificial Sequence: Synthetic peptide
  Seed: LPRRSGAAG
LPRRSGAAQ

SEQ ID NO: 39040 - protein, 9 aa, Artificial Sequence
  Description of Artificial Sequence: Synthetic peptide
  Seed: LPRRSGAAG
LPRRSGAAE

SEQ ID NO: 39041 - protein, 9 aa, Artificial Sequence
  Description of Artificial Sequence: Synthetic peptide
  Seed: LPRRSGAAG
LLRRSGAAL

SEQ ID NO: 39042 - protein, 9 aa, Artificial Sequence
  Description of Artificial Sequence: Synthetic peptide
  Seed: LPRRSGAAG
LLRRSGAAI

SEQ ID NO: 39043 - protein, 9 aa, Artificial Sequence
  Description of Artificial Sequence: Synthetic peptide
  Seed: LPRRSGAAG
LLRRSGAAA

SEQ ID NO: 39044 - protein, 9 aa, Artificial Sequence
  Description of Artificial Sequence: Synthetic peptide
  Seed: LPRRSGAAG
LIRRSGAAV

SEQ ID NO: 39045 - protein, 9 aa, Artificial Sequence
  Description of Artificial Sequence: Synthetic peptide
  Seed: LPRRSGAAG
LNRRSGAAM

SEQ ID NO: 39046 - protein, 9 aa, Artificial Sequence
  Description of Artificial Sequence: Synthetic peptide
  Seed: LPRRSGAAG
LCRRSGAAL

SEQ ID NO: 39047 - protein, 9 aa, Artificial Sequence
  Description of Artificial Sequence: Synthetic peptide
  Seed: LPRRSGAAG
LCRRSGAAM

SEQ ID NO: 39048 - protein, 9 aa, Artificial Sequence
  Description of Artificial Sequence: Synthetic peptide
  Seed: LPRRSGAAG
LQRRSGAAI

SEQ ID NO: 39049 - protein, 9 aa, Artificial Sequence
  Description of Artificial Sequence: Synthetic peptide
  Seed: LPRRSGAAG
LQRRSGAAL

SEQ ID NO: 39050 - protein, 9 aa, Artificial Sequence
  Description of Artificial Sequence: Synthetic peptide
  Seed: LPRRSGAAG
LQRRSGAAM

SEQ ID NO: 39051 - protein, 9 aa, Artificial Sequence
  Description of Artificial Sequence: Synthetic peptide
  Seed: LPRRSGAAG
LERRSGAAL

SEQ ID NO: 39052 - protein, 9 aa, Artificial Sequence
  Description of Artificial Sequence: Synthetic peptide
  Seed: LPRRSGAAG
LGRRSGAAI

SEQ ID NO: 39053 - protein, 9 aa, Artificial Sequence
  Description of Artificial Sequence: Synthetic peptide
  Seed: LPRRSGAAG
LGRRSGAAL

SEQ ID NO: 39054 - protein, 9 aa, Artificial Sequence
  Description of Artificial Sequence: Synthetic peptide
  Seed: LPRRSGAAG
LGRRSGAAM

SEQ ID NO: 39055 - protein, 9 aa, Artificial Sequence
  Description of Artificial Sequence: Synthetic peptide
  Seed: LPRRSGAAG
LGRRSGAAF

SEQ ID NO: 39056 - protein, 9 aa, Artificial Sequence
  Description of Artificial Sequence: Synthetic peptide
  Seed: LPRRSGAAG
LGRRSGAAV

SEQ ID NO: 39057 - protein, 9 aa, Artificial Sequence
  Description of Artificial Sequence: Synthetic peptide
  Seed: LPRRSGAAG
LIRRSGAAA

SEQ ID NO: 39058 - protein, 9 aa, Artificial Sequence
  Description of Artificial Sequence: Synthetic peptide
  Seed: LPRRSGAAG
LIRRSGAAC

SEQ ID NO: 39059 - protein, 9 aa, Artificial Sequence
  Description of Artificial Sequence: Synthetic peptide
  Seed: LPRRSGAAG
LIRRSGAAI

SEQ ID NO: 39060 - protein, 9 aa, Artificial Sequence
  Description of Artificial Sequence: Synthetic peptide
  Seed: LPRRSGAAG
LIRRSGAAL

SEQ ID NO: 39061 - protein, 9 aa, Artificial Sequence
  Description of Artificial Sequence: Synthetic peptide
  Seed: LPRRSGAAG
LIRRSGAAM

SEQ ID NO: 39062 - protein, 9 aa, Artificial Sequence
  Description of Artificial Sequence: Synthetic peptide
  Seed: LPRRSGAAG
LIRRSGAAF

SEQ ID NO: 39063 - protein, 9 aa, Artificial Sequence
  Description of Artificial Sequence: Synthetic peptide
  Seed: LPRRSGAAG
LIRRSGAAT

SEQ ID NO: 39064 - protein, 11 aa, Artificial Sequence
  Description of Artificial Sequence: Synthetic peptide
  Seed: LPFERATVMAA
LAFERATVMAF

SEQ ID NO: 39065 - protein, 11 aa, Artificial Sequence
  Description of Artificial Sequence: Synthetic peptide
  Seed: LPFERATVMAA
LAFERATVMAM

SEQ ID NO: 39066 - protein, 10 aa, Artificial Sequence
  Description of Artificial Sequence: Synthetic peptide
  Seed: LPFERATVMA
LVFERATVMY

SEQ ID NO: 39067 - protein, 9 aa, Artificial Sequence
  Description of Artificial Sequence: Synthetic peptide
  Seed: LPFERATVM
LWFERATVH

SEQ ID NO: 39068 - protein, 9 aa, Artificial Sequence
  Description of Artificial Sequence: Synthetic peptide
  Seed: LPFERATVM
LTFERATVC

SEQ ID NO: 39069 - protein, 9 aa, Artificial Sequence
  Description of Artificial Sequence: Synthetic peptide
  Seed: LPFERATVM
LTFERATVH

SEQ ID NO: 39070 - protein, 9 aa, Artificial Sequence
  Description of Artificial Sequence: Synthetic peptide
  Seed: LPFERATVM
LTFERATVI

SEQ ID NO: 39071 - protein, 9 aa, Artificial Sequence
  Description of Artificial Sequence: Synthetic peptide
  Seed: LPFERATVM
LTFERATVL

SEQ ID NO: 39072 - protein, 9 aa, Artificial Sequence
  Description of Artificial Sequence: Synthetic peptide
  Seed: LPFERATVM
LTFERATVM

SEQ ID NO: 39073 - protein, 9 aa, Artificial Sequence
  Description of Artificial Sequence: Synthetic peptide
  Seed: LPFERATVM
LTFERATVF

SEQ ID NO: 39074 - protein, 9 aa, Artificial Sequence
  Description of Artificial Sequence: Synthetic peptide
  Seed: LPFERATVM
LTFERATVW

SEQ ID NO: 39075 - protein, 9 aa, Artificial Sequence
  Description of Artificial Sequence: Synthetic peptide
  Seed: LPFERATVM
LTFERATVY

SEQ ID NO: 39076 - protein, 9 aa, Artificial Sequence
  Description of Artificial Sequence: Synthetic peptide
  Seed: LPFERATVM
LTFERATVV

SEQ ID NO: 39077 - protein, 9 aa, Artificial Sequence
  Description of Artificial Sequence: Synthetic peptide
  Seed: LPFERATVM
LWFERATVI

SEQ ID NO: 39078 - protein, 10 aa, Artificial Sequence
  Description of Artificial Sequence: Synthetic peptide
  Seed: LPFERATVMA
LTFERATVMY

SEQ ID NO: 39079 - protein, 9 aa, Artificial Sequence
  Description of Artificial Sequence: Synthetic peptide
  Seed: LPFERATVM
LWFERATVL

SEQ ID NO: 39080 - protein, 9 aa, Artificial Sequence
  Description of Artificial Sequence: Synthetic peptide
  Seed: LPFERATVM
LWFERATVM

SEQ ID NO: 39081 - protein, 9 aa, Artificial Sequence
  Description of Artificial Sequence: Synthetic peptide
  Seed: LPFERATVM
LWFERATVF

SEQ ID NO: 39082 - protein, 9 aa, Artificial Sequence
  Description of Artificial Sequence: Synthetic peptide
  Seed: LPFERATVM
LWFERATVW

SEQ ID NO: 39083 - protein, 9 aa, Artificial Sequence
  Description of Artificial Sequence: Synthetic peptide
  Seed: LPFERATVM
LWFERATVY

SEQ ID NO: 39084 - protein, 9 aa, Artificial Sequence
  Description of Artificial Sequence: Synthetic peptide
  Seed: LPFERATVM
LWFERATVV

SEQ ID NO: 39085 - protein, 9 aa, Artificial Sequence
  Description of Artificial Sequence: Synthetic peptide
  Seed: LPFERATVM
LYFERATVA

SEQ ID NO: 39086 - protein, 9 aa, Artificial Sequence
  Description of Artificial Sequence: Synthetic peptide
  Seed: LPFERATVM
LYFERATVC

SEQ ID NO: 39087 - protein, 9 aa, Artificial Sequence
  Description of Artificial Sequence: Synthetic peptide
  Seed: LPFERATVM
LYFERATVQ

SEQ ID NO: 39088 - protein, 9 aa, Artificial Sequence
  Description of Artificial Sequence: Synthetic peptide
  Seed: LPFERATVM
LTFERATVA

SEQ ID NO: 39089 - protein, 9 aa, Artificial Sequence
  Description of Artificial Sequence: Synthetic peptide
  Seed: LPFERATVM
LSFERATVV

SEQ ID NO: 39090 - protein, 9 aa, Artificial Sequence
  Description of Artificial Sequence: Synthetic peptide
  Seed: LPFERATVM
LSFERATVY

SEQ ID NO: 39091 - protein, 9 aa, Artificial Sequence
  Description of Artificial Sequence: Synthetic peptide
  Seed: LPFERATVM
LSFERATVW

SEQ ID NO: 39092 - protein, 9 aa, Artificial Sequence
  Description of Artificial Sequence: Synthetic peptide
  Seed: LPFERATVM
LPFERATVG

SEQ ID NO: 39093 - protein, 9 aa, Artificial Sequence
  Description of Artificial Sequence: Synthetic peptide
  Seed: LPFERATVM
LPFERATVH

SEQ ID NO: 39094 - protein, 9 aa, Artificial Sequence
  Description of Artificial Sequence: Synthetic peptide
  Seed: LPFERATVM
LPFERATVI

SEQ ID NO: 39095 - protein, 9 aa, Artificial Sequence
  Description of Artificial Sequence: Synthetic peptide
  Seed: LPFERATVM
LPFERATVL

SEQ ID NO: 39096 - protein, 9 aa, Artificial Sequence
  Description of Artificial Sequence: Synthetic peptide
  Seed: LPFERATVM
LPFERATVF

SEQ ID NO: 39097 - protein, 9 aa, Artificial Sequence
  Description of Artificial Sequence: Synthetic peptide
  Seed: LPFERATVM
LPFERATVP

SEQ ID NO: 39098 - protein, 9 aa, Artificial Sequence
  Description of Artificial Sequence: Synthetic peptide
  Seed: LPFERATVM
LPFERATVS

SEQ ID NO: 39099 - protein, 9 aa, Artificial Sequence
  Description of Artificial Sequence: Synthetic peptide
  Seed: LPFERATVM
LPFERATVT

SEQ ID NO: 39100 - protein, 9 aa, Artificial Sequence
  Description of Artificial Sequence: Synthetic peptide
  Seed: LPFERATVM
LPFERATVW

SEQ ID NO: 39101 - protein, 9 aa, Artificial Sequence
  Description of Artificial Sequence: Synthetic peptide
  Seed: LPFERATVM
LPFERATVY

SEQ ID NO: 39102 - protein, 9 aa, Artificial Sequence
  Description of Artificial Sequence: Synthetic peptide
  Seed: LPFERATVM
LPFERATVV

SEQ ID NO: 39103 - protein, 9 aa, Artificial Sequence
  Description of Artificial Sequence: Synthetic peptide
  Seed: LPFERATVM
LSFERATVA

SEQ ID NO: 39104 - protein, 9 aa, Artificial Sequence
  Description of Artificial Sequence: Synthetic peptide
  Seed: LPFERATVM
LSFERATVC

SEQ ID NO: 39105 - protein, 9 aa, Artificial Sequence
  Description of Artificial Sequence: Synthetic peptide
  Seed: LPFERATVM
LSFERATVH

SEQ ID NO: 39106 - protein, 9 aa, Artificial Sequence
  Description of Artificial Sequence: Synthetic peptide
  Seed: LPFERATVM
LSFERATVI

SEQ ID NO: 39107 - protein, 9 aa, Artificial Sequence
  Description of Artificial Sequence: Synthetic peptide
  Seed: LPFERATVM
LSFERATVL

SEQ ID NO: 39108 - protein, 9 aa, Artificial Sequence
  Description of Artificial Sequence: Synthetic peptide
  Seed: LPFERATVM
LSFERATVM

SEQ ID NO: 39109 - protein, 9 aa, Artificial Sequence
  Description of Artificial Sequence: Synthetic peptide
  Seed: LPFERATVM
LSFERATVF

SEQ ID NO: 39110 - protein, 9 aa, Artificial Sequence
  Description of Artificial Sequence: Synthetic peptide
  Seed: LPFERATVM
LSFERATVT

SEQ ID NO: 39111 - protein, 9 aa, Artificial Sequence
  Description of Artificial Sequence: Synthetic peptide
  Seed: LPFERATVM
LYFERATVG

SEQ ID NO: 39112 - protein, 9 aa, Artificial Sequence
  Description of Artificial Sequence: Synthetic peptide
  Seed: LPFERATVM
LYFERATVH

SEQ ID NO: 39113 - protein, 9 aa, Artificial Sequence
  Description of Artificial Sequence: Synthetic peptide
  Seed: LPFERATVM
LYFERATVI

SEQ ID NO: 39114 - protein, 10 aa, Artificial Sequence
  Description of Artificial Sequence: Synthetic peptide
  Seed: LPFERATVMA
LMFERATVMY

SEQ ID NO: 39115 - protein, 10 aa, Artificial Sequence
  Description of Artificial Sequence: Synthetic peptide
  Seed: LPFERATVMA
LPFERATVMN

SEQ ID NO: 39116 - protein, 10 aa, Artificial Sequence
  Description of Artificial Sequence: Synthetic peptide
  Seed: LPFERATVMA
LPFERATVMD

SEQ ID NO: 39117 - protein, 10 aa, Artificial Sequence
  Description of Artificial Sequence: Synthetic peptide
  Seed: LPFERATVMA
LPFERATVMC

SEQ ID NO: 39118 - protein, 10 aa, Artificial Sequence
  Description of Artificial Sequence: Synthetic peptide
  Seed: LPFERATVMA
LPFERATVMQ

SEQ ID NO: 39119 - protein, 10 aa, Artificial Sequence
  Description of Artificial Sequence: Synthetic peptide
  Seed: LPFERATVMA
LPFERATVME

SEQ ID NO: 39120 - protein, 10 aa, Artificial Sequence
  Description of Artificial Sequence: Synthetic peptide
  Seed: LPFERATVMA
LPFERATVMG

SEQ ID NO: 39121 - protein, 10 aa, Artificial Sequence
  Description of Artificial Sequence: Synthetic peptide
  Seed: LPFERATVMA
LPFERATVMH

SEQ ID NO: 39122 - protein, 10 aa, Artificial Sequence
  Description of Artificial Sequence: Synthetic peptide
  Seed: LPFERATVMA
LPFERATVMI

SEQ ID NO: 39123 - protein, 10 aa, Artificial Sequence
  Description of Artificial Sequence: Synthetic peptide
  Seed: LPFERATVMA
LPFERATVML

SEQ ID NO: 39124 - protein, 10 aa, Artificial Sequence
  Description of Artificial Sequence: Synthetic peptide
  Seed: LPFERATVMA
LPFERATVMK

SEQ ID NO: 39125 - protein, 10 aa, Artificial Sequence
  Description of Artificial Sequence: Synthetic peptide
  Seed: LPFERATVMA
LPFERATVMM

SEQ ID NO: 39126 - protein, 10 aa, Artificial Sequence
  Description of Artificial Sequence: Synthetic peptide
  Seed: LPFERATVMA
LPFERATVMF

SEQ ID NO: 39127 - protein, 10 aa, Artificial Sequence
  Description of Artificial Sequence: Synthetic peptide
  Seed: LPFERATVMA
LPFERATVMP

SEQ ID NO: 39128 - protein, 10 aa, Artificial Sequence
  Description of Artificial Sequence: Synthetic peptide
  Seed: LPFERATVMA
LPFERATVMS

SEQ ID NO: 39129 - protein, 10 aa, Artificial Sequence
  Description of Artificial Sequence: Synthetic peptide
  Seed: LPFERATVMA
LPFERATVMT

SEQ ID NO: 39130 - protein, 10 aa, Artificial Sequence
  Description of Artificial Sequence: Synthetic peptide
  Seed: LPFERATVMA
LPFERATVMW

SEQ ID NO: 39131 - protein, 10 aa, Artificial Sequence
  Description of Artificial Sequence: Synthetic peptide
  Seed: LPFERATVMA
LPFERATVMY

SEQ ID NO: 39132 - protein, 10 aa, Artificial Sequence
  Description of Artificial Sequence: Synthetic peptide
  Seed: LPFERATVMA
LPFERATVMV

SEQ ID NO: 39133 - protein, 10 aa, Artificial Sequence
  Description of Artificial Sequence: Synthetic peptide
  Seed: LPFERATVMA
LSFERATVMY

SEQ ID NO: 39134 - protein, 10 aa, Artificial Sequence
  Description of Artificial Sequence: Synthetic peptide
  Seed: LPFERATVMA
LPFERATVMR

SEQ ID NO: 39135 - protein, 10 aa, Artificial Sequence
  Description of Artificial Sequence: Synthetic peptide
  Seed: LPFERATVMA
LIFERATVMY

SEQ ID NO: 39136 - protein, 9 aa, Artificial Sequence
  Description of Artificial Sequence: Synthetic peptide
  Seed: LPFERATVM
LYFERATVL

SEQ ID NO: 39137 - protein, 10 aa, Artificial Sequence
  Description of Artificial Sequence: Synthetic peptide
  Seed: LPFERATVMA
LAFERATVMY

SEQ ID NO: 39138 - protein, 9 aa, Artificial Sequence
  Description of Artificial Sequence: Synthetic peptide
  Seed: LPFERATVM
LYFERATVK

SEQ ID NO: 39139 - protein, 9 aa, Artificial Sequence
  Description of Artificial Sequence: Synthetic peptide
  Seed: LPFERATVM
LYFERATVM

SEQ ID NO: 39140 - protein, 9 aa, Artificial Sequence
  Description of Artificial Sequence: Synthetic peptide
  Seed: LPFERATVM
LYFERATVF

SEQ ID NO: 39141 - protein, 9 aa, Artificial Sequence
  Description of Artificial Sequence: Synthetic peptide
  Seed: LPFERATVM
LYFERATVS

SEQ ID NO: 39142 - protein, 9 aa, Artificial Sequence
  Description of Artificial Sequence: Synthetic peptide
  Seed: LPFERATVM
LYFERATVT

SEQ ID NO: 39143 - protein, 9 aa, Artificial Sequence
  Description of Artificial Sequence: Synthetic peptide
  Seed: LPFERATVM
LYFERATVW

SEQ ID NO: 39144 - protein, 9 aa, Artificial Sequence
  Description of Artificial Sequence: Synthetic peptide
  Seed: LPFERATVM
LYFERATVY

SEQ ID NO: 39145 - protein, 9 aa, Artificial Sequence
  Description of Artificial Sequence: Synthetic peptide
  Seed: LPFERATVM
LYFERATVV

SEQ ID NO: 39146 - protein, 9 aa, Artificial Sequence
  Description of Artificial Sequence: Synthetic peptide
  Seed: LPFERATVM
LVFERATVA

SEQ ID NO: 39147 - protein, 9 aa, Artificial Sequence
  Description of Artificial Sequence: Synthetic peptide
  Seed: LPFERATVM
LVFERATVH

SEQ ID NO: 39148 - protein, 9 aa, Artificial Sequence
  Description of Artificial Sequence: Synthetic peptide
  Seed: LPFERATVM
LVFERATVI

SEQ ID NO: 39149 - protein, 9 aa, Artificial Sequence
  Description of Artificial Sequence: Synthetic peptide
  Seed: LPFERATVM
LVFERATVL

SEQ ID NO: 39150 - protein, 9 aa, Artificial Sequence
  Description of Artificial Sequence: Synthetic peptide
  Seed: LPFERATVM
LVFERATVM

SEQ ID NO: 39151 - protein, 9 aa, Artificial Sequence
  Description of Artificial Sequence: Synthetic peptide
  Seed: LPFERATVM
LVFERATVF

SEQ ID NO: 39152 - protein, 9 aa, Artificial Sequence
  Description of Artificial Sequence: Synthetic peptide
  Seed: LPFERATVM
LVFERATVW

SEQ ID NO: 39153 - protein, 9 aa, Artificial Sequence
  Description of Artificial Sequence: Synthetic peptide
  Seed: LPFERATVM
LVFERATVY

SEQ ID NO: 39154 - protein, 9 aa, Artificial Sequence
  Description of Artificial Sequence: Synthetic peptide
  Seed: LPFERATVM
LVFERATVV

SEQ ID NO: 39155 - protein, 10 aa, Artificial Sequence
  Description of Artificial Sequence: Synthetic peptide
  Seed: LPFERATVMA
LAFERATVMM

SEQ ID NO: 39156 - protein, 10 aa, Artificial Sequence
  Description of Artificial Sequence: Synthetic peptide
  Seed: LPFERATVMA
LAFERATVMF

SEQ ID NO: 39157 - protein, 9 aa, Artificial Sequence
  Description of Artificial Sequence: Synthetic peptide
  Seed: LPRRSGAAG
LPRRSGAAH

SEQ ID NO: 39158 - protein, 9 aa, Artificial Sequence
  Description of Artificial Sequence: Synthetic peptide
  Seed: LPFERATVM
LPFERATVQ

SEQ ID NO: 39159 - protein, 9 aa, Artificial Sequence
  Description of Artificial Sequence: Synthetic peptide
  Seed: LQNSQVFSL
LHNSQVFSY

SEQ ID NO: 39160 - protein, 9 aa, Artificial Sequence
  Description of Artificial Sequence: Synthetic peptide
  Seed: LQNSQVFSL
LENSQVFSV

SEQ ID NO: 39161 - protein, 9 aa, Artificial Sequence
  Description of Artificial Sequence: Synthetic peptide
  Seed: LQNSQVFSL
LGNSQVFSF

SEQ ID NO: 39162 - protein, 9 aa, Artificial Sequence
  Description of Artificial Sequence: Synthetic peptide
  Seed: LQNSQVFSL
LGNSQVFSY

SEQ ID NO: 39163 - protein, 9 aa, Artificial Sequence
  Description of Artificial Sequence: Synthetic peptide
  Seed: LQNSQVFSL
LHNSQVFSA

SEQ ID NO: 39164 - protein, 9 aa, Artificial Sequence
  Description of Artificial Sequence: Synthetic peptide
  Seed: LQNSQVFSL
LHNSQVFSI

SEQ ID NO: 39165 - protein, 9 aa, Artificial Sequence
  Description of Artificial Sequence: Synthetic peptide
  Seed: LQNSQVFSL
LHNSQVFSL

SEQ ID NO: 39166 - protein, 9 aa, Artificial Sequence
  Description of Artificial Sequence: Synthetic peptide
  Seed: LQNSQVFSL
LHNSQVFSM

SEQ ID NO: 39167 - protein, 9 aa, Artificial Sequence
  Description of Artificial Sequence: Synthetic peptide
  Seed: LQNSQVFSL
LHNSQVFSF

SEQ ID NO: 39168 - protein, 9 aa, Artificial Sequence
  Description of Artificial Sequence: Synthetic peptide
  Seed: LQNSQVFSL
LHNSQVFSW

SEQ ID NO: 39169 - protein, 9 aa, Artificial Sequence
  Description of Artificial Sequence: Synthetic peptide
  Seed: LQNSQVFSL
LHNSQVFSV

SEQ ID NO: 39170 - protein, 9 aa, Artificial Sequence
  Description of Artificial Sequence: Synthetic peptide
  Seed: LQNSQVFSL
LLNSQVFSG

SEQ ID NO: 39171 - protein, 9 aa, Artificial Sequence
  Description of Artificial Sequence: Synthetic peptide
  Seed: LQNSQVFSL
LINSQVFSA

SEQ ID NO: 39172 - protein, 9 aa, Artificial Sequence
  Description of Artificial Sequence: Synthetic peptide
  Seed: LQNSQVFSL
LINSQVFSI

SEQ ID NO: 39173 - protein, 9 aa, Artificial Sequence
  Description of Artificial Sequence: Synthetic peptide
  Seed: LQNSQVFSL
LINSQVFSL

SEQ ID NO: 39174 - protein, 9 aa, Artificial Sequence
  Description of Artificial Sequence: Synthetic peptide
  Seed: LQNSQVFSL
LINSQVFSM

SEQ ID NO: 39175 - protein, 9 aa, Artificial Sequence
  Description of Artificial Sequence: Synthetic peptide
  Seed: LQNSQVFSL
LINSQVFSF

SEQ ID NO: 39176 - protein, 9 aa, Artificial Sequence
  Description of Artificial Sequence: Synthetic peptide
  Seed: LQNSQVFSL
LINSQVFSW

SEQ ID NO: 39177 - protein, 9 aa, Artificial Sequence
  Description of Artificial Sequence: Synthetic peptide
  Seed: LQNSQVFSL
LINSQVFSY

SEQ ID NO: 39178 - protein, 9 aa, Artificial Sequence
  Description of Artificial Sequence: Synthetic peptide
  Seed: LQNSQVFSL
LINSQVFSV

SEQ ID NO: 39179 - protein, 9 aa, Artificial Sequence
  Description of Artificial Sequence: Synthetic peptide
  Seed: LQNSQVFSL
LLNSQVFSA

SEQ ID NO: 39180 - protein, 9 aa, Artificial Sequence
  Description of Artificial Sequence: Synthetic peptide
  Seed: LQNSQVFSL
LENSQVFSY

SEQ ID NO: 39181 - protein, 9 aa, Artificial Sequence
  Description of Artificial Sequence: Synthetic peptide
  Seed: LQNSQVFSL
LENSQVFSF

SEQ ID NO: 39182 - protein, 9 aa, Artificial Sequence
  Description of Artificial Sequence: Synthetic peptide
  Seed: LQNSQVFSL
LENSQVFSM

SEQ ID NO: 39183 - protein, 9 aa, Artificial Sequence
  Description of Artificial Sequence: Synthetic peptide
  Seed: LQNSQVFSL
LENSQVFSL

SEQ ID NO: 39184 - protein, 9 aa, Artificial Sequence
  Description of Artificial Sequence: Synthetic peptide
  Seed: LQNSQVFSL
LRNSQVFSF

SEQ ID NO: 39185 - protein, 9 aa, Artificial Sequence
  Description of Artificial Sequence: Synthetic peptide
  Seed: LQNSQVFSL
LRNSQVFST

SEQ ID NO: 39186 - protein, 9 aa, Artificial Sequence
  Description of Artificial Sequence: Synthetic peptide
  Seed: LQNSQVFSL
LRNSQVFSY

SEQ ID NO: 39187 - protein, 9 aa, Artificial Sequence
  Description of Artificial Sequence: Synthetic peptide
  Seed: LQNSQVFSL
LRNSQVFSV

SEQ ID NO: 39188 - protein, 9 aa, Artificial Sequence
  Description of Artificial Sequence: Synthetic peptide
  Seed: LQNSQVFSL
LNNSQVFSM

SEQ ID NO: 39189 - protein, 9 aa, Artificial Sequence
  Description of Artificial Sequence: Synthetic peptide
  Seed: LQNSQVFSL
LNNSQVFSF

SEQ ID NO: 39190 - protein, 9 aa, Artificial Sequence
  Description of Artificial Sequence: Synthetic peptide
  Seed: LQNSQVFSL
LNNSQVFSY

SEQ ID NO: 39191 - protein, 9 aa, Artificial Sequence
  Description of Artificial Sequence: Synthetic peptide
  Seed: LQNSQVFSL
LCNSQVFSY

SEQ ID NO: 39192 - protein, 9 aa, Artificial Sequence
  Description of Artificial Sequence: Synthetic peptide
  Seed: LQNSQVFSL
LQNSQVFSA

SEQ ID NO: 39193 - protein, 9 aa, Artificial Sequence
  Description of Artificial Sequence: Synthetic peptide
  Seed: LQNSQVFSL
LQNSQVFSG

SEQ ID NO: 39194 - protein, 9 aa, Artificial Sequence
  Description of Artificial Sequence: Synthetic peptide
  Seed: LQNSQVFSL
LQNSQVFSH

SEQ ID NO: 39195 - protein, 9 aa, Artificial Sequence
  Description of Artificial Sequence: Synthetic peptide
  Seed: LQNSQVFSL
LQNSQVFSM

SEQ ID NO: 39196 - protein, 9 aa, Artificial Sequence
  Description of Artificial Sequence: Synthetic peptide
  Seed: LQNSQVFSL
LQNSQVFSF

SEQ ID NO: 39197 - protein, 9 aa, Artificial Sequence
  Description of Artificial Sequence: Synthetic peptide
  Seed: LQNSQVFSL
LQNSQVFST

SEQ ID NO: 39198 - protein, 9 aa, Artificial Sequence
  Description of Artificial Sequence: Synthetic peptide
  Seed: LQNSQVFSL
LQNSQVFSW

SEQ ID NO: 39199 - protein, 9 aa, Artificial Sequence
  Description of Artificial Sequence: Synthetic peptide
  Seed: LQNSQVFSL
LQNSQVFSY

SEQ ID NO: 39200 - protein, 9 aa, Artificial Sequence
  Description of Artificial Sequence: Synthetic peptide
  Seed: LQNSQVFSL
LQNSQVFSV

SEQ ID NO: 39201 - protein, 9 aa, Artificial Sequence
  Description of Artificial Sequence: Synthetic peptide
  Seed: LQNSQVFSL
LENSQVFSI

SEQ ID NO: 39202 - protein, 9 aa, Artificial Sequence
  Description of Artificial Sequence: Synthetic peptide
  Seed: LQNSQVFSL
LLNSQVFSC

SEQ ID NO: 39203 - protein, 9 aa, Artificial Sequence
  Description of Artificial Sequence: Synthetic peptide
  Seed: LQNSQVFSL
LLNSQVFSI

SEQ ID NO: 39204 - protein, 9 aa, Artificial Sequence
  Description of Artificial Sequence: Synthetic peptide
  Seed: LPRRSGAAG
LPRRSGAAK

SEQ ID NO: 39205 - protein, 9 aa, Artificial Sequence
  Description of Artificial Sequence: Synthetic peptide
  Seed: LQNSQVFSL
LPNSQVFSF

SEQ ID NO: 39206 - protein, 9 aa, Artificial Sequence
  Description of Artificial Sequence: Synthetic peptide
  Seed: LQNSQVFSL
LMNSQVFST

SEQ ID NO: 39207 - protein, 9 aa, Artificial Sequence
  Description of Artificial Sequence: Synthetic peptide
  Seed: LQNSQVFSL
LMNSQVFSW

SEQ ID NO: 39208 - protein, 9 aa, Artificial Sequence
  Description of Artificial Sequence: Synthetic peptide
  Seed: LQNSQVFSL
LMNSQVFSY

SEQ ID NO: 39209 - protein, 9 aa, Artificial Sequence
  Description of Artificial Sequence: Synthetic peptide
  Seed: LQNSQVFSL
LMNSQVFSV

SEQ ID NO: 39210 - protein, 9 aa, Artificial Sequence
  Description of Artificial Sequence: Synthetic peptide
  Seed: LQNSQVFSL
LFNSQVFSM

SEQ ID NO: 39211 - protein, 9 aa, Artificial Sequence
  Description of Artificial Sequence: Synthetic peptide
  Seed: LQNSQVFSL
LFNSQVFSF

SEQ ID NO: 39212 - protein, 9 aa, Artificial Sequence
  Description of Artificial Sequence: Synthetic peptide
  Seed: LQNSQVFSL
LFNSQVFSY

SEQ ID NO: 39213 - protein, 9 aa, Artificial Sequence
  Description of Artificial Sequence: Synthetic peptide
  Seed: LQNSQVFSL
LFNSQVFSV

SEQ ID NO: 39214 - protein, 9 aa, Artificial Sequence
  Description of Artificial Sequence: Synthetic peptide
  Seed: LQNSQVFSL
LPNSQVFSL

SEQ ID NO: 39215 - protein, 9 aa, Artificial Sequence
  Description of Artificial Sequence: Synthetic peptide
  Seed: LQNSQVFSL
LSNSQVFSI

SEQ ID NO: 39216 - protein, 9 aa, Artificial Sequence
  Description of Artificial Sequence: Synthetic peptide
  Seed: LQNSQVFSL
LLNSQVFSL

SEQ ID NO: 39217 - protein, 9 aa, Artificial Sequence
  Description of Artificial Sequence: Synthetic peptide
  Seed: LQNSQVFSL
LSNSQVFSL

SEQ ID NO: 39218 - protein, 9 aa, Artificial Sequence
  Description of Artificial Sequence: Synthetic peptide
  Seed: LQNSQVFSL
LSNSQVFSM

SEQ ID NO: 39219 - protein, 9 aa, Artificial Sequence
  Description of Artificial Sequence: Synthetic peptide
  Seed: LQNSQVFSL
LSNSQVFSF

SEQ ID NO: 39220 - protein, 9 aa, Artificial Sequence
  Description of Artificial Sequence: Synthetic peptide
  Seed: LQNSQVFSL
LSNSQVFSW

SEQ ID NO: 39221 - protein, 9 aa, Artificial Sequence
  Description of Artificial Sequence: Synthetic peptide
  Seed: LQNSQVFSL
LSNSQVFSY

SEQ ID NO: 39222 - protein, 9 aa, Artificial Sequence
  Description of Artificial Sequence: Synthetic peptide
  Seed: LQNSQVFSL
LSNSQVFSV

SEQ ID NO: 39223 - protein, 9 aa, Artificial Sequence
  Description of Artificial Sequence: Synthetic peptide
  Seed: LQNSQVFSL
LTNSQVFSA

SEQ ID NO: 39224 - protein, 9 aa, Artificial Sequence
  Description of Artificial Sequence: Synthetic peptide
  Seed: LQNSQVFSL
LTNSQVFSI

SEQ ID NO: 39225 - protein, 9 aa, Artificial Sequence
  Description of Artificial Sequence: Synthetic peptide
  Seed: LQNSQVFSL
LTNSQVFSL

SEQ ID NO: 39226 - protein, 9 aa, Artificial Sequence
  Description of Artificial Sequence: Synthetic peptide
  Seed: LQNSQVFSL
LMNSQVFSS

SEQ ID NO: 39227 - protein, 9 aa, Artificial Sequence
  Description of Artificial Sequence: Synthetic peptide
  Seed: LQNSQVFSL
LMNSQVFSF

SEQ ID NO: 39228 - protein, 9 aa, Artificial Sequence
  Description of Artificial Sequence: Synthetic peptide
  Seed: LQNSQVFSL
LMNSQVFSM

SEQ ID NO: 39229 - protein, 9 aa, Artificial Sequence
  Description of Artificial Sequence: Synthetic peptide
  Seed: LQNSQVFSL
LMNSQVFSL

SEQ ID NO: 39230 - protein, 9 aa, Artificial Sequence
  Description of Artificial Sequence: Synthetic peptide
  Seed: LQNSQVFSL
LLNSQVFSM

SEQ ID NO: 39231 - protein, 9 aa, Artificial Sequence
  Description of Artificial Sequence: Synthetic peptide
  Seed: LQNSQVFSL
LLNSQVFSF

SEQ ID NO: 39232 - protein, 9 aa, Artificial Sequence
  Description of Artificial Sequence: Synthetic peptide
  Seed: LQNSQVFSL
LLNSQVFSS

SEQ ID NO: 39233 - protein, 9 aa, Artificial Sequence
  Description of Artificial Sequence: Synthetic peptide
  Seed: LQNSQVFSL
LLNSQVFST

SEQ ID NO: 39234 - protein, 9 aa, Artificial Sequence
  Description of Artificial Sequence: Synthetic peptide
  Seed: LQNSQVFSL
LLNSQVFSW

SEQ ID NO: 39235 - protein, 9 aa, Artificial Sequence
  Description of Artificial Sequence: Synthetic peptide
  Seed: LQNSQVFSL
LLNSQVFSY

SEQ ID NO: 39236 - protein, 9 aa, Artificial Sequence
  Description of Artificial Sequence: Synthetic peptide
  Seed: LQNSQVFSL
LLNSQVFSV

SEQ ID NO: 39237 - protein, 9 aa, Artificial Sequence
  Description of Artificial Sequence: Synthetic peptide
  Seed: LQNSQVFSL
LKNSQVFSI

SEQ ID NO: 39238 - protein, 9 aa, Artificial Sequence
  Description of Artificial Sequence: Synthetic peptide
  Seed: LQNSQVFSL
LKNSQVFSL

SEQ ID NO: 39239 - protein, 9 aa, Artificial Sequence
  Description of Artificial Sequence: Synthetic peptide
  Seed: LQNSQVFSL
LKNSQVFSM

SEQ ID NO: 39240 - protein, 9 aa, Artificial Sequence
  Description of Artificial Sequence: Synthetic peptide
  Seed: LQNSQVFSL
LKNSQVFSF

SEQ ID NO: 39241 - protein, 9 aa, Artificial Sequence
  Description of Artificial Sequence: Synthetic peptide
  Seed: LQNSQVFSL
LKNSQVFSW

SEQ ID NO: 39242 - protein, 9 aa, Artificial Sequence
  Description of Artificial Sequence: Synthetic peptide
  Seed: LQNSQVFSL
LKNSQVFSY

SEQ ID NO: 39243 - protein, 9 aa, Artificial Sequence
  Description of Artificial Sequence: Synthetic peptide
  Seed: LQNSQVFSL
LKNSQVFSV

SEQ ID NO: 39244 - protein, 9 aa, Artificial Sequence
  Description of Artificial Sequence: Synthetic peptide
  Seed: LQNSQVFSL
LMNSQVFSA

SEQ ID NO: 39245 - protein, 9 aa, Artificial Sequence
  Description of Artificial Sequence: Synthetic peptide
  Seed: LQNSQVFSL
LMNSQVFSC

SEQ ID NO: 39246 - protein, 9 aa, Artificial Sequence
  Description of Artificial Sequence: Synthetic peptide
  Seed: LQNSQVFSL
LMNSQVFSG

SEQ ID NO: 39247 - protein, 9 aa, Artificial Sequence
  Description of Artificial Sequence: Synthetic peptide
  Seed: LQNSQVFSL
LMNSQVFSH

SEQ ID NO: 39248 - protein, 9 aa, Artificial Sequence
  Description of Artificial Sequence: Synthetic peptide
  Seed: LQNSQVFSL
LMNSQVFSI

SEQ ID NO: 39249 - protein, 9 aa, Artificial Sequence
  Description of Artificial Sequence: Synthetic peptide
  Seed: LQNSQVFSL
LRNSQVFSM

SEQ ID NO: 39250 - protein, 9 aa, Artificial Sequence
  Description of Artificial Sequence: Synthetic peptide
  Seed: LQNSQVFSL
LRNSQVFSL

SEQ ID NO: 39251 - protein, 9 aa, Artificial Sequence
  Description of Artificial Sequence: Synthetic peptide
  Seed: LQNSQVFSL
LRNSQVFSI

SEQ ID NO: 39252 - protein, 10 aa, Artificial Sequence
  Description of Artificial Sequence: Synthetic peptide
  Seed: LPRRSGAAGA
LARRSGAAGM

SEQ ID NO: 39253 - protein, 9 aa, Artificial Sequence
  Description of Artificial Sequence: Synthetic peptide
  Seed: LPRRSGAAG
LVRRSGAAA

SEQ ID NO: 39254 - protein, 9 aa, Artificial Sequence
  Description of Artificial Sequence: Synthetic peptide
  Seed: LPRRSGAAG
LVRRSGAAC

SEQ ID NO: 39255 - protein, 9 aa, Artificial Sequence
  Description of Artificial Sequence: Synthetic peptide
  Seed: LPRRSGAAG
LVRRSGAAI

SEQ ID NO: 39256 - protein, 9 aa, Artificial Sequence
  Description of Artificial Sequence: Synthetic peptide
  Seed: LPRRSGAAG
LVRRSGAAL

SEQ ID NO: 39257 - protein, 9 aa, Artificial Sequence
  Description of Artificial Sequence: Synthetic peptide
  Seed: LPRRSGAAG
LVRRSGAAM

SEQ ID NO: 39258 - protein, 9 aa, Artificial Sequence
  Description of Artificial Sequence: Synthetic peptide
  Seed: LPRRSGAAG
LVRRSGAAF

SEQ ID NO: 39259 - protein, 9 aa, Artificial Sequence
  Description of Artificial Sequence: Synthetic peptide
  Seed: LPRRSGAAG
LVRRSGAAT

SEQ ID NO: 39260 - protein, 9 aa, Artificial Sequence
  Description of Artificial Sequence: Synthetic peptide
  Seed: LPRRSGAAG
LVRRSGAAV

SEQ ID NO: 39261 - protein, 10 aa, Artificial Sequence
  Description of Artificial Sequence: Synthetic peptide
  Seed: LPRRSGAAGA
LARRSGAAGL

SEQ ID NO: 39262 - protein, 10 aa, Artificial Sequence
  Description of Artificial Sequence: Synthetic peptide
  Seed: LPRRSGAAGA
LARRSGAAGF

SEQ ID NO: 39263 - protein, 9 aa, Artificial Sequence
  Description of Artificial Sequence: Synthetic peptide
  Seed: LQNSQVFSL
LRNSQVFSC

SEQ ID NO: 39264 - protein, 10 aa, Artificial Sequence
  Description of Artificial Sequence: Synthetic peptide
  Seed: LPRRSGAAGA
LIRRSGAAGL

SEQ ID NO: 39265 - protein, 10 aa, Artificial Sequence
  Description of Artificial Sequence: Synthetic peptide
  Seed: LPRRSGAAGA
LIRRSGAAGM

SEQ ID NO: 39266 - protein, 10 aa, Artificial Sequence
  Description of Artificial Sequence: Synthetic peptide
  Seed: LPRRSGAAGA
LLRRSGAAGL

SEQ ID NO: 39267 - protein, 10 aa, Artificial Sequence
  Description of Artificial Sequence: Synthetic peptide
  Seed: LPRRSGAAGA
LLRRSGAAGM

SEQ ID NO: 39268 - protein, 10 aa, Artificial Sequence
  Description of Artificial Sequence: Synthetic peptide
  Seed: LPRRSGAAGA
LMRRSGAAGL

SEQ ID NO: 39269 - protein, 10 aa, Artificial Sequence
  Description of Artificial Sequence: Synthetic peptide
  Seed: LPRRSGAAGA
LMRRSGAAGM

SEQ ID NO: 39270 - protein, 10 aa, Artificial Sequence
  Description of Artificial Sequence: Synthetic peptide
  Seed: LPRRSGAAGA
LPRRSGAAGC

SEQ ID NO: 39271 - protein, 10 aa, Artificial Sequence
  Description of Artificial Sequence: Synthetic peptide
  Seed: LPRRSGAAGA
LPRRSGAAGQ

SEQ ID NO: 39272 - protein, 10 aa, Artificial Sequence
  Description of Artificial Sequence: Synthetic peptide
  Seed: LPRRSGAAGA
LPRRSGAAGE

SEQ ID NO: 39273 - protein, 9 aa, Artificial Sequence
  Description of Artificial Sequence: Synthetic peptide
  Seed: LPRRSGAAG
LYRRSGAAM

SEQ ID NO: 39274 - protein, 9 aa, Artificial Sequence
  Description of Artificial Sequence: Synthetic peptide
  Seed: LPRRSGAAG
LYRRSGAAL

SEQ ID NO: 39275 - protein, 9 aa, Artificial Sequence
  Description of Artificial Sequence: Synthetic peptide
  Seed: LPRRSGAAG
LWRRSGAAL

SEQ ID NO: 39276 - protein, 9 aa, Artificial Sequence
  Description of Artificial Sequence: Synthetic peptide
  Seed: LPRRSGAAG
LTRRSGAAV

SEQ ID NO: 39277 - protein, 9 aa, Artificial Sequence
  Description of Artificial Sequence: Synthetic peptide
  Seed: LPRRSGAAG
LPRRSGAAF

SEQ ID NO: 39278 - protein, 9 aa, Artificial Sequence
  Description of Artificial Sequence: Synthetic peptide
  Seed: LPRRSGAAG
LPRRSGAAP

SEQ ID NO: 39279 - protein, 9 aa, Artificial Sequence
  Description of Artificial Sequence: Synthetic peptide
  Seed: LPRRSGAAG
LPRRSGAAS

SEQ ID NO: 39280 - protein, 9 aa, Artificial Sequence
  Description of Artificial Sequence: Synthetic peptide
  Seed: LPRRSGAAG
LPRRSGAAT

SEQ ID NO: 39281 - protein, 9 aa, Artificial Sequence
  Description of Artificial Sequence: Synthetic peptide
  Seed: LPRRSGAAG
LPRRSGAAW

SEQ ID NO: 39282 - protein, 9 aa, Artificial Sequence
  Description of Artificial Sequence: Synthetic peptide
  Seed: LPRRSGAAG
LPRRSGAAY

SEQ ID NO: 39283 - protein, 9 aa, Artificial Sequence
  Description of Artificial Sequence: Synthetic peptide
  Seed: LPRRSGAAG
LSRRSGAAA

SEQ ID NO: 39284 - protein, 9 aa, Artificial Sequence
  Description of Artificial Sequence: Synthetic peptide
  Seed: LPRRSGAAG
LSRRSGAAI

SEQ ID NO: 39285 - protein, 9 aa, Artificial Sequence
  Description of Artificial Sequence: Synthetic peptide
  Seed: LPRRSGAAG
LSRRSGAAL

SEQ ID NO: 39286 - protein, 9 aa, Artificial Sequence
  Description of Artificial Sequence: Synthetic peptide
  Seed: LPRRSGAAG
LSRRSGAAM

SEQ ID NO: 39287 - protein, 9 aa, Artificial Sequence
  Description of Artificial Sequence: Synthetic peptide
  Seed: LPRRSGAAG
LSRRSGAAF

SEQ ID NO: 39288 - protein, 9 aa, Artificial Sequence
  Description of Artificial Sequence: Synthetic peptide
  Seed: LPRRSGAAG
LSRRSGAAV

SEQ ID NO: 39289 - protein, 9 aa, Artificial Sequence
  Description of Artificial Sequence: Synthetic peptide
  Seed: LPRRSGAAG
LTRRSGAAA

SEQ ID NO: 39290 - protein, 9 aa, Artificial Sequence
  Description of Artificial Sequence: Synthetic peptide
  Seed: LPRRSGAAG
LTRRSGAAI

SEQ ID NO: 39291 - protein, 9 aa, Artificial Sequence
  Description of Artificial Sequence: Synthetic peptide
  Seed: LPRRSGAAG
LTRRSGAAL

SEQ ID NO: 39292 - protein, 9 aa, Artificial Sequence
  Description of Artificial Sequence: Synthetic peptide
  Seed: LPRRSGAAG
LTRRSGAAM

SEQ ID NO: 39293 - protein, 9 aa, Artificial Sequence
  Description of Artificial Sequence: Synthetic peptide
  Seed: LPRRSGAAG
LTRRSGAAF

SEQ ID NO: 39294 - protein, 10 aa, Artificial Sequence
  Description of Artificial Sequence: Synthetic peptide
  Seed: LPRRSGAAGA
LPRRSGAAGG

SEQ ID NO: 39295 - protein, 10 aa, Artificial Sequence
  Description of Artificial Sequence: Synthetic peptide
  Seed: LPRRSGAAGA
LPRRSGAAGH

SEQ ID NO: 39296 - protein, 10 aa, Artificial Sequence
  Description of Artificial Sequence: Synthetic peptide
  Seed: LPRRSGAAGA
LPRRSGAAGI

SEQ ID NO: 39297 - protein, 11 aa, Artificial Sequence
  Description of Artificial Sequence: Synthetic peptide
  Seed: LPRRSGAAGAA
LPRRSGAAGAG

SEQ ID NO: 39298 - protein, 11 aa, Artificial Sequence
  Description of Artificial Sequence: Synthetic peptide
  Seed: LPRRSGAAGAA
LPRRSGAAGAL

SEQ ID NO: 39299 - protein, 11 aa, Artificial Sequence
  Description of Artificial Sequence: Synthetic peptide
  Seed: LPRRSGAAGAA
LPRRSGAAGAM

SEQ ID NO: 39300 - protein, 11 aa, Artificial Sequence
  Description of Artificial Sequence: Synthetic peptide
  Seed: LPRRSGAAGAA
LPRRSGAAGAF

SEQ ID NO: 39301 - protein, 11 aa, Artificial Sequence
  Description of Artificial Sequence: Synthetic peptide
  Seed: LPRRSGAAGAA
LPRRSGAAGAP

SEQ ID NO: 39302 - protein, 11 aa, Artificial Sequence
  Description of Artificial Sequence: Synthetic peptide
  Seed: LPRRSGAAGAA
LPRRSGAAGAS

SEQ ID NO: 39303 - protein, 11 aa, Artificial Sequence
  Description of Artificial Sequence: Synthetic peptide
  Seed: LPRRSGAAGAA
LPRRSGAAGAW

SEQ ID NO: 39304 - protein, 11 aa, Artificial Sequence
  Description of Artificial Sequence: Synthetic peptide
  Seed: LPRRSGAAGAA
LPRRSGAAGAY

SEQ ID NO: 39305 - protein, 11 aa, Artificial Sequence
  Description of Artificial Sequence: Synthetic peptide
  Seed: LPRRSGAAGAA
LPRRSGAAGAV

SEQ ID NO: 39306 - protein, 11 aa, Artificial Sequence
  Description of Artificial Sequence: Synthetic peptide
  Seed: LPRRSGAAGAA
LVRRSGAAGAL

SEQ ID NO: 39307 - protein, 11 aa, Artificial Sequence
  Description of Artificial Sequence: Synthetic peptide
  Seed: LPRRSGAAGAA
LVRRSGAAGAM

SEQ ID NO: 39308 - protein, 9 aa, Artificial Sequence
  Description of Artificial Sequence: Synthetic peptide
  Seed: LQNSQVFSL
LANSQVFSI

SEQ ID NO: 39309 - protein, 9 aa, Artificial Sequence
  Description of Artificial Sequence: Synthetic peptide
  Seed: LQNSQVFSL
LANSQVFSL

SEQ ID NO: 39310 - protein, 9 aa, Artificial Sequence
  Description of Artificial Sequence: Synthetic peptide
  Seed: LQNSQVFSL
LANSQVFSM

SEQ ID NO: 39311 - protein, 9 aa, Artificial Sequence
  Description of Artificial Sequence: Synthetic peptide
  Seed: LQNSQVFSL
LANSQVFSF

SEQ ID NO: 39312 - protein, 9 aa, Artificial Sequence
  Description of Artificial Sequence: Synthetic peptide
  Seed: LQNSQVFSL
LANSQVFSW

SEQ ID NO: 39313 - protein, 9 aa, Artificial Sequence
  Description of Artificial Sequence: Synthetic peptide
  Seed: LQNSQVFSL
LANSQVFSY

SEQ ID NO: 39314 - protein, 9 aa, Artificial Sequence
  Description of Artificial Sequence: Synthetic peptide
  Seed: LQNSQVFSL
LANSQVFSV

SEQ ID NO: 39315 - protein, 9 aa, Artificial Sequence
  Description of Artificial Sequence: Synthetic peptide
  Seed: LQNSQVFSL
LRNSQVFSA

SEQ ID NO: 39316 - protein, 11 aa, Artificial Sequence
  Description of Artificial Sequence: Synthetic peptide
  Seed: LPRRSGAAGAA
LPRRSGAAGAI

SEQ ID NO: 39317 - protein, 11 aa, Artificial Sequence
  Description of Artificial Sequence: Synthetic peptide
  Seed: LPRRSGAAGAA
LPRRSGAAGAC

SEQ ID NO: 39318 - protein, 10 aa, Artificial Sequence
  Description of Artificial Sequence: Synthetic peptide
  Seed: LPRRSGAAGA
LPRRSGAAGL

SEQ ID NO: 39319 - protein, 11 aa, Artificial Sequence
  Description of Artificial Sequence: Synthetic peptide
  Seed: LPRRSGAAGAA
LIRRSGAAGAM

SEQ ID NO: 39320 - protein, 10 aa, Artificial Sequence
  Description of Artificial Sequence: Synthetic peptide
  Seed: LPRRSGAAGA
LPRRSGAAGM

SEQ ID NO: 39321 - protein, 10 aa, Artificial Sequence
  Description of Artificial Sequence: Synthetic peptide
  Seed: LPRRSGAAGA
LPRRSGAAGF

SEQ ID NO: 39322 - protein, 10 aa, Artificial Sequence
  Description of Artificial Sequence: Synthetic peptide
  Seed: LPRRSGAAGA
LPRRSGAAGP

SEQ ID NO: 39323 - protein, 10 aa, Artificial Sequence
  Description of Artificial Sequence: Synthetic peptide
  Seed: LPRRSGAAGA
LPRRSGAAGS

SEQ ID NO: 39324 - protein, 10 aa, Artificial Sequence
  Description of Artificial Sequence: Synthetic peptide
  Seed: LPRRSGAAGA
LPRRSGAAGT

SEQ ID NO: 39325 - protein, 10 aa, Artificial Sequence
  Description of Artificial Sequence: Synthetic peptide
  Seed: LPRRSGAAGA
LPRRSGAAGW

SEQ ID NO: 39326 - protein, 10 aa, Artificial Sequence
  Description of Artificial Sequence: Synthetic peptide
  Seed: LPRRSGAAGA
LPRRSGAAGY

SEQ ID NO: 39327 - protein, 10 aa, Artificial Sequence
  Description of Artificial Sequence: Synthetic peptide
  Seed: LPRRSGAAGA
LPRRSGAAGV

SEQ ID NO: 39328 - protein, 10 aa, Artificial Sequence
  Description of Artificial Sequence: Synthetic peptide
  Seed: LPRRSGAAGA
LSRRSGAAGL

SEQ ID NO: 39329 - protein, 10 aa, Artificial Sequence
  Description of Artificial Sequence: Synthetic peptide
  Seed: LPRRSGAAGA
LSRRSGAAGM

SEQ ID NO: 39330 - protein, 10 aa, Artificial Sequence
  Description of Artificial Sequence: Synthetic peptide
  Seed: LPRRSGAAGA
LTRRSGAAGL

SEQ ID NO: 39331 - protein, 10 aa, Artificial Sequence
  Description of Artificial Sequence: Synthetic peptide
  Seed: LPRRSGAAGA
LTRRSGAAGM

SEQ ID NO: 39332 - protein, 10 aa, Artificial Sequence
  Description of Artificial Sequence: Synthetic peptide
  Seed: LPRRSGAAGA
LVRRSGAAGI

SEQ ID NO: 39333 - protein, 10 aa, Artificial Sequence
  Description of Artificial Sequence: Synthetic peptide
  Seed: LPRRSGAAGA
LVRRSGAAGL

SEQ ID NO: 39334 - protein, 10 aa, Artificial Sequence
  Description of Artificial Sequence: Synthetic peptide
  Seed: LPRRSGAAGA
LVRRSGAAGM

SEQ ID NO: 39335 - protein, 10 aa, Artificial Sequence
  Description of Artificial Sequence: Synthetic peptide
  Seed: LPRRSGAAGA
LVRRSGAAGF

SEQ ID NO: 39336 - protein, 11 aa, Artificial Sequence
  Description of Artificial Sequence: Synthetic peptide
  Seed: LPRRSGAAGAA
LARRSGAAGAL

SEQ ID NO: 39337 - protein, 11 aa, Artificial Sequence
  Description of Artificial Sequence: Synthetic peptide
  Seed: LPRRSGAAGAA
LARRSGAAGAM

SEQ ID NO: 39338 - protein, 11 aa, Artificial Sequence
  Description of Artificial Sequence: Synthetic peptide
  Seed: LPRRSGAAGAA
LIRRSGAAGAL

SEQ ID NO: 39339 - protein, 9 aa, Artificial Sequence
  Description of Artificial Sequence: Synthetic peptide
  Seed: LPFERATVM
LPFERATVE

SEQ ID NO: 39340 - protein, 9 aa, Artificial Sequence
  Description of Artificial Sequence: Synthetic peptide
  Seed: LPFERATVM
LPFERATVC

SEQ ID NO: 39341 - protein, 10 aa, Artificial Sequence
  Description of Artificial Sequence: Synthetic peptide
  Seed: LPFEKSTVMA
LPFEKSTVMC

SEQ ID NO: 39342 - protein, 9 aa, Artificial Sequence
  Description of Artificial Sequence: Synthetic peptide
  Seed: LPFERATIM
LKFERATIL

SEQ ID NO: 39343 - protein, 9 aa, Artificial Sequence
  Description of Artificial Sequence: Synthetic peptide
  Seed: LPFERATIM
LLFERATIL

SEQ ID NO: 39344 - protein, 9 aa, Artificial Sequence
  Description of Artificial Sequence: Synthetic peptide
  Seed: LPFERATIM
LLFERATIM

SEQ ID NO: 39345 - protein, 9 aa, Artificial Sequence
  Description of Artificial Sequence: Synthetic peptide
  Seed: LPFERATIM
LLFERATIF

SEQ ID NO: 39346 - protein, 9 aa, Artificial Sequence
  Description of Artificial Sequence: Synthetic peptide
  Seed: LPFERATIM
LLFERATIW

SEQ ID NO: 39347 - protein, 9 aa, Artificial Sequence
  Description of Artificial Sequence: Synthetic peptide
  Seed: LPFERATIM
LLFERATIY

SEQ ID NO: 39348 - protein, 9 aa, Artificial Sequence
  Description of Artificial Sequence: Synthetic peptide
  Seed: LPFERATIM
LLFERATIV

SEQ ID NO: 39349 - protein, 9 aa, Artificial Sequence
  Description of Artificial Sequence: Synthetic peptide
  Seed: LPFERATIM
LKFERATIA

SEQ ID NO: 39350 - protein, 9 aa, Artificial Sequence
  Description of Artificial Sequence: Synthetic peptide
  Seed: LPFERATIM
LKFERATIH

SEQ ID NO: 39351 - protein, 9 aa, Artificial Sequence
  Description of Artificial Sequence: Synthetic peptide
  Seed: LPFERATIM
LKFERATII

SEQ ID NO: 39352 - protein, 9 aa, Artificial Sequence
  Description of Artificial Sequence: Synthetic peptide
  Seed: LPFERATIM
LKFERATIM

SEQ ID NO: 39353 - protein, 9 aa, Artificial Sequence
  Description of Artificial Sequence: Synthetic peptide
  Seed: LPFERATIM
LMFERATIL

SEQ ID NO: 39354 - protein, 9 aa, Artificial Sequence
  Description of Artificial Sequence: Synthetic peptide
  Seed: LPFERATIM
LKFERATIF

SEQ ID NO: 39355 - protein, 9 aa, Artificial Sequence
  Description of Artificial Sequence: Synthetic peptide
  Seed: LPFERATIM
LKFERATIW

SEQ ID NO: 39356 - protein, 9 aa, Artificial Sequence
  Description of Artificial Sequence: Synthetic peptide
  Seed: LPFERATIM
LKFERATIY

SEQ ID NO: 39357 - protein, 9 aa, Artificial Sequence
  Description of Artificial Sequence: Synthetic peptide
  Seed: LPFERATIM
LKFERATIV

SEQ ID NO: 39358 - protein, 9 aa, Artificial Sequence
  Description of Artificial Sequence: Synthetic peptide
  Seed: LPFERATIM
LMFERATIA

SEQ ID NO: 39359 - protein, 9 aa, Artificial Sequence
  Description of Artificial Sequence: Synthetic peptide
  Seed: LPFERATIM
LMFERATIN

SEQ ID NO: 39360 - protein, 9 aa, Artificial Sequence
  Description of Artificial Sequence: Synthetic peptide
  Seed: LPFERATIM
LMFERATIC

SEQ ID NO: 39361 - protein, 9 aa, Artificial Sequence
  Description of Artificial Sequence: Synthetic peptide
  Seed: LPFERATIM
LMFERATIG

SEQ ID NO: 39362 - protein, 9 aa, Artificial Sequence
  Description of Artificial Sequence: Synthetic peptide
  Seed: LPFERATIM
LMFERATIH

SEQ ID NO: 39363 - protein, 9 aa, Artificial Sequence
  Description of Artificial Sequence: Synthetic peptide
  Seed: LPFERATIM
LLFERATII

SEQ ID NO: 39364 - protein, 9 aa, Artificial Sequence
  Description of Artificial Sequence: Synthetic peptide
  Seed: LPFERATIM
LLFERATIH

SEQ ID NO: 39365 - protein, 9 aa, Artificial Sequence
  Description of Artificial Sequence: Synthetic peptide
  Seed: LPFERATIM
LLFERATIA

SEQ ID NO: 39366 - protein, 9 aa, Artificial Sequence
  Description of Artificial Sequence: Synthetic peptide
  Seed: LPFERATIM
LIFERATIY

SEQ ID NO: 39367 - protein, 9 aa, Artificial Sequence
  Description of Artificial Sequence: Synthetic peptide
  Seed: LPFERATIM
LEFERATIY

SEQ ID NO: 39368 - protein, 9 aa, Artificial Sequence
  Description of Artificial Sequence: Synthetic peptide
  Seed: LPFERATIM
LGFERATII

SEQ ID NO: 39369 - protein, 9 aa, Artificial Sequence
  Description of Artificial Sequence: Synthetic peptide
  Seed: LPFERATIM
LGFERATIL

SEQ ID NO: 39370 - protein, 9 aa, Artificial Sequence
  Description of Artificial Sequence: Synthetic peptide
  Seed: LPFERATIM
LGFERATIM

SEQ ID NO: 39371 - protein, 9 aa, Artificial Sequence
  Description of Artificial Sequence: Synthetic peptide
  Seed: LPFERATIM
LGFERATIF

SEQ ID NO: 39372 - protein, 9 aa, Artificial Sequence
  Description of Artificial Sequence: Synthetic peptide
  Seed: LPFERATIM
LGFERATIY

SEQ ID NO: 39373 - protein, 9 aa, Artificial Sequence
  Description of Artificial Sequence: Synthetic peptide
  Seed: LPFERATIM
LGFERATIV

SEQ ID NO: 39374 - protein, 9 aa, Artificial Sequence
  Description of Artificial Sequence: Synthetic peptide
  Seed: LPFERATIM
LHFERATIH

SEQ ID NO: 39375 - protein, 9 aa, Artificial Sequence
  Description of Artificial Sequence: Synthetic peptide
  Seed: LPFERATIM
LHFERATII

SEQ ID NO: 39376 - protein, 9 aa, Artificial Sequence
  Description of Artificial Sequence: Synthetic peptide
  Seed: LPFERATIM
LHFERATIL

SEQ ID NO: 39377 - protein, 9 aa, Artificial Sequence
  Description of Artificial Sequence: Synthetic peptide
  Seed: LPFERATIM
LHFERATIM

SEQ ID NO: 39378 - protein, 9 aa, Artificial Sequence
  Description of Artificial Sequence: Synthetic peptide
  Seed: LPFERATIM
LHFERATIF

SEQ ID NO: 39379 - protein, 9 aa, Artificial Sequence
  Description of Artificial Sequence: Synthetic peptide
  Seed: LPFERATIM
LHFERATIW

SEQ ID NO: 39380 - protein, 9 aa, Artificial Sequence
  Description of Artificial Sequence: Synthetic peptide
  Seed: LPFERATIM
LHFERATIY

SEQ ID NO: 39381 - protein, 9 aa, Artificial Sequence
  Description of Artificial Sequence: Synthetic peptide
  Seed: LPFERATIM
LHFERATIV

SEQ ID NO: 39382 - protein, 9 aa, Artificial Sequence
  Description of Artificial Sequence: Synthetic peptide
  Seed: LPFERATIM
LIFERATIL

SEQ ID NO: 39383 - protein, 9 aa, Artificial Sequence
  Description of Artificial Sequence: Synthetic peptide
  Seed: LPFERATIM
LIFERATIM

SEQ ID NO: 39384 - protein, 9 aa, Artificial Sequence
  Description of Artificial Sequence: Synthetic peptide
  Seed: LPFERATIM
LIFERATIF

SEQ ID NO: 39385 - protein, 9 aa, Artificial Sequence
  Description of Artificial Sequence: Synthetic peptide
  Seed: LPFERATIM
LIFERATIW

SEQ ID NO: 39386 - protein, 9 aa, Artificial Sequence
  Description of Artificial Sequence: Synthetic peptide
  Seed: LPFERATIM
LMFERATII

SEQ ID NO: 39387 - protein, 9 aa, Artificial Sequence
  Description of Artificial Sequence: Synthetic peptide
  Seed: LPFERATIM
LMFERATIM

SEQ ID NO: 39388 - protein, 9 aa, Artificial Sequence
  Description of Artificial Sequence: Synthetic peptide
  Seed: LPFERATIM
LWFERATII

SEQ ID NO: 39389 - protein, 9 aa, Artificial Sequence
  Description of Artificial Sequence: Synthetic peptide
  Seed: LPFERATIM
LSFERATIM

SEQ ID NO: 39390 - protein, 9 aa, Artificial Sequence
  Description of Artificial Sequence: Synthetic peptide
  Seed: LPFERATIM
LPFERATIS

SEQ ID NO: 39391 - protein, 9 aa, Artificial Sequence
  Description of Artificial Sequence: Synthetic peptide
  Seed: LPFERATIM
LPFERATIT

SEQ ID NO: 39392 - protein, 9 aa, Artificial Sequence
  Description of Artificial Sequence: Synthetic peptide
  Seed: LPFERATIM
LPFERATIW

SEQ ID NO: 39393 - protein, 9 aa, Artificial Sequence
  Description of Artificial Sequence: Synthetic peptide
  Seed: LPFERATIM
LPFERATIY

SEQ ID NO: 39394 - protein, 9 aa, Artificial Sequence
  Description of Artificial Sequence: Synthetic peptide
  Seed: LPFERATIM
LPFERATIV

SEQ ID NO: 39395 - protein, 9 aa, Artificial Sequence
  Description of Artificial Sequence: Synthetic peptide
  Seed: LPFERATIM
LSFERATIA

SEQ ID NO: 39396 - protein, 9 aa, Artificial Sequence
  Description of Artificial Sequence: Synthetic peptide
  Seed: LPFERATIM
LSFERATIH

SEQ ID NO: 39397 - protein, 9 aa, Artificial Sequence
  Description of Artificial Sequence: Synthetic peptide
  Seed: LPFERATIM
LSFERATII

SEQ ID NO: 39398 - protein, 9 aa, Artificial Sequence
  Description of Artificial Sequence: Synthetic peptide
  Seed: LPFERATIM
LSFERATIL

SEQ ID NO: 39399 - protein, 9 aa, Artificial Sequence
  Description of Artificial Sequence: Synthetic peptide
  Seed: LPFERATIM
LSFERATIF

SEQ ID NO: 39400 - protein, 9 aa, Artificial Sequence
  Description of Artificial Sequence: Synthetic peptide
  Seed: LPFERATIM
LMFERATIF

SEQ ID NO: 39401 - protein, 9 aa, Artificial Sequence
  Description of Artificial Sequence: Synthetic peptide
  Seed: LPFERATIM
LSFERATIW

SEQ ID NO: 39402 - protein, 9 aa, Artificial Sequence
  Description of Artificial Sequence: Synthetic peptide
  Seed: LPFERATIM
LSFERATIY

SEQ ID NO: 39403 - protein, 9 aa, Artificial Sequence
  Description of Artificial Sequence: Synthetic peptide
  Seed: LPFERATIM
LSFERATIV

SEQ ID NO: 39404 - protein, 9 aa, Artificial Sequence
  Description of Artificial Sequence: Synthetic peptide
  Seed: LPFERATIM
LTFERATII

SEQ ID NO: 39405 - protein, 9 aa, Artificial Sequence
  Description of Artificial Sequence: Synthetic peptide
  Seed: LPFERATIM
LTFERATIL

SEQ ID NO: 39406 - protein, 9 aa, Artificial Sequence
  Description of Artificial Sequence: Synthetic peptide
  Seed: LPFERATIM
LTFERATIM

SEQ ID NO: 39407 - protein, 9 aa, Artificial Sequence
  Description of Artificial Sequence: Synthetic peptide
  Seed: LPFERATIM
LTFERATIF

SEQ ID NO: 39408 - protein, 9 aa, Artificial Sequence
  Description of Artificial Sequence: Synthetic peptide
  Seed: LPFERATIM
LTFERATIW

SEQ ID NO: 39409 - protein, 9 aa, Artificial Sequence
  Description of Artificial Sequence: Synthetic peptide
  Seed: LPFERATIM
LTFERATIY

SEQ ID NO: 39410 - protein, 9 aa, Artificial Sequence
  Description of Artificial Sequence: Synthetic peptide
  Seed: LPFERATIM
LPFERATIF

SEQ ID NO: 39411 - protein, 9 aa, Artificial Sequence
  Description of Artificial Sequence: Synthetic peptide
  Seed: LPFERATIM
LPFERATIL

SEQ ID NO: 39412 - protein, 9 aa, Artificial Sequence
  Description of Artificial Sequence: Synthetic peptide
  Seed: LPFERATIM
LPFERATII

SEQ ID NO: 39413 - protein, 9 aa, Artificial Sequence
  Description of Artificial Sequence: Synthetic peptide
  Seed: LPFERATIM
LPFERATIH

SEQ ID NO: 39414 - protein, 9 aa, Artificial Sequence
  Description of Artificial Sequence: Synthetic peptide
  Seed: LPFERATIM
LMFERATIS

SEQ ID NO: 39415 - protein, 9 aa, Artificial Sequence
  Description of Artificial Sequence: Synthetic peptide
  Seed: LPFERATIM
LMFERATIT

SEQ ID NO: 39416 - protein, 9 aa, Artificial Sequence
  Description of Artificial Sequence: Synthetic peptide
  Seed: LPFERATIM
LMFERATIW

SEQ ID NO: 39417 - protein, 9 aa, Artificial Sequence
  Description of Artificial Sequence: Synthetic peptide
  Seed: LPFERATIM
LMFERATIY

SEQ ID NO: 39418 - protein, 9 aa, Artificial Sequence
  Description of Artificial Sequence: Synthetic peptide
  Seed: LPFERATIM
LMFERATIV

SEQ ID NO: 39419 - protein, 9 aa, Artificial Sequence
  Description of Artificial Sequence: Synthetic peptide
  Seed: LPFERATIM
LFFERATIA

SEQ ID NO: 39420 - protein, 9 aa, Artificial Sequence
  Description of Artificial Sequence: Synthetic peptide
  Seed: LPFERATIM
LFFERATIH

SEQ ID NO: 39421 - protein, 9 aa, Artificial Sequence
  Description of Artificial Sequence: Synthetic peptide
  Seed: LPFERATIM
LFFERATII

SEQ ID NO: 39422 - protein, 9 aa, Artificial Sequence
  Description of Artificial Sequence: Synthetic peptide
  Seed: LPFERATIM
LFFERATIL

SEQ ID NO: 39423 - protein, 9 aa, Artificial Sequence
  Description of Artificial Sequence: Synthetic peptide
  Seed: LPFERATIM
LFFERATIM

SEQ ID NO: 39424 - protein, 9 aa, Artificial Sequence
  Description of Artificial Sequence: Synthetic peptide
  Seed: LPFERATIM
LFFERATIF

SEQ ID NO: 39425 - protein, 9 aa, Artificial Sequence
  Description of Artificial Sequence: Synthetic peptide
  Seed: LPFERATIM
LFFERATIW

SEQ ID NO: 39426 - protein, 9 aa, Artificial Sequence
  Description of Artificial Sequence: Synthetic peptide
  Seed: LPFERATIM
LFFERATIY

SEQ ID NO: 39427 - protein, 9 aa, Artificial Sequence
  Description of Artificial Sequence: Synthetic peptide
  Seed: LPFERATIM
LFFERATIV

SEQ ID NO: 39428 - protein, 9 aa, Artificial Sequence
  Description of Artificial Sequence: Synthetic peptide
  Seed: LPFERATIM
LPFERATIA

SEQ ID NO: 39429 - protein, 9 aa, Artificial Sequence
  Description of Artificial Sequence: Synthetic peptide
  Seed: LPFERATIM
LPFERATIC

SEQ ID NO: 39430 - protein, 9 aa, Artificial Sequence
  Description of Artificial Sequence: Synthetic peptide
  Seed: LPFERATIM
LPFERATIQ

SEQ ID NO: 39431 - protein, 9 aa, Artificial Sequence
  Description of Artificial Sequence: Synthetic peptide
  Seed: LPFERATIM
LPFERATIE

SEQ ID NO: 39432 - protein, 9 aa, Artificial Sequence
  Description of Artificial Sequence: Synthetic peptide
  Seed: LPFERATIM
LPFERATIG

SEQ ID NO: 39433 - protein, 9 aa, Artificial Sequence
  Description of Artificial Sequence: Synthetic peptide
  Seed: LPFERATIM
LEFERATIW

SEQ ID NO: 39434 - protein, 9 aa, Artificial Sequence
  Description of Artificial Sequence: Synthetic peptide
  Seed: LPFERATIM
LEFERATIF

SEQ ID NO: 39435 - protein, 9 aa, Artificial Sequence
  Description of Artificial Sequence: Synthetic peptide
  Seed: LPFERATIM
LEFERATIM

SEQ ID NO: 39436 - protein, 11 aa, Artificial Sequence
  Description of Artificial Sequence: Synthetic peptide
  Seed: LPFEKSTVMAA
LPFEKSTVMAW

SEQ ID NO: 39437 - protein, 11 aa, Artificial Sequence
  Description of Artificial Sequence: Synthetic peptide
  Seed: LPFEKSTVMAA
LPFEKSTVMAC

SEQ ID NO: 39438 - protein, 11 aa, Artificial Sequence
  Description of Artificial Sequence: Synthetic peptide
  Seed: LPFEKSTVMAA
LPFEKSTVMAH

SEQ ID NO: 39439 - protein, 11 aa, Artificial Sequence
  Description of Artificial Sequence: Synthetic peptide
  Seed: LPFEKSTVMAA
LPFEKSTVMAI

SEQ ID NO: 39440 - protein, 11 aa, Artificial Sequence
  Description of Artificial Sequence: Synthetic peptide
  Seed: LPFEKSTVMAA
LPFEKSTVMAL

SEQ ID NO: 39441 - protein, 11 aa, Artificial Sequence
  Description of Artificial Sequence: Synthetic peptide
  Seed: LPFEKSTVMAA
LPFEKSTVMAM

SEQ ID NO: 39442 - protein, 11 aa, Artificial Sequence
  Description of Artificial Sequence: Synthetic peptide
  Seed: LPFEKSTVMAA
LPFEKSTVMAF

SEQ ID NO: 39443 - protein, 11 aa, Artificial Sequence
  Description of Artificial Sequence: Synthetic peptide
  Seed: LPFEKSTVMAA
LPFEKSTVMAP

SEQ ID NO: 39444 - protein, 11 aa, Artificial Sequence
  Description of Artificial Sequence: Synthetic peptide
  Seed: LPFEKSTVMAA
LPFEKSTVMAS

SEQ ID NO: 39445 - protein, 11 aa, Artificial Sequence
  Description of Artificial Sequence: Synthetic peptide
  Seed: LPFEKSTVMAA
LPFEKSTVMAT

SEQ ID NO: 39446 - protein, 11 aa, Artificial Sequence
  Description of Artificial Sequence: Synthetic peptide
  Seed: LPFEKSTVMAA
LPFEKSTVMAY

SEQ ID NO: 39447 - protein, 9 aa, Artificial Sequence
  Description of Artificial Sequence: Synthetic peptide
  Seed: LPFERATIM
LEFERATIL

SEQ ID NO: 39448 - protein, 11 aa, Artificial Sequence
  Description of Artificial Sequence: Synthetic peptide
  Seed: LPFEKSTVMAA
LPFEKSTVMAV

SEQ ID NO: 39449 - protein, 11 aa, Artificial Sequence
  Description of Artificial Sequence: Synthetic peptide
  Seed: LPFEKSTVMAA
LSFEKSTVMAY

SEQ ID NO: 39450 - protein, 11 aa, Artificial Sequence
  Description of Artificial Sequence: Synthetic peptide
  Seed: LPFEKSTVMAA
LTFEKSTVMAY

SEQ ID NO: 39451 - protein, 11 aa, Artificial Sequence
  Description of Artificial Sequence: Synthetic peptide
  Seed: LPFEKSTVMAA
LVFEKSTVMAY

SEQ ID NO: 39452 - protein, 8 aa, Artificial Sequence
  Description of Artificial Sequence: Synthetic peptide
  Seed: LPFERATI
LAFERATI

SEQ ID NO: 39453 - protein, 8 aa, Artificial Sequence
  Description of Artificial Sequence: Synthetic peptide
  Seed: LPFERATI
LPFERATL

SEQ ID NO: 39454 - protein, 8 aa, Artificial Sequence
  Description of Artificial Sequence: Synthetic peptide
  Seed: LPFERATI
LPFERATM

SEQ ID NO: 39455 - protein, 8 aa, Artificial Sequence
  Description of Artificial Sequence: Synthetic peptide
  Seed: LPFERATI
LPFERATF

SEQ ID NO: 39456 - protein, 11 aa, Artificial Sequence
  Description of Artificial Sequence: Synthetic peptide
  Seed: LPFEKSTVMAA
LMFEKSTVMAY

SEQ ID NO: 39457 - protein, 11 aa, Artificial Sequence
  Description of Artificial Sequence: Synthetic peptide
  Seed: LPFEKSTVMAA
LIFEKSTVMAY

SEQ ID NO: 39458 - protein, 11 aa, Artificial Sequence
  Description of Artificial Sequence: Synthetic peptide
  Seed: LPFEKSTVMAA
LAFEKSTVMAY

SEQ ID NO: 39459 - protein, 11 aa, Artificial Sequence
  Description of Artificial Sequence: Synthetic peptide
  Seed: LPFEKSTVMAA
LAFEKSTVMAF

SEQ ID NO: 39460 - protein, 10 aa, Artificial Sequence
  Description of Artificial Sequence: Synthetic peptide
  Seed: LPFEKSTVMA
LPFEKSTVMQ

SEQ ID NO: 39461 - protein, 10 aa, Artificial Sequence
  Description of Artificial Sequence: Synthetic peptide
  Seed: LPFEKSTVMA
LPFEKSTVME

SEQ ID NO: 39462 - protein, 10 aa, Artificial Sequence
  Description of Artificial Sequence: Synthetic peptide
  Seed: LPFEKSTVMA
LPFEKSTVMG

SEQ ID NO: 39463 - protein, 10 aa, Artificial Sequence
  Description of Artificial Sequence: Synthetic peptide
  Seed: LPFEKSTVMA
LPFEKSTVMH

SEQ ID NO: 39464 - protein, 10 aa, Artificial Sequence
  Description of Artificial Sequence: Synthetic peptide
  Seed: LPFEKSTVMA
LPFEKSTVMI

SEQ ID NO: 39465 - protein, 10 aa, Artificial Sequence
  Description of Artificial Sequence: Synthetic peptide
  Seed: LPFEKSTVMA
LPFEKSTVML

SEQ ID NO: 39466 - protein, 10 aa, Artificial Sequence
  Description of Artificial Sequence: Synthetic peptide
  Seed: LPFEKSTVMA
LPFEKSTVMK

SEQ ID NO: 39467 - protein, 10 aa, Artificial Sequence
  Description of Artificial Sequence: Synthetic peptide
  Seed: LPFEKSTVMA
LPFEKSTVMM

SEQ ID NO: 39468 - protein, 10 aa, Artificial Sequence
  Description of Artificial Sequence: Synthetic peptide
  Seed: LPFEKSTVMA
LPFEKSTVMF

SEQ ID NO: 39469 - protein, 10 aa, Artificial Sequence
  Description of Artificial Sequence: Synthetic peptide
  Seed: LPFEKSTVMA
LPFEKSTVMP

SEQ ID NO: 39470 - protein, 10 aa, Artificial Sequence
  Description of Artificial Sequence: Synthetic peptide
  Seed: LPFEKSTVMA
LPFEKSTVMS

SEQ ID NO: 39471 - protein, 10 aa, Artificial Sequence
  Description of Artificial Sequence: Synthetic peptide
  Seed: LPFEKSTVMA
LPFEKSTVMT

SEQ ID NO: 39472 - protein, 10 aa, Artificial Sequence
  Description of Artificial Sequence: Synthetic peptide
  Seed: LPFEKSTVMA
LPFEKSTVMW

SEQ ID NO: 39473 - protein, 10 aa, Artificial Sequence
  Description of Artificial Sequence: Synthetic peptide
  Seed: LPFEKSTVMA
LPFEKSTVMY

SEQ ID NO: 39474 - protein, 10 aa, Artificial Sequence
  Description of Artificial Sequence: Synthetic peptide
  Seed: LPFEKSTVMA
LPFEKSTVMV

SEQ ID NO: 39475 - protein, 10 aa, Artificial Sequence
  Description of Artificial Sequence: Synthetic peptide
  Seed: LPFEKSTVMA
LSFEKSTVMY

SEQ ID NO: 39476 - protein, 10 aa, Artificial Sequence
  Description of Artificial Sequence: Synthetic peptide
  Seed: LPFEKSTVMA
LTFEKSTVMY

SEQ ID NO: 39477 - protein, 10 aa, Artificial Sequence
  Description of Artificial Sequence: Synthetic peptide
  Seed: LPFEKSTVMA
LVFEKSTVMY

SEQ ID NO: 39478 - protein, 11 aa, Artificial Sequence
  Description of Artificial Sequence: Synthetic peptide
  Seed: LPFEKSTVMAA
LAFEKSTVMAM

SEQ ID NO: 39479 - protein, 9 aa, Artificial Sequence
  Description of Artificial Sequence: Synthetic peptide
  Seed: LPFERATIM
LAFERATIA

SEQ ID NO: 39480 - protein, 9 aa, Artificial Sequence
  Description of Artificial Sequence: Synthetic peptide
  Seed: LPFERATIM
LAFERATIC

SEQ ID NO: 39481 - protein, 9 aa, Artificial Sequence
  Description of Artificial Sequence: Synthetic peptide
  Seed: LPFERATIM
LAFERATIH

SEQ ID NO: 39482 - protein, 9 aa, Artificial Sequence
  Description of Artificial Sequence: Synthetic peptide
  Seed: LPFERATIM
LCFERATIM

SEQ ID NO: 39483 - protein, 9 aa, Artificial Sequence
  Description of Artificial Sequence: Synthetic peptide
  Seed: LPFERATIM
LCFERATIY

SEQ ID NO: 39484 - protein, 9 aa, Artificial Sequence
  Description of Artificial Sequence: Synthetic peptide
  Seed: LPFERATIM
LQFERATIA

SEQ ID NO: 39485 - protein, 9 aa, Artificial Sequence
  Description of Artificial Sequence: Synthetic peptide
  Seed: LPFERATIM
LQFERATIN

SEQ ID NO: 39486 - protein, 9 aa, Artificial Sequence
  Description of Artificial Sequence: Synthetic peptide
  Seed: LPFERATIM
LQFERATIC

SEQ ID NO: 39487 - protein, 9 aa, Artificial Sequence
  Description of Artificial Sequence: Synthetic peptide
  Seed: LPFERATIM
LQFERATIQ

SEQ ID NO: 39488 - protein, 9 aa, Artificial Sequence
  Description of Artificial Sequence: Synthetic peptide
  Seed: LPFERATIM
LQFERATIG

SEQ ID NO: 39489 - protein, 9 aa, Artificial Sequence
  Description of Artificial Sequence: Synthetic peptide
  Seed: LPFERATIM
LQFERATIH

SEQ ID NO: 39490 - protein, 9 aa, Artificial Sequence
  Description of Artificial Sequence: Synthetic peptide
  Seed: LPFERATIM
LQFERATII

SEQ ID NO: 39491 - protein, 9 aa, Artificial Sequence
  Description of Artificial Sequence: Synthetic peptide
  Seed: LPFERATIM
LQFERATIL

SEQ ID NO: 39492 - protein, 9 aa, Artificial Sequence
  Description of Artificial Sequence: Synthetic peptide
  Seed: LPFERATIM
LQFERATIM

SEQ ID NO: 39493 - protein, 9 aa, Artificial Sequence
  Description of Artificial Sequence: Synthetic peptide
  Seed: LPFERATIM
LQFERATIF

SEQ ID NO: 39494 - protein, 9 aa, Artificial Sequence
  Description of Artificial Sequence: Synthetic peptide
  Seed: LPFERATIM
LQFERATIP

SEQ ID NO: 39495 - protein, 9 aa, Artificial Sequence
  Description of Artificial Sequence: Synthetic peptide
  Seed: LPFERATIM
LQFERATIS

SEQ ID NO: 39496 - protein, 9 aa, Artificial Sequence
  Description of Artificial Sequence: Synthetic peptide
  Seed: LPFERATIM
LQFERATIT

SEQ ID NO: 39497 - protein, 9 aa, Artificial Sequence
  Description of Artificial Sequence: Synthetic peptide
  Seed: LPFERATIM
LQFERATIW

SEQ ID NO: 39498 - protein, 9 aa, Artificial Sequence
  Description of Artificial Sequence: Synthetic peptide
  Seed: LPFERATIM
LQFERATIY

SEQ ID NO: 39499 - protein, 9 aa, Artificial Sequence
  Description of Artificial Sequence: Synthetic peptide
  Seed: LPFERATIM
LQFERATIV

SEQ ID NO: 39500 - protein, 9 aa, Artificial Sequence
  Description of Artificial Sequence: Synthetic peptide
  Seed: LPFERATIM
LEFERATIH

SEQ ID NO: 39501 - protein, 9 aa, Artificial Sequence
  Description of Artificial Sequence: Synthetic peptide
  Seed: LPFERATIM
LEFERATII

SEQ ID NO: 39502 - protein, 9 aa, Artificial Sequence
  Description of Artificial Sequence: Synthetic peptide
  Seed: LPFERATIM
LCFERATIF

SEQ ID NO: 39503 - protein, 9 aa, Artificial Sequence
  Description of Artificial Sequence: Synthetic peptide
  Seed: LPFERATIM
LCFERATIL

SEQ ID NO: 39504 - protein, 9 aa, Artificial Sequence
  Description of Artificial Sequence: Synthetic peptide
  Seed: LPFERATIM
LAFERATII

SEQ ID NO: 39505 - protein, 9 aa, Artificial Sequence
  Description of Artificial Sequence: Synthetic peptide
  Seed: LPFERATIM
LDFERATIY

SEQ ID NO: 39506 - protein, 9 aa, Artificial Sequence
  Description of Artificial Sequence: Synthetic peptide
  Seed: LPFERATIM
LAFERATIL

SEQ ID NO: 39507 - protein, 9 aa, Artificial Sequence
  Description of Artificial Sequence: Synthetic peptide
  Seed: LPFERATIM
LAFERATIM

SEQ ID NO: 39508 - protein, 9 aa, Artificial Sequence
  Description of Artificial Sequence: Synthetic peptide
  Seed: LPFERATIM
LAFERATIF

SEQ ID NO: 39509 - protein, 9 aa, Artificial Sequence
  Description of Artificial Sequence: Synthetic peptide
  Seed: LPFERATIM
LAFERATIT

SEQ ID NO: 39510 - protein, 9 aa, Artificial Sequence
  Description of Artificial Sequence: Synthetic peptide
  Seed: LPFERATIM
LAFERATIW

SEQ ID NO: 39511 - protein, 9 aa, Artificial Sequence
  Description of Artificial Sequence: Synthetic peptide
  Seed: LPFERATIM
LAFERATIY

SEQ ID NO: 39512 - protein, 9 aa, Artificial Sequence
  Description of Artificial Sequence: Synthetic peptide
  Seed: LPFERATIM
LAFERATIV

SEQ ID NO: 39513 - protein, 9 aa, Artificial Sequence
  Description of Artificial Sequence: Synthetic peptide
  Seed: LPFERATIM
LRFERATIH

SEQ ID NO: 39514 - protein, 9 aa, Artificial Sequence
  Description of Artificial Sequence: Synthetic peptide
  Seed: LPFERATIM
LRFERATII

SEQ ID NO: 39515 - protein, 9 aa, Artificial Sequence
  Description of Artificial Sequence: Synthetic peptide
  Seed: LPFERATIM
LRFERATIL

SEQ ID NO: 39516 - protein, 9 aa, Artificial Sequence
  Description of Artificial Sequence: Synthetic peptide
  Seed: LPFERATIM
LRFERATIM

SEQ ID NO: 39517 - protein, 9 aa, Artificial Sequence
  Description of Artificial Sequence: Synthetic peptide
  Seed: LPFERATIM
LRFERATIF

SEQ ID NO: 39518 - protein, 9 aa, Artificial Sequence
  Description of Artificial Sequence: Synthetic peptide
  Seed: LPFERATIM
LRFERATIW

SEQ ID NO: 39519 - protein, 9 aa, Artificial Sequence
  Description of Artificial Sequence: Synthetic peptide
  Seed: LPFERATIM
LRFERATIY

SEQ ID NO: 39520 - protein, 9 aa, Artificial Sequence
  Description of Artificial Sequence: Synthetic peptide
  Seed: LPFERATIM
LNFERATIL

SEQ ID NO: 39521 - protein, 9 aa, Artificial Sequence
  Description of Artificial Sequence: Synthetic peptide
  Seed: LPFERATIM
LNFERATIM

SEQ ID NO: 39522 - protein, 9 aa, Artificial Sequence
  Description of Artificial Sequence: Synthetic peptide
  Seed: LPFERATIM
LNFERATIF

SEQ ID NO: 39523 - protein, 9 aa, Artificial Sequence
  Description of Artificial Sequence: Synthetic peptide
  Seed: LPFERATIM
LNFERATIY

SEQ ID NO: 39524 - protein, 9 aa, Artificial Sequence
  Description of Artificial Sequence: Synthetic peptide
  Seed: LPFERATIM
LDFERATIF

SEQ ID NO: 39525 - protein, 9 aa, Artificial Sequence
  Description of Artificial Sequence: Synthetic peptide
  Seed: LPFERATIM
LTFERATIV

SEQ ID NO: 39526 - protein, 9 aa, Artificial Sequence
  Description of Artificial Sequence: Synthetic peptide
  Seed: LPFERATIM
LWFERATIL

SEQ ID NO: 39527 - protein, 9 aa, Artificial Sequence
  Description of Artificial Sequence: Synthetic peptide
  Seed: LPFERATVM
LPFERATVN

SEQ ID NO: 39528 - protein, 9 aa, Artificial Sequence
  Description of Artificial Sequence: Synthetic peptide
  Seed: LPFERATVM
LIFERATVI

SEQ ID NO: 39529 - protein, 9 aa, Artificial Sequence
  Description of Artificial Sequence: Synthetic peptide
  Seed: LPFERATVM
LHFERATVI

SEQ ID NO: 39530 - protein, 9 aa, Artificial Sequence
  Description of Artificial Sequence: Synthetic peptide
  Seed: LPFERATVM
LHFERATVL

SEQ ID NO: 39531 - protein, 9 aa, Artificial Sequence
  Description of Artificial Sequence: Synthetic peptide
  Seed: LPFERATVM
LHFERATVM

SEQ ID NO: 39532 - protein, 9 aa, Artificial Sequence
  Description of Artificial Sequence: Synthetic peptide
  Seed: LPFERATVM
LHFERATVF

SEQ ID NO: 39533 - protein, 9 aa, Artificial Sequence
  Description of Artificial Sequence: Synthetic peptide
  Seed: LPFERATVM
LHFERATVW

SEQ ID NO: 39534 - protein, 9 aa, Artificial Sequence
  Description of Artificial Sequence: Synthetic peptide
  Seed: LPFERATVM
LHFERATVY

SEQ ID NO: 39535 - protein, 9 aa, Artificial Sequence
  Description of Artificial Sequence: Synthetic peptide
  Seed: LPFERATVM
LHFERATVV

SEQ ID NO: 39536 - protein, 9 aa, Artificial Sequence
  Description of Artificial Sequence: Synthetic peptide
  Seed: LPFERATVM
LIFERATVA

SEQ ID NO: 39537 - protein, 9 aa, Artificial Sequence
  Description of Artificial Sequence: Synthetic peptide
  Seed: LPFERATVM
LIFERATVH

SEQ ID NO: 39538 - protein, 9 aa, Artificial Sequence
  Description of Artificial Sequence: Synthetic peptide
  Seed: LPFERATVM
LIFERATVL

SEQ ID NO: 39539 - protein, 9 aa, Artificial Sequence
  Description of Artificial Sequence: Synthetic peptide
  Seed: LPFERATVM
LLFERATVM

SEQ ID NO: 39540 - protein, 9 aa, Artificial Sequence
  Description of Artificial Sequence: Synthetic peptide
  Seed: LPFERATVM
LIFERATVM

SEQ ID NO: 39541 - protein, 9 aa, Artificial Sequence
  Description of Artificial Sequence: Synthetic peptide
  Seed: LPFERATVM
LIFERATVF

SEQ ID NO: 39542 - protein, 9 aa, Artificial Sequence
  Description of Artificial Sequence: Synthetic peptide
  Seed: LPFERATVM
LIFERATVW

SEQ ID NO: 39543 - protein, 9 aa, Artificial Sequence
  Description of Artificial Sequence: Synthetic peptide
  Seed: LPFERATVM
LIFERATVY

SEQ ID NO: 39544 - protein, 9 aa, Artificial Sequence
  Description of Artificial Sequence: Synthetic peptide
  Seed: LPFERATVM
LIFERATVV

SEQ ID NO: 39545 - protein, 9 aa, Artificial Sequence
  Description of Artificial Sequence: Synthetic peptide
  Seed: LPFERATVM
LLFERATVA

SEQ ID NO: 39546 - protein, 9 aa, Artificial Sequence
  Description of Artificial Sequence: Synthetic peptide
  Seed: LPFERATVM
LLFERATVG

SEQ ID NO: 39547 - protein, 9 aa, Artificial Sequence
  Description of Artificial Sequence: Synthetic peptide
  Seed: LPFERATVM
LLFERATVH

SEQ ID NO: 39548 - protein, 9 aa, Artificial Sequence
  Description of Artificial Sequence: Synthetic peptide
  Seed: LPFERATVM
LLFERATVI

SEQ ID NO: 39549 - protein, 9 aa, Artificial Sequence
  Description of Artificial Sequence: Synthetic peptide
  Seed: LPFERATVM
LHFERATVH

SEQ ID NO: 39550 - protein, 9 aa, Artificial Sequence
  Description of Artificial Sequence: Synthetic peptide
  Seed: LPFERATVM
LHFERATVC

SEQ ID NO: 39551 - protein, 9 aa, Artificial Sequence
  Description of Artificial Sequence: Synthetic peptide
  Seed: LPFERATVM
LHFERATVA

SEQ ID NO: 39552 - protein, 9 aa, Artificial Sequence
  Description of Artificial Sequence: Synthetic peptide
  Seed: LPFERATVM
LGFERATVV

SEQ ID NO: 39553 - protein, 9 aa, Artificial Sequence
  Description of Artificial Sequence: Synthetic peptide
  Seed: LPFERATVM
LQFERATVS

SEQ ID NO: 39554 - protein, 9 aa, Artificial Sequence
  Description of Artificial Sequence: Synthetic peptide
  Seed: LPFERATVM
LQFERATVT

SEQ ID NO: 39555 - protein, 9 aa, Artificial Sequence
  Description of Artificial Sequence: Synthetic peptide
  Seed: LPFERATVM
LQFERATVW

SEQ ID NO: 39556 - protein, 9 aa, Artificial Sequence
  Description of Artificial Sequence: Synthetic peptide
  Seed: LPFERATVM
LQFERATVY

SEQ ID NO: 39557 - protein, 9 aa, Artificial Sequence
  Description of Artificial Sequence: Synthetic peptide
  Seed: LPFERATVM
LQFERATVV

SEQ ID NO: 39558 - protein, 9 aa, Artificial Sequence
  Description of Artificial Sequence: Synthetic peptide
  Seed: LPFERATVM
LEFERATVH

SEQ ID NO: 39559 - protein, 9 aa, Artificial Sequence
  Description of Artificial Sequence: Synthetic peptide
  Seed: LPFERATVM
LEFERATVI

SEQ ID NO: 39560 - protein, 9 aa, Artificial Sequence
  Description of Artificial Sequence: Synthetic peptide
  Seed: LPFERATVM
LEFERATVL

SEQ ID NO: 39561 - protein, 9 aa, Artificial Sequence
  Description of Artificial Sequence: Synthetic peptide
  Seed: LPFERATVM
LEFERATVM

SEQ ID NO: 39562 - protein, 9 aa, Artificial Sequence
  Description of Artificial Sequence: Synthetic peptide
  Seed: LPFERATVM
LEFERATVF

SEQ ID NO: 39563 - protein, 9 aa, Artificial Sequence
  Description of Artificial Sequence: Synthetic peptide
  Seed: LPFERATVM
LEFERATVW

SEQ ID NO: 39564 - protein, 9 aa, Artificial Sequence
  Description of Artificial Sequence: Synthetic peptide
  Seed: LPFERATVM
LEFERATVY

SEQ ID NO: 39565 - protein, 9 aa, Artificial Sequence
  Description of Artificial Sequence: Synthetic peptide
  Seed: LPFERATVM
LEFERATVV

SEQ ID NO: 39566 - protein, 9 aa, Artificial Sequence
  Description of Artificial Sequence: Synthetic peptide
  Seed: LPFERATVM
LGFERATVI

SEQ ID NO: 39567 - protein, 9 aa, Artificial Sequence
  Description of Artificial Sequence: Synthetic peptide
  Seed: LPFERATVM
LGFERATVL

SEQ ID NO: 39568 - protein, 9 aa, Artificial Sequence
  Description of Artificial Sequence: Synthetic peptide
  Seed: LPFERATVM
LGFERATVM

SEQ ID NO: 39569 - protein, 9 aa, Artificial Sequence
  Description of Artificial Sequence: Synthetic peptide
  Seed: LPFERATVM
LGFERATVF

SEQ ID NO: 39570 - protein, 9 aa, Artificial Sequence
  Description of Artificial Sequence: Synthetic peptide
  Seed: LPFERATVM
LGFERATVW

SEQ ID NO: 39571 - protein, 9 aa, Artificial Sequence
  Description of Artificial Sequence: Synthetic peptide
  Seed: LPFERATVM
LGFERATVY

SEQ ID NO: 39572 - protein, 9 aa, Artificial Sequence
  Description of Artificial Sequence: Synthetic peptide
  Seed: LPFERATVM
LLFERATVL

SEQ ID NO: 39573 - protein, 9 aa, Artificial Sequence
  Description of Artificial Sequence: Synthetic peptide
  Seed: LPFERATVM
LLFERATVF

SEQ ID NO: 39574 - protein, 9 aa, Artificial Sequence
  Description of Artificial Sequence: Synthetic peptide
  Seed: LPFERATIM
LWFERATIM

SEQ ID NO: 39575 - protein, 9 aa, Artificial Sequence
  Description of Artificial Sequence: Synthetic peptide
  Seed: LPFERATVM
LFFERATVC

SEQ ID NO: 39576 - protein, 9 aa, Artificial Sequence
  Description of Artificial Sequence: Synthetic peptide
  Seed: LPFERATVM
LMFERATVM

SEQ ID NO: 39577 - protein, 9 aa, Artificial Sequence
  Description of Artificial Sequence: Synthetic peptide
  Seed: LPFERATVM
LMFERATVF

SEQ ID NO: 39578 - protein, 9 aa, Artificial Sequence
  Description of Artificial Sequence: Synthetic peptide
  Seed: LPFERATVM
LMFERATVP

SEQ ID NO: 39579 - protein, 9 aa, Artificial Sequence
  Description of Artificial Sequence: Synthetic peptide
  Seed: LPFERATVM
LMFERATVS

SEQ ID NO: 39580 - protein, 9 aa, Artificial Sequence
  Description of Artificial Sequence: Synthetic peptide
  Seed: LPFERATVM
LMFERATVT

SEQ ID NO: 39581 - protein, 9 aa, Artificial Sequence
  Description of Artificial Sequence: Synthetic peptide
  Seed: LPFERATVM
LMFERATVW

SEQ ID NO: 39582 - protein, 9 aa, Artificial Sequence
  Description of Artificial Sequence: Synthetic peptide
  Seed: LPFERATVM
LMFERATVY

SEQ ID NO: 39583 - protein, 9 aa, Artificial Sequence
  Description of Artificial Sequence: Synthetic peptide
  Seed: LPFERATVM
LMFERATVV

SEQ ID NO: 39584 - protein, 9 aa, Artificial Sequence
  Description of Artificial Sequence: Synthetic peptide
  Seed: LPFERATVM
LFFERATVA

SEQ ID NO: 39585 - protein, 9 aa, Artificial Sequence
  Description of Artificial Sequence: Synthetic peptide
  Seed: LPFERATVM
LFFERATVH

SEQ ID NO: 39586 - protein, 9 aa, Artificial Sequence
  Description of Artificial Sequence: Synthetic peptide
  Seed: LPFERATVM
LLFERATVW

SEQ ID NO: 39587 - protein, 9 aa, Artificial Sequence
  Description of Artificial Sequence: Synthetic peptide
  Seed: LPFERATVM
LFFERATVI

SEQ ID NO: 39588 - protein, 9 aa, Artificial Sequence
  Description of Artificial Sequence: Synthetic peptide
  Seed: LPFERATVM
LFFERATVL

SEQ ID NO: 39589 - protein, 9 aa, Artificial Sequence
  Description of Artificial Sequence: Synthetic peptide
  Seed: LPFERATVM
LFFERATVM

SEQ ID NO: 39590 - protein, 9 aa, Artificial Sequence
  Description of Artificial Sequence: Synthetic peptide
  Seed: LPFERATVM
LFFERATVF

SEQ ID NO: 39591 - protein, 9 aa, Artificial Sequence
  Description of Artificial Sequence: Synthetic peptide
  Seed: LPFERATVM
LFFERATVT

SEQ ID NO: 39592 - protein, 9 aa, Artificial Sequence
  Description of Artificial Sequence: Synthetic peptide
  Seed: LPFERATVM
LFFERATVW

SEQ ID NO: 39593 - protein, 9 aa, Artificial Sequence
  Description of Artificial Sequence: Synthetic peptide
  Seed: LPFERATVM
LFFERATVY

SEQ ID NO: 39594 - protein, 9 aa, Artificial Sequence
  Description of Artificial Sequence: Synthetic peptide
  Seed: LPFERATVM
LFFERATVV

SEQ ID NO: 39595 - protein, 9 aa, Artificial Sequence
  Description of Artificial Sequence: Synthetic peptide
  Seed: LPFERATVM
LPFERATVA

SEQ ID NO: 39596 - protein, 9 aa, Artificial Sequence
  Description of Artificial Sequence: Synthetic peptide
  Seed: LPFERATVM
LMFERATVL

SEQ ID NO: 39597 - protein, 9 aa, Artificial Sequence
  Description of Artificial Sequence: Synthetic peptide
  Seed: LPFERATVM
LMFERATVI

SEQ ID NO: 39598 - protein, 9 aa, Artificial Sequence
  Description of Artificial Sequence: Synthetic peptide
  Seed: LPFERATVM
LMFERATVH

SEQ ID NO: 39599 - protein, 9 aa, Artificial Sequence
  Description of Artificial Sequence: Synthetic peptide
  Seed: LPFERATVM
LMFERATVG

SEQ ID NO: 39600 - protein, 9 aa, Artificial Sequence
  Description of Artificial Sequence: Synthetic peptide
  Seed: LPFERATVM
LLFERATVY

SEQ ID NO: 39601 - protein, 9 aa, Artificial Sequence
  Description of Artificial Sequence: Synthetic peptide
  Seed: LPFERATVM
LLFERATVV

SEQ ID NO: 39602 - protein, 9 aa, Artificial Sequence
  Description of Artificial Sequence: Synthetic peptide
  Seed: LPFERATVM
LKFERATVA

SEQ ID NO: 39603 - protein, 9 aa, Artificial Sequence
  Description of Artificial Sequence: Synthetic peptide
  Seed: LPFERATVM
LKFERATVC

SEQ ID NO: 39604 - protein, 9 aa, Artificial Sequence
  Description of Artificial Sequence: Synthetic peptide
  Seed: LPFERATVM
LKFERATVG

SEQ ID NO: 39605 - protein, 9 aa, Artificial Sequence
  Description of Artificial Sequence: Synthetic peptide
  Seed: LPFERATVM
LKFERATVH

SEQ ID NO: 39606 - protein, 9 aa, Artificial Sequence
  Description of Artificial Sequence: Synthetic peptide
  Seed: LPFERATVM
LKFERATVI

SEQ ID NO: 39607 - protein, 9 aa, Artificial Sequence
  Description of Artificial Sequence: Synthetic peptide
  Seed: LPFERATVM
LKFERATVL

SEQ ID NO: 39608 - protein, 9 aa, Artificial Sequence
  Description of Artificial Sequence: Synthetic peptide
  Seed: LPFERATVM
LKFERATVM

SEQ ID NO: 39609 - protein, 9 aa, Artificial Sequence
  Description of Artificial Sequence: Synthetic peptide
  Seed: LPFERATVM
LKFERATVF

SEQ ID NO: 39610 - protein, 9 aa, Artificial Sequence
  Description of Artificial Sequence: Synthetic peptide
  Seed: LPFERATVM
LKFERATVS

SEQ ID NO: 39611 - protein, 9 aa, Artificial Sequence
  Description of Artificial Sequence: Synthetic peptide
  Seed: LPFERATVM
LKFERATVT

SEQ ID NO: 39612 - protein, 9 aa, Artificial Sequence
  Description of Artificial Sequence: Synthetic peptide
  Seed: LPFERATVM
LKFERATVW

SEQ ID NO: 39613 - protein, 9 aa, Artificial Sequence
  Description of Artificial Sequence: Synthetic peptide
  Seed: LPFERATVM
LKFERATVY

SEQ ID NO: 39614 - protein, 9 aa, Artificial Sequence
  Description of Artificial Sequence: Synthetic peptide
  Seed: LPFERATVM
LKFERATVV

SEQ ID NO: 39615 - protein, 9 aa, Artificial Sequence
  Description of Artificial Sequence: Synthetic peptide
  Seed: LPFERATVM
LMFERATVA

SEQ ID NO: 39616 - protein, 9 aa, Artificial Sequence
  Description of Artificial Sequence: Synthetic peptide
  Seed: LPFERATVM
LMFERATVN

SEQ ID NO: 39617 - protein, 9 aa, Artificial Sequence
  Description of Artificial Sequence: Synthetic peptide
  Seed: LPFERATVM
LMFERATVC

SEQ ID NO: 39618 - protein, 9 aa, Artificial Sequence
  Description of Artificial Sequence: Synthetic peptide
  Seed: LPFERATVM
LMFERATVQ

SEQ ID NO: 39619 - protein, 9 aa, Artificial Sequence
  Description of Artificial Sequence: Synthetic peptide
  Seed: LPFERATVM
LQFERATVP

SEQ ID NO: 39620 - protein, 9 aa, Artificial Sequence
  Description of Artificial Sequence: Synthetic peptide
  Seed: LPFERATVM
LQFERATVF

SEQ ID NO: 39621 - protein, 9 aa, Artificial Sequence
  Description of Artificial Sequence: Synthetic peptide
  Seed: LPFERATVM
LQFERATVM

SEQ ID NO: 39622 - protein, 11 aa, Artificial Sequence
  Description of Artificial Sequence: Synthetic peptide
  Seed: LPFERATIMAA
LPFERATIMAI

SEQ ID NO: 39623 - protein, 10 aa, Artificial Sequence
  Description of Artificial Sequence: Synthetic peptide
  Seed: LPFERATIMA
LPFERATIMI

SEQ ID NO: 39624 - protein, 10 aa, Artificial Sequence
  Description of Artificial Sequence: Synthetic peptide
  Seed: LPFERATIMA
LPFERATIML

SEQ ID NO: 39625 - protein, 10 aa, Artificial Sequence
  Description of Artificial Sequence: Synthetic peptide
  Seed: LPFERATIMA
LPFERATIMM

SEQ ID NO: 39626 - protein, 10 aa, Artificial Sequence
  Description of Artificial Sequence: Synthetic peptide
  Seed: LPFERATIMA
LPFERATIMF

SEQ ID NO: 39627 - protein, 10 aa, Artificial Sequence
  Description of Artificial Sequence: Synthetic peptide
  Seed: LPFERATIMA
LPFERATIMP

SEQ ID NO: 39628 - protein, 10 aa, Artificial Sequence
  Description of Artificial Sequence: Synthetic peptide
  Seed: LPFERATIMA
LPFERATIMS

SEQ ID NO: 39629 - protein, 10 aa, Artificial Sequence
  Description of Artificial Sequence: Synthetic peptide
  Seed: LPFERATIMA
LPFERATIMT

SEQ ID NO: 39630 - protein, 10 aa, Artificial Sequence
  Description of Artificial Sequence: Synthetic peptide
  Seed: LPFERATIMA
LPFERATIMV

SEQ ID NO: 39631 - protein, 11 aa, Artificial Sequence
  Description of Artificial Sequence: Synthetic peptide
  Seed: LPFERATIMAA
LPFERATIMAC

SEQ ID NO: 39632 - protein, 11 aa, Artificial Sequence
  Description of Artificial Sequence: Synthetic peptide
  Seed: LPFERATIMAA
LPFERATIMAL

SEQ ID NO: 39633 - protein, 9 aa, Artificial Sequence
  Description of Artificial Sequence: Synthetic peptide
  Seed: LPFERATVM
LQFERATVK

SEQ ID NO: 39634 - protein, 11 aa, Artificial Sequence
  Description of Artificial Sequence: Synthetic peptide
  Seed: LPFERATIMAA
LPFERATIMAM

SEQ ID NO: 39635 - protein, 11 aa, Artificial Sequence
  Description of Artificial Sequence: Synthetic peptide
  Seed: LPFERATIMAA
LPFERATIMAF

SEQ ID NO: 39636 - protein, 11 aa, Artificial Sequence
  Description of Artificial Sequence: Synthetic peptide
  Seed: LPFERATIMAA
LPFERATIMAP

SEQ ID NO: 39637 - protein, 11 aa, Artificial Sequence
  Description of Artificial Sequence: Synthetic peptide
  Seed: LPFERATIMAA
LPFERATIMAS

SEQ ID NO: 39638 - protein, 11 aa, Artificial Sequence
  Description of Artificial Sequence: Synthetic peptide
  Seed: LPFERATIMAA
LPFERATIMAT

SEQ ID NO: 39639 - protein, 11 aa, Artificial Sequence
  Description of Artificial Sequence: Synthetic peptide
  Seed: LPFERATIMAA
LPFERATIMAV

SEQ ID NO: 39640 - protein, 10 aa, Artificial Sequence
  Description of Artificial Sequence: Synthetic peptide
  Seed: LPFERATIMA
LPFERATIMC

SEQ ID NO: 39641 - protein, 9 aa, Artificial Sequence
  Description of Artificial Sequence: Synthetic peptide
  Seed: LPFERATIM
LVFERATIV

SEQ ID NO: 39642 - protein, 9 aa, Artificial Sequence
  Description of Artificial Sequence: Synthetic peptide
  Seed: LPFERATIM
LVFERATIY

SEQ ID NO: 39643 - protein, 9 aa, Artificial Sequence
  Description of Artificial Sequence: Synthetic peptide
  Seed: LPFERATIM
LVFERATIW

SEQ ID NO: 39644 - protein, 9 aa, Artificial Sequence
  Description of Artificial Sequence: Synthetic peptide
  Seed: LPFERATIM
LWFERATIF

SEQ ID NO: 39645 - protein, 9 aa, Artificial Sequence
  Description of Artificial Sequence: Synthetic peptide
  Seed: LPFERATIM
LWFERATIW

SEQ ID NO: 39646 - protein, 9 aa, Artificial Sequence
  Description of Artificial Sequence: Synthetic peptide
  Seed: LPFERATIM
LWFERATIY

SEQ ID NO: 39647 - protein, 9 aa, Artificial Sequence
  Description of Artificial Sequence: Synthetic peptide
  Seed: LPFERATIM
LWFERATIV

SEQ ID NO: 39648 - protein, 9 aa, Artificial Sequence
  Description of Artificial Sequence: Synthetic peptide
  Seed: LPFERATIM
LYFERATIA

SEQ ID NO: 39649 - protein, 9 aa, Artificial Sequence
  Description of Artificial Sequence: Synthetic peptide
  Seed: LPFERATIM
LYFERATIC

SEQ ID NO: 39650 - protein, 9 aa, Artificial Sequence
  Description of Artificial Sequence: Synthetic peptide
  Seed: LPFERATIM
LYFERATIH

SEQ ID NO: 39651 - protein, 9 aa, Artificial Sequence
  Description of Artificial Sequence: Synthetic peptide
  Seed: LPFERATIM
LYFERATII

SEQ ID NO: 39652 - protein, 9 aa, Artificial Sequence
  Description of Artificial Sequence: Synthetic peptide
  Seed: LPFERATIM
LYFERATIL

SEQ ID NO: 39653 - protein, 9 aa, Artificial Sequence
  Description of Artificial Sequence: Synthetic peptide
  Seed: LPFERATIM
LYFERATIM

SEQ ID NO: 39654 - protein, 9 aa, Artificial Sequence
  Description of Artificial Sequence: Synthetic peptide
  Seed: LPFERATIM
LYFERATIF

SEQ ID NO: 39655 - protein, 9 aa, Artificial Sequence
  Description of Artificial Sequence: Synthetic peptide
  Seed: LPFERATIM
LYFERATIT

SEQ ID NO: 39656 - protein, 9 aa, Artificial Sequence
  Description of Artificial Sequence: Synthetic peptide
  Seed: LPFERATIM
LYFERATIW

SEQ ID NO: 39657 - protein, 9 aa, Artificial Sequence
  Description of Artificial Sequence: Synthetic peptide
  Seed: LPFERATIM
LYFERATIY

SEQ ID NO: 39658 - protein, 9 aa, Artificial Sequence
  Description of Artificial Sequence: Synthetic peptide
  Seed: LPFERATIM
LYFERATIV

SEQ ID NO: 39659 - protein, 9 aa, Artificial Sequence
  Description of Artificial Sequence: Synthetic peptide
  Seed: LPFERATIM
LVFERATII

SEQ ID NO: 39660 - protein, 9 aa, Artificial Sequence
  Description of Artificial Sequence: Synthetic peptide
  Seed: LPFERATIM
LVFERATIL

SEQ ID NO: 39661 - protein, 9 aa, Artificial Sequence
  Description of Artificial Sequence: Synthetic peptide
  Seed: LPFERATIM
LVFERATIM

SEQ ID NO: 39662 - protein, 9 aa, Artificial Sequence
  Description of Artificial Sequence: Synthetic peptide
  Seed: LPFERATIM
LVFERATIF

SEQ ID NO: 39663 - protein, 9 aa, Artificial Sequence
  Description of Artificial Sequence: Synthetic peptide
  Seed: LPFERATVM
LAFERATVA

SEQ ID NO: 39664 - protein, 9 aa, Artificial Sequence
  Description of Artificial Sequence: Synthetic peptide
  Seed: LPFERATVM
LNFERATVM

SEQ ID NO: 39665 - protein, 9 aa, Artificial Sequence
  Description of Artificial Sequence: Synthetic peptide
  Seed: LPFERATVM
LNFERATVW

SEQ ID NO: 39666 - protein, 9 aa, Artificial Sequence
  Description of Artificial Sequence: Synthetic peptide
  Seed: LPFERATVM
LNFERATVY

SEQ ID NO: 39667 - protein, 9 aa, Artificial Sequence
  Description of Artificial Sequence: Synthetic peptide
  Seed: LPFERATVM
LNFERATVV

SEQ ID NO: 39668 - protein, 9 aa, Artificial Sequence
  Description of Artificial Sequence: Synthetic peptide
  Seed: LPFERATVM
LDFERATVF

SEQ ID NO: 39669 - protein, 9 aa, Artificial Sequence
  Description of Artificial Sequence: Synthetic peptide
  Seed: LPFERATVM
LDFERATVY

SEQ ID NO: 39670 - protein, 9 aa, Artificial Sequence
  Description of Artificial Sequence: Synthetic peptide
  Seed: LPFERATVM
LCFERATVL

SEQ ID NO: 39671 - protein, 9 aa, Artificial Sequence
  Description of Artificial Sequence: Synthetic peptide
  Seed: LPFERATVM
LCFERATVM

SEQ ID NO: 39672 - protein, 9 aa, Artificial Sequence
  Description of Artificial Sequence: Synthetic peptide
  Seed: LPFERATVM
LCFERATVF

SEQ ID NO: 39673 - protein, 9 aa, Artificial Sequence
  Description of Artificial Sequence: Synthetic peptide
  Seed: LPFERATVM
LCFERATVY

SEQ ID NO: 39674 - protein, 9 aa, Artificial Sequence
  Description of Artificial Sequence: Synthetic peptide
  Seed: LPFERATVM
LCFERATVV

SEQ ID NO: 39675 - protein, 9 aa, Artificial Sequence
  Description of Artificial Sequence: Synthetic peptide
  Seed: LPFERATVM
LQFERATVA

SEQ ID NO: 39676 - protein, 9 aa, Artificial Sequence
  Description of Artificial Sequence: Synthetic peptide
  Seed: LPFERATVM
LQFERATVN

SEQ ID NO: 39677 - protein, 9 aa, Artificial Sequence
  Description of Artificial Sequence: Synthetic peptide
  Seed: LPFERATVM
LQFERATVC

SEQ ID NO: 39678 - protein, 9 aa, Artificial Sequence
  Description of Artificial Sequence: Synthetic peptide
  Seed: LPFERATVM
LQFERATVQ

SEQ ID NO: 39679 - protein, 9 aa, Artificial Sequence
  Description of Artificial Sequence: Synthetic peptide
  Seed: LPFERATVM
LQFERATVE

SEQ ID NO: 39680 - protein, 9 aa, Artificial Sequence
  Description of Artificial Sequence: Synthetic peptide
  Seed: LPFERATVM
LQFERATVG

SEQ ID NO: 39681 - protein, 9 aa, Artificial Sequence
  Description of Artificial Sequence: Synthetic peptide
  Seed: LPFERATVM
LQFERATVH

SEQ ID NO: 39682 - protein, 9 aa, Artificial Sequence
  Description of Artificial Sequence: Synthetic peptide
  Seed: LPFERATVM
LQFERATVI

SEQ ID NO: 39683 - protein, 9 aa, Artificial Sequence
  Description of Artificial Sequence: Synthetic peptide
  Seed: LPFERATVM
LQFERATVL

SEQ ID NO: 39684 - protein, 9 aa, Artificial Sequence
  Description of Artificial Sequence: Synthetic peptide
  Seed: LPFERATVM
LNFERATVF

SEQ ID NO: 39685 - protein, 9 aa, Artificial Sequence
  Description of Artificial Sequence: Synthetic peptide
  Seed: LPFERATVM
LNFERATVL

SEQ ID NO: 39686 - protein, 9 aa, Artificial Sequence
  Description of Artificial Sequence: Synthetic peptide
  Seed: LPFERATVM
LAFERATVC

SEQ ID NO: 39687 - protein, 9 aa, Artificial Sequence
  Description of Artificial Sequence: Synthetic peptide
  Seed: LPFERATVM
LNFERATVI

SEQ ID NO: 39688 - protein, 9 aa, Artificial Sequence
  Description of Artificial Sequence: Synthetic peptide
  Seed: LPFERATVM
LAFERATVH

SEQ ID NO: 39689 - protein, 9 aa, Artificial Sequence
  Description of Artificial Sequence: Synthetic peptide
  Seed: LPFERATVM
LAFERATVI

SEQ ID NO: 39690 - protein, 9 aa, Artificial Sequence
  Description of Artificial Sequence: Synthetic peptide
  Seed: LPFERATVM
LAFERATVL

SEQ ID NO: 39691 - protein, 9 aa, Artificial Sequence
  Description of Artificial Sequence: Synthetic peptide
  Seed: LPFERATVM
LAFERATVM

SEQ ID NO: 39692 - protein, 9 aa, Artificial Sequence
  Description of Artificial Sequence: Synthetic peptide
  Seed: LPFERATVM
LAFERATVF

SEQ ID NO: 39693 - protein, 9 aa, Artificial Sequence
  Description of Artificial Sequence: Synthetic peptide
  Seed: LPFERATVM
LAFERATVS

SEQ ID NO: 39694 - protein, 9 aa, Artificial Sequence
  Description of Artificial Sequence: Synthetic peptide
  Seed: LPFERATVM
LAFERATVT

SEQ ID NO: 39695 - protein, 9 aa, Artificial Sequence
  Description of Artificial Sequence: Synthetic peptide
  Seed: LPFERATVM
LAFERATVW

SEQ ID NO: 39696 - protein, 9 aa, Artificial Sequence
  Description of Artificial Sequence: Synthetic peptide
  Seed: LPFERATVM
LAFERATVY

SEQ ID NO: 39697 - protein, 9 aa, Artificial Sequence
  Description of Artificial Sequence: Synthetic peptide
  Seed: LPFERATVM
LAFERATVV

SEQ ID NO: 39698 - protein, 9 aa, Artificial Sequence
  Description of Artificial Sequence: Synthetic peptide
  Seed: LPFERATVM
LRFERATVA

SEQ ID NO: 39699 - protein, 9 aa, Artificial Sequence
  Description of Artificial Sequence: Synthetic peptide
  Seed: LPFERATVM
LRFERATVH

SEQ ID NO: 39700 - protein, 9 aa, Artificial Sequence
  Description of Artificial Sequence: Synthetic peptide
  Seed: LPFERATVM
LRFERATVI

SEQ ID NO: 39701 - protein, 9 aa, Artificial Sequence
  Description of Artificial Sequence: Synthetic peptide
  Seed: LPFERATVM
LRFERATVL

SEQ ID NO: 39702 - protein, 9 aa, Artificial Sequence
  Description of Artificial Sequence: Synthetic peptide
  Seed: LPFERATVM
LRFERATVM

SEQ ID NO: 39703 - protein, 9 aa, Artificial Sequence
  Description of Artificial Sequence: Synthetic peptide
  Seed: LPFERATVM
LRFERATVF

SEQ ID NO: 39704 - protein, 9 aa, Artificial Sequence
  Description of Artificial Sequence: Synthetic peptide
  Seed: LPFERATVM
LRFERATVW

SEQ ID NO: 39705 - protein, 9 aa, Artificial Sequence
  Description of Artificial Sequence: Synthetic peptide
  Seed: LPFERATVM
LRFERATVY

SEQ ID NO: 39706 - protein, 9 aa, Artificial Sequence
  Description of Artificial Sequence: Synthetic peptide
  Seed: LPFERATVM
LRFERATVV

SEQ ID NO: 39707 - protein, 8 aa, Artificial Sequence
  Description of Artificial Sequence: Synthetic peptide
  Seed: MESSTLEL
MVSSTLEM

SEQ ID NO: 39708 - protein, 10 aa, Artificial Sequence
  Description of Artificial Sequence: Synthetic peptide
  Seed: NAEIEDLIFL
NHEIEDLIFL

SEQ ID NO: 39709 - protein, 10 aa, Artificial Sequence
  Description of Artificial Sequence: Synthetic peptide
  Seed: NAEIEDLIFL
NDEIEDLIFM

SEQ ID NO: 39710 - protein, 10 aa, Artificial Sequence
  Description of Artificial Sequence: Synthetic peptide
  Seed: NAEIEDLIFL
NCEIEDLIFL

SEQ ID NO: 39711 - protein, 10 aa, Artificial Sequence
  Description of Artificial Sequence: Synthetic peptide
  Seed: NAEIEDLIFL
NCEIEDLIFM

SEQ ID NO: 39712 - protein, 10 aa, Artificial Sequence
  Description of Artificial Sequence: Synthetic peptide
  Seed: NAEIEDLIFL
NQEIEDLIFL

SEQ ID NO: 39713 - protein, 10 aa, Artificial Sequence
  Description of Artificial Sequence: Synthetic peptide
  Seed: NAEIEDLIFL
NQEIEDLIFM

SEQ ID NO: 39714 - protein, 10 aa, Artificial Sequence
  Description of Artificial Sequence: Synthetic peptide
  Seed: NAEIEDLIFL
NEEIEDLIFL

SEQ ID NO: 39715 - protein, 10 aa, Artificial Sequence
  Description of Artificial Sequence: Synthetic peptide
  Seed: NAEIEDLIFL
NEEIEDLIFM

SEQ ID NO: 39716 - protein, 10 aa, Artificial Sequence
  Description of Artificial Sequence: Synthetic peptide
  Seed: NAEIEDLIFL
NGEIEDLIFL

SEQ ID NO: 39717 - protein, 10 aa, Artificial Sequence
  Description of Artificial Sequence: Synthetic peptide
  Seed: NAEIEDLIFL
NGEIEDLIFM

SEQ ID NO: 39718 - protein, 10 aa, Artificial Sequence
  Description of Artificial Sequence: Synthetic peptide
  Seed: NAEIEDLIFL
NHEIEDLIFM

SEQ ID NO: 39719 - protein, 10 aa, Artificial Sequence
  Description of Artificial Sequence: Synthetic peptide
  Seed: NAEIEDLIFL
NPEIEDLIFL

SEQ ID NO: 39720 - protein, 10 aa, Artificial Sequence
  Description of Artificial Sequence: Synthetic peptide
  Seed: NAEIEDLIFL
NIEIEDLIFL

SEQ ID NO: 39721 - protein, 10 aa, Artificial Sequence
  Description of Artificial Sequence: Synthetic peptide
  Seed: NAEIEDLIFL
NIEIEDLIFM

SEQ ID NO: 39722 - protein, 10 aa, Artificial Sequence
  Description of Artificial Sequence: Synthetic peptide
  Seed: NAEIEDLIFL
NLEIEDLIFL

SEQ ID NO: 39723 - protein, 10 aa, Artificial Sequence
  Description of Artificial Sequence: Synthetic peptide
  Seed: NAEIEDLIFL
NLEIEDLIFM

SEQ ID NO: 39724 - protein, 10 aa, Artificial Sequence
  Description of Artificial Sequence: Synthetic peptide
  Seed: NAEIEDLIFL
NKEIEDLIFL

SEQ ID NO: 39725 - protein, 10 aa, Artificial Sequence
  Description of Artificial Sequence: Synthetic peptide
  Seed: NAEIEDLIFL
NKEIEDLIFM

SEQ ID NO: 39726 - protein, 10 aa, Artificial Sequence
  Description of Artificial Sequence: Synthetic peptide
  Seed: NAEIEDLIFL
NMEIEDLIFL

SEQ ID NO: 39727 - protein, 10 aa, Artificial Sequence
  Description of Artificial Sequence: Synthetic peptide
  Seed: NAEIEDLIFL
NMEIEDLIFM

SEQ ID NO: 39728 - protein, 10 aa, Artificial Sequence
  Description of Artificial Sequence: Synthetic peptide
  Seed: NAEIEDLIFL
NFEIEDLIFL

SEQ ID NO: 39729 - protein, 10 aa, Artificial Sequence
  Description of Artificial Sequence: Synthetic peptide
  Seed: NAEIEDLIFL
NDEIEDLIFL

SEQ ID NO: 39730 - protein, 10 aa, Artificial Sequence
  Description of Artificial Sequence: Synthetic peptide
  Seed: NAEIEDLIFL
NNEIEDLIFM

SEQ ID NO: 39731 - protein, 10 aa, Artificial Sequence
  Description of Artificial Sequence: Synthetic peptide
  Seed: NAEIEDLIFL
NNEIEDLIFL

SEQ ID NO: 39732 - protein, 10 aa, Artificial Sequence
  Description of Artificial Sequence: Synthetic peptide
  Seed: NAEIEDLIFL
NREIEDLIFM

SEQ ID NO: 39733 - protein, 11 aa, Artificial Sequence
  Description of Artificial Sequence: Synthetic peptide
  Seed: MVMELIRMIKR
MPMELIRMIKR

SEQ ID NO: 39734 - protein, 11 aa, Artificial Sequence
  Description of Artificial Sequence: Synthetic peptide
  Seed: MVMELIRMIKR
MSMELIRMIKR

SEQ ID NO: 39735 - protein, 11 aa, Artificial Sequence
  Description of Artificial Sequence: Synthetic peptide
  Seed: MVMELIRMIKR
MSMELIRMIKK

SEQ ID NO: 39736 - protein, 11 aa, Artificial Sequence
  Description of Artificial Sequence: Synthetic peptide
  Seed: MVMELIRMIKR
MTMELIRMIKR

SEQ ID NO: 39737 - protein, 11 aa, Artificial Sequence
  Description of Artificial Sequence: Synthetic peptide
  Seed: MVMELIRMIKR
MTMELIRMIKK

SEQ ID NO: 39738 - protein, 11 aa, Artificial Sequence
  Description of Artificial Sequence: Synthetic peptide
  Seed: MVMELIRMIKR
MTMELIRMIKY

SEQ ID NO: 39739 - protein, 11 aa, Artificial Sequence
  Description of Artificial Sequence: Synthetic peptide
  Seed: MVMELIRMIKR
MWMELIRMIKR

SEQ ID NO: 39740 - protein, 11 aa, Artificial Sequence
  Description of Artificial Sequence: Synthetic peptide
  Seed: MVMELIRMIKR
MWMELIRMIKK

SEQ ID NO: 39741 - protein, 11 aa, Artificial Sequence
  Description of Artificial Sequence: Synthetic peptide
  Seed: MVMELIRMIKR
MYMELIRMIKR

SEQ ID NO: 39742 - protein, 11 aa, Artificial Sequence
  Description of Artificial Sequence: Synthetic peptide
  Seed: MVMELIRMIKR
MYMELIRMIKK

SEQ ID NO: 39743 - protein, 11 aa, Artificial Sequence
  Description of Artificial Sequence: Synthetic peptide
  Seed: MVMELIRMIKR
MVMELIRMIKK

SEQ ID NO: 39744 - protein, 11 aa, Artificial Sequence
  Description of Artificial Sequence: Synthetic peptide
  Seed: MVMELIRMIKR
MVMELIRMIKY

SEQ ID NO: 39745 - protein, 9 aa, Artificial Sequence
  Description of Artificial Sequence: Synthetic peptide
  Seed: NAEIEDLIF
NAEIEDLIM

SEQ ID NO: 39746 - protein, 9 aa, Artificial Sequence
  Description of Artificial Sequence: Synthetic peptide
  Seed: NAEIEDLIF
NAEIEDLIY

SEQ ID NO: 39747 - protein, 9 aa, Artificial Sequence
  Description of Artificial Sequence: Synthetic peptide
  Seed: NAEIEDLIF
NPEIEDLIM

SEQ ID NO: 39748 - protein, 9 aa, Artificial Sequence
  Description of Artificial Sequence: Synthetic peptide
  Seed: NAEIEDLIF
NPEIEDLIF

SEQ ID NO: 39749 - protein, 9 aa, Artificial Sequence
  Description of Artificial Sequence: Synthetic peptide
  Seed: NAEIEDLIF
NPEIEDLIY

SEQ ID NO: 39750 - protein, 10 aa, Artificial Sequence
  Description of Artificial Sequence: Synthetic peptide
  Seed: NAEIEDLIFL
NAEIEDLIFM

SEQ ID NO: 39751 - protein, 10 aa, Artificial Sequence
  Description of Artificial Sequence: Synthetic peptide
  Seed: NAEIEDLIFL
NREIEDLIFL

SEQ ID NO: 39752 - protein, 10 aa, Artificial Sequence
  Description of Artificial Sequence: Synthetic peptide
  Seed: NAEIEDLIFL
NFEIEDLIFM

SEQ ID NO: 39753 - protein, 10 aa, Artificial Sequence
  Description of Artificial Sequence: Synthetic peptide
  Seed: NAEIEDLIFL
NPEIEDLIFM

SEQ ID NO: 39754 - protein, 11 aa, Artificial Sequence
  Description of Artificial Sequence: Synthetic peptide
  Seed: MVMELIRMIKR
MFMELIRMIKR

SEQ ID NO: 39755 - protein, 9 aa, Artificial Sequence
  Description of Artificial Sequence: Synthetic peptide
  Seed: NATEIRASV
NMTEIRASV

SEQ ID NO: 39756 - protein, 9 aa, Artificial Sequence
  Description of Artificial Sequence: Synthetic peptide
  Seed: NATEIRASV
NITEIRASM

SEQ ID NO: 39757 - protein, 9 aa, Artificial Sequence
  Description of Artificial Sequence: Synthetic peptide
  Seed: NATEIRASV
NITEIRASV

SEQ ID NO: 39758 - protein, 9 aa, Artificial Sequence
  Description of Artificial Sequence: Synthetic peptide
  Seed: NATEIRASV
NLTEIRASI

SEQ ID NO: 39759 - protein, 9 aa, Artificial Sequence
  Description of Artificial Sequence: Synthetic peptide
  Seed: NATEIRASV
NLTEIRASL

SEQ ID NO: 39760 - protein, 9 aa, Artificial Sequence
  Description of Artificial Sequence: Synthetic peptide
  Seed: NATEIRASV
NLTEIRASV

SEQ ID NO: 39761 - protein, 9 aa, Artificial Sequence
  Description of Artificial Sequence: Synthetic peptide
  Seed: NATEIRASV
NMTEIRASI

SEQ ID NO: 39762 - protein, 9 aa, Artificial Sequence
  Description of Artificial Sequence: Synthetic peptide
  Seed: NATEIRASV
NMTEIRASM

SEQ ID NO: 39763 - protein, 9 aa, Artificial Sequence
  Description of Artificial Sequence: Synthetic peptide
  Seed: NATEIRASV
NMTEIRASF

SEQ ID NO: 39764 - protein, 9 aa, Artificial Sequence
  Description of Artificial Sequence: Synthetic peptide
  Seed: NATEIRASV
NMTEIRASY

SEQ ID NO: 39765 - protein, 9 aa, Artificial Sequence
  Description of Artificial Sequence: Synthetic peptide
  Seed: NATEIRASV
NSTEIRASA

SEQ ID NO: 39766 - protein, 10 aa, Artificial Sequence
  Description of Artificial Sequence: Synthetic peptide
  Seed: NAEIEDLIFL
NSEIEDLIFL

SEQ ID NO: 39767 - protein, 9 aa, Artificial Sequence
  Description of Artificial Sequence: Synthetic peptide
  Seed: NATEIRASV
NSTEIRASI

SEQ ID NO: 39768 - protein, 9 aa, Artificial Sequence
  Description of Artificial Sequence: Synthetic peptide
  Seed: NATEIRASV
NSTEIRASL

SEQ ID NO: 39769 - protein, 9 aa, Artificial Sequence
  Description of Artificial Sequence: Synthetic peptide
  Seed: NATEIRASV
NSTEIRASM

SEQ ID NO: 39770 - protein, 9 aa, Artificial Sequence
  Description of Artificial Sequence: Synthetic peptide
  Seed: NATEIRASV
NSTEIRASF

SEQ ID NO: 39771 - protein, 9 aa, Artificial Sequence
  Description of Artificial Sequence: Synthetic peptide
  Seed: NATEIRASV
NSTEIRASY

SEQ ID NO: 39772 - protein, 9 aa, Artificial Sequence
  Description of Artificial Sequence: Synthetic peptide
  Seed: NATEIRASV
NSTEIRASV

SEQ ID NO: 39773 - protein, 9 aa, Artificial Sequence
  Description of Artificial Sequence: Synthetic peptide
  Seed: NATEIRASV
NTTEIRASA

SEQ ID NO: 39774 - protein, 9 aa, Artificial Sequence
  Description of Artificial Sequence: Synthetic peptide
  Seed: NATEIRASV
NTTEIRASC

SEQ ID NO: 39775 - protein, 9 aa, Artificial Sequence
  Description of Artificial Sequence: Synthetic peptide
  Seed: NATEIRASV
NTTEIRASI

SEQ ID NO: 39776 - protein, 9 aa, Artificial Sequence
  Description of Artificial Sequence: Synthetic peptide
  Seed: NATEIRASV
NITEIRASL

SEQ ID NO: 39777 - protein, 9 aa, Artificial Sequence
  Description of Artificial Sequence: Synthetic peptide
  Seed: NATEIRASV
NITEIRASI

SEQ ID NO: 39778 - protein, 9 aa, Artificial Sequence
  Description of Artificial Sequence: Synthetic peptide
  Seed: NATEIRASV
NITEIRASA

SEQ ID NO: 39779 - protein, 9 aa, Artificial Sequence
  Description of Artificial Sequence: Synthetic peptide
  Seed: NATEIRASV
NGTEIRASV

SEQ ID NO: 39780 - protein, 10 aa, Artificial Sequence
  Description of Artificial Sequence: Synthetic peptide
  Seed: NAEIEDLIFL
NSEIEDLIFM

SEQ ID NO: 39781 - protein, 10 aa, Artificial Sequence
  Description of Artificial Sequence: Synthetic peptide
  Seed: NAEIEDLIFL
NTEIEDLIFL

SEQ ID NO: 39782 - protein, 10 aa, Artificial Sequence
  Description of Artificial Sequence: Synthetic peptide
  Seed: NAEIEDLIFL
NTEIEDLIFM

SEQ ID NO: 39783 - protein, 10 aa, Artificial Sequence
  Description of Artificial Sequence: Synthetic peptide
  Seed: NAEIEDLIFL
NWEIEDLIFL

SEQ ID NO: 39784 - protein, 10 aa, Artificial Sequence
  Description of Artificial Sequence: Synthetic peptide
  Seed: NAEIEDLIFL
NWEIEDLIFM

SEQ ID NO: 39785 - protein, 10 aa, Artificial Sequence
  Description of Artificial Sequence: Synthetic peptide
  Seed: NAEIEDLIFL
NYEIEDLIFL

SEQ ID NO: 39786 - protein, 10 aa, Artificial Sequence
  Description of Artificial Sequence: Synthetic peptide
  Seed: NAEIEDLIFL
NYEIEDLIFM

SEQ ID NO: 39787 - protein, 10 aa, Artificial Sequence
  Description of Artificial Sequence: Synthetic peptide
  Seed: NAEIEDLIFL
NVEIEDLIFL

SEQ ID NO: 39788 - protein, 10 aa, Artificial Sequence
  Description of Artificial Sequence: Synthetic peptide
  Seed: NAEIEDLIFL
NVEIEDLIFM

SEQ ID NO: 39789 - protein, 9 aa, Artificial Sequence
  Description of Artificial Sequence: Synthetic peptide
  Seed: NATEIRASV
NATEIRASA

SEQ ID NO: 39790 - protein, 9 aa, Artificial Sequence
  Description of Artificial Sequence: Synthetic peptide
  Seed: NATEIRASV
NATEIRASI

SEQ ID NO: 39791 - protein, 9 aa, Artificial Sequence
  Description of Artificial Sequence: Synthetic peptide
  Seed: NATEIRASV
NATEIRASL

SEQ ID NO: 39792 - protein, 9 aa, Artificial Sequence
  Description of Artificial Sequence: Synthetic peptide
  Seed: NATEIRASV
NATEIRASM

SEQ ID NO: 39793 - protein, 9 aa, Artificial Sequence
  Description of Artificial Sequence: Synthetic peptide
  Seed: NATEIRASV
NATEIRASF

SEQ ID NO: 39794 - protein, 9 aa, Artificial Sequence
  Description of Artificial Sequence: Synthetic peptide
  Seed: NATEIRASV
NATEIRASY

SEQ ID NO: 39795 - protein, 9 aa, Artificial Sequence
  Description of Artificial Sequence: Synthetic peptide
  Seed: NATEIRASV
NNTEIRASV

SEQ ID NO: 39796 - protein, 9 aa, Artificial Sequence
  Description of Artificial Sequence: Synthetic peptide
  Seed: NATEIRASV
NGTEIRASM

SEQ ID NO: 39797 - protein, 9 aa, Artificial Sequence
  Description of Artificial Sequence: Synthetic peptide
  Seed: NATEIRASV
NGTEIRASF

SEQ ID NO: 39798 - protein, 9 aa, Artificial Sequence
  Description of Artificial Sequence: Synthetic peptide
  Seed: NATEIRASV
NGTEIRASY

SEQ ID NO: 39799 - protein, 11 aa, Artificial Sequence
  Description of Artificial Sequence: Synthetic peptide
  Seed: MVMELIRMIKR
MFMELIRMIKK

SEQ ID NO: 39800 - protein, 11 aa, Artificial Sequence
  Description of Artificial Sequence: Synthetic peptide
  Seed: MVMELIRMIKR
MMMELIRMIKK

SEQ ID NO: 39801 - protein, 10 aa, Artificial Sequence
  Description of Artificial Sequence: Synthetic peptide
  Seed: NILKGKFQTA
NFLKGKFQTF

SEQ ID NO: 39802 - protein, 10 aa, Artificial Sequence
  Description of Artificial Sequence: Synthetic peptide
  Seed: MVMELIRMIK
MMMELIRMIK

SEQ ID NO: 39803 - protein, 10 aa, Artificial Sequence
  Description of Artificial Sequence: Synthetic peptide
  Seed: MVMELIRMIK
MIMELIRMIF

SEQ ID NO: 39804 - protein, 10 aa, Artificial Sequence
  Description of Artificial Sequence: Synthetic peptide
  Seed: MVMELIRMIK
MIMELIRMIY

SEQ ID NO: 39805 - protein, 10 aa, Artificial Sequence
  Description of Artificial Sequence: Synthetic peptide
  Seed: MVMELIRMIK
MLMELIRMIR

SEQ ID NO: 39806 - protein, 10 aa, Artificial Sequence
  Description of Artificial Sequence: Synthetic peptide
  Seed: MVMELIRMIK
MLMELIRMIK

SEQ ID NO: 39807 - protein, 10 aa, Artificial Sequence
  Description of Artificial Sequence: Synthetic peptide
  Seed: MVMELIRMIK
MLMELIRMIY

SEQ ID NO: 39808 - protein, 10 aa, Artificial Sequence
  Description of Artificial Sequence: Synthetic peptide
  Seed: MVMELIRMIK
MKMELIRMIR

SEQ ID NO: 39809 - protein, 10 aa, Artificial Sequence
  Description of Artificial Sequence: Synthetic peptide
  Seed: MVMELIRMIK
MKMELIRMIK

SEQ ID NO: 39810 - protein, 10 aa, Artificial Sequence
  Description of Artificial Sequence: Synthetic peptide
  Seed: MVMELIRMIK
MMMELIRMIR

SEQ ID NO: 39811 - protein, 10 aa, Artificial Sequence
  Description of Artificial Sequence: Synthetic peptide
  Seed: MVMELIRMIK
MMMELIRMIH

SEQ ID NO: 39812 - protein, 10 aa, Artificial Sequence
  Description of Artificial Sequence: Synthetic peptide
  Seed: MVMELIRMIK
MMMELIRMIM

SEQ ID NO: 39813 - protein, 10 aa, Artificial Sequence
  Description of Artificial Sequence: Synthetic peptide
  Seed: MVMELIRMIK
MSMELIRMIL

SEQ ID NO: 39814 - protein, 10 aa, Artificial Sequence
  Description of Artificial Sequence: Synthetic peptide
  Seed: MVMELIRMIK
MMMELIRMIY

SEQ ID NO: 39815 - protein, 10 aa, Artificial Sequence
  Description of Artificial Sequence: Synthetic peptide
  Seed: MVMELIRMIK
MFMELIRMIR

SEQ ID NO: 39816 - protein, 10 aa, Artificial Sequence
  Description of Artificial Sequence: Synthetic peptide
  Seed: MVMELIRMIK
MFMELIRMIH

SEQ ID NO: 39817 - protein, 10 aa, Artificial Sequence
  Description of Artificial Sequence: Synthetic peptide
  Seed: MVMELIRMIK
MFMELIRMIK

SEQ ID NO: 39818 - protein, 10 aa, Artificial Sequence
  Description of Artificial Sequence: Synthetic peptide
  Seed: MVMELIRMIK
MFMELIRMIY

SEQ ID NO: 39819 - protein, 10 aa, Artificial Sequence
  Description of Artificial Sequence: Synthetic peptide
  Seed: MVMELIRMIK
MPMELIRMIR

SEQ ID NO: 39820 - protein, 10 aa, Artificial Sequence
  Description of Artificial Sequence: Synthetic peptide
  Seed: MVMELIRMIK
MPMELIRMIK

SEQ ID NO: 39821 - protein, 10 aa, Artificial Sequence
  Description of Artificial Sequence: Synthetic peptide
  Seed: MVMELIRMIK
MSMELIRMIA

SEQ ID NO: 39822 - protein, 10 aa, Artificial Sequence
  Description of Artificial Sequence: Synthetic peptide
  Seed: MVMELIRMIK
MSMELIRMIR

SEQ ID NO: 39823 - protein, 10 aa, Artificial Sequence
  Description of Artificial Sequence: Synthetic peptide
  Seed: MVMELIRMIK
MIMELIRMIM

SEQ ID NO: 39824 - protein, 10 aa, Artificial Sequence
  Description of Artificial Sequence: Synthetic peptide
  Seed: MVMELIRMIK
MIMELIRMIR

SEQ ID NO: 39825 - protein, 10 aa, Artificial Sequence
  Description of Artificial Sequence: Synthetic peptide
  Seed: MVMELIRMIK
MHMELIRMIK

SEQ ID NO: 39826 - protein, 10 aa, Artificial Sequence
  Description of Artificial Sequence: Synthetic peptide
  Seed: MVMELIRMIK
MAMELIRMIR

SEQ ID NO: 39827 - protein, 10 aa, Artificial Sequence
  Description of Artificial Sequence: Synthetic peptide
  Seed: MVMELIRMIK
MAMELIRMIK

SEQ ID NO: 39828 - protein, 10 aa, Artificial Sequence
  Description of Artificial Sequence: Synthetic peptide
  Seed: MVMELIRMIK
MAMELIRMIM

SEQ ID NO: 39829 - protein, 10 aa, Artificial Sequence
  Description of Artificial Sequence: Synthetic peptide
  Seed: MVMELIRMIK
MAMELIRMIY

SEQ ID NO: 39830 - protein, 10 aa, Artificial Sequence
  Description of Artificial Sequence: Synthetic peptide
  Seed: MVMELIRMIK
MRMELIRMIR

SEQ ID NO: 39831 - protein, 10 aa, Artificial Sequence
  Description of Artificial Sequence: Synthetic peptide
  Seed: MVMELIRMIK
MRMELIRMIK

SEQ ID NO: 39832 - protein, 10 aa, Artificial Sequence
  Description of Artificial Sequence: Synthetic peptide
  Seed: MVMELIRMIK
MNMELIRMIR

SEQ ID NO: 39833 - protein, 10 aa, Artificial Sequence
  Description of Artificial Sequence: Synthetic peptide
  Seed: MVMELIRMIK
MDMELIRMIR

SEQ ID NO: 39834 - protein, 10 aa, Artificial Sequence
  Description of Artificial Sequence: Synthetic peptide
  Seed: MVMELIRMIK
MDMELIRMIK

SEQ ID NO: 39835 - protein, 10 aa, Artificial Sequence
  Description of Artificial Sequence: Synthetic peptide
  Seed: MVMELIRMIK
MCMELIRMIR

SEQ ID NO: 39836 - protein, 10 aa, Artificial Sequence
  Description of Artificial Sequence: Synthetic peptide
  Seed: MVMELIRMIK
MCMELIRMIK

SEQ ID NO: 39837 - protein, 10 aa, Artificial Sequence
  Description of Artificial Sequence: Synthetic peptide
  Seed: MVMELIRMIK
MQMELIRMIR

SEQ ID NO: 39838 - protein, 10 aa, Artificial Sequence
  Description of Artificial Sequence: Synthetic peptide
  Seed: MVMELIRMIK
MQMELIRMIK

SEQ ID NO: 39839 - protein, 10 aa, Artificial Sequence
  Description of Artificial Sequence: Synthetic peptide
  Seed: MVMELIRMIK
MEMELIRMIR

SEQ ID NO: 39840 - protein, 10 aa, Artificial Sequence
  Description of Artificial Sequence: Synthetic peptide
  Seed: MVMELIRMIK
MEMELIRMIK

SEQ ID NO: 39841 - protein, 10 aa, Artificial Sequence
  Description of Artificial Sequence: Synthetic peptide
  Seed: MVMELIRMIK
MGMELIRMIR

SEQ ID NO: 39842 - protein, 10 aa, Artificial Sequence
  Description of Artificial Sequence: Synthetic peptide
  Seed: MVMELIRMIK
MGMELIRMIK

SEQ ID NO: 39843 - protein, 10 aa, Artificial Sequence
  Description of Artificial Sequence: Synthetic peptide
  Seed: MVMELIRMIK
MHMELIRMIR

SEQ ID NO: 39844 - protein, 10 aa, Artificial Sequence
  Description of Artificial Sequence: Synthetic peptide
  Seed: MVMELIRMIK
MSMELIRMII

SEQ ID NO: 39845 - protein, 10 aa, Artificial Sequence
  Description of Artificial Sequence: Synthetic peptide
  Seed: MVMELIRMIK
MSMELIRMIK

SEQ ID NO: 39846 - protein, 11 aa, Artificial Sequence
  Description of Artificial Sequence: Synthetic peptide
  Seed: MVMELIRMIKR
MMMELIRMIKR

SEQ ID NO: 39847 - protein, 11 aa, Artificial Sequence
  Description of Artificial Sequence: Synthetic peptide
  Seed: MVMELIRMIKR
MRMELIRMIKR

SEQ ID NO: 39848 - protein, 10 aa, Artificial Sequence
  Description of Artificial Sequence: Synthetic peptide
  Seed: MVMELIRMIK
MVMELIRMIR

SEQ ID NO: 39849 - protein, 10 aa, Artificial Sequence
  Description of Artificial Sequence: Synthetic peptide
  Seed: MVMELIRMIK
MVMELIRMIH

SEQ ID NO: 39850 - protein, 10 aa, Artificial Sequence
  Description of Artificial Sequence: Synthetic peptide
  Seed: MVMELIRMIK
MVMELIRMIL

SEQ ID NO: 39851 - protein, 10 aa, Artificial Sequence
  Description of Artificial Sequence: Synthetic peptide
  Seed: MVMELIRMIK
MVMELIRMIM

SEQ ID NO: 39852 - protein, 10 aa, Artificial Sequence
  Description of Artificial Sequence: Synthetic peptide
  Seed: MVMELIRMIK
MVMELIRMIF

SEQ ID NO: 39853 - protein, 10 aa, Artificial Sequence
  Description of Artificial Sequence: Synthetic peptide
  Seed: MVMELIRMIK
MVMELIRMIY

SEQ ID NO: 39854 - protein, 10 aa, Artificial Sequence
  Description of Artificial Sequence: Synthetic peptide
  Seed: MVMELIRMIK
MVMELIRMIV

SEQ ID NO: 39855 - protein, 11 aa, Artificial Sequence
  Description of Artificial Sequence: Synthetic peptide
  Seed: MVMELIRMIKR
MAMELIRMIKR

SEQ ID NO: 39856 - protein, 11 aa, Artificial Sequence
  Description of Artificial Sequence: Synthetic peptide
  Seed: MVMELIRMIKR
MAMELIRMIKK

SEQ ID NO: 39857 - protein, 10 aa, Artificial Sequence
  Description of Artificial Sequence: Synthetic peptide
  Seed: MVMELIRMIK
MSMELIRMIM

SEQ ID NO: 39858 - protein, 11 aa, Artificial Sequence
  Description of Artificial Sequence: Synthetic peptide
  Seed: MVMELIRMIKR
MQMELIRMIKR

SEQ ID NO: 39859 - protein, 11 aa, Artificial Sequence
  Description of Artificial Sequence: Synthetic peptide
  Seed: MVMELIRMIKR
MQMELIRMIKK

SEQ ID NO: 39860 - protein, 11 aa, Artificial Sequence
  Description of Artificial Sequence: Synthetic peptide
  Seed: MVMELIRMIKR
MGMELIRMIKR

SEQ ID NO: 39861 - protein, 11 aa, Artificial Sequence
  Description of Artificial Sequence: Synthetic peptide
  Seed: MVMELIRMIKR
MHMELIRMIKR

SEQ ID NO: 39862 - protein, 11 aa, Artificial Sequence
  Description of Artificial Sequence: Synthetic peptide
  Seed: MVMELIRMIKR
MIMELIRMIKK

SEQ ID NO: 39863 - protein, 11 aa, Artificial Sequence
  Description of Artificial Sequence: Synthetic peptide
  Seed: MVMELIRMIKR
MLMELIRMIKR

SEQ ID NO: 39864 - protein, 11 aa, Artificial Sequence
  Description of Artificial Sequence: Synthetic peptide
  Seed: MVMELIRMIKR
MLMELIRMIKK

SEQ ID NO: 39865 - protein, 11 aa, Artificial Sequence
  Description of Artificial Sequence: Synthetic peptide
  Seed: MVMELIRMIKR
MKMELIRMIKR

SEQ ID NO: 39866 - protein, 10 aa, Artificial Sequence
  Description of Artificial Sequence: Synthetic peptide
  Seed: MVMELIRMIK
MVMELIRMIA

SEQ ID NO: 39867 - protein, 10 aa, Artificial Sequence
  Description of Artificial Sequence: Synthetic peptide
  Seed: MVMELIRMIK
MYMELIRMIK

SEQ ID NO: 39868 - protein, 10 aa, Artificial Sequence
  Description of Artificial Sequence: Synthetic peptide
  Seed: MVMELIRMIK
MYMELIRMIH

SEQ ID NO: 39869 - protein, 10 aa, Artificial Sequence
  Description of Artificial Sequence: Synthetic peptide
  Seed: MVMELIRMIK
MYMELIRMIR

SEQ ID NO: 39870 - protein, 10 aa, Artificial Sequence
  Description of Artificial Sequence: Synthetic peptide
  Seed: MVMELIRMIK
MSMELIRMIS

SEQ ID NO: 39871 - protein, 10 aa, Artificial Sequence
  Description of Artificial Sequence: Synthetic peptide
  Seed: MVMELIRMIK
MSMELIRMIY

SEQ ID NO: 39872 - protein, 10 aa, Artificial Sequence
  Description of Artificial Sequence: Synthetic peptide
  Seed: MVMELIRMIK
MSMELIRMIV

SEQ ID NO: 39873 - protein, 10 aa, Artificial Sequence
  Description of Artificial Sequence: Synthetic peptide
  Seed: MVMELIRMIK
MTMELIRMIA

SEQ ID NO: 39874 - protein, 10 aa, Artificial Sequence
  Description of Artificial Sequence: Synthetic peptide
  Seed: MVMELIRMIK
MTMELIRMIR

SEQ ID NO: 39875 - protein, 10 aa, Artificial Sequence
  Description of Artificial Sequence: Synthetic peptide
  Seed: MVMELIRMIK
MTMELIRMIQ

SEQ ID NO: 39876 - protein, 10 aa, Artificial Sequence
  Description of Artificial Sequence: Synthetic peptide
  Seed: MVMELIRMIK
MTMELIRMIH

SEQ ID NO: 39877 - protein, 10 aa, Artificial Sequence
  Description of Artificial Sequence: Synthetic peptide
  Seed: MVMELIRMIK
MTMELIRMII

SEQ ID NO: 39878 - protein, 10 aa, Artificial Sequence
  Description of Artificial Sequence: Synthetic peptide
  Seed: MVMELIRMIK
MTMELIRMIL

SEQ ID NO: 39879 - protein, 10 aa, Artificial Sequence
  Description of Artificial Sequence: Synthetic peptide
  Seed: MVMELIRMIK
MTMELIRMIK

SEQ ID NO: 39880 - protein, 10 aa, Artificial Sequence
  Description of Artificial Sequence: Synthetic peptide
  Seed: MVMELIRMIK
MTMELIRMIM

SEQ ID NO: 39881 - protein, 10 aa, Artificial Sequence
  Description of Artificial Sequence: Synthetic peptide
  Seed: MVMELIRMIK
MTMELIRMIF

SEQ ID NO: 39882 - protein, 10 aa, Artificial Sequence
  Description of Artificial Sequence: Synthetic peptide
  Seed: MVMELIRMIK
MTMELIRMIY

SEQ ID NO: 39883 - protein, 10 aa, Artificial Sequence
  Description of Artificial Sequence: Synthetic peptide
  Seed: MVMELIRMIK
MTMELIRMIV

SEQ ID NO: 39884 - protein, 10 aa, Artificial Sequence
  Description of Artificial Sequence: Synthetic peptide
  Seed: MVMELIRMIK
MWMELIRMIR

SEQ ID NO: 39885 - protein, 10 aa, Artificial Sequence
  Description of Artificial Sequence: Synthetic peptide
  Seed: MVMELIRMIK
MWMELIRMIH

SEQ ID NO: 39886 - protein, 10 aa, Artificial Sequence
  Description of Artificial Sequence: Synthetic peptide
  Seed: MVMELIRMIK
MWMELIRMIK

SEQ ID NO: 39887 - protein, 10 aa, Artificial Sequence
  Description of Artificial Sequence: Synthetic peptide
  Seed: MVMELIRMIK
MWMELIRMIY

SEQ ID NO: 39888 - protein, 10 aa, Artificial Sequence
  Description of Artificial Sequence: Synthetic peptide
  Seed: MVMELIRMIK
MYMELIRMIA

SEQ ID NO: 39889 - protein, 9 aa, Artificial Sequence
  Description of Artificial Sequence: Synthetic peptide
  Seed: NATEIRASV
NTTEIRASL

SEQ ID NO: 39890 - protein, 9 aa, Artificial Sequence
  Description of Artificial Sequence: Synthetic peptide
  Seed: NATEIRASV
NTTEIRASM

SEQ ID NO: 39891 - protein, 9 aa, Artificial Sequence
  Description of Artificial Sequence: Synthetic peptide
  Seed: NATEIRASV
NTTEIRASF

SEQ ID NO: 39892 - protein, 10 aa, Artificial Sequence
  Description of Artificial Sequence: Synthetic peptide
  Seed: NILKGKFQTA
NNLKGKFQTF

SEQ ID NO: 39893 - protein, 10 aa, Artificial Sequence
  Description of Artificial Sequence: Synthetic peptide
  Seed: NILKGKFQTA
NALKGKFQTV

SEQ ID NO: 39894 - protein, 10 aa, Artificial Sequence
  Description of Artificial Sequence: Synthetic peptide
  Seed: NILKGKFQTA
NRLKGKFQTI

SEQ ID NO: 39895 - protein, 10 aa, Artificial Sequence
  Description of Artificial Sequence: Synthetic peptide
  Seed: NILKGKFQTA
NRLKGKFQTL

SEQ ID NO: 39896 - protein, 10 aa, Artificial Sequence
  Description of Artificial Sequence: Synthetic peptide
  Seed: NILKGKFQTA
NRLKGKFQTM

SEQ ID NO: 39897 - protein, 10 aa, Artificial Sequence
  Description of Artificial Sequence: Synthetic peptide
  Seed: NILKGKFQTA
NRLKGKFQTF

SEQ ID NO: 39898 - protein, 10 aa, Artificial Sequence
  Description of Artificial Sequence: Synthetic peptide
  Seed: NILKGKFQTA
NRLKGKFQTV

SEQ ID NO: 39899 - protein, 10 aa, Artificial Sequence
  Description of Artificial Sequence: Synthetic peptide
  Seed: NILKGKFQTA
NNLKGKFQTI

SEQ ID NO: 39900 - protein, 10 aa, Artificial Sequence
  Description of Artificial Sequence: Synthetic peptide
  Seed: NILKGKFQTA
NNLKGKFQTL

SEQ ID NO: 39901 - protein, 10 aa, Artificial Sequence
  Description of Artificial Sequence: Synthetic peptide
  Seed: NILKGKFQTA
NNLKGKFQTM

SEQ ID NO: 39902 - protein, 10 aa, Artificial Sequence
  Description of Artificial Sequence: Synthetic peptide
  Seed: NILKGKFQTA
NNLKGKFQTV

SEQ ID NO: 39903 - protein, 10 aa, Artificial Sequence
  Description of Artificial Sequence: Synthetic peptide
  Seed: NILKGKFQTA
NQLKGKFQTI

SEQ ID NO: 39904 - protein, 10 aa, Artificial Sequence
  Description of Artificial Sequence: Synthetic peptide
  Seed: NILKGKFQTA
NDLKGKFQTI

SEQ ID NO: 39905 - protein, 10 aa, Artificial Sequence
  Description of Artificial Sequence: Synthetic peptide
  Seed: NILKGKFQTA
NDLKGKFQTL

SEQ ID NO: 39906 - protein, 10 aa, Artificial Sequence
  Description of Artificial Sequence: Synthetic peptide
  Seed: NILKGKFQTA
NDLKGKFQTM

SEQ ID NO: 39907 - protein, 10 aa, Artificial Sequence
  Description of Artificial Sequence: Synthetic peptide
  Seed: NILKGKFQTA
NDLKGKFQTF

SEQ ID NO: 39908 - protein, 10 aa, Artificial Sequence
  Description of Artificial Sequence: Synthetic peptide
  Seed: NILKGKFQTA
NDLKGKFQTV

SEQ ID NO: 39909 - protein, 10 aa, Artificial Sequence
  Description of Artificial Sequence: Synthetic peptide
  Seed: NILKGKFQTA
NCLKGKFQTI

SEQ ID NO: 39910 - protein, 10 aa, Artificial Sequence
  Description of Artificial Sequence: Synthetic peptide
  Seed: NILKGKFQTA
NCLKGKFQTL

SEQ ID NO: 39911 - protein, 10 aa, Artificial Sequence
  Description of Artificial Sequence: Synthetic peptide
  Seed: NILKGKFQTA
NCLKGKFQTM

SEQ ID NO: 39912 - protein, 10 aa, Artificial Sequence
  Description of Artificial Sequence: Synthetic peptide
  Seed: NILKGKFQTA
NCLKGKFQTF

SEQ ID NO: 39913 - protein, 10 aa, Artificial Sequence
  Description of Artificial Sequence: Synthetic peptide
  Seed: NILKGKFQTA
NALKGKFQTF

SEQ ID NO: 39914 - protein, 10 aa, Artificial Sequence
  Description of Artificial Sequence: Synthetic peptide
  Seed: NILKGKFQTA
NALKGKFQTM

SEQ ID NO: 39915 - protein, 10 aa, Artificial Sequence
  Description of Artificial Sequence: Synthetic peptide
  Seed: NILKGKFQTA
NALKGKFQTL

SEQ ID NO: 39916 - protein, 10 aa, Artificial Sequence
  Description of Artificial Sequence: Synthetic peptide
  Seed: NILKGKFQTA
NALKGKFQTI

SEQ ID NO: 39917 - protein, 9 aa, Artificial Sequence
  Description of Artificial Sequence: Synthetic peptide
  Seed: NGDDATAGL
NMDDATAGM

SEQ ID NO: 39918 - protein, 9 aa, Artificial Sequence
  Description of Artificial Sequence: Synthetic peptide
  Seed: NGDDATAGL
NMDDATAGF

SEQ ID NO: 39919 - protein, 9 aa, Artificial Sequence
  Description of Artificial Sequence: Synthetic peptide
  Seed: NGDDATAGL
NMDDATAGV

SEQ ID NO: 39920 - protein, 9 aa, Artificial Sequence
  Description of Artificial Sequence: Synthetic peptide
  Seed: NGDDATAGL
NSDDATAGI

SEQ ID NO: 39921 - protein, 9 aa, Artificial Sequence
  Description of Artificial Sequence: Synthetic peptide
  Seed: NGDDATAGL
NSDDATAGL

SEQ ID NO: 39922 - protein, 9 aa, Artificial Sequence
  Description of Artificial Sequence: Synthetic peptide
  Seed: NGDDATAGL
NSDDATAGM

SEQ ID NO: 39923 - protein, 9 aa, Artificial Sequence
  Description of Artificial Sequence: Synthetic peptide
  Seed: NGDDATAGL
NSDDATAGF

SEQ ID NO: 39924 - protein, 9 aa, Artificial Sequence
  Description of Artificial Sequence: Synthetic peptide
  Seed: NGDDATAGL
NSDDATAGV

SEQ ID NO: 39925 - protein, 9 aa, Artificial Sequence
  Description of Artificial Sequence: Synthetic peptide
  Seed: NGDDATAGL
NTDDATAGI

SEQ ID NO: 39926 - protein, 9 aa, Artificial Sequence
  Description of Artificial Sequence: Synthetic peptide
  Seed: NGDDATAGL
NTDDATAGL

SEQ ID NO: 39927 - protein, 9 aa, Artificial Sequence
  Description of Artificial Sequence: Synthetic peptide
  Seed: NGDDATAGL
NTDDATAGM

SEQ ID NO: 39928 - protein, 9 aa, Artificial Sequence
  Description of Artificial Sequence: Synthetic peptide
  Seed: NGDDATAGL
NTDDATAGF

SEQ ID NO: 39929 - protein, 9 aa, Artificial Sequence
  Description of Artificial Sequence: Synthetic peptide
  Seed: NGDDATAGL
NTDDATAGV

SEQ ID NO: 39930 - protein, 9 aa, Artificial Sequence
  Description of Artificial Sequence: Synthetic peptide
  Seed: NGDDATAGL
NVDDATAGI

SEQ ID NO: 39931 - protein, 9 aa, Artificial Sequence
  Description of Artificial Sequence: Synthetic peptide
  Seed: NGDDATAGL
NVDDATAGL

SEQ ID NO: 39932 - protein, 9 aa, Artificial Sequence
  Description of Artificial Sequence: Synthetic peptide
  Seed: NGDDATAGL
NVDDATAGM

SEQ ID NO: 39933 - protein, 9 aa, Artificial Sequence
  Description of Artificial Sequence: Synthetic peptide
  Seed: NGDDATAGL
NVDDATAGF

SEQ ID NO: 39934 - protein, 9 aa, Artificial Sequence
  Description of Artificial Sequence: Synthetic peptide
  Seed: NGDDATAGL
NVDDATAGV

SEQ ID NO: 39935 - protein, 10 aa, Artificial Sequence
  Description of Artificial Sequence: Synthetic peptide
  Seed: NILKGKFQTA
NALKGKFQTA

SEQ ID NO: 39936 - protein, 10 aa, Artificial Sequence
  Description of Artificial Sequence: Synthetic peptide
  Seed: NILKGKFQTA
NCLKGKFQTV

SEQ ID NO: 39937 - protein, 10 aa, Artificial Sequence
  Description of Artificial Sequence: Synthetic peptide
  Seed: NILKGKFQTA
NQLKGKFQTL

SEQ ID NO: 39938 - protein, 9 aa, Artificial Sequence
  Description of Artificial Sequence: Synthetic peptide
  Seed: NATEIRASV
NTTEIRASS

SEQ ID NO: 39939 - protein, 10 aa, Artificial Sequence
  Description of Artificial Sequence: Synthetic peptide
  Seed: NILKGKFQTA
NKLKGKFQTV

SEQ ID NO: 39940 - protein, 10 aa, Artificial Sequence
  Description of Artificial Sequence: Synthetic peptide
  Seed: NILKGKFQTA
NLLKGKFQTI

SEQ ID NO: 39941 - protein, 10 aa, Artificial Sequence
  Description of Artificial Sequence: Synthetic peptide
  Seed: NILKGKFQTA
NLLKGKFQTL

SEQ ID NO: 39942 - protein, 10 aa, Artificial Sequence
  Description of Artificial Sequence: Synthetic peptide
  Seed: NILKGKFQTA
NLLKGKFQTM

SEQ ID NO: 39943 - protein, 10 aa, Artificial Sequence
  Description of Artificial Sequence: Synthetic peptide
  Seed: NILKGKFQTA
NLLKGKFQTF

SEQ ID NO: 39944 - protein, 10 aa, Artificial Sequence
  Description of Artificial Sequence: Synthetic peptide
  Seed: NILKGKFQTA
NLLKGKFQTV

SEQ ID NO: 39945 - protein, 10 aa, Artificial Sequence
  Description of Artificial Sequence: Synthetic peptide
  Seed: NILKGKFQTA
NKLKGKFQTI

SEQ ID NO: 39946 - protein, 10 aa, Artificial Sequence
  Description of Artificial Sequence: Synthetic peptide
  Seed: NILKGKFQTA
NKLKGKFQTL

SEQ ID NO: 39947 - protein, 10 aa, Artificial Sequence
  Description of Artificial Sequence: Synthetic peptide
  Seed: NILKGKFQTA
NKLKGKFQTM

SEQ ID NO: 39948 - protein, 10 aa, Artificial Sequence
  Description of Artificial Sequence: Synthetic peptide
  Seed: NILKGKFQTA
NKLKGKFQTF

SEQ ID NO: 39949 - protein, 10 aa, Artificial Sequence
  Description of Artificial Sequence: Synthetic peptide
  Seed: NILKGKFQTA
NMLKGKFQTA

SEQ ID NO: 39950 - protein, 10 aa, Artificial Sequence
  Description of Artificial Sequence: Synthetic peptide
  Seed: NILKGKFQTA
NQLKGKFQTM

SEQ ID NO: 39951 - protein, 10 aa, Artificial Sequence
  Description of Artificial Sequence: Synthetic peptide
  Seed: NILKGKFQTA
NMLKGKFQTC

SEQ ID NO: 39952 - protein, 10 aa, Artificial Sequence
  Description of Artificial Sequence: Synthetic peptide
  Seed: NILKGKFQTA
NMLKGKFQTI

SEQ ID NO: 39953 - protein, 10 aa, Artificial Sequence
  Description of Artificial Sequence: Synthetic peptide
  Seed: NILKGKFQTA
NMLKGKFQTL

SEQ ID NO: 39954 - protein, 10 aa, Artificial Sequence
  Description of Artificial Sequence: Synthetic peptide
  Seed: NILKGKFQTA
NMLKGKFQTM

SEQ ID NO: 39955 - protein, 10 aa, Artificial Sequence
  Description of Artificial Sequence: Synthetic peptide
  Seed: NILKGKFQTA
NMLKGKFQTF

SEQ ID NO: 39956 - protein, 10 aa, Artificial Sequence
  Description of Artificial Sequence: Synthetic peptide
  Seed: NILKGKFQTA
NMLKGKFQTV

SEQ ID NO: 39957 - protein, 10 aa, Artificial Sequence
  Description of Artificial Sequence: Synthetic peptide
  Seed: NILKGKFQTA
NFLKGKFQTA

SEQ ID NO: 39958 - protein, 10 aa, Artificial Sequence
  Description of Artificial Sequence: Synthetic peptide
  Seed: NILKGKFQTA
NFLKGKFQTI

SEQ ID NO: 39959 - protein, 10 aa, Artificial Sequence
  Description of Artificial Sequence: Synthetic peptide
  Seed: NILKGKFQTA
NFLKGKFQTL

SEQ ID NO: 39960 - protein, 10 aa, Artificial Sequence
  Description of Artificial Sequence: Synthetic peptide
  Seed: NILKGKFQTA
NLLKGKFQTA

SEQ ID NO: 39961 - protein, 10 aa, Artificial Sequence
  Description of Artificial Sequence: Synthetic peptide
  Seed: NILKGKFQTA
NILKGKFQTV

SEQ ID NO: 39962 - protein, 10 aa, Artificial Sequence
  Description of Artificial Sequence: Synthetic peptide
  Seed: NILKGKFQTA
NILKGKFQTF

SEQ ID NO: 39963 - protein, 10 aa, Artificial Sequence
  Description of Artificial Sequence: Synthetic peptide
  Seed: NILKGKFQTA
NILKGKFQTM

SEQ ID NO: 39964 - protein, 10 aa, Artificial Sequence
  Description of Artificial Sequence: Synthetic peptide
  Seed: NILKGKFQTA
NQLKGKFQTF

SEQ ID NO: 39965 - protein, 10 aa, Artificial Sequence
  Description of Artificial Sequence: Synthetic peptide
  Seed: NILKGKFQTA
NQLKGKFQTV

SEQ ID NO: 39966 - protein, 10 aa, Artificial Sequence
  Description of Artificial Sequence: Synthetic peptide
  Seed: NILKGKFQTA
NELKGKFQTI

SEQ ID NO: 39967 - protein, 10 aa, Artificial Sequence
  Description of Artificial Sequence: Synthetic peptide
  Seed: NILKGKFQTA
NELKGKFQTL

SEQ ID NO: 39968 - protein, 10 aa, Artificial Sequence
  Description of Artificial Sequence: Synthetic peptide
  Seed: NILKGKFQTA
NELKGKFQTM

SEQ ID NO: 39969 - protein, 10 aa, Artificial Sequence
  Description of Artificial Sequence: Synthetic peptide
  Seed: NILKGKFQTA
NELKGKFQTF

SEQ ID NO: 39970 - protein, 10 aa, Artificial Sequence
  Description of Artificial Sequence: Synthetic peptide
  Seed: NILKGKFQTA
NELKGKFQTV

SEQ ID NO: 39971 - protein, 10 aa, Artificial Sequence
  Description of Artificial Sequence: Synthetic peptide
  Seed: NILKGKFQTA
NGLKGKFQTI

SEQ ID NO: 39972 - protein, 10 aa, Artificial Sequence
  Description of Artificial Sequence: Synthetic peptide
  Seed: NILKGKFQTA
NGLKGKFQTL

SEQ ID NO: 39973 - protein, 10 aa, Artificial Sequence
  Description of Artificial Sequence: Synthetic peptide
  Seed: NILKGKFQTA
NGLKGKFQTM

SEQ ID NO: 39974 - protein, 10 aa, Artificial Sequence
  Description of Artificial Sequence: Synthetic peptide
  Seed: NILKGKFQTA
NGLKGKFQTF

SEQ ID NO: 39975 - protein, 10 aa, Artificial Sequence
  Description of Artificial Sequence: Synthetic peptide
  Seed: NILKGKFQTA
NGLKGKFQTV

SEQ ID NO: 39976 - protein, 10 aa, Artificial Sequence
  Description of Artificial Sequence: Synthetic peptide
  Seed: NILKGKFQTA
NHLKGKFQTI

SEQ ID NO: 39977 - protein, 10 aa, Artificial Sequence
  Description of Artificial Sequence: Synthetic peptide
  Seed: NILKGKFQTA
NHLKGKFQTL

SEQ ID NO: 39978 - protein, 10 aa, Artificial Sequence
  Description of Artificial Sequence: Synthetic peptide
  Seed: NILKGKFQTA
NHLKGKFQTM

SEQ ID NO: 39979 - protein, 10 aa, Artificial Sequence
  Description of Artificial Sequence: Synthetic peptide
  Seed: NILKGKFQTA
NHLKGKFQTF

SEQ ID NO: 39980 - protein, 10 aa, Artificial Sequence
  Description of Artificial Sequence: Synthetic peptide
  Seed: NILKGKFQTA
NHLKGKFQTV

SEQ ID NO: 39981 - protein, 10 aa, Artificial Sequence
  Description of Artificial Sequence: Synthetic peptide
  Seed: NILKGKFQTA
NILKGKFQTI

SEQ ID NO: 39982 - protein, 10 aa, Artificial Sequence
  Description of Artificial Sequence: Synthetic peptide
  Seed: NILKGKFQTA
NILKGKFQTL

SEQ ID NO: 39983 - protein, 9 aa, Artificial Sequence
  Description of Artificial Sequence: Synthetic peptide
  Seed: NGDDATAGL
NMDDATAGL

SEQ ID NO: 39984 - protein, 9 aa, Artificial Sequence
  Description of Artificial Sequence: Synthetic peptide
  Seed: NGDDATAGL
NMDDATAGI

SEQ ID NO: 39985 - protein, 9 aa, Artificial Sequence
  Description of Artificial Sequence: Synthetic peptide
  Seed: NGDDATAGL
NLDDATAGV

SEQ ID NO: 39986 - protein, 11 aa, Artificial Sequence
  Description of Artificial Sequence: Synthetic peptide
  Seed: NATEIRASVGR
NDTEIRASVGR

SEQ ID NO: 39987 - protein, 11 aa, Artificial Sequence
  Description of Artificial Sequence: Synthetic peptide
  Seed: NATEIRASVGK
NSTEIRASVGK

SEQ ID NO: 39988 - protein, 11 aa, Artificial Sequence
  Description of Artificial Sequence: Synthetic peptide
  Seed: NATEIRASVGK
NTTEIRASVGK

SEQ ID NO: 39989 - protein, 11 aa, Artificial Sequence
  Description of Artificial Sequence: Synthetic peptide
  Seed: NATEIRASVGK
NWTEIRASVGR

SEQ ID NO: 39990 - protein, 11 aa, Artificial Sequence
  Description of Artificial Sequence: Synthetic peptide
  Seed: NATEIRASVGK
NYTEIRASVGR

SEQ ID NO: 39991 - protein, 11 aa, Artificial Sequence
  Description of Artificial Sequence: Synthetic peptide
  Seed: NATEIRASVGK
NVTEIRASVGR

SEQ ID NO: 39992 - protein, 11 aa, Artificial Sequence
  Description of Artificial Sequence: Synthetic peptide
  Seed: NATEIRASVGK
NVTEIRASVGK

SEQ ID NO: 39993 - protein, 11 aa, Artificial Sequence
  Description of Artificial Sequence: Synthetic peptide
  Seed: NATEIRASVGR
NNTEIRASVGR

SEQ ID NO: 39994 - protein, 11 aa, Artificial Sequence
  Description of Artificial Sequence: Synthetic peptide
  Seed: NATEIRASVGR
NETEIRASVGR

SEQ ID NO: 39995 - protein, 9 aa, Artificial Sequence
  Description of Artificial Sequence: Synthetic peptide
  Seed: NGDDATAGL
NLDDATAGF

SEQ ID NO: 39996 - protein, 11 aa, Artificial Sequence
  Description of Artificial Sequence: Synthetic peptide
  Seed: NATEIRASVGR
NHTEIRASVGR

SEQ ID NO: 39997 - protein, 11 aa, Artificial Sequence
  Description of Artificial Sequence: Synthetic peptide
  Seed: NATEIRASVGR
NITEIRASVGR

SEQ ID NO: 39998 - protein, 11 aa, Artificial Sequence
  Description of Artificial Sequence: Synthetic peptide
  Seed: NATEIRASVGR
NITEIRASVGK

SEQ ID NO: 39999 - protein, 11 aa, Artificial Sequence
  Description of Artificial Sequence: Synthetic peptide
  Seed: NATEIRASVGR
NLTEIRASVGR

SEQ ID NO: 40000 - protein, 11 aa, Artificial Sequence
  Description of Artificial Sequence: Synthetic peptide
  Seed: NATEIRASVGR
NMTEIRASVGR

SEQ ID NO: 40001 - protein, 11 aa, Artificial Sequence
  Description of Artificial Sequence: Synthetic peptide
  Seed: NATEIRASVGR
NMTEIRASVGK

SEQ ID NO: 40002 - protein, 11 aa, Artificial Sequence
  Description of Artificial Sequence: Synthetic peptide
  Seed: NATEIRASVGR
NFTEIRASVGR

SEQ ID NO: 40003 - protein, 11 aa, Artificial Sequence
  Description of Artificial Sequence: Synthetic peptide
  Seed: NATEIRASVGR
NSTEIRASVGR

SEQ ID NO: 40004 - protein, 9 aa, Artificial Sequence
  Description of Artificial Sequence: Synthetic peptide
  Seed: NATEIRASV
NTTEIRAST

SEQ ID NO: 40005 - protein, 9 aa, Artificial Sequence
  Description of Artificial Sequence: Synthetic peptide
  Seed: NATEIRASV
NTTEIRASY

SEQ ID NO: 40006 - protein, 9 aa, Artificial Sequence
  Description of Artificial Sequence: Synthetic peptide
  Seed: NATEIRASV
NVTEIRASA

SEQ ID NO: 40007 - protein, 9 aa, Artificial Sequence
  Description of Artificial Sequence: Synthetic peptide
  Seed: NATEIRASV
NVTEIRASI

SEQ ID NO: 40008 - protein, 9 aa, Artificial Sequence
  Description of Artificial Sequence: Synthetic peptide
  Seed: NATEIRASV
NVTEIRASL

SEQ ID NO: 40009 - protein, 9 aa, Artificial Sequence
  Description of Artificial Sequence: Synthetic peptide
  Seed: NATEIRASV
NVTEIRASM

SEQ ID NO: 40010 - protein, 9 aa, Artificial Sequence
  Description of Artificial Sequence: Synthetic peptide
  Seed: NATEIRASV
NVTEIRASF

SEQ ID NO: 40011 - protein, 9 aa, Artificial Sequence
  Description of Artificial Sequence: Synthetic peptide
  Seed: NATEIRASV
NVTEIRAST

SEQ ID NO: 40012 - protein, 9 aa, Artificial Sequence
  Description of Artificial Sequence: Synthetic peptide
  Seed: NATEIRASV
NVTEIRASY

SEQ ID NO: 40013 - protein, 9 aa, Artificial Sequence
  Description of Artificial Sequence: Synthetic peptide
  Seed: NATEIRASV
NVTEIRASV

SEQ ID NO: 40014 - protein, 10 aa, Artificial Sequence
  Description of Artificial Sequence: Synthetic peptide
  Seed: NFWRGENGRR
NTWRGENGRR

SEQ ID NO: 40015 - protein, 10 aa, Artificial Sequence
  Description of Artificial Sequence: Synthetic peptide
  Seed: NFWRGENGRR
NVWRGENGRR

SEQ ID NO: 40016 - protein, 9 aa, Artificial Sequence
  Description of Artificial Sequence: Synthetic peptide
  Seed: NGDDATAGL
NADDATAGI

SEQ ID NO: 40017 - protein, 9 aa, Artificial Sequence
  Description of Artificial Sequence: Synthetic peptide
  Seed: NGDDATAGL
NADDATAGL

SEQ ID NO: 40018 - protein, 9 aa, Artificial Sequence
  Description of Artificial Sequence: Synthetic peptide
  Seed: NGDDATAGL
NADDATAGM

SEQ ID NO: 40019 - protein, 9 aa, Artificial Sequence
  Description of Artificial Sequence: Synthetic peptide
  Seed: NGDDATAGL
NADDATAGF

SEQ ID NO: 40020 - protein, 9 aa, Artificial Sequence
  Description of Artificial Sequence: Synthetic peptide
  Seed: NGDDATAGL
NADDATAGV

SEQ ID NO: 40021 - protein, 9 aa, Artificial Sequence
  Description of Artificial Sequence: Synthetic peptide
  Seed: NGDDATAGL
NCDDATAGL

SEQ ID NO: 40022 - protein, 9 aa, Artificial Sequence
  Description of Artificial Sequence: Synthetic peptide
  Seed: NGDDATAGL
NQDDATAGL

SEQ ID NO: 40023 - protein, 9 aa, Artificial Sequence
  Description of Artificial Sequence: Synthetic peptide
  Seed: NGDDATAGL
NQDDATAGM

SEQ ID NO: 40024 - protein, 9 aa, Artificial Sequence
  Description of Artificial Sequence: Synthetic peptide
  Seed: NGDDATAGL
NQDDATAGF

SEQ ID NO: 40025 - protein, 9 aa, Artificial Sequence
  Description of Artificial Sequence: Synthetic peptide
  Seed: NGDDATAGL
NGDDATAGF

SEQ ID NO: 40026 - protein, 9 aa, Artificial Sequence
  Description of Artificial Sequence: Synthetic peptide
  Seed: NGDDATAGL
NIDDATAGI

SEQ ID NO: 40027 - protein, 9 aa, Artificial Sequence
  Description of Artificial Sequence: Synthetic peptide
  Seed: NGDDATAGL
NIDDATAGL

SEQ ID NO: 40028 - protein, 9 aa, Artificial Sequence
  Description of Artificial Sequence: Synthetic peptide
  Seed: NGDDATAGL
NIDDATAGM

SEQ ID NO: 40029 - protein, 9 aa, Artificial Sequence
  Description of Artificial Sequence: Synthetic peptide
  Seed: NGDDATAGL
NIDDATAGF

SEQ ID NO: 40030 - protein, 9 aa, Artificial Sequence
  Description of Artificial Sequence: Synthetic peptide
  Seed: NGDDATAGL
NIDDATAGV

SEQ ID NO: 40031 - protein, 9 aa, Artificial Sequence
  Description of Artificial Sequence: Synthetic peptide
  Seed: NGDDATAGL
NLDDATAGI

SEQ ID NO: 40032 - protein, 9 aa, Artificial Sequence
  Description of Artificial Sequence: Synthetic peptide
  Seed: NGDDATAGL
NLDDATAGL

SEQ ID NO: 40033 - protein, 9 aa, Artificial Sequence
  Description of Artificial Sequence: Synthetic peptide
  Seed: NGDDATAGL
NLDDATAGM

SEQ ID NO: 40034 - protein, 10 aa, Artificial Sequence
  Description of Artificial Sequence: Synthetic peptide
  Seed: NFWRGENGRR
NYWRGENGRR

SEQ ID NO: 40035 - protein, 10 aa, Artificial Sequence
  Description of Artificial Sequence: Synthetic peptide
  Seed: NFWRGENGRR
NSWRGENGRR

SEQ ID NO: 40036 - protein, 10 aa, Artificial Sequence
  Description of Artificial Sequence: Synthetic peptide
  Seed: NFWRGENGRR
NMWRGENGRR

SEQ ID NO: 40037 - protein, 9 aa, Artificial Sequence
  Description of Artificial Sequence: Synthetic peptide
  Seed: NFWRGENGR
NAWRGENGR

SEQ ID NO: 40038 - protein, 9 aa, Artificial Sequence
  Description of Artificial Sequence: Synthetic peptide
  Seed: NFWRGENGR
NNWRGENGR

SEQ ID NO: 40039 - protein, 9 aa, Artificial Sequence
  Description of Artificial Sequence: Synthetic peptide
  Seed: NFWRGENGR
NQWRGENGR

SEQ ID NO: 40040 - protein, 9 aa, Artificial Sequence
  Description of Artificial Sequence: Synthetic peptide
  Seed: NFWRGENGR
NIWRGENGR

SEQ ID NO: 40041 - protein, 9 aa, Artificial Sequence
  Description of Artificial Sequence: Synthetic peptide
  Seed: NFWRGENGR
NLWRGENGR

SEQ ID NO: 40042 - protein, 9 aa, Artificial Sequence
  Description of Artificial Sequence: Synthetic peptide
  Seed: NFWRGENGR
NMWRGENGR

SEQ ID NO: 40043 - protein, 9 aa, Artificial Sequence
  Description of Artificial Sequence: Synthetic peptide
  Seed: NFWRGENGR
NMWRGENGK

SEQ ID NO: 40044 - protein, 9 aa, Artificial Sequence
  Description of Artificial Sequence: Synthetic peptide
  Seed: NFWRGENGR
NFWRGENGK

SEQ ID NO: 40045 - protein, 9 aa, Artificial Sequence
  Description of Artificial Sequence: Synthetic peptide
  Seed: NFWRGENGR
NSWRGENGR

SEQ ID NO: 40046 - protein, 9 aa, Artificial Sequence
  Description of Artificial Sequence: Synthetic peptide
  Seed: NFWRGENGR
NTWRGENGR

SEQ ID NO: 40047 - protein, 9 aa, Artificial Sequence
  Description of Artificial Sequence: Synthetic peptide
  Seed: NFWRGENGR
NWWRGENGR

SEQ ID NO: 40048 - protein, 9 aa, Artificial Sequence
  Description of Artificial Sequence: Synthetic peptide
  Seed: NFWRGENGR
NYWRGENGR

SEQ ID NO: 40049 - protein, 9 aa, Artificial Sequence
  Description of Artificial Sequence: Synthetic peptide
  Seed: NFWRGENGR
NYWRGENGK

SEQ ID NO: 40050 - protein, 9 aa, Artificial Sequence
  Description of Artificial Sequence: Synthetic peptide
  Seed: NFWRGENGR
NVWRGENGR

SEQ ID NO: 40051 - protein, 10 aa, Artificial Sequence
  Description of Artificial Sequence: Synthetic peptide
  Seed: NFWRGENGRR
NAWRGENGRR

SEQ ID NO: 40052 - protein, 10 aa, Artificial Sequence
  Description of Artificial Sequence: Synthetic peptide
  Seed: NFWRGENGRR
NIWRGENGRR

SEQ ID NO: 40053 - protein, 10 aa, Artificial Sequence
  Description of Artificial Sequence: Synthetic peptide
  Seed: NFWRGENGRR
NLWRGENGRR

SEQ ID NO: 40054 - protein, 9 aa, Artificial Sequence
  Description of Artificial Sequence: Synthetic peptide
  Seed: MVMELIRMI
MVMELIRMY

SEQ ID NO: 40055 - protein, 9 aa, Artificial Sequence
  Description of Artificial Sequence: Synthetic peptide
  Seed: MVMELIRMI
MVMELIRMW

SEQ ID NO: 40056 - protein, 10 aa, Artificial Sequence
  Description of Artificial Sequence: Synthetic peptide
  Seed: MVLSAFDERR
MMLSAFDERN

SEQ ID NO: 40057 - protein, 10 aa, Artificial Sequence
  Description of Artificial Sequence: Synthetic peptide
  Seed: MVLSAFDERR
MGLSAFDERK

SEQ ID NO: 40058 - protein, 10 aa, Artificial Sequence
  Description of Artificial Sequence: Synthetic peptide
  Seed: MVLSAFDERR
MHLSAFDERR

SEQ ID NO: 40059 - protein, 10 aa, Artificial Sequence
  Description of Artificial Sequence: Synthetic peptide
  Seed: MVLSAFDERR
MILSAFDERK

SEQ ID NO: 40060 - protein, 10 aa, Artificial Sequence
  Description of Artificial Sequence: Synthetic peptide
  Seed: MVLSAFDERR
MLLSAFDERR

SEQ ID NO: 40061 - protein, 10 aa, Artificial Sequence
  Description of Artificial Sequence: Synthetic peptide
  Seed: MVLSAFDERR
MLLSAFDERK

SEQ ID NO: 40062 - protein, 10 aa, Artificial Sequence
  Description of Artificial Sequence: Synthetic peptide
  Seed: MVLSAFDERR
MKLSAFDERR

SEQ ID NO: 40063 - protein, 10 aa, Artificial Sequence
  Description of Artificial Sequence: Synthetic peptide
  Seed: MVLSAFDERR
MMLSAFDERA

SEQ ID NO: 40064 - protein, 10 aa, Artificial Sequence
  Description of Artificial Sequence: Synthetic peptide
  Seed: MVLSAFDERR
MMLSAFDERR

SEQ ID NO: 40065 - protein, 10 aa, Artificial Sequence
  Description of Artificial Sequence: Synthetic peptide
  Seed: MVLSAFDERR
MMLSAFDERD

SEQ ID NO: 40066 - protein, 10 aa, Artificial Sequence
  Description of Artificial Sequence: Synthetic peptide
  Seed: MVLSAFDERR
MMLSAFDERP

SEQ ID NO: 40067 - protein, 10 aa, Artificial Sequence
  Description of Artificial Sequence: Synthetic peptide
  Seed: MVLSAFDERR
MMLSAFDERC

SEQ ID NO: 40068 - protein, 10 aa, Artificial Sequence
  Description of Artificial Sequence: Synthetic peptide
  Seed: MVLSAFDERR
MMLSAFDERQ

SEQ ID NO: 40069 - protein, 10 aa, Artificial Sequence
  Description of Artificial Sequence: Synthetic peptide
  Seed: MVLSAFDERR
MMLSAFDERE

SEQ ID NO: 40070 - protein, 10 aa, Artificial Sequence
  Description of Artificial Sequence: Synthetic peptide
  Seed: MVLSAFDERR
MMLSAFDERG

SEQ ID NO: 40071 - protein, 10 aa, Artificial Sequence
  Description of Artificial Sequence: Synthetic peptide
  Seed: MVLSAFDERR
MMLSAFDERH

SEQ ID NO: 40072 - protein, 10 aa, Artificial Sequence
  Description of Artificial Sequence: Synthetic peptide
  Seed: MVLSAFDERR
MMLSAFDERI

SEQ ID NO: 40073 - protein, 10 aa, Artificial Sequence
  Description of Artificial Sequence: Synthetic peptide
  Seed: MVLSAFDERR
MMLSAFDERL

SEQ ID NO: 40074 - protein, 10 aa, Artificial Sequence
  Description of Artificial Sequence: Synthetic peptide
  Seed: MVLSAFDERR
MMLSAFDERK

SEQ ID NO: 40075 - protein, 10 aa, Artificial Sequence
  Description of Artificial Sequence: Synthetic peptide
  Seed: MVLSAFDERR
MMLSAFDERM

SEQ ID NO: 40076 - protein, 10 aa, Artificial Sequence
  Description of Artificial Sequence: Synthetic peptide
  Seed: MVLSAFDERR
MGLSAFDERR

SEQ ID NO: 40077 - protein, 10 aa, Artificial Sequence
  Description of Artificial Sequence: Synthetic peptide
  Seed: MVLSAFDERR
MELSAFDERR

SEQ ID NO: 40078 - protein, 10 aa, Artificial Sequence
  Description of Artificial Sequence: Synthetic peptide
  Seed: MVLSAFDERR
MQLSAFDERK

SEQ ID NO: 40079 - protein, 10 aa, Artificial Sequence
  Description of Artificial Sequence: Synthetic peptide
  Seed: MVLSAFDERR
MQLSAFDERR

SEQ ID NO: 40080 - protein, 9 aa, Artificial Sequence
  Description of Artificial Sequence: Synthetic peptide
  Seed: MVLSAFDER
MPLSAFDEK

SEQ ID NO: 40081 - protein, 9 aa, Artificial Sequence
  Description of Artificial Sequence: Synthetic peptide
  Seed: MVLSAFDER
MSLSAFDER

SEQ ID NO: 40082 - protein, 9 aa, Artificial Sequence
  Description of Artificial Sequence: Synthetic peptide
  Seed: MVLSAFDER
MSLSAFDEK

SEQ ID NO: 40083 - protein, 9 aa, Artificial Sequence
  Description of Artificial Sequence: Synthetic peptide
  Seed: MVLSAFDER
MTLSAFDEK

SEQ ID NO: 40084 - protein, 9 aa, Artificial Sequence
  Description of Artificial Sequence: Synthetic peptide
  Seed: MVLSAFDER
MTLSAFDEY

SEQ ID NO: 40085 - protein, 9 aa, Artificial Sequence
  Description of Artificial Sequence: Synthetic peptide
  Seed: MVLSAFDER
MWLSAFDER

SEQ ID NO: 40086 - protein, 9 aa, Artificial Sequence
  Description of Artificial Sequence: Synthetic peptide
  Seed: MVLSAFDER
MWLSAFDEK

SEQ ID NO: 40087 - protein, 9 aa, Artificial Sequence
  Description of Artificial Sequence: Synthetic peptide
  Seed: MVLSAFDER
MYLSAFDEK

SEQ ID NO: 40088 - protein, 9 aa, Artificial Sequence
  Description of Artificial Sequence: Synthetic peptide
  Seed: MVLSAFDER
MVLSAFDEK

SEQ ID NO: 40089 - protein, 9 aa, Artificial Sequence
  Description of Artificial Sequence: Synthetic peptide
  Seed: MVLSAFDER
MVLSAFDEY

SEQ ID NO: 40090 - protein, 10 aa, Artificial Sequence
  Description of Artificial Sequence: Synthetic peptide
  Seed: MVLSAFDERR
MALSAFDERR

SEQ ID NO: 40091 - protein, 10 aa, Artificial Sequence
  Description of Artificial Sequence: Synthetic peptide
  Seed: MVLSAFDERR
MALSAFDERK

SEQ ID NO: 40092 - protein, 10 aa, Artificial Sequence
  Description of Artificial Sequence: Synthetic peptide
  Seed: MVLSAFDERR
MRLSAFDERR

SEQ ID NO: 40093 - protein, 10 aa, Artificial Sequence
  Description of Artificial Sequence: Synthetic peptide
  Seed: MVLSAFDERR
MNLSAFDERR

SEQ ID NO: 40094 - protein, 10 aa, Artificial Sequence
  Description of Artificial Sequence: Synthetic peptide
  Seed: MVLSAFDERR
MNLSAFDERK

SEQ ID NO: 40095 - protein, 10 aa, Artificial Sequence
  Description of Artificial Sequence: Synthetic peptide
  Seed: MVLSAFDERR
MDLSAFDERR

SEQ ID NO: 40096 - protein, 10 aa, Artificial Sequence
  Description of Artificial Sequence: Synthetic peptide
  Seed: MVLSAFDERR
MCLSAFDERR

SEQ ID NO: 40097 - protein, 10 aa, Artificial Sequence
  Description of Artificial Sequence: Synthetic peptide
  Seed: MVLSAFDERR
MMLSAFDERF

SEQ ID NO: 40098 - protein, 10 aa, Artificial Sequence
  Description of Artificial Sequence: Synthetic peptide
  Seed: MVLSAFDERR
MMLSAFDERS

SEQ ID NO: 40099 - protein, 10 aa, Artificial Sequence
  Description of Artificial Sequence: Synthetic peptide
  Seed: MVLSAFDERR
MVLSAFDERG

SEQ ID NO: 40100 - protein, 10 aa, Artificial Sequence
  Description of Artificial Sequence: Synthetic peptide
  Seed: MVLSAFDERR
MTLSAFDERY

SEQ ID NO: 40101 - protein, 10 aa, Artificial Sequence
  Description of Artificial Sequence: Synthetic peptide
  Seed: MVLSAFDERR
MTLSAFDERI

SEQ ID NO: 40102 - protein, 10 aa, Artificial Sequence
  Description of Artificial Sequence: Synthetic peptide
  Seed: MVLSAFDERR
MTLSAFDERL

SEQ ID NO: 40103 - protein, 10 aa, Artificial Sequence
  Description of Artificial Sequence: Synthetic peptide
  Seed: MVLSAFDERR
MTLSAFDERK

SEQ ID NO: 40104 - protein, 10 aa, Artificial Sequence
  Description of Artificial Sequence: Synthetic peptide
  Seed: MVLSAFDERR
MTLSAFDERM

SEQ ID NO: 40105 - protein, 10 aa, Artificial Sequence
  Description of Artificial Sequence: Synthetic peptide
  Seed: MVLSAFDERR
MTLSAFDERF

SEQ ID NO: 40106 - protein, 10 aa, Artificial Sequence
  Description of Artificial Sequence: Synthetic peptide
  Seed: MVLSAFDERR
MTLSAFDERP

SEQ ID NO: 40107 - protein, 10 aa, Artificial Sequence
  Description of Artificial Sequence: Synthetic peptide
  Seed: MVLSAFDERR
MTLSAFDERS

SEQ ID NO: 40108 - protein, 10 aa, Artificial Sequence
  Description of Artificial Sequence: Synthetic peptide
  Seed: MVLSAFDERR
MTLSAFDERT

SEQ ID NO: 40109 - protein, 10 aa, Artificial Sequence
  Description of Artificial Sequence: Synthetic peptide
  Seed: MVLSAFDERR
MTLSAFDERW

SEQ ID NO: 40110 - protein, 10 aa, Artificial Sequence
  Description of Artificial Sequence: Synthetic peptide
  Seed: MVLSAFDERR
MTLSAFDERV

SEQ ID NO: 40111 - protein, 10 aa, Artificial Sequence
  Description of Artificial Sequence: Synthetic peptide
  Seed: MVLSAFDERR
MMLSAFDERT

SEQ ID NO: 40112 - protein, 10 aa, Artificial Sequence
  Description of Artificial Sequence: Synthetic peptide
  Seed: MVLSAFDERR
MWLSAFDERR

SEQ ID NO: 40113 - protein, 10 aa, Artificial Sequence
  Description of Artificial Sequence: Synthetic peptide
  Seed: MVLSAFDERR
MWLSAFDERK

SEQ ID NO: 40114 - protein, 10 aa, Artificial Sequence
  Description of Artificial Sequence: Synthetic peptide
  Seed: MVLSAFDERR
MYLSAFDERR

SEQ ID NO: 40115 - protein, 10 aa, Artificial Sequence
  Description of Artificial Sequence: Synthetic peptide
  Seed: MVLSAFDERR
MYLSAFDERK

SEQ ID NO: 40116 - protein, 10 aa, Artificial Sequence
  Description of Artificial Sequence: Synthetic peptide
  Seed: MVLSAFDERR
MVLSAFDERA

SEQ ID NO: 40117 - protein, 10 aa, Artificial Sequence
  Description of Artificial Sequence: Synthetic peptide
  Seed: MVLSAFDERR
MVLSAFDERN

SEQ ID NO: 40118 - protein, 10 aa, Artificial Sequence
  Description of Artificial Sequence: Synthetic peptide
  Seed: MVLSAFDERR
MVLSAFDERD

SEQ ID NO: 40119 - protein, 10 aa, Artificial Sequence
  Description of Artificial Sequence: Synthetic peptide
  Seed: MVLSAFDERR
MVLSAFDERC

SEQ ID NO: 40120 - protein, 10 aa, Artificial Sequence
  Description of Artificial Sequence: Synthetic peptide
  Seed: MVLSAFDERR
MVLSAFDERQ

SEQ ID NO: 40121 - protein, 10 aa, Artificial Sequence
  Description of Artificial Sequence: Synthetic peptide
  Seed: MVLSAFDERR
MTLSAFDERH

SEQ ID NO: 40122 - protein, 10 aa, Artificial Sequence
  Description of Artificial Sequence: Synthetic peptide
  Seed: MVLSAFDERR
MTLSAFDERG

SEQ ID NO: 40123 - protein, 10 aa, Artificial Sequence
  Description of Artificial Sequence: Synthetic peptide
  Seed: MVLSAFDERR
MTLSAFDERE

SEQ ID NO: 40124 - protein, 10 aa, Artificial Sequence
  Description of Artificial Sequence: Synthetic peptide
  Seed: MVLSAFDERR
MTLSAFDERQ

SEQ ID NO: 40125 - protein, 10 aa, Artificial Sequence
  Description of Artificial Sequence: Synthetic peptide
  Seed: MVLSAFDERR
MMLSAFDERW

SEQ ID NO: 40126 - protein, 10 aa, Artificial Sequence
  Description of Artificial Sequence: Synthetic peptide
  Seed: MVLSAFDERR
MMLSAFDERY

SEQ ID NO: 40127 - protein, 10 aa, Artificial Sequence
  Description of Artificial Sequence: Synthetic peptide
  Seed: MVLSAFDERR
MMLSAFDERV

SEQ ID NO: 40128 - protein, 10 aa, Artificial Sequence
  Description of Artificial Sequence: Synthetic peptide
  Seed: MVLSAFDERR
MFLSAFDERR

SEQ ID NO: 40129 - protein, 10 aa, Artificial Sequence
  Description of Artificial Sequence: Synthetic peptide
  Seed: MVLSAFDERR
MFLSAFDERH

SEQ ID NO: 40130 - protein, 10 aa, Artificial Sequence
  Description of Artificial Sequence: Synthetic peptide
  Seed: MVLSAFDERR
MFLSAFDERL

SEQ ID NO: 40131 - protein, 10 aa, Artificial Sequence
  Description of Artificial Sequence: Synthetic peptide
  Seed: MVLSAFDERR
MFLSAFDERK

SEQ ID NO: 40132 - protein, 10 aa, Artificial Sequence
  Description of Artificial Sequence: Synthetic peptide
  Seed: MVLSAFDERR
MFLSAFDERM

SEQ ID NO: 40133 - protein, 10 aa, Artificial Sequence
  Description of Artificial Sequence: Synthetic peptide
  Seed: MVLSAFDERR
MFLSAFDERF

SEQ ID NO: 40134 - protein, 10 aa, Artificial Sequence
  Description of Artificial Sequence: Synthetic peptide
  Seed: MVLSAFDERR
MFLSAFDERY

SEQ ID NO: 40135 - protein, 10 aa, Artificial Sequence
  Description of Artificial Sequence: Synthetic peptide
  Seed: MVLSAFDERR
MPLSAFDERR

SEQ ID NO: 40136 - protein, 10 aa, Artificial Sequence
  Description of Artificial Sequence: Synthetic peptide
  Seed: MVLSAFDERR
MPLSAFDERK

SEQ ID NO: 40137 - protein, 10 aa, Artificial Sequence
  Description of Artificial Sequence: Synthetic peptide
  Seed: MVLSAFDERR
MSLSAFDERR

SEQ ID NO: 40138 - protein, 10 aa, Artificial Sequence
  Description of Artificial Sequence: Synthetic peptide
  Seed: MVLSAFDERR
MSLSAFDERK

SEQ ID NO: 40139 - protein, 10 aa, Artificial Sequence
  Description of Artificial Sequence: Synthetic peptide
  Seed: MVLSAFDERR
MTLSAFDERA

SEQ ID NO: 40140 - protein, 10 aa, Artificial Sequence
  Description of Artificial Sequence: Synthetic peptide
  Seed: MVLSAFDERR
MTLSAFDERR

SEQ ID NO: 40141 - protein, 10 aa, Artificial Sequence
  Description of Artificial Sequence: Synthetic peptide
  Seed: MVLSAFDERR
MTLSAFDERN

SEQ ID NO: 40142 - protein, 10 aa, Artificial Sequence
  Description of Artificial Sequence: Synthetic peptide
  Seed: MVLSAFDERR
MTLSAFDERD

SEQ ID NO: 40143 - protein, 10 aa, Artificial Sequence
  Description of Artificial Sequence: Synthetic peptide
  Seed: MVLSAFDERR
MTLSAFDERC

SEQ ID NO: 40144 - protein, 9 aa, Artificial Sequence
  Description of Artificial Sequence: Synthetic peptide
  Seed: MVLSAFDER
MPLSAFDER

SEQ ID NO: 40145 - protein, 9 aa, Artificial Sequence
  Description of Artificial Sequence: Synthetic peptide
  Seed: MVLSAFDER
MFLSAFDEK

SEQ ID NO: 40146 - protein, 9 aa, Artificial Sequence
  Description of Artificial Sequence: Synthetic peptide
  Seed: MVLSAFDER
MFLSAFDER

SEQ ID NO: 40147 - protein, 10 aa, Artificial Sequence
  Description of Artificial Sequence: Synthetic peptide
  Seed: MVGGIGRFYI
MIGGIGRFYA

SEQ ID NO: 40148 - protein, 10 aa, Artificial Sequence
  Description of Artificial Sequence: Synthetic peptide
  Seed: MVGGIGRFYI
MAGGIGRFYM

SEQ ID NO: 40149 - protein, 10 aa, Artificial Sequence
  Description of Artificial Sequence: Synthetic peptide
  Seed: MVGGIGRFYI
MAGGIGRFYV

SEQ ID NO: 40150 - protein, 10 aa, Artificial Sequence
  Description of Artificial Sequence: Synthetic peptide
  Seed: MVGGIGRFYI
MNGGIGRFYV

SEQ ID NO: 40151 - protein, 10 aa, Artificial Sequence
  Description of Artificial Sequence: Synthetic peptide
  Seed: MVGGIGRFYI
MQGGIGRFYA

SEQ ID NO: 40152 - protein, 10 aa, Artificial Sequence
  Description of Artificial Sequence: Synthetic peptide
  Seed: MVGGIGRFYI
MQGGIGRFYI

SEQ ID NO: 40153 - protein, 10 aa, Artificial Sequence
  Description of Artificial Sequence: Synthetic peptide
  Seed: MVGGIGRFYI
MQGGIGRFYL

SEQ ID NO: 40154 - protein, 10 aa, Artificial Sequence
  Description of Artificial Sequence: Synthetic peptide
  Seed: MVGGIGRFYI
MQGGIGRFYM

SEQ ID NO: 40155 - protein, 10 aa, Artificial Sequence
  Description of Artificial Sequence: Synthetic peptide
  Seed: MVGGIGRFYI
MQGGIGRFYV

SEQ ID NO: 40156 - protein, 10 aa, Artificial Sequence
  Description of Artificial Sequence: Synthetic peptide
  Seed: MVGGIGRFYI
MGGGIGRFYV

SEQ ID NO: 40157 - protein, 9 aa, Artificial Sequence
  Description of Artificial Sequence: Synthetic peptide
  Seed: MVLSAFDER
MMLSAFDEK

SEQ ID NO: 40158 - protein, 10 aa, Artificial Sequence
  Description of Artificial Sequence: Synthetic peptide
  Seed: MVGGIGRFYI
MIGGIGRFYL

SEQ ID NO: 40159 - protein, 10 aa, Artificial Sequence
  Description of Artificial Sequence: Synthetic peptide
  Seed: MVGGIGRFYI
MIGGIGRFYM

SEQ ID NO: 40160 - protein, 10 aa, Artificial Sequence
  Description of Artificial Sequence: Synthetic peptide
  Seed: MVGGIGRFYI
MIGGIGRFYV

SEQ ID NO: 40161 - protein, 10 aa, Artificial Sequence
  Description of Artificial Sequence: Synthetic peptide
  Seed: MVGGIGRFYI
MLGGIGRFYA

SEQ ID NO: 40162 - protein, 10 aa, Artificial Sequence
  Description of Artificial Sequence: Synthetic peptide
  Seed: MVGGIGRFYI
MLGGIGRFYC

SEQ ID NO: 40163 - protein, 10 aa, Artificial Sequence
  Description of Artificial Sequence: Synthetic peptide
  Seed: MVGGIGRFYI
MLGGIGRFYI

SEQ ID NO: 40164 - protein, 10 aa, Artificial Sequence
  Description of Artificial Sequence: Synthetic peptide
  Seed: MVGGIGRFYI
MLGGIGRFYL

SEQ ID NO: 40165 - protein, 10 aa, Artificial Sequence
  Description of Artificial Sequence: Synthetic peptide
  Seed: MVGGIGRFYI
MLGGIGRFYM

SEQ ID NO: 40166 - protein, 10 aa, Artificial Sequence
  Description of Artificial Sequence: Synthetic peptide
  Seed: MVGGIGRFYI
MLGGIGRFYF

SEQ ID NO: 40167 - protein, 10 aa, Artificial Sequence
  Description of Artificial Sequence: Synthetic peptide
  Seed: MVGGIGRFYI
MAGGIGRFYL

SEQ ID NO: 40168 - protein, 10 aa, Artificial Sequence
  Description of Artificial Sequence: Synthetic peptide
  Seed: MVGGIGRFYI
MAGGIGRFYI

SEQ ID NO: 40169 - protein, 10 aa, Artificial Sequence
  Description of Artificial Sequence: Synthetic peptide
  Seed: MVGGIGRFYI
MAGGIGRFYA

SEQ ID NO: 40170 - protein, 9 aa, Artificial Sequence
  Description of Artificial Sequence: Synthetic peptide
  Seed: MVGGIGRFY
MVGGIGRFW

SEQ ID NO: 40171 - protein, 9 aa, Artificial Sequence
  Description of Artificial Sequence: Synthetic peptide
  Seed: MVGGIGRFY
MSGGIGRFY

SEQ ID NO: 40172 - protein, 9 aa, Artificial Sequence
  Description of Artificial Sequence: Synthetic peptide
  Seed: MVGGIGRFY
MSGGIGRFV

SEQ ID NO: 40173 - protein, 9 aa, Artificial Sequence
  Description of Artificial Sequence: Synthetic peptide
  Seed: MVGGIGRFY
MTGGIGRFR

SEQ ID NO: 40174 - protein, 9 aa, Artificial Sequence
  Description of Artificial Sequence: Synthetic peptide
  Seed: MVGGIGRFY
MTGGIGRFI

SEQ ID NO: 40175 - protein, 9 aa, Artificial Sequence
  Description of Artificial Sequence: Synthetic peptide
  Seed: MVGGIGRFY
MTGGIGRFL

SEQ ID NO: 40176 - protein, 9 aa, Artificial Sequence
  Description of Artificial Sequence: Synthetic peptide
  Seed: MVGGIGRFY
MTGGIGRFK

SEQ ID NO: 40177 - protein, 9 aa, Artificial Sequence
  Description of Artificial Sequence: Synthetic peptide
  Seed: MVGGIGRFY
MTGGIGRFM

SEQ ID NO: 40178 - protein, 9 aa, Artificial Sequence
  Description of Artificial Sequence: Synthetic peptide
  Seed: MVGGIGRFY
MTGGIGRFF

SEQ ID NO: 40179 - protein, 9 aa, Artificial Sequence
  Description of Artificial Sequence: Synthetic peptide
  Seed: MVGGIGRFY
MTGGIGRFW

SEQ ID NO: 40180 - protein, 9 aa, Artificial Sequence
  Description of Artificial Sequence: Synthetic peptide
  Seed: MVGGIGRFY
MTGGIGRFY

SEQ ID NO: 40181 - protein, 9 aa, Artificial Sequence
  Description of Artificial Sequence: Synthetic peptide
  Seed: MVGGIGRFY
MTGGIGRFV

SEQ ID NO: 40182 - protein, 9 aa, Artificial Sequence
  Description of Artificial Sequence: Synthetic peptide
  Seed: MVGGIGRFY
MWGGIGRFF

SEQ ID NO: 40183 - protein, 9 aa, Artificial Sequence
  Description of Artificial Sequence: Synthetic peptide
  Seed: MVGGIGRFY
MWGGIGRFY

SEQ ID NO: 40184 - protein, 9 aa, Artificial Sequence
  Description of Artificial Sequence: Synthetic peptide
  Seed: MVGGIGRFY
MYGGIGRFF

SEQ ID NO: 40185 - protein, 9 aa, Artificial Sequence
  Description of Artificial Sequence: Synthetic peptide
  Seed: MVGGIGRFY
MYGGIGRFY

SEQ ID NO: 40186 - protein, 9 aa, Artificial Sequence
  Description of Artificial Sequence: Synthetic peptide
  Seed: MVGGIGRFY
MVGGIGRFR

SEQ ID NO: 40187 - protein, 9 aa, Artificial Sequence
  Description of Artificial Sequence: Synthetic peptide
  Seed: MVGGIGRFY
MVGGIGRFK

SEQ ID NO: 40188 - protein, 9 aa, Artificial Sequence
  Description of Artificial Sequence: Synthetic peptide
  Seed: MVGGIGRFY
MVGGIGRFM

SEQ ID NO: 40189 - protein, 9 aa, Artificial Sequence
  Description of Artificial Sequence: Synthetic peptide
  Seed: MVGGIGRFY
MVGGIGRFF

SEQ ID NO: 40190 - protein, 10 aa, Artificial Sequence
  Description of Artificial Sequence: Synthetic peptide
  Seed: MVGGIGRFYI
MLGGIGRFYS

SEQ ID NO: 40191 - protein, 10 aa, Artificial Sequence
  Description of Artificial Sequence: Synthetic peptide
  Seed: MVGGIGRFYI
MLGGIGRFYT

SEQ ID NO: 40192 - protein, 10 aa, Artificial Sequence
  Description of Artificial Sequence: Synthetic peptide
  Seed: MVGGIGRFYI
MLGGIGRFYV

SEQ ID NO: 40193 - protein, 10 aa, Artificial Sequence
  Description of Artificial Sequence: Synthetic peptide
  Seed: MVGGIGRFYI
MVGGIGRFYA

SEQ ID NO: 40194 - protein, 10 aa, Artificial Sequence
  Description of Artificial Sequence: Synthetic peptide
  Seed: MVGGIGRFYI
MVGGIGRFYM

SEQ ID NO: 40195 - protein, 10 aa, Artificial Sequence
  Description of Artificial Sequence: Synthetic peptide
  Seed: MVGGIGRFYI
MVGGIGRFYT

SEQ ID NO: 40196 - protein, 9 aa, Artificial Sequence
  Description of Artificial Sequence: Synthetic peptide
  Seed: MVLSAFDER
MALSAFDER

SEQ ID NO: 40197 - protein, 9 aa, Artificial Sequence
  Description of Artificial Sequence: Synthetic peptide
  Seed: MVLSAFDER
MALSAFDEK

SEQ ID NO: 40198 - protein, 9 aa, Artificial Sequence
  Description of Artificial Sequence: Synthetic peptide
  Seed: MVLSAFDER
MNLSAFDER

SEQ ID NO: 40199 - protein, 9 aa, Artificial Sequence
  Description of Artificial Sequence: Synthetic peptide
  Seed: MVLSAFDER
MNLSAFDEK

SEQ ID NO: 40200 - protein, 9 aa, Artificial Sequence
  Description of Artificial Sequence: Synthetic peptide
  Seed: MVLSAFDER
MCLSAFDER

SEQ ID NO: 40201 - protein, 9 aa, Artificial Sequence
  Description of Artificial Sequence: Synthetic peptide
  Seed: MVLSAFDER
MQLSAFDER

SEQ ID NO: 40202 - protein, 9 aa, Artificial Sequence
  Description of Artificial Sequence: Synthetic peptide
  Seed: MVLSAFDER
MQLSAFDEK

SEQ ID NO: 40203 - protein, 9 aa, Artificial Sequence
  Description of Artificial Sequence: Synthetic peptide
  Seed: MVLSAFDER
MGLSAFDER

SEQ ID NO: 40204 - protein, 9 aa, Artificial Sequence
  Description of Artificial Sequence: Synthetic peptide
  Seed: MVLSAFDER
MGLSAFDEK

SEQ ID NO: 40205 - protein, 9 aa, Artificial Sequence
  Description of Artificial Sequence: Synthetic peptide
  Seed: MVLSAFDER
MHLSAFDER

SEQ ID NO: 40206 - protein, 9 aa, Artificial Sequence
  Description of Artificial Sequence: Synthetic peptide
  Seed: MVLSAFDER
MILSAFDEK

SEQ ID NO: 40207 - protein, 9 aa, Artificial Sequence
  Description of Artificial Sequence: Synthetic peptide
  Seed: MVLSAFDER
MILSAFDEY

SEQ ID NO: 40208 - protein, 9 aa, Artificial Sequence
  Description of Artificial Sequence: Synthetic peptide
  Seed: MVLSAFDER
MLLSAFDER

SEQ ID NO: 40209 - protein, 9 aa, Artificial Sequence
  Description of Artificial Sequence: Synthetic peptide
  Seed: MVLSAFDER
MLLSAFDEK

SEQ ID NO: 40210 - protein, 9 aa, Artificial Sequence
  Description of Artificial Sequence: Synthetic peptide
  Seed: MVLSAFDER
MMLSAFDER

SEQ ID NO: 40211 - protein, 10 aa, Artificial Sequence
  Description of Artificial Sequence: Synthetic peptide
  Seed: MVGGIGRFYI
MVGGIGRFYL

SEQ ID NO: 40212 - protein, 10 aa, Artificial Sequence
  Description of Artificial Sequence: Synthetic peptide
  Seed: MVGGIGRFYI
MTGGIGRFYV

SEQ ID NO: 40213 - protein, 10 aa, Artificial Sequence
  Description of Artificial Sequence: Synthetic peptide
  Seed: MVGGIGRFYI
MMGGIGRFYA

SEQ ID NO: 40214 - protein, 10 aa, Artificial Sequence
  Description of Artificial Sequence: Synthetic peptide
  Seed: MVGGIGRFYI
MTGGIGRFYT

SEQ ID NO: 40215 - protein, 10 aa, Artificial Sequence
  Description of Artificial Sequence: Synthetic peptide
  Seed: MVGGIGRFYI
MMGGIGRFYC

SEQ ID NO: 40216 - protein, 10 aa, Artificial Sequence
  Description of Artificial Sequence: Synthetic peptide
  Seed: MVGGIGRFYI
MMGGIGRFYI

SEQ ID NO: 40217 - protein, 10 aa, Artificial Sequence
  Description of Artificial Sequence: Synthetic peptide
  Seed: MVGGIGRFYI
MMGGIGRFYL

SEQ ID NO: 40218 - protein, 10 aa, Artificial Sequence
  Description of Artificial Sequence: Synthetic peptide
  Seed: MVGGIGRFYI
MMGGIGRFYM

SEQ ID NO: 40219 - protein, 10 aa, Artificial Sequence
  Description of Artificial Sequence: Synthetic peptide
  Seed: MVGGIGRFYI
MMGGIGRFYF

SEQ ID NO: 40220 - protein, 10 aa, Artificial Sequence
  Description of Artificial Sequence: Synthetic peptide
  Seed: MVGGIGRFYI
MMGGIGRFYP

SEQ ID NO: 40221 - protein, 10 aa, Artificial Sequence
  Description of Artificial Sequence: Synthetic peptide
  Seed: MVGGIGRFYI
MMGGIGRFYS

SEQ ID NO: 40222 - protein, 10 aa, Artificial Sequence
  Description of Artificial Sequence: Synthetic peptide
  Seed: MVGGIGRFYI
MMGGIGRFYT

SEQ ID NO: 40223 - protein, 10 aa, Artificial Sequence
  Description of Artificial Sequence: Synthetic peptide
  Seed: MVGGIGRFYI
MMGGIGRFYV

SEQ ID NO: 40224 - protein, 10 aa, Artificial Sequence
  Description of Artificial Sequence: Synthetic peptide
  Seed: MVGGIGRFYI
MFGGIGRFYV

SEQ ID NO: 40225 - protein, 10 aa, Artificial Sequence
  Description of Artificial Sequence: Synthetic peptide
  Seed: MVGGIGRFYI
MPGGIGRFYV

SEQ ID NO: 40226 - protein, 10 aa, Artificial Sequence
  Description of Artificial Sequence: Synthetic peptide
  Seed: MVGGIGRFYI
MSGGIGRFYA

SEQ ID NO: 40227 - protein, 10 aa, Artificial Sequence
  Description of Artificial Sequence: Synthetic peptide
  Seed: MVGGIGRFYI
MSGGIGRFYI

SEQ ID NO: 40228 - protein, 10 aa, Artificial Sequence
  Description of Artificial Sequence: Synthetic peptide
  Seed: MVGGIGRFYI
MSGGIGRFYL

SEQ ID NO: 40229 - protein, 10 aa, Artificial Sequence
  Description of Artificial Sequence: Synthetic peptide
  Seed: MVGGIGRFYI
MSGGIGRFYV

SEQ ID NO: 40230 - protein, 10 aa, Artificial Sequence
  Description of Artificial Sequence: Synthetic peptide
  Seed: MVGGIGRFYI
MTGGIGRFYA

SEQ ID NO: 40231 - protein, 10 aa, Artificial Sequence
  Description of Artificial Sequence: Synthetic peptide
  Seed: MVGGIGRFYI
MTGGIGRFYI

SEQ ID NO: 40232 - protein, 10 aa, Artificial Sequence
  Description of Artificial Sequence: Synthetic peptide
  Seed: MVGGIGRFYI
MTGGIGRFYL

SEQ ID NO: 40233 - protein, 10 aa, Artificial Sequence
  Description of Artificial Sequence: Synthetic peptide
  Seed: MVGGIGRFYI
MTGGIGRFYM

SEQ ID NO: 40234 - protein, 10 aa, Artificial Sequence
  Description of Artificial Sequence: Synthetic peptide
  Seed: MVLSAFDERR
MVLSAFDERE

SEQ ID NO: 40235 - protein, 10 aa, Artificial Sequence
  Description of Artificial Sequence: Synthetic peptide
  Seed: MVLSAFDERR
MVLSAFDERH

SEQ ID NO: 40236 - protein, 9 aa, Artificial Sequence
  Description of Artificial Sequence: Synthetic peptide
  Seed: MVMELIRMI
MVMELIRMT

SEQ ID NO: 40237 - protein, 9 aa, Artificial Sequence
  Description of Artificial Sequence: Synthetic peptide
  Seed: MVMELIRMI
MFMELIRMI

SEQ ID NO: 40238 - protein, 9 aa, Artificial Sequence
  Description of Artificial Sequence: Synthetic peptide
  Seed: MVMELIRMI
MMMELIRMM

SEQ ID NO: 40239 - protein, 9 aa, Artificial Sequence
  Description of Artificial Sequence: Synthetic peptide
  Seed: MVMELIRMI
MMMELIRMF

SEQ ID NO: 40240 - protein, 9 aa, Artificial Sequence
  Description of Artificial Sequence: Synthetic peptide
  Seed: MVMELIRMI
MMMELIRMP

SEQ ID NO: 40241 - protein, 9 aa, Artificial Sequence
  Description of Artificial Sequence: Synthetic peptide
  Seed: MVMELIRMI
MMMELIRMS

SEQ ID NO: 40242 - protein, 9 aa, Artificial Sequence
  Description of Artificial Sequence: Synthetic peptide
  Seed: MVMELIRMI
MMMELIRMT

SEQ ID NO: 40243 - protein, 9 aa, Artificial Sequence
  Description of Artificial Sequence: Synthetic peptide
  Seed: MVMELIRMI
MMMELIRMW

SEQ ID NO: 40244 - protein, 9 aa, Artificial Sequence
  Description of Artificial Sequence: Synthetic peptide
  Seed: MVMELIRMI
MMMELIRMY

SEQ ID NO: 40245 - protein, 9 aa, Artificial Sequence
  Description of Artificial Sequence: Synthetic peptide
  Seed: MVMELIRMI
MMMELIRMV

SEQ ID NO: 40246 - protein, 9 aa, Artificial Sequence
  Description of Artificial Sequence: Synthetic peptide
  Seed: MVMELIRMI
MFMELIRMA

SEQ ID NO: 40247 - protein, 9 aa, Artificial Sequence
  Description of Artificial Sequence: Synthetic peptide
  Seed: MVMELIRMI
MFMELIRML

SEQ ID NO: 40248 - protein, 9 aa, Artificial Sequence
  Description of Artificial Sequence: Synthetic peptide
  Seed: MVMELIRMI
MPMELIRMV

SEQ ID NO: 40249 - protein, 9 aa, Artificial Sequence
  Description of Artificial Sequence: Synthetic peptide
  Seed: MVMELIRMI
MFMELIRMM

SEQ ID NO: 40250 - protein, 9 aa, Artificial Sequence
  Description of Artificial Sequence: Synthetic peptide
  Seed: MVMELIRMI
MFMELIRMF

SEQ ID NO: 40251 - protein, 9 aa, Artificial Sequence
  Description of Artificial Sequence: Synthetic peptide
  Seed: MVMELIRMI
MFMELIRMW

SEQ ID NO: 40252 - protein, 9 aa, Artificial Sequence
  Description of Artificial Sequence: Synthetic peptide
  Seed: MVMELIRMI
MFMELIRMY

SEQ ID NO: 40253 - protein, 9 aa, Artificial Sequence
  Description of Artificial Sequence: Synthetic peptide
  Seed: MVMELIRMI
MFMELIRMV

SEQ ID NO: 40254 - protein, 9 aa, Artificial Sequence
  Description of Artificial Sequence: Synthetic peptide
  Seed: MVMELIRMI
MPMELIRMI

SEQ ID NO: 40255 - protein, 9 aa, Artificial Sequence
  Description of Artificial Sequence: Synthetic peptide
  Seed: MVMELIRMI
MPMELIRML

SEQ ID NO: 40256 - protein, 9 aa, Artificial Sequence
  Description of Artificial Sequence: Synthetic peptide
  Seed: MVMELIRMI
MPMELIRMM

SEQ ID NO: 40257 - protein, 9 aa, Artificial Sequence
  Description of Artificial Sequence: Synthetic peptide
  Seed: MVMELIRMI
MPMELIRMF

SEQ ID NO: 40258 - protein, 9 aa, Artificial Sequence
  Description of Artificial Sequence: Synthetic peptide
  Seed: MVMELIRMI
MMMELIRMK

SEQ ID NO: 40259 - protein, 9 aa, Artificial Sequence
  Description of Artificial Sequence: Synthetic peptide
  Seed: MVMELIRMI
MMMELIRML

SEQ ID NO: 40260 - protein, 9 aa, Artificial Sequence
  Description of Artificial Sequence: Synthetic peptide
  Seed: MVMELIRMI
MMMELIRMI

SEQ ID NO: 40261 - protein, 9 aa, Artificial Sequence
  Description of Artificial Sequence: Synthetic peptide
  Seed: MVMELIRMI
MMMELIRMG

SEQ ID NO: 40262 - protein, 9 aa, Artificial Sequence
  Description of Artificial Sequence: Synthetic peptide
  Seed: MVMELIRMI
MLMELIRMM

SEQ ID NO: 40263 - protein, 9 aa, Artificial Sequence
  Description of Artificial Sequence: Synthetic peptide
  Seed: MVMELIRMI
MLMELIRMF

SEQ ID NO: 40264 - protein, 9 aa, Artificial Sequence
  Description of Artificial Sequence: Synthetic peptide
  Seed: MVMELIRMI
MLMELIRMP

SEQ ID NO: 40265 - protein, 9 aa, Artificial Sequence
  Description of Artificial Sequence: Synthetic peptide
  Seed: MVMELIRMI
MLMELIRMS

SEQ ID NO: 40266 - protein, 9 aa, Artificial Sequence
  Description of Artificial Sequence: Synthetic peptide
  Seed: MVMELIRMI
MLMELIRMT

SEQ ID NO: 40267 - protein, 9 aa, Artificial Sequence
  Description of Artificial Sequence: Synthetic peptide
  Seed: MVMELIRMI
MLMELIRMW

SEQ ID NO: 40268 - protein, 9 aa, Artificial Sequence
  Description of Artificial Sequence: Synthetic peptide
  Seed: MVMELIRMI
MLMELIRMY

SEQ ID NO: 40269 - protein, 9 aa, Artificial Sequence
  Description of Artificial Sequence: Synthetic peptide
  Seed: MVMELIRMI
MLMELIRMV

SEQ ID NO: 40270 - protein, 9 aa, Artificial Sequence
  Description of Artificial Sequence: Synthetic peptide
  Seed: MVMELIRMI
MKMELIRMI

SEQ ID NO: 40271 - protein, 9 aa, Artificial Sequence
  Description of Artificial Sequence: Synthetic peptide
  Seed: MVMELIRMI
MKMELIRML

SEQ ID NO: 40272 - protein, 9 aa, Artificial Sequence
  Description of Artificial Sequence: Synthetic peptide
  Seed: MVMELIRMI
MKMELIRMM

SEQ ID NO: 40273 - protein, 9 aa, Artificial Sequence
  Description of Artificial Sequence: Synthetic peptide
  Seed: MVMELIRMI
MKMELIRMF

SEQ ID NO: 40274 - protein, 9 aa, Artificial Sequence
  Description of Artificial Sequence: Synthetic peptide
  Seed: MVMELIRMI
MKMELIRMY

SEQ ID NO: 40275 - protein, 9 aa, Artificial Sequence
  Description of Artificial Sequence: Synthetic peptide
  Seed: MVMELIRMI
MKMELIRMV

SEQ ID NO: 40276 - protein, 9 aa, Artificial Sequence
  Description of Artificial Sequence: Synthetic peptide
  Seed: MVMELIRMI
MMMELIRMA

SEQ ID NO: 40277 - protein, 9 aa, Artificial Sequence
  Description of Artificial Sequence: Synthetic peptide
  Seed: MVMELIRMI
MMMELIRMR

SEQ ID NO: 40278 - protein, 9 aa, Artificial Sequence
  Description of Artificial Sequence: Synthetic peptide
  Seed: MVMELIRMI
MMMELIRMC

SEQ ID NO: 40279 - protein, 9 aa, Artificial Sequence
  Description of Artificial Sequence: Synthetic peptide
  Seed: MVMELIRMI
MMMELIRMQ

SEQ ID NO: 40280 - protein, 9 aa, Artificial Sequence
  Description of Artificial Sequence: Synthetic peptide
  Seed: MVMELIRMI
MMMELIRME

SEQ ID NO: 40281 - protein, 9 aa, Artificial Sequence
  Description of Artificial Sequence: Synthetic peptide
  Seed: MVMELIRMI
MPMELIRMY

SEQ ID NO: 40282 - protein, 9 aa, Artificial Sequence
  Description of Artificial Sequence: Synthetic peptide
  Seed: MVMELIRMI
MSMELIRMA

SEQ ID NO: 40283 - protein, 10 aa, Artificial Sequence
  Description of Artificial Sequence: Synthetic peptide
  Seed: MVLSAFDERR
MVLSAFDERI

SEQ ID NO: 40284 - protein, 9 aa, Artificial Sequence
  Description of Artificial Sequence: Synthetic peptide
  Seed: MVMELIRMI
MYMELIRMY

SEQ ID NO: 40285 - protein, 9 aa, Artificial Sequence
  Description of Artificial Sequence: Synthetic peptide
  Seed: MVMELIRMI
MTMELIRMV

SEQ ID NO: 40286 - protein, 9 aa, Artificial Sequence
  Description of Artificial Sequence: Synthetic peptide
  Seed: MVMELIRMI
MWMELIRMI

SEQ ID NO: 40287 - protein, 9 aa, Artificial Sequence
  Description of Artificial Sequence: Synthetic peptide
  Seed: MVMELIRMI
MWMELIRML

SEQ ID NO: 40288 - protein, 9 aa, Artificial Sequence
  Description of Artificial Sequence: Synthetic peptide
  Seed: MVMELIRMI
MWMELIRMV

SEQ ID NO: 40289 - protein, 9 aa, Artificial Sequence
  Description of Artificial Sequence: Synthetic peptide
  Seed: MVMELIRMI
MYMELIRMI

SEQ ID NO: 40290 - protein, 9 aa, Artificial Sequence
  Description of Artificial Sequence: Synthetic peptide
  Seed: MVMELIRMI
MYMELIRML

SEQ ID NO: 40291 - protein, 9 aa, Artificial Sequence
  Description of Artificial Sequence: Synthetic peptide
  Seed: MVMELIRMI
MYMELIRMM

SEQ ID NO: 40292 - protein, 9 aa, Artificial Sequence
  Description of Artificial Sequence: Synthetic peptide
  Seed: MVMELIRMI
MYMELIRMF

SEQ ID NO: 40293 - protein, 9 aa, Artificial Sequence
  Description of Artificial Sequence: Synthetic peptide
  Seed: MVMELIRMI
MYMELIRMW

SEQ ID NO: 40294 - protein, 9 aa, Artificial Sequence
  Description of Artificial Sequence: Synthetic peptide
  Seed: MVMELIRMI
MYMELIRMV

SEQ ID NO: 40295 - protein, 9 aa, Artificial Sequence
  Description of Artificial Sequence: Synthetic peptide
  Seed: MVMELIRMI
MSMELIRMR

SEQ ID NO: 40296 - protein, 9 aa, Artificial Sequence
  Description of Artificial Sequence: Synthetic peptide
  Seed: MVMELIRMI
MVMELIRMA

SEQ ID NO: 40297 - protein, 9 aa, Artificial Sequence
  Description of Artificial Sequence: Synthetic peptide
  Seed: MVMELIRMI
MVMELIRMR

SEQ ID NO: 40298 - protein, 9 aa, Artificial Sequence
  Description of Artificial Sequence: Synthetic peptide
  Seed: MVMELIRMI
MVMELIRMC

SEQ ID NO: 40299 - protein, 9 aa, Artificial Sequence
  Description of Artificial Sequence: Synthetic peptide
  Seed: MVMELIRMI
MVMELIRMH

SEQ ID NO: 40300 - protein, 9 aa, Artificial Sequence
  Description of Artificial Sequence: Synthetic peptide
  Seed: MVMELIRMI
MVMELIRML

SEQ ID NO: 40301 - protein, 9 aa, Artificial Sequence
  Description of Artificial Sequence: Synthetic peptide
  Seed: MVMELIRMI
MVMELIRMK

SEQ ID NO: 40302 - protein, 9 aa, Artificial Sequence
  Description of Artificial Sequence: Synthetic peptide
  Seed: MVMELIRMI
MVMELIRMM

SEQ ID NO: 40303 - protein, 9 aa, Artificial Sequence
  Description of Artificial Sequence: Synthetic peptide
  Seed: MVMELIRMI
MVMELIRMF

SEQ ID NO: 40304 - protein, 9 aa, Artificial Sequence
  Description of Artificial Sequence: Synthetic peptide
  Seed: MVMELIRMI
MVMELIRMS

SEQ ID NO: 40305 - protein, 9 aa, Artificial Sequence
  Description of Artificial Sequence: Synthetic peptide
  Seed: MVMELIRMI
MTMELIRMY

SEQ ID NO: 40306 - protein, 9 aa, Artificial Sequence
  Description of Artificial Sequence: Synthetic peptide
  Seed: MVMELIRMI
MTMELIRMW

SEQ ID NO: 40307 - protein, 9 aa, Artificial Sequence
  Description of Artificial Sequence: Synthetic peptide
  Seed: MVMELIRMI
MTMELIRMT

SEQ ID NO: 40308 - protein, 9 aa, Artificial Sequence
  Description of Artificial Sequence: Synthetic peptide
  Seed: MVMELIRMI
MTMELIRMS

SEQ ID NO: 40309 - protein, 9 aa, Artificial Sequence
  Description of Artificial Sequence: Synthetic peptide
  Seed: MVMELIRMI
MSMELIRMH

SEQ ID NO: 40310 - protein, 9 aa, Artificial Sequence
  Description of Artificial Sequence: Synthetic peptide
  Seed: MVMELIRMI
MSMELIRMI

SEQ ID NO: 40311 - protein, 9 aa, Artificial Sequence
  Description of Artificial Sequence: Synthetic peptide
  Seed: MVMELIRMI
MSMELIRML

SEQ ID NO: 40312 - protein, 9 aa, Artificial Sequence
  Description of Artificial Sequence: Synthetic peptide
  Seed: MVMELIRMI
MSMELIRMK

SEQ ID NO: 40313 - protein, 9 aa, Artificial Sequence
  Description of Artificial Sequence: Synthetic peptide
  Seed: MVMELIRMI
MSMELIRMM

SEQ ID NO: 40314 - protein, 9 aa, Artificial Sequence
  Description of Artificial Sequence: Synthetic peptide
  Seed: MVMELIRMI
MSMELIRMF

SEQ ID NO: 40315 - protein, 9 aa, Artificial Sequence
  Description of Artificial Sequence: Synthetic peptide
  Seed: MVMELIRMI
MSMELIRMT

SEQ ID NO: 40316 - protein, 9 aa, Artificial Sequence
  Description of Artificial Sequence: Synthetic peptide
  Seed: MVMELIRMI
MSMELIRMW

SEQ ID NO: 40317 - protein, 9 aa, Artificial Sequence
  Description of Artificial Sequence: Synthetic peptide
  Seed: MVMELIRMI
MSMELIRMY

SEQ ID NO: 40318 - protein, 9 aa, Artificial Sequence
  Description of Artificial Sequence: Synthetic peptide
  Seed: MVMELIRMI
MSMELIRMV

SEQ ID NO: 40319 - protein, 9 aa, Artificial Sequence
  Description of Artificial Sequence: Synthetic peptide
  Seed: MVMELIRMI
MTMELIRMA

SEQ ID NO: 40320 - protein, 9 aa, Artificial Sequence
  Description of Artificial Sequence: Synthetic peptide
  Seed: MVMELIRMI
MTMELIRMR

SEQ ID NO: 40321 - protein, 9 aa, Artificial Sequence
  Description of Artificial Sequence: Synthetic peptide
  Seed: MVMELIRMI
MTMELIRMC

SEQ ID NO: 40322 - protein, 9 aa, Artificial Sequence
  Description of Artificial Sequence: Synthetic peptide
  Seed: MVMELIRMI
MTMELIRMH

SEQ ID NO: 40323 - protein, 9 aa, Artificial Sequence
  Description of Artificial Sequence: Synthetic peptide
  Seed: MVMELIRMI
MTMELIRMI

SEQ ID NO: 40324 - protein, 9 aa, Artificial Sequence
  Description of Artificial Sequence: Synthetic peptide
  Seed: MVMELIRMI
MTMELIRML

SEQ ID NO: 40325 - protein, 9 aa, Artificial Sequence
  Description of Artificial Sequence: Synthetic peptide
  Seed: MVMELIRMI
MTMELIRMK

SEQ ID NO: 40326 - protein, 9 aa, Artificial Sequence
  Description of Artificial Sequence: Synthetic peptide
  Seed: MVMELIRMI
MTMELIRMM

SEQ ID NO: 40327 - protein, 9 aa, Artificial Sequence
  Description of Artificial Sequence: Synthetic peptide
  Seed: MVMELIRMI
MTMELIRMF

SEQ ID NO: 40328 - protein, 9 aa, Artificial Sequence
  Description of Artificial Sequence: Synthetic peptide
  Seed: MVMELIRMI
MLMELIRMK

SEQ ID NO: 40329 - protein, 9 aa, Artificial Sequence
  Description of Artificial Sequence: Synthetic peptide
  Seed: MVMELIRMI
MLMELIRML

SEQ ID NO: 40330 - protein, 9 aa, Artificial Sequence
  Description of Artificial Sequence: Synthetic peptide
  Seed: MVMELIRMI
MLMELIRMI

SEQ ID NO: 40331 - protein, 9 aa, Artificial Sequence
  Description of Artificial Sequence: Synthetic peptide
  Seed: MVMELIRMI
MRMELIRMA

SEQ ID NO: 40332 - protein, 9 aa, Artificial Sequence
  Description of Artificial Sequence: Synthetic peptide
  Seed: MVMELIRMI
MRMELIRMI

SEQ ID NO: 40333 - protein, 9 aa, Artificial Sequence
  Description of Artificial Sequence: Synthetic peptide
  Seed: MVMELIRMI
MRMELIRML

SEQ ID NO: 40334 - protein, 9 aa, Artificial Sequence
  Description of Artificial Sequence: Synthetic peptide
  Seed: MVMELIRMI
MRMELIRMM

SEQ ID NO: 40335 - protein, 9 aa, Artificial Sequence
  Description of Artificial Sequence: Synthetic peptide
  Seed: MVMELIRMI
MRMELIRMF

SEQ ID NO: 40336 - protein, 9 aa, Artificial Sequence
  Description of Artificial Sequence: Synthetic peptide
  Seed: MVMELIRMI
MRMELIRMT

SEQ ID NO: 40337 - protein, 9 aa, Artificial Sequence
  Description of Artificial Sequence: Synthetic peptide
  Seed: MVMELIRMI
MRMELIRMW

SEQ ID NO: 40338 - protein, 9 aa, Artificial Sequence
  Description of Artificial Sequence: Synthetic peptide
  Seed: MVMELIRMI
MRMELIRMY

SEQ ID NO: 40339 - protein, 9 aa, Artificial Sequence
  Description of Artificial Sequence: Synthetic peptide
  Seed: MVMELIRMI
MRMELIRMV

SEQ ID NO: 40340 - protein, 9 aa, Artificial Sequence
  Description of Artificial Sequence: Synthetic peptide
  Seed: MVMELIRMI
MNMELIRML

SEQ ID NO: 40341 - protein, 9 aa, Artificial Sequence
  Description of Artificial Sequence: Synthetic peptide
  Seed: MVMELIRMI
MLMELIRMG

SEQ ID NO: 40342 - protein, 9 aa, Artificial Sequence
  Description of Artificial Sequence: Synthetic peptide
  Seed: MVMELIRMI
MNMELIRMM

SEQ ID NO: 40343 - protein, 9 aa, Artificial Sequence
  Description of Artificial Sequence: Synthetic peptide
  Seed: MVMELIRMI
MNMELIRMF

SEQ ID NO: 40344 - protein, 9 aa, Artificial Sequence
  Description of Artificial Sequence: Synthetic peptide
  Seed: MVMELIRMI
MNMELIRMY

SEQ ID NO: 40345 - protein, 9 aa, Artificial Sequence
  Description of Artificial Sequence: Synthetic peptide
  Seed: MVMELIRMI
MNMELIRMV

SEQ ID NO: 40346 - protein, 9 aa, Artificial Sequence
  Description of Artificial Sequence: Synthetic peptide
  Seed: MVMELIRMI
MDMELIRMV

SEQ ID NO: 40347 - protein, 9 aa, Artificial Sequence
  Description of Artificial Sequence: Synthetic peptide
  Seed: MVMELIRMI
MCMELIRML

SEQ ID NO: 40348 - protein, 9 aa, Artificial Sequence
  Description of Artificial Sequence: Synthetic peptide
  Seed: MVMELIRMI
MCMELIRMM

SEQ ID NO: 40349 - protein, 9 aa, Artificial Sequence
  Description of Artificial Sequence: Synthetic peptide
  Seed: MVMELIRMI
MCMELIRMF

SEQ ID NO: 40350 - protein, 9 aa, Artificial Sequence
  Description of Artificial Sequence: Synthetic peptide
  Seed: MVMELIRMI
MCMELIRMY

SEQ ID NO: 40351 - protein, 9 aa, Artificial Sequence
  Description of Artificial Sequence: Synthetic peptide
  Seed: MVMELIRMI
MAMELIRMV

SEQ ID NO: 40352 - protein, 9 aa, Artificial Sequence
  Description of Artificial Sequence: Synthetic peptide
  Seed: MVMELIRMI
MAMELIRMY

SEQ ID NO: 40353 - protein, 9 aa, Artificial Sequence
  Description of Artificial Sequence: Synthetic peptide
  Seed: MVMELIRMI
MAMELIRMW

SEQ ID NO: 40354 - protein, 9 aa, Artificial Sequence
  Description of Artificial Sequence: Synthetic peptide
  Seed: MVMELIRMI
MAMELIRMT

SEQ ID NO: 40355 - protein, 10 aa, Artificial Sequence
  Description of Artificial Sequence: Synthetic peptide
  Seed: MVLSAFDERR
MVLSAFDERL

SEQ ID NO: 40356 - protein, 10 aa, Artificial Sequence
  Description of Artificial Sequence: Synthetic peptide
  Seed: MVLSAFDERR
MVLSAFDERK

SEQ ID NO: 40357 - protein, 10 aa, Artificial Sequence
  Description of Artificial Sequence: Synthetic peptide
  Seed: MVLSAFDERR
MVLSAFDERM

SEQ ID NO: 40358 - protein, 10 aa, Artificial Sequence
  Description of Artificial Sequence: Synthetic peptide
  Seed: MVLSAFDERR
MVLSAFDERF

SEQ ID NO: 40359 - protein, 10 aa, Artificial Sequence
  Description of Artificial Sequence: Synthetic peptide
  Seed: MVLSAFDERR
MVLSAFDERP

SEQ ID NO: 40360 - protein, 10 aa, Artificial Sequence
  Description of Artificial Sequence: Synthetic peptide
  Seed: MVLSAFDERR
MVLSAFDERS

SEQ ID NO: 40361 - protein, 10 aa, Artificial Sequence
  Description of Artificial Sequence: Synthetic peptide
  Seed: MVLSAFDERR
MVLSAFDERT

SEQ ID NO: 40362 - protein, 10 aa, Artificial Sequence
  Description of Artificial Sequence: Synthetic peptide
  Seed: MVLSAFDERR
MVLSAFDERW

SEQ ID NO: 40363 - protein, 10 aa, Artificial Sequence
  Description of Artificial Sequence: Synthetic peptide
  Seed: MVLSAFDERR
MVLSAFDERY

SEQ ID NO: 40364 - protein, 10 aa, Artificial Sequence
  Description of Artificial Sequence: Synthetic peptide
  Seed: MVLSAFDERR
MVLSAFDERV

SEQ ID NO: 40365 - protein, 9 aa, Artificial Sequence
  Description of Artificial Sequence: Synthetic peptide
  Seed: MVMELIRMI
MAMELIRMA

SEQ ID NO: 40366 - protein, 9 aa, Artificial Sequence
  Description of Artificial Sequence: Synthetic peptide
  Seed: MVMELIRMI
MAMELIRMR

SEQ ID NO: 40367 - protein, 9 aa, Artificial Sequence
  Description of Artificial Sequence: Synthetic peptide
  Seed: MVMELIRMI
MAMELIRMC

SEQ ID NO: 40368 - protein, 9 aa, Artificial Sequence
  Description of Artificial Sequence: Synthetic peptide
  Seed: MVMELIRMI
MAMELIRMH

SEQ ID NO: 40369 - protein, 9 aa, Artificial Sequence
  Description of Artificial Sequence: Synthetic peptide
  Seed: MVMELIRMI
MAMELIRMI

SEQ ID NO: 40370 - protein, 9 aa, Artificial Sequence
  Description of Artificial Sequence: Synthetic peptide
  Seed: MVMELIRMI
MAMELIRML

SEQ ID NO: 40371 - protein, 9 aa, Artificial Sequence
  Description of Artificial Sequence: Synthetic peptide
  Seed: MVMELIRMI
MAMELIRMK

SEQ ID NO: 40372 - protein, 9 aa, Artificial Sequence
  Description of Artificial Sequence: Synthetic peptide
  Seed: MVMELIRMI
MAMELIRMM

SEQ ID NO: 40373 - protein, 9 aa, Artificial Sequence
  Description of Artificial Sequence: Synthetic peptide
  Seed: MVMELIRMI
MAMELIRMF

SEQ ID NO: 40374 - protein, 9 aa, Artificial Sequence
  Description of Artificial Sequence: Synthetic peptide
  Seed: MVMELIRMI
MCMELIRMV

SEQ ID NO: 40375 - protein, 9 aa, Artificial Sequence
  Description of Artificial Sequence: Synthetic peptide
  Seed: MVMELIRMI
MQMELIRMA

SEQ ID NO: 40376 - protein, 9 aa, Artificial Sequence
  Description of Artificial Sequence: Synthetic peptide
  Seed: MVMELIRMI
MQMELIRMC

SEQ ID NO: 40377 - protein, 9 aa, Artificial Sequence
  Description of Artificial Sequence: Synthetic peptide
  Seed: MVMELIRMI
MHMELIRML

SEQ ID NO: 40378 - protein, 9 aa, Artificial Sequence
  Description of Artificial Sequence: Synthetic peptide
  Seed: MVMELIRMI
MHMELIRMV

SEQ ID NO: 40379 - protein, 9 aa, Artificial Sequence
  Description of Artificial Sequence: Synthetic peptide
  Seed: MVMELIRMI
MIMELIRMA

SEQ ID NO: 40380 - protein, 9 aa, Artificial Sequence
  Description of Artificial Sequence: Synthetic peptide
  Seed: MVMELIRMI
MIMELIRMR

SEQ ID NO: 40381 - protein, 9 aa, Artificial Sequence
  Description of Artificial Sequence: Synthetic peptide
  Seed: MVMELIRMI
MIMELIRMC

SEQ ID NO: 40382 - protein, 9 aa, Artificial Sequence
  Description of Artificial Sequence: Synthetic peptide
  Seed: MVMELIRMI
MIMELIRML

SEQ ID NO: 40383 - protein, 9 aa, Artificial Sequence
  Description of Artificial Sequence: Synthetic peptide
  Seed: MVMELIRMI
MIMELIRMK

SEQ ID NO: 40384 - protein, 9 aa, Artificial Sequence
  Description of Artificial Sequence: Synthetic peptide
  Seed: MVMELIRMI
MIMELIRMM

SEQ ID NO: 40385 - protein, 9 aa, Artificial Sequence
  Description of Artificial Sequence: Synthetic peptide
  Seed: MVMELIRMI
MIMELIRMF

SEQ ID NO: 40386 - protein, 9 aa, Artificial Sequence
  Description of Artificial Sequence: Synthetic peptide
  Seed: MVMELIRMI
MIMELIRMS

SEQ ID NO: 40387 - protein, 9 aa, Artificial Sequence
  Description of Artificial Sequence: Synthetic peptide
  Seed: MVMELIRMI
MIMELIRMT

SEQ ID NO: 40388 - protein, 9 aa, Artificial Sequence
  Description of Artificial Sequence: Synthetic peptide
  Seed: MVMELIRMI
MIMELIRMW

SEQ ID NO: 40389 - protein, 9 aa, Artificial Sequence
  Description of Artificial Sequence: Synthetic peptide
  Seed: MVMELIRMI
MIMELIRMY

SEQ ID NO: 40390 - protein, 9 aa, Artificial Sequence
  Description of Artificial Sequence: Synthetic peptide
  Seed: MVMELIRMI
MIMELIRMV

SEQ ID NO: 40391 - protein, 9 aa, Artificial Sequence
  Description of Artificial Sequence: Synthetic peptide
  Seed: MVMELIRMI
MLMELIRMA

SEQ ID NO: 40392 - protein, 9 aa, Artificial Sequence
  Description of Artificial Sequence: Synthetic peptide
  Seed: MVMELIRMI
MLMELIRMR

SEQ ID NO: 40393 - protein, 9 aa, Artificial Sequence
  Description of Artificial Sequence: Synthetic peptide
  Seed: MVMELIRMI
MLMELIRMC

SEQ ID NO: 40394 - protein, 9 aa, Artificial Sequence
  Description of Artificial Sequence: Synthetic peptide
  Seed: MVMELIRMI
MLMELIRMQ

SEQ ID NO: 40395 - protein, 9 aa, Artificial Sequence
  Description of Artificial Sequence: Synthetic peptide
  Seed: MVMELIRMI
MLMELIRME

SEQ ID NO: 40396 - protein, 9 aa, Artificial Sequence
  Description of Artificial Sequence: Synthetic peptide
  Seed: MVMELIRMI
MHMELIRMM

SEQ ID NO: 40397 - protein, 9 aa, Artificial Sequence
  Description of Artificial Sequence: Synthetic peptide
  Seed: MVMELIRMI
MHMELIRMI

SEQ ID NO: 40398 - protein, 9 aa, Artificial Sequence
  Description of Artificial Sequence: Synthetic peptide
  Seed: MVMELIRMI
MQMELIRME

SEQ ID NO: 40399 - protein, 9 aa, Artificial Sequence
  Description of Artificial Sequence: Synthetic peptide
  Seed: MVMELIRMI
MGMELIRMV

SEQ ID NO: 40400 - protein, 9 aa, Artificial Sequence
  Description of Artificial Sequence: Synthetic peptide
  Seed: MVMELIRMI
MQMELIRMG

SEQ ID NO: 40401 - protein, 9 aa, Artificial Sequence
  Description of Artificial Sequence: Synthetic peptide
  Seed: MVMELIRMI
MQMELIRMI

SEQ ID NO: 40402 - protein, 9 aa, Artificial Sequence
  Description of Artificial Sequence: Synthetic peptide
  Seed: MVMELIRMI
MQMELIRML

SEQ ID NO: 40403 - protein, 9 aa, Artificial Sequence
  Description of Artificial Sequence: Synthetic peptide
  Seed: MVMELIRMI
MQMELIRMM

SEQ ID NO: 40404 - protein, 9 aa, Artificial Sequence
  Description of Artificial Sequence: Synthetic peptide
  Seed: MVMELIRMI
MQMELIRMF

SEQ ID NO: 40405 - protein, 9 aa, Artificial Sequence
  Description of Artificial Sequence: Synthetic peptide
  Seed: MVMELIRMI
MQMELIRMP

SEQ ID NO: 40406 - protein, 9 aa, Artificial Sequence
  Description of Artificial Sequence: Synthetic peptide
  Seed: MVMELIRMI
MQMELIRMS

SEQ ID NO: 40407 - protein, 9 aa, Artificial Sequence
  Description of Artificial Sequence: Synthetic peptide
  Seed: MVMELIRMI
MQMELIRMT

SEQ ID NO: 40408 - protein, 9 aa, Artificial Sequence
  Description of Artificial Sequence: Synthetic peptide
  Seed: MVMELIRMI
MQMELIRMW

SEQ ID NO: 40409 - protein, 9 aa, Artificial Sequence
  Description of Artificial Sequence: Synthetic peptide
  Seed: MVMELIRMI
MQMELIRMY

SEQ ID NO: 40410 - protein, 9 aa, Artificial Sequence
  Description of Artificial Sequence: Synthetic peptide
  Seed: MVMELIRMI
MQMELIRMV

SEQ ID NO: 40411 - protein, 9 aa, Artificial Sequence
  Description of Artificial Sequence: Synthetic peptide
  Seed: MVMELIRMI
MEMELIRMI

SEQ ID NO: 40412 - protein, 9 aa, Artificial Sequence
  Description of Artificial Sequence: Synthetic peptide
  Seed: MVMELIRMI
MEMELIRML

SEQ ID NO: 40413 - protein, 9 aa, Artificial Sequence
  Description of Artificial Sequence: Synthetic peptide
  Seed: MVMELIRMI
MEMELIRMV

SEQ ID NO: 40414 - protein, 9 aa, Artificial Sequence
  Description of Artificial Sequence: Synthetic peptide
  Seed: MVMELIRMI
MGMELIRMI

SEQ ID NO: 40415 - protein, 9 aa, Artificial Sequence
  Description of Artificial Sequence: Synthetic peptide
  Seed: MVMELIRMI
MGMELIRML

SEQ ID NO: 40416 - protein, 9 aa, Artificial Sequence
  Description of Artificial Sequence: Synthetic peptide
  Seed: MVMELIRMI
MGMELIRMM

SEQ ID NO: 40417 - protein, 9 aa, Artificial Sequence
  Description of Artificial Sequence: Synthetic peptide
  Seed: MVMELIRMI
MGMELIRMF

SEQ ID NO: 40418 - protein, 9 aa, Artificial Sequence
  Description of Artificial Sequence: Synthetic peptide
  Seed: MVMELIRMI
MGMELIRMY

SEQ ID NO: 40419 - protein, 10 aa, Artificial Sequence
  Description of Artificial Sequence: Synthetic peptide
  Seed: NILKGKFQTA
NFLKGKFQTM

SEQ ID NO: 40420 - protein, 10 aa, Artificial Sequence
  Description of Artificial Sequence: Synthetic peptide
  Seed: NILKGKFQTA
NFLKGKFQTV

SEQ ID NO: 40421 - protein, 9 aa, Artificial Sequence
  Description of Artificial Sequence: Synthetic peptide
  Seed: NPIVPSFDM
NAIVPSFDY

SEQ ID NO: 40422 - protein, 10 aa, Artificial Sequence
  Description of Artificial Sequence: Synthetic peptide
  Seed: NPAHKSQLVW
NTAHKSQLVF

SEQ ID NO: 40423 - protein, 10 aa, Artificial Sequence
  Description of Artificial Sequence: Synthetic peptide
  Seed: NPAHKSQLVW
NTAHKSQLVY

SEQ ID NO: 40424 - protein, 10 aa, Artificial Sequence
  Description of Artificial Sequence: Synthetic peptide
  Seed: NPAHKSQLVW
NWAHKSQLVW

SEQ ID NO: 40425 - protein, 10 aa, Artificial Sequence
  Description of Artificial Sequence: Synthetic peptide
  Seed: NPAHKSQLVW
NYAHKSQLVF

SEQ ID NO: 40426 - protein, 10 aa, Artificial Sequence
  Description of Artificial Sequence: Synthetic peptide
  Seed: NPAHKSQLVW
NYAHKSQLVW

SEQ ID NO: 40427 - protein, 10 aa, Artificial Sequence
  Description of Artificial Sequence: Synthetic peptide
  Seed: NPAHKSQLVW
NVAHKSQLVW

SEQ ID NO: 40428 - protein, 9 aa, Artificial Sequence
  Description of Artificial Sequence: Synthetic peptide
  Seed: NPIVPSFDM
NAIVPSFDM

SEQ ID NO: 40429 - protein, 9 aa, Artificial Sequence
  Description of Artificial Sequence: Synthetic peptide
  Seed: NPIVPSFDM
NAIVPSFDF

SEQ ID NO: 40430 - protein, 9 aa, Artificial Sequence
  Description of Artificial Sequence: Synthetic peptide
  Seed: NPIVPSFDM
NCIVPSFDY

SEQ ID NO: 40431 - protein, 9 aa, Artificial Sequence
  Description of Artificial Sequence: Synthetic peptide
  Seed: NPIVPSFDM
NPIVPSFDW

SEQ ID NO: 40432 - protein, 9 aa, Artificial Sequence
  Description of Artificial Sequence: Synthetic peptide
  Seed: NPIVPSFDM
NGIVPSFDY

SEQ ID NO: 40433 - protein, 9 aa, Artificial Sequence
  Description of Artificial Sequence: Synthetic peptide
  Seed: NPIVPSFDM
NIIVPSFDF

SEQ ID NO: 40434 - protein, 9 aa, Artificial Sequence
  Description of Artificial Sequence: Synthetic peptide
  Seed: NPIVPSFDM
NIIVPSFDY

SEQ ID NO: 40435 - protein, 9 aa, Artificial Sequence
  Description of Artificial Sequence: Synthetic peptide
  Seed: NPIVPSFDM
NLIVPSFDY

SEQ ID NO: 40436 - protein, 9 aa, Artificial Sequence
  Description of Artificial Sequence: Synthetic peptide
  Seed: AAFEDLRLL
AAFEDLRLI

SEQ ID NO: 40437 - protein, 9 aa, Artificial Sequence
  Description of Artificial Sequence: Synthetic peptide
  Seed: NPIVPSFDM
NMIVPSFDY

SEQ ID NO: 40438 - protein, 9 aa, Artificial Sequence
  Description of Artificial Sequence: Synthetic peptide
  Seed: NPIVPSFDM
NPIVPSFDA

SEQ ID NO: 40439 - protein, 9 aa, Artificial Sequence
  Description of Artificial Sequence: Synthetic peptide
  Seed: NPIVPSFDM
NPIVPSFDI

SEQ ID NO: 40440 - protein, 9 aa, Artificial Sequence
  Description of Artificial Sequence: Synthetic peptide
  Seed: NPIVPSFDM
NPIVPSFDL

SEQ ID NO: 40441 - protein, 10 aa, Artificial Sequence
  Description of Artificial Sequence: Synthetic peptide
  Seed: NPAHKSQLVW
NSAHKSQLVY

SEQ ID NO: 40442 - protein, 10 aa, Artificial Sequence
  Description of Artificial Sequence: Synthetic peptide
  Seed: NPAHKSQLVW
NSAHKSQLVF

SEQ ID NO: 40443 - protein, 10 aa, Artificial Sequence
  Description of Artificial Sequence: Synthetic peptide
  Seed: NPAHKSQLVW
NFAHKSQLVW

SEQ ID NO: 40444 - protein, 9 aa, Artificial Sequence
  Description of Artificial Sequence: Synthetic peptide
  Seed: NPAHKSQLV
NTAHKSQLV

SEQ ID NO: 40445 - protein, 9 aa, Artificial Sequence
  Description of Artificial Sequence: Synthetic peptide
  Seed: NPAHKSQLV
NVAHKSQLI

SEQ ID NO: 40446 - protein, 9 aa, Artificial Sequence
  Description of Artificial Sequence: Synthetic peptide
  Seed: NPAHKSQLV
NVAHKSQLL

SEQ ID NO: 40447 - protein, 9 aa, Artificial Sequence
  Description of Artificial Sequence: Synthetic peptide
  Seed: NPAHKSQLV
NVAHKSQLV

SEQ ID NO: 40448 - protein, 10 aa, Artificial Sequence
  Description of Artificial Sequence: Synthetic peptide
  Seed: NPAHKSQLVW
NAAHKSQLVW

SEQ ID NO: 40449 - protein, 10 aa, Artificial Sequence
  Description of Artificial Sequence: Synthetic peptide
  Seed: NPAHKSQLVW
NRAHKSQLVF

SEQ ID NO: 40450 - protein, 10 aa, Artificial Sequence
  Description of Artificial Sequence: Synthetic peptide
  Seed: NPAHKSQLVW
NRAHKSQLVW

SEQ ID NO: 40451 - protein, 10 aa, Artificial Sequence
  Description of Artificial Sequence: Synthetic peptide
  Seed: NPAHKSQLVW
NNAHKSQLVW

SEQ ID NO: 40452 - protein, 10 aa, Artificial Sequence
  Description of Artificial Sequence: Synthetic peptide
  Seed: NPAHKSQLVW
NDAHKSQLVW

SEQ ID NO: 40453 - protein, 10 aa, Artificial Sequence
  Description of Artificial Sequence: Synthetic peptide
  Seed: NPAHKSQLVW
NCAHKSQLVW

SEQ ID NO: 40454 - protein, 10 aa, Artificial Sequence
  Description of Artificial Sequence: Synthetic peptide
  Seed: NPAHKSQLVW
NQAHKSQLVW

SEQ ID NO: 40455 - protein, 10 aa, Artificial Sequence
  Description of Artificial Sequence: Synthetic peptide
  Seed: NPAHKSQLVW
NEAHKSQLVW

SEQ ID NO: 40456 - protein, 10 aa, Artificial Sequence
  Description of Artificial Sequence: Synthetic peptide
  Seed: NPAHKSQLVW
NGAHKSQLVW

SEQ ID NO: 40457 - protein, 10 aa, Artificial Sequence
  Description of Artificial Sequence: Synthetic peptide
  Seed: NPAHKSQLVW
NHAHKSQLVW

SEQ ID NO: 40458 - protein, 10 aa, Artificial Sequence
  Description of Artificial Sequence: Synthetic peptide
  Seed: NPAHKSQLVW
NIAHKSQLVW

SEQ ID NO: 40459 - protein, 10 aa, Artificial Sequence
  Description of Artificial Sequence: Synthetic peptide
  Seed: NPAHKSQLVW
NLAHKSQLVW

SEQ ID NO: 40460 - protein, 10 aa, Artificial Sequence
  Description of Artificial Sequence: Synthetic peptide
  Seed: NPAHKSQLVW
NKAHKSQLVW

SEQ ID NO: 40461 - protein, 10 aa, Artificial Sequence
  Description of Artificial Sequence: Synthetic peptide
  Seed: NPAHKSQLVW
NMAHKSQLVF

SEQ ID NO: 40462 - protein, 10 aa, Artificial Sequence
  Description of Artificial Sequence: Synthetic peptide
  Seed: NPAHKSQLVW
NMAHKSQLVW

SEQ ID NO: 40463 - protein, 9 aa, Artificial Sequence
  Description of Artificial Sequence: Synthetic peptide
  Seed: NPIVPSFDM
NPIVPSFDF

SEQ ID NO: 40464 - protein, 9 aa, Artificial Sequence
  Description of Artificial Sequence: Synthetic peptide
  Seed: NPIVPSFDM
NPIVPSFDY

SEQ ID NO: 40465 - protein, 9 aa, Artificial Sequence
  Description of Artificial Sequence: Synthetic peptide
  Seed: NPAHKSQLV
NTAHKSQLF

SEQ ID NO: 40466 - protein, 9 aa, Artificial Sequence
  Description of Artificial Sequence: Synthetic peptide
  Seed: NSAAFEDLR
NNAAFEDLK

SEQ ID NO: 40467 - protein, 9 aa, Artificial Sequence
  Description of Artificial Sequence: Synthetic peptide
  Seed: NRYLEEHPS
NHYLEEHPV

SEQ ID NO: 40468 - protein, 9 aa, Artificial Sequence
  Description of Artificial Sequence: Synthetic peptide
  Seed: NRYLEEHPS
NKYLEEHPA

SEQ ID NO: 40469 - protein, 9 aa, Artificial Sequence
  Description of Artificial Sequence: Synthetic peptide
  Seed: NRYLEEHPS
NKYLEEHPV

SEQ ID NO: 40470 - protein, 10 aa, Artificial Sequence
  Description of Artificial Sequence: Synthetic peptide
  Seed: NRYLEEHPSA
NHYLEEHPSA

SEQ ID NO: 40471 - protein, 10 aa, Artificial Sequence
  Description of Artificial Sequence: Synthetic peptide
  Seed: NRYLEEHPSA
NHYLEEHPSV

SEQ ID NO: 40472 - protein, 9 aa, Artificial Sequence
  Description of Artificial Sequence: Synthetic peptide
  Seed: NSAAFEDLR
NAAAFEDLR

SEQ ID NO: 40473 - protein, 9 aa, Artificial Sequence
  Description of Artificial Sequence: Synthetic peptide
  Seed: NSAAFEDLR
NAAAFEDLK

SEQ ID NO: 40474 - protein, 9 aa, Artificial Sequence
  Description of Artificial Sequence: Synthetic peptide
  Seed: NSAAFEDLR
NAAAFEDLY

SEQ ID NO: 40475 - protein, 9 aa, Artificial Sequence
  Description of Artificial Sequence: Synthetic peptide
  Seed: NSAAFEDLR
NNAAFEDLR

SEQ ID NO: 40476 - protein, 9 aa, Artificial Sequence
  Description of Artificial Sequence: Synthetic peptide
  Seed: NSAAFEDLR
NCAAFEDLR

SEQ ID NO: 40477 - protein, 9 aa, Artificial Sequence
  Description of Artificial Sequence: Synthetic peptide
  Seed: NPIVPSFDM
NPIVPSFDV

SEQ ID NO: 40478 - protein, 9 aa, Artificial Sequence
  Description of Artificial Sequence: Synthetic peptide
  Seed: NSAAFEDLR
NQAAFEDLR

SEQ ID NO: 40479 - protein, 9 aa, Artificial Sequence
  Description of Artificial Sequence: Synthetic peptide
  Seed: NSAAFEDLR
NQAAFEDLK

SEQ ID NO: 40480 - protein, 9 aa, Artificial Sequence
  Description of Artificial Sequence: Synthetic peptide
  Seed: NSAAFEDLR
NGAAFEDLR

SEQ ID NO: 40481 - protein, 9 aa, Artificial Sequence
  Description of Artificial Sequence: Synthetic peptide
  Seed: NSAAFEDLR
NGAAFEDLK

SEQ ID NO: 40482 - protein, 9 aa, Artificial Sequence
  Description of Artificial Sequence: Synthetic peptide
  Seed: NSAAFEDLR
NIAAFEDLR

SEQ ID NO: 40483 - protein, 9 aa, Artificial Sequence
  Description of Artificial Sequence: Synthetic peptide
  Seed: NSAAFEDLR
NIAAFEDLK

SEQ ID NO: 40484 - protein, 9 aa, Artificial Sequence
  Description of Artificial Sequence: Synthetic peptide
  Seed: NSAAFEDLR
NIAAFEDLY

SEQ ID NO: 40485 - protein, 9 aa, Artificial Sequence
  Description of Artificial Sequence: Synthetic peptide
  Seed: NSAAFEDLR
NLAAFEDLR

SEQ ID NO: 40486 - protein, 9 aa, Artificial Sequence
  Description of Artificial Sequence: Synthetic peptide
  Seed: NSAAFEDLR
NLAAFEDLK

SEQ ID NO: 40487 - protein, 9 aa, Artificial Sequence
  Description of Artificial Sequence: Synthetic peptide
  Seed: NRYLEEHPS
NHYLEEHPT

SEQ ID NO: 40488 - protein, 9 aa, Artificial Sequence
  Description of Artificial Sequence: Synthetic peptide
  Seed: NRYLEEHPS
NHYLEEHPS

SEQ ID NO: 40489 - protein, 9 aa, Artificial Sequence
  Description of Artificial Sequence: Synthetic peptide
  Seed: NRYLEEHPS
NHYLEEHPP

SEQ ID NO: 40490 - protein, 9 aa, Artificial Sequence
  Description of Artificial Sequence: Synthetic peptide
  Seed: NRYLEEHPS
NHYLEEHPL

SEQ ID NO: 40491 - protein, 9 aa, Artificial Sequence
  Description of Artificial Sequence: Synthetic peptide
  Seed: NPIVPSFDM
NSIVPSFDF

SEQ ID NO: 40492 - protein, 9 aa, Artificial Sequence
  Description of Artificial Sequence: Synthetic peptide
  Seed: NPIVPSFDM
NSIVPSFDY

SEQ ID NO: 40493 - protein, 9 aa, Artificial Sequence
  Description of Artificial Sequence: Synthetic peptide
  Seed: NPIVPSFDM
NTIVPSFDY

SEQ ID NO: 40494 - protein, 9 aa, Artificial Sequence
  Description of Artificial Sequence: Synthetic peptide
  Seed: NPIVPSFDM
NVIVPSFDM

SEQ ID NO: 40495 - protein, 9 aa, Artificial Sequence
  Description of Artificial Sequence: Synthetic peptide
  Seed: NPIVPSFDM
NVIVPSFDF

SEQ ID NO: 40496 - protein, 9 aa, Artificial Sequence
  Description of Artificial Sequence: Synthetic peptide
  Seed: NPIVPSFDM
NVIVPSFDY

SEQ ID NO: 40497 - protein, 9 aa, Artificial Sequence
  Description of Artificial Sequence: Synthetic peptide
  Seed: NRYLEEHPS
NRYLEEHPA

SEQ ID NO: 40498 - protein, 9 aa, Artificial Sequence
  Description of Artificial Sequence: Synthetic peptide
  Seed: NRYLEEHPS
NRYLEEHPC

SEQ ID NO: 40499 - protein, 9 aa, Artificial Sequence
  Description of Artificial Sequence: Synthetic peptide
  Seed: NRYLEEHPS
NRYLEEHPI

SEQ ID NO: 40500 - protein, 9 aa, Artificial Sequence
  Description of Artificial Sequence: Synthetic peptide
  Seed: NRYLEEHPS
NRYLEEHPL

SEQ ID NO: 40501 - protein, 9 aa, Artificial Sequence
  Description of Artificial Sequence: Synthetic peptide
  Seed: NRYLEEHPS
NRYLEEHPM

SEQ ID NO: 40502 - protein, 9 aa, Artificial Sequence
  Description of Artificial Sequence: Synthetic peptide
  Seed: NRYLEEHPS
NRYLEEHPP

SEQ ID NO: 40503 - protein, 9 aa, Artificial Sequence
  Description of Artificial Sequence: Synthetic peptide
  Seed: NRYLEEHPS
NRYLEEHPT

SEQ ID NO: 40504 - protein, 9 aa, Artificial Sequence
  Description of Artificial Sequence: Synthetic peptide
  Seed: NRYLEEHPS
NRYLEEHPV

SEQ ID NO: 40505 - protein, 9 aa, Artificial Sequence
  Description of Artificial Sequence: Synthetic peptide
  Seed: NRYLEEHPS
NQYLEEHPA

SEQ ID NO: 40506 - protein, 9 aa, Artificial Sequence
  Description of Artificial Sequence: Synthetic peptide
  Seed: NRYLEEHPS
NQYLEEHPV

SEQ ID NO: 40507 - protein, 9 aa, Artificial Sequence
  Description of Artificial Sequence: Synthetic peptide
  Seed: NRYLEEHPS
NHYLEEHPA

SEQ ID NO: 40508 - protein, 9 aa, Artificial Sequence
  Description of Artificial Sequence: Synthetic peptide
  Seed: NRYLEEHPS
NHYLEEHPC

SEQ ID NO: 40509 - protein, 9 aa, Artificial Sequence
  Description of Artificial Sequence: Synthetic peptide
  Seed: NRYLEEHPS
NHYLEEHPI

SEQ ID NO: 40510 - protein, 9 aa, Artificial Sequence
  Description of Artificial Sequence: Synthetic peptide
  Seed: NPAHKSQLV
NTAHKSQLY

SEQ ID NO: 40511 - protein, 9 aa, Artificial Sequence
  Description of Artificial Sequence: Synthetic peptide
  Seed: NPAHKSQLV
NTAHKSQLM

SEQ ID NO: 40512 - protein, 10 aa, Artificial Sequence
  Description of Artificial Sequence: Synthetic peptide
  Seed: NILKGKFQTA
NPLKGKFQTA

SEQ ID NO: 40513 - protein, 10 aa, Artificial Sequence
  Description of Artificial Sequence: Synthetic peptide
  Seed: NLPFERATVM
NMPFERATVM

SEQ ID NO: 40514 - protein, 10 aa, Artificial Sequence
  Description of Artificial Sequence: Synthetic peptide
  Seed: NLPFERATVM
NKPFERATVI

SEQ ID NO: 40515 - protein, 10 aa, Artificial Sequence
  Description of Artificial Sequence: Synthetic peptide
  Seed: NLPFERATVM
NKPFERATVL

SEQ ID NO: 40516 - protein, 10 aa, Artificial Sequence
  Description of Artificial Sequence: Synthetic peptide
  Seed: NLPFERATVM
NKPFERATVM

SEQ ID NO: 40517 - protein, 10 aa, Artificial Sequence
  Description of Artificial Sequence: Synthetic peptide
  Seed: NLPFERATVM
NKPFERATVF

SEQ ID NO: 40518 - protein, 10 aa, Artificial Sequence
  Description of Artificial Sequence: Synthetic peptide
  Seed: NLPFERATVM
NKPFERATVY

SEQ ID NO: 40519 - protein, 10 aa, Artificial Sequence
  Description of Artificial Sequence: Synthetic peptide
  Seed: NLPFERATVM
NKPFERATVV

SEQ ID NO: 40520 - protein, 10 aa, Artificial Sequence
  Description of Artificial Sequence: Synthetic peptide
  Seed: NLPFERATVM
NMPFERATVA

SEQ ID NO: 40521 - protein, 10 aa, Artificial Sequence
  Description of Artificial Sequence: Synthetic peptide
  Seed: NLPFERATVM
NMPFERATVI

SEQ ID NO: 40522 - protein, 10 aa, Artificial Sequence
  Description of Artificial Sequence: Synthetic peptide
  Seed: NLPFERATVM
NMPFERATVL

SEQ ID NO: 40523 - protein, 10 aa, Artificial Sequence
  Description of Artificial Sequence: Synthetic peptide
  Seed: NLPFERATVM
NMPFERATVF

SEQ ID NO: 40524 - protein, 10 aa, Artificial Sequence
  Description of Artificial Sequence: Synthetic peptide
  Seed: NLPFERATVM
NPPFERATVI

SEQ ID NO: 40525 - protein, 10 aa, Artificial Sequence
  Description of Artificial Sequence: Synthetic peptide
  Seed: NLPFERATVM
NMPFERATVW

SEQ ID NO: 40526 - protein, 10 aa, Artificial Sequence
  Description of Artificial Sequence: Synthetic peptide
  Seed: NLPFERATVM
NMPFERATVY

SEQ ID NO: 40527 - protein, 10 aa, Artificial Sequence
  Description of Artificial Sequence: Synthetic peptide
  Seed: NLPFERATVM
NMPFERATVV

SEQ ID NO: 40528 - protein, 10 aa, Artificial Sequence
  Description of Artificial Sequence: Synthetic peptide
  Seed: NLPFERATVM
NFPFERATVI

SEQ ID NO: 40529 - protein, 10 aa, Artificial Sequence
  Description of Artificial Sequence: Synthetic peptide
  Seed: NLPFERATVM
NFPFERATVL

SEQ ID NO: 40530 - protein, 10 aa, Artificial Sequence
  Description of Artificial Sequence: Synthetic peptide
  Seed: NLPFERATVM
NFPFERATVM

SEQ ID NO: 40531 - protein, 10 aa, Artificial Sequence
  Description of Artificial Sequence: Synthetic peptide
  Seed: NLPFERATVM
NFPFERATVF

SEQ ID NO: 40532 - protein, 10 aa, Artificial Sequence
  Description of Artificial Sequence: Synthetic peptide
  Seed: NLPFERATVM
NFPFERATVW

SEQ ID NO: 40533 - protein, 10 aa, Artificial Sequence
  Description of Artificial Sequence: Synthetic peptide
  Seed: NLPFERATVM
NFPFERATVY

SEQ ID NO: 40534 - protein, 10 aa, Artificial Sequence
  Description of Artificial Sequence: Synthetic peptide
  Seed: NLPFERATVM
NLPFERATVV

SEQ ID NO: 40535 - protein, 10 aa, Artificial Sequence
  Description of Artificial Sequence: Synthetic peptide
  Seed: NLPFERATVM
NLPFERATVY

SEQ ID NO: 40536 - protein, 10 aa, Artificial Sequence
  Description of Artificial Sequence: Synthetic peptide
  Seed: NLPFERATVM
NLPFERATVF

SEQ ID NO: 40537 - protein, 10 aa, Artificial Sequence
  Description of Artificial Sequence: Synthetic peptide
  Seed: NLPFERATVM
NLPFERATVL

SEQ ID NO: 40538 - protein, 10 aa, Artificial Sequence
  Description of Artificial Sequence: Synthetic peptide
  Seed: NLPFERATVM
NGPFERATVI

SEQ ID NO: 40539 - protein, 10 aa, Artificial Sequence
  Description of Artificial Sequence: Synthetic peptide
  Seed: NLPFERATVM
NGPFERATVL

SEQ ID NO: 40540 - protein, 10 aa, Artificial Sequence
  Description of Artificial Sequence: Synthetic peptide
  Seed: NLPFERATVM
NGPFERATVM

SEQ ID NO: 40541 - protein, 10 aa, Artificial Sequence
  Description of Artificial Sequence: Synthetic peptide
  Seed: NLPFERATVM
NGPFERATVF

SEQ ID NO: 40542 - protein, 10 aa, Artificial Sequence
  Description of Artificial Sequence: Synthetic peptide
  Seed: NLPFERATVM
NGPFERATVY

SEQ ID NO: 40543 - protein, 10 aa, Artificial Sequence
  Description of Artificial Sequence: Synthetic peptide
  Seed: NLPFERATVM
NGPFERATVV

SEQ ID NO: 40544 - protein, 10 aa, Artificial Sequence
  Description of Artificial Sequence: Synthetic peptide
  Seed: NLPFERATVM
NHPFERATVI

SEQ ID NO: 40545 - protein, 10 aa, Artificial Sequence
  Description of Artificial Sequence: Synthetic peptide
  Seed: NLPFERATVM
NHPFERATVL

SEQ ID NO: 40546 - protein, 10 aa, Artificial Sequence
  Description of Artificial Sequence: Synthetic peptide
  Seed: NLPFERATVM
NHPFERATVM

SEQ ID NO: 40547 - protein, 10 aa, Artificial Sequence
  Description of Artificial Sequence: Synthetic peptide
  Seed: NLPFERATVM
NHPFERATVF

SEQ ID NO: 40548 - protein, 10 aa, Artificial Sequence
  Description of Artificial Sequence: Synthetic peptide
  Seed: NLPFERATVM
NHPFERATVY

SEQ ID NO: 40549 - protein, 10 aa, Artificial Sequence
  Description of Artificial Sequence: Synthetic peptide
  Seed: NLPFERATVM
NHPFERATVV

SEQ ID NO: 40550 - protein, 10 aa, Artificial Sequence
  Description of Artificial Sequence: Synthetic peptide
  Seed: NLPFERATVM
NIPFERATVI

SEQ ID NO: 40551 - protein, 10 aa, Artificial Sequence
  Description of Artificial Sequence: Synthetic peptide
  Seed: NLPFERATVM
NIPFERATVL

SEQ ID NO: 40552 - protein, 10 aa, Artificial Sequence
  Description of Artificial Sequence: Synthetic peptide
  Seed: NLPFERATVM
NIPFERATVM

SEQ ID NO: 40553 - protein, 10 aa, Artificial Sequence
  Description of Artificial Sequence: Synthetic peptide
  Seed: NLPFERATVM
NIPFERATVF

SEQ ID NO: 40554 - protein, 10 aa, Artificial Sequence
  Description of Artificial Sequence: Synthetic peptide
  Seed: NLPFERATVM
NIPFERATVY

SEQ ID NO: 40555 - protein, 10 aa, Artificial Sequence
  Description of Artificial Sequence: Synthetic peptide
  Seed: NLPFERATVM
NIPFERATVV

SEQ ID NO: 40556 - protein, 10 aa, Artificial Sequence
  Description of Artificial Sequence: Synthetic peptide
  Seed: NLPFERATVM
NLPFERATVI

SEQ ID NO: 40557 - protein, 10 aa, Artificial Sequence
  Description of Artificial Sequence: Synthetic peptide
  Seed: NLPFERATVM
NFPFERATVV

SEQ ID NO: 40558 - protein, 10 aa, Artificial Sequence
  Description of Artificial Sequence: Synthetic peptide
  Seed: NLPFERATVM
NPPFERATVL

SEQ ID NO: 40559 - protein, 9 aa, Artificial Sequence
  Description of Artificial Sequence: Synthetic peptide
  Seed: NPAHKSQLV
NTAHKSQLL

SEQ ID NO: 40560 - protein, 10 aa, Artificial Sequence
  Description of Artificial Sequence: Synthetic peptide
  Seed: NLPFERATVM
NVPFERATVV

SEQ ID NO: 40561 - protein, 10 aa, Artificial Sequence
  Description of Artificial Sequence: Synthetic peptide
  Seed: NLPFERATVM
NYPFERATVM

SEQ ID NO: 40562 - protein, 10 aa, Artificial Sequence
  Description of Artificial Sequence: Synthetic peptide
  Seed: NLPFERATVM
NYPFERATVF

SEQ ID NO: 40563 - protein, 10 aa, Artificial Sequence
  Description of Artificial Sequence: Synthetic peptide
  Seed: NLPFERATVM
NYPFERATVY

SEQ ID NO: 40564 - protein, 10 aa, Artificial Sequence
  Description of Artificial Sequence: Synthetic peptide
  Seed: NLPFERATVM
NYPFERATVV

SEQ ID NO: 40565 - protein, 10 aa, Artificial Sequence
  Description of Artificial Sequence: Synthetic peptide
  Seed: NLPFERATVM
NVPFERATVI

SEQ ID NO: 40566 - protein, 10 aa, Artificial Sequence
  Description of Artificial Sequence: Synthetic peptide
  Seed: NLPFERATVM
NVPFERATVL

SEQ ID NO: 40567 - protein, 10 aa, Artificial Sequence
  Description of Artificial Sequence: Synthetic peptide
  Seed: NLPFERATVM
NVPFERATVM

SEQ ID NO: 40568 - protein, 10 aa, Artificial Sequence
  Description of Artificial Sequence: Synthetic peptide
  Seed: NLPFERATVM
NVPFERATVF

SEQ ID NO: 40569 - protein, 10 aa, Artificial Sequence
  Description of Artificial Sequence: Synthetic peptide
  Seed: NLPFERATVM
NVPFERATVY

SEQ ID NO: 40570 - protein, 9 aa, Artificial Sequence
  Description of Artificial Sequence: Synthetic peptide
  Seed: NPAHKSQLV
NIAHKSQLV

SEQ ID NO: 40571 - protein, 10 aa, Artificial Sequence
  Description of Artificial Sequence: Synthetic peptide
  Seed: NLPFERATVM
NPPFERATVM

SEQ ID NO: 40572 - protein, 9 aa, Artificial Sequence
  Description of Artificial Sequence: Synthetic peptide
  Seed: NPAHKSQLV
NSAHKSQLI

SEQ ID NO: 40573 - protein, 9 aa, Artificial Sequence
  Description of Artificial Sequence: Synthetic peptide
  Seed: NPAHKSQLV
NSAHKSQLL

SEQ ID NO: 40574 - protein, 9 aa, Artificial Sequence
  Description of Artificial Sequence: Synthetic peptide
  Seed: NPAHKSQLV
NSAHKSQLM

SEQ ID NO: 40575 - protein, 9 aa, Artificial Sequence
  Description of Artificial Sequence: Synthetic peptide
  Seed: NPAHKSQLV
NSAHKSQLF

SEQ ID NO: 40576 - protein, 9 aa, Artificial Sequence
  Description of Artificial Sequence: Synthetic peptide
  Seed: NPAHKSQLV
NSAHKSQLY

SEQ ID NO: 40577 - protein, 9 aa, Artificial Sequence
  Description of Artificial Sequence: Synthetic peptide
  Seed: NPAHKSQLV
NTAHKSQLA

SEQ ID NO: 40578 - protein, 9 aa, Artificial Sequence
  Description of Artificial Sequence: Synthetic peptide
  Seed: NPAHKSQLV
NTAHKSQLI

SEQ ID NO: 40579 - protein, 10 aa, Artificial Sequence
  Description of Artificial Sequence: Synthetic peptide
  Seed: NLPFERATVM
NYPFERATVL

SEQ ID NO: 40580 - protein, 10 aa, Artificial Sequence
  Description of Artificial Sequence: Synthetic peptide
  Seed: NLPFERATVM
NYPFERATVI

SEQ ID NO: 40581 - protein, 10 aa, Artificial Sequence
  Description of Artificial Sequence: Synthetic peptide
  Seed: NLPFERATVM
NWPFERATVV

SEQ ID NO: 40582 - protein, 10 aa, Artificial Sequence
  Description of Artificial Sequence: Synthetic peptide
  Seed: NLPFERATVM
NWPFERATVY

SEQ ID NO: 40583 - protein, 10 aa, Artificial Sequence
  Description of Artificial Sequence: Synthetic peptide
  Seed: NLPFERATVM
NPPFERATVF

SEQ ID NO: 40584 - protein, 10 aa, Artificial Sequence
  Description of Artificial Sequence: Synthetic peptide
  Seed: NLPFERATVM
NPPFERATVY

SEQ ID NO: 40585 - protein, 10 aa, Artificial Sequence
  Description of Artificial Sequence: Synthetic peptide
  Seed: NLPFERATVM
NPPFERATVV

SEQ ID NO: 40586 - protein, 10 aa, Artificial Sequence
  Description of Artificial Sequence: Synthetic peptide
  Seed: NLPFERATVM
NSPFERATVI

SEQ ID NO: 40587 - protein, 10 aa, Artificial Sequence
  Description of Artificial Sequence: Synthetic peptide
  Seed: NLPFERATVM
NSPFERATVL

SEQ ID NO: 40588 - protein, 10 aa, Artificial Sequence
  Description of Artificial Sequence: Synthetic peptide
  Seed: NLPFERATVM
NSPFERATVM

SEQ ID NO: 40589 - protein, 10 aa, Artificial Sequence
  Description of Artificial Sequence: Synthetic peptide
  Seed: NLPFERATVM
NSPFERATVF

SEQ ID NO: 40590 - protein, 10 aa, Artificial Sequence
  Description of Artificial Sequence: Synthetic peptide
  Seed: NLPFERATVM
NSPFERATVY

SEQ ID NO: 40591 - protein, 10 aa, Artificial Sequence
  Description of Artificial Sequence: Synthetic peptide
  Seed: NLPFERATVM
NSPFERATVV

SEQ ID NO: 40592 - protein, 10 aa, Artificial Sequence
  Description of Artificial Sequence: Synthetic peptide
  Seed: NLPFERATVM
NTPFERATVI

SEQ ID NO: 40593 - protein, 10 aa, Artificial Sequence
  Description of Artificial Sequence: Synthetic peptide
  Seed: NLPFERATVM
NTPFERATVL

SEQ ID NO: 40594 - protein, 10 aa, Artificial Sequence
  Description of Artificial Sequence: Synthetic peptide
  Seed: NLPFERATVM
NTPFERATVM

SEQ ID NO: 40595 - protein, 10 aa, Artificial Sequence
  Description of Artificial Sequence: Synthetic peptide
  Seed: NLPFERATVM
NTPFERATVF

SEQ ID NO: 40596 - protein, 10 aa, Artificial Sequence
  Description of Artificial Sequence: Synthetic peptide
  Seed: NLPFERATVM
NTPFERATVY

SEQ ID NO: 40597 - protein, 10 aa, Artificial Sequence
  Description of Artificial Sequence: Synthetic peptide
  Seed: NLPFERATVM
NTPFERATVV

SEQ ID NO: 40598 - protein, 10 aa, Artificial Sequence
  Description of Artificial Sequence: Synthetic peptide
  Seed: NLPFERATVM
NWPFERATVI

SEQ ID NO: 40599 - protein, 10 aa, Artificial Sequence
  Description of Artificial Sequence: Synthetic peptide
  Seed: NLPFERATVM
NWPFERATVL

SEQ ID NO: 40600 - protein, 10 aa, Artificial Sequence
  Description of Artificial Sequence: Synthetic peptide
  Seed: NLPFERATVM
NWPFERATVM

SEQ ID NO: 40601 - protein, 10 aa, Artificial Sequence
  Description of Artificial Sequence: Synthetic peptide
  Seed: NLPFERATVM
NWPFERATVF

SEQ ID NO: 40602 - protein, 9 aa, Artificial Sequence
  Description of Artificial Sequence: Synthetic peptide
  Seed: NSAAFEDLR
NMAAFEDLR

SEQ ID NO: 40603 - protein, 9 aa, Artificial Sequence
  Description of Artificial Sequence: Synthetic peptide
  Seed: NSAAFEDLR
NMAAFEDLK

SEQ ID NO: 40604 - protein, 9 aa, Artificial Sequence
  Description of Artificial Sequence: Synthetic peptide
  Seed: NSAAFEDLR
NFAAFEDLR

SEQ ID NO: 40605 - protein, 10 aa, Artificial Sequence
  Description of Artificial Sequence: Synthetic peptide
  Seed: PFERATVMAA
PRERATVMAA

SEQ ID NO: 40606 - protein, 11 aa, Artificial Sequence
  Description of Artificial Sequence: Synthetic peptide
  Seed: PAVASGYDFEK
PRVASGYDFEK

SEQ ID NO: 40607 - protein, 11 aa, Artificial Sequence
  Description of Artificial Sequence: Synthetic peptide
  Seed: PAVASGYDFEK
PSVASGYDFEK

SEQ ID NO: 40608 - protein, 10 aa, Artificial Sequence
  Description of Artificial Sequence: Synthetic peptide
  Seed: PFERATIMAA
PAERATIMAA

SEQ ID NO: 40609 - protein, 10 aa, Artificial Sequence
  Description of Artificial Sequence: Synthetic peptide
  Seed: PFERATIMAA
PRERATIMAA

SEQ ID NO: 40610 - protein, 10 aa, Artificial Sequence
  Description of Artificial Sequence: Synthetic peptide
  Seed: PFERATIMAA
PMERATIMAA

SEQ ID NO: 40611 - protein, 10 aa, Artificial Sequence
  Description of Artificial Sequence: Synthetic peptide
  Seed: PFERATIMAA
PSERATIMAA

SEQ ID NO: 40612 - protein, 10 aa, Artificial Sequence
  Description of Artificial Sequence: Synthetic peptide
  Seed: PFERATIMAA
PWERATIMAA

SEQ ID NO: 40613 - protein, 10 aa, Artificial Sequence
  Description of Artificial Sequence: Synthetic peptide
  Seed: PFERATIMAA
PYERATIMAA

SEQ ID NO: 40614 - protein, 10 aa, Artificial Sequence
  Description of Artificial Sequence: Synthetic peptide
  Seed: PFERATVMAA
PAERATVMAA

SEQ ID NO: 40615 - protein, 10 aa, Artificial Sequence
  Description of Artificial Sequence: Synthetic peptide
  Seed: PFERATVMAA
PMERATVMAA

SEQ ID NO: 40616 - protein, 10 aa, Artificial Sequence
  Description of Artificial Sequence: Synthetic peptide
  Seed: QISIQPTFSV
QRSIQPTFSV

SEQ ID NO: 40617 - protein, 10 aa, Artificial Sequence
  Description of Artificial Sequence: Synthetic peptide
  Seed: PFERATVMAA
PSERATVMAA

SEQ ID NO: 40618 - protein, 10 aa, Artificial Sequence
  Description of Artificial Sequence: Synthetic peptide
  Seed: PFERATVMAA
PWERATVMAA

SEQ ID NO: 40619 - protein, 10 aa, Artificial Sequence
  Description of Artificial Sequence: Synthetic peptide
  Seed: PFERATVMAA
PYERATVMAA

SEQ ID NO: 40620 - protein, 10 aa, Artificial Sequence
  Description of Artificial Sequence: Synthetic peptide
  Seed: QANNGDDATR
QINNGDDATR

SEQ ID NO: 40621 - protein, 10 aa, Artificial Sequence
  Description of Artificial Sequence: Synthetic peptide
  Seed: QANNGDDATR
QSNNGDDATR

SEQ ID NO: 40622 - protein, 10 aa, Artificial Sequence
  Description of Artificial Sequence: Synthetic peptide
  Seed: QANNGDDATR
QTNNGDDATR

SEQ ID NO: 40623 - protein, 10 aa, Artificial Sequence
  Description of Artificial Sequence: Synthetic peptide
  Seed: QANNGDDATR
QTNNGDDATK

SEQ ID NO: 40624 - protein, 10 aa, Artificial Sequence
  Description of Artificial Sequence: Synthetic peptide
  Seed: QANNGDDATR
QVNNGDDATR

SEQ ID NO: 40625 - protein, 10 aa, Artificial Sequence
  Description of Artificial Sequence: Synthetic peptide
  Seed: QISIQPTFSV
QASIQPTFSI

SEQ ID NO: 40626 - protein, 9 aa, Artificial Sequence
  Description of Artificial Sequence: Synthetic peptide
  Seed: PAHKSQLVW
PTHKSQLVW

SEQ ID NO: 40627 - protein, 9 aa, Artificial Sequence
  Description of Artificial Sequence: Synthetic peptide
  Seed: PAHKSQLVW
PSHKSQLVW

SEQ ID NO: 40628 - protein, 9 aa, Artificial Sequence
  Description of Artificial Sequence: Synthetic peptide
  Seed: NTLELRSRY
NSLELRSRF

SEQ ID NO: 40629 - protein, 9 aa, Artificial Sequence
  Description of Artificial Sequence: Synthetic peptide
  Seed: NTLELRSRY
NSLELRSRW

SEQ ID NO: 40630 - protein, 9 aa, Artificial Sequence
  Description of Artificial Sequence: Synthetic peptide
  Seed: NTLELRSRY
NSLELRSRY

SEQ ID NO: 40631 - protein, 9 aa, Artificial Sequence
  Description of Artificial Sequence: Synthetic peptide
  Seed: NTLELRSRY
NTLELRSRR

SEQ ID NO: 40632 - protein, 9 aa, Artificial Sequence
  Description of Artificial Sequence: Synthetic peptide
  Seed: NTLELRSRY
NTLELRSRK

SEQ ID NO: 40633 - protein, 9 aa, Artificial Sequence
  Description of Artificial Sequence: Synthetic peptide
  Seed: NTLELRSRY
NTLELRSRF

SEQ ID NO: 40634 - protein, 9 aa, Artificial Sequence
  Description of Artificial Sequence: Synthetic peptide
  Seed: NTLELRSRY
NTLELRSRW

SEQ ID NO: 40635 - protein, 9 aa, Artificial Sequence
  Description of Artificial Sequence: Synthetic peptide
  Seed: NTLELRSRY
NWLELRSRY

SEQ ID NO: 40636 - protein, 9 aa, Artificial Sequence
  Description of Artificial Sequence: Synthetic peptide
  Seed: NTLELRSRY
NYLELRSRY

SEQ ID NO: 40637 - protein, 9 aa, Artificial Sequence
  Description of Artificial Sequence: Synthetic peptide
  Seed: NTLELRSRY
NVLELRSRR

SEQ ID NO: 40638 - protein, 9 aa, Artificial Sequence
  Description of Artificial Sequence: Synthetic peptide
  Seed: NTLELRSRY
NVLELRSRK

SEQ ID NO: 40639 - protein, 9 aa, Artificial Sequence
  Description of Artificial Sequence: Synthetic peptide
  Seed: NTLELRSRY
NVLELRSRW

SEQ ID NO: 40640 - protein, 9 aa, Artificial Sequence
  Description of Artificial Sequence: Synthetic peptide
  Seed: NTLELRSRY
NVLELRSRY

SEQ ID NO: 40641 - protein, 10 aa, Artificial Sequence
  Description of Artificial Sequence: Synthetic peptide
  Seed: NTLELRSRYW
NALELRSRYW

SEQ ID NO: 40642 - protein, 10 aa, Artificial Sequence
  Description of Artificial Sequence: Synthetic peptide
  Seed: NTLELRSRYW
NMLELRSRYW

SEQ ID NO: 40643 - protein, 10 aa, Artificial Sequence
  Description of Artificial Sequence: Synthetic peptide
  Seed: NTLELRSRYW
NSLELRSRYF

SEQ ID NO: 40644 - protein, 10 aa, Artificial Sequence
  Description of Artificial Sequence: Synthetic peptide
  Seed: NTLELRSRYW
NSLELRSRYW

SEQ ID NO: 40645 - protein, 10 aa, Artificial Sequence
  Description of Artificial Sequence: Synthetic peptide
  Seed: NTLELRSRYW
NTLELRSRYF

SEQ ID NO: 40646 - protein, 10 aa, Artificial Sequence
  Description of Artificial Sequence: Synthetic peptide
  Seed: NTLELRSRYW
NVLELRSRYW

SEQ ID NO: 40647 - protein, 10 aa, Artificial Sequence
  Description of Artificial Sequence: Synthetic peptide
  Seed: QISIQPTFSV
QASIQPTFSV

SEQ ID NO: 40648 - protein, 10 aa, Artificial Sequence
  Description of Artificial Sequence: Synthetic peptide
  Seed: QISIQPTFSV
QNSIQPTFSI

SEQ ID NO: 40649 - protein, 9 aa, Artificial Sequence
  Description of Artificial Sequence: Synthetic peptide
  Seed: NSAAFEDLR
NFAAFEDLK

SEQ ID NO: 40650 - protein, 10 aa, Artificial Sequence
  Description of Artificial Sequence: Synthetic peptide
  Seed: QISIQPTFSV
QYSIQPTFSI

SEQ ID NO: 40651 - protein, 10 aa, Artificial Sequence
  Description of Artificial Sequence: Synthetic peptide
  Seed: QISIQPTFSV
QFSIQPTFSV

SEQ ID NO: 40652 - protein, 10 aa, Artificial Sequence
  Description of Artificial Sequence: Synthetic peptide
  Seed: QISIQPTFSV
QPSIQPTFSV

SEQ ID NO: 40653 - protein, 10 aa, Artificial Sequence
  Description of Artificial Sequence: Synthetic peptide
  Seed: QISIQPTFSV
QSSIQPTFSV

SEQ ID NO: 40654 - protein, 10 aa, Artificial Sequence
  Description of Artificial Sequence: Synthetic peptide
  Seed: QISIQPTFSV
QTSIQPTFSA

SEQ ID NO: 40655 - protein, 10 aa, Artificial Sequence
  Description of Artificial Sequence: Synthetic peptide
  Seed: QISIQPTFSV
QTSIQPTFSI

SEQ ID NO: 40656 - protein, 10 aa, Artificial Sequence
  Description of Artificial Sequence: Synthetic peptide
  Seed: QISIQPTFSV
QTSIQPTFSL

SEQ ID NO: 40657 - protein, 10 aa, Artificial Sequence
  Description of Artificial Sequence: Synthetic peptide
  Seed: QISIQPTFSV
QTSIQPTFSM

SEQ ID NO: 40658 - protein, 10 aa, Artificial Sequence
  Description of Artificial Sequence: Synthetic peptide
  Seed: QISIQPTFSV
QTSIQPTFSV

SEQ ID NO: 40659 - protein, 10 aa, Artificial Sequence
  Description of Artificial Sequence: Synthetic peptide
  Seed: QISIQPTFSV
QWSIQPTFSV

SEQ ID NO: 40660 - protein, 10 aa, Artificial Sequence
  Description of Artificial Sequence: Synthetic peptide
  Seed: QISIQPTFSV
QYSIQPTFSV

SEQ ID NO: 40661 - protein, 10 aa, Artificial Sequence
  Description of Artificial Sequence: Synthetic peptide
  Seed: QISIQPTFSV
QNSIQPTFSV

SEQ ID NO: 40662 - protein, 10 aa, Artificial Sequence
  Description of Artificial Sequence: Synthetic peptide
  Seed: QISIQPTFSV
QVSIQPTFSA

SEQ ID NO: 40663 - protein, 10 aa, Artificial Sequence
  Description of Artificial Sequence: Synthetic peptide
  Seed: QISIQPTFSV
QVSIQPTFSI

SEQ ID NO: 40664 - protein, 10 aa, Artificial Sequence
  Description of Artificial Sequence: Synthetic peptide
  Seed: QISIQPTFSV
QVSIQPTFSL

SEQ ID NO: 40665 - protein, 10 aa, Artificial Sequence
  Description of Artificial Sequence: Synthetic peptide
  Seed: QISIQPTFSV
QVSIQPTFSV

SEQ ID NO: 40666 - protein, 10 aa, Artificial Sequence
  Description of Artificial Sequence: Synthetic peptide
  Seed: QISVQPTFSV
QASVQPTFSV

SEQ ID NO: 40667 - protein, 10 aa, Artificial Sequence
  Description of Artificial Sequence: Synthetic peptide
  Seed: QISVQPTFSV
QRSVQPTFSV

SEQ ID NO: 40668 - protein, 10 aa, Artificial Sequence
  Description of Artificial Sequence: Synthetic peptide
  Seed: QISVQPTFSV
QNSVQPTFSV

SEQ ID NO: 40669 - protein, 10 aa, Artificial Sequence
  Description of Artificial Sequence: Synthetic peptide
  Seed: QISVQPTFSV
QDSVQPTFSV

SEQ ID NO: 40670 - protein, 10 aa, Artificial Sequence
  Description of Artificial Sequence: Synthetic peptide
  Seed: QISVQPTFSV
QCSVQPTFSV

SEQ ID NO: 40671 - protein, 10 aa, Artificial Sequence
  Description of Artificial Sequence: Synthetic peptide
  Seed: QISIQPTFSV
QFSIQPTFSI

SEQ ID NO: 40672 - protein, 10 aa, Artificial Sequence
  Description of Artificial Sequence: Synthetic peptide
  Seed: QISIQPTFSV
QMSIQPTFSV

SEQ ID NO: 40673 - protein, 10 aa, Artificial Sequence
  Description of Artificial Sequence: Synthetic peptide
  Seed: QISIQPTFSV
QMSIQPTFSM

SEQ ID NO: 40674 - protein, 10 aa, Artificial Sequence
  Description of Artificial Sequence: Synthetic peptide
  Seed: QISIQPTFSV
QMSIQPTFSL

SEQ ID NO: 40675 - protein, 10 aa, Artificial Sequence
  Description of Artificial Sequence: Synthetic peptide
  Seed: QISIQPTFSV
QDSIQPTFSI

SEQ ID NO: 40676 - protein, 10 aa, Artificial Sequence
  Description of Artificial Sequence: Synthetic peptide
  Seed: QISIQPTFSV
QDSIQPTFSV

SEQ ID NO: 40677 - protein, 10 aa, Artificial Sequence
  Description of Artificial Sequence: Synthetic peptide
  Seed: QISIQPTFSV
QCSIQPTFSV

SEQ ID NO: 40678 - protein, 10 aa, Artificial Sequence
  Description of Artificial Sequence: Synthetic peptide
  Seed: QISIQPTFSV
QQSIQPTFSI

SEQ ID NO: 40679 - protein, 10 aa, Artificial Sequence
  Description of Artificial Sequence: Synthetic peptide
  Seed: QISIQPTFSV
QQSIQPTFSL

SEQ ID NO: 40680 - protein, 10 aa, Artificial Sequence
  Description of Artificial Sequence: Synthetic peptide
  Seed: QISIQPTFSV
QQSIQPTFSV

SEQ ID NO: 40681 - protein, 10 aa, Artificial Sequence
  Description of Artificial Sequence: Synthetic peptide
  Seed: QISIQPTFSV
QESIQPTFSI

SEQ ID NO: 40682 - protein, 10 aa, Artificial Sequence
  Description of Artificial Sequence: Synthetic peptide
  Seed: QISIQPTFSV
QESIQPTFSV

SEQ ID NO: 40683 - protein, 10 aa, Artificial Sequence
  Description of Artificial Sequence: Synthetic peptide
  Seed: QISIQPTFSV
QGSIQPTFSV

SEQ ID NO: 40684 - protein, 10 aa, Artificial Sequence
  Description of Artificial Sequence: Synthetic peptide
  Seed: QISIQPTFSV
QHSIQPTFSV

SEQ ID NO: 40685 - protein, 10 aa, Artificial Sequence
  Description of Artificial Sequence: Synthetic peptide
  Seed: QISIQPTFSV
QISIQPTFSI

SEQ ID NO: 40686 - protein, 10 aa, Artificial Sequence
  Description of Artificial Sequence: Synthetic peptide
  Seed: QISIQPTFSV
QLSIQPTFSA

SEQ ID NO: 40687 - protein, 10 aa, Artificial Sequence
  Description of Artificial Sequence: Synthetic peptide
  Seed: QISIQPTFSV
QLSIQPTFSI

SEQ ID NO: 40688 - protein, 10 aa, Artificial Sequence
  Description of Artificial Sequence: Synthetic peptide
  Seed: QISIQPTFSV
QLSIQPTFSL

SEQ ID NO: 40689 - protein, 10 aa, Artificial Sequence
  Description of Artificial Sequence: Synthetic peptide
  Seed: QISIQPTFSV
QLSIQPTFSM

SEQ ID NO: 40690 - protein, 10 aa, Artificial Sequence
  Description of Artificial Sequence: Synthetic peptide
  Seed: QISIQPTFSV
QLSIQPTFSV

SEQ ID NO: 40691 - protein, 10 aa, Artificial Sequence
  Description of Artificial Sequence: Synthetic peptide
  Seed: QISIQPTFSV
QKSIQPTFSV

SEQ ID NO: 40692 - protein, 10 aa, Artificial Sequence
  Description of Artificial Sequence: Synthetic peptide
  Seed: QISIQPTFSV
QMSIQPTFSA

SEQ ID NO: 40693 - protein, 10 aa, Artificial Sequence
  Description of Artificial Sequence: Synthetic peptide
  Seed: QISIQPTFSV
QMSIQPTFSI

SEQ ID NO: 40694 - protein, 9 aa, Artificial Sequence
  Description of Artificial Sequence: Synthetic peptide
  Seed: NTLELRSRY
NSLELRSRK

SEQ ID NO: 40695 - protein, 9 aa, Artificial Sequence
  Description of Artificial Sequence: Synthetic peptide
  Seed: NTLELRSRY
NSLELRSRR

SEQ ID NO: 40696 - protein, 9 aa, Artificial Sequence
  Description of Artificial Sequence: Synthetic peptide
  Seed: NTLELRSRY
NFLELRSRY

SEQ ID NO: 40697 - protein, 9 aa, Artificial Sequence
  Description of Artificial Sequence: Synthetic peptide
  Seed: NSITIERMV
NVITIERMI

SEQ ID NO: 40698 - protein, 10 aa, Artificial Sequence
  Description of Artificial Sequence: Synthetic peptide
  Seed: NSAAFEDLRV
NVAAFEDLRL

SEQ ID NO: 40699 - protein, 10 aa, Artificial Sequence
  Description of Artificial Sequence: Synthetic peptide
  Seed: NSAAFEDLRV
NVAAFEDLRV

SEQ ID NO: 40700 - protein, 9 aa, Artificial Sequence
  Description of Artificial Sequence: Synthetic peptide
  Seed: NSITIERMV
NAITIERMV

SEQ ID NO: 40701 - protein, 9 aa, Artificial Sequence
  Description of Artificial Sequence: Synthetic peptide
  Seed: NSITIERMV
NIITIERMV

SEQ ID NO: 40702 - protein, 9 aa, Artificial Sequence
  Description of Artificial Sequence: Synthetic peptide
  Seed: NSITIERMV
NTITIERMA

SEQ ID NO: 40703 - protein, 9 aa, Artificial Sequence
  Description of Artificial Sequence: Synthetic peptide
  Seed: NSITIERMV
NTITIERMI

SEQ ID NO: 40704 - protein, 9 aa, Artificial Sequence
  Description of Artificial Sequence: Synthetic peptide
  Seed: NSITIERMV
NTITIERML

SEQ ID NO: 40705 - protein, 9 aa, Artificial Sequence
  Description of Artificial Sequence: Synthetic peptide
  Seed: NSITIERMV
NTITIERMM

SEQ ID NO: 40706 - protein, 9 aa, Artificial Sequence
  Description of Artificial Sequence: Synthetic peptide
  Seed: NSITIERMV
NTITIERMV

SEQ ID NO: 40707 - protein, 9 aa, Artificial Sequence
  Description of Artificial Sequence: Synthetic peptide
  Seed: NSITIERMV
NVITIERMV

SEQ ID NO: 40708 - protein, 9 aa, Artificial Sequence
  Description of Artificial Sequence: Synthetic peptide
  Seed: NTLELRSRY
NMLELRSRY

SEQ ID NO: 40709 - protein, 9 aa, Artificial Sequence
  Description of Artificial Sequence: Synthetic peptide
  Seed: NSQVFSLIR
NAQVFSLIR

SEQ ID NO: 40710 - protein, 9 aa, Artificial Sequence
  Description of Artificial Sequence: Synthetic peptide
  Seed: NSQVFSLIR
NAQVFSLIK

SEQ ID NO: 40711 - protein, 9 aa, Artificial Sequence
  Description of Artificial Sequence: Synthetic peptide
  Seed: NSQVFSLIR
NNQVFSLIR

SEQ ID NO: 40712 - protein, 9 aa, Artificial Sequence
  Description of Artificial Sequence: Synthetic peptide
  Seed: NSQVFSLIR
NQQVFSLIR

SEQ ID NO: 40713 - protein, 9 aa, Artificial Sequence
  Description of Artificial Sequence: Synthetic peptide
  Seed: NSQVFSLIR
NGQVFSLIR

SEQ ID NO: 40714 - protein, 9 aa, Artificial Sequence
  Description of Artificial Sequence: Synthetic peptide
  Seed: NSQVFSLIR
NIQVFSLIR

SEQ ID NO: 40715 - protein, 9 aa, Artificial Sequence
  Description of Artificial Sequence: Synthetic peptide
  Seed: NSQVFSLIR
NIQVFSLIK

SEQ ID NO: 40716 - protein, 9 aa, Artificial Sequence
  Description of Artificial Sequence: Synthetic peptide
  Seed: NSQVFSLIR
NLQVFSLIR

SEQ ID NO: 40717 - protein, 9 aa, Artificial Sequence
  Description of Artificial Sequence: Synthetic peptide
  Seed: NSQVFSLIR
NLQVFSLIK

SEQ ID NO: 40718 - protein, 10 aa, Artificial Sequence
  Description of Artificial Sequence: Synthetic peptide
  Seed: NSAAFEDLRV
NVAAFEDLRI

SEQ ID NO: 40719 - protein, 10 aa, Artificial Sequence
  Description of Artificial Sequence: Synthetic peptide
  Seed: NSAAFEDLRV
NTAAFEDLRV

SEQ ID NO: 40720 - protein, 10 aa, Artificial Sequence
  Description of Artificial Sequence: Synthetic peptide
  Seed: NSAAFEDLRV
NTAAFEDLRM

SEQ ID NO: 40721 - protein, 10 aa, Artificial Sequence
  Description of Artificial Sequence: Synthetic peptide
  Seed: NSAAFEDLRV
NTAAFEDLRL

SEQ ID NO: 40722 - protein, 9 aa, Artificial Sequence
  Description of Artificial Sequence: Synthetic peptide
  Seed: NSAAFEDLR
NPAAFEDLR

SEQ ID NO: 40723 - protein, 9 aa, Artificial Sequence
  Description of Artificial Sequence: Synthetic peptide
  Seed: NSAAFEDLR
NPAAFEDLK

SEQ ID NO: 40724 - protein, 9 aa, Artificial Sequence
  Description of Artificial Sequence: Synthetic peptide
  Seed: NSAAFEDLR
NSAAFEDLK

SEQ ID NO: 40725 - protein, 9 aa, Artificial Sequence
  Description of Artificial Sequence: Synthetic peptide
  Seed: NSAAFEDLR
NSAAFEDLY

SEQ ID NO: 40726 - protein, 9 aa, Artificial Sequence
  Description of Artificial Sequence: Synthetic peptide
  Seed: NSAAFEDLR
NTAAFEDLR

SEQ ID NO: 40727 - protein, 9 aa, Artificial Sequence
  Description of Artificial Sequence: Synthetic peptide
  Seed: NSAAFEDLR
NTAAFEDLH

SEQ ID NO: 40728 - protein, 9 aa, Artificial Sequence
  Description of Artificial Sequence: Synthetic peptide
  Seed: NSAAFEDLR
NTAAFEDLK

SEQ ID NO: 40729 - protein, 9 aa, Artificial Sequence
  Description of Artificial Sequence: Synthetic peptide
  Seed: NSAAFEDLR
NTAAFEDLY

SEQ ID NO: 40730 - protein, 9 aa, Artificial Sequence
  Description of Artificial Sequence: Synthetic peptide
  Seed: NSAAFEDLR
NWAAFEDLR

SEQ ID NO: 40731 - protein, 9 aa, Artificial Sequence
  Description of Artificial Sequence: Synthetic peptide
  Seed: NSAAFEDLR
NYAAFEDLR

SEQ ID NO: 40732 - protein, 9 aa, Artificial Sequence
  Description of Artificial Sequence: Synthetic peptide
  Seed: NSAAFEDLR
NYAAFEDLK

SEQ ID NO: 40733 - protein, 9 aa, Artificial Sequence
  Description of Artificial Sequence: Synthetic peptide
  Seed: NSAAFEDLR
NVAAFEDLR

SEQ ID NO: 40734 - protein, 9 aa, Artificial Sequence
  Description of Artificial Sequence: Synthetic peptide
  Seed: NSAAFEDLR
NVAAFEDLK

SEQ ID NO: 40735 - protein, 9 aa, Artificial Sequence
  Description of Artificial Sequence: Synthetic peptide
  Seed: NSAAFEDLR
NVAAFEDLY

SEQ ID NO: 40736 - protein, 10 aa, Artificial Sequence
  Description of Artificial Sequence: Synthetic peptide
  Seed: NSAAFEDLRV
NAAAFEDLRV

SEQ ID NO: 40737 - protein, 10 aa, Artificial Sequence
  Description of Artificial Sequence: Synthetic peptide
  Seed: NSAAFEDLRV
NIAAFEDLRI

SEQ ID NO: 40738 - protein, 10 aa, Artificial Sequence
  Description of Artificial Sequence: Synthetic peptide
  Seed: NSAAFEDLRV
NIAAFEDLRV

SEQ ID NO: 40739 - protein, 10 aa, Artificial Sequence
  Description of Artificial Sequence: Synthetic peptide
  Seed: NSAAFEDLRV
NTAAFEDLRA

SEQ ID NO: 40740 - protein, 10 aa, Artificial Sequence
  Description of Artificial Sequence: Synthetic peptide
  Seed: NSAAFEDLRV
NTAAFEDLRI

SEQ ID NO: 40741 - protein, 9 aa, Artificial Sequence
  Description of Artificial Sequence: Synthetic peptide
  Seed: NSQVFSLIR
NMQVFSLIR

SEQ ID NO: 40742 - protein, 9 aa, Artificial Sequence
  Description of Artificial Sequence: Synthetic peptide
  Seed: NSQVFSLIR
NMQVFSLIK

SEQ ID NO: 40743 - protein, 9 aa, Artificial Sequence
  Description of Artificial Sequence: Synthetic peptide
  Seed: NSQVFSLIR
NFQVFSLIR

SEQ ID NO: 40744 - protein, 9 aa, Artificial Sequence
  Description of Artificial Sequence: Synthetic peptide
  Seed: NSQVYSLIR
NWQVYSLIR

SEQ ID NO: 40745 - protein, 9 aa, Artificial Sequence
  Description of Artificial Sequence: Synthetic peptide
  Seed: NSQVYSLIR
NYQVYSLIK

SEQ ID NO: 40746 - protein, 9 aa, Artificial Sequence
  Description of Artificial Sequence: Synthetic peptide
  Seed: NSQVYSLIR
NVQVYSLIR

SEQ ID NO: 40747 - protein, 9 aa, Artificial Sequence
  Description of Artificial Sequence: Synthetic peptide
  Seed: NSQVYSLIR
NVQVYSLIK

SEQ ID NO: 40748 - protein, 10 aa, Artificial Sequence
  Description of Artificial Sequence: Synthetic peptide
  Seed: NTEGRTSDMR
NVEGRTSDMR

SEQ ID NO: 40749 - protein, 8 aa, Artificial Sequence
  Description of Artificial Sequence: Synthetic peptide
  Seed: NTLELRSR
NFLELRSR

SEQ ID NO: 40750 - protein, 8 aa, Artificial Sequence
  Description of Artificial Sequence: Synthetic peptide
  Seed: NTLELRSR
NYLELRSR

SEQ ID NO: 40751 - protein, 9 aa, Artificial Sequence
  Description of Artificial Sequence: Synthetic peptide
  Seed: NTLELRSRY
NALELRSRR

SEQ ID NO: 40752 - protein, 9 aa, Artificial Sequence
  Description of Artificial Sequence: Synthetic peptide
  Seed: NTLELRSRY
NALELRSRK

SEQ ID NO: 40753 - protein, 9 aa, Artificial Sequence
  Description of Artificial Sequence: Synthetic peptide
  Seed: NTLELRSRY
NALELRSRW

SEQ ID NO: 40754 - protein, 9 aa, Artificial Sequence
  Description of Artificial Sequence: Synthetic peptide
  Seed: NTLELRSRY
NNLELRSRR

SEQ ID NO: 40755 - protein, 9 aa, Artificial Sequence
  Description of Artificial Sequence: Synthetic peptide
  Seed: NTLELRSRY
NQLELRSRY

SEQ ID NO: 40756 - protein, 9 aa, Artificial Sequence
  Description of Artificial Sequence: Synthetic peptide
  Seed: NTLELRSRY
NILELRSRR

SEQ ID NO: 40757 - protein, 9 aa, Artificial Sequence
  Description of Artificial Sequence: Synthetic peptide
  Seed: NTLELRSRY
NILELRSRK

SEQ ID NO: 40758 - protein, 9 aa, Artificial Sequence
  Description of Artificial Sequence: Synthetic peptide
  Seed: NTLELRSRY
NILELRSRY

SEQ ID NO: 40759 - protein, 9 aa, Artificial Sequence
  Description of Artificial Sequence: Synthetic peptide
  Seed: NTLELRSRY
NLLELRSRR

SEQ ID NO: 40760 - protein, 9 aa, Artificial Sequence
  Description of Artificial Sequence: Synthetic peptide
  Seed: NTLELRSRY
NLLELRSRK

SEQ ID NO: 40761 - protein, 9 aa, Artificial Sequence
  Description of Artificial Sequence: Synthetic peptide
  Seed: NTLELRSRY
NLLELRSRY

SEQ ID NO: 40762 - protein, 9 aa, Artificial Sequence
  Description of Artificial Sequence: Synthetic peptide
  Seed: NTLELRSRY
NMLELRSRR

SEQ ID NO: 40763 - protein, 9 aa, Artificial Sequence
  Description of Artificial Sequence: Synthetic peptide
  Seed: NTLELRSRY
NMLELRSRK

SEQ ID NO: 40764 - protein, 9 aa, Artificial Sequence
  Description of Artificial Sequence: Synthetic peptide
  Seed: NSQVYSLIR
NYQVYSLIR

SEQ ID NO: 40765 - protein, 9 aa, Artificial Sequence
  Description of Artificial Sequence: Synthetic peptide
  Seed: NSQVYSLIR
NTQVYSLIK

SEQ ID NO: 40766 - protein, 9 aa, Artificial Sequence
  Description of Artificial Sequence: Synthetic peptide
  Seed: NSQVFSLIR
NFQVFSLIK

SEQ ID NO: 40767 - protein, 9 aa, Artificial Sequence
  Description of Artificial Sequence: Synthetic peptide
  Seed: NSQVYSLIR
NTQVYSLIR

SEQ ID NO: 40768 - protein, 9 aa, Artificial Sequence
  Description of Artificial Sequence: Synthetic peptide
  Seed: NSQVFSLIR
NSQVFSLIK

SEQ ID NO: 40769 - protein, 9 aa, Artificial Sequence
  Description of Artificial Sequence: Synthetic peptide
  Seed: NSQVFSLIR
NTQVFSLIR

SEQ ID NO: 40770 - protein, 9 aa, Artificial Sequence
  Description of Artificial Sequence: Synthetic peptide
  Seed: NSQVFSLIR
NTQVFSLIK

SEQ ID NO: 40771 - protein, 9 aa, Artificial Sequence
  Description of Artificial Sequence: Synthetic peptide
  Seed: NSQVFSLIR
NTQVFSLIY

SEQ ID NO: 40772 - protein, 9 aa, Artificial Sequence
  Description of Artificial Sequence: Synthetic peptide
  Seed: NSQVFSLIR
NWQVFSLIR

SEQ ID NO: 40773 - protein, 9 aa, Artificial Sequence
  Description of Artificial Sequence: Synthetic peptide
  Seed: NSQVFSLIR
NWQVFSLIK

SEQ ID NO: 40774 - protein, 9 aa, Artificial Sequence
  Description of Artificial Sequence: Synthetic peptide
  Seed: NSQVFSLIR
NYQVFSLIR

SEQ ID NO: 40775 - protein, 9 aa, Artificial Sequence
  Description of Artificial Sequence: Synthetic peptide
  Seed: NSQVFSLIR
NYQVFSLIK

SEQ ID NO: 40776 - protein, 9 aa, Artificial Sequence
  Description of Artificial Sequence: Synthetic peptide
  Seed: NSQVFSLIR
NVQVFSLIR

SEQ ID NO: 40777 - protein, 9 aa, Artificial Sequence
  Description of Artificial Sequence: Synthetic peptide
  Seed: NSQVFSLIR
NVQVFSLIK

SEQ ID NO: 40778 - protein, 9 aa, Artificial Sequence
  Description of Artificial Sequence: Synthetic peptide
  Seed: NSQVFSLIR
NVQVFSLIY

SEQ ID NO: 40779 - protein, 9 aa, Artificial Sequence
  Description of Artificial Sequence: Synthetic peptide
  Seed: NSQVYSLIR
NAQVYSLIR

SEQ ID NO: 40780 - protein, 9 aa, Artificial Sequence
  Description of Artificial Sequence: Synthetic peptide
  Seed: NSQVYSLIR
NQQVYSLIR

SEQ ID NO: 40781 - protein, 9 aa, Artificial Sequence
  Description of Artificial Sequence: Synthetic peptide
  Seed: NSQVYSLIR
NIQVYSLIR

SEQ ID NO: 40782 - protein, 9 aa, Artificial Sequence
  Description of Artificial Sequence: Synthetic peptide
  Seed: NSQVYSLIR
NLQVYSLIR

SEQ ID NO: 40783 - protein, 9 aa, Artificial Sequence
  Description of Artificial Sequence: Synthetic peptide
  Seed: NSQVYSLIR
NMQVYSLIR

SEQ ID NO: 40784 - protein, 9 aa, Artificial Sequence
  Description of Artificial Sequence: Synthetic peptide
  Seed: NSQVYSLIR
NMQVYSLIK

SEQ ID NO: 40785 - protein, 9 aa, Artificial Sequence
  Description of Artificial Sequence: Synthetic peptide
  Seed: NSQVYSLIR
NFQVYSLIR

SEQ ID NO: 40786 - protein, 9 aa, Artificial Sequence
  Description of Artificial Sequence: Synthetic peptide
  Seed: NSQVYSLIR
NFQVYSLIK

SEQ ID NO: 40787 - protein, 10 aa, Artificial Sequence
  Description of Artificial Sequence: Synthetic peptide
  Seed: NLPFERATVM
NEPFERATVV

SEQ ID NO: 40788 - protein, 10 aa, Artificial Sequence
  Description of Artificial Sequence: Synthetic peptide
  Seed: NLPFERATVM
NEPFERATVY

SEQ ID NO: 40789 - protein, 10 aa, Artificial Sequence
  Description of Artificial Sequence: Synthetic peptide
  Seed: NLPFERATVM
NEPFERATVF

SEQ ID NO: 40790 - protein, 10 aa, Artificial Sequence
  Description of Artificial Sequence: Synthetic peptide
  Seed: NLPFEKSTVM
NNPFEKSTVM

SEQ ID NO: 40791 - protein, 10 aa, Artificial Sequence
  Description of Artificial Sequence: Synthetic peptide
  Seed: NLPFEKSTVM
NAPFEKSTVV

SEQ ID NO: 40792 - protein, 10 aa, Artificial Sequence
  Description of Artificial Sequence: Synthetic peptide
  Seed: NLPFEKSTVM
NRPFEKSTVI

SEQ ID NO: 40793 - protein, 10 aa, Artificial Sequence
  Description of Artificial Sequence: Synthetic peptide
  Seed: NLPFEKSTVM
NRPFEKSTVL

SEQ ID NO: 40794 - protein, 10 aa, Artificial Sequence
  Description of Artificial Sequence: Synthetic peptide
  Seed: NLPFEKSTVM
NRPFEKSTVM

SEQ ID NO: 40795 - protein, 10 aa, Artificial Sequence
  Description of Artificial Sequence: Synthetic peptide
  Seed: NLPFEKSTVM
NRPFEKSTVF

SEQ ID NO: 40796 - protein, 10 aa, Artificial Sequence
  Description of Artificial Sequence: Synthetic peptide
  Seed: NLPFEKSTVM
NRPFEKSTVY

SEQ ID NO: 40797 - protein, 10 aa, Artificial Sequence
  Description of Artificial Sequence: Synthetic peptide
  Seed: NLPFEKSTVM
NRPFEKSTVV

SEQ ID NO: 40798 - protein, 10 aa, Artificial Sequence
  Description of Artificial Sequence: Synthetic peptide
  Seed: NLPFEKSTVM
NNPFEKSTVI

SEQ ID NO: 40799 - protein, 10 aa, Artificial Sequence
  Description of Artificial Sequence: Synthetic peptide
  Seed: NLPFEKSTVM
NNPFEKSTVL

SEQ ID NO: 40800 - protein, 10 aa, Artificial Sequence
  Description of Artificial Sequence: Synthetic peptide
  Seed: NLPFEKSTVM
NNPFEKSTVF

SEQ ID NO: 40801 - protein, 10 aa, Artificial Sequence
  Description of Artificial Sequence: Synthetic peptide
  Seed: NLPFEKSTVM
NCPFEKSTVM

SEQ ID NO: 40802 - protein, 10 aa, Artificial Sequence
  Description of Artificial Sequence: Synthetic peptide
  Seed: NLPFEKSTVM
NNPFEKSTVY

SEQ ID NO: 40803 - protein, 10 aa, Artificial Sequence
  Description of Artificial Sequence: Synthetic peptide
  Seed: NLPFEKSTVM
NNPFEKSTVV

SEQ ID NO: 40804 - protein, 10 aa, Artificial Sequence
  Description of Artificial Sequence: Synthetic peptide
  Seed: NLPFEKSTVM
NDPFEKSTVI

SEQ ID NO: 40805 - protein, 10 aa, Artificial Sequence
  Description of Artificial Sequence: Synthetic peptide
  Seed: NLPFEKSTVM
NDPFEKSTVL

SEQ ID NO: 40806 - protein, 10 aa, Artificial Sequence
  Description of Artificial Sequence: Synthetic peptide
  Seed: NLPFEKSTVM
NDPFEKSTVM

SEQ ID NO: 40807 - protein, 10 aa, Artificial Sequence
  Description of Artificial Sequence: Synthetic peptide
  Seed: NLPFEKSTVM
NDPFEKSTVF

SEQ ID NO: 40808 - protein, 10 aa, Artificial Sequence
  Description of Artificial Sequence: Synthetic peptide
  Seed: NLPFEKSTVM
NDPFEKSTVY

SEQ ID NO: 40809 - protein, 10 aa, Artificial Sequence
  Description of Artificial Sequence: Synthetic peptide
  Seed: NLPFEKSTVM
NDPFEKSTVV

SEQ ID NO: 40810 - protein, 10 aa, Artificial Sequence
  Description of Artificial Sequence: Synthetic peptide
  Seed: NLPFEKSTVM
NCPFEKSTVI

SEQ ID NO: 40811 - protein, 10 aa, Artificial Sequence
  Description of Artificial Sequence: Synthetic peptide
  Seed: NLPFEKSTVM
NAPFEKSTVY

SEQ ID NO: 40812 - protein, 10 aa, Artificial Sequence
  Description of Artificial Sequence: Synthetic peptide
  Seed: NLPFEKSTVM
NAPFEKSTVF

SEQ ID NO: 40813 - protein, 10 aa, Artificial Sequence
  Description of Artificial Sequence: Synthetic peptide
  Seed: NLPFEKSTVM
NAPFEKSTVM

SEQ ID NO: 40814 - protein, 10 aa, Artificial Sequence
  Description of Artificial Sequence: Synthetic peptide
  Seed: NLPFEKSTVM
NAPFEKSTVL

SEQ ID NO: 40815 - protein, 9 aa, Artificial Sequence
  Description of Artificial Sequence: Synthetic peptide
  Seed: NLNDTTYQR
NTNDTTYQK

SEQ ID NO: 40816 - protein, 9 aa, Artificial Sequence
  Description of Artificial Sequence: Synthetic peptide
  Seed: NLNDTTYQR
NTNDTTYQY

SEQ ID NO: 40817 - protein, 9 aa, Artificial Sequence
  Description of Artificial Sequence: Synthetic peptide
  Seed: NLNDTTYQR
NWNDTTYQR

SEQ ID NO: 40818 - protein, 9 aa, Artificial Sequence
  Description of Artificial Sequence: Synthetic peptide
  Seed: NLNDTTYQR
NWNDTTYQK

SEQ ID NO: 40819 - protein, 9 aa, Artificial Sequence
  Description of Artificial Sequence: Synthetic peptide
  Seed: NLNDTTYQR
NYNDTTYQR

SEQ ID NO: 40820 - protein, 9 aa, Artificial Sequence
  Description of Artificial Sequence: Synthetic peptide
  Seed: NLNDTTYQR
NYNDTTYQK

SEQ ID NO: 40821 - protein, 9 aa, Artificial Sequence
  Description of Artificial Sequence: Synthetic peptide
  Seed: NLNDTTYQR
NVNDTTYQR

SEQ ID NO: 40822 - protein, 9 aa, Artificial Sequence
  Description of Artificial Sequence: Synthetic peptide
  Seed: NLNDTTYQR
NVNDTTYQK

SEQ ID NO: 40823 - protein, 9 aa, Artificial Sequence
  Description of Artificial Sequence: Synthetic peptide
  Seed: NLNDTTYQR
NVNDTTYQY

SEQ ID NO: 40824 - protein, 11 aa, Artificial Sequence
  Description of Artificial Sequence: Synthetic peptide
  Seed: NLNDTTYQRTR
NANDTTYQRTR

SEQ ID NO: 40825 - protein, 11 aa, Artificial Sequence
  Description of Artificial Sequence: Synthetic peptide
  Seed: NLNDTTYQRTR
NINDTTYQRTR

SEQ ID NO: 40826 - protein, 11 aa, Artificial Sequence
  Description of Artificial Sequence: Synthetic peptide
  Seed: NLNDTTYQRTR
NMNDTTYQRTR

SEQ ID NO: 40827 - protein, 11 aa, Artificial Sequence
  Description of Artificial Sequence: Synthetic peptide
  Seed: NLNDTTYQRTR
NFNDTTYQRTR

SEQ ID NO: 40828 - protein, 11 aa, Artificial Sequence
  Description of Artificial Sequence: Synthetic peptide
  Seed: NLNDTTYQRTR
NSNDTTYQRTR

SEQ ID NO: 40829 - protein, 11 aa, Artificial Sequence
  Description of Artificial Sequence: Synthetic peptide
  Seed: NLNDTTYQRTR
NTNDTTYQRTR

SEQ ID NO: 40830 - protein, 11 aa, Artificial Sequence
  Description of Artificial Sequence: Synthetic peptide
  Seed: NLNDTTYQRTR
NYNDTTYQRTR

SEQ ID NO: 40831 - protein, 11 aa, Artificial Sequence
  Description of Artificial Sequence: Synthetic peptide
  Seed: NLNDTTYQRTR
NVNDTTYQRTR

SEQ ID NO: 40832 - protein, 9 aa, Artificial Sequence
  Description of Artificial Sequence: Synthetic peptide
  Seed: NLPFEKSTV
NMPFEKSTV

SEQ ID NO: 40833 - protein, 10 aa, Artificial Sequence
  Description of Artificial Sequence: Synthetic peptide
  Seed: NLPFEKSTVM
NAPFEKSTVI

SEQ ID NO: 40834 - protein, 10 aa, Artificial Sequence
  Description of Artificial Sequence: Synthetic peptide
  Seed: NLPFEKSTVM
NCPFEKSTVL

SEQ ID NO: 40835 - protein, 10 aa, Artificial Sequence
  Description of Artificial Sequence: Synthetic peptide
  Seed: NLPFEKSTVM
NCPFEKSTVF

SEQ ID NO: 40836 - protein, 10 aa, Artificial Sequence
  Description of Artificial Sequence: Synthetic peptide
  Seed: NLPFEKSTVM
NMPFEKSTVL

SEQ ID NO: 40837 - protein, 10 aa, Artificial Sequence
  Description of Artificial Sequence: Synthetic peptide
  Seed: NLPFEKSTVM
NLPFEKSTVL

SEQ ID NO: 40838 - protein, 10 aa, Artificial Sequence
  Description of Artificial Sequence: Synthetic peptide
  Seed: NLPFEKSTVM
NHPFEKSTVY

SEQ ID NO: 40839 - protein, 10 aa, Artificial Sequence
  Description of Artificial Sequence: Synthetic peptide
  Seed: NLPFEKSTVM
NHPFEKSTVV

SEQ ID NO: 40840 - protein, 10 aa, Artificial Sequence
  Description of Artificial Sequence: Synthetic peptide
  Seed: NLPFEKSTVM
NIPFEKSTVI

SEQ ID NO: 40841 - protein, 10 aa, Artificial Sequence
  Description of Artificial Sequence: Synthetic peptide
  Seed: NLPFEKSTVM
NIPFEKSTVL

SEQ ID NO: 40842 - protein, 10 aa, Artificial Sequence
  Description of Artificial Sequence: Synthetic peptide
  Seed: NLPFEKSTVM
NIPFEKSTVM

SEQ ID NO: 40843 - protein, 10 aa, Artificial Sequence
  Description of Artificial Sequence: Synthetic peptide
  Seed: NLPFEKSTVM
NIPFEKSTVF

SEQ ID NO: 40844 - protein, 10 aa, Artificial Sequence
  Description of Artificial Sequence: Synthetic peptide
  Seed: NLPFEKSTVM
NIPFEKSTVY

SEQ ID NO: 40845 - protein, 10 aa, Artificial Sequence
  Description of Artificial Sequence: Synthetic peptide
  Seed: NLPFEKSTVM
NIPFEKSTVV

SEQ ID NO: 40846 - protein, 10 aa, Artificial Sequence
  Description of Artificial Sequence: Synthetic peptide
  Seed: NLPFEKSTVM
NLPFEKSTVI

SEQ ID NO: 40847 - protein, 10 aa, Artificial Sequence
  Description of Artificial Sequence: Synthetic peptide
  Seed: NLPFEKSTVM
NLPFEKSTVF

SEQ ID NO: 40848 - protein, 10 aa, Artificial Sequence
  Description of Artificial Sequence: Synthetic peptide
  Seed: NLPFEKSTVM
NCPFEKSTVY

SEQ ID NO: 40849 - protein, 10 aa, Artificial Sequence
  Description of Artificial Sequence: Synthetic peptide
  Seed: NLPFEKSTVM
NLPFEKSTVY

SEQ ID NO: 40850 - protein, 10 aa, Artificial Sequence
  Description of Artificial Sequence: Synthetic peptide
  Seed: NLPFEKSTVM
NLPFEKSTVV

SEQ ID NO: 40851 - protein, 10 aa, Artificial Sequence
  Description of Artificial Sequence: Synthetic peptide
  Seed: NLPFEKSTVM
NKPFEKSTVI

SEQ ID NO: 40852 - protein, 10 aa, Artificial Sequence
  Description of Artificial Sequence: Synthetic peptide
  Seed: NLPFEKSTVM
NKPFEKSTVL

SEQ ID NO: 40853 - protein, 10 aa, Artificial Sequence
  Description of Artificial Sequence: Synthetic peptide
  Seed: NLPFEKSTVM
NKPFEKSTVM

SEQ ID NO: 40854 - protein, 10 aa, Artificial Sequence
  Description of Artificial Sequence: Synthetic peptide
  Seed: NLPFEKSTVM
NKPFEKSTVF

SEQ ID NO: 40855 - protein, 10 aa, Artificial Sequence
  Description of Artificial Sequence: Synthetic peptide
  Seed: NLPFEKSTVM
NKPFEKSTVY

SEQ ID NO: 40856 - protein, 10 aa, Artificial Sequence
  Description of Artificial Sequence: Synthetic peptide
  Seed: NLPFEKSTVM
NKPFEKSTVV

SEQ ID NO: 40857 - protein, 10 aa, Artificial Sequence
  Description of Artificial Sequence: Synthetic peptide
  Seed: NLPFEKSTVM
NMPFEKSTVA

SEQ ID NO: 40858 - protein, 10 aa, Artificial Sequence
  Description of Artificial Sequence: Synthetic peptide
  Seed: NLPFEKSTVM
NHPFEKSTVF

SEQ ID NO: 40859 - protein, 10 aa, Artificial Sequence
  Description of Artificial Sequence: Synthetic peptide
  Seed: NLPFEKSTVM
NHPFEKSTVM

SEQ ID NO: 40860 - protein, 10 aa, Artificial Sequence
  Description of Artificial Sequence: Synthetic peptide
  Seed: NLPFEKSTVM
NHPFEKSTVL

SEQ ID NO: 40861 - protein, 10 aa, Artificial Sequence
  Description of Artificial Sequence: Synthetic peptide
  Seed: NLPFEKSTVM
NHPFEKSTVI

SEQ ID NO: 40862 - protein, 10 aa, Artificial Sequence
  Description of Artificial Sequence: Synthetic peptide
  Seed: NLPFEKSTVM
NCPFEKSTVV

SEQ ID NO: 40863 - protein, 10 aa, Artificial Sequence
  Description of Artificial Sequence: Synthetic peptide
  Seed: NLPFEKSTVM
NQPFEKSTVI

SEQ ID NO: 40864 - protein, 10 aa, Artificial Sequence
  Description of Artificial Sequence: Synthetic peptide
  Seed: NLPFEKSTVM
NQPFEKSTVL

SEQ ID NO: 40865 - protein, 10 aa, Artificial Sequence
  Description of Artificial Sequence: Synthetic peptide
  Seed: NLPFEKSTVM
NQPFEKSTVM

SEQ ID NO: 40866 - protein, 10 aa, Artificial Sequence
  Description of Artificial Sequence: Synthetic peptide
  Seed: NLPFEKSTVM
NQPFEKSTVF

SEQ ID NO: 40867 - protein, 10 aa, Artificial Sequence
  Description of Artificial Sequence: Synthetic peptide
  Seed: NLPFEKSTVM
NQPFEKSTVY

SEQ ID NO: 40868 - protein, 10 aa, Artificial Sequence
  Description of Artificial Sequence: Synthetic peptide
  Seed: NLPFEKSTVM
NQPFEKSTVV

SEQ ID NO: 40869 - protein, 10 aa, Artificial Sequence
  Description of Artificial Sequence: Synthetic peptide
  Seed: NLPFEKSTVM
NEPFEKSTVI

SEQ ID NO: 40870 - protein, 10 aa, Artificial Sequence
  Description of Artificial Sequence: Synthetic peptide
  Seed: NLPFEKSTVM
NEPFEKSTVL

SEQ ID NO: 40871 - protein, 10 aa, Artificial Sequence
  Description of Artificial Sequence: Synthetic peptide
  Seed: NLPFEKSTVM
NEPFEKSTVM

SEQ ID NO: 40872 - protein, 10 aa, Artificial Sequence
  Description of Artificial Sequence: Synthetic peptide
  Seed: NLPFEKSTVM
NEPFEKSTVF

SEQ ID NO: 40873 - protein, 10 aa, Artificial Sequence
  Description of Artificial Sequence: Synthetic peptide
  Seed: NLPFEKSTVM
NEPFEKSTVY

SEQ ID NO: 40874 - protein, 10 aa, Artificial Sequence
  Description of Artificial Sequence: Synthetic peptide
  Seed: NLPFEKSTVM
NEPFEKSTVV

SEQ ID NO: 40875 - protein, 10 aa, Artificial Sequence
  Description of Artificial Sequence: Synthetic peptide
  Seed: NLPFEKSTVM
NGPFEKSTVI

SEQ ID NO: 40876 - protein, 10 aa, Artificial Sequence
  Description of Artificial Sequence: Synthetic peptide
  Seed: NLPFEKSTVM
NGPFEKSTVL

SEQ ID NO: 40877 - protein, 10 aa, Artificial Sequence
  Description of Artificial Sequence: Synthetic peptide
  Seed: NLPFEKSTVM
NGPFEKSTVM

SEQ ID NO: 40878 - protein, 10 aa, Artificial Sequence
  Description of Artificial Sequence: Synthetic peptide
  Seed: NLPFEKSTVM
NGPFEKSTVF

SEQ ID NO: 40879 - protein, 10 aa, Artificial Sequence
  Description of Artificial Sequence: Synthetic peptide
  Seed: NLPFEKSTVM
NGPFEKSTVY

SEQ ID NO: 40880 - protein, 10 aa, Artificial Sequence
  Description of Artificial Sequence: Synthetic peptide
  Seed: NLPFEKSTVM
NGPFEKSTVV

SEQ ID NO: 40881 - protein, 9 aa, Artificial Sequence
  Description of Artificial Sequence: Synthetic peptide
  Seed: NLNDTTYQR
NTNDTTYQR

SEQ ID NO: 40882 - protein, 9 aa, Artificial Sequence
  Description of Artificial Sequence: Synthetic peptide
  Seed: NLNDTTYQR
NSNDTTYQY

SEQ ID NO: 40883 - protein, 9 aa, Artificial Sequence
  Description of Artificial Sequence: Synthetic peptide
  Seed: NLNDTTYQR
NSNDTTYQK

SEQ ID NO: 40884 - protein, 9 aa, Artificial Sequence
  Description of Artificial Sequence: Synthetic peptide
  Seed: NLNDATYQR
NANDATYQR

SEQ ID NO: 40885 - protein, 10 aa, Artificial Sequence
  Description of Artificial Sequence: Synthetic peptide
  Seed: NILKGKFQTA
NYLKGKFQTL

SEQ ID NO: 40886 - protein, 10 aa, Artificial Sequence
  Description of Artificial Sequence: Synthetic peptide
  Seed: NILKGKFQTA
NYLKGKFQTM

SEQ ID NO: 40887 - protein, 10 aa, Artificial Sequence
  Description of Artificial Sequence: Synthetic peptide
  Seed: NILKGKFQTA
NYLKGKFQTF

SEQ ID NO: 40888 - protein, 10 aa, Artificial Sequence
  Description of Artificial Sequence: Synthetic peptide
  Seed: NILKGKFQTA
NYLKGKFQTV

SEQ ID NO: 40889 - protein, 10 aa, Artificial Sequence
  Description of Artificial Sequence: Synthetic peptide
  Seed: NILKGKFQTA
NVLKGKFQTI

SEQ ID NO: 40890 - protein, 10 aa, Artificial Sequence
  Description of Artificial Sequence: Synthetic peptide
  Seed: NILKGKFQTA
NVLKGKFQTL

SEQ ID NO: 40891 - protein, 10 aa, Artificial Sequence
  Description of Artificial Sequence: Synthetic peptide
  Seed: NILKGKFQTA
NVLKGKFQTM

SEQ ID NO: 40892 - protein, 10 aa, Artificial Sequence
  Description of Artificial Sequence: Synthetic peptide
  Seed: NILKGKFQTA
NVLKGKFQTF

SEQ ID NO: 40893 - protein, 10 aa, Artificial Sequence
  Description of Artificial Sequence: Synthetic peptide
  Seed: NILKGKFQTA
NVLKGKFQTV

SEQ ID NO: 40894 - protein, 9 aa, Artificial Sequence
  Description of Artificial Sequence: Synthetic peptide
  Seed: NLNDATYQR
NANDATYQK

SEQ ID NO: 40895 - protein, 9 aa, Artificial Sequence
  Description of Artificial Sequence: Synthetic peptide
  Seed: NLNDTTYQR
NSNDTTYQR

SEQ ID NO: 40896 - protein, 9 aa, Artificial Sequence
  Description of Artificial Sequence: Synthetic peptide
  Seed: NLNDATYQR
NANDATYQY

SEQ ID NO: 40897 - protein, 9 aa, Artificial Sequence
  Description of Artificial Sequence: Synthetic peptide
  Seed: NLNDATYQR
NNNDATYQR

SEQ ID NO: 40898 - protein, 9 aa, Artificial Sequence
  Description of Artificial Sequence: Synthetic peptide
  Seed: NLNDATYQR
NNNDATYQK

SEQ ID NO: 40899 - protein, 9 aa, Artificial Sequence
  Description of Artificial Sequence: Synthetic peptide
  Seed: NLNDATYQR
NCNDATYQR

SEQ ID NO: 40900 - protein, 9 aa, Artificial Sequence
  Description of Artificial Sequence: Synthetic peptide
  Seed: NLNDATYQR
NQNDATYQR

SEQ ID NO: 40901 - protein, 9 aa, Artificial Sequence
  Description of Artificial Sequence: Synthetic peptide
  Seed: NLNDATYQR
NGNDATYQR

SEQ ID NO: 40902 - protein, 9 aa, Artificial Sequence
  Description of Artificial Sequence: Synthetic peptide
  Seed: NLNDATYQR
NGNDATYQK

SEQ ID NO: 40903 - protein, 9 aa, Artificial Sequence
  Description of Artificial Sequence: Synthetic peptide
  Seed: NLNDATYQR
NINDATYQR

SEQ ID NO: 40904 - protein, 9 aa, Artificial Sequence
  Description of Artificial Sequence: Synthetic peptide
  Seed: NLNDATYQR
NINDATYQK

SEQ ID NO: 40905 - protein, 10 aa, Artificial Sequence
  Description of Artificial Sequence: Synthetic peptide
  Seed: NILKGKFQTA
NYLKGKFQTI

SEQ ID NO: 40906 - protein, 10 aa, Artificial Sequence
  Description of Artificial Sequence: Synthetic peptide
  Seed: NILKGKFQTA
NYLKGKFQTA

SEQ ID NO: 40907 - protein, 10 aa, Artificial Sequence
  Description of Artificial Sequence: Synthetic peptide
  Seed: NILKGKFQTA
NWLKGKFQTV

SEQ ID NO: 40908 - protein, 10 aa, Artificial Sequence
  Description of Artificial Sequence: Synthetic peptide
  Seed: NILKGKFQTA
NWLKGKFQTF

SEQ ID NO: 40909 - protein, 10 aa, Artificial Sequence
  Description of Artificial Sequence: Synthetic peptide
  Seed: NILKGKFQTA
NPLKGKFQTI

SEQ ID NO: 40910 - protein, 10 aa, Artificial Sequence
  Description of Artificial Sequence: Synthetic peptide
  Seed: NILKGKFQTA
NPLKGKFQTL

SEQ ID NO: 40911 - protein, 10 aa, Artificial Sequence
  Description of Artificial Sequence: Synthetic peptide
  Seed: NILKGKFQTA
NPLKGKFQTM

SEQ ID NO: 40912 - protein, 10 aa, Artificial Sequence
  Description of Artificial Sequence: Synthetic peptide
  Seed: NILKGKFQTA
NPLKGKFQTF

SEQ ID NO: 40913 - protein, 10 aa, Artificial Sequence
  Description of Artificial Sequence: Synthetic peptide
  Seed: NILKGKFQTA
NPLKGKFQTV

SEQ ID NO: 40914 - protein, 10 aa, Artificial Sequence
  Description of Artificial Sequence: Synthetic peptide
  Seed: NILKGKFQTA
NSLKGKFQTI

SEQ ID NO: 40915 - protein, 10 aa, Artificial Sequence
  Description of Artificial Sequence: Synthetic peptide
  Seed: NILKGKFQTA
NSLKGKFQTL

SEQ ID NO: 40916 - protein, 10 aa, Artificial Sequence
  Description of Artificial Sequence: Synthetic peptide
  Seed: NILKGKFQTA
NSLKGKFQTM

SEQ ID NO: 40917 - protein, 10 aa, Artificial Sequence
  Description of Artificial Sequence: Synthetic peptide
  Seed: NILKGKFQTA
NSLKGKFQTF

SEQ ID NO: 40918 - protein, 10 aa, Artificial Sequence
  Description of Artificial Sequence: Synthetic peptide
  Seed: NILKGKFQTA
NSLKGKFQTV

SEQ ID NO: 40919 - protein, 10 aa, Artificial Sequence
  Description of Artificial Sequence: Synthetic peptide
  Seed: NILKGKFQTA
NTLKGKFQTI

SEQ ID NO: 40920 - protein, 10 aa, Artificial Sequence
  Description of Artificial Sequence: Synthetic peptide
  Seed: NILKGKFQTA
NTLKGKFQTL

SEQ ID NO: 40921 - protein, 10 aa, Artificial Sequence
  Description of Artificial Sequence: Synthetic peptide
  Seed: NILKGKFQTA
NTLKGKFQTM

SEQ ID NO: 40922 - protein, 10 aa, Artificial Sequence
  Description of Artificial Sequence: Synthetic peptide
  Seed: NILKGKFQTA
NTLKGKFQTF

SEQ ID NO: 40923 - protein, 10 aa, Artificial Sequence
  Description of Artificial Sequence: Synthetic peptide
  Seed: NILKGKFQTA
NTLKGKFQTV

SEQ ID NO: 40924 - protein, 10 aa, Artificial Sequence
  Description of Artificial Sequence: Synthetic peptide
  Seed: NILKGKFQTA
NWLKGKFQTA

SEQ ID NO: 40925 - protein, 10 aa, Artificial Sequence
  Description of Artificial Sequence: Synthetic peptide
  Seed: NILKGKFQTA
NWLKGKFQTI

SEQ ID NO: 40926 - protein, 10 aa, Artificial Sequence
  Description of Artificial Sequence: Synthetic peptide
  Seed: NILKGKFQTA
NWLKGKFQTL

SEQ ID NO: 40927 - protein, 10 aa, Artificial Sequence
  Description of Artificial Sequence: Synthetic peptide
  Seed: NILKGKFQTA
NWLKGKFQTM

SEQ ID NO: 40928 - protein, 9 aa, Artificial Sequence
  Description of Artificial Sequence: Synthetic peptide
  Seed: NLNDATYQR
NINDATYQY

SEQ ID NO: 40929 - protein, 9 aa, Artificial Sequence
  Description of Artificial Sequence: Synthetic peptide
  Seed: NLNDATYQR
NLNDATYQK

SEQ ID NO: 40930 - protein, 9 aa, Artificial Sequence
  Description of Artificial Sequence: Synthetic peptide
  Seed: NLNDATYQR
NMNDATYQR

SEQ ID NO: 40931 - protein, 11 aa, Artificial Sequence
  Description of Artificial Sequence: Synthetic peptide
  Seed: NLNDATYQRTR
NTNDATYQRTR

SEQ ID NO: 40932 - protein, 11 aa, Artificial Sequence
  Description of Artificial Sequence: Synthetic peptide
  Seed: NLNDATYQRTR
NVNDATYQRTR

SEQ ID NO: 40933 - protein, 9 aa, Artificial Sequence
  Description of Artificial Sequence: Synthetic peptide
  Seed: NLNDTTYQR
NANDTTYQR

SEQ ID NO: 40934 - protein, 9 aa, Artificial Sequence
  Description of Artificial Sequence: Synthetic peptide
  Seed: NLNDTTYQR
NANDTTYQK

SEQ ID NO: 40935 - protein, 9 aa, Artificial Sequence
  Description of Artificial Sequence: Synthetic peptide
  Seed: NLNDTTYQR
NANDTTYQY

SEQ ID NO: 40936 - protein, 9 aa, Artificial Sequence
  Description of Artificial Sequence: Synthetic peptide
  Seed: NLNDTTYQR
NNNDTTYQR

SEQ ID NO: 40937 - protein, 9 aa, Artificial Sequence
  Description of Artificial Sequence: Synthetic peptide
  Seed: NLNDTTYQR
NNNDTTYQK

SEQ ID NO: 40938 - protein, 9 aa, Artificial Sequence
  Description of Artificial Sequence: Synthetic peptide
  Seed: NLNDTTYQR
NCNDTTYQR

SEQ ID NO: 40939 - protein, 9 aa, Artificial Sequence
  Description of Artificial Sequence: Synthetic peptide
  Seed: NLNDTTYQR
NQNDTTYQR

SEQ ID NO: 40940 - protein, 9 aa, Artificial Sequence
  Description of Artificial Sequence: Synthetic peptide
  Seed: NLNDTTYQR
NGNDTTYQR

SEQ ID NO: 40941 - protein, 9 aa, Artificial Sequence
  Description of Artificial Sequence: Synthetic peptide
  Seed: NLNDTTYQR
NGNDTTYQK

SEQ ID NO: 40942 - protein, 9 aa, Artificial Sequence
  Description of Artificial Sequence: Synthetic peptide
  Seed: NLNDTTYQR
NINDTTYQR

SEQ ID NO: 40943 - protein, 9 aa, Artificial Sequence
  Description of Artificial Sequence: Synthetic peptide
  Seed: NLNDTTYQR
NINDTTYQK

SEQ ID NO: 40944 - protein, 9 aa, Artificial Sequence
  Description of Artificial Sequence: Synthetic peptide
  Seed: NLNDTTYQR
NINDTTYQY

SEQ ID NO: 40945 - protein, 9 aa, Artificial Sequence
  Description of Artificial Sequence: Synthetic peptide
  Seed: NLNDTTYQR
NLNDTTYQK

SEQ ID NO: 40946 - protein, 9 aa, Artificial Sequence
  Description of Artificial Sequence: Synthetic peptide
  Seed: NLNDTTYQR
NMNDTTYQR

SEQ ID NO: 40947 - protein, 9 aa, Artificial Sequence
  Description of Artificial Sequence: Synthetic peptide
  Seed: NLNDTTYQR
NMNDTTYQK

SEQ ID NO: 40948 - protein, 9 aa, Artificial Sequence
  Description of Artificial Sequence: Synthetic peptide
  Seed: NLNDTTYQR
NFNDTTYQR

SEQ ID NO: 40949 - protein, 9 aa, Artificial Sequence
  Description of Artificial Sequence: Synthetic peptide
  Seed: NLNDTTYQR
NFNDTTYQK

SEQ ID NO: 40950 - protein, 9 aa, Artificial Sequence
  Description of Artificial Sequence: Synthetic peptide
  Seed: NLNDTTYQR
NPNDTTYQR

SEQ ID NO: 40951 - protein, 11 aa, Artificial Sequence
  Description of Artificial Sequence: Synthetic peptide
  Seed: NLNDATYQRTR
NYNDATYQRTR

SEQ ID NO: 40952 - protein, 11 aa, Artificial Sequence
  Description of Artificial Sequence: Synthetic peptide
  Seed: NLNDATYQRTR
NSNDATYQRTR

SEQ ID NO: 40953 - protein, 9 aa, Artificial Sequence
  Description of Artificial Sequence: Synthetic peptide
  Seed: NLNDATYQR
NMNDATYQK

SEQ ID NO: 40954 - protein, 11 aa, Artificial Sequence
  Description of Artificial Sequence: Synthetic peptide
  Seed: NLNDATYQRTR
NFNDATYQRTR

SEQ ID NO: 40955 - protein, 9 aa, Artificial Sequence
  Description of Artificial Sequence: Synthetic peptide
  Seed: NLNDATYQR
NFNDATYQR

SEQ ID NO: 40956 - protein, 9 aa, Artificial Sequence
  Description of Artificial Sequence: Synthetic peptide
  Seed: NLNDATYQR
NFNDATYQK

SEQ ID NO: 40957 - protein, 9 aa, Artificial Sequence
  Description of Artificial Sequence: Synthetic peptide
  Seed: NLNDATYQR
NPNDATYQR

SEQ ID NO: 40958 - protein, 9 aa, Artificial Sequence
  Description of Artificial Sequence: Synthetic peptide
  Seed: NLNDATYQR
NSNDATYQR

SEQ ID NO: 40959 - protein, 9 aa, Artificial Sequence
  Description of Artificial Sequence: Synthetic peptide
  Seed: NLNDATYQR
NSNDATYQK

SEQ ID NO: 40960 - protein, 9 aa, Artificial Sequence
  Description of Artificial Sequence: Synthetic peptide
  Seed: NLNDATYQR
NSNDATYQY

SEQ ID NO: 40961 - protein, 9 aa, Artificial Sequence
  Description of Artificial Sequence: Synthetic peptide
  Seed: NLNDATYQR
NTNDATYQR

SEQ ID NO: 40962 - protein, 9 aa, Artificial Sequence
  Description of Artificial Sequence: Synthetic peptide
  Seed: NLNDATYQR
NTNDATYQK

SEQ ID NO: 40963 - protein, 9 aa, Artificial Sequence
  Description of Artificial Sequence: Synthetic peptide
  Seed: NLNDATYQR
NTNDATYQY

SEQ ID NO: 40964 - protein, 9 aa, Artificial Sequence
  Description of Artificial Sequence: Synthetic peptide
  Seed: NLNDATYQR
NWNDATYQR

SEQ ID NO: 40965 - protein, 9 aa, Artificial Sequence
  Description of Artificial Sequence: Synthetic peptide
  Seed: NLNDATYQR
NWNDATYQK

SEQ ID NO: 40966 - protein, 9 aa, Artificial Sequence
  Description of Artificial Sequence: Synthetic peptide
  Seed: NLNDATYQR
NYNDATYQR

SEQ ID NO: 40967 - protein, 9 aa, Artificial Sequence
  Description of Artificial Sequence: Synthetic peptide
  Seed: NLNDATYQR
NYNDATYQK

SEQ ID NO: 40968 - protein, 9 aa, Artificial Sequence
  Description of Artificial Sequence: Synthetic peptide
  Seed: NLNDATYQR
NVNDATYQR

SEQ ID NO: 40969 - protein, 9 aa, Artificial Sequence
  Description of Artificial Sequence: Synthetic peptide
  Seed: NLNDATYQR
NVNDATYQK

SEQ ID NO: 40970 - protein, 9 aa, Artificial Sequence
  Description of Artificial Sequence: Synthetic peptide
  Seed: NLNDATYQR
NVNDATYQY

SEQ ID NO: 40971 - protein, 11 aa, Artificial Sequence
  Description of Artificial Sequence: Synthetic peptide
  Seed: NLNDATYQRTR
NANDATYQRTR

SEQ ID NO: 40972 - protein, 11 aa, Artificial Sequence
  Description of Artificial Sequence: Synthetic peptide
  Seed: NLNDATYQRTR
NINDATYQRTR

SEQ ID NO: 40973 - protein, 11 aa, Artificial Sequence
  Description of Artificial Sequence: Synthetic peptide
  Seed: NLNDATYQRTR
NMNDATYQRTR

SEQ ID NO: 40974 - protein, 10 aa, Artificial Sequence
  Description of Artificial Sequence: Synthetic peptide
  Seed: NLPFEKSTVM
NMPFEKSTVI

SEQ ID NO: 40975 - protein, 10 aa, Artificial Sequence
  Description of Artificial Sequence: Synthetic peptide
  Seed: NLPFEKSTVM
NMPFEKSTVM

SEQ ID NO: 40976 - protein, 10 aa, Artificial Sequence
  Description of Artificial Sequence: Synthetic peptide
  Seed: NLPFERATVM
NEPFERATVM

SEQ ID NO: 40977 - protein, 10 aa, Artificial Sequence
  Description of Artificial Sequence: Synthetic peptide
  Seed: NLPFERATIM
NYPFERATII

SEQ ID NO: 40978 - protein, 10 aa, Artificial Sequence
  Description of Artificial Sequence: Synthetic peptide
  Seed: NLPFERATIM
NTPFERATIL

SEQ ID NO: 40979 - protein, 10 aa, Artificial Sequence
  Description of Artificial Sequence: Synthetic peptide
  Seed: NLPFERATIM
NTPFERATIM

SEQ ID NO: 40980 - protein, 10 aa, Artificial Sequence
  Description of Artificial Sequence: Synthetic peptide
  Seed: NLPFERATIM
NTPFERATIF

SEQ ID NO: 40981 - protein, 10 aa, Artificial Sequence
  Description of Artificial Sequence: Synthetic peptide
  Seed: NLPFERATIM
NTPFERATIY

SEQ ID NO: 40982 - protein, 10 aa, Artificial Sequence
  Description of Artificial Sequence: Synthetic peptide
  Seed: NLPFERATIM
NWPFERATII

SEQ ID NO: 40983 - protein, 10 aa, Artificial Sequence
  Description of Artificial Sequence: Synthetic peptide
  Seed: NLPFERATIM
NWPFERATIL

SEQ ID NO: 40984 - protein, 10 aa, Artificial Sequence
  Description of Artificial Sequence: Synthetic peptide
  Seed: NLPFERATIM
NWPFERATIM

SEQ ID NO: 40985 - protein, 10 aa, Artificial Sequence
  Description of Artificial Sequence: Synthetic peptide
  Seed: NLPFERATIM
NWPFERATIF

SEQ ID NO: 40986 - protein, 10 aa, Artificial Sequence
  Description of Artificial Sequence: Synthetic peptide
  Seed: NLPFERATIM
NWPFERATIY

SEQ ID NO: 40987 - protein, 10 aa, Artificial Sequence
  Description of Artificial Sequence: Synthetic peptide
  Seed: NLPFERATIM
NYPFERATIL

SEQ ID NO: 40988 - protein, 9 aa, Artificial Sequence
  Description of Artificial Sequence: Synthetic peptide
  Seed: NLPFERATV
NSPFERATV

SEQ ID NO: 40989 - protein, 10 aa, Artificial Sequence
  Description of Artificial Sequence: Synthetic peptide
  Seed: NLPFERATIM
NYPFERATIM

SEQ ID NO: 40990 - protein, 10 aa, Artificial Sequence
  Description of Artificial Sequence: Synthetic peptide
  Seed: NLPFERATIM
NYPFERATIF

SEQ ID NO: 40991 - protein, 10 aa, Artificial Sequence
  Description of Artificial Sequence: Synthetic peptide
  Seed: NLPFERATIM
NYPFERATIY

SEQ ID NO: 40992 - protein, 10 aa, Artificial Sequence
  Description of Artificial Sequence: Synthetic peptide
  Seed: NLPFERATIM
NVPFERATIL

SEQ ID NO: 40993 - protein, 10 aa, Artificial Sequence
  Description of Artificial Sequence: Synthetic peptide
  Seed: NLPFERATIM
NVPFERATIM

SEQ ID NO: 40994 - protein, 10 aa, Artificial Sequence
  Description of Artificial Sequence: Synthetic peptide
  Seed: NLPFERATIM
NVPFERATIF

SEQ ID NO: 40995 - protein, 10 aa, Artificial Sequence
  Description of Artificial Sequence: Synthetic peptide
  Seed: NLPFERATIM
NVPFERATIY

SEQ ID NO: 40996 - protein, 9 aa, Artificial Sequence
  Description of Artificial Sequence: Synthetic peptide
  Seed: NLPFERATV
NAPFERATV

SEQ ID NO: 40997 - protein, 9 aa, Artificial Sequence
  Description of Artificial Sequence: Synthetic peptide
  Seed: NLPFERATV
NIPFERATV

SEQ ID NO: 40998 - protein, 10 aa, Artificial Sequence
  Description of Artificial Sequence: Synthetic peptide
  Seed: NLPFERATIM
NSPFERATIY

SEQ ID NO: 40999 - protein, 10 aa, Artificial Sequence
  Description of Artificial Sequence: Synthetic peptide
  Seed: NLPFERATIM
NSPFERATIF

SEQ ID NO: 41000 - protein, 10 aa, Artificial Sequence
  Description of Artificial Sequence: Synthetic peptide
  Seed: NLPFERATIM
NSPFERATIM

SEQ ID NO: 41001 - protein, 10 aa, Artificial Sequence
  Description of Artificial Sequence: Synthetic peptide
  Seed: NLPFERATIM
NSPFERATIL

SEQ ID NO: 41002 - protein, 10 aa, Artificial Sequence
  Description of Artificial Sequence: Synthetic peptide
  Seed: NLPFERATIM
NLPFERATIY

SEQ ID NO: 41003 - protein, 10 aa, Artificial Sequence
  Description of Artificial Sequence: Synthetic peptide
  Seed: NLPFERATIM
NKPFERATIL

SEQ ID NO: 41004 - protein, 10 aa, Artificial Sequence
  Description of Artificial Sequence: Synthetic peptide
  Seed: NLPFERATIM
NKPFERATIM

SEQ ID NO: 41005 - protein, 10 aa, Artificial Sequence
  Description of Artificial Sequence: Synthetic peptide
  Seed: NLPFERATIM
NKPFERATIF

SEQ ID NO: 41006 - protein, 10 aa, Artificial Sequence
  Description of Artificial Sequence: Synthetic peptide
  Seed: NLPFERATIM
NKPFERATIY

SEQ ID NO: 41007 - protein, 10 aa, Artificial Sequence
  Description of Artificial Sequence: Synthetic peptide
  Seed: NLPFERATIM
NMPFERATII

SEQ ID NO: 41008 - protein, 10 aa, Artificial Sequence
  Description of Artificial Sequence: Synthetic peptide
  Seed: NLPFERATIM
NMPFERATIL

SEQ ID NO: 41009 - protein, 10 aa, Artificial Sequence
  Description of Artificial Sequence: Synthetic peptide
  Seed: NLPFERATIM
NMPFERATIM

SEQ ID NO: 41010 - protein, 10 aa, Artificial Sequence
  Description of Artificial Sequence: Synthetic peptide
  Seed: NLPFERATIM
NMPFERATIF

SEQ ID NO: 41011 - protein, 10 aa, Artificial Sequence
  Description of Artificial Sequence: Synthetic peptide
  Seed: NLPFERATIM
NMPFERATIY

SEQ ID NO: 41012 - protein, 10 aa, Artificial Sequence
  Description of Artificial Sequence: Synthetic peptide
  Seed: NLPFERATIM
NFPFERATIL

SEQ ID NO: 41013 - protein, 10 aa, Artificial Sequence
  Description of Artificial Sequence: Synthetic peptide
  Seed: NLPFERATIM
NFPFERATIM

SEQ ID NO: 41014 - protein, 10 aa, Artificial Sequence
  Description of Artificial Sequence: Synthetic peptide
  Seed: NLPFERATIM
NFPFERATIF

SEQ ID NO: 41015 - protein, 10 aa, Artificial Sequence
  Description of Artificial Sequence: Synthetic peptide
  Seed: NLPFERATIM
NFPFERATIY

SEQ ID NO: 41016 - protein, 10 aa, Artificial Sequence
  Description of Artificial Sequence: Synthetic peptide
  Seed: NLPFERATIM
NPPFERATII

SEQ ID NO: 41017 - protein, 10 aa, Artificial Sequence
  Description of Artificial Sequence: Synthetic peptide
  Seed: NLPFERATIM
NPPFERATIL

SEQ ID NO: 41018 - protein, 10 aa, Artificial Sequence
  Description of Artificial Sequence: Synthetic peptide
  Seed: NLPFERATIM
NPPFERATIM

SEQ ID NO: 41019 - protein, 10 aa, Artificial Sequence
  Description of Artificial Sequence: Synthetic peptide
  Seed: NLPFERATIM
NPPFERATIF

SEQ ID NO: 41020 - protein, 10 aa, Artificial Sequence
  Description of Artificial Sequence: Synthetic peptide
  Seed: NLPFERATIM
NPPFERATIY

SEQ ID NO: 41021 - protein, 9 aa, Artificial Sequence
  Description of Artificial Sequence: Synthetic peptide
  Seed: NLPFERATV
NMPFERATV

SEQ ID NO: 41022 - protein, 9 aa, Artificial Sequence
  Description of Artificial Sequence: Synthetic peptide
  Seed: NLPFERATV
NTPFERATA

SEQ ID NO: 41023 - protein, 10 aa, Artificial Sequence
  Description of Artificial Sequence: Synthetic peptide
  Seed: NLPFEKSTVM
NMPFEKSTVF

SEQ ID NO: 41024 - protein, 10 aa, Artificial Sequence
  Description of Artificial Sequence: Synthetic peptide
  Seed: NLPFERATVM
NCPFERATVF

SEQ ID NO: 41025 - protein, 10 aa, Artificial Sequence
  Description of Artificial Sequence: Synthetic peptide
  Seed: NLPFERATVM
NDPFERATVI

SEQ ID NO: 41026 - protein, 10 aa, Artificial Sequence
  Description of Artificial Sequence: Synthetic peptide
  Seed: NLPFERATVM
NDPFERATVL

SEQ ID NO: 41027 - protein, 10 aa, Artificial Sequence
  Description of Artificial Sequence: Synthetic peptide
  Seed: NLPFERATVM
NDPFERATVM

SEQ ID NO: 41028 - protein, 10 aa, Artificial Sequence
  Description of Artificial Sequence: Synthetic peptide
  Seed: NLPFERATVM
NDPFERATVF

SEQ ID NO: 41029 - protein, 10 aa, Artificial Sequence
  Description of Artificial Sequence: Synthetic peptide
  Seed: NLPFERATVM
NDPFERATVY

SEQ ID NO: 41030 - protein, 10 aa, Artificial Sequence
  Description of Artificial Sequence: Synthetic peptide
  Seed: NLPFERATVM
NDPFERATVV

SEQ ID NO: 41031 - protein, 10 aa, Artificial Sequence
  Description of Artificial Sequence: Synthetic peptide
  Seed: NLPFERATVM
NCPFERATVI

SEQ ID NO: 41032 - protein, 10 aa, Artificial Sequence
  Description of Artificial Sequence: Synthetic peptide
  Seed: NLPFERATVM
NCPFERATVL

SEQ ID NO: 41033 - protein, 10 aa, Artificial Sequence
  Description of Artificial Sequence: Synthetic peptide
  Seed: NLPFERATVM
NCPFERATVM

SEQ ID NO: 41034 - protein, 10 aa, Artificial Sequence
  Description of Artificial Sequence: Synthetic peptide
  Seed: NLPFERATVM
NCPFERATVY

SEQ ID NO: 41035 - protein, 9 aa, Artificial Sequence
  Description of Artificial Sequence: Synthetic peptide
  Seed: NLPFERATV
NTPFERATI

SEQ ID NO: 41036 - protein, 10 aa, Artificial Sequence
  Description of Artificial Sequence: Synthetic peptide
  Seed: NLPFERATVM
NCPFERATVV

SEQ ID NO: 41037 - protein, 10 aa, Artificial Sequence
  Description of Artificial Sequence: Synthetic peptide
  Seed: NLPFERATVM
NQPFERATVI

SEQ ID NO: 41038 - protein, 10 aa, Artificial Sequence
  Description of Artificial Sequence: Synthetic peptide
  Seed: NLPFERATVM
NQPFERATVL

SEQ ID NO: 41039 - protein, 10 aa, Artificial Sequence
  Description of Artificial Sequence: Synthetic peptide
  Seed: NLPFERATVM
NQPFERATVM

SEQ ID NO: 41040 - protein, 10 aa, Artificial Sequence
  Description of Artificial Sequence: Synthetic peptide
  Seed: NLPFERATVM
NQPFERATVF

SEQ ID NO: 41041 - protein, 10 aa, Artificial Sequence
  Description of Artificial Sequence: Synthetic peptide
  Seed: NLPFERATVM
NQPFERATVY

SEQ ID NO: 41042 - protein, 10 aa, Artificial Sequence
  Description of Artificial Sequence: Synthetic peptide
  Seed: NLPFERATVM
NQPFERATVV

SEQ ID NO: 41043 - protein, 10 aa, Artificial Sequence
  Description of Artificial Sequence: Synthetic peptide
  Seed: NLPFERATVM
NEPFERATVI

SEQ ID NO: 41044 - protein, 10 aa, Artificial Sequence
  Description of Artificial Sequence: Synthetic peptide
  Seed: NLPFERATVM
NEPFERATVL

SEQ ID NO: 41045 - protein, 10 aa, Artificial Sequence
  Description of Artificial Sequence: Synthetic peptide
  Seed: NLPFERATVM
NNPFERATVV

SEQ ID NO: 41046 - protein, 10 aa, Artificial Sequence
  Description of Artificial Sequence: Synthetic peptide
  Seed: NLPFERATVM
NNPFERATVY

SEQ ID NO: 41047 - protein, 10 aa, Artificial Sequence
  Description of Artificial Sequence: Synthetic peptide
  Seed: NLPFERATVM
NNPFERATVF

SEQ ID NO: 41048 - protein, 10 aa, Artificial Sequence
  Description of Artificial Sequence: Synthetic peptide
  Seed: NLPFERATVM
NNPFERATVM

SEQ ID NO: 41049 - protein, 9 aa, Artificial Sequence
  Description of Artificial Sequence: Synthetic peptide
  Seed: NLPFERATV
NTPFERATL

SEQ ID NO: 41050 - protein, 9 aa, Artificial Sequence
  Description of Artificial Sequence: Synthetic peptide
  Seed: NLPFERATV
NTPFERATV

SEQ ID NO: 41051 - protein, 9 aa, Artificial Sequence
  Description of Artificial Sequence: Synthetic peptide
  Seed: NLPFERATV
NVPFERATI

SEQ ID NO: 41052 - protein, 9 aa, Artificial Sequence
  Description of Artificial Sequence: Synthetic peptide
  Seed: NLPFERATV
NVPFERATV

SEQ ID NO: 41053 - protein, 10 aa, Artificial Sequence
  Description of Artificial Sequence: Synthetic peptide
  Seed: NLPFERATVM
NAPFERATVI

SEQ ID NO: 41054 - protein, 10 aa, Artificial Sequence
  Description of Artificial Sequence: Synthetic peptide
  Seed: NLPFERATVM
NAPFERATVL

SEQ ID NO: 41055 - protein, 10 aa, Artificial Sequence
  Description of Artificial Sequence: Synthetic peptide
  Seed: NLPFERATVM
NAPFERATVM

SEQ ID NO: 41056 - protein, 10 aa, Artificial Sequence
  Description of Artificial Sequence: Synthetic peptide
  Seed: NLPFERATVM
NAPFERATVF

SEQ ID NO: 41057 - protein, 10 aa, Artificial Sequence
  Description of Artificial Sequence: Synthetic peptide
  Seed: NLPFERATVM
NAPFERATVY

SEQ ID NO: 41058 - protein, 10 aa, Artificial Sequence
  Description of Artificial Sequence: Synthetic peptide
  Seed: NLPFERATVM
NAPFERATVV

SEQ ID NO: 41059 - protein, 10 aa, Artificial Sequence
  Description of Artificial Sequence: Synthetic peptide
  Seed: NLPFERATVM
NRPFERATVA

SEQ ID NO: 41060 - protein, 10 aa, Artificial Sequence
  Description of Artificial Sequence: Synthetic peptide
  Seed: NLPFERATVM
NRPFERATVI

SEQ ID NO: 41061 - protein, 10 aa, Artificial Sequence
  Description of Artificial Sequence: Synthetic peptide
  Seed: NLPFERATVM
NRPFERATVL

SEQ ID NO: 41062 - protein, 10 aa, Artificial Sequence
  Description of Artificial Sequence: Synthetic peptide
  Seed: NLPFERATVM
NRPFERATVM

SEQ ID NO: 41063 - protein, 10 aa, Artificial Sequence
  Description of Artificial Sequence: Synthetic peptide
  Seed: NLPFERATVM
NRPFERATVF

SEQ ID NO: 41064 - protein, 10 aa, Artificial Sequence
  Description of Artificial Sequence: Synthetic peptide
  Seed: NLPFERATVM
NRPFERATVY

SEQ ID NO: 41065 - protein, 10 aa, Artificial Sequence
  Description of Artificial Sequence: Synthetic peptide
  Seed: NLPFERATVM
NRPFERATVV

SEQ ID NO: 41066 - protein, 10 aa, Artificial Sequence
  Description of Artificial Sequence: Synthetic peptide
  Seed: NLPFERATVM
NNPFERATVI

SEQ ID NO: 41067 - protein, 10 aa, Artificial Sequence
  Description of Artificial Sequence: Synthetic peptide
  Seed: NLPFERATVM
NNPFERATVL

SEQ ID NO: 41068 - protein, 10 aa, Artificial Sequence
  Description of Artificial Sequence: Synthetic peptide
  Seed: NLPFERATIM
NLPFERATIF

SEQ ID NO: 41069 - protein, 10 aa, Artificial Sequence
  Description of Artificial Sequence: Synthetic peptide
  Seed: NLPFERATIM
NLPFERATIL

SEQ ID NO: 41070 - protein, 10 aa, Artificial Sequence
  Description of Artificial Sequence: Synthetic peptide
  Seed: NLPFERATIM
NIPFERATIY

SEQ ID NO: 41071 - protein, 10 aa, Artificial Sequence
  Description of Artificial Sequence: Synthetic peptide
  Seed: NLPFEKSTVM
NWPFEKSTVF

SEQ ID NO: 41072 - protein, 10 aa, Artificial Sequence
  Description of Artificial Sequence: Synthetic peptide
  Seed: NLPFEKSTVM
NTPFEKSTVI

SEQ ID NO: 41073 - protein, 10 aa, Artificial Sequence
  Description of Artificial Sequence: Synthetic peptide
  Seed: NLPFEKSTVM
NTPFEKSTVL

SEQ ID NO: 41074 - protein, 10 aa, Artificial Sequence
  Description of Artificial Sequence: Synthetic peptide
  Seed: NLPFEKSTVM
NTPFEKSTVM

SEQ ID NO: 41075 - protein, 10 aa, Artificial Sequence
  Description of Artificial Sequence: Synthetic peptide
  Seed: NLPFEKSTVM
NTPFEKSTVF

SEQ ID NO: 41076 - protein, 10 aa, Artificial Sequence
  Description of Artificial Sequence: Synthetic peptide
  Seed: NLPFEKSTVM
NTPFEKSTVY

SEQ ID NO: 41077 - protein, 10 aa, Artificial Sequence
  Description of Artificial Sequence: Synthetic peptide
  Seed: NLPFEKSTVM
NTPFEKSTVV

SEQ ID NO: 41078 - protein, 10 aa, Artificial Sequence
  Description of Artificial Sequence: Synthetic peptide
  Seed: NLPFEKSTVM
NWPFEKSTVI

SEQ ID NO: 41079 - protein, 10 aa, Artificial Sequence
  Description of Artificial Sequence: Synthetic peptide
  Seed: NLPFEKSTVM
NWPFEKSTVL

SEQ ID NO: 41080 - protein, 10 aa, Artificial Sequence
  Description of Artificial Sequence: Synthetic peptide
  Seed: NLPFEKSTVM
NWPFEKSTVM

SEQ ID NO: 41081 - protein, 10 aa, Artificial Sequence
  Description of Artificial Sequence: Synthetic peptide
  Seed: NLPFEKSTVM
NWPFEKSTVY

SEQ ID NO: 41082 - protein, 10 aa, Artificial Sequence
  Description of Artificial Sequence: Synthetic peptide
  Seed: NLPFERATIM
NIPFERATIF

SEQ ID NO: 41083 - protein, 10 aa, Artificial Sequence
  Description of Artificial Sequence: Synthetic peptide
  Seed: NLPFEKSTVM
NWPFEKSTVV

SEQ ID NO: 41084 - protein, 10 aa, Artificial Sequence
  Description of Artificial Sequence: Synthetic peptide
  Seed: NLPFEKSTVM
NYPFEKSTVA

SEQ ID NO: 41085 - protein, 10 aa, Artificial Sequence
  Description of Artificial Sequence: Synthetic peptide
  Seed: NLPFEKSTVM
NYPFEKSTVI

SEQ ID NO: 41086 - protein, 10 aa, Artificial Sequence
  Description of Artificial Sequence: Synthetic peptide
  Seed: NLPFEKSTVM
NYPFEKSTVL

SEQ ID NO: 41087 - protein, 10 aa, Artificial Sequence
  Description of Artificial Sequence: Synthetic peptide
  Seed: NLPFEKSTVM
NYPFEKSTVM

SEQ ID NO: 41088 - protein, 10 aa, Artificial Sequence
  Description of Artificial Sequence: Synthetic peptide
  Seed: NLPFEKSTVM
NYPFEKSTVF

SEQ ID NO: 41089 - protein, 10 aa, Artificial Sequence
  Description of Artificial Sequence: Synthetic peptide
  Seed: NLPFEKSTVM
NYPFEKSTVW

SEQ ID NO: 41090 - protein, 10 aa, Artificial Sequence
  Description of Artificial Sequence: Synthetic peptide
  Seed: NLPFEKSTVM
NYPFEKSTVY

SEQ ID NO: 41091 - protein, 10 aa, Artificial Sequence
  Description of Artificial Sequence: Synthetic peptide
  Seed: NLPFEKSTVM
NYPFEKSTVV

SEQ ID NO: 41092 - protein, 10 aa, Artificial Sequence
  Description of Artificial Sequence: Synthetic peptide
  Seed: NLPFEKSTVM
NSPFEKSTVV

SEQ ID NO: 41093 - protein, 10 aa, Artificial Sequence
  Description of Artificial Sequence: Synthetic peptide
  Seed: NLPFEKSTVM
NSPFEKSTVY

SEQ ID NO: 41094 - protein, 10 aa, Artificial Sequence
  Description of Artificial Sequence: Synthetic peptide
  Seed: NLPFEKSTVM
NSPFEKSTVF

SEQ ID NO: 41095 - protein, 10 aa, Artificial Sequence
  Description of Artificial Sequence: Synthetic peptide
  Seed: NLPFEKSTVM
NSPFEKSTVM

SEQ ID NO: 41096 - protein, 10 aa, Artificial Sequence
  Description of Artificial Sequence: Synthetic peptide
  Seed: NLPFEKSTVM
NMPFEKSTVW

SEQ ID NO: 41097 - protein, 10 aa, Artificial Sequence
  Description of Artificial Sequence: Synthetic peptide
  Seed: NLPFEKSTVM
NMPFEKSTVY

SEQ ID NO: 41098 - protein, 10 aa, Artificial Sequence
  Description of Artificial Sequence: Synthetic peptide
  Seed: NLPFEKSTVM
NMPFEKSTVV

SEQ ID NO: 41099 - protein, 10 aa, Artificial Sequence
  Description of Artificial Sequence: Synthetic peptide
  Seed: NLPFEKSTVM
NFPFEKSTVA

SEQ ID NO: 41100 - protein, 10 aa, Artificial Sequence
  Description of Artificial Sequence: Synthetic peptide
  Seed: NLPFEKSTVM
NFPFEKSTVI

SEQ ID NO: 41101 - protein, 10 aa, Artificial Sequence
  Description of Artificial Sequence: Synthetic peptide
  Seed: NLPFEKSTVM
NFPFEKSTVL

SEQ ID NO: 41102 - protein, 10 aa, Artificial Sequence
  Description of Artificial Sequence: Synthetic peptide
  Seed: NLPFEKSTVM
NFPFEKSTVM

SEQ ID NO: 41103 - protein, 10 aa, Artificial Sequence
  Description of Artificial Sequence: Synthetic peptide
  Seed: NLPFEKSTVM
NFPFEKSTVF

SEQ ID NO: 41104 - protein, 10 aa, Artificial Sequence
  Description of Artificial Sequence: Synthetic peptide
  Seed: NLPFEKSTVM
NFPFEKSTVW

SEQ ID NO: 41105 - protein, 10 aa, Artificial Sequence
  Description of Artificial Sequence: Synthetic peptide
  Seed: NLPFEKSTVM
NFPFEKSTVY

SEQ ID NO: 41106 - protein, 10 aa, Artificial Sequence
  Description of Artificial Sequence: Synthetic peptide
  Seed: NLPFEKSTVM
NFPFEKSTVV

SEQ ID NO: 41107 - protein, 10 aa, Artificial Sequence
  Description of Artificial Sequence: Synthetic peptide
  Seed: NLPFEKSTVM
NPPFEKSTVI

SEQ ID NO: 41108 - protein, 10 aa, Artificial Sequence
  Description of Artificial Sequence: Synthetic peptide
  Seed: NLPFEKSTVM
NPPFEKSTVL

SEQ ID NO: 41109 - protein, 10 aa, Artificial Sequence
  Description of Artificial Sequence: Synthetic peptide
  Seed: NLPFEKSTVM
NPPFEKSTVM

SEQ ID NO: 41110 - protein, 10 aa, Artificial Sequence
  Description of Artificial Sequence: Synthetic peptide
  Seed: NLPFEKSTVM
NPPFEKSTVF

SEQ ID NO: 41111 - protein, 10 aa, Artificial Sequence
  Description of Artificial Sequence: Synthetic peptide
  Seed: NLPFEKSTVM
NPPFEKSTVY

SEQ ID NO: 41112 - protein, 10 aa, Artificial Sequence
  Description of Artificial Sequence: Synthetic peptide
  Seed: NLPFEKSTVM
NPPFEKSTVV

SEQ ID NO: 41113 - protein, 10 aa, Artificial Sequence
  Description of Artificial Sequence: Synthetic peptide
  Seed: NLPFEKSTVM
NSPFEKSTVI

SEQ ID NO: 41114 - protein, 10 aa, Artificial Sequence
  Description of Artificial Sequence: Synthetic peptide
  Seed: NLPFEKSTVM
NSPFEKSTVL

SEQ ID NO: 41115 - protein, 10 aa, Artificial Sequence
  Description of Artificial Sequence: Synthetic peptide
  Seed: NLPFEKSTVM
NVPFEKSTVI

SEQ ID NO: 41116 - protein, 10 aa, Artificial Sequence
  Description of Artificial Sequence: Synthetic peptide
  Seed: NLPFEKSTVM
NVPFEKSTVL

SEQ ID NO: 41117 - protein, 10 aa, Artificial Sequence
  Description of Artificial Sequence: Synthetic peptide
  Seed: NLPFEKSTVM
NVPFEKSTVM

SEQ ID NO: 41118 - protein, 10 aa, Artificial Sequence
  Description of Artificial Sequence: Synthetic peptide
  Seed: NLPFERATIM
NCPFERATIM

SEQ ID NO: 41119 - protein, 10 aa, Artificial Sequence
  Description of Artificial Sequence: Synthetic peptide
  Seed: NLPFERATIM
NCPFERATIY

SEQ ID NO: 41120 - protein, 10 aa, Artificial Sequence
  Description of Artificial Sequence: Synthetic peptide
  Seed: NLPFERATIM
NQPFERATIL

SEQ ID NO: 41121 - protein, 10 aa, Artificial Sequence
  Description of Artificial Sequence: Synthetic peptide
  Seed: NLPFERATIM
NQPFERATIM

SEQ ID NO: 41122 - protein, 10 aa, Artificial Sequence
  Description of Artificial Sequence: Synthetic peptide
  Seed: NLPFERATIM
NQPFERATIF

SEQ ID NO: 41123 - protein, 10 aa, Artificial Sequence
  Description of Artificial Sequence: Synthetic peptide
  Seed: NLPFERATIM
NQPFERATIY

SEQ ID NO: 41124 - protein, 10 aa, Artificial Sequence
  Description of Artificial Sequence: Synthetic peptide
  Seed: NLPFERATIM
NEPFERATIL

SEQ ID NO: 41125 - protein, 10 aa, Artificial Sequence
  Description of Artificial Sequence: Synthetic peptide
  Seed: NLPFERATIM
NEPFERATIM

SEQ ID NO: 41126 - protein, 10 aa, Artificial Sequence
  Description of Artificial Sequence: Synthetic peptide
  Seed: NLPFERATIM
NEPFERATIF

SEQ ID NO: 41127 - protein, 10 aa, Artificial Sequence
  Description of Artificial Sequence: Synthetic peptide
  Seed: NLPFERATIM
NEPFERATIY

SEQ ID NO: 41128 - protein, 10 aa, Artificial Sequence
  Description of Artificial Sequence: Synthetic peptide
  Seed: NLPFERATIM
NGPFERATIL

SEQ ID NO: 41129 - protein, 10 aa, Artificial Sequence
  Description of Artificial Sequence: Synthetic peptide
  Seed: NLPFERATIM
NGPFERATIM

SEQ ID NO: 41130 - protein, 10 aa, Artificial Sequence
  Description of Artificial Sequence: Synthetic peptide
  Seed: NLPFERATIM
NGPFERATIF

SEQ ID NO: 41131 - protein, 10 aa, Artificial Sequence
  Description of Artificial Sequence: Synthetic peptide
  Seed: NLPFERATIM
NGPFERATIY

SEQ ID NO: 41132 - protein, 10 aa, Artificial Sequence
  Description of Artificial Sequence: Synthetic peptide
  Seed: NLPFERATIM
NHPFERATIL

SEQ ID NO: 41133 - protein, 10 aa, Artificial Sequence
  Description of Artificial Sequence: Synthetic peptide
  Seed: NLPFERATIM
NHPFERATIM

SEQ ID NO: 41134 - protein, 10 aa, Artificial Sequence
  Description of Artificial Sequence: Synthetic peptide
  Seed: NLPFERATIM
NHPFERATIF

SEQ ID NO: 41135 - protein, 10 aa, Artificial Sequence
  Description of Artificial Sequence: Synthetic peptide
  Seed: NLPFERATIM
NHPFERATIY

SEQ ID NO: 41136 - protein, 10 aa, Artificial Sequence
  Description of Artificial Sequence: Synthetic peptide
  Seed: NLPFERATIM
NIPFERATIL

SEQ ID NO: 41137 - protein, 10 aa, Artificial Sequence
  Description of Artificial Sequence: Synthetic peptide
  Seed: NLPFERATIM
NIPFERATIM

SEQ ID NO: 41138 - protein, 10 aa, Artificial Sequence
  Description of Artificial Sequence: Synthetic peptide
  Seed: NLPFERATIM
NCPFERATIF

SEQ ID NO: 41139 - protein, 10 aa, Artificial Sequence
  Description of Artificial Sequence: Synthetic peptide
  Seed: NLPFERATIM
NCPFERATIL

SEQ ID NO: 41140 - protein, 10 aa, Artificial Sequence
  Description of Artificial Sequence: Synthetic peptide
  Seed: NLPFEKSTVM
NVPFEKSTVF

SEQ ID NO: 41141 - protein, 10 aa, Artificial Sequence
  Description of Artificial Sequence: Synthetic peptide
  Seed: NLPFERATIM
NDPFERATIY

SEQ ID NO: 41142 - protein, 10 aa, Artificial Sequence
  Description of Artificial Sequence: Synthetic peptide
  Seed: NLPFEKSTVM
NVPFEKSTVY

SEQ ID NO: 41143 - protein, 10 aa, Artificial Sequence
  Description of Artificial Sequence: Synthetic peptide
  Seed: NLPFEKSTVM
NVPFEKSTVV

SEQ ID NO: 41144 - protein, 10 aa, Artificial Sequence
  Description of Artificial Sequence: Synthetic peptide
  Seed: NLPFERATIM
NAPFERATIL

SEQ ID NO: 41145 - protein, 10 aa, Artificial Sequence
  Description of Artificial Sequence: Synthetic peptide
  Seed: NLPFERATIM
NAPFERATIM

SEQ ID NO: 41146 - protein, 10 aa, Artificial Sequence
  Description of Artificial Sequence: Synthetic peptide
  Seed: NLPFERATIM
NAPFERATIF

SEQ ID NO: 41147 - protein, 10 aa, Artificial Sequence
  Description of Artificial Sequence: Synthetic peptide
  Seed: NLPFERATIM
NAPFERATIY

SEQ ID NO: 41148 - protein, 10 aa, Artificial Sequence
  Description of Artificial Sequence: Synthetic peptide
  Seed: NLPFERATIM
NRPFERATII

SEQ ID NO: 41149 - protein, 10 aa, Artificial Sequence
  Description of Artificial Sequence: Synthetic peptide
  Seed: NLPFERATIM
NRPFERATIL

SEQ ID NO: 41150 - protein, 10 aa, Artificial Sequence
  Description of Artificial Sequence: Synthetic peptide
  Seed: NLPFERATIM
NRPFERATIM

SEQ ID NO: 41151 - protein, 10 aa, Artificial Sequence
  Description of Artificial Sequence: Synthetic peptide
  Seed: NLPFERATIM
NRPFERATIF

SEQ ID NO: 41152 - protein, 10 aa, Artificial Sequence
  Description of Artificial Sequence: Synthetic peptide
  Seed: NLPFERATIM
NRPFERATIY

SEQ ID NO: 41153 - protein, 10 aa, Artificial Sequence
  Description of Artificial Sequence: Synthetic peptide
  Seed: NLPFERATIM
NRPFERATIV

SEQ ID NO: 41154 - protein, 10 aa, Artificial Sequence
  Description of Artificial Sequence: Synthetic peptide
  Seed: NLPFERATIM
NNPFERATIL

SEQ ID NO: 41155 - protein, 10 aa, Artificial Sequence
  Description of Artificial Sequence: Synthetic peptide
  Seed: NLPFERATIM
NNPFERATIM

SEQ ID NO: 41156 - protein, 10 aa, Artificial Sequence
  Description of Artificial Sequence: Synthetic peptide
  Seed: NLPFERATIM
NNPFERATIF

SEQ ID NO: 41157 - protein, 10 aa, Artificial Sequence
  Description of Artificial Sequence: Synthetic peptide
  Seed: NLPFERATIM
NNPFERATIY

SEQ ID NO: 41158 - protein, 10 aa, Artificial Sequence
  Description of Artificial Sequence: Synthetic peptide
  Seed: NLPFERATIM
NDPFERATIL

SEQ ID NO: 41159 - protein, 10 aa, Artificial Sequence
  Description of Artificial Sequence: Synthetic peptide
  Seed: NLPFERATIM
NDPFERATIM

SEQ ID NO: 41160 - protein, 10 aa, Artificial Sequence
  Description of Artificial Sequence: Synthetic peptide
  Seed: NLPFERATIM
NDPFERATIF

SEQ ID NO: 41161 - protein, 9 aa, Artificial Sequence
  Description of Artificial Sequence: Synthetic peptide
  Seed: MVGGIGRFY
MSGGIGRFW

SEQ ID NO: 41162 - protein, 9 aa, Artificial Sequence
  Description of Artificial Sequence: Synthetic peptide
  Seed: MVGGIGRFY
MSGGIGRFF

SEQ ID NO: 41163 - protein, 9 aa, Artificial Sequence
  Description of Artificial Sequence: Synthetic peptide
  Seed: MVGGIGRFY
MSGGIGRFM

SEQ ID NO: 41164 - protein, 9 aa, Artificial Sequence
  Description of Artificial Sequence: Synthetic peptide
  Seed: MIGGIGRFY
MSGGIGRFK

SEQ ID NO: 41165 - protein, 9 aa, Artificial Sequence
  Description of Artificial Sequence: Synthetic peptide
  Seed: MIGGIGRFY
MSGGIGRFI

SEQ ID NO: 41166 - protein, 9 aa, Artificial Sequence
  Description of Artificial Sequence: Synthetic peptide
  Seed: MIKRGINDR
MNKRGINDR

SEQ ID NO: 41167 - protein, 9 aa, Artificial Sequence
  Description of Artificial Sequence: Synthetic peptide
  Seed: MIKRGINDR
MAKRGINDR

SEQ ID NO: 41168 - protein, 9 aa, Artificial Sequence
  Description of Artificial Sequence: Synthetic peptide
  Seed: MIKRGINDR
MQKRGINDR

SEQ ID NO: 41169 - protein, 9 aa, Artificial Sequence
  Description of Artificial Sequence: Synthetic peptide
  Seed: MIKRGINDR
MGKRGINDR

SEQ ID NO: 41170 - protein, 9 aa, Artificial Sequence
  Description of Artificial Sequence: Synthetic peptide
  Seed: MIKRGINDR
MIKRGINDK

SEQ ID NO: 41171 - protein, 9 aa, Artificial Sequence
  Description of Artificial Sequence: Synthetic peptide
  Seed: MIKRGINDR
MLKRGINDR

SEQ ID NO: 41172 - protein, 9 aa, Artificial Sequence
  Description of Artificial Sequence: Synthetic peptide
  Seed: MIKRGINDR
MMKRGINDR

SEQ ID NO: 41173 - protein, 9 aa, Artificial Sequence
  Description of Artificial Sequence: Synthetic peptide
  Seed: MIKRGINDR
MMKRGINDK

SEQ ID NO: 41174 - protein, 9 aa, Artificial Sequence
  Description of Artificial Sequence: Synthetic peptide
  Seed: MIKRGINDR
MFKRGINDR

SEQ ID NO: 41175 - protein, 9 aa, Artificial Sequence
  Description of Artificial Sequence: Synthetic peptide
  Seed: MIKRGINDR
MFKRGINDK

SEQ ID NO: 41176 - protein, 9 aa, Artificial Sequence
  Description of Artificial Sequence: Synthetic peptide
  Seed: MIKRGINDR
MSKRGINDR

SEQ ID NO: 41177 - protein, 9 aa, Artificial Sequence
  Description of Artificial Sequence: Synthetic peptide
  Seed: MIKRGINDR
MTKRGINDR

SEQ ID NO: 41178 - protein, 9 aa, Artificial Sequence
  Description of Artificial Sequence: Synthetic peptide
  Seed: MIGGIGRFY
MSGGIGRFL

SEQ ID NO: 41179 - protein, 9 aa, Artificial Sequence
  Description of Artificial Sequence: Synthetic peptide
  Seed: MIGGIGRFY
MSGGIGRFR

SEQ ID NO: 41180 - protein, 9 aa, Artificial Sequence
  Description of Artificial Sequence: Synthetic peptide
  Seed: MIGGIGRFY
MAGGIGRFR

SEQ ID NO: 41181 - protein, 10 aa, Artificial Sequence
  Description of Artificial Sequence: Synthetic peptide
  Seed: MIDGIGRFYI
MTDGIGRFYV

SEQ ID NO: 41182 - protein, 10 aa, Artificial Sequence
  Description of Artificial Sequence: Synthetic peptide
  Seed: MIDGIGRFYI
MWDGIGRFYV

SEQ ID NO: 41183 - protein, 10 aa, Artificial Sequence
  Description of Artificial Sequence: Synthetic peptide
  Seed: MIDGIGRFYI
MYDGIGRFYV

SEQ ID NO: 41184 - protein, 10 aa, Artificial Sequence
  Description of Artificial Sequence: Synthetic peptide
  Seed: MIDGIGRFYI
MVDGIGRFYA

SEQ ID NO: 41185 - protein, 10 aa, Artificial Sequence
  Description of Artificial Sequence: Synthetic peptide
  Seed: MIDGIGRFYI
MVDGIGRFYL

SEQ ID NO: 41186 - protein, 10 aa, Artificial Sequence
  Description of Artificial Sequence: Synthetic peptide
  Seed: MIDGIGRFYI
MVDGIGRFYM

SEQ ID NO: 41187 - protein, 10 aa, Artificial Sequence
  Description of Artificial Sequence: Synthetic peptide
  Seed: MIDGIGRFYI
MVDGIGRFYF

SEQ ID NO: 41188 - protein, 10 aa, Artificial Sequence
  Description of Artificial Sequence: Synthetic peptide
  Seed: MIDGIGRFYI
MVDGIGRFYV

SEQ ID NO: 41189 - protein, 9 aa, Artificial Sequence
  Description of Artificial Sequence: Synthetic peptide
  Seed: MIGGIGRFY
MAGGIGRFI

SEQ ID NO: 41190 - protein, 9 aa, Artificial Sequence
  Description of Artificial Sequence: Synthetic peptide
  Seed: MIGGIGRFY
MCGGIGRFY

SEQ ID NO: 41191 - protein, 9 aa, Artificial Sequence
  Description of Artificial Sequence: Synthetic peptide
  Seed: MIGGIGRFY
MAGGIGRFL

SEQ ID NO: 41192 - protein, 9 aa, Artificial Sequence
  Description of Artificial Sequence: Synthetic peptide
  Seed: MIGGIGRFY
MAGGIGRFK

SEQ ID NO: 41193 - protein, 9 aa, Artificial Sequence
  Description of Artificial Sequence: Synthetic peptide
  Seed: MIGGIGRFY
MAGGIGRFM

SEQ ID NO: 41194 - protein, 9 aa, Artificial Sequence
  Description of Artificial Sequence: Synthetic peptide
  Seed: MIGGIGRFY
MAGGIGRFF

SEQ ID NO: 41195 - protein, 9 aa, Artificial Sequence
  Description of Artificial Sequence: Synthetic peptide
  Seed: MIGGIGRFY
MAGGIGRFW

SEQ ID NO: 41196 - protein, 9 aa, Artificial Sequence
  Description of Artificial Sequence: Synthetic peptide
  Seed: MIGGIGRFY
MAGGIGRFY

SEQ ID NO: 41197 - protein, 9 aa, Artificial Sequence
  Description of Artificial Sequence: Synthetic peptide
  Seed: MIGGIGRFY
MAGGIGRFV

SEQ ID NO: 41198 - protein, 9 aa, Artificial Sequence
  Description of Artificial Sequence: Synthetic peptide
  Seed: MIGGIGRFY
MRGGIGRFF

SEQ ID NO: 41199 - protein, 9 aa, Artificial Sequence
  Description of Artificial Sequence: Synthetic peptide
  Seed: MIGGIGRFY
MRGGIGRFY

SEQ ID NO: 41200 - protein, 10 aa, Artificial Sequence
  Description of Artificial Sequence: Synthetic peptide
  Seed: MIDGIGRFYI
MTDGIGRFYT

SEQ ID NO: 41201 - protein, 10 aa, Artificial Sequence
  Description of Artificial Sequence: Synthetic peptide
  Seed: MIDGIGRFYI
MTDGIGRFYF

SEQ ID NO: 41202 - protein, 10 aa, Artificial Sequence
  Description of Artificial Sequence: Synthetic peptide
  Seed: MIDGIGRFYI
MTDGIGRFYM

SEQ ID NO: 41203 - protein, 10 aa, Artificial Sequence
  Description of Artificial Sequence: Synthetic peptide
  Seed: MIDGIGRFYI
MTDGIGRFYL

SEQ ID NO: 41204 - protein, 10 aa, Artificial Sequence
  Description of Artificial Sequence: Synthetic peptide
  Seed: MIDGIGRFYI
MMDGIGRFYM

SEQ ID NO: 41205 - protein, 10 aa, Artificial Sequence
  Description of Artificial Sequence: Synthetic peptide
  Seed: MIDGIGRFYI
MMDGIGRFYF

SEQ ID NO: 41206 - protein, 10 aa, Artificial Sequence
  Description of Artificial Sequence: Synthetic peptide
  Seed: MIDGIGRFYI
MMDGIGRFYP

SEQ ID NO: 41207 - protein, 10 aa, Artificial Sequence
  Description of Artificial Sequence: Synthetic peptide
  Seed: MIDGIGRFYI
MMDGIGRFYS

SEQ ID NO: 41208 - protein, 10 aa, Artificial Sequence
  Description of Artificial Sequence: Synthetic peptide
  Seed: MIDGIGRFYI
MMDGIGRFYT

SEQ ID NO: 41209 - protein, 10 aa, Artificial Sequence
  Description of Artificial Sequence: Synthetic peptide
  Seed: MIDGIGRFYI
MMDGIGRFYV

SEQ ID NO: 41210 - protein, 10 aa, Artificial Sequence
  Description of Artificial Sequence: Synthetic peptide
  Seed: MIDGIGRFYI
MFDGIGRFYI

SEQ ID NO: 41211 - protein, 10 aa, Artificial Sequence
  Description of Artificial Sequence: Synthetic peptide
  Seed: MIDGIGRFYI
MFDGIGRFYL

SEQ ID NO: 41212 - protein, 10 aa, Artificial Sequence
  Description of Artificial Sequence: Synthetic peptide
  Seed: MIDGIGRFYI
MFDGIGRFYV

SEQ ID NO: 41213 - protein, 10 aa, Artificial Sequence
  Description of Artificial Sequence: Synthetic peptide
  Seed: MIDGIGRFYI
MPDGIGRFYI

SEQ ID NO: 41214 - protein, 10 aa, Artificial Sequence
  Description of Artificial Sequence: Synthetic peptide
  Seed: MIDGIGRFYI
MPDGIGRFYV

SEQ ID NO: 41215 - protein, 10 aa, Artificial Sequence
  Description of Artificial Sequence: Synthetic peptide
  Seed: MIDGIGRFYI
MSDGIGRFYA

SEQ ID NO: 41216 - protein, 10 aa, Artificial Sequence
  Description of Artificial Sequence: Synthetic peptide
  Seed: MIDGIGRFYI
MSDGIGRFYI

SEQ ID NO: 41217 - protein, 10 aa, Artificial Sequence
  Description of Artificial Sequence: Synthetic peptide
  Seed: MIDGIGRFYI
MSDGIGRFYL

SEQ ID NO: 41218 - protein, 10 aa, Artificial Sequence
  Description of Artificial Sequence: Synthetic peptide
  Seed: MIDGIGRFYI
MSDGIGRFYM

SEQ ID NO: 41219 - protein, 10 aa, Artificial Sequence
  Description of Artificial Sequence: Synthetic peptide
  Seed: MIDGIGRFYI
MSDGIGRFYF

SEQ ID NO: 41220 - protein, 10 aa, Artificial Sequence
  Description of Artificial Sequence: Synthetic peptide
  Seed: MIDGIGRFYI
MSDGIGRFYV

SEQ ID NO: 41221 - protein, 10 aa, Artificial Sequence
  Description of Artificial Sequence: Synthetic peptide
  Seed: MIDGIGRFYI
MTDGIGRFYA

SEQ ID NO: 41222 - protein, 10 aa, Artificial Sequence
  Description of Artificial Sequence: Synthetic peptide
  Seed: MIDGIGRFYI
MTDGIGRFYI

SEQ ID NO: 41223 - protein, 9 aa, Artificial Sequence
  Description of Artificial Sequence: Synthetic peptide
  Seed: MIGGIGRFY
MNGGIGRFY

SEQ ID NO: 41224 - protein, 9 aa, Artificial Sequence
  Description of Artificial Sequence: Synthetic peptide
  Seed: MIGGIGRFY
MQGGIGRFH

SEQ ID NO: 41225 - protein, 9 aa, Artificial Sequence
  Description of Artificial Sequence: Synthetic peptide
  Seed: MIGGIGRFY
MPGGIGRFY

SEQ ID NO: 41226 - protein, 9 aa, Artificial Sequence
  Description of Artificial Sequence: Synthetic peptide
  Seed: MIGGIGRFY
MMGGIGRFF

SEQ ID NO: 41227 - protein, 9 aa, Artificial Sequence
  Description of Artificial Sequence: Synthetic peptide
  Seed: MIGGIGRFY
MLGGIGRFY

SEQ ID NO: 41228 - protein, 9 aa, Artificial Sequence
  Description of Artificial Sequence: Synthetic peptide
  Seed: MIGGIGRFY
MKGGIGRFL

SEQ ID NO: 41229 - protein, 9 aa, Artificial Sequence
  Description of Artificial Sequence: Synthetic peptide
  Seed: MIGGIGRFY
MKGGIGRFM

SEQ ID NO: 41230 - protein, 9 aa, Artificial Sequence
  Description of Artificial Sequence: Synthetic peptide
  Seed: MIGGIGRFY
MKGGIGRFF

SEQ ID NO: 41231 - protein, 9 aa, Artificial Sequence
  Description of Artificial Sequence: Synthetic peptide
  Seed: MIGGIGRFY
MKGGIGRFY

SEQ ID NO: 41232 - protein, 9 aa, Artificial Sequence
  Description of Artificial Sequence: Synthetic peptide
  Seed: MIGGIGRFY
MMGGIGRFR

SEQ ID NO: 41233 - protein, 9 aa, Artificial Sequence
  Description of Artificial Sequence: Synthetic peptide
  Seed: MIGGIGRFY
MMGGIGRFL

SEQ ID NO: 41234 - protein, 9 aa, Artificial Sequence
  Description of Artificial Sequence: Synthetic peptide
  Seed: MIGGIGRFY
MMGGIGRFK

SEQ ID NO: 41235 - protein, 9 aa, Artificial Sequence
  Description of Artificial Sequence: Synthetic peptide
  Seed: MIGGIGRFY
MMGGIGRFM

SEQ ID NO: 41236 - protein, 9 aa, Artificial Sequence
  Description of Artificial Sequence: Synthetic peptide
  Seed: MIGGIGRFY
MMGGIGRFW

SEQ ID NO: 41237 - protein, 9 aa, Artificial Sequence
  Description of Artificial Sequence: Synthetic peptide
  Seed: MIGGIGRFY
MQGGIGRFI

SEQ ID NO: 41238 - protein, 9 aa, Artificial Sequence
  Description of Artificial Sequence: Synthetic peptide
  Seed: MIGGIGRFY
MMGGIGRFY

SEQ ID NO: 41239 - protein, 9 aa, Artificial Sequence
  Description of Artificial Sequence: Synthetic peptide
  Seed: MIGGIGRFY
MFGGIGRFM

SEQ ID NO: 41240 - protein, 9 aa, Artificial Sequence
  Description of Artificial Sequence: Synthetic peptide
  Seed: MIGGIGRFY
MFGGIGRFF

SEQ ID NO: 41241 - protein, 9 aa, Artificial Sequence
  Description of Artificial Sequence: Synthetic peptide
  Seed: MIGGIGRFY
MFGGIGRFY

SEQ ID NO: 41242 - protein, 9 aa, Artificial Sequence
  Description of Artificial Sequence: Synthetic peptide
  Seed: MIGGIGRFY
MPGGIGRFH

SEQ ID NO: 41243 - protein, 9 aa, Artificial Sequence
  Description of Artificial Sequence: Synthetic peptide
  Seed: MIGGIGRFY
MPGGIGRFL

SEQ ID NO: 41244 - protein, 9 aa, Artificial Sequence
  Description of Artificial Sequence: Synthetic peptide
  Seed: MIGGIGRFY
MPGGIGRFM

SEQ ID NO: 41245 - protein, 9 aa, Artificial Sequence
  Description of Artificial Sequence: Synthetic peptide
  Seed: MIGGIGRFY
MPGGIGRFF

SEQ ID NO: 41246 - protein, 9 aa, Artificial Sequence
  Description of Artificial Sequence: Synthetic peptide
  Seed: MIGGIGRFY
MPGGIGRFW

SEQ ID NO: 41247 - protein, 9 aa, Artificial Sequence
  Description of Artificial Sequence: Synthetic peptide
  Seed: MIGGIGRFY
MLGGIGRFW

SEQ ID NO: 41248 - protein, 9 aa, Artificial Sequence
  Description of Artificial Sequence: Synthetic peptide
  Seed: MIGGIGRFY
MLGGIGRFF

SEQ ID NO: 41249 - protein, 9 aa, Artificial Sequence
  Description of Artificial Sequence: Synthetic peptide
  Seed: MIGGIGRFY
MLGGIGRFM

SEQ ID NO: 41250 - protein, 9 aa, Artificial Sequence
  Description of Artificial Sequence: Synthetic peptide
  Seed: MIGGIGRFY
MLGGIGRFK

SEQ ID NO: 41251 - protein, 9 aa, Artificial Sequence
  Description of Artificial Sequence: Synthetic peptide
  Seed: MIGGIGRFY
MQGGIGRFL

SEQ ID NO: 41252 - protein, 9 aa, Artificial Sequence
  Description of Artificial Sequence: Synthetic peptide
  Seed: MIGGIGRFY
MQGGIGRFM

SEQ ID NO: 41253 - protein, 9 aa, Artificial Sequence
  Description of Artificial Sequence: Synthetic peptide
  Seed: MIGGIGRFY
MQGGIGRFF

SEQ ID NO: 41254 - protein, 9 aa, Artificial Sequence
  Description of Artificial Sequence: Synthetic peptide
  Seed: MIGGIGRFY
MQGGIGRFW

SEQ ID NO: 41255 - protein, 9 aa, Artificial Sequence
  Description of Artificial Sequence: Synthetic peptide
  Seed: MIGGIGRFY
MQGGIGRFY

SEQ ID NO: 41256 - protein, 9 aa, Artificial Sequence
  Description of Artificial Sequence: Synthetic peptide
  Seed: MIGGIGRFY
MEGGIGRFF

SEQ ID NO: 41257 - protein, 9 aa, Artificial Sequence
  Description of Artificial Sequence: Synthetic peptide
  Seed: MIGGIGRFY
MEGGIGRFY

SEQ ID NO: 41258 - protein, 9 aa, Artificial Sequence
  Description of Artificial Sequence: Synthetic peptide
  Seed: MIGGIGRFY
MGGGIGRFM

SEQ ID NO: 41259 - protein, 9 aa, Artificial Sequence
  Description of Artificial Sequence: Synthetic peptide
  Seed: MIGGIGRFY
MGGGIGRFW

SEQ ID NO: 41260 - protein, 9 aa, Artificial Sequence
  Description of Artificial Sequence: Synthetic peptide
  Seed: MIGGIGRFY
MGGGIGRFY

SEQ ID NO: 41261 - protein, 9 aa, Artificial Sequence
  Description of Artificial Sequence: Synthetic peptide
  Seed: MIGGIGRFY
MHGGIGRFM

SEQ ID NO: 41262 - protein, 9 aa, Artificial Sequence
  Description of Artificial Sequence: Synthetic peptide
  Seed: MIGGIGRFY
MHGGIGRFF

SEQ ID NO: 41263 - protein, 9 aa, Artificial Sequence
  Description of Artificial Sequence: Synthetic peptide
  Seed: MIGGIGRFY
MHGGIGRFY

SEQ ID NO: 41264 - protein, 9 aa, Artificial Sequence
  Description of Artificial Sequence: Synthetic peptide
  Seed: MIGGIGRFY
MIGGIGRFR

SEQ ID NO: 41265 - protein, 9 aa, Artificial Sequence
  Description of Artificial Sequence: Synthetic peptide
  Seed: MIGGIGRFY
MIGGIGRFK

SEQ ID NO: 41266 - protein, 9 aa, Artificial Sequence
  Description of Artificial Sequence: Synthetic peptide
  Seed: MIGGIGRFY
MIGGIGRFM

SEQ ID NO: 41267 - protein, 9 aa, Artificial Sequence
  Description of Artificial Sequence: Synthetic peptide
  Seed: MIGGIGRFY
MIGGIGRFF

SEQ ID NO: 41268 - protein, 9 aa, Artificial Sequence
  Description of Artificial Sequence: Synthetic peptide
  Seed: MIGGIGRFY
MIGGIGRFW

SEQ ID NO: 41269 - protein, 9 aa, Artificial Sequence
  Description of Artificial Sequence: Synthetic peptide
  Seed: MIGGIGRFY
MLGGIGRFR

SEQ ID NO: 41270 - protein, 9 aa, Artificial Sequence
  Description of Artificial Sequence: Synthetic peptide
  Seed: MIKRGINDR
MTKRGINDK

SEQ ID NO: 41271 - protein, 9 aa, Artificial Sequence
  Description of Artificial Sequence: Synthetic peptide
  Seed: MIKRGINDR
MWKRGINDR

SEQ ID NO: 41272 - protein, 9 aa, Artificial Sequence
  Description of Artificial Sequence: Synthetic peptide
  Seed: MIKRGINDR
MWKRGINDK

SEQ ID NO: 41273 - protein, 9 aa, Artificial Sequence
  Description of Artificial Sequence: Synthetic peptide
  Seed: MNNEGSYFF
MANEGSYFM

SEQ ID NO: 41274 - protein, 11 aa, Artificial Sequence
  Description of Artificial Sequence: Synthetic peptide
  Seed: MMIWHSNLNDA
MYIWHSNLNDV

SEQ ID NO: 41275 - protein, 11 aa, Artificial Sequence
  Description of Artificial Sequence: Synthetic peptide
  Seed: MMIWHSNLNDA
MVIWHSNLNDV

SEQ ID NO: 41276 - protein, 9 aa, Artificial Sequence
  Description of Artificial Sequence: Synthetic peptide
  Seed: MNNEGSYFF
MANEGSYFA

SEQ ID NO: 41277 - protein, 9 aa, Artificial Sequence
  Description of Artificial Sequence: Synthetic peptide
  Seed: MNNEGSYFF
MANEGSYFC

SEQ ID NO: 41278 - protein, 9 aa, Artificial Sequence
  Description of Artificial Sequence: Synthetic peptide
  Seed: MNNEGSYFF
MANEGSYFQ

SEQ ID NO: 41279 - protein, 9 aa, Artificial Sequence
  Description of Artificial Sequence: Synthetic peptide
  Seed: MNNEGSYFF
MANEGSYFG

SEQ ID NO: 41280 - protein, 9 aa, Artificial Sequence
  Description of Artificial Sequence: Synthetic peptide
  Seed: MNNEGSYFF
MANEGSYFH

SEQ ID NO: 41281 - protein, 9 aa, Artificial Sequence
  Description of Artificial Sequence: Synthetic peptide
  Seed: MNNEGSYFF
MANEGSYFI

SEQ ID NO: 41282 - protein, 9 aa, Artificial Sequence
  Description of Artificial Sequence: Synthetic peptide
  Seed: MNNEGSYFF
MANEGSYFL

SEQ ID NO: 41283 - protein, 9 aa, Artificial Sequence
  Description of Artificial Sequence: Synthetic peptide
  Seed: MNNEGSYFF
MANEGSYFF

SEQ ID NO: 41284 - protein, 9 aa, Artificial Sequence
  Description of Artificial Sequence: Synthetic peptide
  Seed: MNNEGSYFF
MRNEGSYFY

SEQ ID NO: 41285 - protein, 9 aa, Artificial Sequence
  Description of Artificial Sequence: Synthetic peptide
  Seed: MNNEGSYFF
MANEGSYFS

SEQ ID NO: 41286 - protein, 9 aa, Artificial Sequence
  Description of Artificial Sequence: Synthetic peptide
  Seed: MNNEGSYFF
MANEGSYFT

SEQ ID NO: 41287 - protein, 9 aa, Artificial Sequence
  Description of Artificial Sequence: Synthetic peptide
  Seed: MNNEGSYFF
MANEGSYFW

SEQ ID NO: 41288 - protein, 9 aa, Artificial Sequence
  Description of Artificial Sequence: Synthetic peptide
  Seed: MNNEGSYFF
MANEGSYFY

SEQ ID NO: 41289 - protein, 9 aa, Artificial Sequence
  Description of Artificial Sequence: Synthetic peptide
  Seed: MNNEGSYFF
MANEGSYFV

SEQ ID NO: 41290 - protein, 9 aa, Artificial Sequence
  Description of Artificial Sequence: Synthetic peptide
  Seed: MNNEGSYFF
MRNEGSYFI

SEQ ID NO: 41291 - protein, 9 aa, Artificial Sequence
  Description of Artificial Sequence: Synthetic peptide
  Seed: MNNEGSYFF
MRNEGSYFL

SEQ ID NO: 41292 - protein, 9 aa, Artificial Sequence
  Description of Artificial Sequence: Synthetic peptide
  Seed: MNNEGSYFF
MRNEGSYFM

SEQ ID NO: 41293 - protein, 9 aa, Artificial Sequence
  Description of Artificial Sequence: Synthetic peptide
  Seed: MNNEGSYFF
MRNEGSYFF

SEQ ID NO: 41294 - protein, 11 aa, Artificial Sequence
  Description of Artificial Sequence: Synthetic peptide
  Seed: MMIWHSNLNDA
MFIWHSNLNDV

SEQ ID NO: 41295 - protein, 11 aa, Artificial Sequence
  Description of Artificial Sequence: Synthetic peptide
  Seed: MMIWHSNLNDA
MMIWHSNLNDV

SEQ ID NO: 41296 - protein, 11 aa, Artificial Sequence
  Description of Artificial Sequence: Synthetic peptide
  Seed: MMIWHSNLNDA
MMIWHSNLNDL

SEQ ID NO: 41297 - protein, 11 aa, Artificial Sequence
  Description of Artificial Sequence: Synthetic peptide
  Seed: MMIWHSNLNDA
MMIWHSNLNDI

SEQ ID NO: 41298 - protein, 8 aa, Artificial Sequence
  Description of Artificial Sequence: Synthetic peptide
  Seed: MMIWHSNL
MMIWHSNA

SEQ ID NO: 41299 - protein, 8 aa, Artificial Sequence
  Description of Artificial Sequence: Synthetic peptide
  Seed: MMIWHSNL
MMIWHSNI

SEQ ID NO: 41300 - protein, 8 aa, Artificial Sequence
  Description of Artificial Sequence: Synthetic peptide
  Seed: MMIWHSNL
MMIWHSNM

SEQ ID NO: 41301 - protein, 8 aa, Artificial Sequence
  Description of Artificial Sequence: Synthetic peptide
  Seed: MMIWHSNL
MMIWHSNF

SEQ ID NO: 41302 - protein, 8 aa, Artificial Sequence
  Description of Artificial Sequence: Synthetic peptide
  Seed: MMIWHSNL
MMIWHSNY

SEQ ID NO: 41303 - protein, 8 aa, Artificial Sequence
  Description of Artificial Sequence: Synthetic peptide
  Seed: MMIWHSNL
MMIWHSNV

SEQ ID NO: 41304 - protein, 8 aa, Artificial Sequence
  Description of Artificial Sequence: Synthetic peptide
  Seed: MMIWHSNL
MPIWHSNL

SEQ ID NO: 41305 - protein, 8 aa, Artificial Sequence
  Description of Artificial Sequence: Synthetic peptide
  Seed: MMIWHSNL
MSIWHSNF

SEQ ID NO: 41306 - protein, 8 aa, Artificial Sequence
  Description of Artificial Sequence: Synthetic peptide
  Seed: MMIWHSNL
MSIWHSNY

SEQ ID NO: 41307 - protein, 8 aa, Artificial Sequence
  Description of Artificial Sequence: Synthetic peptide
  Seed: MMIWHSNL
MTIWHSNF

SEQ ID NO: 41308 - protein, 8 aa, Artificial Sequence
  Description of Artificial Sequence: Synthetic peptide
  Seed: MMIWHSNL
MTIWHSNY

SEQ ID NO: 41309 - protein, 8 aa, Artificial Sequence
  Description of Artificial Sequence: Synthetic peptide
  Seed: MMIWHSNL
MVIWHSNF

SEQ ID NO: 41310 - protein, 8 aa, Artificial Sequence
  Description of Artificial Sequence: Synthetic peptide
  Seed: MMIWHSNL
MVIWHSNY

SEQ ID NO: 41311 - protein, 11 aa, Artificial Sequence
  Description of Artificial Sequence: Synthetic peptide
  Seed: MMIWHSNLNDA
MQIWHSNLNDV

SEQ ID NO: 41312 - protein, 11 aa, Artificial Sequence
  Description of Artificial Sequence: Synthetic peptide
  Seed: MMIWHSNLNDA
MIIWHSNLNDV

SEQ ID NO: 41313 - protein, 11 aa, Artificial Sequence
  Description of Artificial Sequence: Synthetic peptide
  Seed: MMIWHSNLNDA
MLIWHSNLNDA

SEQ ID NO: 41314 - protein, 11 aa, Artificial Sequence
  Description of Artificial Sequence: Synthetic peptide
  Seed: MMIWHSNLNDA
MLIWHSNLNDI

SEQ ID NO: 41315 - protein, 11 aa, Artificial Sequence
  Description of Artificial Sequence: Synthetic peptide
  Seed: MMIWHSNLNDA
MLIWHSNLNDL

SEQ ID NO: 41316 - protein, 11 aa, Artificial Sequence
  Description of Artificial Sequence: Synthetic peptide
  Seed: MMIWHSNLNDA
MLIWHSNLNDV

SEQ ID NO: 41317 - protein, 9 aa, Artificial Sequence
  Description of Artificial Sequence: Synthetic peptide
  Seed: MNNEGSYFF
MRNEGSYFW

SEQ ID NO: 41318 - protein, 9 aa, Artificial Sequence
  Description of Artificial Sequence: Synthetic peptide
  Seed: MNNEGSYFF
MRNEGSYFV

SEQ ID NO: 41319 - protein, 9 aa, Artificial Sequence
  Description of Artificial Sequence: Synthetic peptide
  Seed: MIKRGINDR
MYKRGINDR

SEQ ID NO: 41320 - protein, 9 aa, Artificial Sequence
  Description of Artificial Sequence: Synthetic peptide
  Seed: MNNEGSYFF
MENEGSYFW

SEQ ID NO: 41321 - protein, 9 aa, Artificial Sequence
  Description of Artificial Sequence: Synthetic peptide
  Seed: MNNEGSYFF
MQNEGSYFS

SEQ ID NO: 41322 - protein, 9 aa, Artificial Sequence
  Description of Artificial Sequence: Synthetic peptide
  Seed: MNNEGSYFF
MQNEGSYFT

SEQ ID NO: 41323 - protein, 9 aa, Artificial Sequence
  Description of Artificial Sequence: Synthetic peptide
  Seed: MNNEGSYFF
MQNEGSYFW

SEQ ID NO: 41324 - protein, 9 aa, Artificial Sequence
  Description of Artificial Sequence: Synthetic peptide
  Seed: MNNEGSYFF
MQNEGSYFY

SEQ ID NO: 41325 - protein, 9 aa, Artificial Sequence
  Description of Artificial Sequence: Synthetic peptide
  Seed: MNNEGSYFF
MQNEGSYFV

SEQ ID NO: 41326 - protein, 9 aa, Artificial Sequence
  Description of Artificial Sequence: Synthetic peptide
  Seed: MNNEGSYFF
MENEGSYFI

SEQ ID NO: 41327 - protein, 9 aa, Artificial Sequence
  Description of Artificial Sequence: Synthetic peptide
  Seed: MNNEGSYFF
MENEGSYFL

SEQ ID NO: 41328 - protein, 9 aa, Artificial Sequence
  Description of Artificial Sequence: Synthetic peptide
  Seed: MNNEGSYFF
MENEGSYFM

SEQ ID NO: 41329 - protein, 9 aa, Artificial Sequence
  Description of Artificial Sequence: Synthetic peptide
  Seed: MNNEGSYFF
MENEGSYFF

SEQ ID NO: 41330 - protein, 9 aa, Artificial Sequence
  Description of Artificial Sequence: Synthetic peptide
  Seed: MNNEGSYFF
MENEGSYFY

SEQ ID NO: 41331 - protein, 9 aa, Artificial Sequence
  Description of Artificial Sequence: Synthetic peptide
  Seed: MNNEGSYFF
MNNEGSYFI

SEQ ID NO: 41332 - protein, 9 aa, Artificial Sequence
  Description of Artificial Sequence: Synthetic peptide
  Seed: MNNEGSYFF
MENEGSYFV

SEQ ID NO: 41333 - protein, 9 aa, Artificial Sequence
  Description of Artificial Sequence: Synthetic peptide
  Seed: MNNEGSYFF
MGNEGSYFI

SEQ ID NO: 41334 - protein, 9 aa, Artificial Sequence
  Description of Artificial Sequence: Synthetic peptide
  Seed: MNNEGSYFF
MGNEGSYFL

SEQ ID NO: 41335 - protein, 9 aa, Artificial Sequence
  Description of Artificial Sequence: Synthetic peptide
  Seed: MNNEGSYFF
MGNEGSYFM

SEQ ID NO: 41336 - protein, 9 aa, Artificial Sequence
  Description of Artificial Sequence: Synthetic peptide
  Seed: MNNEGSYFF
MGNEGSYFF

SEQ ID NO: 41337 - protein, 9 aa, Artificial Sequence
  Description of Artificial Sequence: Synthetic peptide
  Seed: MNNEGSYFF
MGNEGSYFW

SEQ ID NO: 41338 - protein, 9 aa, Artificial Sequence
  Description of Artificial Sequence: Synthetic peptide
  Seed: MNNEGSYFF
MGNEGSYFY

SEQ ID NO: 41339 - protein, 9 aa, Artificial Sequence
  Description of Artificial Sequence: Synthetic peptide
  Seed: MNNEGSYFF
MGNEGSYFV

SEQ ID NO: 41340 - protein, 9 aa, Artificial Sequence
  Description of Artificial Sequence: Synthetic peptide
  Seed: MNNEGSYFF
MHNEGSYFI

SEQ ID NO: 41341 - protein, 9 aa, Artificial Sequence
  Description of Artificial Sequence: Synthetic peptide
  Seed: MNNEGSYFF
MQNEGSYFF

SEQ ID NO: 41342 - protein, 9 aa, Artificial Sequence
  Description of Artificial Sequence: Synthetic peptide
  Seed: MNNEGSYFF
MQNEGSYFM

SEQ ID NO: 41343 - protein, 9 aa, Artificial Sequence
  Description of Artificial Sequence: Synthetic peptide
  Seed: MNNEGSYFF
MQNEGSYFL

SEQ ID NO: 41344 - protein, 9 aa, Artificial Sequence
  Description of Artificial Sequence: Synthetic peptide
  Seed: MNNEGSYFF
MQNEGSYFI

SEQ ID NO: 41345 - protein, 9 aa, Artificial Sequence
  Description of Artificial Sequence: Synthetic peptide
  Seed: MNNEGSYFF
MNNEGSYFL

SEQ ID NO: 41346 - protein, 9 aa, Artificial Sequence
  Description of Artificial Sequence: Synthetic peptide
  Seed: MNNEGSYFF
MNNEGSYFM

SEQ ID NO: 41347 - protein, 9 aa, Artificial Sequence
  Description of Artificial Sequence: Synthetic peptide
  Seed: MNNEGSYFF
MNNEGSYFW

SEQ ID NO: 41348 - protein, 9 aa, Artificial Sequence
  Description of Artificial Sequence: Synthetic peptide
  Seed: MNNEGSYFF
MNNEGSYFY

SEQ ID NO: 41349 - protein, 9 aa, Artificial Sequence
  Description of Artificial Sequence: Synthetic peptide
  Seed: MNNEGSYFF
MNNEGSYFV

SEQ ID NO: 41350 - protein, 9 aa, Artificial Sequence
  Description of Artificial Sequence: Synthetic peptide
  Seed: MNNEGSYFF
MDNEGSYFI

SEQ ID NO: 41351 - protein, 9 aa, Artificial Sequence
  Description of Artificial Sequence: Synthetic peptide
  Seed: MNNEGSYFF
MDNEGSYFW

SEQ ID NO: 41352 - protein, 9 aa, Artificial Sequence
  Description of Artificial Sequence: Synthetic peptide
  Seed: MNNEGSYFF
MDNEGSYFY

SEQ ID NO: 41353 - protein, 9 aa, Artificial Sequence
  Description of Artificial Sequence: Synthetic peptide
  Seed: MNNEGSYFF
MDNEGSYFV

SEQ ID NO: 41354 - protein, 9 aa, Artificial Sequence
  Description of Artificial Sequence: Synthetic peptide
  Seed: MNNEGSYFF
MCNEGSYFL

SEQ ID NO: 41355 - protein, 9 aa, Artificial Sequence
  Description of Artificial Sequence: Synthetic peptide
  Seed: MNNEGSYFF
MCNEGSYFM

SEQ ID NO: 41356 - protein, 9 aa, Artificial Sequence
  Description of Artificial Sequence: Synthetic peptide
  Seed: MNNEGSYFF
MCNEGSYFF

SEQ ID NO: 41357 - protein, 9 aa, Artificial Sequence
  Description of Artificial Sequence: Synthetic peptide
  Seed: MNNEGSYFF
MCNEGSYFW

SEQ ID NO: 41358 - protein, 9 aa, Artificial Sequence
  Description of Artificial Sequence: Synthetic peptide
  Seed: MNNEGSYFF
MCNEGSYFY

SEQ ID NO: 41359 - protein, 9 aa, Artificial Sequence
  Description of Artificial Sequence: Synthetic peptide
  Seed: MNNEGSYFF
MCNEGSYFV

SEQ ID NO: 41360 - protein, 9 aa, Artificial Sequence
  Description of Artificial Sequence: Synthetic peptide
  Seed: MNNEGSYFF
MQNEGSYFA

SEQ ID NO: 41361 - protein, 9 aa, Artificial Sequence
  Description of Artificial Sequence: Synthetic peptide
  Seed: MNNEGSYFF
MQNEGSYFC

SEQ ID NO: 41362 - protein, 9 aa, Artificial Sequence
  Description of Artificial Sequence: Synthetic peptide
  Seed: MNNEGSYFF
MQNEGSYFG

SEQ ID NO: 41363 - protein, 9 aa, Artificial Sequence
  Description of Artificial Sequence: Synthetic peptide
  Seed: MNNEGSYFF
MQNEGSYFH

SEQ ID NO: 41364 - protein, 8 aa, Artificial Sequence
  Description of Artificial Sequence: Synthetic peptide
  Seed: MMIWHSNL
MKIWHSNY

SEQ ID NO: 41365 - protein, 8 aa, Artificial Sequence
  Description of Artificial Sequence: Synthetic peptide
  Seed: MMIWHSNL
MKIWHSNF

SEQ ID NO: 41366 - protein, 8 aa, Artificial Sequence
  Description of Artificial Sequence: Synthetic peptide
  Seed: MMIWHSNL
MKIWHSNM

SEQ ID NO: 41367 - protein, 9 aa, Artificial Sequence
  Description of Artificial Sequence: Synthetic peptide
  Seed: MMDQVRESR
MNDQVRESR

SEQ ID NO: 41368 - protein, 10 aa, Artificial Sequence
  Description of Artificial Sequence: Synthetic peptide
  Seed: MIWHSNLNDA
MMWHSNLNDV

SEQ ID NO: 41369 - protein, 10 aa, Artificial Sequence
  Description of Artificial Sequence: Synthetic peptide
  Seed: MIWHSNLNDA
MSWHSNLNDV

SEQ ID NO: 41370 - protein, 10 aa, Artificial Sequence
  Description of Artificial Sequence: Synthetic peptide
  Seed: MIWHSNLNDA
MTWHSNLNDI

SEQ ID NO: 41371 - protein, 10 aa, Artificial Sequence
  Description of Artificial Sequence: Synthetic peptide
  Seed: MIWHSNLNDA
MTWHSNLNDV

SEQ ID NO: 41372 - protein, 10 aa, Artificial Sequence
  Description of Artificial Sequence: Synthetic peptide
  Seed: MIWHSNLNDA
MVWHSNLNDI

SEQ ID NO: 41373 - protein, 10 aa, Artificial Sequence
  Description of Artificial Sequence: Synthetic peptide
  Seed: MIWHSNLNDA
MVWHSNLNDL

SEQ ID NO: 41374 - protein, 10 aa, Artificial Sequence
  Description of Artificial Sequence: Synthetic peptide
  Seed: MIWHSNLNDA
MVWHSNLNDV

SEQ ID NO: 41375 - protein, 9 aa, Artificial Sequence
  Description of Artificial Sequence: Synthetic peptide
  Seed: MMDQVRESR
MADQVRESR

SEQ ID NO: 41376 - protein, 9 aa, Artificial Sequence
  Description of Artificial Sequence: Synthetic peptide
  Seed: MMDQVRESR
MADQVRESK

SEQ ID NO: 41377 - protein, 9 aa, Artificial Sequence
  Description of Artificial Sequence: Synthetic peptide
  Seed: MMDQVRESR
MQDQVRESR

SEQ ID NO: 41378 - protein, 8 aa, Artificial Sequence
  Description of Artificial Sequence: Synthetic peptide
  Seed: MMIWHSNL
MKIWHSNL

SEQ ID NO: 41379 - protein, 9 aa, Artificial Sequence
  Description of Artificial Sequence: Synthetic peptide
  Seed: MMDQVRESR
MGDQVRESR

SEQ ID NO: 41380 - protein, 9 aa, Artificial Sequence
  Description of Artificial Sequence: Synthetic peptide
  Seed: MMDQVRESR
MIDQVRESR

SEQ ID NO: 41381 - protein, 9 aa, Artificial Sequence
  Description of Artificial Sequence: Synthetic peptide
  Seed: MMDQVRESR
MIDQVRESK

SEQ ID NO: 41382 - protein, 9 aa, Artificial Sequence
  Description of Artificial Sequence: Synthetic peptide
  Seed: MMDQVRESR
MLDQVRESR

SEQ ID NO: 41383 - protein, 9 aa, Artificial Sequence
  Description of Artificial Sequence: Synthetic peptide
  Seed: MMDQVRESR
MMDQVRESK

SEQ ID NO: 41384 - protein, 9 aa, Artificial Sequence
  Description of Artificial Sequence: Synthetic peptide
  Seed: MMDQVRESR
MFDQVRESR

SEQ ID NO: 41385 - protein, 9 aa, Artificial Sequence
  Description of Artificial Sequence: Synthetic peptide
  Seed: MMDQVRESR
MFDQVRESK

SEQ ID NO: 41386 - protein, 9 aa, Artificial Sequence
  Description of Artificial Sequence: Synthetic peptide
  Seed: MMDQVRESR
MSDQVRESR

SEQ ID NO: 41387 - protein, 9 aa, Artificial Sequence
  Description of Artificial Sequence: Synthetic peptide
  Seed: MMDQVRESR
MSDQVRESK

SEQ ID NO: 41388 - protein, 10 aa, Artificial Sequence
  Description of Artificial Sequence: Synthetic peptide
  Seed: MIWHSNLNDA
MMWHSNLNDT

SEQ ID NO: 41389 - protein, 10 aa, Artificial Sequence
  Description of Artificial Sequence: Synthetic peptide
  Seed: MIWHSNLNDA
MMWHSNLNDM

SEQ ID NO: 41390 - protein, 10 aa, Artificial Sequence
  Description of Artificial Sequence: Synthetic peptide
  Seed: MIWHSNLNDA
MMWHSNLNDL

SEQ ID NO: 41391 - protein, 10 aa, Artificial Sequence
  Description of Artificial Sequence: Synthetic peptide
  Seed: MIWHSNLNDA
MMWHSNLNDI

SEQ ID NO: 41392 - protein, 9 aa, Artificial Sequence
  Description of Artificial Sequence: Synthetic peptide
  Seed: MIKRGINDR
MYKRGINDK

SEQ ID NO: 41393 - protein, 9 aa, Artificial Sequence
  Description of Artificial Sequence: Synthetic peptide
  Seed: MIKRGINDR
MVKRGINDK

SEQ ID NO: 41394 - protein, 10 aa, Artificial Sequence
  Description of Artificial Sequence: Synthetic peptide
  Seed: MIWHSNLNDA
MAWHSNLNDV

SEQ ID NO: 41395 - protein, 10 aa, Artificial Sequence
  Description of Artificial Sequence: Synthetic peptide
  Seed: MIWHSNLNDA
MQWHSNLNDI

SEQ ID NO: 41396 - protein, 10 aa, Artificial Sequence
  Description of Artificial Sequence: Synthetic peptide
  Seed: MIWHSNLNDA
MQWHSNLNDL

SEQ ID NO: 41397 - protein, 10 aa, Artificial Sequence
  Description of Artificial Sequence: Synthetic peptide
  Seed: MIWHSNLNDA
MQWHSNLNDV

SEQ ID NO: 41398 - protein, 10 aa, Artificial Sequence
  Description of Artificial Sequence: Synthetic peptide
  Seed: MIWHSNLNDA
MIWHSNLNDI

SEQ ID NO: 41399 - protein, 10 aa, Artificial Sequence
  Description of Artificial Sequence: Synthetic peptide
  Seed: MIWHSNLNDA
MIWHSNLNDL

SEQ ID NO: 41400 - protein, 10 aa, Artificial Sequence
  Description of Artificial Sequence: Synthetic peptide
  Seed: MIWHSNLNDA
MIWHSNLNDV

SEQ ID NO: 41401 - protein, 10 aa, Artificial Sequence
  Description of Artificial Sequence: Synthetic peptide
  Seed: MIWHSNLNDA
MLWHSNLNDA

SEQ ID NO: 41402 - protein, 10 aa, Artificial Sequence
  Description of Artificial Sequence: Synthetic peptide
  Seed: MIWHSNLNDA
MLWHSNLNDC

SEQ ID NO: 41403 - protein, 10 aa, Artificial Sequence
  Description of Artificial Sequence: Synthetic peptide
  Seed: MIWHSNLNDA
MLWHSNLNDI

SEQ ID NO: 41404 - protein, 10 aa, Artificial Sequence
  Description of Artificial Sequence: Synthetic peptide
  Seed: MIWHSNLNDA
MLWHSNLNDL

SEQ ID NO: 41405 - protein, 10 aa, Artificial Sequence
  Description of Artificial Sequence: Synthetic peptide
  Seed: MIWHSNLNDA
MLWHSNLNDM

SEQ ID NO: 41406 - protein, 10 aa, Artificial Sequence
  Description of Artificial Sequence: Synthetic peptide
  Seed: MIWHSNLNDA
MLWHSNLNDT

SEQ ID NO: 41407 - protein, 10 aa, Artificial Sequence
  Description of Artificial Sequence: Synthetic peptide
  Seed: MIWHSNLNDA
MLWHSNLNDV

SEQ ID NO: 41408 - protein, 10 aa, Artificial Sequence
  Description of Artificial Sequence: Synthetic peptide
  Seed: MIWHSNLNDA
MMWHSNLNDA

SEQ ID NO: 41409 - protein, 10 aa, Artificial Sequence
  Description of Artificial Sequence: Synthetic peptide
  Seed: MIWHSNLNDA
MMWHSNLNDC

SEQ ID NO: 41410 - protein, 9 aa, Artificial Sequence
  Description of Artificial Sequence: Synthetic peptide
  Seed: MMDQVRESR
MTDQVRESR

SEQ ID NO: 41411 - protein, 9 aa, Artificial Sequence
  Description of Artificial Sequence: Synthetic peptide
  Seed: MMDQVRESR
MTDQVRESK

SEQ ID NO: 41412 - protein, 9 aa, Artificial Sequence
  Description of Artificial Sequence: Synthetic peptide
  Seed: MMDQVRESR
MWDQVRESR

SEQ ID NO: 41413 - protein, 8 aa, Artificial Sequence
  Description of Artificial Sequence: Synthetic peptide
  Seed: MMIWHSNL
MQIWHSNF

SEQ ID NO: 41414 - protein, 8 aa, Artificial Sequence
  Description of Artificial Sequence: Synthetic peptide
  Seed: MMIWHSNL
MQIWHSNS

SEQ ID NO: 41415 - protein, 8 aa, Artificial Sequence
  Description of Artificial Sequence: Synthetic peptide
  Seed: MMIWHSNL
MQIWHSNT

SEQ ID NO: 41416 - protein, 8 aa, Artificial Sequence
  Description of Artificial Sequence: Synthetic peptide
  Seed: MMIWHSNL
MQIWHSNW

SEQ ID NO: 41417 - protein, 8 aa, Artificial Sequence
  Description of Artificial Sequence: Synthetic peptide
  Seed: MMIWHSNL
MQIWHSNY

SEQ ID NO: 41418 - protein, 8 aa, Artificial Sequence
  Description of Artificial Sequence: Synthetic peptide
  Seed: MMIWHSNL
MQIWHSNV

SEQ ID NO: 41419 - protein, 8 aa, Artificial Sequence
  Description of Artificial Sequence: Synthetic peptide
  Seed: MMIWHSNL
MEIWHSNM

SEQ ID NO: 41420 - protein, 8 aa, Artificial Sequence
  Description of Artificial Sequence: Synthetic peptide
  Seed: MMIWHSNL
MEIWHSNF

SEQ ID NO: 41421 - protein, 8 aa, Artificial Sequence
  Description of Artificial Sequence: Synthetic peptide
  Seed: MMIWHSNL
MEIWHSNY

SEQ ID NO: 41422 - protein, 8 aa, Artificial Sequence
  Description of Artificial Sequence: Synthetic peptide
  Seed: MMIWHSNL
MHIWHSNM

SEQ ID NO: 41423 - protein, 8 aa, Artificial Sequence
  Description of Artificial Sequence: Synthetic peptide
  Seed: MMIWHSNL
MHIWHSNF

SEQ ID NO: 41424 - protein, 8 aa, Artificial Sequence
  Description of Artificial Sequence: Synthetic peptide
  Seed: MMIWHSNL
MHIWHSNY

SEQ ID NO: 41425 - protein, 8 aa, Artificial Sequence
  Description of Artificial Sequence: Synthetic peptide
  Seed: MMIWHSNL
MIIWHSNF

SEQ ID NO: 41426 - protein, 8 aa, Artificial Sequence
  Description of Artificial Sequence: Synthetic peptide
  Seed: MMIWHSNL
MIIWHSNY

SEQ ID NO: 41427 - protein, 8 aa, Artificial Sequence
  Description of Artificial Sequence: Synthetic peptide
  Seed: MMIWHSNL
MLIWHSNA

SEQ ID NO: 41428 - protein, 8 aa, Artificial Sequence
  Description of Artificial Sequence: Synthetic peptide
  Seed: MMIWHSNL
MLIWHSNI

SEQ ID NO: 41429 - protein, 8 aa, Artificial Sequence
  Description of Artificial Sequence: Synthetic peptide
  Seed: MMIWHSNL
MLIWHSNL

SEQ ID NO: 41430 - protein, 8 aa, Artificial Sequence
  Description of Artificial Sequence: Synthetic peptide
  Seed: MMIWHSNL
MLIWHSNF

SEQ ID NO: 41431 - protein, 8 aa, Artificial Sequence
  Description of Artificial Sequence: Synthetic peptide
  Seed: MMIWHSNL
MLIWHSNY

SEQ ID NO: 41432 - protein, 8 aa, Artificial Sequence
  Description of Artificial Sequence: Synthetic peptide
  Seed: MMIWHSNL
MLIWHSNV

SEQ ID NO: 41433 - protein, 8 aa, Artificial Sequence
  Description of Artificial Sequence: Synthetic peptide
  Seed: MMIWHSNL
MQIWHSNP

SEQ ID NO: 41434 - protein, 8 aa, Artificial Sequence
  Description of Artificial Sequence: Synthetic peptide
  Seed: MMIWHSNL
MQIWHSNM

SEQ ID NO: 41435 - protein, 9 aa, Artificial Sequence
  Description of Artificial Sequence: Synthetic peptide
  Seed: MMDQVRESR
MWDQVRESK

SEQ ID NO: 41436 - protein, 8 aa, Artificial Sequence
  Description of Artificial Sequence: Synthetic peptide
  Seed: MMIWHSNL
MQIWHSNL

SEQ ID NO: 41437 - protein, 9 aa, Artificial Sequence
  Description of Artificial Sequence: Synthetic peptide
  Seed: MMDQVRESR
MYDQVRESR

SEQ ID NO: 41438 - protein, 9 aa, Artificial Sequence
  Description of Artificial Sequence: Synthetic peptide
  Seed: MMDQVRESR
MYDQVRESK

SEQ ID NO: 41439 - protein, 9 aa, Artificial Sequence
  Description of Artificial Sequence: Synthetic peptide
  Seed: MMDQVRESR
MVDQVRESK

SEQ ID NO: 41440 - protein, 10 aa, Artificial Sequence
  Description of Artificial Sequence: Synthetic peptide
  Seed: MMEGAKPEEV
MLEGAKPEEI

SEQ ID NO: 41441 - protein, 10 aa, Artificial Sequence
  Description of Artificial Sequence: Synthetic peptide
  Seed: MMEGAKPEEV
MLEGAKPEEL

SEQ ID NO: 41442 - protein, 10 aa, Artificial Sequence
  Description of Artificial Sequence: Synthetic peptide
  Seed: MMEGAKPEEV
MLEGAKPEEV

SEQ ID NO: 41443 - protein, 10 aa, Artificial Sequence
  Description of Artificial Sequence: Synthetic peptide
  Seed: MMEGAKPEEV
MMEGAKPEEI

SEQ ID NO: 41444 - protein, 10 aa, Artificial Sequence
  Description of Artificial Sequence: Synthetic peptide
  Seed: MMEGAKPEEV
MMEGAKPEEL

SEQ ID NO: 41445 - protein, 10 aa, Artificial Sequence
  Description of Artificial Sequence: Synthetic peptide
  Seed: MMESARPEDV
MLESARPEDL

SEQ ID NO: 41446 - protein, 10 aa, Artificial Sequence
  Description of Artificial Sequence: Synthetic peptide
  Seed: MMESARPEDV
MLESARPEDV

SEQ ID NO: 41447 - protein, 8 aa, Artificial Sequence
  Description of Artificial Sequence: Synthetic peptide
  Seed: MMIWHSNL
MAIWHSNF

SEQ ID NO: 41448 - protein, 8 aa, Artificial Sequence
  Description of Artificial Sequence: Synthetic peptide
  Seed: MMIWHSNL
MAIWHSNY

SEQ ID NO: 41449 - protein, 8 aa, Artificial Sequence
  Description of Artificial Sequence: Synthetic peptide
  Seed: MMIWHSNL
MRIWHSNF

SEQ ID NO: 41450 - protein, 8 aa, Artificial Sequence
  Description of Artificial Sequence: Synthetic peptide
  Seed: MMIWHSNL
MRIWHSNY

SEQ ID NO: 41451 - protein, 8 aa, Artificial Sequence
  Description of Artificial Sequence: Synthetic peptide
  Seed: MMIWHSNL
MQIWHSNA

SEQ ID NO: 41452 - protein, 8 aa, Artificial Sequence
  Description of Artificial Sequence: Synthetic peptide
  Seed: MMIWHSNL
MQIWHSNH

SEQ ID NO: 41453 - protein, 8 aa, Artificial Sequence
  Description of Artificial Sequence: Synthetic peptide
  Seed: MMIWHSNL
MQIWHSNI

SEQ ID NO: 41454 - protein, 10 aa, Artificial Sequence
  Description of Artificial Sequence: Synthetic peptide
  Seed: MIDGIGRFYI
MMDGIGRFYL

SEQ ID NO: 41455 - protein, 10 aa, Artificial Sequence
  Description of Artificial Sequence: Synthetic peptide
  Seed: MIDGIGRFYI
MMDGIGRFYI

SEQ ID NO: 41456 - protein, 10 aa, Artificial Sequence
  Description of Artificial Sequence: Synthetic peptide
  Seed: MIDGIGRFYI
MMDGIGRFYG

SEQ ID NO: 41457 - protein, 9 aa, Artificial Sequence
  Description of Artificial Sequence: Synthetic peptide
  Seed: METMDSSTL
MMTMDSSTL

SEQ ID NO: 41458 - protein, 9 aa, Artificial Sequence
  Description of Artificial Sequence: Synthetic peptide
  Seed: METMDSSTL
MKTMDSSTM

SEQ ID NO: 41459 - protein, 9 aa, Artificial Sequence
  Description of Artificial Sequence: Synthetic peptide
  Seed: METMDSSTL
MKTMDSSTF

SEQ ID NO: 41460 - protein, 9 aa, Artificial Sequence
  Description of Artificial Sequence: Synthetic peptide
  Seed: METMDSSTL
MKTMDSSTW

SEQ ID NO: 41461 - protein, 9 aa, Artificial Sequence
  Description of Artificial Sequence: Synthetic peptide
  Seed: METMDSSTL
MKTMDSSTY

SEQ ID NO: 41462 - protein, 9 aa, Artificial Sequence
  Description of Artificial Sequence: Synthetic peptide
  Seed: METMDSSTL
MKTMDSSTV

SEQ ID NO: 41463 - protein, 9 aa, Artificial Sequence
  Description of Artificial Sequence: Synthetic peptide
  Seed: METMDSSTL
MMTMDSSTA

SEQ ID NO: 41464 - protein, 9 aa, Artificial Sequence
  Description of Artificial Sequence: Synthetic peptide
  Seed: METMDSSTL
MMTMDSSTG

SEQ ID NO: 41465 - protein, 9 aa, Artificial Sequence
  Description of Artificial Sequence: Synthetic peptide
  Seed: METMDSSTL
MMTMDSSTH

SEQ ID NO: 41466 - protein, 9 aa, Artificial Sequence
  Description of Artificial Sequence: Synthetic peptide
  Seed: METMDSSTL
MMTMDSSTI

SEQ ID NO: 41467 - protein, 9 aa, Artificial Sequence
  Description of Artificial Sequence: Synthetic peptide
  Seed: METMDSSTL
MMTMDSSTM

SEQ ID NO: 41468 - protein, 9 aa, Artificial Sequence
  Description of Artificial Sequence: Synthetic peptide
  Seed: METMDSSTL
MSTMDSSTI

SEQ ID NO: 41469 - protein, 9 aa, Artificial Sequence
  Description of Artificial Sequence: Synthetic peptide
  Seed: METMDSSTL
MMTMDSSTF

SEQ ID NO: 41470 - protein, 9 aa, Artificial Sequence
  Description of Artificial Sequence: Synthetic peptide
  Seed: METMDSSTL
MMTMDSSTW

SEQ ID NO: 41471 - protein, 9 aa, Artificial Sequence
  Description of Artificial Sequence: Synthetic peptide
  Seed: METMDSSTL
MMTMDSSTY

SEQ ID NO: 41472 - protein, 9 aa, Artificial Sequence
  Description of Artificial Sequence: Synthetic peptide
  Seed: METMDSSTL
MMTMDSSTV

SEQ ID NO: 41473 - protein, 9 aa, Artificial Sequence
  Description of Artificial Sequence: Synthetic peptide
  Seed: METMDSSTL
MFTMDSSTM

SEQ ID NO: 41474 - protein, 9 aa, Artificial Sequence
  Description of Artificial Sequence: Synthetic peptide
  Seed: METMDSSTL
MFTMDSSTF

SEQ ID NO: 41475 - protein, 9 aa, Artificial Sequence
  Description of Artificial Sequence: Synthetic peptide
  Seed: METMDSSTL
MFTMDSSTY

SEQ ID NO: 41476 - protein, 9 aa, Artificial Sequence
  Description of Artificial Sequence: Synthetic peptide
  Seed: METMDSSTL
MPTMDSSTM

SEQ ID NO: 41477 - protein, 9 aa, Artificial Sequence
  Description of Artificial Sequence: Synthetic peptide
  Seed: METMDSSTL
MPTMDSSTF

SEQ ID NO: 41478 - protein, 9 aa, Artificial Sequence
  Description of Artificial Sequence: Synthetic peptide
  Seed: METMDSSTL
MKTMDSSTL

SEQ ID NO: 41479 - protein, 9 aa, Artificial Sequence
  Description of Artificial Sequence: Synthetic peptide
  Seed: METMDSSTL
MKTMDSSTI

SEQ ID NO: 41480 - protein, 9 aa, Artificial Sequence
  Description of Artificial Sequence: Synthetic peptide
  Seed: METMDSSTL
MKTMDSSTH

SEQ ID NO: 41481 - protein, 9 aa, Artificial Sequence
  Description of Artificial Sequence: Synthetic peptide
  Seed: METMDSSTL
MKTMDSSTA

SEQ ID NO: 41482 - protein, 9 aa, Artificial Sequence
  Description of Artificial Sequence: Synthetic peptide
  Seed: METMDSSTL
MHTMDSSTH

SEQ ID NO: 41483 - protein, 9 aa, Artificial Sequence
  Description of Artificial Sequence: Synthetic peptide
  Seed: METMDSSTL
MHTMDSSTI

SEQ ID NO: 41484 - protein, 9 aa, Artificial Sequence
  Description of Artificial Sequence: Synthetic peptide
  Seed: METMDSSTL
MHTMDSSTL

SEQ ID NO: 41485 - protein, 9 aa, Artificial Sequence
  Description of Artificial Sequence: Synthetic peptide
  Seed: METMDSSTL
MHTMDSSTM

SEQ ID NO: 41486 - protein, 9 aa, Artificial Sequence
  Description of Artificial Sequence: Synthetic peptide
  Seed: METMDSSTL
MHTMDSSTF

SEQ ID NO: 41487 - protein, 9 aa, Artificial Sequence
  Description of Artificial Sequence: Synthetic peptide
  Seed: METMDSSTL
MHTMDSSTW

SEQ ID NO: 41488 - protein, 9 aa, Artificial Sequence
  Description of Artificial Sequence: Synthetic peptide
  Seed: METMDSSTL
MHTMDSSTY

SEQ ID NO: 41489 - protein, 9 aa, Artificial Sequence
  Description of Artificial Sequence: Synthetic peptide
  Seed: METMDSSTL
MHTMDSSTV

SEQ ID NO: 41490 - protein, 9 aa, Artificial Sequence
  Description of Artificial Sequence: Synthetic peptide
  Seed: METMDSSTL
MITMDSSTL

SEQ ID NO: 41491 - protein, 9 aa, Artificial Sequence
  Description of Artificial Sequence: Synthetic peptide
  Seed: METMDSSTL
MITMDSSTM

SEQ ID NO: 41492 - protein, 9 aa, Artificial Sequence
  Description of Artificial Sequence: Synthetic peptide
  Seed: METMDSSTL
MITMDSSTF

SEQ ID NO: 41493 - protein, 9 aa, Artificial Sequence
  Description of Artificial Sequence: Synthetic peptide
  Seed: METMDSSTL
MITMDSSTY

SEQ ID NO: 41494 - protein, 9 aa, Artificial Sequence
  Description of Artificial Sequence: Synthetic peptide
  Seed: METMDSSTL
MLTMDSSTH

SEQ ID NO: 41495 - protein, 9 aa, Artificial Sequence
  Description of Artificial Sequence: Synthetic peptide
  Seed: METMDSSTL
MLTMDSSTI

SEQ ID NO: 41496 - protein, 9 aa, Artificial Sequence
  Description of Artificial Sequence: Synthetic peptide
  Seed: METMDSSTL
MLTMDSSTL

SEQ ID NO: 41497 - protein, 9 aa, Artificial Sequence
  Description of Artificial Sequence: Synthetic peptide
  Seed: METMDSSTL
MLTMDSSTM

SEQ ID NO: 41498 - protein, 9 aa, Artificial Sequence
  Description of Artificial Sequence: Synthetic peptide
  Seed: METMDSSTL
MLTMDSSTF

SEQ ID NO: 41499 - protein, 9 aa, Artificial Sequence
  Description of Artificial Sequence: Synthetic peptide
  Seed: METMDSSTL
MLTMDSSTW

SEQ ID NO: 41500 - protein, 9 aa, Artificial Sequence
  Description of Artificial Sequence: Synthetic peptide
  Seed: METMDSSTL
MLTMDSSTY

SEQ ID NO: 41501 - protein, 9 aa, Artificial Sequence
  Description of Artificial Sequence: Synthetic peptide
  Seed: METMDSSTL
MPTMDSSTY

SEQ ID NO: 41502 - protein, 9 aa, Artificial Sequence
  Description of Artificial Sequence: Synthetic peptide
  Seed: METMDSSTL
MSTMDSSTL

SEQ ID NO: 41503 - protein, 11 aa, Artificial Sequence
  Description of Artificial Sequence: Synthetic peptide
  Seed: METMDSSTLEL
MQTMDSSTLEV

SEQ ID NO: 41504 - protein, 11 aa, Artificial Sequence
  Description of Artificial Sequence: Synthetic peptide
  Seed: METMDSSTLEL
MDTMDSSTLEM

SEQ ID NO: 41505 - protein, 11 aa, Artificial Sequence
  Description of Artificial Sequence: Synthetic peptide
  Seed: METMDSSTLEL
MRTMDSSTLEF

SEQ ID NO: 41506 - protein, 11 aa, Artificial Sequence
  Description of Artificial Sequence: Synthetic peptide
  Seed: METMDSSTLEL
MRTMDSSTLEV

SEQ ID NO: 41507 - protein, 11 aa, Artificial Sequence
  Description of Artificial Sequence: Synthetic peptide
  Seed: METMDSSTLEL
MNTMDSSTLEI

SEQ ID NO: 41508 - protein, 11 aa, Artificial Sequence
  Description of Artificial Sequence: Synthetic peptide
  Seed: METMDSSTLEL
MNTMDSSTLEL

SEQ ID NO: 41509 - protein, 11 aa, Artificial Sequence
  Description of Artificial Sequence: Synthetic peptide
  Seed: METMDSSTLEL
MNTMDSSTLEM

SEQ ID NO: 41510 - protein, 11 aa, Artificial Sequence
  Description of Artificial Sequence: Synthetic peptide
  Seed: METMDSSTLEL
MNTMDSSTLEF

SEQ ID NO: 41511 - protein, 11 aa, Artificial Sequence
  Description of Artificial Sequence: Synthetic peptide
  Seed: METMDSSTLEL
MNTMDSSTLEV

SEQ ID NO: 41512 - protein, 11 aa, Artificial Sequence
  Description of Artificial Sequence: Synthetic peptide
  Seed: METMDSSTLEL
MDTMDSSTLEI

SEQ ID NO: 41513 - protein, 11 aa, Artificial Sequence
  Description of Artificial Sequence: Synthetic peptide
  Seed: METMDSSTLEL
MDTMDSSTLEL

SEQ ID NO: 41514 - protein, 11 aa, Artificial Sequence
  Description of Artificial Sequence: Synthetic peptide
  Seed: METMDSSTLEL
MDTMDSSTLEF

SEQ ID NO: 41515 - protein, 9 aa, Artificial Sequence
  Description of Artificial Sequence: Synthetic peptide
  Seed: METMDSSTL
MSTMDSSTM

SEQ ID NO: 41516 - protein, 11 aa, Artificial Sequence
  Description of Artificial Sequence: Synthetic peptide
  Seed: METMDSSTLEL
MDTMDSSTLEV

SEQ ID NO: 41517 - protein, 11 aa, Artificial Sequence
  Description of Artificial Sequence: Synthetic peptide
  Seed: METMDSSTLEL
MCTMDSSTLEI

SEQ ID NO: 41518 - protein, 11 aa, Artificial Sequence
  Description of Artificial Sequence: Synthetic peptide
  Seed: METMDSSTLEL
MCTMDSSTLEL

SEQ ID NO: 41519 - protein, 11 aa, Artificial Sequence
  Description of Artificial Sequence: Synthetic peptide
  Seed: METMDSSTLEL
MCTMDSSTLEM

SEQ ID NO: 41520 - protein, 11 aa, Artificial Sequence
  Description of Artificial Sequence: Synthetic peptide
  Seed: METMDSSTLEL
MCTMDSSTLEF

SEQ ID NO: 41521 - protein, 11 aa, Artificial Sequence
  Description of Artificial Sequence: Synthetic peptide
  Seed: METMDSSTLEL
MCTMDSSTLEV

SEQ ID NO: 41522 - protein, 11 aa, Artificial Sequence
  Description of Artificial Sequence: Synthetic peptide
  Seed: METMDSSTLEL
MQTMDSSTLEI

SEQ ID NO: 41523 - protein, 11 aa, Artificial Sequence
  Description of Artificial Sequence: Synthetic peptide
  Seed: METMDSSTLEL
MQTMDSSTLEL

SEQ ID NO: 41524 - protein, 11 aa, Artificial Sequence
  Description of Artificial Sequence: Synthetic peptide
  Seed: METMDSSTLEL
MQTMDSSTLEM

SEQ ID NO: 41525 - protein, 11 aa, Artificial Sequence
  Description of Artificial Sequence: Synthetic peptide
  Seed: METMDSSTLEL
MRTMDSSTLEM

SEQ ID NO: 41526 - protein, 11 aa, Artificial Sequence
  Description of Artificial Sequence: Synthetic peptide
  Seed: METMDSSTLEL
MRTMDSSTLEL

SEQ ID NO: 41527 - protein, 11 aa, Artificial Sequence
  Description of Artificial Sequence: Synthetic peptide
  Seed: METMDSSTLEL
MRTMDSSTLEI

SEQ ID NO: 41528 - protein, 11 aa, Artificial Sequence
  Description of Artificial Sequence: Synthetic peptide
  Seed: METMDSSTLEL
MATMDSSTLEV

SEQ ID NO: 41529 - protein, 9 aa, Artificial Sequence
  Description of Artificial Sequence: Synthetic peptide
  Seed: METMDSSTL
MSTMDSSTF

SEQ ID NO: 41530 - protein, 9 aa, Artificial Sequence
  Description of Artificial Sequence: Synthetic peptide
  Seed: METMDSSTL
MSTMDSSTY

SEQ ID NO: 41531 - protein, 9 aa, Artificial Sequence
  Description of Artificial Sequence: Synthetic peptide
  Seed: METMDSSTL
MTTMDSSTL

SEQ ID NO: 41532 - protein, 9 aa, Artificial Sequence
  Description of Artificial Sequence: Synthetic peptide
  Seed: METMDSSTL
MTTMDSSTM

SEQ ID NO: 41533 - protein, 9 aa, Artificial Sequence
  Description of Artificial Sequence: Synthetic peptide
  Seed: METMDSSTL
MTTMDSSTF

SEQ ID NO: 41534 - protein, 9 aa, Artificial Sequence
  Description of Artificial Sequence: Synthetic peptide
  Seed: METMDSSTL
MTTMDSSTY

SEQ ID NO: 41535 - protein, 9 aa, Artificial Sequence
  Description of Artificial Sequence: Synthetic peptide
  Seed: METMDSSTL
MWTMDSSTF

SEQ ID NO: 41536 - protein, 9 aa, Artificial Sequence
  Description of Artificial Sequence: Synthetic peptide
  Seed: METMDSSTL
MWTMDSSTY

SEQ ID NO: 41537 - protein, 9 aa, Artificial Sequence
  Description of Artificial Sequence: Synthetic peptide
  Seed: METMDSSTL
MYTMDSSTM

SEQ ID NO: 41538 - protein, 9 aa, Artificial Sequence
  Description of Artificial Sequence: Synthetic peptide
  Seed: METMDSSTL
MYTMDSSTF

SEQ ID NO: 41539 - protein, 9 aa, Artificial Sequence
  Description of Artificial Sequence: Synthetic peptide
  Seed: METMDSSTL
MYTMDSSTY

SEQ ID NO: 41540 - protein, 9 aa, Artificial Sequence
  Description of Artificial Sequence: Synthetic peptide
  Seed: METMDSSTL
MVTMDSSTL

SEQ ID NO: 41541 - protein, 9 aa, Artificial Sequence
  Description of Artificial Sequence: Synthetic peptide
  Seed: METMDSSTL
MVTMDSSTM

SEQ ID NO: 41542 - protein, 9 aa, Artificial Sequence
  Description of Artificial Sequence: Synthetic peptide
  Seed: METMDSSTL
MVTMDSSTF

SEQ ID NO: 41543 - protein, 9 aa, Artificial Sequence
  Description of Artificial Sequence: Synthetic peptide
  Seed: METMDSSTL
MVTMDSSTY

SEQ ID NO: 41544 - protein, 11 aa, Artificial Sequence
  Description of Artificial Sequence: Synthetic peptide
  Seed: METMDSSTLEL
MATMDSSTLEI

SEQ ID NO: 41545 - protein, 11 aa, Artificial Sequence
  Description of Artificial Sequence: Synthetic peptide
  Seed: METMDSSTLEL
MATMDSSTLEL

SEQ ID NO: 41546 - protein, 11 aa, Artificial Sequence
  Description of Artificial Sequence: Synthetic peptide
  Seed: METMDSSTLEL
MATMDSSTLEM

SEQ ID NO: 41547 - protein, 11 aa, Artificial Sequence
  Description of Artificial Sequence: Synthetic peptide
  Seed: METMDSSTLEL
MATMDSSTLEF

SEQ ID NO: 41548 - protein, 9 aa, Artificial Sequence
  Description of Artificial Sequence: Synthetic peptide
  Seed: METMDSSTL
MGTMDSSTY

SEQ ID NO: 41549 - protein, 9 aa, Artificial Sequence
  Description of Artificial Sequence: Synthetic peptide
  Seed: METMDSSTL
MGTMDSSTF

SEQ ID NO: 41550 - protein, 9 aa, Artificial Sequence
  Description of Artificial Sequence: Synthetic peptide
  Seed: METMDSSTL
MGTMDSSTM

SEQ ID NO: 41551 - protein, 9 aa, Artificial Sequence
  Description of Artificial Sequence: Synthetic peptide
  Seed: METMDSSTL
METMDSSTV

SEQ ID NO: 41552 - protein, 9 aa, Artificial Sequence
  Description of Artificial Sequence: Synthetic peptide
  Seed: METMDSSTL
MQTMDSSTC

SEQ ID NO: 41553 - protein, 9 aa, Artificial Sequence
  Description of Artificial Sequence: Synthetic peptide
  Seed: METMDSSTL
MQTMDSSTH

SEQ ID NO: 41554 - protein, 9 aa, Artificial Sequence
  Description of Artificial Sequence: Synthetic peptide
  Seed: METMDSSTL
MQTMDSSTI

SEQ ID NO: 41555 - protein, 9 aa, Artificial Sequence
  Description of Artificial Sequence: Synthetic peptide
  Seed: METMDSSTL
MQTMDSSTL

SEQ ID NO: 41556 - protein, 9 aa, Artificial Sequence
  Description of Artificial Sequence: Synthetic peptide
  Seed: METMDSSTL
MQTMDSSTM

SEQ ID NO: 41557 - protein, 9 aa, Artificial Sequence
  Description of Artificial Sequence: Synthetic peptide
  Seed: METMDSSTL
MQTMDSSTF

SEQ ID NO: 41558 - protein, 9 aa, Artificial Sequence
  Description of Artificial Sequence: Synthetic peptide
  Seed: METMDSSTL
MQTMDSSTS

SEQ ID NO: 41559 - protein, 9 aa, Artificial Sequence
  Description of Artificial Sequence: Synthetic peptide
  Seed: METMDSSTL
MQTMDSSTT

SEQ ID NO: 41560 - protein, 9 aa, Artificial Sequence
  Description of Artificial Sequence: Synthetic peptide
  Seed: METMDSSTL
MQTMDSSTW

SEQ ID NO: 41561 - protein, 9 aa, Artificial Sequence
  Description of Artificial Sequence: Synthetic peptide
  Seed: METMDSSTL
MQTMDSSTY

SEQ ID NO: 41562 - protein, 9 aa, Artificial Sequence
  Description of Artificial Sequence: Synthetic peptide
  Seed: METMDSSTL
MQTMDSSTV

SEQ ID NO: 41563 - protein, 9 aa, Artificial Sequence
  Description of Artificial Sequence: Synthetic peptide
  Seed: METMDSSTL
METMDSSTA

SEQ ID NO: 41564 - protein, 9 aa, Artificial Sequence
  Description of Artificial Sequence: Synthetic peptide
  Seed: METMDSSTL
METMDSSTC

SEQ ID NO: 41565 - protein, 9 aa, Artificial Sequence
  Description of Artificial Sequence: Synthetic peptide
  Seed: METMDSSTL
METMDSSTI

SEQ ID NO: 41566 - protein, 9 aa, Artificial Sequence
  Description of Artificial Sequence: Synthetic peptide
  Seed: METMDSSTL
METMDSSTM

SEQ ID NO: 41567 - protein, 9 aa, Artificial Sequence
  Description of Artificial Sequence: Synthetic peptide
  Seed: METMDSSTL
METMDSSTF

SEQ ID NO: 41568 - protein, 9 aa, Artificial Sequence
  Description of Artificial Sequence: Synthetic peptide
  Seed: METMDSSTL
METMDSSTP

SEQ ID NO: 41569 - protein, 9 aa, Artificial Sequence
  Description of Artificial Sequence: Synthetic peptide
  Seed: METMDSSTL
METMDSSTT

SEQ ID NO: 41570 - protein, 9 aa, Artificial Sequence
  Description of Artificial Sequence: Synthetic peptide
  Seed: METMDSSTL
METMDSSTW

SEQ ID NO: 41571 - protein, 9 aa, Artificial Sequence
  Description of Artificial Sequence: Synthetic peptide
  Seed: METMDSSTL
METMDSSTY

SEQ ID NO: 41572 - protein, 9 aa, Artificial Sequence
  Description of Artificial Sequence: Synthetic peptide
  Seed: METMDSSTL
MQTMDSSTG

SEQ ID NO: 41573 - protein, 9 aa, Artificial Sequence
  Description of Artificial Sequence: Synthetic peptide
  Seed: METMDSSTL
MQTMDSSTA

SEQ ID NO: 41574 - protein, 9 aa, Artificial Sequence
  Description of Artificial Sequence: Synthetic peptide
  Seed: METMDSSTL
MCTMDSSTY

SEQ ID NO: 41575 - protein, 9 aa, Artificial Sequence
  Description of Artificial Sequence: Synthetic peptide
  Seed: METMDSSTL
MATMDSSTH

SEQ ID NO: 41576 - protein, 9 aa, Artificial Sequence
  Description of Artificial Sequence: Synthetic peptide
  Seed: METMDSSTL
MATMDSSTI

SEQ ID NO: 41577 - protein, 9 aa, Artificial Sequence
  Description of Artificial Sequence: Synthetic peptide
  Seed: METMDSSTL
MATMDSSTL

SEQ ID NO: 41578 - protein, 9 aa, Artificial Sequence
  Description of Artificial Sequence: Synthetic peptide
  Seed: METMDSSTL
MATMDSSTM

SEQ ID NO: 41579 - protein, 9 aa, Artificial Sequence
  Description of Artificial Sequence: Synthetic peptide
  Seed: METMDSSTL
MATMDSSTF

SEQ ID NO: 41580 - protein, 9 aa, Artificial Sequence
  Description of Artificial Sequence: Synthetic peptide
  Seed: METMDSSTL
MATMDSSTW

SEQ ID NO: 41581 - protein, 9 aa, Artificial Sequence
  Description of Artificial Sequence: Synthetic peptide
  Seed: METMDSSTL
MATMDSSTY

SEQ ID NO: 41582 - protein, 9 aa, Artificial Sequence
  Description of Artificial Sequence: Synthetic peptide
  Seed: METMDSSTL
MRTMDSSTH

SEQ ID NO: 41583 - protein, 9 aa, Artificial Sequence
  Description of Artificial Sequence: Synthetic peptide
  Seed: METMDSSTL
MRTMDSSTI

SEQ ID NO: 41584 - protein, 9 aa, Artificial Sequence
  Description of Artificial Sequence: Synthetic peptide
  Seed: METMDSSTL
MRTMDSSTL

SEQ ID NO: 41585 - protein, 9 aa, Artificial Sequence
  Description of Artificial Sequence: Synthetic peptide
  Seed: METMDSSTL
MRTMDSSTM

SEQ ID NO: 41586 - protein, 9 aa, Artificial Sequence
  Description of Artificial Sequence: Synthetic peptide
  Seed: METMDSSTL
MRTMDSSTF

SEQ ID NO: 41587 - protein, 9 aa, Artificial Sequence
  Description of Artificial Sequence: Synthetic peptide
  Seed: METMDSSTL
MRTMDSSTW

SEQ ID NO: 41588 - protein, 9 aa, Artificial Sequence
  Description of Artificial Sequence: Synthetic peptide
  Seed: METMDSSTL
MRTMDSSTY

SEQ ID NO: 41589 - protein, 9 aa, Artificial Sequence
  Description of Artificial Sequence: Synthetic peptide
  Seed: METMDSSTL
MNTMDSSTM

SEQ ID NO: 41590 - protein, 9 aa, Artificial Sequence
  Description of Artificial Sequence: Synthetic peptide
  Seed: METMDSSTL
MNTMDSSTF

SEQ ID NO: 41591 - protein, 9 aa, Artificial Sequence
  Description of Artificial Sequence: Synthetic peptide
  Seed: METMDSSTL
MNTMDSSTY

SEQ ID NO: 41592 - protein, 9 aa, Artificial Sequence
  Description of Artificial Sequence: Synthetic peptide
  Seed: METMDSSTL
MCTMDSSTF

SEQ ID NO: 41593 - protein, 11 aa, Artificial Sequence
  Description of Artificial Sequence: Synthetic peptide
  Seed: METMDSSTLEL
MQTMDSSTLEF

SEQ ID NO: 41594 - protein, 11 aa, Artificial Sequence
  Description of Artificial Sequence: Synthetic peptide
  Seed: METMDSSTLEL
METMDSSTLEI

SEQ ID NO: 41595 - protein, 10 aa, Artificial Sequence
  Description of Artificial Sequence: Synthetic peptide
  Seed: MIDGIGRFYI
MMDGIGRFYC

SEQ ID NO: 41596 - protein, 9 aa, Artificial Sequence
  Description of Artificial Sequence: Synthetic peptide
  Seed: MIDGIGRFY
MSDGIGRFW

SEQ ID NO: 41597 - protein, 9 aa, Artificial Sequence
  Description of Artificial Sequence: Synthetic peptide
  Seed: MIDGIGRFY
MPDGIGRFW

SEQ ID NO: 41598 - protein, 9 aa, Artificial Sequence
  Description of Artificial Sequence: Synthetic peptide
  Seed: MIDGIGRFY
MPDGIGRFY

SEQ ID NO: 41599 - protein, 9 aa, Artificial Sequence
  Description of Artificial Sequence: Synthetic peptide
  Seed: MIDGIGRFY
MPDGIGRFV

SEQ ID NO: 41600 - protein, 9 aa, Artificial Sequence
  Description of Artificial Sequence: Synthetic peptide
  Seed: MIDGIGRFY
MSDGIGRFR

SEQ ID NO: 41601 - protein, 9 aa, Artificial Sequence
  Description of Artificial Sequence: Synthetic peptide
  Seed: MIDGIGRFY
MSDGIGRFI

SEQ ID NO: 41602 - protein, 9 aa, Artificial Sequence
  Description of Artificial Sequence: Synthetic peptide
  Seed: MIDGIGRFY
MSDGIGRFL

SEQ ID NO: 41603 - protein, 9 aa, Artificial Sequence
  Description of Artificial Sequence: Synthetic peptide
  Seed: MIDGIGRFY
MSDGIGRFK

SEQ ID NO: 41604 - protein, 9 aa, Artificial Sequence
  Description of Artificial Sequence: Synthetic peptide
  Seed: MIDGIGRFY
MSDGIGRFM

SEQ ID NO: 41605 - protein, 9 aa, Artificial Sequence
  Description of Artificial Sequence: Synthetic peptide
  Seed: MIDGIGRFY
MSDGIGRFF

SEQ ID NO: 41606 - protein, 9 aa, Artificial Sequence
  Description of Artificial Sequence: Synthetic peptide
  Seed: MIDGIGRFY
MSDGIGRFY

SEQ ID NO: 41607 - protein, 9 aa, Artificial Sequence
  Description of Artificial Sequence: Synthetic peptide
  Seed: MIDGIGRFY
MWDGIGRFF

SEQ ID NO: 41608 - protein, 9 aa, Artificial Sequence
  Description of Artificial Sequence: Synthetic peptide
  Seed: MIDGIGRFY
MSDGIGRFV

SEQ ID NO: 41609 - protein, 9 aa, Artificial Sequence
  Description of Artificial Sequence: Synthetic peptide
  Seed: MIDGIGRFY
MTDGIGRFR

SEQ ID NO: 41610 - protein, 9 aa, Artificial Sequence
  Description of Artificial Sequence: Synthetic peptide
  Seed: MIDGIGRFY
MTDGIGRFI

SEQ ID NO: 41611 - protein, 9 aa, Artificial Sequence
  Description of Artificial Sequence: Synthetic peptide
  Seed: MIDGIGRFY
MTDGIGRFL

SEQ ID NO: 41612 - protein, 9 aa, Artificial Sequence
  Description of Artificial Sequence: Synthetic peptide
  Seed: MIDGIGRFY
MTDGIGRFK

SEQ ID NO: 41613 - protein, 9 aa, Artificial Sequence
  Description of Artificial Sequence: Synthetic peptide
  Seed: MIDGIGRFY
MTDGIGRFM

SEQ ID NO: 41614 - protein, 9 aa, Artificial Sequence
  Description of Artificial Sequence: Synthetic peptide
  Seed: MIDGIGRFY
MTDGIGRFF

SEQ ID NO: 41615 - protein, 9 aa, Artificial Sequence
  Description of Artificial Sequence: Synthetic peptide
  Seed: MIDGIGRFY
MTDGIGRFW

SEQ ID NO: 41616 - protein, 9 aa, Artificial Sequence
  Description of Artificial Sequence: Synthetic peptide
  Seed: MIDGIGRFY
MTDGIGRFY

SEQ ID NO: 41617 - protein, 9 aa, Artificial Sequence
  Description of Artificial Sequence: Synthetic peptide
  Seed: MIDGIGRFY
MPDGIGRFF

SEQ ID NO: 41618 - protein, 9 aa, Artificial Sequence
  Description of Artificial Sequence: Synthetic peptide
  Seed: MIDGIGRFY
MPDGIGRFM

SEQ ID NO: 41619 - protein, 9 aa, Artificial Sequence
  Description of Artificial Sequence: Synthetic peptide
  Seed: MIDGIGRFY
MPDGIGRFL

SEQ ID NO: 41620 - protein, 9 aa, Artificial Sequence
  Description of Artificial Sequence: Synthetic peptide
  Seed: MIDGIGRFY
MPDGIGRFI

SEQ ID NO: 41621 - protein, 9 aa, Artificial Sequence
  Description of Artificial Sequence: Synthetic peptide
  Seed: MIDGIGRFY
MIDGIGRFW

SEQ ID NO: 41622 - protein, 9 aa, Artificial Sequence
  Description of Artificial Sequence: Synthetic peptide
  Seed: MIDGIGRFY
MLDGIGRFR

SEQ ID NO: 41623 - protein, 9 aa, Artificial Sequence
  Description of Artificial Sequence: Synthetic peptide
  Seed: MIDGIGRFY
MLDGIGRFK

SEQ ID NO: 41624 - protein, 9 aa, Artificial Sequence
  Description of Artificial Sequence: Synthetic peptide
  Seed: MIDGIGRFY
MLDGIGRFM

SEQ ID NO: 41625 - protein, 9 aa, Artificial Sequence
  Description of Artificial Sequence: Synthetic peptide
  Seed: MIDGIGRFY
MLDGIGRFF

SEQ ID NO: 41626 - protein, 9 aa, Artificial Sequence
  Description of Artificial Sequence: Synthetic peptide
  Seed: MIDGIGRFY
MLDGIGRFY

SEQ ID NO: 41627 - protein, 9 aa, Artificial Sequence
  Description of Artificial Sequence: Synthetic peptide
  Seed: MIDGIGRFY
MMDGIGRFR

SEQ ID NO: 41628 - protein, 9 aa, Artificial Sequence
  Description of Artificial Sequence: Synthetic peptide
  Seed: MIDGIGRFY
MMDGIGRFL

SEQ ID NO: 41629 - protein, 9 aa, Artificial Sequence
  Description of Artificial Sequence: Synthetic peptide
  Seed: MIDGIGRFY
MMDGIGRFK

SEQ ID NO: 41630 - protein, 9 aa, Artificial Sequence
  Description of Artificial Sequence: Synthetic peptide
  Seed: MIDGIGRFY
MMDGIGRFM

SEQ ID NO: 41631 - protein, 9 aa, Artificial Sequence
  Description of Artificial Sequence: Synthetic peptide
  Seed: MIDGIGRFY
MMDGIGRFF

SEQ ID NO: 41632 - protein, 9 aa, Artificial Sequence
  Description of Artificial Sequence: Synthetic peptide
  Seed: MIDGIGRFY
MMDGIGRFW

SEQ ID NO: 41633 - protein, 9 aa, Artificial Sequence
  Description of Artificial Sequence: Synthetic peptide
  Seed: MIDGIGRFY
MMDGIGRFY

SEQ ID NO: 41634 - protein, 9 aa, Artificial Sequence
  Description of Artificial Sequence: Synthetic peptide
  Seed: MIDGIGRFY
MFDGIGRFK

SEQ ID NO: 41635 - protein, 9 aa, Artificial Sequence
  Description of Artificial Sequence: Synthetic peptide
  Seed: MIDGIGRFY
MFDGIGRFM

SEQ ID NO: 41636 - protein, 9 aa, Artificial Sequence
  Description of Artificial Sequence: Synthetic peptide
  Seed: MIDGIGRFY
MFDGIGRFF

SEQ ID NO: 41637 - protein, 9 aa, Artificial Sequence
  Description of Artificial Sequence: Synthetic peptide
  Seed: MIDGIGRFY
MFDGIGRFY

SEQ ID NO: 41638 - protein, 9 aa, Artificial Sequence
  Description of Artificial Sequence: Synthetic peptide
  Seed: MIDGIGRFY
MPDGIGRFA

SEQ ID NO: 41639 - protein, 9 aa, Artificial Sequence
  Description of Artificial Sequence: Synthetic peptide
  Seed: MIDGIGRFY
MPDGIGRFH

SEQ ID NO: 41640 - protein, 9 aa, Artificial Sequence
  Description of Artificial Sequence: Synthetic peptide
  Seed: MIDGIGRFY
MTDGIGRFV

SEQ ID NO: 41641 - protein, 9 aa, Artificial Sequence
  Description of Artificial Sequence: Synthetic peptide
  Seed: MIDGIGRFY
MWDGIGRFY

SEQ ID NO: 41642 - protein, 11 aa, Artificial Sequence
  Description of Artificial Sequence: Synthetic peptide
  Seed: METMDSSTLEL
METMDSSTLEM

SEQ ID NO: 41643 - protein, 10 aa, Artificial Sequence
  Description of Artificial Sequence: Synthetic peptide
  Seed: MIDGIGRFYI
MLDGIGRFYC

SEQ ID NO: 41644 - protein, 10 aa, Artificial Sequence
  Description of Artificial Sequence: Synthetic peptide
  Seed: MIDGIGRFYI
MQDGIGRFYT

SEQ ID NO: 41645 - protein, 10 aa, Artificial Sequence
  Description of Artificial Sequence: Synthetic peptide
  Seed: MIDGIGRFYI
MQDGIGRFYV

SEQ ID NO: 41646 - protein, 10 aa, Artificial Sequence
  Description of Artificial Sequence: Synthetic peptide
  Seed: MIDGIGRFYI
MGDGIGRFYV

SEQ ID NO: 41647 - protein, 10 aa, Artificial Sequence
  Description of Artificial Sequence: Synthetic peptide
  Seed: MIDGIGRFYI
MIDGIGRFYA

SEQ ID NO: 41648 - protein, 10 aa, Artificial Sequence
  Description of Artificial Sequence: Synthetic peptide
  Seed: MIDGIGRFYI
MIDGIGRFYL

SEQ ID NO: 41649 - protein, 10 aa, Artificial Sequence
  Description of Artificial Sequence: Synthetic peptide
  Seed: MIDGIGRFYI
MIDGIGRFYM

SEQ ID NO: 41650 - protein, 10 aa, Artificial Sequence
  Description of Artificial Sequence: Synthetic peptide
  Seed: MIDGIGRFYI
MIDGIGRFYT

SEQ ID NO: 41651 - protein, 10 aa, Artificial Sequence
  Description of Artificial Sequence: Synthetic peptide
  Seed: MIDGIGRFYI
MIDGIGRFYV

SEQ ID NO: 41652 - protein, 10 aa, Artificial Sequence
  Description of Artificial Sequence: Synthetic peptide
  Seed: MIDGIGRFYI
MLDGIGRFYA

SEQ ID NO: 41653 - protein, 10 aa, Artificial Sequence
  Description of Artificial Sequence: Synthetic peptide
  Seed: MIDGIGRFYI
MLDGIGRFYG

SEQ ID NO: 41654 - protein, 9 aa, Artificial Sequence
  Description of Artificial Sequence: Synthetic peptide
  Seed: MIDGIGRFY
MYDGIGRFF

SEQ ID NO: 41655 - protein, 10 aa, Artificial Sequence
  Description of Artificial Sequence: Synthetic peptide
  Seed: MIDGIGRFYI
MLDGIGRFYI

SEQ ID NO: 41656 - protein, 10 aa, Artificial Sequence
  Description of Artificial Sequence: Synthetic peptide
  Seed: MIDGIGRFYI
MLDGIGRFYL

SEQ ID NO: 41657 - protein, 10 aa, Artificial Sequence
  Description of Artificial Sequence: Synthetic peptide
  Seed: MIDGIGRFYI
MLDGIGRFYM

SEQ ID NO: 41658 - protein, 10 aa, Artificial Sequence
  Description of Artificial Sequence: Synthetic peptide
  Seed: MIDGIGRFYI
MLDGIGRFYF

SEQ ID NO: 41659 - protein, 10 aa, Artificial Sequence
  Description of Artificial Sequence: Synthetic peptide
  Seed: MIDGIGRFYI
MLDGIGRFYP

SEQ ID NO: 41660 - protein, 10 aa, Artificial Sequence
  Description of Artificial Sequence: Synthetic peptide
  Seed: MIDGIGRFYI
MLDGIGRFYS

SEQ ID NO: 41661 - protein, 10 aa, Artificial Sequence
  Description of Artificial Sequence: Synthetic peptide
  Seed: MIDGIGRFYI
MLDGIGRFYT

SEQ ID NO: 41662 - protein, 10 aa, Artificial Sequence
  Description of Artificial Sequence: Synthetic peptide
  Seed: MIDGIGRFYI
MLDGIGRFYV

SEQ ID NO: 41663 - protein, 10 aa, Artificial Sequence
  Description of Artificial Sequence: Synthetic peptide
  Seed: MIDGIGRFYI
MMDGIGRFYA

SEQ ID NO: 41664 - protein, 10 aa, Artificial Sequence
  Description of Artificial Sequence: Synthetic peptide
  Seed: MIDGIGRFYI
MQDGIGRFYF

SEQ ID NO: 41665 - protein, 10 aa, Artificial Sequence
  Description of Artificial Sequence: Synthetic peptide
  Seed: MIDGIGRFYI
MQDGIGRFYM

SEQ ID NO: 41666 - protein, 10 aa, Artificial Sequence
  Description of Artificial Sequence: Synthetic peptide
  Seed: MIDGIGRFYI
MQDGIGRFYL

SEQ ID NO: 41667 - protein, 10 aa, Artificial Sequence
  Description of Artificial Sequence: Synthetic peptide
  Seed: MIDGIGRFYI
MQDGIGRFYI

SEQ ID NO: 41668 - protein, 9 aa, Artificial Sequence
  Description of Artificial Sequence: Synthetic peptide
  Seed: MIDGIGRFY
MYDGIGRFY

SEQ ID NO: 41669 - protein, 9 aa, Artificial Sequence
  Description of Artificial Sequence: Synthetic peptide
  Seed: MIDGIGRFY
MVDGIGRFR

SEQ ID NO: 41670 - protein, 9 aa, Artificial Sequence
  Description of Artificial Sequence: Synthetic peptide
  Seed: MIDGIGRFY
MVDGIGRFI

SEQ ID NO: 41671 - protein, 9 aa, Artificial Sequence
  Description of Artificial Sequence: Synthetic peptide
  Seed: MIDGIGRFY
MVDGIGRFL

SEQ ID NO: 41672 - protein, 9 aa, Artificial Sequence
  Description of Artificial Sequence: Synthetic peptide
  Seed: MIDGIGRFY
MVDGIGRFK

SEQ ID NO: 41673 - protein, 9 aa, Artificial Sequence
  Description of Artificial Sequence: Synthetic peptide
  Seed: MIDGIGRFY
MVDGIGRFM

SEQ ID NO: 41674 - protein, 9 aa, Artificial Sequence
  Description of Artificial Sequence: Synthetic peptide
  Seed: MIDGIGRFY
MVDGIGRFF

SEQ ID NO: 41675 - protein, 9 aa, Artificial Sequence
  Description of Artificial Sequence: Synthetic peptide
  Seed: MIDGIGRFY
MVDGIGRFW

SEQ ID NO: 41676 - protein, 9 aa, Artificial Sequence
  Description of Artificial Sequence: Synthetic peptide
  Seed: MIDGIGRFY
MVDGIGRFV

SEQ ID NO: 41677 - protein, 10 aa, Artificial Sequence
  Description of Artificial Sequence: Synthetic peptide
  Seed: MIDGIGRFYI
MADGIGRFYA

SEQ ID NO: 41678 - protein, 10 aa, Artificial Sequence
  Description of Artificial Sequence: Synthetic peptide
  Seed: MIDGIGRFYI
MADGIGRFYI

SEQ ID NO: 41679 - protein, 10 aa, Artificial Sequence
  Description of Artificial Sequence: Synthetic peptide
  Seed: MIDGIGRFYI
MADGIGRFYL

SEQ ID NO: 41680 - protein, 10 aa, Artificial Sequence
  Description of Artificial Sequence: Synthetic peptide
  Seed: MIDGIGRFYI
MADGIGRFYM

SEQ ID NO: 41681 - protein, 10 aa, Artificial Sequence
  Description of Artificial Sequence: Synthetic peptide
  Seed: MIDGIGRFYI
MADGIGRFYF

SEQ ID NO: 41682 - protein, 10 aa, Artificial Sequence
  Description of Artificial Sequence: Synthetic peptide
  Seed: MIDGIGRFYI
MADGIGRFYV

SEQ ID NO: 41683 - protein, 10 aa, Artificial Sequence
  Description of Artificial Sequence: Synthetic peptide
  Seed: MIDGIGRFYI
MNDGIGRFYV

SEQ ID NO: 41684 - protein, 10 aa, Artificial Sequence
  Description of Artificial Sequence: Synthetic peptide
  Seed: MIDGIGRFYI
MCDGIGRFYV

SEQ ID NO: 41685 - protein, 10 aa, Artificial Sequence
  Description of Artificial Sequence: Synthetic peptide
  Seed: MIDGIGRFYI
MQDGIGRFYA

SEQ ID NO: 41686 - protein, 9 aa, Artificial Sequence
  Description of Artificial Sequence: Synthetic peptide
  Seed: MIDGIGRFY
MIDGIGRFF

SEQ ID NO: 41687 - protein, 9 aa, Artificial Sequence
  Description of Artificial Sequence: Synthetic peptide
  Seed: MIDGIGRFY
MIDGIGRFM

SEQ ID NO: 41688 - protein, 9 aa, Artificial Sequence
  Description of Artificial Sequence: Synthetic peptide
  Seed: MIDGIGRFY
MIDGIGRFK

SEQ ID NO: 41689 - protein, 11 aa, Artificial Sequence
  Description of Artificial Sequence: Synthetic peptide
  Seed: METMDSSTLEL
MMTMDSSTLEV

SEQ ID NO: 41690 - protein, 11 aa, Artificial Sequence
  Description of Artificial Sequence: Synthetic peptide
  Seed: METMDSSTLEL
MKTMDSSTLEI

SEQ ID NO: 41691 - protein, 11 aa, Artificial Sequence
  Description of Artificial Sequence: Synthetic peptide
  Seed: METMDSSTLEL
MKTMDSSTLEL

SEQ ID NO: 41692 - protein, 11 aa, Artificial Sequence
  Description of Artificial Sequence: Synthetic peptide
  Seed: METMDSSTLEL
MKTMDSSTLEM

SEQ ID NO: 41693 - protein, 11 aa, Artificial Sequence
  Description of Artificial Sequence: Synthetic peptide
  Seed: METMDSSTLEL
MKTMDSSTLEF

SEQ ID NO: 41694 - protein, 11 aa, Artificial Sequence
  Description of Artificial Sequence: Synthetic peptide
  Seed: METMDSSTLEL
MKTMDSSTLEV

SEQ ID NO: 41695 - protein, 11 aa, Artificial Sequence
  Description of Artificial Sequence: Synthetic peptide
  Seed: METMDSSTLEL
MMTMDSSTLEI

SEQ ID NO: 41696 - protein, 11 aa, Artificial Sequence
  Description of Artificial Sequence: Synthetic peptide
  Seed: METMDSSTLEL
MMTMDSSTLEL

SEQ ID NO: 41697 - protein, 11 aa, Artificial Sequence
  Description of Artificial Sequence: Synthetic peptide
  Seed: METMDSSTLEL
MMTMDSSTLEM

SEQ ID NO: 41698 - protein, 11 aa, Artificial Sequence
  Description of Artificial Sequence: Synthetic peptide
  Seed: METMDSSTLEL
MMTMDSSTLEF

SEQ ID NO: 41699 - protein, 11 aa, Artificial Sequence
  Description of Artificial Sequence: Synthetic peptide
  Seed: METMDSSTLEL
MFTMDSSTLEI

SEQ ID NO: 41700 - protein, 9 aa, Artificial Sequence
  Description of Artificial Sequence: Synthetic peptide
  Seed: MIDGIGRFY
MIDGIGRFR

SEQ ID NO: 41701 - protein, 11 aa, Artificial Sequence
  Description of Artificial Sequence: Synthetic peptide
  Seed: METMDSSTLEL
MFTMDSSTLEL

SEQ ID NO: 41702 - protein, 11 aa, Artificial Sequence
  Description of Artificial Sequence: Synthetic peptide
  Seed: METMDSSTLEL
MFTMDSSTLEM

SEQ ID NO: 41703 - protein, 11 aa, Artificial Sequence
  Description of Artificial Sequence: Synthetic peptide
  Seed: METMDSSTLEL
MFTMDSSTLEF

SEQ ID NO: 41704 - protein, 11 aa, Artificial Sequence
  Description of Artificial Sequence: Synthetic peptide
  Seed: METMDSSTLEL
MFTMDSSTLEV

SEQ ID NO: 41705 - protein, 11 aa, Artificial Sequence
  Description of Artificial Sequence: Synthetic peptide
  Seed: METMDSSTLEL
MPTMDSSTLEI

SEQ ID NO: 41706 - protein, 11 aa, Artificial Sequence
  Description of Artificial Sequence: Synthetic peptide
  Seed: METMDSSTLEL
MPTMDSSTLEL

SEQ ID NO: 41707 - protein, 11 aa, Artificial Sequence
  Description of Artificial Sequence: Synthetic peptide
  Seed: METMDSSTLEL
MPTMDSSTLEM

SEQ ID NO: 41708 - protein, 11 aa, Artificial Sequence
  Description of Artificial Sequence: Synthetic peptide
  Seed: METMDSSTLEL
MPTMDSSTLEF

SEQ ID NO: 41709 - protein, 11 aa, Artificial Sequence
  Description of Artificial Sequence: Synthetic peptide
  Seed: METMDSSTLEL
MPTMDSSTLEV

SEQ ID NO: 41710 - protein, 11 aa, Artificial Sequence
  Description of Artificial Sequence: Synthetic peptide
  Seed: METMDSSTLEL
MLTMDSSTLEV

SEQ ID NO: 41711 - protein, 11 aa, Artificial Sequence
  Description of Artificial Sequence: Synthetic peptide
  Seed: METMDSSTLEL
MLTMDSSTLEF

SEQ ID NO: 41712 - protein, 11 aa, Artificial Sequence
  Description of Artificial Sequence: Synthetic peptide
  Seed: METMDSSTLEL
MLTMDSSTLEM

SEQ ID NO: 41713 - protein, 11 aa, Artificial Sequence
  Description of Artificial Sequence: Synthetic peptide
  Seed: METMDSSTLEL
MLTMDSSTLEL

SEQ ID NO: 41714 - protein, 11 aa, Artificial Sequence
  Description of Artificial Sequence: Synthetic peptide
  Seed: METMDSSTLEL
METMDSSTLEF

SEQ ID NO: 41715 - protein, 11 aa, Artificial Sequence
  Description of Artificial Sequence: Synthetic peptide
  Seed: METMDSSTLEL
METMDSSTLEV

SEQ ID NO: 41716 - protein, 11 aa, Artificial Sequence
  Description of Artificial Sequence: Synthetic peptide
  Seed: METMDSSTLEL
MGTMDSSTLEI

SEQ ID NO: 41717 - protein, 11 aa, Artificial Sequence
  Description of Artificial Sequence: Synthetic peptide
  Seed: METMDSSTLEL
MGTMDSSTLEL

SEQ ID NO: 41718 - protein, 11 aa, Artificial Sequence
  Description of Artificial Sequence: Synthetic peptide
  Seed: METMDSSTLEL
MGTMDSSTLEM

SEQ ID NO: 41719 - protein, 11 aa, Artificial Sequence
  Description of Artificial Sequence: Synthetic peptide
  Seed: METMDSSTLEL
MGTMDSSTLEF

SEQ ID NO: 41720 - protein, 11 aa, Artificial Sequence
  Description of Artificial Sequence: Synthetic peptide
  Seed: METMDSSTLEL
MGTMDSSTLEV

SEQ ID NO: 41721 - protein, 11 aa, Artificial Sequence
  Description of Artificial Sequence: Synthetic peptide
  Seed: METMDSSTLEL
MHTMDSSTLEI

SEQ ID NO: 41722 - protein, 11 aa, Artificial Sequence
  Description of Artificial Sequence: Synthetic peptide
  Seed: METMDSSTLEL
MHTMDSSTLEL

SEQ ID NO: 41723 - protein, 11 aa, Artificial Sequence
  Description of Artificial Sequence: Synthetic peptide
  Seed: METMDSSTLEL
MHTMDSSTLEM

SEQ ID NO: 41724 - protein, 11 aa, Artificial Sequence
  Description of Artificial Sequence: Synthetic peptide
  Seed: METMDSSTLEL
MHTMDSSTLEF

SEQ ID NO: 41725 - protein, 11 aa, Artificial Sequence
  Description of Artificial Sequence: Synthetic peptide
  Seed: METMDSSTLEL
MHTMDSSTLEV

SEQ ID NO: 41726 - protein, 11 aa, Artificial Sequence
  Description of Artificial Sequence: Synthetic peptide
  Seed: METMDSSTLEL
MITMDSSTLEI

SEQ ID NO: 41727 - protein, 11 aa, Artificial Sequence
  Description of Artificial Sequence: Synthetic peptide
  Seed: METMDSSTLEL
MITMDSSTLEL

SEQ ID NO: 41728 - protein, 11 aa, Artificial Sequence
  Description of Artificial Sequence: Synthetic peptide
  Seed: METMDSSTLEL
MITMDSSTLEM

SEQ ID NO: 41729 - protein, 11 aa, Artificial Sequence
  Description of Artificial Sequence: Synthetic peptide
  Seed: METMDSSTLEL
MITMDSSTLEF

SEQ ID NO: 41730 - protein, 11 aa, Artificial Sequence
  Description of Artificial Sequence: Synthetic peptide
  Seed: METMDSSTLEL
MITMDSSTLEV

SEQ ID NO: 41731 - protein, 11 aa, Artificial Sequence
  Description of Artificial Sequence: Synthetic peptide
  Seed: METMDSSTLEL
MLTMDSSTLEA

SEQ ID NO: 41732 - protein, 11 aa, Artificial Sequence
  Description of Artificial Sequence: Synthetic peptide
  Seed: METMDSSTLEL
MLTMDSSTLEI

SEQ ID NO: 41733 - protein, 11 aa, Artificial Sequence
  Description of Artificial Sequence: Synthetic peptide
  Seed: METMDSSTLEL
MSTMDSSTLEI

SEQ ID NO: 41734 - protein, 11 aa, Artificial Sequence
  Description of Artificial Sequence: Synthetic peptide
  Seed: METMDSSTLEL
MSTMDSSTLEL

SEQ ID NO: 41735 - protein, 11 aa, Artificial Sequence
  Description of Artificial Sequence: Synthetic peptide
  Seed: METMDSSTLEL
MSTMDSSTLEM

SEQ ID NO: 41736 - protein, 9 aa, Artificial Sequence
  Description of Artificial Sequence: Synthetic peptide
  Seed: MIDGIGRFY
MADGIGRFR

SEQ ID NO: 41737 - protein, 9 aa, Artificial Sequence
  Description of Artificial Sequence: Synthetic peptide
  Seed: MIDGIGRFY
MADGIGRFI

SEQ ID NO: 41738 - protein, 9 aa, Artificial Sequence
  Description of Artificial Sequence: Synthetic peptide
  Seed: MIDGIGRFY
MADGIGRFL

SEQ ID NO: 41739 - protein, 9 aa, Artificial Sequence
  Description of Artificial Sequence: Synthetic peptide
  Seed: MIDGIGRFY
MADGIGRFK

SEQ ID NO: 41740 - protein, 9 aa, Artificial Sequence
  Description of Artificial Sequence: Synthetic peptide
  Seed: MIDGIGRFY
MADGIGRFM

SEQ ID NO: 41741 - protein, 9 aa, Artificial Sequence
  Description of Artificial Sequence: Synthetic peptide
  Seed: MIDGIGRFY
MADGIGRFF

SEQ ID NO: 41742 - protein, 9 aa, Artificial Sequence
  Description of Artificial Sequence: Synthetic peptide
  Seed: MIDGIGRFY
MADGIGRFW

SEQ ID NO: 41743 - protein, 9 aa, Artificial Sequence
  Description of Artificial Sequence: Synthetic peptide
  Seed: MIDGIGRFY
MADGIGRFY

SEQ ID NO: 41744 - protein, 9 aa, Artificial Sequence
  Description of Artificial Sequence: Synthetic peptide
  Seed: MIDGIGRFY
MADGIGRFV

SEQ ID NO: 41745 - protein, 9 aa, Artificial Sequence
  Description of Artificial Sequence: Synthetic peptide
  Seed: MIDGIGRFY
MNDGIGRFY

SEQ ID NO: 41746 - protein, 9 aa, Artificial Sequence
  Description of Artificial Sequence: Synthetic peptide
  Seed: MIDGIGRFY
MDDGIGRFY

SEQ ID NO: 41747 - protein, 9 aa, Artificial Sequence
  Description of Artificial Sequence: Synthetic peptide
  Seed: MIDGIGRFY
MCDGIGRFY

SEQ ID NO: 41748 - protein, 9 aa, Artificial Sequence
  Description of Artificial Sequence: Synthetic peptide
  Seed: MIDGIGRFY
MQDGIGRFM

SEQ ID NO: 41749 - protein, 9 aa, Artificial Sequence
  Description of Artificial Sequence: Synthetic peptide
  Seed: MIDGIGRFY
MQDGIGRFF

SEQ ID NO: 41750 - protein, 9 aa, Artificial Sequence
  Description of Artificial Sequence: Synthetic peptide
  Seed: MIDGIGRFY
MQDGIGRFY

SEQ ID NO: 41751 - protein, 9 aa, Artificial Sequence
  Description of Artificial Sequence: Synthetic peptide
  Seed: MIDGIGRFY
MGDGIGRFM

SEQ ID NO: 41752 - protein, 9 aa, Artificial Sequence
  Description of Artificial Sequence: Synthetic peptide
  Seed: MIDGIGRFY
MGDGIGRFF

SEQ ID NO: 41753 - protein, 9 aa, Artificial Sequence
  Description of Artificial Sequence: Synthetic peptide
  Seed: MIDGIGRFY
MGDGIGRFW

SEQ ID NO: 41754 - protein, 9 aa, Artificial Sequence
  Description of Artificial Sequence: Synthetic peptide
  Seed: MIDGIGRFY
MGDGIGRFY

SEQ ID NO: 41755 - protein, 9 aa, Artificial Sequence
  Description of Artificial Sequence: Synthetic peptide
  Seed: MIDGIGRFY
MHDGIGRFY

SEQ ID NO: 41756 - protein, 9 aa, Artificial Sequence
  Description of Artificial Sequence: Synthetic peptide
  Seed: MIDGIGRFY
MADGIGRFH

SEQ ID NO: 41757 - protein, 11 aa, Artificial Sequence
  Description of Artificial Sequence: Synthetic peptide
  Seed: METMDSSTLEL
MVTMDSSTLEV

SEQ ID NO: 41758 - protein, 11 aa, Artificial Sequence
  Description of Artificial Sequence: Synthetic peptide
  Seed: METMDSSTLEL
MSTMDSSTLEF

SEQ ID NO: 41759 - protein, 11 aa, Artificial Sequence
  Description of Artificial Sequence: Synthetic peptide
  Seed: METMDSSTLEL
MVTMDSSTLEF

SEQ ID NO: 41760 - protein, 11 aa, Artificial Sequence
  Description of Artificial Sequence: Synthetic peptide
  Seed: METMDSSTLEL
MSTMDSSTLEV

SEQ ID NO: 41761 - protein, 11 aa, Artificial Sequence
  Description of Artificial Sequence: Synthetic peptide
  Seed: METMDSSTLEL
MTTMDSSTLEI

SEQ ID NO: 41762 - protein, 11 aa, Artificial Sequence
  Description of Artificial Sequence: Synthetic peptide
  Seed: METMDSSTLEL
MTTMDSSTLEL

SEQ ID NO: 41763 - protein, 11 aa, Artificial Sequence
  Description of Artificial Sequence: Synthetic peptide
  Seed: METMDSSTLEL
MTTMDSSTLEM

SEQ ID NO: 41764 - protein, 11 aa, Artificial Sequence
  Description of Artificial Sequence: Synthetic peptide
  Seed: METMDSSTLEL
MTTMDSSTLEF

SEQ ID NO: 41765 - protein, 11 aa, Artificial Sequence
  Description of Artificial Sequence: Synthetic peptide
  Seed: METMDSSTLEL
MTTMDSSTLEV

SEQ ID NO: 41766 - protein, 11 aa, Artificial Sequence
  Description of Artificial Sequence: Synthetic peptide
  Seed: METMDSSTLEL
MWTMDSSTLEI

SEQ ID NO: 41767 - protein, 11 aa, Artificial Sequence
  Description of Artificial Sequence: Synthetic peptide
  Seed: METMDSSTLEL
MWTMDSSTLEL

SEQ ID NO: 41768 - protein, 11 aa, Artificial Sequence
  Description of Artificial Sequence: Synthetic peptide
  Seed: METMDSSTLEL
MWTMDSSTLEM

SEQ ID NO: 41769 - protein, 11 aa, Artificial Sequence
  Description of Artificial Sequence: Synthetic peptide
  Seed: METMDSSTLEL
MWTMDSSTLEF

SEQ ID NO: 41770 - protein, 11 aa, Artificial Sequence
  Description of Artificial Sequence: Synthetic peptide
  Seed: METMDSSTLEL
MWTMDSSTLEV

SEQ ID NO: 41771 - protein, 11 aa, Artificial Sequence
  Description of Artificial Sequence: Synthetic peptide
  Seed: METMDSSTLEL
MYTMDSSTLEI

SEQ ID NO: 41772 - protein, 11 aa, Artificial Sequence
  Description of Artificial Sequence: Synthetic peptide
  Seed: METMDSSTLEL
MYTMDSSTLEL

SEQ ID NO: 41773 - protein, 11 aa, Artificial Sequence
  Description of Artificial Sequence: Synthetic peptide
  Seed: METMDSSTLEL
MYTMDSSTLEM

SEQ ID NO: 41774 - protein, 11 aa, Artificial Sequence
  Description of Artificial Sequence: Synthetic peptide
  Seed: METMDSSTLEL
MYTMDSSTLEF

SEQ ID NO: 41775 - protein, 11 aa, Artificial Sequence
  Description of Artificial Sequence: Synthetic peptide
  Seed: METMDSSTLEL
MYTMDSSTLEV

SEQ ID NO: 41776 - protein, 11 aa, Artificial Sequence
  Description of Artificial Sequence: Synthetic peptide
  Seed: METMDSSTLEL
MVTMDSSTLEI

SEQ ID NO: 41777 - protein, 11 aa, Artificial Sequence
  Description of Artificial Sequence: Synthetic peptide
  Seed: METMDSSTLEL
MVTMDSSTLEL

SEQ ID NO: 41778 - protein, 11 aa, Artificial Sequence
  Description of Artificial Sequence: Synthetic peptide
  Seed: METMDSSTLEL
MVTMDSSTLEM

SEQ ID NO: 41779 - protein, 9 aa, Artificial Sequence
  Description of Artificial Sequence: Synthetic peptide
  Seed: MNNEGSYFF
MHNEGSYFL

SEQ ID NO: 41780 - protein, 9 aa, Artificial Sequence
  Description of Artificial Sequence: Synthetic peptide
  Seed: MNNEGSYFF
MHNEGSYFM

SEQ ID NO: 41781 - protein, 9 aa, Artificial Sequence
  Description of Artificial Sequence: Synthetic peptide
  Seed: MNNEGSYFF
MHNEGSYFF

SEQ ID NO: 41782 - protein, 9 aa, Artificial Sequence
  Description of Artificial Sequence: Synthetic peptide
  Seed: MSNEGSYFF
MINEGSYFI

SEQ ID NO: 41783 - protein, 9 aa, Artificial Sequence
  Description of Artificial Sequence: Synthetic peptide
  Seed: MSNEGSYFF
MHNEGSYFW

SEQ ID NO: 41784 - protein, 9 aa, Artificial Sequence
  Description of Artificial Sequence: Synthetic peptide
  Seed: MSNEGSYFF
MHNEGSYFY

SEQ ID NO: 41785 - protein, 9 aa, Artificial Sequence
  Description of Artificial Sequence: Synthetic peptide
  Seed: MSNEGSYFF
MINEGSYFA

SEQ ID NO: 41786 - protein, 9 aa, Artificial Sequence
  Description of Artificial Sequence: Synthetic peptide
  Seed: MSNEGSYFF
MINEGSYFC

SEQ ID NO: 41787 - protein, 9 aa, Artificial Sequence
  Description of Artificial Sequence: Synthetic peptide
  Seed: MSNEGSYFF
MINEGSYFH

SEQ ID NO: 41788 - protein, 9 aa, Artificial Sequence
  Description of Artificial Sequence: Synthetic peptide
  Seed: MSNEGSYFF
MINEGSYFL

SEQ ID NO: 41789 - protein, 9 aa, Artificial Sequence
  Description of Artificial Sequence: Synthetic peptide
  Seed: MSNEGSYFF
MLNEGSYFI

SEQ ID NO: 41790 - protein, 9 aa, Artificial Sequence
  Description of Artificial Sequence: Synthetic peptide
  Seed: MSNEGSYFF
MINEGSYFM

SEQ ID NO: 41791 - protein, 9 aa, Artificial Sequence
  Description of Artificial Sequence: Synthetic peptide
  Seed: MSNEGSYFF
MINEGSYFF

SEQ ID NO: 41792 - protein, 9 aa, Artificial Sequence
  Description of Artificial Sequence: Synthetic peptide
  Seed: MSNEGSYFF
MINEGSYFT

SEQ ID NO: 41793 - protein, 9 aa, Artificial Sequence
  Description of Artificial Sequence: Synthetic peptide
  Seed: MSNEGSYFF
MINEGSYFW

SEQ ID NO: 41794 - protein, 9 aa, Artificial Sequence
  Description of Artificial Sequence: Synthetic peptide
  Seed: MSNEGSYFF
MINEGSYFY

SEQ ID NO: 41795 - protein, 9 aa, Artificial Sequence
  Description of Artificial Sequence: Synthetic peptide
  Seed: MSNEGSYFF
MINEGSYFV

SEQ ID NO: 41796 - protein, 9 aa, Artificial Sequence
  Description of Artificial Sequence: Synthetic peptide
  Seed: MSNEGSYFF
MLNEGSYFA

SEQ ID NO: 41797 - protein, 9 aa, Artificial Sequence
  Description of Artificial Sequence: Synthetic peptide
  Seed: MSNEGSYFF
MLNEGSYFC

SEQ ID NO: 41798 - protein, 9 aa, Artificial Sequence
  Description of Artificial Sequence: Synthetic peptide
  Seed: MSNEGSYFF
MLNEGSYFG

SEQ ID NO: 41799 - protein, 9 aa, Artificial Sequence
  Description of Artificial Sequence: Synthetic peptide
  Seed: MSNEGSYFF
MLNEGSYFH

SEQ ID NO: 41800 - protein, 9 aa, Artificial Sequence
  Description of Artificial Sequence: Synthetic peptide
  Seed: MSNEGSYFF
MLNEGSYFL

SEQ ID NO: 41801 - protein, 9 aa, Artificial Sequence
  Description of Artificial Sequence: Synthetic peptide
  Seed: MSNEGSYFF
MPNEGSYFQ

SEQ ID NO: 41802 - protein, 9 aa, Artificial Sequence
  Description of Artificial Sequence: Synthetic peptide
  Seed: MSNEGSYFF
MFNEGSYFI

SEQ ID NO: 41803 - protein, 9 aa, Artificial Sequence
  Description of Artificial Sequence: Synthetic peptide
  Seed: MSNEGSYFF
MMNEGSYFM

SEQ ID NO: 41804 - protein, 9 aa, Artificial Sequence
  Description of Artificial Sequence: Synthetic peptide
  Seed: MSNEGSYFF
MMNEGSYFF

SEQ ID NO: 41805 - protein, 9 aa, Artificial Sequence
  Description of Artificial Sequence: Synthetic peptide
  Seed: MSNEGSYFF
MMNEGSYFP

SEQ ID NO: 41806 - protein, 9 aa, Artificial Sequence
  Description of Artificial Sequence: Synthetic peptide
  Seed: MSNEGSYFF
MMNEGSYFS

SEQ ID NO: 41807 - protein, 9 aa, Artificial Sequence
  Description of Artificial Sequence: Synthetic peptide
  Seed: MSNEGSYFF
MMNEGSYFT

SEQ ID NO: 41808 - protein, 9 aa, Artificial Sequence
  Description of Artificial Sequence: Synthetic peptide
  Seed: MSNEGSYFF
MMNEGSYFW

SEQ ID NO: 41809 - protein, 9 aa, Artificial Sequence
  Description of Artificial Sequence: Synthetic peptide
  Seed: MSNEGSYFF
MMNEGSYFY

SEQ ID NO: 41810 - protein, 9 aa, Artificial Sequence
  Description of Artificial Sequence: Synthetic peptide
  Seed: MSNEGSYFF
MMNEGSYFV

SEQ ID NO: 41811 - protein, 9 aa, Artificial Sequence
  Description of Artificial Sequence: Synthetic peptide
  Seed: MSNEGSYFF
MFNEGSYFH

SEQ ID NO: 41812 - protein, 9 aa, Artificial Sequence
  Description of Artificial Sequence: Synthetic peptide
  Seed: MSNEGSYFF
MFNEGSYFL

SEQ ID NO: 41813 - protein, 9 aa, Artificial Sequence
  Description of Artificial Sequence: Synthetic peptide
  Seed: MSNEGSYFF
MLNEGSYFM

SEQ ID NO: 41814 - protein, 9 aa, Artificial Sequence
  Description of Artificial Sequence: Synthetic peptide
  Seed: MSNEGSYFF
MFNEGSYFM

SEQ ID NO: 41815 - protein, 9 aa, Artificial Sequence
  Description of Artificial Sequence: Synthetic peptide
  Seed: MSNEGSYFF
MFNEGSYFF

SEQ ID NO: 41816 - protein, 9 aa, Artificial Sequence
  Description of Artificial Sequence: Synthetic peptide
  Seed: MSNEGSYFF
MFNEGSYFW

SEQ ID NO: 41817 - protein, 9 aa, Artificial Sequence
  Description of Artificial Sequence: Synthetic peptide
  Seed: MSNEGSYFF
MFNEGSYFY

SEQ ID NO: 41818 - protein, 9 aa, Artificial Sequence
  Description of Artificial Sequence: Synthetic peptide
  Seed: MSNEGSYFF
MFNEGSYFV

SEQ ID NO: 41819 - protein, 9 aa, Artificial Sequence
  Description of Artificial Sequence: Synthetic peptide
  Seed: MSNEGSYFF
MPNEGSYFA

SEQ ID NO: 41820 - protein, 9 aa, Artificial Sequence
  Description of Artificial Sequence: Synthetic peptide
  Seed: MSNEGSYFF
MPNEGSYFR

SEQ ID NO: 41821 - protein, 9 aa, Artificial Sequence
  Description of Artificial Sequence: Synthetic peptide
  Seed: MSNEGSYFF
MPNEGSYFN

SEQ ID NO: 41822 - protein, 9 aa, Artificial Sequence
  Description of Artificial Sequence: Synthetic peptide
  Seed: MSNEGSYFF
MPNEGSYFD

SEQ ID NO: 41823 - protein, 9 aa, Artificial Sequence
  Description of Artificial Sequence: Synthetic peptide
  Seed: MSNEGSYFF
MMNEGSYFK

SEQ ID NO: 41824 - protein, 9 aa, Artificial Sequence
  Description of Artificial Sequence: Synthetic peptide
  Seed: MSNEGSYFF
MMNEGSYFL

SEQ ID NO: 41825 - protein, 9 aa, Artificial Sequence
  Description of Artificial Sequence: Synthetic peptide
  Seed: MSNEGSYFF
MMNEGSYFI

SEQ ID NO: 41826 - protein, 9 aa, Artificial Sequence
  Description of Artificial Sequence: Synthetic peptide
  Seed: MSNEGSYFF
MMNEGSYFH

SEQ ID NO: 41827 - protein, 9 aa, Artificial Sequence
  Description of Artificial Sequence: Synthetic peptide
  Seed: MSNEGSYFF
MLNEGSYFF

SEQ ID NO: 41828 - protein, 9 aa, Artificial Sequence
  Description of Artificial Sequence: Synthetic peptide
  Seed: MSNEGSYFF
MLNEGSYFS

SEQ ID NO: 41829 - protein, 9 aa, Artificial Sequence
  Description of Artificial Sequence: Synthetic peptide
  Seed: MSNEGSYFF
MLNEGSYFT

SEQ ID NO: 41830 - protein, 9 aa, Artificial Sequence
  Description of Artificial Sequence: Synthetic peptide
  Seed: MSNEGSYFF
MLNEGSYFW

SEQ ID NO: 41831 - protein, 9 aa, Artificial Sequence
  Description of Artificial Sequence: Synthetic peptide
  Seed: MSNEGSYFF
MLNEGSYFY

SEQ ID NO: 41832 - protein, 9 aa, Artificial Sequence
  Description of Artificial Sequence: Synthetic peptide
  Seed: MSNEGSYFF
MLNEGSYFV

SEQ ID NO: 41833 - protein, 9 aa, Artificial Sequence
  Description of Artificial Sequence: Synthetic peptide
  Seed: MSNEGSYFF
MKNEGSYFH

SEQ ID NO: 41834 - protein, 9 aa, Artificial Sequence
  Description of Artificial Sequence: Synthetic peptide
  Seed: MSNEGSYFF
MKNEGSYFI

SEQ ID NO: 41835 - protein, 9 aa, Artificial Sequence
  Description of Artificial Sequence: Synthetic peptide
  Seed: MSNEGSYFF
MKNEGSYFL

SEQ ID NO: 41836 - protein, 9 aa, Artificial Sequence
  Description of Artificial Sequence: Synthetic peptide
  Seed: MSNEGSYFF
MKNEGSYFM

SEQ ID NO: 41837 - protein, 9 aa, Artificial Sequence
  Description of Artificial Sequence: Synthetic peptide
  Seed: MSNEGSYFF
MKNEGSYFF

SEQ ID NO: 41838 - protein, 9 aa, Artificial Sequence
  Description of Artificial Sequence: Synthetic peptide
  Seed: MSNEGSYFF
MKNEGSYFW

SEQ ID NO: 41839 - protein, 9 aa, Artificial Sequence
  Description of Artificial Sequence: Synthetic peptide
  Seed: MSNEGSYFF
MKNEGSYFY

SEQ ID NO: 41840 - protein, 9 aa, Artificial Sequence
  Description of Artificial Sequence: Synthetic peptide
  Seed: MSNEGSYFF
MKNEGSYFV

SEQ ID NO: 41841 - protein, 9 aa, Artificial Sequence
  Description of Artificial Sequence: Synthetic peptide
  Seed: MSNEGSYFF
MMNEGSYFA

SEQ ID NO: 41842 - protein, 9 aa, Artificial Sequence
  Description of Artificial Sequence: Synthetic peptide
  Seed: MSNEGSYFF
MMNEGSYFR

SEQ ID NO: 41843 - protein, 9 aa, Artificial Sequence
  Description of Artificial Sequence: Synthetic peptide
  Seed: MSNEGSYFF
MMNEGSYFC

SEQ ID NO: 41844 - protein, 9 aa, Artificial Sequence
  Description of Artificial Sequence: Synthetic peptide
  Seed: MSNEGSYFF
MMNEGSYFE

SEQ ID NO: 41845 - protein, 9 aa, Artificial Sequence
  Description of Artificial Sequence: Synthetic peptide
  Seed: MSNEGSYFF
MMNEGSYFG

SEQ ID NO: 41846 - protein, 8 aa, Artificial Sequence
  Description of Artificial Sequence: Synthetic peptide
  Seed: MSNEGSYF
MMNEGSYF

SEQ ID NO: 41847 - protein, 8 aa, Artificial Sequence
  Description of Artificial Sequence: Synthetic peptide
  Seed: MSNEGSYF
MHNEGSYY

SEQ ID NO: 41848 - protein, 8 aa, Artificial Sequence
  Description of Artificial Sequence: Synthetic peptide
  Seed: MSNEGSYF
MINEGSYF

SEQ ID NO: 41849 - protein, 8 aa, Artificial Sequence
  Description of Artificial Sequence: Synthetic peptide
  Seed: MSNEGSYF
MLNEGSYF

SEQ ID NO: 41850 - protein, 8 aa, Artificial Sequence
  Description of Artificial Sequence: Synthetic peptide
  Seed: MSNEGSYF
MLNEGSYY

SEQ ID NO: 41851 - protein, 8 aa, Artificial Sequence
  Description of Artificial Sequence: Synthetic peptide
  Seed: MSNEGSYF
MKNEGSYM

SEQ ID NO: 41852 - protein, 8 aa, Artificial Sequence
  Description of Artificial Sequence: Synthetic peptide
  Seed: MSNEGSYF
MKNEGSYF

SEQ ID NO: 41853 - protein, 8 aa, Artificial Sequence
  Description of Artificial Sequence: Synthetic peptide
  Seed: MSNEGSYF
MKNEGSYY

SEQ ID NO: 41854 - protein, 8 aa, Artificial Sequence
  Description of Artificial Sequence: Synthetic peptide
  Seed: MSNEGSYF
MMNEGSYL

SEQ ID NO: 41855 - protein, 8 aa, Artificial Sequence
  Description of Artificial Sequence: Synthetic peptide
  Seed: MSNEGSYF
MMNEGSYM

SEQ ID NO: 41856 - protein, 8 aa, Artificial Sequence
  Description of Artificial Sequence: Synthetic peptide
  Seed: MSNEGSYF
MMNEGSYY

SEQ ID NO: 41857 - protein, 8 aa, Artificial Sequence
  Description of Artificial Sequence: Synthetic peptide
  Seed: MSNEGSYF
MFNEGSYF

SEQ ID NO: 41858 - protein, 8 aa, Artificial Sequence
  Description of Artificial Sequence: Synthetic peptide
  Seed: MSNEGSYF
MFNEGSYY

SEQ ID NO: 41859 - protein, 8 aa, Artificial Sequence
  Description of Artificial Sequence: Synthetic peptide
  Seed: MSNEGSYF
MSNEGSYL

SEQ ID NO: 41860 - protein, 8 aa, Artificial Sequence
  Description of Artificial Sequence: Synthetic peptide
  Seed: MSNEGSYF
MSNEGSYM

SEQ ID NO: 41861 - protein, 8 aa, Artificial Sequence
  Description of Artificial Sequence: Synthetic peptide
  Seed: MSNEGSYF
MSNEGSYW

SEQ ID NO: 41862 - protein, 8 aa, Artificial Sequence
  Description of Artificial Sequence: Synthetic peptide
  Seed: MSNEGSYF
MSNEGSYY

SEQ ID NO: 41863 - protein, 8 aa, Artificial Sequence
  Description of Artificial Sequence: Synthetic peptide
  Seed: MSNEGSYF
MTNEGSYL

SEQ ID NO: 41864 - protein, 8 aa, Artificial Sequence
  Description of Artificial Sequence: Synthetic peptide
  Seed: MSNEGSYF
MTNEGSYM

SEQ ID NO: 41865 - protein, 8 aa, Artificial Sequence
  Description of Artificial Sequence: Synthetic peptide
  Seed: MSNEGSYF
MTNEGSYF

SEQ ID NO: 41866 - protein, 8 aa, Artificial Sequence
  Description of Artificial Sequence: Synthetic peptide
  Seed: MSNEGSYF
MHNEGSYF

SEQ ID NO: 41867 - protein, 8 aa, Artificial Sequence
  Description of Artificial Sequence: Synthetic peptide
  Seed: MSNEGSYF
MENEGSYF

SEQ ID NO: 41868 - protein, 8 aa, Artificial Sequence
  Description of Artificial Sequence: Synthetic peptide
  Seed: MSNEGSYF
MQNEGSYY

SEQ ID NO: 41869 - protein, 8 aa, Artificial Sequence
  Description of Artificial Sequence: Synthetic peptide
  Seed: MSNEGSYF
MQNEGSYW

SEQ ID NO: 41870 - protein, 9 aa, Artificial Sequence
  Description of Artificial Sequence: Synthetic peptide
  Seed: MRTEIIRMM
MYTEIIRMM

SEQ ID NO: 41871 - protein, 9 aa, Artificial Sequence
  Description of Artificial Sequence: Synthetic peptide
  Seed: MRTEIIRMM
MYTEIIRMF

SEQ ID NO: 41872 - protein, 9 aa, Artificial Sequence
  Description of Artificial Sequence: Synthetic peptide
  Seed: MRTEIIRMM
MYTEIIRMY

SEQ ID NO: 41873 - protein, 9 aa, Artificial Sequence
  Description of Artificial Sequence: Synthetic peptide
  Seed: MRTEIIRMM
MYTEIIRMV

SEQ ID NO: 41874 - protein, 9 aa, Artificial Sequence
  Description of Artificial Sequence: Synthetic peptide
  Seed: MRTEIIRMM
MVTEIIRMF

SEQ ID NO: 41875 - protein, 9 aa, Artificial Sequence
  Description of Artificial Sequence: Synthetic peptide
  Seed: MRTEIIRMM
MVTEIIRMY

SEQ ID NO: 41876 - protein, 8 aa, Artificial Sequence
  Description of Artificial Sequence: Synthetic peptide
  Seed: MSNEGSYF
MANEGSYI

SEQ ID NO: 41877 - protein, 8 aa, Artificial Sequence
  Description of Artificial Sequence: Synthetic peptide
  Seed: MSNEGSYF
MANEGSYL

SEQ ID NO: 41878 - protein, 8 aa, Artificial Sequence
  Description of Artificial Sequence: Synthetic peptide
  Seed: MSNEGSYF
MANEGSYM

SEQ ID NO: 41879 - protein, 8 aa, Artificial Sequence
  Description of Artificial Sequence: Synthetic peptide
  Seed: MSNEGSYF
MANEGSYF

SEQ ID NO: 41880 - protein, 8 aa, Artificial Sequence
  Description of Artificial Sequence: Synthetic peptide
  Seed: MSNEGSYF
MANEGSYW

SEQ ID NO: 41881 - protein, 8 aa, Artificial Sequence
  Description of Artificial Sequence: Synthetic peptide
  Seed: MSNEGSYF
MANEGSYY

SEQ ID NO: 41882 - protein, 8 aa, Artificial Sequence
  Description of Artificial Sequence: Synthetic peptide
  Seed: MSNEGSYF
MANEGSYV

SEQ ID NO: 41883 - protein, 8 aa, Artificial Sequence
  Description of Artificial Sequence: Synthetic peptide
  Seed: MSNEGSYF
MRNEGSYF

SEQ ID NO: 41884 - protein, 8 aa, Artificial Sequence
  Description of Artificial Sequence: Synthetic peptide
  Seed: MSNEGSYF
MRNEGSYY

SEQ ID NO: 41885 - protein, 8 aa, Artificial Sequence
  Description of Artificial Sequence: Synthetic peptide
  Seed: MSNEGSYF
MQNEGSYI

SEQ ID NO: 41886 - protein, 8 aa, Artificial Sequence
  Description of Artificial Sequence: Synthetic peptide
  Seed: MSNEGSYF
MQNEGSYL

SEQ ID NO: 41887 - protein, 8 aa, Artificial Sequence
  Description of Artificial Sequence: Synthetic peptide
  Seed: MSNEGSYF
MQNEGSYM

SEQ ID NO: 41888 - protein, 8 aa, Artificial Sequence
  Description of Artificial Sequence: Synthetic peptide
  Seed: MSNEGSYF
MQNEGSYF

SEQ ID NO: 41889 - protein, 8 aa, Artificial Sequence
  Description of Artificial Sequence: Synthetic peptide
  Seed: MSNEGSYF
MTNEGSYW

SEQ ID NO: 41890 - protein, 8 aa, Artificial Sequence
  Description of Artificial Sequence: Synthetic peptide
  Seed: MSNEGSYF
MTNEGSYY

SEQ ID NO: 41891 - protein, 8 aa, Artificial Sequence
  Description of Artificial Sequence: Synthetic peptide
  Seed: MSNEGSYF
MYNEGSYF

SEQ ID NO: 41892 - protein, 8 aa, Artificial Sequence
  Description of Artificial Sequence: Synthetic peptide
  Seed: MSNEGSYF
MYNEGSYY

SEQ ID NO: 41893 - protein, 8 aa, Artificial Sequence
  Description of Artificial Sequence: Synthetic peptide
  Seed: MSNEGSYF
MVNEGSYM

SEQ ID NO: 41894 - protein, 8 aa, Artificial Sequence
  Description of Artificial Sequence: Synthetic peptide
  Seed: MSNEGSYF
MVNEGSYF

SEQ ID NO: 41895 - protein, 8 aa, Artificial Sequence
  Description of Artificial Sequence: Synthetic peptide
  Seed: MSNEGSYF
MVNEGSYW

SEQ ID NO: 41896 - protein, 8 aa, Artificial Sequence
  Description of Artificial Sequence: Synthetic peptide
  Seed: MSNEGSYF
MVNEGSYY

SEQ ID NO: 41897 - protein, 9 aa, Artificial Sequence
  Description of Artificial Sequence: Synthetic peptide
  Seed: MSNEGSYFF
MPNEGSYFC

SEQ ID NO: 41898 - protein, 9 aa, Artificial Sequence
  Description of Artificial Sequence: Synthetic peptide
  Seed: MSNEGSYFF
MPNEGSYFE

SEQ ID NO: 41899 - protein, 9 aa, Artificial Sequence
  Description of Artificial Sequence: Synthetic peptide
  Seed: MRTEIIRMM
MYTEIIRMI

SEQ ID NO: 41900 - protein, 10 aa, Artificial Sequence
  Description of Artificial Sequence: Synthetic peptide
  Seed: MSNEGSYFFG
MWNEGSYFFW

SEQ ID NO: 41901 - protein, 10 aa, Artificial Sequence
  Description of Artificial Sequence: Synthetic peptide
  Seed: MSNEGSYFFG
MYNEGSYFFW

SEQ ID NO: 41902 - protein, 10 aa, Artificial Sequence
  Description of Artificial Sequence: Synthetic peptide
  Seed: MSNEGSYFFG
MVNEGSYFFF

SEQ ID NO: 41903 - protein, 10 aa, Artificial Sequence
  Description of Artificial Sequence: Synthetic peptide
  Seed: MSNEGSYFFG
MVNEGSYFFW

SEQ ID NO: 41904 - protein, 10 aa, Artificial Sequence
  Description of Artificial Sequence: Synthetic peptide
  Seed: MSNEGSYFFG
MTNEGSYFFV

SEQ ID NO: 41905 - protein, 10 aa, Artificial Sequence
  Description of Artificial Sequence: Synthetic peptide
  Seed: MSNEGSYFFG
MTNEGSYFFY

SEQ ID NO: 41906 - protein, 10 aa, Artificial Sequence
  Description of Artificial Sequence: Synthetic peptide
  Seed: MSNEGSYFFG
MTNEGSYFFW

SEQ ID NO: 41907 - protein, 10 aa, Artificial Sequence
  Description of Artificial Sequence: Synthetic peptide
  Seed: MSNEGSYFFG
MTNEGSYFFF

SEQ ID NO: 41908 - protein, 10 aa, Artificial Sequence
  Description of Artificial Sequence: Synthetic peptide
  Seed: MSNEGSYFFG
MSNEGSYFFC

SEQ ID NO: 41909 - protein, 10 aa, Artificial Sequence
  Description of Artificial Sequence: Synthetic peptide
  Seed: MSNEGSYFFG
MSNEGSYFFQ

SEQ ID NO: 41910 - protein, 10 aa, Artificial Sequence
  Description of Artificial Sequence: Synthetic peptide
  Seed: MSNEGSYFFG
MSNEGSYFFE

SEQ ID NO: 41911 - protein, 10 aa, Artificial Sequence
  Description of Artificial Sequence: Synthetic peptide
  Seed: MSNEGSYFFG
MSNEGSYFFH

SEQ ID NO: 41912 - protein, 10 aa, Artificial Sequence
  Description of Artificial Sequence: Synthetic peptide
  Seed: MSNEGSYFFG
MSNEGSYFFI

SEQ ID NO: 41913 - protein, 10 aa, Artificial Sequence
  Description of Artificial Sequence: Synthetic peptide
  Seed: MSNEGSYFFG
MSNEGSYFFL

SEQ ID NO: 41914 - protein, 10 aa, Artificial Sequence
  Description of Artificial Sequence: Synthetic peptide
  Seed: MSNEGSYFFG
MSNEGSYFFK

SEQ ID NO: 41915 - protein, 10 aa, Artificial Sequence
  Description of Artificial Sequence: Synthetic peptide
  Seed: MSNEGSYFFG
MSNEGSYFFM

SEQ ID NO: 41916 - protein, 10 aa, Artificial Sequence
  Description of Artificial Sequence: Synthetic peptide
  Seed: MSNEGSYFFG
MSNEGSYFFF

SEQ ID NO: 41917 - protein, 10 aa, Artificial Sequence
  Description of Artificial Sequence: Synthetic peptide
  Seed: MSNEGSYFFG
MSNEGSYFFP

SEQ ID NO: 41918 - protein, 10 aa, Artificial Sequence
  Description of Artificial Sequence: Synthetic peptide
  Seed: MSNEGSYFFG
MSNEGSYFFS

SEQ ID NO: 41919 - protein, 10 aa, Artificial Sequence
  Description of Artificial Sequence: Synthetic peptide
  Seed: MSNEGSYFFG
MSNEGSYFFT

SEQ ID NO: 41920 - protein, 10 aa, Artificial Sequence
  Description of Artificial Sequence: Synthetic peptide
  Seed: MSNEGSYFFG
MSNEGSYFFW

SEQ ID NO: 41921 - protein, 10 aa, Artificial Sequence
  Description of Artificial Sequence: Synthetic peptide
  Seed: MSNEGSYFFG
MSNEGSYFFY

SEQ ID NO: 41922 - protein, 10 aa, Artificial Sequence
  Description of Artificial Sequence: Synthetic peptide
  Seed: MSNEGSYFFG
MSNEGSYFFV

SEQ ID NO: 41923 - protein, 10 aa, Artificial Sequence
  Description of Artificial Sequence: Synthetic peptide
  Seed: MSNEGSYFFG
MTNEGSYFFG

SEQ ID NO: 41924 - protein, 10 aa, Artificial Sequence
  Description of Artificial Sequence: Synthetic peptide
  Seed: MSNEGSYFFG
MTNEGSYFFI

SEQ ID NO: 41925 - protein, 10 aa, Artificial Sequence
  Description of Artificial Sequence: Synthetic peptide
  Seed: MSNEGSYFFG
MTNEGSYFFL

SEQ ID NO: 41926 - protein, 10 aa, Artificial Sequence
  Description of Artificial Sequence: Synthetic peptide
  Seed: MSNEGSYFFG
MTNEGSYFFM

SEQ ID NO: 41927 - protein, 9 aa, Artificial Sequence
  Description of Artificial Sequence: Synthetic peptide
  Seed: MSNEGSYFF
MPNEGSYFG

SEQ ID NO: 41928 - protein, 10 aa, Artificial Sequence
  Description of Artificial Sequence: Synthetic peptide
  Seed: MSNEGSYFFG
MSNEGSYFFD

SEQ ID NO: 41929 - protein, 10 aa, Artificial Sequence
  Description of Artificial Sequence: Synthetic peptide
  Seed: MSNEGSYFFG
MSNEGSYFFN

SEQ ID NO: 41930 - protein, 10 aa, Artificial Sequence
  Description of Artificial Sequence: Synthetic peptide
  Seed: MSNEGSYFFG
MSNEGSYFFR

SEQ ID NO: 41931 - protein, 9 aa, Artificial Sequence
  Description of Artificial Sequence: Synthetic peptide
  Seed: MSNEGSYFF
MTNEGSYFV

SEQ ID NO: 41932 - protein, 9 aa, Artificial Sequence
  Description of Artificial Sequence: Synthetic peptide
  Seed: MSNEGSYFF
MTNEGSYFG

SEQ ID NO: 41933 - protein, 9 aa, Artificial Sequence
  Description of Artificial Sequence: Synthetic peptide
  Seed: MSNEGSYFF
MTNEGSYFH

SEQ ID NO: 41934 - protein, 9 aa, Artificial Sequence
  Description of Artificial Sequence: Synthetic peptide
  Seed: MSNEGSYFF
MTNEGSYFI

SEQ ID NO: 41935 - protein, 9 aa, Artificial Sequence
  Description of Artificial Sequence: Synthetic peptide
  Seed: MSNEGSYFF
MTNEGSYFL

SEQ ID NO: 41936 - protein, 9 aa, Artificial Sequence
  Description of Artificial Sequence: Synthetic peptide
  Seed: MSNEGSYFF
MTNEGSYFM

SEQ ID NO: 41937 - protein, 9 aa, Artificial Sequence
  Description of Artificial Sequence: Synthetic peptide
  Seed: MSNEGSYFF
MTNEGSYFF

SEQ ID NO: 41938 - protein, 9 aa, Artificial Sequence
  Description of Artificial Sequence: Synthetic peptide
  Seed: MSNEGSYFF
MTNEGSYFT

SEQ ID NO: 41939 - protein, 9 aa, Artificial Sequence
  Description of Artificial Sequence: Synthetic peptide
  Seed: MSNEGSYFF
MTNEGSYFW

SEQ ID NO: 41940 - protein, 9 aa, Artificial Sequence
  Description of Artificial Sequence: Synthetic peptide
  Seed: MSNEGSYFF
MTNEGSYFY

SEQ ID NO: 41941 - protein, 9 aa, Artificial Sequence
  Description of Artificial Sequence: Synthetic peptide
  Seed: MSNEGSYFF
MWNEGSYFI

SEQ ID NO: 41942 - protein, 10 aa, Artificial Sequence
  Description of Artificial Sequence: Synthetic peptide
  Seed: MSNEGSYFFG
MSNEGSYFFA

SEQ ID NO: 41943 - protein, 9 aa, Artificial Sequence
  Description of Artificial Sequence: Synthetic peptide
  Seed: MSNEGSYFF
MWNEGSYFL

SEQ ID NO: 41944 - protein, 9 aa, Artificial Sequence
  Description of Artificial Sequence: Synthetic peptide
  Seed: MSNEGSYFF
MWNEGSYFM

SEQ ID NO: 41945 - protein, 9 aa, Artificial Sequence
  Description of Artificial Sequence: Synthetic peptide
  Seed: MSNEGSYFF
MWNEGSYFF

SEQ ID NO: 41946 - protein, 9 aa, Artificial Sequence
  Description of Artificial Sequence: Synthetic peptide
  Seed: MSNEGSYFF
MWNEGSYFW

SEQ ID NO: 41947 - protein, 9 aa, Artificial Sequence
  Description of Artificial Sequence: Synthetic peptide
  Seed: MSNEGSYFF
MWNEGSYFY

SEQ ID NO: 41948 - protein, 9 aa, Artificial Sequence
  Description of Artificial Sequence: Synthetic peptide
  Seed: MSNEGSYFF
MWNEGSYFV

SEQ ID NO: 41949 - protein, 9 aa, Artificial Sequence
  Description of Artificial Sequence: Synthetic peptide
  Seed: MSNEGSYFF
MYNEGSYFA

SEQ ID NO: 41950 - protein, 9 aa, Artificial Sequence
  Description of Artificial Sequence: Synthetic peptide
  Seed: MSNEGSYFF
MYNEGSYFC

SEQ ID NO: 41951 - protein, 9 aa, Artificial Sequence
  Description of Artificial Sequence: Synthetic peptide
  Seed: MSNEGSYFF
MYNEGSYFG

SEQ ID NO: 41952 - protein, 9 aa, Artificial Sequence
  Description of Artificial Sequence: Synthetic peptide
  Seed: MSNEGSYFF
MTNEGSYFA

SEQ ID NO: 41953 - protein, 9 aa, Artificial Sequence
  Description of Artificial Sequence: Synthetic peptide
  Seed: MSNEGSYFF
MSNEGSYFV

SEQ ID NO: 41954 - protein, 9 aa, Artificial Sequence
  Description of Artificial Sequence: Synthetic peptide
  Seed: MSNEGSYFF
MSNEGSYFY

SEQ ID NO: 41955 - protein, 9 aa, Artificial Sequence
  Description of Artificial Sequence: Synthetic peptide
  Seed: MSNEGSYFF
MSNEGSYFW

SEQ ID NO: 41956 - protein, 9 aa, Artificial Sequence
  Description of Artificial Sequence: Synthetic peptide
  Seed: MSNEGSYFF
MPNEGSYFH

SEQ ID NO: 41957 - protein, 9 aa, Artificial Sequence
  Description of Artificial Sequence: Synthetic peptide
  Seed: MSNEGSYFF
MPNEGSYFI

SEQ ID NO: 41958 - protein, 9 aa, Artificial Sequence
  Description of Artificial Sequence: Synthetic peptide
  Seed: MSNEGSYFF
MPNEGSYFL

SEQ ID NO: 41959 - protein, 9 aa, Artificial Sequence
  Description of Artificial Sequence: Synthetic peptide
  Seed: MSNEGSYFF
MPNEGSYFK

SEQ ID NO: 41960 - protein, 9 aa, Artificial Sequence
  Description of Artificial Sequence: Synthetic peptide
  Seed: MSNEGSYFF
MPNEGSYFM

SEQ ID NO: 41961 - protein, 9 aa, Artificial Sequence
  Description of Artificial Sequence: Synthetic peptide
  Seed: MSNEGSYFF
MPNEGSYFF

SEQ ID NO: 41962 - protein, 9 aa, Artificial Sequence
  Description of Artificial Sequence: Synthetic peptide
  Seed: MSNEGSYFF
MPNEGSYFP

SEQ ID NO: 41963 - protein, 9 aa, Artificial Sequence
  Description of Artificial Sequence: Synthetic peptide
  Seed: MSNEGSYFF
MPNEGSYFS

SEQ ID NO: 41964 - protein, 9 aa, Artificial Sequence
  Description of Artificial Sequence: Synthetic peptide
  Seed: MSNEGSYFF
MPNEGSYFT

SEQ ID NO: 41965 - protein, 9 aa, Artificial Sequence
  Description of Artificial Sequence: Synthetic peptide
  Seed: MSNEGSYFF
MPNEGSYFW

SEQ ID NO: 41966 - protein, 9 aa, Artificial Sequence
  Description of Artificial Sequence: Synthetic peptide
  Seed: MSNEGSYFF
MPNEGSYFY

SEQ ID NO: 41967 - protein, 9 aa, Artificial Sequence
  Description of Artificial Sequence: Synthetic peptide
  Seed: MSNEGSYFF
MPNEGSYFV

SEQ ID NO: 41968 - protein, 9 aa, Artificial Sequence
  Description of Artificial Sequence: Synthetic peptide
  Seed: MSNEGSYFF
MSNEGSYFA

SEQ ID NO: 41969 - protein, 9 aa, Artificial Sequence
  Description of Artificial Sequence: Synthetic peptide
  Seed: MSNEGSYFF
MSNEGSYFN

SEQ ID NO: 41970 - protein, 9 aa, Artificial Sequence
  Description of Artificial Sequence: Synthetic peptide
  Seed: MSNEGSYFF
MSNEGSYFG

SEQ ID NO: 41971 - protein, 9 aa, Artificial Sequence
  Description of Artificial Sequence: Synthetic peptide
  Seed: MSNEGSYFF
MSNEGSYFH

SEQ ID NO: 41972 - protein, 9 aa, Artificial Sequence
  Description of Artificial Sequence: Synthetic peptide
  Seed: MSNEGSYFF
MSNEGSYFI

SEQ ID NO: 41973 - protein, 9 aa, Artificial Sequence
  Description of Artificial Sequence: Synthetic peptide
  Seed: MSNEGSYFF
MSNEGSYFL

SEQ ID NO: 41974 - protein, 9 aa, Artificial Sequence
  Description of Artificial Sequence: Synthetic peptide
  Seed: MSNEGSYFF
MSNEGSYFM

SEQ ID NO: 41975 - protein, 9 aa, Artificial Sequence
  Description of Artificial Sequence: Synthetic peptide
  Seed: MSNEGSYFF
MYNEGSYFH

SEQ ID NO: 41976 - protein, 9 aa, Artificial Sequence
  Description of Artificial Sequence: Synthetic peptide
  Seed: MSNEGSYFF
MYNEGSYFI

SEQ ID NO: 41977 - protein, 9 aa, Artificial Sequence
  Description of Artificial Sequence: Synthetic peptide
  Seed: MSNEGSYFF
MYNEGSYFL

SEQ ID NO: 41978 - protein, 10 aa, Artificial Sequence
  Description of Artificial Sequence: Synthetic peptide
  Seed: MSNEGSYFFG
MANEGSYFFW

SEQ ID NO: 41979 - protein, 10 aa, Artificial Sequence
  Description of Artificial Sequence: Synthetic peptide
  Seed: MSNEGSYFFG
MANEGSYFFV

SEQ ID NO: 41980 - protein, 10 aa, Artificial Sequence
  Description of Artificial Sequence: Synthetic peptide
  Seed: MSNEGSYFFG
MRNEGSYFFW

SEQ ID NO: 41981 - protein, 10 aa, Artificial Sequence
  Description of Artificial Sequence: Synthetic peptide
  Seed: MSNEGSYFFG
MNNEGSYFFW

SEQ ID NO: 41982 - protein, 10 aa, Artificial Sequence
  Description of Artificial Sequence: Synthetic peptide
  Seed: MSNEGSYFFG
MDNEGSYFFW

SEQ ID NO: 41983 - protein, 10 aa, Artificial Sequence
  Description of Artificial Sequence: Synthetic peptide
  Seed: MSNEGSYFFG
MCNEGSYFFW

SEQ ID NO: 41984 - protein, 10 aa, Artificial Sequence
  Description of Artificial Sequence: Synthetic peptide
  Seed: MSNEGSYFFG
MQNEGSYFFW

SEQ ID NO: 41985 - protein, 10 aa, Artificial Sequence
  Description of Artificial Sequence: Synthetic peptide
  Seed: MSNEGSYFFG
MENEGSYFFW

SEQ ID NO: 41986 - protein, 10 aa, Artificial Sequence
  Description of Artificial Sequence: Synthetic peptide
  Seed: MSNEGSYFFG
MGNEGSYFFF

SEQ ID NO: 41987 - protein, 10 aa, Artificial Sequence
  Description of Artificial Sequence: Synthetic peptide
  Seed: MSNEGSYFFG
MGNEGSYFFW

SEQ ID NO: 41988 - protein, 10 aa, Artificial Sequence
  Description of Artificial Sequence: Synthetic peptide
  Seed: MSNEGSYFFG
MHNEGSYFFW

SEQ ID NO: 41989 - protein, 10 aa, Artificial Sequence
  Description of Artificial Sequence: Synthetic peptide
  Seed: MSNEGSYFFG
MINEGSYFFF

SEQ ID NO: 41990 - protein, 10 aa, Artificial Sequence
  Description of Artificial Sequence: Synthetic peptide
  Seed: MSNEGSYFFG
MINEGSYFFW

SEQ ID NO: 41991 - protein, 10 aa, Artificial Sequence
  Description of Artificial Sequence: Synthetic peptide
  Seed: MSNEGSYFFG
MLNEGSYFFW

SEQ ID NO: 41992 - protein, 10 aa, Artificial Sequence
  Description of Artificial Sequence: Synthetic peptide
  Seed: MSNEGSYFFG
MKNEGSYFFW

SEQ ID NO: 41993 - protein, 10 aa, Artificial Sequence
  Description of Artificial Sequence: Synthetic peptide
  Seed: MSNEGSYFFG
MMNEGSYFFF

SEQ ID NO: 41994 - protein, 10 aa, Artificial Sequence
  Description of Artificial Sequence: Synthetic peptide
  Seed: MSNEGSYFFG
MMNEGSYFFW

SEQ ID NO: 41995 - protein, 10 aa, Artificial Sequence
  Description of Artificial Sequence: Synthetic peptide
  Seed: MSNEGSYFFG
MMNEGSYFFY

SEQ ID NO: 41996 - protein, 10 aa, Artificial Sequence
  Description of Artificial Sequence: Synthetic peptide
  Seed: MSNEGSYFFG
MFNEGSYFFW

SEQ ID NO: 41997 - protein, 10 aa, Artificial Sequence
  Description of Artificial Sequence: Synthetic peptide
  Seed: MSNEGSYFFG
MPNEGSYFFW

SEQ ID NO: 41998 - protein, 10 aa, Artificial Sequence
  Description of Artificial Sequence: Synthetic peptide
  Seed: MSNEGSYFFG
MANEGSYFFY

SEQ ID NO: 41999 - protein, 10 aa, Artificial Sequence
  Description of Artificial Sequence: Synthetic peptide
  Seed: MSNEGSYFFG
MANEGSYFFF

SEQ ID NO: 42000 - protein, 9 aa, Artificial Sequence
  Description of Artificial Sequence: Synthetic peptide
  Seed: MSNEGSYFF
MYNEGSYFK

SEQ ID NO: 42001 - protein, 10 aa, Artificial Sequence
  Description of Artificial Sequence: Synthetic peptide
  Seed: MSNEGSYFFG
MANEGSYFFM

SEQ ID NO: 42002 - protein, 9 aa, Artificial Sequence
  Description of Artificial Sequence: Synthetic peptide
  Seed: MSNEGSYFF
MYNEGSYFM

SEQ ID NO: 42003 - protein, 9 aa, Artificial Sequence
  Description of Artificial Sequence: Synthetic peptide
  Seed: MSNEGSYFF
MYNEGSYFF

SEQ ID NO: 42004 - protein, 9 aa, Artificial Sequence
  Description of Artificial Sequence: Synthetic peptide
  Seed: MSNEGSYFF
MYNEGSYFW

SEQ ID NO: 42005 - protein, 9 aa, Artificial Sequence
  Description of Artificial Sequence: Synthetic peptide
  Seed: MSNEGSYFF
MYNEGSYFY

SEQ ID NO: 42006 - protein, 9 aa, Artificial Sequence
  Description of Artificial Sequence: Synthetic peptide
  Seed: MSNEGSYFF
MYNEGSYFV

SEQ ID NO: 42007 - protein, 9 aa, Artificial Sequence
  Description of Artificial Sequence: Synthetic peptide
  Seed: MSNEGSYFF
MVNEGSYFA

SEQ ID NO: 42008 - protein, 9 aa, Artificial Sequence
  Description of Artificial Sequence: Synthetic peptide
  Seed: MSNEGSYFF
MVNEGSYFC

SEQ ID NO: 42009 - protein, 9 aa, Artificial Sequence
  Description of Artificial Sequence: Synthetic peptide
  Seed: MSNEGSYFF
MVNEGSYFH

SEQ ID NO: 42010 - protein, 9 aa, Artificial Sequence
  Description of Artificial Sequence: Synthetic peptide
  Seed: MSNEGSYFF
MVNEGSYFI

SEQ ID NO: 42011 - protein, 9 aa, Artificial Sequence
  Description of Artificial Sequence: Synthetic peptide
  Seed: MSNEGSYFF
MVNEGSYFL

SEQ ID NO: 42012 - protein, 9 aa, Artificial Sequence
  Description of Artificial Sequence: Synthetic peptide
  Seed: MSNEGSYFF
MVNEGSYFM

SEQ ID NO: 42013 - protein, 9 aa, Artificial Sequence
  Description of Artificial Sequence: Synthetic peptide
  Seed: MSNEGSYFF
MVNEGSYFF

SEQ ID NO: 42014 - protein, 9 aa, Artificial Sequence
  Description of Artificial Sequence: Synthetic peptide
  Seed: MSNEGSYFF
MVNEGSYFT

SEQ ID NO: 42015 - protein, 9 aa, Artificial Sequence
  Description of Artificial Sequence: Synthetic peptide
  Seed: MSNEGSYFF
MVNEGSYFW

SEQ ID NO: 42016 - protein, 9 aa, Artificial Sequence
  Description of Artificial Sequence: Synthetic peptide
  Seed: MSNEGSYFF
MVNEGSYFY

SEQ ID NO: 42017 - protein, 9 aa, Artificial Sequence
  Description of Artificial Sequence: Synthetic peptide
  Seed: MSNEGSYFF
MVNEGSYFV

SEQ ID NO: 42018 - protein, 10 aa, Artificial Sequence
  Description of Artificial Sequence: Synthetic peptide
  Seed: MSNEGSYFFG
MANEGSYFFG

SEQ ID NO: 42019 - protein, 10 aa, Artificial Sequence
  Description of Artificial Sequence: Synthetic peptide
  Seed: MSNEGSYFFG
MANEGSYFFI

SEQ ID NO: 42020 - protein, 10 aa, Artificial Sequence
  Description of Artificial Sequence: Synthetic peptide
  Seed: MSNEGSYFFG
MANEGSYFFL

SEQ ID NO: 42021 - protein, 9 aa, Artificial Sequence
  Description of Artificial Sequence: Synthetic peptide
  Seed: MRTEIIRMM
MYTEIIRML

SEQ ID NO: 42022 - protein, 9 aa, Artificial Sequence
  Description of Artificial Sequence: Synthetic peptide
  Seed: MRTEIIRMM
MTTEIIRMV

SEQ ID NO: 42023 - protein, 8 aa, Artificial Sequence
  Description of Artificial Sequence: Synthetic peptide
  Seed: MQGSTLPR
MWGSTLPR

SEQ ID NO: 42024 - protein, 8 aa, Artificial Sequence
  Description of Artificial Sequence: Synthetic peptide
  Seed: MQGSTLPR
MNGSTLPR

SEQ ID NO: 42025 - protein, 8 aa, Artificial Sequence
  Description of Artificial Sequence: Synthetic peptide
  Seed: MQGSTLPR
MIGSTLPR

SEQ ID NO: 42026 - protein, 8 aa, Artificial Sequence
  Description of Artificial Sequence: Synthetic peptide
  Seed: MQGSTLPR
MLGSTLPR

SEQ ID NO: 42027 - protein, 8 aa, Artificial Sequence
  Description of Artificial Sequence: Synthetic peptide
  Seed: MQGSTLPR
MMGSTLPR

SEQ ID NO: 42028 - protein, 8 aa, Artificial Sequence
  Description of Artificial Sequence: Synthetic peptide
  Seed: MQGSTLPR
MFGSTLPR

SEQ ID NO: 42029 - protein, 8 aa, Artificial Sequence
  Description of Artificial Sequence: Synthetic peptide
  Seed: MQGSTLPR
MSGSTLPR

SEQ ID NO: 42030 - protein, 8 aa, Artificial Sequence
  Description of Artificial Sequence: Synthetic peptide
  Seed: MQGSTLPR
MTGSTLPR

SEQ ID NO: 42031 - protein, 8 aa, Artificial Sequence
  Description of Artificial Sequence: Synthetic peptide
  Seed: MQGSTLPR
MYGSTLPR

SEQ ID NO: 42032 - protein, 9 aa, Artificial Sequence
  Description of Artificial Sequence: Synthetic peptide
  Seed: MRAEIIRMM
MRAEIIRMF

SEQ ID NO: 42033 - protein, 9 aa, Artificial Sequence
  Description of Artificial Sequence: Synthetic peptide
  Seed: MRAEIIRMM
MAAEIIRMF

SEQ ID NO: 42034 - protein, 8 aa, Artificial Sequence
  Description of Artificial Sequence: Synthetic peptide
  Seed: MRAEIIRM
MRAEIIRF

SEQ ID NO: 42035 - protein, 8 aa, Artificial Sequence
  Description of Artificial Sequence: Synthetic peptide
  Seed: MRAEIIRM
MHAEIIRL

SEQ ID NO: 42036 - protein, 9 aa, Artificial Sequence
  Description of Artificial Sequence: Synthetic peptide
  Seed: MRAEIIRMM
MAAEIIRMA

SEQ ID NO: 42037 - protein, 9 aa, Artificial Sequence
  Description of Artificial Sequence: Synthetic peptide
  Seed: MRAEIIRMM
MAAEIIRMC

SEQ ID NO: 42038 - protein, 9 aa, Artificial Sequence
  Description of Artificial Sequence: Synthetic peptide
  Seed: MRAEIIRMM
MAAEIIRMH

SEQ ID NO: 42039 - protein, 9 aa, Artificial Sequence
  Description of Artificial Sequence: Synthetic peptide
  Seed: MRAEIIRMM
MAAEIIRMI

SEQ ID NO: 42040 - protein, 9 aa, Artificial Sequence
  Description of Artificial Sequence: Synthetic peptide
  Seed: MRAEIIRMM
MAAEIIRML

SEQ ID NO: 42041 - protein, 9 aa, Artificial Sequence
  Description of Artificial Sequence: Synthetic peptide
  Seed: MRAEIIRMM
MAAEIIRMM

SEQ ID NO: 42042 - protein, 9 aa, Artificial Sequence
  Description of Artificial Sequence: Synthetic peptide
  Seed: MRAEIIRMM
MAAEIIRMT

SEQ ID NO: 42043 - protein, 8 aa, Artificial Sequence
  Description of Artificial Sequence: Synthetic peptide
  Seed: MQGSTLPR
MVGSTLPR

SEQ ID NO: 42044 - protein, 9 aa, Artificial Sequence
  Description of Artificial Sequence: Synthetic peptide
  Seed: MRAEIIRMM
MAAEIIRMW

SEQ ID NO: 42045 - protein, 9 aa, Artificial Sequence
  Description of Artificial Sequence: Synthetic peptide
  Seed: MRAEIIRMM
MAAEIIRMY

SEQ ID NO: 42046 - protein, 9 aa, Artificial Sequence
  Description of Artificial Sequence: Synthetic peptide
  Seed: MRAEIIRMM
MAAEIIRMV

SEQ ID NO: 42047 - protein, 9 aa, Artificial Sequence
  Description of Artificial Sequence: Synthetic peptide
  Seed: MRAEIIRMM
MRAEIIRMA

SEQ ID NO: 42048 - protein, 9 aa, Artificial Sequence
  Description of Artificial Sequence: Synthetic peptide
  Seed: MRAEIIRMM
MRAEIIRMR

SEQ ID NO: 42049 - protein, 9 aa, Artificial Sequence
  Description of Artificial Sequence: Synthetic peptide
  Seed: MRAEIIRMM
MRAEIIRMC

SEQ ID NO: 42050 - protein, 9 aa, Artificial Sequence
  Description of Artificial Sequence: Synthetic peptide
  Seed: MRAEIIRMM
MRAEIIRMH

SEQ ID NO: 42051 - protein, 9 aa, Artificial Sequence
  Description of Artificial Sequence: Synthetic peptide
  Seed: MRAEIIRMM
MRAEIIRMI

SEQ ID NO: 42052 - protein, 9 aa, Artificial Sequence
  Description of Artificial Sequence: Synthetic peptide
  Seed: MRAEIIRMM
MRAEIIRML

SEQ ID NO: 42053 - protein, 8 aa, Artificial Sequence
  Description of Artificial Sequence: Synthetic peptide
  Seed: MRAEIIRM
MRAEIIRI

SEQ ID NO: 42054 - protein, 9 aa, Artificial Sequence
  Description of Artificial Sequence: Synthetic peptide
  Seed: MQGSTLPRR
MVGSTLPRK

SEQ ID NO: 42055 - protein, 9 aa, Artificial Sequence
  Description of Artificial Sequence: Synthetic peptide
  Seed: MQGSTLPRR
MVGSTLPRR

SEQ ID NO: 42056 - protein, 9 aa, Artificial Sequence
  Description of Artificial Sequence: Synthetic peptide
  Seed: MQGSTLPRR
MYGSTLPRK

SEQ ID NO: 42057 - protein, 9 aa, Artificial Sequence
  Description of Artificial Sequence: Synthetic peptide
  Seed: MQGSTLPRR
MAGSTLPRR

SEQ ID NO: 42058 - protein, 9 aa, Artificial Sequence
  Description of Artificial Sequence: Synthetic peptide
  Seed: MQGSTLPRR
MNGSTLPRR

SEQ ID NO: 42059 - protein, 9 aa, Artificial Sequence
  Description of Artificial Sequence: Synthetic peptide
  Seed: MQGSTLPRR
MQGSTLPRK

SEQ ID NO: 42060 - protein, 9 aa, Artificial Sequence
  Description of Artificial Sequence: Synthetic peptide
  Seed: MQGSTLPRR
MGGSTLPRR

SEQ ID NO: 42061 - protein, 9 aa, Artificial Sequence
  Description of Artificial Sequence: Synthetic peptide
  Seed: MQGSTLPRR
MIGSTLPRR

SEQ ID NO: 42062 - protein, 9 aa, Artificial Sequence
  Description of Artificial Sequence: Synthetic peptide
  Seed: MQGSTLPRR
MIGSTLPRK

SEQ ID NO: 42063 - protein, 9 aa, Artificial Sequence
  Description of Artificial Sequence: Synthetic peptide
  Seed: MQGSTLPRR
MLGSTLPRR

SEQ ID NO: 42064 - protein, 9 aa, Artificial Sequence
  Description of Artificial Sequence: Synthetic peptide
  Seed: MQGSTLPRR
MLGSTLPRK

SEQ ID NO: 42065 - protein, 9 aa, Artificial Sequence
  Description of Artificial Sequence: Synthetic peptide
  Seed: MQGSTLPRR
MMGSTLPRR

SEQ ID NO: 42066 - protein, 9 aa, Artificial Sequence
  Description of Artificial Sequence: Synthetic peptide
  Seed: MQGSTLPRR
MMGSTLPRK

SEQ ID NO: 42067 - protein, 9 aa, Artificial Sequence
  Description of Artificial Sequence: Synthetic peptide
  Seed: MQGSTLPRR
MFGSTLPRR

SEQ ID NO: 42068 - protein, 9 aa, Artificial Sequence
  Description of Artificial Sequence: Synthetic peptide
  Seed: MQGSTLPRR
MFGSTLPRK

SEQ ID NO: 42069 - protein, 9 aa, Artificial Sequence
  Description of Artificial Sequence: Synthetic peptide
  Seed: MQGSTLPRR
MSGSTLPRR

SEQ ID NO: 42070 - protein, 9 aa, Artificial Sequence
  Description of Artificial Sequence: Synthetic peptide
  Seed: MQGSTLPRR
MSGSTLPRK

SEQ ID NO: 42071 - protein, 9 aa, Artificial Sequence
  Description of Artificial Sequence: Synthetic peptide
  Seed: MQGSTLPRR
MTGSTLPRR

SEQ ID NO: 42072 - protein, 9 aa, Artificial Sequence
  Description of Artificial Sequence: Synthetic peptide
  Seed: MQGSTLPRR
MTGSTLPRK

SEQ ID NO: 42073 - protein, 9 aa, Artificial Sequence
  Description of Artificial Sequence: Synthetic peptide
  Seed: MQGSTLPRR
MWGSTLPRR

SEQ ID NO: 42074 - protein, 9 aa, Artificial Sequence
  Description of Artificial Sequence: Synthetic peptide
  Seed: MQGSTLPRR
MWGSTLPRK

SEQ ID NO: 42075 - protein, 9 aa, Artificial Sequence
  Description of Artificial Sequence: Synthetic peptide
  Seed: MQGSTLPRR
MYGSTLPRR

SEQ ID NO: 42076 - protein, 9 aa, Artificial Sequence
  Description of Artificial Sequence: Synthetic peptide
  Seed: MRAEIIRMM
MRAEIIRMK

SEQ ID NO: 42077 - protein, 9 aa, Artificial Sequence
  Description of Artificial Sequence: Synthetic peptide
  Seed: MRAEIIRMM
MRAEIIRMT

SEQ ID NO: 42078 - protein, 9 aa, Artificial Sequence
  Description of Artificial Sequence: Synthetic peptide
  Seed: MRTEIIRMM
MTTEIIRMY

SEQ ID NO: 42079 - protein, 9 aa, Artificial Sequence
  Description of Artificial Sequence: Synthetic peptide
  Seed: MRTEIIRMM
MRTEIIRMF

SEQ ID NO: 42080 - protein, 9 aa, Artificial Sequence
  Description of Artificial Sequence: Synthetic peptide
  Seed: MRTEIIRMM
MATEIIRMY

SEQ ID NO: 42081 - protein, 9 aa, Artificial Sequence
  Description of Artificial Sequence: Synthetic peptide
  Seed: MRTEIIRMM
MATEIIRMV

SEQ ID NO: 42082 - protein, 9 aa, Artificial Sequence
  Description of Artificial Sequence: Synthetic peptide
  Seed: MRTEIIRMM
MRTEIIRMA

SEQ ID NO: 42083 - protein, 9 aa, Artificial Sequence
  Description of Artificial Sequence: Synthetic peptide
  Seed: MRTEIIRMM
MRTEIIRMR

SEQ ID NO: 42084 - protein, 9 aa, Artificial Sequence
  Description of Artificial Sequence: Synthetic peptide
  Seed: MRTEIIRMM
MRTEIIRMC

SEQ ID NO: 42085 - protein, 9 aa, Artificial Sequence
  Description of Artificial Sequence: Synthetic peptide
  Seed: MRTEIIRMM
MRTEIIRMH

SEQ ID NO: 42086 - protein, 9 aa, Artificial Sequence
  Description of Artificial Sequence: Synthetic peptide
  Seed: MRTEIIRMM
MRTEIIRMI

SEQ ID NO: 42087 - protein, 9 aa, Artificial Sequence
  Description of Artificial Sequence: Synthetic peptide
  Seed: MRTEIIRMM
MRTEIIRML

SEQ ID NO: 42088 - protein, 9 aa, Artificial Sequence
  Description of Artificial Sequence: Synthetic peptide
  Seed: MRTEIIRMM
MRTEIIRMK

SEQ ID NO: 42089 - protein, 9 aa, Artificial Sequence
  Description of Artificial Sequence: Synthetic peptide
  Seed: MRTEIIRMM
MRTEIIRMW

SEQ ID NO: 42090 - protein, 9 aa, Artificial Sequence
  Description of Artificial Sequence: Synthetic peptide
  Seed: MRTEIIRMM
MQTEIIRMW

SEQ ID NO: 42091 - protein, 9 aa, Artificial Sequence
  Description of Artificial Sequence: Synthetic peptide
  Seed: MRTEIIRMM
MRTEIIRMY

SEQ ID NO: 42092 - protein, 9 aa, Artificial Sequence
  Description of Artificial Sequence: Synthetic peptide
  Seed: MRTEIIRMM
MRTEIIRMV

SEQ ID NO: 42093 - protein, 9 aa, Artificial Sequence
  Description of Artificial Sequence: Synthetic peptide
  Seed: MRTEIIRMM
MNTEIIRMF

SEQ ID NO: 42094 - protein, 9 aa, Artificial Sequence
  Description of Artificial Sequence: Synthetic peptide
  Seed: MRTEIIRMM
MNTEIIRMY

SEQ ID NO: 42095 - protein, 9 aa, Artificial Sequence
  Description of Artificial Sequence: Synthetic peptide
  Seed: MRTEIIRMM
MQTEIIRMA

SEQ ID NO: 42096 - protein, 9 aa, Artificial Sequence
  Description of Artificial Sequence: Synthetic peptide
  Seed: MRTEIIRMM
MQTEIIRMH

SEQ ID NO: 42097 - protein, 9 aa, Artificial Sequence
  Description of Artificial Sequence: Synthetic peptide
  Seed: MRTEIIRMM
MQTEIIRMI

SEQ ID NO: 42098 - protein, 9 aa, Artificial Sequence
  Description of Artificial Sequence: Synthetic peptide
  Seed: MRTEIIRMM
MQTEIIRML

SEQ ID NO: 42099 - protein, 9 aa, Artificial Sequence
  Description of Artificial Sequence: Synthetic peptide
  Seed: MRTEIIRMM
MQTEIIRMM

SEQ ID NO: 42100 - protein, 9 aa, Artificial Sequence
  Description of Artificial Sequence: Synthetic peptide
  Seed: MRTEIIRMM
MATEIIRMF

SEQ ID NO: 42101 - protein, 9 aa, Artificial Sequence
  Description of Artificial Sequence: Synthetic peptide
  Seed: MRTEIIRMM
MATEIIRMM

SEQ ID NO: 42102 - protein, 9 aa, Artificial Sequence
  Description of Artificial Sequence: Synthetic peptide
  Seed: MRTEIIRMM
MATEIIRML

SEQ ID NO: 42103 - protein, 9 aa, Artificial Sequence
  Description of Artificial Sequence: Synthetic peptide
  Seed: MRTEIIRMM
MATEIIRMI

SEQ ID NO: 42104 - protein, 9 aa, Artificial Sequence
  Description of Artificial Sequence: Synthetic peptide
  Seed: MRAEIIRMM
MWAEIIRMV

SEQ ID NO: 42105 - protein, 9 aa, Artificial Sequence
  Description of Artificial Sequence: Synthetic peptide
  Seed: MRAEIIRMM
MYAEIIRMA

SEQ ID NO: 42106 - protein, 9 aa, Artificial Sequence
  Description of Artificial Sequence: Synthetic peptide
  Seed: MRAEIIRMM
MYAEIIRMH

SEQ ID NO: 42107 - protein, 9 aa, Artificial Sequence
  Description of Artificial Sequence: Synthetic peptide
  Seed: MRAEIIRMM
MYAEIIRMI

SEQ ID NO: 42108 - protein, 9 aa, Artificial Sequence
  Description of Artificial Sequence: Synthetic peptide
  Seed: MRAEIIRMM
MYAEIIRML

SEQ ID NO: 42109 - protein, 9 aa, Artificial Sequence
  Description of Artificial Sequence: Synthetic peptide
  Seed: MRAEIIRMM
MYAEIIRMM

SEQ ID NO: 42110 - protein, 9 aa, Artificial Sequence
  Description of Artificial Sequence: Synthetic peptide
  Seed: MRAEIIRMM
MYAEIIRMF

SEQ ID NO: 42111 - protein, 9 aa, Artificial Sequence
  Description of Artificial Sequence: Synthetic peptide
  Seed: MRAEIIRMM
MYAEIIRMW

SEQ ID NO: 42112 - protein, 9 aa, Artificial Sequence
  Description of Artificial Sequence: Synthetic peptide
  Seed: MRAEIIRMM
MYAEIIRMY

SEQ ID NO: 42113 - protein, 9 aa, Artificial Sequence
  Description of Artificial Sequence: Synthetic peptide
  Seed: MRAEIIRMM
MYAEIIRMV

SEQ ID NO: 42114 - protein, 9 aa, Artificial Sequence
  Description of Artificial Sequence: Synthetic peptide
  Seed: MRAEIIRMM
MVAEIIRMA

SEQ ID NO: 42115 - protein, 9 aa, Artificial Sequence
  Description of Artificial Sequence: Synthetic peptide
  Seed: MRAEIIRMM
MVAEIIRMI

SEQ ID NO: 42116 - protein, 9 aa, Artificial Sequence
  Description of Artificial Sequence: Synthetic peptide
  Seed: MRAEIIRMM
MVAEIIRML

SEQ ID NO: 42117 - protein, 9 aa, Artificial Sequence
  Description of Artificial Sequence: Synthetic peptide
  Seed: MRAEIIRMM
MVAEIIRMM

SEQ ID NO: 42118 - protein, 9 aa, Artificial Sequence
  Description of Artificial Sequence: Synthetic peptide
  Seed: MRAEIIRMM
MVAEIIRMF

SEQ ID NO: 42119 - protein, 9 aa, Artificial Sequence
  Description of Artificial Sequence: Synthetic peptide
  Seed: MRAEIIRMM
MVAEIIRMY

SEQ ID NO: 42120 - protein, 9 aa, Artificial Sequence
  Description of Artificial Sequence: Synthetic peptide
  Seed: MRAEIIRMM
MVAEIIRMV

SEQ ID NO: 42121 - protein, 9 aa, Artificial Sequence
  Description of Artificial Sequence: Synthetic peptide
  Seed: MRELILYDK
MRELILYDR

SEQ ID NO: 42122 - protein, 9 aa, Artificial Sequence
  Description of Artificial Sequence: Synthetic peptide
  Seed: MRELILYDK
MRELILYDL

SEQ ID NO: 42123 - protein, 9 aa, Artificial Sequence
  Description of Artificial Sequence: Synthetic peptide
  Seed: MRTEIIRMM
MQTEIIRMF

SEQ ID NO: 42124 - protein, 9 aa, Artificial Sequence
  Description of Artificial Sequence: Synthetic peptide
  Seed: MRTEIIRMM
MQTEIIRMY

SEQ ID NO: 42125 - protein, 9 aa, Artificial Sequence
  Description of Artificial Sequence: Synthetic peptide
  Seed: MRAEIIRMM
MRAEIIRMW

SEQ ID NO: 42126 - protein, 9 aa, Artificial Sequence
  Description of Artificial Sequence: Synthetic peptide
  Seed: MRTEIIRMM
MFTEIIRMF

SEQ ID NO: 42127 - protein, 9 aa, Artificial Sequence
  Description of Artificial Sequence: Synthetic peptide
  Seed: MRTEIIRMM
MMTEIIRMI

SEQ ID NO: 42128 - protein, 9 aa, Artificial Sequence
  Description of Artificial Sequence: Synthetic peptide
  Seed: MRTEIIRMM
MMTEIIRML

SEQ ID NO: 42129 - protein, 9 aa, Artificial Sequence
  Description of Artificial Sequence: Synthetic peptide
  Seed: MRTEIIRMM
MMTEIIRMM

SEQ ID NO: 42130 - protein, 9 aa, Artificial Sequence
  Description of Artificial Sequence: Synthetic peptide
  Seed: MRTEIIRMM
MMTEIIRMF

SEQ ID NO: 42131 - protein, 9 aa, Artificial Sequence
  Description of Artificial Sequence: Synthetic peptide
  Seed: MRTEIIRMM
MMTEIIRMW

SEQ ID NO: 42132 - protein, 9 aa, Artificial Sequence
  Description of Artificial Sequence: Synthetic peptide
  Seed: MRTEIIRMM
MMTEIIRMY

SEQ ID NO: 42133 - protein, 9 aa, Artificial Sequence
  Description of Artificial Sequence: Synthetic peptide
  Seed: MRTEIIRMM
MMTEIIRMV

SEQ ID NO: 42134 - protein, 9 aa, Artificial Sequence
  Description of Artificial Sequence: Synthetic peptide
  Seed: MRTEIIRMM
MFTEIIRML

SEQ ID NO: 42135 - protein, 9 aa, Artificial Sequence
  Description of Artificial Sequence: Synthetic peptide
  Seed: MRTEIIRMM
MFTEIIRMM

SEQ ID NO: 42136 - protein, 9 aa, Artificial Sequence
  Description of Artificial Sequence: Synthetic peptide
  Seed: MRTEIIRMM
MFTEIIRMY

SEQ ID NO: 42137 - protein, 9 aa, Artificial Sequence
  Description of Artificial Sequence: Synthetic peptide
  Seed: MRTEIIRMM
MQTEIIRMV

SEQ ID NO: 42138 - protein, 9 aa, Artificial Sequence
  Description of Artificial Sequence: Synthetic peptide
  Seed: MRTEIIRMM
MFTEIIRMV

SEQ ID NO: 42139 - protein, 9 aa, Artificial Sequence
  Description of Artificial Sequence: Synthetic peptide
  Seed: MRTEIIRMM
MSTEIIRMI

SEQ ID NO: 42140 - protein, 9 aa, Artificial Sequence
  Description of Artificial Sequence: Synthetic peptide
  Seed: MRTEIIRMM
MSTEIIRML

SEQ ID NO: 42141 - protein, 9 aa, Artificial Sequence
  Description of Artificial Sequence: Synthetic peptide
  Seed: MRTEIIRMM
MSTEIIRMM

SEQ ID NO: 42142 - protein, 9 aa, Artificial Sequence
  Description of Artificial Sequence: Synthetic peptide
  Seed: MRTEIIRMM
MSTEIIRMF

SEQ ID NO: 42143 - protein, 9 aa, Artificial Sequence
  Description of Artificial Sequence: Synthetic peptide
  Seed: MRTEIIRMM
MSTEIIRMY

SEQ ID NO: 42144 - protein, 9 aa, Artificial Sequence
  Description of Artificial Sequence: Synthetic peptide
  Seed: MRTEIIRMM
MSTEIIRMV

SEQ ID NO: 42145 - protein, 9 aa, Artificial Sequence
  Description of Artificial Sequence: Synthetic peptide
  Seed: MRTEIIRMM
MTTEIIRML

SEQ ID NO: 42146 - protein, 9 aa, Artificial Sequence
  Description of Artificial Sequence: Synthetic peptide
  Seed: MRTEIIRMM
MTTEIIRMF

SEQ ID NO: 42147 - protein, 9 aa, Artificial Sequence
  Description of Artificial Sequence: Synthetic peptide
  Seed: MRTEIIRMM
MMTEIIRMH

SEQ ID NO: 42148 - protein, 9 aa, Artificial Sequence
  Description of Artificial Sequence: Synthetic peptide
  Seed: MRTEIIRMM
MKTEIIRMV

SEQ ID NO: 42149 - protein, 9 aa, Artificial Sequence
  Description of Artificial Sequence: Synthetic peptide
  Seed: MRTEIIRMM
MKTEIIRMY

SEQ ID NO: 42150 - protein, 9 aa, Artificial Sequence
  Description of Artificial Sequence: Synthetic peptide
  Seed: MRTEIIRMM
MKTEIIRMF

SEQ ID NO: 42151 - protein, 9 aa, Artificial Sequence
  Description of Artificial Sequence: Synthetic peptide
  Seed: MRTEIIRMM
METEIIRMM

SEQ ID NO: 42152 - protein, 9 aa, Artificial Sequence
  Description of Artificial Sequence: Synthetic peptide
  Seed: MRTEIIRMM
METEIIRMF

SEQ ID NO: 42153 - protein, 9 aa, Artificial Sequence
  Description of Artificial Sequence: Synthetic peptide
  Seed: MRTEIIRMM
METEIIRMY

SEQ ID NO: 42154 - protein, 9 aa, Artificial Sequence
  Description of Artificial Sequence: Synthetic peptide
  Seed: MRTEIIRMM
MGTEIIRMY

SEQ ID NO: 42155 - protein, 9 aa, Artificial Sequence
  Description of Artificial Sequence: Synthetic peptide
  Seed: MRTEIIRMM
MHTEIIRMA

SEQ ID NO: 42156 - protein, 9 aa, Artificial Sequence
  Description of Artificial Sequence: Synthetic peptide
  Seed: MRTEIIRMM
MHTEIIRMI

SEQ ID NO: 42157 - protein, 9 aa, Artificial Sequence
  Description of Artificial Sequence: Synthetic peptide
  Seed: MRTEIIRMM
MHTEIIRML

SEQ ID NO: 42158 - protein, 9 aa, Artificial Sequence
  Description of Artificial Sequence: Synthetic peptide
  Seed: MRTEIIRMM
MHTEIIRMM

SEQ ID NO: 42159 - protein, 9 aa, Artificial Sequence
  Description of Artificial Sequence: Synthetic peptide
  Seed: MRTEIIRMM
MHTEIIRMF

SEQ ID NO: 42160 - protein, 9 aa, Artificial Sequence
  Description of Artificial Sequence: Synthetic peptide
  Seed: MRTEIIRMM
MHTEIIRMY

SEQ ID NO: 42161 - protein, 9 aa, Artificial Sequence
  Description of Artificial Sequence: Synthetic peptide
  Seed: MRTEIIRMM
MHTEIIRMV

SEQ ID NO: 42162 - protein, 9 aa, Artificial Sequence
  Description of Artificial Sequence: Synthetic peptide
  Seed: MRTEIIRMM
MITEIIRMF

SEQ ID NO: 42163 - protein, 9 aa, Artificial Sequence
  Description of Artificial Sequence: Synthetic peptide
  Seed: MRTEIIRMM
MITEIIRMY

SEQ ID NO: 42164 - protein, 9 aa, Artificial Sequence
  Description of Artificial Sequence: Synthetic peptide
  Seed: MRTEIIRMM
MLTEIIRMM

SEQ ID NO: 42165 - protein, 9 aa, Artificial Sequence
  Description of Artificial Sequence: Synthetic peptide
  Seed: MRTEIIRMM
MLTEIIRMF

SEQ ID NO: 42166 - protein, 9 aa, Artificial Sequence
  Description of Artificial Sequence: Synthetic peptide
  Seed: MRTEIIRMM
MLTEIIRMY

SEQ ID NO: 42167 - protein, 9 aa, Artificial Sequence
  Description of Artificial Sequence: Synthetic peptide
  Seed: MRTEIIRMM
MKTEIIRMI

SEQ ID NO: 42168 - protein, 9 aa, Artificial Sequence
  Description of Artificial Sequence: Synthetic peptide
  Seed: MRTEIIRMM
MKTEIIRML

SEQ ID NO: 42169 - protein, 9 aa, Artificial Sequence
  Description of Artificial Sequence: Synthetic peptide
  Seed: MRTEIIRMM
MKTEIIRMM

SEQ ID NO: 42170 - protein, 9 aa, Artificial Sequence
  Description of Artificial Sequence: Synthetic peptide
  Seed: MRAEIIRMM
MWAEIIRMY

SEQ ID NO: 42171 - protein, 9 aa, Artificial Sequence
  Description of Artificial Sequence: Synthetic peptide
  Seed: MRAEIIRMM
MWAEIIRMF

SEQ ID NO: 42172 - protein, 9 aa, Artificial Sequence
  Description of Artificial Sequence: Synthetic peptide
  Seed: MRAEIIRMM
MWAEIIRMM

SEQ ID NO: 42173 - protein, 9 aa, Artificial Sequence
  Description of Artificial Sequence: Synthetic peptide
  Seed: MRAEIIRMM
MHAEIIRMF

SEQ ID NO: 42174 - protein, 9 aa, Artificial Sequence
  Description of Artificial Sequence: Synthetic peptide
  Seed: MRAEIIRMM
MGAEIIRMM

SEQ ID NO: 42175 - protein, 9 aa, Artificial Sequence
  Description of Artificial Sequence: Synthetic peptide
  Seed: MRAEIIRMM
MGAEIIRMF

SEQ ID NO: 42176 - protein, 9 aa, Artificial Sequence
  Description of Artificial Sequence: Synthetic peptide
  Seed: MRAEIIRMM
MGAEIIRMY

SEQ ID NO: 42177 - protein, 9 aa, Artificial Sequence
  Description of Artificial Sequence: Synthetic peptide
  Seed: MRAEIIRMM
MGAEIIRMV

SEQ ID NO: 42178 - protein, 9 aa, Artificial Sequence
  Description of Artificial Sequence: Synthetic peptide
  Seed: MRAEIIRMM
MHAEIIRMA

SEQ ID NO: 42179 - protein, 9 aa, Artificial Sequence
  Description of Artificial Sequence: Synthetic peptide
  Seed: MRAEIIRMM
MHAEIIRMH

SEQ ID NO: 42180 - protein, 9 aa, Artificial Sequence
  Description of Artificial Sequence: Synthetic peptide
  Seed: MRAEIIRMM
MHAEIIRMI

SEQ ID NO: 42181 - protein, 9 aa, Artificial Sequence
  Description of Artificial Sequence: Synthetic peptide
  Seed: MRAEIIRMM
MHAEIIRML

SEQ ID NO: 42182 - protein, 9 aa, Artificial Sequence
  Description of Artificial Sequence: Synthetic peptide
  Seed: MRAEIIRMM
MHAEIIRMM

SEQ ID NO: 42183 - protein, 9 aa, Artificial Sequence
  Description of Artificial Sequence: Synthetic peptide
  Seed: MRAEIIRMM
MHAEIIRMY

SEQ ID NO: 42184 - protein, 9 aa, Artificial Sequence
  Description of Artificial Sequence: Synthetic peptide
  Seed: MRAEIIRMM
MWAEIIRML

SEQ ID NO: 42185 - protein, 9 aa, Artificial Sequence
  Description of Artificial Sequence: Synthetic peptide
  Seed: MRAEIIRMM
MHAEIIRMV

SEQ ID NO: 42186 - protein, 9 aa, Artificial Sequence
  Description of Artificial Sequence: Synthetic peptide
  Seed: MRAEIIRMM
MIAEIIRMI

SEQ ID NO: 42187 - protein, 9 aa, Artificial Sequence
  Description of Artificial Sequence: Synthetic peptide
  Seed: MRAEIIRMM
MIAEIIRML

SEQ ID NO: 42188 - protein, 9 aa, Artificial Sequence
  Description of Artificial Sequence: Synthetic peptide
  Seed: MRAEIIRMM
MIAEIIRMM

SEQ ID NO: 42189 - protein, 9 aa, Artificial Sequence
  Description of Artificial Sequence: Synthetic peptide
  Seed: MRAEIIRMM
MIAEIIRMF

SEQ ID NO: 42190 - protein, 9 aa, Artificial Sequence
  Description of Artificial Sequence: Synthetic peptide
  Seed: MRAEIIRMM
MIAEIIRMY

SEQ ID NO: 42191 - protein, 9 aa, Artificial Sequence
  Description of Artificial Sequence: Synthetic peptide
  Seed: MRAEIIRMM
MIAEIIRMV

SEQ ID NO: 42192 - protein, 9 aa, Artificial Sequence
  Description of Artificial Sequence: Synthetic peptide
  Seed: MRAEIIRMM
MLAEIIRMI

SEQ ID NO: 42193 - protein, 9 aa, Artificial Sequence
  Description of Artificial Sequence: Synthetic peptide
  Seed: MRAEIIRMM
MLAEIIRML

SEQ ID NO: 42194 - protein, 9 aa, Artificial Sequence
  Description of Artificial Sequence: Synthetic peptide
  Seed: MRAEIIRMM
MGAEIIRML

SEQ ID NO: 42195 - protein, 9 aa, Artificial Sequence
  Description of Artificial Sequence: Synthetic peptide
  Seed: MRAEIIRMM
MGAEIIRMI

SEQ ID NO: 42196 - protein, 9 aa, Artificial Sequence
  Description of Artificial Sequence: Synthetic peptide
  Seed: MRAEIIRMM
MEAEIIRMY

SEQ ID NO: 42197 - protein, 9 aa, Artificial Sequence
  Description of Artificial Sequence: Synthetic peptide
  Seed: MRAEIIRMM
MEAEIIRMF

SEQ ID NO: 42198 - protein, 9 aa, Artificial Sequence
  Description of Artificial Sequence: Synthetic peptide
  Seed: MRAEIIRMM
MRAEIIRMY

SEQ ID NO: 42199 - protein, 9 aa, Artificial Sequence
  Description of Artificial Sequence: Synthetic peptide
  Seed: MRAEIIRMM
MRAEIIRMV

SEQ ID NO: 42200 - protein, 9 aa, Artificial Sequence
  Description of Artificial Sequence: Synthetic peptide
  Seed: MRAEIIRMM
MNAEIIRML

SEQ ID NO: 42201 - protein, 9 aa, Artificial Sequence
  Description of Artificial Sequence: Synthetic peptide
  Seed: MRAEIIRMM
MNAEIIRMM

SEQ ID NO: 42202 - protein, 9 aa, Artificial Sequence
  Description of Artificial Sequence: Synthetic peptide
  Seed: MRAEIIRMM
MNAEIIRMF

SEQ ID NO: 42203 - protein, 9 aa, Artificial Sequence
  Description of Artificial Sequence: Synthetic peptide
  Seed: MRAEIIRMM
MNAEIIRMY

SEQ ID NO: 42204 - protein, 9 aa, Artificial Sequence
  Description of Artificial Sequence: Synthetic peptide
  Seed: MRAEIIRMM
MNAEIIRMV

SEQ ID NO: 42205 - protein, 9 aa, Artificial Sequence
  Description of Artificial Sequence: Synthetic peptide
  Seed: MRAEIIRMM
MCAEIIRMM

SEQ ID NO: 42206 - protein, 9 aa, Artificial Sequence
  Description of Artificial Sequence: Synthetic peptide
  Seed: MRAEIIRMM
MCAEIIRMY

SEQ ID NO: 42207 - protein, 9 aa, Artificial Sequence
  Description of Artificial Sequence: Synthetic peptide
  Seed: MRAEIIRMM
MQAEIIRMA

SEQ ID NO: 42208 - protein, 9 aa, Artificial Sequence
  Description of Artificial Sequence: Synthetic peptide
  Seed: MRAEIIRMM
MQAEIIRMH

SEQ ID NO: 42209 - protein, 9 aa, Artificial Sequence
  Description of Artificial Sequence: Synthetic peptide
  Seed: MRAEIIRMM
MQAEIIRMI

SEQ ID NO: 42210 - protein, 9 aa, Artificial Sequence
  Description of Artificial Sequence: Synthetic peptide
  Seed: MRAEIIRMM
MQAEIIRML

SEQ ID NO: 42211 - protein, 9 aa, Artificial Sequence
  Description of Artificial Sequence: Synthetic peptide
  Seed: MRAEIIRMM
MQAEIIRMM

SEQ ID NO: 42212 - protein, 9 aa, Artificial Sequence
  Description of Artificial Sequence: Synthetic peptide
  Seed: MRAEIIRMM
MQAEIIRMF

SEQ ID NO: 42213 - protein, 9 aa, Artificial Sequence
  Description of Artificial Sequence: Synthetic peptide
  Seed: MRAEIIRMM
MQAEIIRMW

SEQ ID NO: 42214 - protein, 9 aa, Artificial Sequence
  Description of Artificial Sequence: Synthetic peptide
  Seed: MRAEIIRMM
MQAEIIRMY

SEQ ID NO: 42215 - protein, 9 aa, Artificial Sequence
  Description of Artificial Sequence: Synthetic peptide
  Seed: MRAEIIRMM
MQAEIIRMV

SEQ ID NO: 42216 - protein, 9 aa, Artificial Sequence
  Description of Artificial Sequence: Synthetic peptide
  Seed: MRAEIIRMM
MEAEIIRMM

SEQ ID NO: 42217 - protein, 9 aa, Artificial Sequence
  Description of Artificial Sequence: Synthetic peptide
  Seed: MRAEIIRMM
MLAEIIRMM

SEQ ID NO: 42218 - protein, 9 aa, Artificial Sequence
  Description of Artificial Sequence: Synthetic peptide
  Seed: MRAEIIRMM
MLAEIIRMF

SEQ ID NO: 42219 - protein, 9 aa, Artificial Sequence
  Description of Artificial Sequence: Synthetic peptide
  Seed: MRAEIIRMM
MLAEIIRMY

SEQ ID NO: 42220 - protein, 9 aa, Artificial Sequence
  Description of Artificial Sequence: Synthetic peptide
  Seed: MRAEIIRMM
MFAEIIRMY

SEQ ID NO: 42221 - protein, 9 aa, Artificial Sequence
  Description of Artificial Sequence: Synthetic peptide
  Seed: MRAEIIRMM
MPAEIIRML

SEQ ID NO: 42222 - protein, 9 aa, Artificial Sequence
  Description of Artificial Sequence: Synthetic peptide
  Seed: MRAEIIRMM
MPAEIIRMY

SEQ ID NO: 42223 - protein, 9 aa, Artificial Sequence
  Description of Artificial Sequence: Synthetic peptide
  Seed: MRAEIIRMM
MSAEIIRMA

SEQ ID NO: 42224 - protein, 9 aa, Artificial Sequence
  Description of Artificial Sequence: Synthetic peptide
  Seed: MRAEIIRMM
MSAEIIRMH

SEQ ID NO: 42225 - protein, 9 aa, Artificial Sequence
  Description of Artificial Sequence: Synthetic peptide
  Seed: MRAEIIRMM
MSAEIIRMI

SEQ ID NO: 42226 - protein, 9 aa, Artificial Sequence
  Description of Artificial Sequence: Synthetic peptide
  Seed: MRAEIIRMM
MSAEIIRML

SEQ ID NO: 42227 - protein, 9 aa, Artificial Sequence
  Description of Artificial Sequence: Synthetic peptide
  Seed: MRAEIIRMM
MSAEIIRMM

SEQ ID NO: 42228 - protein, 9 aa, Artificial Sequence
  Description of Artificial Sequence: Synthetic peptide
  Seed: MRAEIIRMM
MSAEIIRMF

SEQ ID NO: 42229 - protein, 9 aa, Artificial Sequence
  Description of Artificial Sequence: Synthetic peptide
  Seed: MRAEIIRMM
MSAEIIRMW

SEQ ID NO: 42230 - protein, 9 aa, Artificial Sequence
  Description of Artificial Sequence: Synthetic peptide
  Seed: MRAEIIRMM
MSAEIIRMY

SEQ ID NO: 42231 - protein, 9 aa, Artificial Sequence
  Description of Artificial Sequence: Synthetic peptide
  Seed: MRAEIIRMM
MSAEIIRMV

SEQ ID NO: 42232 - protein, 9 aa, Artificial Sequence
  Description of Artificial Sequence: Synthetic peptide
  Seed: MRAEIIRMM
MTAEIIRMA

SEQ ID NO: 42233 - protein, 9 aa, Artificial Sequence
  Description of Artificial Sequence: Synthetic peptide
  Seed: MRAEIIRMM
MTAEIIRMI

SEQ ID NO: 42234 - protein, 9 aa, Artificial Sequence
  Description of Artificial Sequence: Synthetic peptide
  Seed: MRAEIIRMM
MTAEIIRML

SEQ ID NO: 42235 - protein, 9 aa, Artificial Sequence
  Description of Artificial Sequence: Synthetic peptide
  Seed: MRAEIIRMM
MTAEIIRMM

SEQ ID NO: 42236 - protein, 9 aa, Artificial Sequence
  Description of Artificial Sequence: Synthetic peptide
  Seed: MRAEIIRMM
MTAEIIRMF

SEQ ID NO: 42237 - protein, 9 aa, Artificial Sequence
  Description of Artificial Sequence: Synthetic peptide
  Seed: MRAEIIRMM
MTAEIIRMY

SEQ ID NO: 42238 - protein, 9 aa, Artificial Sequence
  Description of Artificial Sequence: Synthetic peptide
  Seed: MRAEIIRMM
MTAEIIRMV

SEQ ID NO: 42239 - protein, 9 aa, Artificial Sequence
  Description of Artificial Sequence: Synthetic peptide
  Seed: MRAEIIRMM
MWAEIIRMI

SEQ ID NO: 42240 - protein, 9 aa, Artificial Sequence
  Description of Artificial Sequence: Synthetic peptide
  Seed: MRAEIIRMM
MFAEIIRMV

SEQ ID NO: 42241 - protein, 9 aa, Artificial Sequence
  Description of Artificial Sequence: Synthetic peptide
  Seed: MRAEIIRMM
MFAEIIRMF

SEQ ID NO: 42242 - protein, 9 aa, Artificial Sequence
  Description of Artificial Sequence: Synthetic peptide
  Seed: MRAEIIRMM
MLAEIIRMV

SEQ ID NO: 42243 - protein, 9 aa, Artificial Sequence
  Description of Artificial Sequence: Synthetic peptide
  Seed: MRAEIIRMM
MFAEIIRMM

SEQ ID NO: 42244 - protein, 9 aa, Artificial Sequence
  Description of Artificial Sequence: Synthetic peptide
  Seed: MRAEIIRMM
MKAEIIRMH

SEQ ID NO: 42245 - protein, 9 aa, Artificial Sequence
  Description of Artificial Sequence: Synthetic peptide
  Seed: MRAEIIRMM
MKAEIIRMI

SEQ ID NO: 42246 - protein, 9 aa, Artificial Sequence
  Description of Artificial Sequence: Synthetic peptide
  Seed: MRAEIIRMM
MKAEIIRML

SEQ ID NO: 42247 - protein, 9 aa, Artificial Sequence
  Description of Artificial Sequence: Synthetic peptide
  Seed: MRAEIIRMM
MKAEIIRMM

SEQ ID NO: 42248 - protein, 9 aa, Artificial Sequence
  Description of Artificial Sequence: Synthetic peptide
  Seed: MRAEIIRMM
MKAEIIRMF

SEQ ID NO: 42249 - protein, 9 aa, Artificial Sequence
  Description of Artificial Sequence: Synthetic peptide
  Seed: MRAEIIRMM
MKAEIIRMY

SEQ ID NO: 42250 - protein, 9 aa, Artificial Sequence
  Description of Artificial Sequence: Synthetic peptide
  Seed: MRAEIIRMM
MKAEIIRMV

SEQ ID NO: 42251 - protein, 9 aa, Artificial Sequence
  Description of Artificial Sequence: Synthetic peptide
  Seed: MRAEIIRMM
MMAEIIRMA

SEQ ID NO: 42252 - protein, 9 aa, Artificial Sequence
  Description of Artificial Sequence: Synthetic peptide
  Seed: MRAEIIRMM
MMAEIIRMH

SEQ ID NO: 42253 - protein, 9 aa, Artificial Sequence
  Description of Artificial Sequence: Synthetic peptide
  Seed: MRAEIIRMM
MMAEIIRMI

SEQ ID NO: 42254 - protein, 9 aa, Artificial Sequence
  Description of Artificial Sequence: Synthetic peptide
  Seed: MRAEIIRMM
MMAEIIRML

SEQ ID NO: 42255 - protein, 9 aa, Artificial Sequence
  Description of Artificial Sequence: Synthetic peptide
  Seed: MRAEIIRMM
MMAEIIRMM

SEQ ID NO: 42256 - protein, 9 aa, Artificial Sequence
  Description of Artificial Sequence: Synthetic peptide
  Seed: MRAEIIRMM
MMAEIIRMF

SEQ ID NO: 42257 - protein, 9 aa, Artificial Sequence
  Description of Artificial Sequence: Synthetic peptide
  Seed: MRAEIIRMM
MMAEIIRMW

SEQ ID NO: 42258 - protein, 9 aa, Artificial Sequence
  Description of Artificial Sequence: Synthetic peptide
  Seed: MRAEIIRMM
MMAEIIRMY

SEQ ID NO: 42259 - protein, 9 aa, Artificial Sequence
  Description of Artificial Sequence: Synthetic peptide
  Seed: MRAEIIRMM
MMAEIIRMV

SEQ ID NO: 42260 - protein, 9 aa, Artificial Sequence
  Description of Artificial Sequence: Synthetic peptide
  Seed: MRAEIIRMM
MFAEIIRMH

SEQ ID NO: 42261 - protein, 9 aa, Artificial Sequence
  Description of Artificial Sequence: Synthetic peptide
  Seed: MRAEIIRMM
MFAEIIRMI

SEQ ID NO: 42262 - protein, 9 aa, Artificial Sequence
  Description of Artificial Sequence: Synthetic peptide
  Seed: MRAEIIRMM
MFAEIIRML

SEQ ID NO: 42263 - protein, 10 aa, Artificial Sequence
  Description of Artificial Sequence: Synthetic peptide
  Seed: LLQNSQVFSL
LMQNSQVFSY

SEQ ID NO: 42264 - protein, 10 aa, Artificial Sequence
  Description of Artificial Sequence: Synthetic peptide
  Seed: LLQNSQVFSL
LMQNSQVFSW

SEQ ID NO: 42265 - protein, 10 aa, Artificial Sequence
  Description of Artificial Sequence: Synthetic peptide
  Seed: LLQNSQVFSL
LMQNSQVFST

SEQ ID NO: 42266 - protein, 9 aa, Artificial Sequence
  Description of Artificial Sequence: Synthetic peptide
  Seed: KLSTRGVQI
KSSTRGVQW

SEQ ID NO: 42267 - protein, 9 aa, Artificial Sequence
  Description of Artificial Sequence: Synthetic peptide
  Seed: KLSTRGVQI
KLSTRGVQW

SEQ ID NO: 42268 - protein, 9 aa, Artificial Sequence
  Description of Artificial Sequence: Synthetic peptide
  Seed: KLSTRGVQI
KLSTRGVQV

SEQ ID NO: 42269 - protein, 9 aa, Artificial Sequence
  Description of Artificial Sequence: Synthetic peptide
  Seed: KLSTRGVQI
KMSTRGVQA

SEQ ID NO: 42270 - protein, 9 aa, Artificial Sequence
  Description of Artificial Sequence: Synthetic peptide
  Seed: KLSTRGVQI
KMSTRGVQI

SEQ ID NO: 42271 - protein, 9 aa, Artificial Sequence
  Description of Artificial Sequence: Synthetic peptide
  Seed: KLSTRGVQI
KMSTRGVQL

SEQ ID NO: 42272 - protein, 9 aa, Artificial Sequence
  Description of Artificial Sequence: Synthetic peptide
  Seed: KLSTRGVQI
KMSTRGVQM

SEQ ID NO: 42273 - protein, 9 aa, Artificial Sequence
  Description of Artificial Sequence: Synthetic peptide
  Seed: KLSTRGVQI
KMSTRGVQF

SEQ ID NO: 42274 - protein, 9 aa, Artificial Sequence
  Description of Artificial Sequence: Synthetic peptide
  Seed: KLSTRGVQI
KMSTRGVQW

SEQ ID NO: 42275 - protein, 9 aa, Artificial Sequence
  Description of Artificial Sequence: Synthetic peptide
  Seed: KLSTRGVQI
KMSTRGVQV

SEQ ID NO: 42276 - protein, 9 aa, Artificial Sequence
  Description of Artificial Sequence: Synthetic peptide
  Seed: KLSTRGVQI
KTSTRGVQI

SEQ ID NO: 42277 - protein, 10 aa, Artificial Sequence
  Description of Artificial Sequence: Synthetic peptide
  Seed: KLSTRGVQIA
KMSTRGVQIL

SEQ ID NO: 42278 - protein, 9 aa, Artificial Sequence
  Description of Artificial Sequence: Synthetic peptide
  Seed: KLSTRGVQI
KTSTRGVQF

SEQ ID NO: 42279 - protein, 9 aa, Artificial Sequence
  Description of Artificial Sequence: Synthetic peptide
  Seed: KLSTRGVQI
KTSTRGVQW

SEQ ID NO: 42280 - protein, 9 aa, Artificial Sequence
  Description of Artificial Sequence: Synthetic peptide
  Seed: KLSTRGVQI
KVSTRGVQI

SEQ ID NO: 42281 - protein, 9 aa, Artificial Sequence
  Description of Artificial Sequence: Synthetic peptide
  Seed: KLSTRGVQI
KVSTRGVQF

SEQ ID NO: 42282 - protein, 9 aa, Artificial Sequence
  Description of Artificial Sequence: Synthetic peptide
  Seed: KLSTRGVQI
KVSTRGVQW

SEQ ID NO: 42283 - protein, 10 aa, Artificial Sequence
  Description of Artificial Sequence: Synthetic peptide
  Seed: KLSTRGVQIA
KLSTRGVQII

SEQ ID NO: 42284 - protein, 10 aa, Artificial Sequence
  Description of Artificial Sequence: Synthetic peptide
  Seed: KLSTRGVQIA
KLSTRGVQIL

SEQ ID NO: 42285 - protein, 10 aa, Artificial Sequence
  Description of Artificial Sequence: Synthetic peptide
  Seed: KLSTRGVQIA
KLSTRGVQIV

SEQ ID NO: 42286 - protein, 10 aa, Artificial Sequence
  Description of Artificial Sequence: Synthetic peptide
  Seed: KLSTRGVQIA
KMSTRGVQIA

SEQ ID NO: 42287 - protein, 9 aa, Artificial Sequence
  Description of Artificial Sequence: Synthetic peptide
  Seed: KLSTRGVQI
KLSTRGVQF

SEQ ID NO: 42288 - protein, 9 aa, Artificial Sequence
  Description of Artificial Sequence: Synthetic peptide
  Seed: KLSTRGVQI
KLSTRGVQM

SEQ ID NO: 42289 - protein, 9 aa, Artificial Sequence
  Description of Artificial Sequence: Synthetic peptide
  Seed: KLSTRGVQI
KLSTRGVQL

SEQ ID NO: 42290 - protein, 9 aa, Artificial Sequence
  Description of Artificial Sequence: Synthetic peptide
  Seed: KLSTRGVQI
KLSTRGVQA

SEQ ID NO: 42291 - protein, 9 aa, Artificial Sequence
  Description of Artificial Sequence: Synthetic peptide
  Seed: KLSDYEGRL
KMSDYEGRL

SEQ ID NO: 42292 - protein, 9 aa, Artificial Sequence
  Description of Artificial Sequence: Synthetic peptide
  Seed: KLSDYEGRL
KMSDYEGRM

SEQ ID NO: 42293 - protein, 9 aa, Artificial Sequence
  Description of Artificial Sequence: Synthetic peptide
  Seed: KLSDYEGRL
KMSDYEGRV

SEQ ID NO: 42294 - protein, 9 aa, Artificial Sequence
  Description of Artificial Sequence: Synthetic peptide
  Seed: KLSDYEGRL
KVSDYEGRV

SEQ ID NO: 42295 - protein, 10 aa, Artificial Sequence
  Description of Artificial Sequence: Synthetic peptide
  Seed: KLSDYEGRLI
KISDYEGRLV

SEQ ID NO: 42296 - protein, 10 aa, Artificial Sequence
  Description of Artificial Sequence: Synthetic peptide
  Seed: KLSDYEGRLI
KLSDYEGRLA

SEQ ID NO: 42297 - protein, 10 aa, Artificial Sequence
  Description of Artificial Sequence: Synthetic peptide
  Seed: KLSDYEGRLI
KLSDYEGRLL

SEQ ID NO: 42298 - protein, 10 aa, Artificial Sequence
  Description of Artificial Sequence: Synthetic peptide
  Seed: KLSDYEGRLI
KLSDYEGRLM

SEQ ID NO: 42299 - protein, 10 aa, Artificial Sequence
  Description of Artificial Sequence: Synthetic peptide
  Seed: KLSDYEGRLI
KLSDYEGRLV

SEQ ID NO: 42300 - protein, 10 aa, Artificial Sequence
  Description of Artificial Sequence: Synthetic peptide
  Seed: KLSDYEGRLI
KMSDYEGRLA

SEQ ID NO: 42301 - protein, 10 aa, Artificial Sequence
  Description of Artificial Sequence: Synthetic peptide
  Seed: KLSDYEGRLI
KMSDYEGRLI

SEQ ID NO: 42302 - protein, 10 aa, Artificial Sequence
  Description of Artificial Sequence: Synthetic peptide
  Seed: KLSDYEGRLI
KMSDYEGRLL

SEQ ID NO: 42303 - protein, 10 aa, Artificial Sequence
  Description of Artificial Sequence: Synthetic peptide
  Seed: KLSDYEGRLI
KMSDYEGRLM

SEQ ID NO: 42304 - protein, 10 aa, Artificial Sequence
  Description of Artificial Sequence: Synthetic peptide
  Seed: KLSDYEGRLI
KMSDYEGRLV

SEQ ID NO: 42305 - protein, 9 aa, Artificial Sequence
  Description of Artificial Sequence: Synthetic peptide
  Seed: KLSTRGVQI
KQSTRGVQW

SEQ ID NO: 42306 - protein, 9 aa, Artificial Sequence
  Description of Artificial Sequence: Synthetic peptide
  Seed: KLSTRGVQI
KISTRGVQI

SEQ ID NO: 42307 - protein, 9 aa, Artificial Sequence
  Description of Artificial Sequence: Synthetic peptide
  Seed: KLSTRGVQI
KISTRGVQF

SEQ ID NO: 42308 - protein, 9 aa, Artificial Sequence
  Description of Artificial Sequence: Synthetic peptide
  Seed: KLSTRGVQI
KISTRGVQW

SEQ ID NO: 42309 - protein, 9 aa, Artificial Sequence
  Description of Artificial Sequence: Synthetic peptide
  Seed: KLSTRGVQI
KISTRGVQV

SEQ ID NO: 42310 - protein, 10 aa, Artificial Sequence
  Description of Artificial Sequence: Synthetic peptide
  Seed: KLSTRGVQIA
KMSTRGVQII

SEQ ID NO: 42311 - protein, 10 aa, Artificial Sequence
  Description of Artificial Sequence: Synthetic peptide
  Seed: KLSTRGVQIA
KMSTRGVQIV

SEQ ID NO: 42312 - protein, 9 aa, Artificial Sequence
  Description of Artificial Sequence: Synthetic peptide
  Seed: KLSDYEGRL
KMSDYEGRA

SEQ ID NO: 42313 - protein, 11 aa, Artificial Sequence
  Description of Artificial Sequence: Synthetic peptide
  Seed: KLSTRGVQIAS
KDSTRGVQIAL

SEQ ID NO: 42314 - protein, 11 aa, Artificial Sequence
  Description of Artificial Sequence: Synthetic peptide
  Seed: KLSTRGVQIAS
KNSTRGVQIAK

SEQ ID NO: 42315 - protein, 11 aa, Artificial Sequence
  Description of Artificial Sequence: Synthetic peptide
  Seed: KLSTRGVQIAS
KNSTRGVQIAM

SEQ ID NO: 42316 - protein, 11 aa, Artificial Sequence
  Description of Artificial Sequence: Synthetic peptide
  Seed: KLSTRGVQIAS
KNSTRGVQIAS

SEQ ID NO: 42317 - protein, 11 aa, Artificial Sequence
  Description of Artificial Sequence: Synthetic peptide
  Seed: KLSTRGVQIAS
KNSTRGVQIAT

SEQ ID NO: 42318 - protein, 11 aa, Artificial Sequence
  Description of Artificial Sequence: Synthetic peptide
  Seed: KLSTRGVQIAS
KNSTRGVQIAY

SEQ ID NO: 42319 - protein, 11 aa, Artificial Sequence
  Description of Artificial Sequence: Synthetic peptide
  Seed: KLSTRGVQIAS
KNSTRGVQIAV

SEQ ID NO: 42320 - protein, 11 aa, Artificial Sequence
  Description of Artificial Sequence: Synthetic peptide
  Seed: KLSTRGVQIAS
KDSTRGVQIAA

SEQ ID NO: 42321 - protein, 11 aa, Artificial Sequence
  Description of Artificial Sequence: Synthetic peptide
  Seed: KLSTRGVQIAS
KDSTRGVQIAG

SEQ ID NO: 42322 - protein, 11 aa, Artificial Sequence
  Description of Artificial Sequence: Synthetic peptide
  Seed: KLSTRGVQIAS
KDSTRGVQIAI

SEQ ID NO: 42323 - protein, 11 aa, Artificial Sequence
  Description of Artificial Sequence: Synthetic peptide
  Seed: KLSTRGVQIAS
KDSTRGVQIAK

SEQ ID NO: 42324 - protein, 11 aa, Artificial Sequence
  Description of Artificial Sequence: Synthetic peptide
  Seed: KLSTRGVQIAS
KASTRGVQIAA

SEQ ID NO: 42325 - protein, 11 aa, Artificial Sequence
  Description of Artificial Sequence: Synthetic peptide
  Seed: KLSTRGVQIAS
KDSTRGVQIAM

SEQ ID NO: 42326 - protein, 11 aa, Artificial Sequence
  Description of Artificial Sequence: Synthetic peptide
  Seed: KLSTRGVQIAS
KDSTRGVQIAS

SEQ ID NO: 42327 - protein, 11 aa, Artificial Sequence
  Description of Artificial Sequence: Synthetic peptide
  Seed: KLSTRGVQIAS
KDSTRGVQIAT

SEQ ID NO: 42328 - protein, 11 aa, Artificial Sequence
  Description of Artificial Sequence: Synthetic peptide
  Seed: KLSTRGVQIAS
KDSTRGVQIAY

SEQ ID NO: 42329 - protein, 11 aa, Artificial Sequence
  Description of Artificial Sequence: Synthetic peptide
  Seed: KLSTRGVQIAS
KDSTRGVQIAV

SEQ ID NO: 42330 - protein, 11 aa, Artificial Sequence
  Description of Artificial Sequence: Synthetic peptide
  Seed: KLSTRGVQIAS
KCSTRGVQIAA

SEQ ID NO: 42331 - protein, 11 aa, Artificial Sequence
  Description of Artificial Sequence: Synthetic peptide
  Seed: KLSTRGVQIAS
KCSTRGVQIAG

SEQ ID NO: 42332 - protein, 11 aa, Artificial Sequence
  Description of Artificial Sequence: Synthetic peptide
  Seed: KLSTRGVQIAS
KCSTRGVQIAI

SEQ ID NO: 42333 - protein, 11 aa, Artificial Sequence
  Description of Artificial Sequence: Synthetic peptide
  Seed: KLSTRGVQIAS
KCSTRGVQIAL

SEQ ID NO: 42334 - protein, 11 aa, Artificial Sequence
  Description of Artificial Sequence: Synthetic peptide
  Seed: KLSTRGVQIAS
KNSTRGVQIAL

SEQ ID NO: 42335 - protein, 11 aa, Artificial Sequence
  Description of Artificial Sequence: Synthetic peptide
  Seed: KLSTRGVQIAS
KNSTRGVQIAI

SEQ ID NO: 42336 - protein, 11 aa, Artificial Sequence
  Description of Artificial Sequence: Synthetic peptide
  Seed: KLSTRGVQIAS
KNSTRGVQIAG

SEQ ID NO: 42337 - protein, 11 aa, Artificial Sequence
  Description of Artificial Sequence: Synthetic peptide
  Seed: KLSTRGVQIAS
KNSTRGVQIAA

SEQ ID NO: 42338 - protein, 11 aa, Artificial Sequence
  Description of Artificial Sequence: Synthetic peptide
  Seed: KLSTRGVQIAS
KASTRGVQIAG

SEQ ID NO: 42339 - protein, 11 aa, Artificial Sequence
  Description of Artificial Sequence: Synthetic peptide
  Seed: KLSTRGVQIAS
KASTRGVQIAI

SEQ ID NO: 42340 - protein, 11 aa, Artificial Sequence
  Description of Artificial Sequence: Synthetic peptide
  Seed: KLSTRGVQIAS
KASTRGVQIAL

SEQ ID NO: 42341 - protein, 11 aa, Artificial Sequence
  Description of Artificial Sequence: Synthetic peptide
  Seed: KLSTRGVQIAS
KASTRGVQIAK

SEQ ID NO: 42342 - protein, 11 aa, Artificial Sequence
  Description of Artificial Sequence: Synthetic peptide
  Seed: KLSTRGVQIAS
KASTRGVQIAM

SEQ ID NO: 42343 - protein, 11 aa, Artificial Sequence
  Description of Artificial Sequence: Synthetic peptide
  Seed: KLSTRGVQIAS
KASTRGVQIAS

SEQ ID NO: 42344 - protein, 11 aa, Artificial Sequence
  Description of Artificial Sequence: Synthetic peptide
  Seed: KLSTRGVQIAS
KASTRGVQIAT

SEQ ID NO: 42345 - protein, 11 aa, Artificial Sequence
  Description of Artificial Sequence: Synthetic peptide
  Seed: KLSTRGVQIAS
KASTRGVQIAY

SEQ ID NO: 42346 - protein, 11 aa, Artificial Sequence
  Description of Artificial Sequence: Synthetic peptide
  Seed: KLSTRGVQIAS
KASTRGVQIAV

SEQ ID NO: 42347 - protein, 11 aa, Artificial Sequence
  Description of Artificial Sequence: Synthetic peptide
  Seed: KLSTRGVQIAS
KRSTRGVQIAA

SEQ ID NO: 42348 - protein, 11 aa, Artificial Sequence
  Description of Artificial Sequence: Synthetic peptide
  Seed: KLSTRGVQIAS
KRSTRGVQIAG

SEQ ID NO: 42349 - protein, 11 aa, Artificial Sequence
  Description of Artificial Sequence: Synthetic peptide
  Seed: KLSTRGVQIAS
KRSTRGVQIAI

SEQ ID NO: 42350 - protein, 11 aa, Artificial Sequence
  Description of Artificial Sequence: Synthetic peptide
  Seed: KLSTRGVQIAS
KRSTRGVQIAL

SEQ ID NO: 42351 - protein, 11 aa, Artificial Sequence
  Description of Artificial Sequence: Synthetic peptide
  Seed: KLSTRGVQIAS
KRSTRGVQIAK

SEQ ID NO: 42352 - protein, 11 aa, Artificial Sequence
  Description of Artificial Sequence: Synthetic peptide
  Seed: KLSTRGVQIAS
KRSTRGVQIAM

SEQ ID NO: 42353 - protein, 11 aa, Artificial Sequence
  Description of Artificial Sequence: Synthetic peptide
  Seed: KLSTRGVQIAS
KRSTRGVQIAS

SEQ ID NO: 42354 - protein, 11 aa, Artificial Sequence
  Description of Artificial Sequence: Synthetic peptide
  Seed: KLSTRGVQIAS
KRSTRGVQIAT

SEQ ID NO: 42355 - protein, 11 aa, Artificial Sequence
  Description of Artificial Sequence: Synthetic peptide
  Seed: KLSTRGVQIAS
KRSTRGVQIAY

SEQ ID NO: 42356 - protein, 11 aa, Artificial Sequence
  Description of Artificial Sequence: Synthetic peptide
  Seed: KLSTRGVQIAS
KRSTRGVQIAV

SEQ ID NO: 42357 - protein, 9 aa, Artificial Sequence
  Description of Artificial Sequence: Synthetic peptide
  Seed: KLSDYEGRL
KMSDYEGRI

SEQ ID NO: 42358 - protein, 9 aa, Artificial Sequence
  Description of Artificial Sequence: Synthetic peptide
  Seed: KLSDYEGRL
KLSDYEGRV

SEQ ID NO: 42359 - protein, 9 aa, Artificial Sequence
  Description of Artificial Sequence: Synthetic peptide
  Seed: KMIDGIGRF
KEIDGIGRY

SEQ ID NO: 42360 - protein, 10 aa, Artificial Sequence
  Description of Artificial Sequence: Synthetic peptide
  Seed: KLLQNSQVYS
KWLQNSQVYY

SEQ ID NO: 42361 - protein, 10 aa, Artificial Sequence
  Description of Artificial Sequence: Synthetic peptide
  Seed: KLLQNSQVYS
KFLQNSQVYF

SEQ ID NO: 42362 - protein, 10 aa, Artificial Sequence
  Description of Artificial Sequence: Synthetic peptide
  Seed: KLLQNSQVYS
KFLQNSQVYY

SEQ ID NO: 42363 - protein, 10 aa, Artificial Sequence
  Description of Artificial Sequence: Synthetic peptide
  Seed: KLLQNSQVYS
KPLQNSQVYF

SEQ ID NO: 42364 - protein, 10 aa, Artificial Sequence
  Description of Artificial Sequence: Synthetic peptide
  Seed: KLLQNSQVYS
KPLQNSQVYY

SEQ ID NO: 42365 - protein, 10 aa, Artificial Sequence
  Description of Artificial Sequence: Synthetic peptide
  Seed: KLLQNSQVYS
KSLQNSQVYF

SEQ ID NO: 42366 - protein, 10 aa, Artificial Sequence
  Description of Artificial Sequence: Synthetic peptide
  Seed: KLLQNSQVYS
KSLQNSQVYY

SEQ ID NO: 42367 - protein, 10 aa, Artificial Sequence
  Description of Artificial Sequence: Synthetic peptide
  Seed: KLLQNSQVYS
KTLQNSQVYF

SEQ ID NO: 42368 - protein, 10 aa, Artificial Sequence
  Description of Artificial Sequence: Synthetic peptide
  Seed: KLLQNSQVYS
KTLQNSQVYY

SEQ ID NO: 42369 - protein, 10 aa, Artificial Sequence
  Description of Artificial Sequence: Synthetic peptide
  Seed: KLLQNSQVYS
KWLQNSQVYF

SEQ ID NO: 42370 - protein, 10 aa, Artificial Sequence
  Description of Artificial Sequence: Synthetic peptide
  Seed: KLLQNSQVYS
KYLQNSQVYF

SEQ ID NO: 42371 - protein, 11 aa, Artificial Sequence
  Description of Artificial Sequence: Synthetic peptide
  Seed: KLLQNSQVYSL
KQLQNSQVYSL

SEQ ID NO: 42372 - protein, 10 aa, Artificial Sequence
  Description of Artificial Sequence: Synthetic peptide
  Seed: KLLQNSQVYS
KYLQNSQVYY

SEQ ID NO: 42373 - protein, 10 aa, Artificial Sequence
  Description of Artificial Sequence: Synthetic peptide
  Seed: KLLQNSQVYS
KVLQNSQVYM

SEQ ID NO: 42374 - protein, 10 aa, Artificial Sequence
  Description of Artificial Sequence: Synthetic peptide
  Seed: KLLQNSQVYS
KVLQNSQVYF

SEQ ID NO: 42375 - protein, 10 aa, Artificial Sequence
  Description of Artificial Sequence: Synthetic peptide
  Seed: KLLQNSQVYS
KVLQNSQVYY

SEQ ID NO: 42376 - protein, 11 aa, Artificial Sequence
  Description of Artificial Sequence: Synthetic peptide
  Seed: KLLQNSQVYSL
KALQNSQVYSV

SEQ ID NO: 42377 - protein, 11 aa, Artificial Sequence
  Description of Artificial Sequence: Synthetic peptide
  Seed: KLLQNSQVYSL
KRLQNSQVYSV

SEQ ID NO: 42378 - protein, 11 aa, Artificial Sequence
  Description of Artificial Sequence: Synthetic peptide
  Seed: KLLQNSQVYSL
KNLQNSQVYSV

SEQ ID NO: 42379 - protein, 11 aa, Artificial Sequence
  Description of Artificial Sequence: Synthetic peptide
  Seed: KLLQNSQVYSL
KDLQNSQVYSV

SEQ ID NO: 42380 - protein, 11 aa, Artificial Sequence
  Description of Artificial Sequence: Synthetic peptide
  Seed: KLLQNSQVYSL
KCLQNSQVYSV

SEQ ID NO: 42381 - protein, 10 aa, Artificial Sequence
  Description of Artificial Sequence: Synthetic peptide
  Seed: KLLQNSQVYS
KMLQNSQVYV

SEQ ID NO: 42382 - protein, 10 aa, Artificial Sequence
  Description of Artificial Sequence: Synthetic peptide
  Seed: KLLQNSQVYS
KMLQNSQVYY

SEQ ID NO: 42383 - protein, 10 aa, Artificial Sequence
  Description of Artificial Sequence: Synthetic peptide
  Seed: KLLQNSQVYS
KMLQNSQVYW

SEQ ID NO: 42384 - protein, 10 aa, Artificial Sequence
  Description of Artificial Sequence: Synthetic peptide
  Seed: KLLQNSQVYS
KMLQNSQVYT

SEQ ID NO: 42385 - protein, 10 aa, Artificial Sequence
  Description of Artificial Sequence: Synthetic peptide
  Seed: KLLQNSQVYS
KLLQNSQVYV

SEQ ID NO: 42386 - protein, 10 aa, Artificial Sequence
  Description of Artificial Sequence: Synthetic peptide
  Seed: KLLQNSQVYS
KKLQNSQVYF

SEQ ID NO: 42387 - protein, 10 aa, Artificial Sequence
  Description of Artificial Sequence: Synthetic peptide
  Seed: KLLQNSQVYS
KKLQNSQVYY

SEQ ID NO: 42388 - protein, 10 aa, Artificial Sequence
  Description of Artificial Sequence: Synthetic peptide
  Seed: KLLQNSQVYS
KMLQNSQVYA

SEQ ID NO: 42389 - protein, 10 aa, Artificial Sequence
  Description of Artificial Sequence: Synthetic peptide
  Seed: KLLQNSQVYS
KMLQNSQVYR

SEQ ID NO: 42390 - protein, 10 aa, Artificial Sequence
  Description of Artificial Sequence: Synthetic peptide
  Seed: KLLQNSQVYS
KMLQNSQVYN

SEQ ID NO: 42391 - protein, 10 aa, Artificial Sequence
  Description of Artificial Sequence: Synthetic peptide
  Seed: KLLQNSQVYS
KMLQNSQVYD

SEQ ID NO: 42392 - protein, 10 aa, Artificial Sequence
  Description of Artificial Sequence: Synthetic peptide
  Seed: KLLQNSQVYS
KMLQNSQVYC

SEQ ID NO: 42393 - protein, 10 aa, Artificial Sequence
  Description of Artificial Sequence: Synthetic peptide
  Seed: KLLQNSQVYS
KMLQNSQVYQ

SEQ ID NO: 42394 - protein, 10 aa, Artificial Sequence
  Description of Artificial Sequence: Synthetic peptide
  Seed: KLLQNSQVYS
KMLQNSQVYE

SEQ ID NO: 42395 - protein, 10 aa, Artificial Sequence
  Description of Artificial Sequence: Synthetic peptide
  Seed: KLLQNSQVYS
KMLQNSQVYG

SEQ ID NO: 42396 - protein, 10 aa, Artificial Sequence
  Description of Artificial Sequence: Synthetic peptide
  Seed: KLLQNSQVYS
KMLQNSQVYH

SEQ ID NO: 42397 - protein, 10 aa, Artificial Sequence
  Description of Artificial Sequence: Synthetic peptide
  Seed: KLLQNSQVYS
KMLQNSQVYI

SEQ ID NO: 42398 - protein, 10 aa, Artificial Sequence
  Description of Artificial Sequence: Synthetic peptide
  Seed: KLLQNSQVYS
KMLQNSQVYL

SEQ ID NO: 42399 - protein, 10 aa, Artificial Sequence
  Description of Artificial Sequence: Synthetic peptide
  Seed: KLLQNSQVYS
KMLQNSQVYK

SEQ ID NO: 42400 - protein, 10 aa, Artificial Sequence
  Description of Artificial Sequence: Synthetic peptide
  Seed: KLLQNSQVYS
KMLQNSQVYM

SEQ ID NO: 42401 - protein, 10 aa, Artificial Sequence
  Description of Artificial Sequence: Synthetic peptide
  Seed: KLLQNSQVYS
KMLQNSQVYF

SEQ ID NO: 42402 - protein, 10 aa, Artificial Sequence
  Description of Artificial Sequence: Synthetic peptide
  Seed: KLLQNSQVYS
KMLQNSQVYP

SEQ ID NO: 42403 - protein, 10 aa, Artificial Sequence
  Description of Artificial Sequence: Synthetic peptide
  Seed: KLLQNSQVYS
KMLQNSQVYS

SEQ ID NO: 42404 - protein, 11 aa, Artificial Sequence
  Description of Artificial Sequence: Synthetic peptide
  Seed: KLLQNSQVYSL
KQLQNSQVYSI

SEQ ID NO: 42405 - protein, 11 aa, Artificial Sequence
  Description of Artificial Sequence: Synthetic peptide
  Seed: KLLQNSQVYSL
KQLQNSQVYSV

SEQ ID NO: 42406 - protein, 9 aa, Artificial Sequence
  Description of Artificial Sequence: Synthetic peptide
  Seed: KLSDYEGRL
KLSDYEGRM

SEQ ID NO: 42407 - protein, 11 aa, Artificial Sequence
  Description of Artificial Sequence: Synthetic peptide
  Seed: KLLQNSQVYSL
KYLQNSQVYSM

SEQ ID NO: 42408 - protein, 11 aa, Artificial Sequence
  Description of Artificial Sequence: Synthetic peptide
  Seed: KLLQNSQVYSL
KSLQNSQVYSI

SEQ ID NO: 42409 - protein, 11 aa, Artificial Sequence
  Description of Artificial Sequence: Synthetic peptide
  Seed: KLLQNSQVYSL
KSLQNSQVYSV

SEQ ID NO: 42410 - protein, 11 aa, Artificial Sequence
  Description of Artificial Sequence: Synthetic peptide
  Seed: KLLQNSQVYSL
KTLQNSQVYSV

SEQ ID NO: 42411 - protein, 11 aa, Artificial Sequence
  Description of Artificial Sequence: Synthetic peptide
  Seed: KLLQNSQVYSL
KWLQNSQVYSI

SEQ ID NO: 42412 - protein, 11 aa, Artificial Sequence
  Description of Artificial Sequence: Synthetic peptide
  Seed: KLLQNSQVYSL
KWLQNSQVYSL

SEQ ID NO: 42413 - protein, 11 aa, Artificial Sequence
  Description of Artificial Sequence: Synthetic peptide
  Seed: KLLQNSQVYSL
KWLQNSQVYSV

SEQ ID NO: 42414 - protein, 11 aa, Artificial Sequence
  Description of Artificial Sequence: Synthetic peptide
  Seed: KLLQNSQVYSL
KYLQNSQVYSA

SEQ ID NO: 42415 - protein, 11 aa, Artificial Sequence
  Description of Artificial Sequence: Synthetic peptide
  Seed: KLLQNSQVYSL
KYLQNSQVYSI

SEQ ID NO: 42416 - protein, 11 aa, Artificial Sequence
  Description of Artificial Sequence: Synthetic peptide
  Seed: KLLQNSQVYSL
KYLQNSQVYSL

SEQ ID NO: 42417 - protein, 11 aa, Artificial Sequence
  Description of Artificial Sequence: Synthetic peptide
  Seed: KLLQNSQVYSL
KYLQNSQVYSV

SEQ ID NO: 42418 - protein, 11 aa, Artificial Sequence
  Description of Artificial Sequence: Synthetic peptide
  Seed: KLLQNSQVYSL
KELQNSQVYSV

SEQ ID NO: 42419 - protein, 11 aa, Artificial Sequence
  Description of Artificial Sequence: Synthetic peptide
  Seed: KLLQNSQVYSL
KVLQNSQVYSI

SEQ ID NO: 42420 - protein, 11 aa, Artificial Sequence
  Description of Artificial Sequence: Synthetic peptide
  Seed: KLLQNSQVYSL
KVLQNSQVYSL

SEQ ID NO: 42421 - protein, 11 aa, Artificial Sequence
  Description of Artificial Sequence: Synthetic peptide
  Seed: KLLQNSQVYSL
KVLQNSQVYSV

SEQ ID NO: 42422 - protein, 9 aa, Artificial Sequence
  Description of Artificial Sequence: Synthetic peptide
  Seed: KLSDYEGRL
KQSDYEGRL

SEQ ID NO: 42423 - protein, 9 aa, Artificial Sequence
  Description of Artificial Sequence: Synthetic peptide
  Seed: KLSDYEGRL
KQSDYEGRV

SEQ ID NO: 42424 - protein, 9 aa, Artificial Sequence
  Description of Artificial Sequence: Synthetic peptide
  Seed: KLSDYEGRL
KISDYEGRL

SEQ ID NO: 42425 - protein, 9 aa, Artificial Sequence
  Description of Artificial Sequence: Synthetic peptide
  Seed: KLSDYEGRL
KISDYEGRV

SEQ ID NO: 42426 - protein, 9 aa, Artificial Sequence
  Description of Artificial Sequence: Synthetic peptide
  Seed: KLSDYEGRL
KLSDYEGRA

SEQ ID NO: 42427 - protein, 9 aa, Artificial Sequence
  Description of Artificial Sequence: Synthetic peptide
  Seed: KLSDYEGRL
KLSDYEGRI

SEQ ID NO: 42428 - protein, 11 aa, Artificial Sequence
  Description of Artificial Sequence: Synthetic peptide
  Seed: KLLQNSQVYSL
KFLQNSQVYSV

SEQ ID NO: 42429 - protein, 11 aa, Artificial Sequence
  Description of Artificial Sequence: Synthetic peptide
  Seed: KLLQNSQVYSL
KFLQNSQVYSM

SEQ ID NO: 42430 - protein, 11 aa, Artificial Sequence
  Description of Artificial Sequence: Synthetic peptide
  Seed: KLLQNSQVYSL
KFLQNSQVYSL

SEQ ID NO: 42431 - protein, 11 aa, Artificial Sequence
  Description of Artificial Sequence: Synthetic peptide
  Seed: KLLQNSQVYSL
KFLQNSQVYSI

SEQ ID NO: 42432 - protein, 11 aa, Artificial Sequence
  Description of Artificial Sequence: Synthetic peptide
  Seed: KLLQNSQVYSL
KGLQNSQVYSV

SEQ ID NO: 42433 - protein, 11 aa, Artificial Sequence
  Description of Artificial Sequence: Synthetic peptide
  Seed: KLLQNSQVYSL
KHLQNSQVYSV

SEQ ID NO: 42434 - protein, 11 aa, Artificial Sequence
  Description of Artificial Sequence: Synthetic peptide
  Seed: KLLQNSQVYSL
KILQNSQVYSI

SEQ ID NO: 42435 - protein, 11 aa, Artificial Sequence
  Description of Artificial Sequence: Synthetic peptide
  Seed: KLLQNSQVYSL
KILQNSQVYSL

SEQ ID NO: 42436 - protein, 11 aa, Artificial Sequence
  Description of Artificial Sequence: Synthetic peptide
  Seed: KLLQNSQVYSL
KILQNSQVYSV

SEQ ID NO: 42437 - protein, 11 aa, Artificial Sequence
  Description of Artificial Sequence: Synthetic peptide
  Seed: KLLQNSQVYSL
KLLQNSQVYSA

SEQ ID NO: 42438 - protein, 11 aa, Artificial Sequence
  Description of Artificial Sequence: Synthetic peptide
  Seed: KLLQNSQVYSL
KLLQNSQVYSI

SEQ ID NO: 42439 - protein, 11 aa, Artificial Sequence
  Description of Artificial Sequence: Synthetic peptide
  Seed: KLLQNSQVYSL
KLLQNSQVYSM

SEQ ID NO: 42440 - protein, 11 aa, Artificial Sequence
  Description of Artificial Sequence: Synthetic peptide
  Seed: KLLQNSQVYSL
KLLQNSQVYST

SEQ ID NO: 42441 - protein, 11 aa, Artificial Sequence
  Description of Artificial Sequence: Synthetic peptide
  Seed: KLLQNSQVYSL
KLLQNSQVYSV

SEQ ID NO: 42442 - protein, 11 aa, Artificial Sequence
  Description of Artificial Sequence: Synthetic peptide
  Seed: KLLQNSQVYSL
KKLQNSQVYSI

SEQ ID NO: 42443 - protein, 11 aa, Artificial Sequence
  Description of Artificial Sequence: Synthetic peptide
  Seed: KLLQNSQVYSL
KKLQNSQVYSV

SEQ ID NO: 42444 - protein, 11 aa, Artificial Sequence
  Description of Artificial Sequence: Synthetic peptide
  Seed: KLLQNSQVYSL
KMLQNSQVYSA

SEQ ID NO: 42445 - protein, 11 aa, Artificial Sequence
  Description of Artificial Sequence: Synthetic peptide
  Seed: KLLQNSQVYSL
KMLQNSQVYSI

SEQ ID NO: 42446 - protein, 11 aa, Artificial Sequence
  Description of Artificial Sequence: Synthetic peptide
  Seed: KLLQNSQVYSL
KMLQNSQVYSL

SEQ ID NO: 42447 - protein, 11 aa, Artificial Sequence
  Description of Artificial Sequence: Synthetic peptide
  Seed: KLLQNSQVYSL
KMLQNSQVYSM

SEQ ID NO: 42448 - protein, 11 aa, Artificial Sequence
  Description of Artificial Sequence: Synthetic peptide
  Seed: KLLQNSQVYSL
KMLQNSQVYST

SEQ ID NO: 42449 - protein, 11 aa, Artificial Sequence
  Description of Artificial Sequence: Synthetic peptide
  Seed: KLLQNSQVYSL
KMLQNSQVYSV

SEQ ID NO: 42450 - protein, 11 aa, Artificial Sequence
  Description of Artificial Sequence: Synthetic peptide
  Seed: KLLQNSQVYSL
KFLQNSQVYSA

SEQ ID NO: 42451 - protein, 11 aa, Artificial Sequence
  Description of Artificial Sequence: Synthetic peptide
  Seed: KLSTRGVQIAS
KCSTRGVQIAK

SEQ ID NO: 42452 - protein, 11 aa, Artificial Sequence
  Description of Artificial Sequence: Synthetic peptide
  Seed: KLSTRGVQIAS
KCSTRGVQIAM

SEQ ID NO: 42453 - protein, 11 aa, Artificial Sequence
  Description of Artificial Sequence: Synthetic peptide
  Seed: KLSTRGVQIAS
KCSTRGVQIAS

SEQ ID NO: 42454 - protein, 11 aa, Artificial Sequence
  Description of Artificial Sequence: Synthetic peptide
  Seed: KLSTRGVQIAS
KWSTRGVQIAK

SEQ ID NO: 42455 - protein, 11 aa, Artificial Sequence
  Description of Artificial Sequence: Synthetic peptide
  Seed: KLSTRGVQIAS
KTSTRGVQIAM

SEQ ID NO: 42456 - protein, 11 aa, Artificial Sequence
  Description of Artificial Sequence: Synthetic peptide
  Seed: KLSTRGVQIAS
KTSTRGVQIAS

SEQ ID NO: 42457 - protein, 11 aa, Artificial Sequence
  Description of Artificial Sequence: Synthetic peptide
  Seed: KLSTRGVQIAS
KTSTRGVQIAT

SEQ ID NO: 42458 - protein, 11 aa, Artificial Sequence
  Description of Artificial Sequence: Synthetic peptide
  Seed: KLSTRGVQIAS
KTSTRGVQIAY

SEQ ID NO: 42459 - protein, 11 aa, Artificial Sequence
  Description of Artificial Sequence: Synthetic peptide
  Seed: KLSTRGVQIAS
KTSTRGVQIAV

SEQ ID NO: 42460 - protein, 11 aa, Artificial Sequence
  Description of Artificial Sequence: Synthetic peptide
  Seed: KLSTRGVQIAS
KWSTRGVQIAA

SEQ ID NO: 42461 - protein, 11 aa, Artificial Sequence
  Description of Artificial Sequence: Synthetic peptide
  Seed: KLSTRGVQIAS
KWSTRGVQIAG

SEQ ID NO: 42462 - protein, 11 aa, Artificial Sequence
  Description of Artificial Sequence: Synthetic peptide
  Seed: KLSTRGVQIAS
KWSTRGVQIAI

SEQ ID NO: 42463 - protein, 11 aa, Artificial Sequence
  Description of Artificial Sequence: Synthetic peptide
  Seed: KLSTRGVQIAS
KWSTRGVQIAL

SEQ ID NO: 42464 - protein, 11 aa, Artificial Sequence
  Description of Artificial Sequence: Synthetic peptide
  Seed: KLSTRGVQIAS
KWSTRGVQIAM

SEQ ID NO: 42465 - protein, 11 aa, Artificial Sequence
  Description of Artificial Sequence: Synthetic peptide
  Seed: KLSTRGVQIAS
KYSTRGVQIAS

SEQ ID NO: 42466 - protein, 11 aa, Artificial Sequence
  Description of Artificial Sequence: Synthetic peptide
  Seed: KLSTRGVQIAS
KWSTRGVQIAS

SEQ ID NO: 42467 - protein, 11 aa, Artificial Sequence
  Description of Artificial Sequence: Synthetic peptide
  Seed: KLSTRGVQIAS
KWSTRGVQIAT

SEQ ID NO: 42468 - protein, 11 aa, Artificial Sequence
  Description of Artificial Sequence: Synthetic peptide
  Seed: KLSTRGVQIAS
KWSTRGVQIAY

SEQ ID NO: 42469 - protein, 11 aa, Artificial Sequence
  Description of Artificial Sequence: Synthetic peptide
  Seed: KLSTRGVQIAS
KWSTRGVQIAV

SEQ ID NO: 42470 - protein, 11 aa, Artificial Sequence
  Description of Artificial Sequence: Synthetic peptide
  Seed: KLSTRGVQIAS
KYSTRGVQIAA

SEQ ID NO: 42471 - protein, 11 aa, Artificial Sequence
  Description of Artificial Sequence: Synthetic peptide
  Seed: KLSTRGVQIAS
KYSTRGVQIAG

SEQ ID NO: 42472 - protein, 11 aa, Artificial Sequence
  Description of Artificial Sequence: Synthetic peptide
  Seed: KLSTRGVQIAS
KYSTRGVQIAI

SEQ ID NO: 42473 - protein, 11 aa, Artificial Sequence
  Description of Artificial Sequence: Synthetic peptide
  Seed: KLSTRGVQIAS
KYSTRGVQIAL

SEQ ID NO: 42474 - protein, 11 aa, Artificial Sequence
  Description of Artificial Sequence: Synthetic peptide
  Seed: KLSTRGVQIAS
KYSTRGVQIAK

SEQ ID NO: 42475 - protein, 11 aa, Artificial Sequence
  Description of Artificial Sequence: Synthetic peptide
  Seed: KLSTRGVQIAS
KTSTRGVQIAK

SEQ ID NO: 42476 - protein, 11 aa, Artificial Sequence
  Description of Artificial Sequence: Synthetic peptide
  Seed: KLSTRGVQIAS
KTSTRGVQIAL

SEQ ID NO: 42477 - protein, 11 aa, Artificial Sequence
  Description of Artificial Sequence: Synthetic peptide
  Seed: KLSTRGVQIAS
KTSTRGVQIAI

SEQ ID NO: 42478 - protein, 11 aa, Artificial Sequence
  Description of Artificial Sequence: Synthetic peptide
  Seed: KLSTRGVQIAS
KTSTRGVQIAG

SEQ ID NO: 42479 - protein, 11 aa, Artificial Sequence
  Description of Artificial Sequence: Synthetic peptide
  Seed: KLSTRGVQIAS
KPSTRGVQIAI

SEQ ID NO: 42480 - protein, 11 aa, Artificial Sequence
  Description of Artificial Sequence: Synthetic peptide
  Seed: KLSTRGVQIAS
KPSTRGVQIAL

SEQ ID NO: 42481 - protein, 11 aa, Artificial Sequence
  Description of Artificial Sequence: Synthetic peptide
  Seed: KLSTRGVQIAS
KPSTRGVQIAK

SEQ ID NO: 42482 - protein, 11 aa, Artificial Sequence
  Description of Artificial Sequence: Synthetic peptide
  Seed: KLSTRGVQIAS
KPSTRGVQIAM

SEQ ID NO: 42483 - protein, 11 aa, Artificial Sequence
  Description of Artificial Sequence: Synthetic peptide
  Seed: KLSTRGVQIAS
KPSTRGVQIAS

SEQ ID NO: 42484 - protein, 11 aa, Artificial Sequence
  Description of Artificial Sequence: Synthetic peptide
  Seed: KLSTRGVQIAS
KPSTRGVQIAT

SEQ ID NO: 42485 - protein, 11 aa, Artificial Sequence
  Description of Artificial Sequence: Synthetic peptide
  Seed: KLSTRGVQIAS
KPSTRGVQIAY

SEQ ID NO: 42486 - protein, 11 aa, Artificial Sequence
  Description of Artificial Sequence: Synthetic peptide
  Seed: KLSTRGVQIAS
KPSTRGVQIAV

SEQ ID NO: 42487 - protein, 11 aa, Artificial Sequence
  Description of Artificial Sequence: Synthetic peptide
  Seed: KLSTRGVQIAS
KSSTRGVQIAA

SEQ ID NO: 42488 - protein, 11 aa, Artificial Sequence
  Description of Artificial Sequence: Synthetic peptide
  Seed: KLSTRGVQIAS
KSSTRGVQIAG

SEQ ID NO: 42489 - protein, 11 aa, Artificial Sequence
  Description of Artificial Sequence: Synthetic peptide
  Seed: KLSTRGVQIAS
KSSTRGVQIAI

SEQ ID NO: 42490 - protein, 11 aa, Artificial Sequence
  Description of Artificial Sequence: Synthetic peptide
  Seed: KLSTRGVQIAS
KSSTRGVQIAL

SEQ ID NO: 42491 - protein, 11 aa, Artificial Sequence
  Description of Artificial Sequence: Synthetic peptide
  Seed: KLSTRGVQIAS
KSSTRGVQIAK

SEQ ID NO: 42492 - protein, 11 aa, Artificial Sequence
  Description of Artificial Sequence: Synthetic peptide
  Seed: KLSTRGVQIAS
KSSTRGVQIAM

SEQ ID NO: 42493 - protein, 11 aa, Artificial Sequence
  Description of Artificial Sequence: Synthetic peptide
  Seed: KLSTRGVQIAS
KSSTRGVQIAS

SEQ ID NO: 42494 - protein, 11 aa, Artificial Sequence
  Description of Artificial Sequence: Synthetic peptide
  Seed: KLSTRGVQIAS
KSSTRGVQIAT

SEQ ID NO: 42495 - protein, 11 aa, Artificial Sequence
  Description of Artificial Sequence: Synthetic peptide
  Seed: KLSTRGVQIAS
KSSTRGVQIAY

SEQ ID NO: 42496 - protein, 11 aa, Artificial Sequence
  Description of Artificial Sequence: Synthetic peptide
  Seed: KLSTRGVQIAS
KSSTRGVQIAV

SEQ ID NO: 42497 - protein, 11 aa, Artificial Sequence
  Description of Artificial Sequence: Synthetic peptide
  Seed: KLSTRGVQIAS
KTSTRGVQIAA

SEQ ID NO: 42498 - protein, 11 aa, Artificial Sequence
  Description of Artificial Sequence: Synthetic peptide
  Seed: KLSTRGVQIAS
KYSTRGVQIAM

SEQ ID NO: 42499 - protein, 11 aa, Artificial Sequence
  Description of Artificial Sequence: Synthetic peptide
  Seed: KLSTRGVQIAS
KYSTRGVQIAT

SEQ ID NO: 42500 - protein, 11 aa, Artificial Sequence
  Description of Artificial Sequence: Synthetic peptide
  Seed: KLSTRGVQIAS
KCSTRGVQIAT

SEQ ID NO: 42501 - protein, 9 aa, Artificial Sequence
  Description of Artificial Sequence: Synthetic peptide
  Seed: KMIDGIGRF
KQIDGIGRC

SEQ ID NO: 42502 - protein, 9 aa, Artificial Sequence
  Description of Artificial Sequence: Synthetic peptide
  Seed: KMIDGIGRF
KRIDGIGRM

SEQ ID NO: 42503 - protein, 9 aa, Artificial Sequence
  Description of Artificial Sequence: Synthetic peptide
  Seed: KMIDGIGRF
KRIDGIGRF

SEQ ID NO: 42504 - protein, 9 aa, Artificial Sequence
  Description of Artificial Sequence: Synthetic peptide
  Seed: KMIDGIGRF
KRIDGIGRY

SEQ ID NO: 42505 - protein, 9 aa, Artificial Sequence
  Description of Artificial Sequence: Synthetic peptide
  Seed: KMIDGIGRF
KNIDGIGRF

SEQ ID NO: 42506 - protein, 9 aa, Artificial Sequence
  Description of Artificial Sequence: Synthetic peptide
  Seed: KMIDGIGRF
KNIDGIGRY

SEQ ID NO: 42507 - protein, 9 aa, Artificial Sequence
  Description of Artificial Sequence: Synthetic peptide
  Seed: KMIDGIGRF
KDIDGIGRY

SEQ ID NO: 42508 - protein, 9 aa, Artificial Sequence
  Description of Artificial Sequence: Synthetic peptide
  Seed: KMIDGIGRF
KCIDGIGRW

SEQ ID NO: 42509 - protein, 9 aa, Artificial Sequence
  Description of Artificial Sequence: Synthetic peptide
  Seed: KMIDGIGRF
KCIDGIGRY

SEQ ID NO: 42510 - protein, 9 aa, Artificial Sequence
  Description of Artificial Sequence: Synthetic peptide
  Seed: KMIDGIGRF
KQIDGIGRA

SEQ ID NO: 42511 - protein, 9 aa, Artificial Sequence
  Description of Artificial Sequence: Synthetic peptide
  Seed: KMIDGIGRF
KQIDGIGRH

SEQ ID NO: 42512 - protein, 11 aa, Artificial Sequence
  Description of Artificial Sequence: Synthetic peptide
  Seed: KLSTRGVQIAS
KYSTRGVQIAY

SEQ ID NO: 42513 - protein, 9 aa, Artificial Sequence
  Description of Artificial Sequence: Synthetic peptide
  Seed: KMIDGIGRF
KQIDGIGRI

SEQ ID NO: 42514 - protein, 9 aa, Artificial Sequence
  Description of Artificial Sequence: Synthetic peptide
  Seed: KMIDGIGRF
KQIDGIGRL

SEQ ID NO: 42515 - protein, 9 aa, Artificial Sequence
  Description of Artificial Sequence: Synthetic peptide
  Seed: KMIDGIGRF
KQIDGIGRM

SEQ ID NO: 42516 - protein, 9 aa, Artificial Sequence
  Description of Artificial Sequence: Synthetic peptide
  Seed: KMIDGIGRF
KQIDGIGRF

SEQ ID NO: 42517 - protein, 9 aa, Artificial Sequence
  Description of Artificial Sequence: Synthetic peptide
  Seed: KMIDGIGRF
KQIDGIGRT

SEQ ID NO: 42518 - protein, 9 aa, Artificial Sequence
  Description of Artificial Sequence: Synthetic peptide
  Seed: KMIDGIGRF
KQIDGIGRW

SEQ ID NO: 42519 - protein, 9 aa, Artificial Sequence
  Description of Artificial Sequence: Synthetic peptide
  Seed: KMIDGIGRF
KQIDGIGRY

SEQ ID NO: 42520 - protein, 9 aa, Artificial Sequence
  Description of Artificial Sequence: Synthetic peptide
  Seed: KMIDGIGRF
KQIDGIGRV

SEQ ID NO: 42521 - protein, 9 aa, Artificial Sequence
  Description of Artificial Sequence: Synthetic peptide
  Seed: KMIDGIGRF
KEIDGIGRM

SEQ ID NO: 42522 - protein, 9 aa, Artificial Sequence
  Description of Artificial Sequence: Synthetic peptide
  Seed: KMIDGIGRF
KAIDGIGRV

SEQ ID NO: 42523 - protein, 9 aa, Artificial Sequence
  Description of Artificial Sequence: Synthetic peptide
  Seed: KMIDGIGRF
KAIDGIGRY

SEQ ID NO: 42524 - protein, 9 aa, Artificial Sequence
  Description of Artificial Sequence: Synthetic peptide
  Seed: KMIDGIGRF
KAIDGIGRW

SEQ ID NO: 42525 - protein, 9 aa, Artificial Sequence
  Description of Artificial Sequence: Synthetic peptide
  Seed: KMIDGIGRF
KAIDGIGRF

SEQ ID NO: 42526 - protein, 11 aa, Artificial Sequence
  Description of Artificial Sequence: Synthetic peptide
  Seed: KLSTRGVQIAS
KYSTRGVQIAV

SEQ ID NO: 42527 - protein, 11 aa, Artificial Sequence
  Description of Artificial Sequence: Synthetic peptide
  Seed: KLSTRGVQIAS
KVSTRGVQIAA

SEQ ID NO: 42528 - protein, 11 aa, Artificial Sequence
  Description of Artificial Sequence: Synthetic peptide
  Seed: KLSTRGVQIAS
KVSTRGVQIAG

SEQ ID NO: 42529 - protein, 11 aa, Artificial Sequence
  Description of Artificial Sequence: Synthetic peptide
  Seed: KLSTRGVQIAS
KVSTRGVQIAI

SEQ ID NO: 42530 - protein, 11 aa, Artificial Sequence
  Description of Artificial Sequence: Synthetic peptide
  Seed: KLSTRGVQIAS
KVSTRGVQIAL

SEQ ID NO: 42531 - protein, 11 aa, Artificial Sequence
  Description of Artificial Sequence: Synthetic peptide
  Seed: KLSTRGVQIAS
KVSTRGVQIAK

SEQ ID NO: 42532 - protein, 11 aa, Artificial Sequence
  Description of Artificial Sequence: Synthetic peptide
  Seed: KLSTRGVQIAS
KVSTRGVQIAM

SEQ ID NO: 42533 - protein, 11 aa, Artificial Sequence
  Description of Artificial Sequence: Synthetic peptide
  Seed: KLSTRGVQIAS
KVSTRGVQIAS

SEQ ID NO: 42534 - protein, 11 aa, Artificial Sequence
  Description of Artificial Sequence: Synthetic peptide
  Seed: KLSTRGVQIAS
KVSTRGVQIAT

SEQ ID NO: 42535 - protein, 11 aa, Artificial Sequence
  Description of Artificial Sequence: Synthetic peptide
  Seed: KLSTRGVQIAS
KVSTRGVQIAY

SEQ ID NO: 42536 - protein, 11 aa, Artificial Sequence
  Description of Artificial Sequence: Synthetic peptide
  Seed: KLSTRGVQIAS
KVSTRGVQIAV

SEQ ID NO: 42537 - protein, 8 aa, Artificial Sequence
  Description of Artificial Sequence: Synthetic peptide
  Seed: KMIDGIGR
KFIDGIGR

SEQ ID NO: 42538 - protein, 8 aa, Artificial Sequence
  Description of Artificial Sequence: Synthetic peptide
  Seed: KMIDGIGR
KTIDGIGR

SEQ ID NO: 42539 - protein, 8 aa, Artificial Sequence
  Description of Artificial Sequence: Synthetic peptide
  Seed: KMIDGIGR
KYIDGIGR

SEQ ID NO: 42540 - protein, 8 aa, Artificial Sequence
  Description of Artificial Sequence: Synthetic peptide
  Seed: KMIDGIGR
KVIDGIGR

SEQ ID NO: 42541 - protein, 9 aa, Artificial Sequence
  Description of Artificial Sequence: Synthetic peptide
  Seed: KMIDGIGRF
KAIDGIGRA

SEQ ID NO: 42542 - protein, 9 aa, Artificial Sequence
  Description of Artificial Sequence: Synthetic peptide
  Seed: KMIDGIGRF
KAIDGIGRI

SEQ ID NO: 42543 - protein, 9 aa, Artificial Sequence
  Description of Artificial Sequence: Synthetic peptide
  Seed: KMIDGIGRF
KAIDGIGRL

SEQ ID NO: 42544 - protein, 9 aa, Artificial Sequence
  Description of Artificial Sequence: Synthetic peptide
  Seed: KMIDGIGRF
KAIDGIGRM

SEQ ID NO: 42545 - protein, 11 aa, Artificial Sequence
  Description of Artificial Sequence: Synthetic peptide
  Seed: KLSTRGVQIAS
KPSTRGVQIAG

SEQ ID NO: 42546 - protein, 11 aa, Artificial Sequence
  Description of Artificial Sequence: Synthetic peptide
  Seed: KLSTRGVQIAS
KPSTRGVQIAA

SEQ ID NO: 42547 - protein, 11 aa, Artificial Sequence
  Description of Artificial Sequence: Synthetic peptide
  Seed: KLSTRGVQIAS
KFSTRGVQIAV

SEQ ID NO: 42548 - protein, 11 aa, Artificial Sequence
  Description of Artificial Sequence: Synthetic peptide
  Seed: KLSTRGVQIAS
KHSTRGVQIAA

SEQ ID NO: 42549 - protein, 11 aa, Artificial Sequence
  Description of Artificial Sequence: Synthetic peptide
  Seed: KLSTRGVQIAS
KGSTRGVQIAG

SEQ ID NO: 42550 - protein, 11 aa, Artificial Sequence
  Description of Artificial Sequence: Synthetic peptide
  Seed: KLSTRGVQIAS
KGSTRGVQIAI

SEQ ID NO: 42551 - protein, 11 aa, Artificial Sequence
  Description of Artificial Sequence: Synthetic peptide
  Seed: KLSTRGVQIAS
KGSTRGVQIAL

SEQ ID NO: 42552 - protein, 11 aa, Artificial Sequence
  Description of Artificial Sequence: Synthetic peptide
  Seed: KLSTRGVQIAS
KGSTRGVQIAK

SEQ ID NO: 42553 - protein, 11 aa, Artificial Sequence
  Description of Artificial Sequence: Synthetic peptide
  Seed: KLSTRGVQIAS
KGSTRGVQIAM

SEQ ID NO: 42554 - protein, 11 aa, Artificial Sequence
  Description of Artificial Sequence: Synthetic peptide
  Seed: KLSTRGVQIAS
KGSTRGVQIAS

SEQ ID NO: 42555 - protein, 11 aa, Artificial Sequence
  Description of Artificial Sequence: Synthetic peptide
  Seed: KLSTRGVQIAS
KGSTRGVQIAT

SEQ ID NO: 42556 - protein, 11 aa, Artificial Sequence
  Description of Artificial Sequence: Synthetic peptide
  Seed: KLSTRGVQIAS
KGSTRGVQIAY

SEQ ID NO: 42557 - protein, 11 aa, Artificial Sequence
  Description of Artificial Sequence: Synthetic peptide
  Seed: KLSTRGVQIAS
KGSTRGVQIAV

SEQ ID NO: 42558 - protein, 11 aa, Artificial Sequence
  Description of Artificial Sequence: Synthetic peptide
  Seed: KLSTRGVQIAS
KHSTRGVQIAG

SEQ ID NO: 42559 - protein, 11 aa, Artificial Sequence
  Description of Artificial Sequence: Synthetic peptide
  Seed: KLSTRGVQIAS
KFSTRGVQIAY

SEQ ID NO: 42560 - protein, 11 aa, Artificial Sequence
  Description of Artificial Sequence: Synthetic peptide
  Seed: KLSTRGVQIAS
KHSTRGVQIAI

SEQ ID NO: 42561 - protein, 11 aa, Artificial Sequence
  Description of Artificial Sequence: Synthetic peptide
  Seed: KLSTRGVQIAS
KHSTRGVQIAL

SEQ ID NO: 42562 - protein, 11 aa, Artificial Sequence
  Description of Artificial Sequence: Synthetic peptide
  Seed: KLSTRGVQIAS
KHSTRGVQIAK

SEQ ID NO: 42563 - protein, 11 aa, Artificial Sequence
  Description of Artificial Sequence: Synthetic peptide
  Seed: KLSTRGVQIAS
KHSTRGVQIAM

SEQ ID NO: 42564 - protein, 11 aa, Artificial Sequence
  Description of Artificial Sequence: Synthetic peptide
  Seed: KLSTRGVQIAS
KHSTRGVQIAS

SEQ ID NO: 42565 - protein, 11 aa, Artificial Sequence
  Description of Artificial Sequence: Synthetic peptide
  Seed: KLSTRGVQIAS
KHSTRGVQIAT

SEQ ID NO: 42566 - protein, 11 aa, Artificial Sequence
  Description of Artificial Sequence: Synthetic peptide
  Seed: KLSTRGVQIAS
KHSTRGVQIAY

SEQ ID NO: 42567 - protein, 11 aa, Artificial Sequence
  Description of Artificial Sequence: Synthetic peptide
  Seed: KLSTRGVQIAS
KHSTRGVQIAV

SEQ ID NO: 42568 - protein, 11 aa, Artificial Sequence
  Description of Artificial Sequence: Synthetic peptide
  Seed: KLSTRGVQIAS
KISTRGVQIAA

SEQ ID NO: 42569 - protein, 11 aa, Artificial Sequence
  Description of Artificial Sequence: Synthetic peptide
  Seed: KLSTRGVQIAS
KGSTRGVQIAA

SEQ ID NO: 42570 - protein, 11 aa, Artificial Sequence
  Description of Artificial Sequence: Synthetic peptide
  Seed: KLSTRGVQIAS
KESTRGVQIAV

SEQ ID NO: 42571 - protein, 11 aa, Artificial Sequence
  Description of Artificial Sequence: Synthetic peptide
  Seed: KLSTRGVQIAS
KESTRGVQIAY

SEQ ID NO: 42572 - protein, 11 aa, Artificial Sequence
  Description of Artificial Sequence: Synthetic peptide
  Seed: KLSTRGVQIAS
KESTRGVQIAT

SEQ ID NO: 42573 - protein, 11 aa, Artificial Sequence
  Description of Artificial Sequence: Synthetic peptide
  Seed: KLSTRGVQIAS
KCSTRGVQIAY

SEQ ID NO: 42574 - protein, 11 aa, Artificial Sequence
  Description of Artificial Sequence: Synthetic peptide
  Seed: KLSTRGVQIAS
KCSTRGVQIAV

SEQ ID NO: 42575 - protein, 11 aa, Artificial Sequence
  Description of Artificial Sequence: Synthetic peptide
  Seed: KLSTRGVQIAS
KQSTRGVQIAA

SEQ ID NO: 42576 - protein, 11 aa, Artificial Sequence
  Description of Artificial Sequence: Synthetic peptide
  Seed: KLSTRGVQIAS
KQSTRGVQIAG

SEQ ID NO: 42577 - protein, 11 aa, Artificial Sequence
  Description of Artificial Sequence: Synthetic peptide
  Seed: KLSTRGVQIAS
KQSTRGVQIAI

SEQ ID NO: 42578 - protein, 11 aa, Artificial Sequence
  Description of Artificial Sequence: Synthetic peptide
  Seed: KLSTRGVQIAS
KQSTRGVQIAL

SEQ ID NO: 42579 - protein, 11 aa, Artificial Sequence
  Description of Artificial Sequence: Synthetic peptide
  Seed: KLSTRGVQIAS
KQSTRGVQIAK

SEQ ID NO: 42580 - protein, 11 aa, Artificial Sequence
  Description of Artificial Sequence: Synthetic peptide
  Seed: KLSTRGVQIAS
KQSTRGVQIAM

SEQ ID NO: 42581 - protein, 11 aa, Artificial Sequence
  Description of Artificial Sequence: Synthetic peptide
  Seed: KLSTRGVQIAS
KQSTRGVQIAS

SEQ ID NO: 42582 - protein, 11 aa, Artificial Sequence
  Description of Artificial Sequence: Synthetic peptide
  Seed: KLSTRGVQIAS
KQSTRGVQIAT

SEQ ID NO: 42583 - protein, 11 aa, Artificial Sequence
  Description of Artificial Sequence: Synthetic peptide
  Seed: KLSTRGVQIAS
KQSTRGVQIAY

SEQ ID NO: 42584 - protein, 11 aa, Artificial Sequence
  Description of Artificial Sequence: Synthetic peptide
  Seed: KLSTRGVQIAS
KQSTRGVQIAV

SEQ ID NO: 42585 - protein, 11 aa, Artificial Sequence
  Description of Artificial Sequence: Synthetic peptide
  Seed: KLSTRGVQIAS
KESTRGVQIAA

SEQ ID NO: 42586 - protein, 11 aa, Artificial Sequence
  Description of Artificial Sequence: Synthetic peptide
  Seed: KLSTRGVQIAS
KESTRGVQIAG

SEQ ID NO: 42587 - protein, 11 aa, Artificial Sequence
  Description of Artificial Sequence: Synthetic peptide
  Seed: KLSTRGVQIAS
KESTRGVQIAI

SEQ ID NO: 42588 - protein, 11 aa, Artificial Sequence
  Description of Artificial Sequence: Synthetic peptide
  Seed: KLSTRGVQIAS
KESTRGVQIAL

SEQ ID NO: 42589 - protein, 11 aa, Artificial Sequence
  Description of Artificial Sequence: Synthetic peptide
  Seed: KLSTRGVQIAS
KESTRGVQIAK

SEQ ID NO: 42590 - protein, 11 aa, Artificial Sequence
  Description of Artificial Sequence: Synthetic peptide
  Seed: KLSTRGVQIAS
KESTRGVQIAM

SEQ ID NO: 42591 - protein, 11 aa, Artificial Sequence
  Description of Artificial Sequence: Synthetic peptide
  Seed: KLSTRGVQIAS
KESTRGVQIAS

SEQ ID NO: 42592 - protein, 11 aa, Artificial Sequence
  Description of Artificial Sequence: Synthetic peptide
  Seed: KLSTRGVQIAS
KISTRGVQIAG

SEQ ID NO: 42593 - protein, 11 aa, Artificial Sequence
  Description of Artificial Sequence: Synthetic peptide
  Seed: KLSTRGVQIAS
KISTRGVQIAI

SEQ ID NO: 42594 - protein, 11 aa, Artificial Sequence
  Description of Artificial Sequence: Synthetic peptide
  Seed: KLSTRGVQIAS
KISTRGVQIAL

SEQ ID NO: 42595 - protein, 11 aa, Artificial Sequence
  Description of Artificial Sequence: Synthetic peptide
  Seed: KLSTRGVQIAS
KKSTRGVQIAT

SEQ ID NO: 42596 - protein, 11 aa, Artificial Sequence
  Description of Artificial Sequence: Synthetic peptide
  Seed: KLSTRGVQIAS
KKSTRGVQIAV

SEQ ID NO: 42597 - protein, 11 aa, Artificial Sequence
  Description of Artificial Sequence: Synthetic peptide
  Seed: KLSTRGVQIAS
KMSTRGVQIAA

SEQ ID NO: 42598 - protein, 11 aa, Artificial Sequence
  Description of Artificial Sequence: Synthetic peptide
  Seed: KLSTRGVQIAS
KMSTRGVQIAG

SEQ ID NO: 42599 - protein, 11 aa, Artificial Sequence
  Description of Artificial Sequence: Synthetic peptide
  Seed: KLSTRGVQIAS
KMSTRGVQIAI

SEQ ID NO: 42600 - protein, 11 aa, Artificial Sequence
  Description of Artificial Sequence: Synthetic peptide
  Seed: KLSTRGVQIAS
KMSTRGVQIAL

SEQ ID NO: 42601 - protein, 11 aa, Artificial Sequence
  Description of Artificial Sequence: Synthetic peptide
  Seed: KLSTRGVQIAS
KMSTRGVQIAK

SEQ ID NO: 42602 - protein, 11 aa, Artificial Sequence
  Description of Artificial Sequence: Synthetic peptide
  Seed: KLSTRGVQIAS
KMSTRGVQIAM

SEQ ID NO: 42603 - protein, 11 aa, Artificial Sequence
  Description of Artificial Sequence: Synthetic peptide
  Seed: KLSTRGVQIAS
KMSTRGVQIAS

SEQ ID NO: 42604 - protein, 11 aa, Artificial Sequence
  Description of Artificial Sequence: Synthetic peptide
  Seed: KLSTRGVQIAS
KMSTRGVQIAT

SEQ ID NO: 42605 - protein, 11 aa, Artificial Sequence
  Description of Artificial Sequence: Synthetic peptide
  Seed: KLSTRGVQIAS
KMSTRGVQIAY

SEQ ID NO: 42606 - protein, 11 aa, Artificial Sequence
  Description of Artificial Sequence: Synthetic peptide
  Seed: KLSTRGVQIAS
KMSTRGVQIAV

SEQ ID NO: 42607 - protein, 11 aa, Artificial Sequence
  Description of Artificial Sequence: Synthetic peptide
  Seed: KLSTRGVQIAS
KFSTRGVQIAA

SEQ ID NO: 42608 - protein, 11 aa, Artificial Sequence
  Description of Artificial Sequence: Synthetic peptide
  Seed: KLSTRGVQIAS
KFSTRGVQIAG

SEQ ID NO: 42609 - protein, 11 aa, Artificial Sequence
  Description of Artificial Sequence: Synthetic peptide
  Seed: KLSTRGVQIAS
KFSTRGVQIAI

SEQ ID NO: 42610 - protein, 11 aa, Artificial Sequence
  Description of Artificial Sequence: Synthetic peptide
  Seed: KLSTRGVQIAS
KFSTRGVQIAL

SEQ ID NO: 42611 - protein, 11 aa, Artificial Sequence
  Description of Artificial Sequence: Synthetic peptide
  Seed: KLSTRGVQIAS
KFSTRGVQIAK

SEQ ID NO: 42612 - protein, 11 aa, Artificial Sequence
  Description of Artificial Sequence: Synthetic peptide
  Seed: KLSTRGVQIAS
KFSTRGVQIAM

SEQ ID NO: 42613 - protein, 11 aa, Artificial Sequence
  Description of Artificial Sequence: Synthetic peptide
  Seed: KLSTRGVQIAS
KFSTRGVQIAS

SEQ ID NO: 42614 - protein, 11 aa, Artificial Sequence
  Description of Artificial Sequence: Synthetic peptide
  Seed: KLSTRGVQIAS
KFSTRGVQIAT

SEQ ID NO: 42615 - protein, 11 aa, Artificial Sequence
  Description of Artificial Sequence: Synthetic peptide
  Seed: KLSTRGVQIAS
KKSTRGVQIAY

SEQ ID NO: 42616 - protein, 11 aa, Artificial Sequence
  Description of Artificial Sequence: Synthetic peptide
  Seed: KLSTRGVQIAS
KKSTRGVQIAS

SEQ ID NO: 42617 - protein, 11 aa, Artificial Sequence
  Description of Artificial Sequence: Synthetic peptide
  Seed: KLSTRGVQIAS
KISTRGVQIAK

SEQ ID NO: 42618 - protein, 11 aa, Artificial Sequence
  Description of Artificial Sequence: Synthetic peptide
  Seed: KLSTRGVQIAS
KKSTRGVQIAM

SEQ ID NO: 42619 - protein, 11 aa, Artificial Sequence
  Description of Artificial Sequence: Synthetic peptide
  Seed: KLSTRGVQIAS
KISTRGVQIAM

SEQ ID NO: 42620 - protein, 11 aa, Artificial Sequence
  Description of Artificial Sequence: Synthetic peptide
  Seed: KLSTRGVQIAS
KISTRGVQIAS

SEQ ID NO: 42621 - protein, 11 aa, Artificial Sequence
  Description of Artificial Sequence: Synthetic peptide
  Seed: KLSTRGVQIAS
KISTRGVQIAT

SEQ ID NO: 42622 - protein, 11 aa, Artificial Sequence
  Description of Artificial Sequence: Synthetic peptide
  Seed: KLSTRGVQIAS
KISTRGVQIAY

SEQ ID NO: 42623 - protein, 11 aa, Artificial Sequence
  Description of Artificial Sequence: Synthetic peptide
  Seed: KLSTRGVQIAS
KISTRGVQIAV

SEQ ID NO: 42624 - protein, 11 aa, Artificial Sequence
  Description of Artificial Sequence: Synthetic peptide
  Seed: KLSTRGVQIAS
KLSTRGVQIAA

SEQ ID NO: 42625 - protein, 11 aa, Artificial Sequence
  Description of Artificial Sequence: Synthetic peptide
  Seed: KLSTRGVQIAS
KLSTRGVQIAG

SEQ ID NO: 42626 - protein, 11 aa, Artificial Sequence
  Description of Artificial Sequence: Synthetic peptide
  Seed: KLSTRGVQIAS
KLSTRGVQIAI

SEQ ID NO: 42627 - protein, 11 aa, Artificial Sequence
  Description of Artificial Sequence: Synthetic peptide
  Seed: KLSTRGVQIAS
KLSTRGVQIAL

SEQ ID NO: 42628 - protein, 11 aa, Artificial Sequence
  Description of Artificial Sequence: Synthetic peptide
  Seed: KLSTRGVQIAS
KLSTRGVQIAK

SEQ ID NO: 42629 - protein, 11 aa, Artificial Sequence
  Description of Artificial Sequence: Synthetic peptide
  Seed: KLSTRGVQIAS
KLSTRGVQIAM

SEQ ID NO: 42630 - protein, 11 aa, Artificial Sequence
  Description of Artificial Sequence: Synthetic peptide
  Seed: KLSTRGVQIAS
KLSTRGVQIAT

SEQ ID NO: 42631 - protein, 11 aa, Artificial Sequence
  Description of Artificial Sequence: Synthetic peptide
  Seed: KLSTRGVQIAS
KLSTRGVQIAY

SEQ ID NO: 42632 - protein, 11 aa, Artificial Sequence
  Description of Artificial Sequence: Synthetic peptide
  Seed: KLSTRGVQIAS
KLSTRGVQIAV

SEQ ID NO: 42633 - protein, 11 aa, Artificial Sequence
  Description of Artificial Sequence: Synthetic peptide
  Seed: KLSTRGVQIAS
KKSTRGVQIAA

SEQ ID NO: 42634 - protein, 11 aa, Artificial Sequence
  Description of Artificial Sequence: Synthetic peptide
  Seed: KLSTRGVQIAS
KKSTRGVQIAG

SEQ ID NO: 42635 - protein, 11 aa, Artificial Sequence
  Description of Artificial Sequence: Synthetic peptide
  Seed: KLSTRGVQIAS
KKSTRGVQIAI

SEQ ID NO: 42636 - protein, 11 aa, Artificial Sequence
  Description of Artificial Sequence: Synthetic peptide
  Seed: KLSTRGVQIAS
KKSTRGVQIAL

SEQ ID NO: 42637 - protein, 11 aa, Artificial Sequence
  Description of Artificial Sequence: Synthetic peptide
  Seed: KLSTRGVQIAS
KKSTRGVQIAK

SEQ ID NO: 42638 - protein, 10 aa, Artificial Sequence
  Description of Artificial Sequence: Synthetic peptide
  Seed: KLLQNSQVYS
KLLQNSQVYY

SEQ ID NO: 42639 - protein, 10 aa, Artificial Sequence
  Description of Artificial Sequence: Synthetic peptide
  Seed: KLLQNSQVYS
KLLQNSQVYW

SEQ ID NO: 42640 - protein, 10 aa, Artificial Sequence
  Description of Artificial Sequence: Synthetic peptide
  Seed: KLLQNSQVYS
KLLQNSQVYT

SEQ ID NO: 42641 - protein, 10 aa, Artificial Sequence
  Description of Artificial Sequence: Synthetic peptide
  Seed: KKTGGPIYKR
KDTGGPIYKR

SEQ ID NO: 42642 - protein, 8 aa, Artificial Sequence
  Description of Artificial Sequence: Synthetic peptide
  Seed: KKTGGPIY
KQTGGPIY

SEQ ID NO: 42643 - protein, 8 aa, Artificial Sequence
  Description of Artificial Sequence: Synthetic peptide
  Seed: KKTGGPIY
KMTGGPIF

SEQ ID NO: 42644 - protein, 8 aa, Artificial Sequence
  Description of Artificial Sequence: Synthetic peptide
  Seed: KKTGGPIY
KMTGGPIY

SEQ ID NO: 42645 - protein, 8 aa, Artificial Sequence
  Description of Artificial Sequence: Synthetic peptide
  Seed: KKTGGPIY
KYTGGPIY

SEQ ID NO: 42646 - protein, 10 aa, Artificial Sequence
  Description of Artificial Sequence: Synthetic peptide
  Seed: KKTGGPIYKR
KATGGPIYKR

SEQ ID NO: 42647 - protein, 10 aa, Artificial Sequence
  Description of Artificial Sequence: Synthetic peptide
  Seed: KKTGGPIYKR
KATGGPIYKK

SEQ ID NO: 42648 - protein, 10 aa, Artificial Sequence
  Description of Artificial Sequence: Synthetic peptide
  Seed: KKTGGPIYKR
KRTGGPIYKR

SEQ ID NO: 42649 - protein, 10 aa, Artificial Sequence
  Description of Artificial Sequence: Synthetic peptide
  Seed: KKTGGPIYKR
KNTGGPIYKR

SEQ ID NO: 42650 - protein, 10 aa, Artificial Sequence
  Description of Artificial Sequence: Synthetic peptide
  Seed: KKTGGPIYKR
KNTGGPIYKK

SEQ ID NO: 42651 - protein, 10 aa, Artificial Sequence
  Description of Artificial Sequence: Synthetic peptide
  Seed: KKTGGPIYKR
KCTGGPIYKR

SEQ ID NO: 42652 - protein, 10 aa, Artificial Sequence
  Description of Artificial Sequence: Synthetic peptide
  Seed: KKTGGPIYKR
KQTGGPIYKR

SEQ ID NO: 42653 - protein, 10 aa, Artificial Sequence
  Description of Artificial Sequence: Synthetic peptide
  Seed: KKTGGPIYKR
KQTGGPIYKK

SEQ ID NO: 42654 - protein, 10 aa, Artificial Sequence
  Description of Artificial Sequence: Synthetic peptide
  Seed: KKTGGPIYKR
KETGGPIYKR

SEQ ID NO: 42655 - protein, 10 aa, Artificial Sequence
  Description of Artificial Sequence: Synthetic peptide
  Seed: KKTGGPIYKR
KGTGGPIYKR

SEQ ID NO: 42656 - protein, 10 aa, Artificial Sequence
  Description of Artificial Sequence: Synthetic peptide
  Seed: KKTGGPIYKR
KGTGGPIYKK

SEQ ID NO: 42657 - protein, 10 aa, Artificial Sequence
  Description of Artificial Sequence: Synthetic peptide
  Seed: KKTGGPIYKR
KHTGGPIYKR

SEQ ID NO: 42658 - protein, 10 aa, Artificial Sequence
  Description of Artificial Sequence: Synthetic peptide
  Seed: KKTGGPIYKR
KITGGPIYKR

SEQ ID NO: 42659 - protein, 10 aa, Artificial Sequence
  Description of Artificial Sequence: Synthetic peptide
  Seed: KKTGGPIYKR
KITGGPIYKK

SEQ ID NO: 42660 - protein, 10 aa, Artificial Sequence
  Description of Artificial Sequence: Synthetic peptide
  Seed: KKTGGPIYKR
KLTGGPIYKR

SEQ ID NO: 42661 - protein, 8 aa, Artificial Sequence
  Description of Artificial Sequence: Synthetic peptide
  Seed: KKTGGPIY
KQTGGPIF

SEQ ID NO: 42662 - protein, 8 aa, Artificial Sequence
  Description of Artificial Sequence: Synthetic peptide
  Seed: KKTGGPIY
KQTGGPIM

SEQ ID NO: 42663 - protein, 8 aa, Artificial Sequence
  Description of Artificial Sequence: Synthetic peptide
  Seed: KKTGGPIY
KQTGGPIL

SEQ ID NO: 42664 - protein, 10 aa, Artificial Sequence
  Description of Artificial Sequence: Synthetic peptide
  Seed: KGKFQTAAQR
KVKFQTAAQV

SEQ ID NO: 42665 - protein, 10 aa, Artificial Sequence
  Description of Artificial Sequence: Synthetic peptide
  Seed: KGKFQTAAQR
KYKFQTAAQR

SEQ ID NO: 42666 - protein, 10 aa, Artificial Sequence
  Description of Artificial Sequence: Synthetic peptide
  Seed: KGKFQTAAQR
KYKFQTAAQG

SEQ ID NO: 42667 - protein, 10 aa, Artificial Sequence
  Description of Artificial Sequence: Synthetic peptide
  Seed: KGKFQTAAQR
KYKFQTAAQI

SEQ ID NO: 42668 - protein, 10 aa, Artificial Sequence
  Description of Artificial Sequence: Synthetic peptide
  Seed: KGKFQTAAQR
KYKFQTAAQL

SEQ ID NO: 42669 - protein, 10 aa, Artificial Sequence
  Description of Artificial Sequence: Synthetic peptide
  Seed: KGKFQTAAQR
KYKFQTAAQK

SEQ ID NO: 42670 - protein, 10 aa, Artificial Sequence
  Description of Artificial Sequence: Synthetic peptide
  Seed: KGKFQTAAQR
KYKFQTAAQM

SEQ ID NO: 42671 - protein, 10 aa, Artificial Sequence
  Description of Artificial Sequence: Synthetic peptide
  Seed: KGKFQTAAQR
KYKFQTAAQS

SEQ ID NO: 42672 - protein, 10 aa, Artificial Sequence
  Description of Artificial Sequence: Synthetic peptide
  Seed: KGKFQTAAQR
KYKFQTAAQV

SEQ ID NO: 42673 - protein, 10 aa, Artificial Sequence
  Description of Artificial Sequence: Synthetic peptide
  Seed: KGKFQTAAQR
KVKFQTAAQA

SEQ ID NO: 42674 - protein, 10 aa, Artificial Sequence
  Description of Artificial Sequence: Synthetic peptide
  Seed: KGKFQTAAQR
KVKFQTAAQR

SEQ ID NO: 42675 - protein, 10 aa, Artificial Sequence
  Description of Artificial Sequence: Synthetic peptide
  Seed: KGKFQTAAQR
KVKFQTAAQG

SEQ ID NO: 42676 - protein, 10 aa, Artificial Sequence
  Description of Artificial Sequence: Synthetic peptide
  Seed: KGKFQTAAQR
KVKFQTAAQI

SEQ ID NO: 42677 - protein, 10 aa, Artificial Sequence
  Description of Artificial Sequence: Synthetic peptide
  Seed: KGKFQTAAQR
KVKFQTAAQL

SEQ ID NO: 42678 - protein, 10 aa, Artificial Sequence
  Description of Artificial Sequence: Synthetic peptide
  Seed: KGKFQTAAQR
KVKFQTAAQK

SEQ ID NO: 42679 - protein, 10 aa, Artificial Sequence
  Description of Artificial Sequence: Synthetic peptide
  Seed: KGKFQTAAQR
KVKFQTAAQM

SEQ ID NO: 42680 - protein, 10 aa, Artificial Sequence
  Description of Artificial Sequence: Synthetic peptide
  Seed: KGKFQTAAQR
KVKFQTAAQF

SEQ ID NO: 42681 - protein, 10 aa, Artificial Sequence
  Description of Artificial Sequence: Synthetic peptide
  Seed: KGKFQTAAQR
KVKFQTAAQS

SEQ ID NO: 42682 - protein, 10 aa, Artificial Sequence
  Description of Artificial Sequence: Synthetic peptide
  Seed: KGKFQTAAQR
KVKFQTAAQT

SEQ ID NO: 42683 - protein, 10 aa, Artificial Sequence
  Description of Artificial Sequence: Synthetic peptide
  Seed: KGKFQTAAQR
KVKFQTAAQY

SEQ ID NO: 42684 - protein, 10 aa, Artificial Sequence
  Description of Artificial Sequence: Synthetic peptide
  Seed: KKTGGPIYKR
KLTGGPIYKK

SEQ ID NO: 42685 - protein, 10 aa, Artificial Sequence
  Description of Artificial Sequence: Synthetic peptide
  Seed: KKTGGPIYKR
KMTGGPIYKR

SEQ ID NO: 42686 - protein, 10 aa, Artificial Sequence
  Description of Artificial Sequence: Synthetic peptide
  Seed: KKTGGPIYRR
KYTGGPIYRK

SEQ ID NO: 42687 - protein, 10 aa, Artificial Sequence
  Description of Artificial Sequence: Synthetic peptide
  Seed: KKTGGPIYRR
KLTGGPIYRY

SEQ ID NO: 42688 - protein, 10 aa, Artificial Sequence
  Description of Artificial Sequence: Synthetic peptide
  Seed: KKTGGPIYRR
KGTGGPIYRK

SEQ ID NO: 42689 - protein, 10 aa, Artificial Sequence
  Description of Artificial Sequence: Synthetic peptide
  Seed: KKTGGPIYRR
KHTGGPIYRR

SEQ ID NO: 42690 - protein, 10 aa, Artificial Sequence
  Description of Artificial Sequence: Synthetic peptide
  Seed: KKTGGPIYRR
KHTGGPIYRK

SEQ ID NO: 42691 - protein, 10 aa, Artificial Sequence
  Description of Artificial Sequence: Synthetic peptide
  Seed: KKTGGPIYRR
KITGGPIYRR

SEQ ID NO: 42692 - protein, 10 aa, Artificial Sequence
  Description of Artificial Sequence: Synthetic peptide
  Seed: KKTGGPIYRR
KITGGPIYRH

SEQ ID NO: 42693 - protein, 10 aa, Artificial Sequence
  Description of Artificial Sequence: Synthetic peptide
  Seed: KKTGGPIYRR
KITGGPIYRK

SEQ ID NO: 42694 - protein, 10 aa, Artificial Sequence
  Description of Artificial Sequence: Synthetic peptide
  Seed: KKTGGPIYRR
KLTGGPIYRR

SEQ ID NO: 42695 - protein, 10 aa, Artificial Sequence
  Description of Artificial Sequence: Synthetic peptide
  Seed: KKTGGPIYRR
KLTGGPIYRH

SEQ ID NO: 42696 - protein, 10 aa, Artificial Sequence
  Description of Artificial Sequence: Synthetic peptide
  Seed: KKTGGPIYRR
KLTGGPIYRK

SEQ ID NO: 42697 - protein, 10 aa, Artificial Sequence
  Description of Artificial Sequence: Synthetic peptide
  Seed: KKTGGPIYKR
KMTGGPIYKK

SEQ ID NO: 42698 - protein, 10 aa, Artificial Sequence
  Description of Artificial Sequence: Synthetic peptide
  Seed: KKTGGPIYRR
KMTGGPIYRR

SEQ ID NO: 42699 - protein, 10 aa, Artificial Sequence
  Description of Artificial Sequence: Synthetic peptide
  Seed: KKTGGPIYRR
KMTGGPIYRK

SEQ ID NO: 42700 - protein, 10 aa, Artificial Sequence
  Description of Artificial Sequence: Synthetic peptide
  Seed: KKTGGPIYRR
KMTGGPIYRY

SEQ ID NO: 42701 - protein, 10 aa, Artificial Sequence
  Description of Artificial Sequence: Synthetic peptide
  Seed: KKTGGPIYRR
KFTGGPIYRK

SEQ ID NO: 42702 - protein, 10 aa, Artificial Sequence
  Description of Artificial Sequence: Synthetic peptide
  Seed: KKTGGPIYRR
KPTGGPIYRK

SEQ ID NO: 42703 - protein, 10 aa, Artificial Sequence
  Description of Artificial Sequence: Synthetic peptide
  Seed: KKTGGPIYRR
KSTGGPIYRR

SEQ ID NO: 42704 - protein, 10 aa, Artificial Sequence
  Description of Artificial Sequence: Synthetic peptide
  Seed: KKTGGPIYRR
KSTGGPIYRK

SEQ ID NO: 42705 - protein, 10 aa, Artificial Sequence
  Description of Artificial Sequence: Synthetic peptide
  Seed: KKTGGPIYRR
KTTGGPIYRR

SEQ ID NO: 42706 - protein, 10 aa, Artificial Sequence
  Description of Artificial Sequence: Synthetic peptide
  Seed: KKTGGPIYRR
KTTGGPIYRK

SEQ ID NO: 42707 - protein, 10 aa, Artificial Sequence
  Description of Artificial Sequence: Synthetic peptide
  Seed: KKTGGPIYRR
KGTGGPIYRR

SEQ ID NO: 42708 - protein, 10 aa, Artificial Sequence
  Description of Artificial Sequence: Synthetic peptide
  Seed: KKTGGPIYRR
KETGGPIYRR

SEQ ID NO: 42709 - protein, 10 aa, Artificial Sequence
  Description of Artificial Sequence: Synthetic peptide
  Seed: KKTGGPIYRR
KQTGGPIYRK

SEQ ID NO: 42710 - protein, 10 aa, Artificial Sequence
  Description of Artificial Sequence: Synthetic peptide
  Seed: KKTGGPIYRR
KQTGGPIYRR

SEQ ID NO: 42711 - protein, 10 aa, Artificial Sequence
  Description of Artificial Sequence: Synthetic peptide
  Seed: KKTGGPIYKR
KFTGGPIYKR

SEQ ID NO: 42712 - protein, 10 aa, Artificial Sequence
  Description of Artificial Sequence: Synthetic peptide
  Seed: KKTGGPIYKR
KFTGGPIYKK

SEQ ID NO: 42713 - protein, 10 aa, Artificial Sequence
  Description of Artificial Sequence: Synthetic peptide
  Seed: KKTGGPIYKR
KPTGGPIYKR

SEQ ID NO: 42714 - protein, 10 aa, Artificial Sequence
  Description of Artificial Sequence: Synthetic peptide
  Seed: KKTGGPIYKR
KSTGGPIYKR

SEQ ID NO: 42715 - protein, 10 aa, Artificial Sequence
  Description of Artificial Sequence: Synthetic peptide
  Seed: KKTGGPIYKR
KSTGGPIYKK

SEQ ID NO: 42716 - protein, 10 aa, Artificial Sequence
  Description of Artificial Sequence: Synthetic peptide
  Seed: KKTGGPIYKR
KTTGGPIYKR

SEQ ID NO: 42717 - protein, 10 aa, Artificial Sequence
  Description of Artificial Sequence: Synthetic peptide
  Seed: KKTGGPIYKR
KTTGGPIYKK

SEQ ID NO: 42718 - protein, 10 aa, Artificial Sequence
  Description of Artificial Sequence: Synthetic peptide
  Seed: KKTGGPIYKR
KTTGGPIYKY

SEQ ID NO: 42719 - protein, 10 aa, Artificial Sequence
  Description of Artificial Sequence: Synthetic peptide
  Seed: KKTGGPIYKR
KWTGGPIYKK

SEQ ID NO: 42720 - protein, 10 aa, Artificial Sequence
  Description of Artificial Sequence: Synthetic peptide
  Seed: KKTGGPIYKR
KYTGGPIYKK

SEQ ID NO: 42721 - protein, 10 aa, Artificial Sequence
  Description of Artificial Sequence: Synthetic peptide
  Seed: KKTGGPIYKR
KVTGGPIYKR

SEQ ID NO: 42722 - protein, 10 aa, Artificial Sequence
  Description of Artificial Sequence: Synthetic peptide
  Seed: KKTGGPIYKR
KVTGGPIYKK

SEQ ID NO: 42723 - protein, 10 aa, Artificial Sequence
  Description of Artificial Sequence: Synthetic peptide
  Seed: KKTGGPIYRR
KATGGPIYRR

SEQ ID NO: 42724 - protein, 10 aa, Artificial Sequence
  Description of Artificial Sequence: Synthetic peptide
  Seed: KKTGGPIYRR
KATGGPIYRK

SEQ ID NO: 42725 - protein, 10 aa, Artificial Sequence
  Description of Artificial Sequence: Synthetic peptide
  Seed: KKTGGPIYRR
KNTGGPIYRR

SEQ ID NO: 42726 - protein, 10 aa, Artificial Sequence
  Description of Artificial Sequence: Synthetic peptide
  Seed: KKTGGPIYRR
KNTGGPIYRK

SEQ ID NO: 42727 - protein, 10 aa, Artificial Sequence
  Description of Artificial Sequence: Synthetic peptide
  Seed: KKTGGPIYRR
KDTGGPIYRR

SEQ ID NO: 42728 - protein, 10 aa, Artificial Sequence
  Description of Artificial Sequence: Synthetic peptide
  Seed: KKTGGPIYRR
KCTGGPIYRR

SEQ ID NO: 42729 - protein, 10 aa, Artificial Sequence
  Description of Artificial Sequence: Synthetic peptide
  Seed: KGKFQTAAQR
KYKFQTAAQA

SEQ ID NO: 42730 - protein, 10 aa, Artificial Sequence
  Description of Artificial Sequence: Synthetic peptide
  Seed: KGKFQTAAQR
KWKFQTAAQV

SEQ ID NO: 42731 - protein, 10 aa, Artificial Sequence
  Description of Artificial Sequence: Synthetic peptide
  Seed: KGKFQTAAQR
KWKFQTAAQM

SEQ ID NO: 42732 - protein, 10 aa, Artificial Sequence
  Description of Artificial Sequence: Synthetic peptide
  Seed: KFQTAAQRAM
KYQTAAQRAF

SEQ ID NO: 42733 - protein, 10 aa, Artificial Sequence
  Description of Artificial Sequence: Synthetic peptide
  Seed: KFQTAAQRAM
KTQTAAQRAF

SEQ ID NO: 42734 - protein, 10 aa, Artificial Sequence
  Description of Artificial Sequence: Synthetic peptide
  Seed: KFQTAAQRAM
KTQTAAQRAY

SEQ ID NO: 42735 - protein, 10 aa, Artificial Sequence
  Description of Artificial Sequence: Synthetic peptide
  Seed: KFQTAAQRAM
KWQTAAQRAL

SEQ ID NO: 42736 - protein, 10 aa, Artificial Sequence
  Description of Artificial Sequence: Synthetic peptide
  Seed: KFQTAAQRAM
KWQTAAQRAM

SEQ ID NO: 42737 - protein, 10 aa, Artificial Sequence
  Description of Artificial Sequence: Synthetic peptide
  Seed: KFQTAAQRAM
KWQTAAQRAF

SEQ ID NO: 42738 - protein, 10 aa, Artificial Sequence
  Description of Artificial Sequence: Synthetic peptide
  Seed: KFQTAAQRAM
KWQTAAQRAY

SEQ ID NO: 42739 - protein, 10 aa, Artificial Sequence
  Description of Artificial Sequence: Synthetic peptide
  Seed: KFQTAAQRAM
KYQTAAQRAI

SEQ ID NO: 42740 - protein, 10 aa, Artificial Sequence
  Description of Artificial Sequence: Synthetic peptide
  Seed: KFQTAAQRAM
KYQTAAQRAL

SEQ ID NO: 42741 - protein, 10 aa, Artificial Sequence
  Description of Artificial Sequence: Synthetic peptide
  Seed: KFQTAAQRAM
KYQTAAQRAM

SEQ ID NO: 42742 - protein, 10 aa, Artificial Sequence
  Description of Artificial Sequence: Synthetic peptide
  Seed: KFQTAAQRAM
KYQTAAQRAY

SEQ ID NO: 42743 - protein, 10 aa, Artificial Sequence
  Description of Artificial Sequence: Synthetic peptide
  Seed: KGKFQTAAQR
KWKFQTAAQK

SEQ ID NO: 42744 - protein, 10 aa, Artificial Sequence
  Description of Artificial Sequence: Synthetic peptide
  Seed: KFQTAAQRAM
KYQTAAQRAV

SEQ ID NO: 42745 - protein, 10 aa, Artificial Sequence
  Description of Artificial Sequence: Synthetic peptide
  Seed: KFQTAAQRAM
KVQTAAQRAL

SEQ ID NO: 42746 - protein, 10 aa, Artificial Sequence
  Description of Artificial Sequence: Synthetic peptide
  Seed: KFQTAAQRAM
KVQTAAQRAM

SEQ ID NO: 42747 - protein, 10 aa, Artificial Sequence
  Description of Artificial Sequence: Synthetic peptide
  Seed: KFQTAAQRAM
KVQTAAQRAF

SEQ ID NO: 42748 - protein, 10 aa, Artificial Sequence
  Description of Artificial Sequence: Synthetic peptide
  Seed: KFQTAAQRAM
KVQTAAQRAY

SEQ ID NO: 42749 - protein, 10 aa, Artificial Sequence
  Description of Artificial Sequence: Synthetic peptide
  Seed: KGKFQTAAQR
KAKFQTAAQR

SEQ ID NO: 42750 - protein, 10 aa, Artificial Sequence
  Description of Artificial Sequence: Synthetic peptide
  Seed: KGKFQTAAQR
KAKFQTAAQK

SEQ ID NO: 42751 - protein, 10 aa, Artificial Sequence
  Description of Artificial Sequence: Synthetic peptide
  Seed: KGKFQTAAQR
KNKFQTAAQR

SEQ ID NO: 42752 - protein, 10 aa, Artificial Sequence
  Description of Artificial Sequence: Synthetic peptide
  Seed: KGKFQTAAQR
KCKFQTAAQR

SEQ ID NO: 42753 - protein, 10 aa, Artificial Sequence
  Description of Artificial Sequence: Synthetic peptide
  Seed: KFQTAAQRAM
KTQTAAQRAM

SEQ ID NO: 42754 - protein, 10 aa, Artificial Sequence
  Description of Artificial Sequence: Synthetic peptide
  Seed: KFQTAAQRAM
KTQTAAQRAL

SEQ ID NO: 42755 - protein, 10 aa, Artificial Sequence
  Description of Artificial Sequence: Synthetic peptide
  Seed: KFQTAAQRAM
KSQTAAQRAY

SEQ ID NO: 42756 - protein, 10 aa, Artificial Sequence
  Description of Artificial Sequence: Synthetic peptide
  Seed: KFQTAAQRAM
KSQTAAQRAF

SEQ ID NO: 42757 - protein, 10 aa, Artificial Sequence
  Description of Artificial Sequence: Synthetic peptide
  Seed: KFQTAAQRAM
KLQTAAQRAF

SEQ ID NO: 42758 - protein, 10 aa, Artificial Sequence
  Description of Artificial Sequence: Synthetic peptide
  Seed: KFQTAAQRAM
KLQTAAQRAY

SEQ ID NO: 42759 - protein, 10 aa, Artificial Sequence
  Description of Artificial Sequence: Synthetic peptide
  Seed: KFQTAAQRAM
KKQTAAQRAL

SEQ ID NO: 42760 - protein, 10 aa, Artificial Sequence
  Description of Artificial Sequence: Synthetic peptide
  Seed: KFQTAAQRAM
KKQTAAQRAM

SEQ ID NO: 42761 - protein, 10 aa, Artificial Sequence
  Description of Artificial Sequence: Synthetic peptide
  Seed: KFQTAAQRAM
KKQTAAQRAF

SEQ ID NO: 42762 - protein, 10 aa, Artificial Sequence
  Description of Artificial Sequence: Synthetic peptide
  Seed: KFQTAAQRAM
KKQTAAQRAY

SEQ ID NO: 42763 - protein, 10 aa, Artificial Sequence
  Description of Artificial Sequence: Synthetic peptide
  Seed: KFQTAAQRAM
KMQTAAQRAL

SEQ ID NO: 42764 - protein, 10 aa, Artificial Sequence
  Description of Artificial Sequence: Synthetic peptide
  Seed: KFQTAAQRAM
KMQTAAQRAM

SEQ ID NO: 42765 - protein, 10 aa, Artificial Sequence
  Description of Artificial Sequence: Synthetic peptide
  Seed: KFQTAAQRAM
KMQTAAQRAF

SEQ ID NO: 42766 - protein, 10 aa, Artificial Sequence
  Description of Artificial Sequence: Synthetic peptide
  Seed: KFQTAAQRAM
KMQTAAQRAY

SEQ ID NO: 42767 - protein, 10 aa, Artificial Sequence
  Description of Artificial Sequence: Synthetic peptide
  Seed: KFQTAAQRAM
KFQTAAQRAL

SEQ ID NO: 42768 - protein, 10 aa, Artificial Sequence
  Description of Artificial Sequence: Synthetic peptide
  Seed: KFQTAAQRAM
KFQTAAQRAF

SEQ ID NO: 42769 - protein, 10 aa, Artificial Sequence
  Description of Artificial Sequence: Synthetic peptide
  Seed: KFQTAAQRAM
KFQTAAQRAY

SEQ ID NO: 42770 - protein, 10 aa, Artificial Sequence
  Description of Artificial Sequence: Synthetic peptide
  Seed: KFQTAAQRAM
KPQTAAQRAL

SEQ ID NO: 42771 - protein, 10 aa, Artificial Sequence
  Description of Artificial Sequence: Synthetic peptide
  Seed: KFQTAAQRAM
KPQTAAQRAM

SEQ ID NO: 42772 - protein, 10 aa, Artificial Sequence
  Description of Artificial Sequence: Synthetic peptide
  Seed: KFQTAAQRAM
KPQTAAQRAF

SEQ ID NO: 42773 - protein, 10 aa, Artificial Sequence
  Description of Artificial Sequence: Synthetic peptide
  Seed: KFQTAAQRAM
KPQTAAQRAY

SEQ ID NO: 42774 - protein, 10 aa, Artificial Sequence
  Description of Artificial Sequence: Synthetic peptide
  Seed: KFQTAAQRAM
KSQTAAQRAL

SEQ ID NO: 42775 - protein, 10 aa, Artificial Sequence
  Description of Artificial Sequence: Synthetic peptide
  Seed: KFQTAAQRAM
KSQTAAQRAM

SEQ ID NO: 42776 - protein, 10 aa, Artificial Sequence
  Description of Artificial Sequence: Synthetic peptide
  Seed: KGKFQTAAQR
KQKFQTAAQR

SEQ ID NO: 42777 - protein, 10 aa, Artificial Sequence
  Description of Artificial Sequence: Synthetic peptide
  Seed: KGKFQTAAQR
KQKFQTAAQK

SEQ ID NO: 42778 - protein, 10 aa, Artificial Sequence
  Description of Artificial Sequence: Synthetic peptide
  Seed: KGKFQTAAQR
KSKFQTAAQV

SEQ ID NO: 42779 - protein, 10 aa, Artificial Sequence
  Description of Artificial Sequence: Synthetic peptide
  Seed: KGKFQTAAQR
KTKFQTAAQR

SEQ ID NO: 42780 - protein, 10 aa, Artificial Sequence
  Description of Artificial Sequence: Synthetic peptide
  Seed: KGKFQTAAQR
KTKFQTAAQN

SEQ ID NO: 42781 - protein, 10 aa, Artificial Sequence
  Description of Artificial Sequence: Synthetic peptide
  Seed: KGKFQTAAQR
KTKFQTAAQC

SEQ ID NO: 42782 - protein, 10 aa, Artificial Sequence
  Description of Artificial Sequence: Synthetic peptide
  Seed: KGKFQTAAQR
KTKFQTAAQQ

SEQ ID NO: 42783 - protein, 10 aa, Artificial Sequence
  Description of Artificial Sequence: Synthetic peptide
  Seed: KGKFQTAAQR
KTKFQTAAQG

SEQ ID NO: 42784 - protein, 10 aa, Artificial Sequence
  Description of Artificial Sequence: Synthetic peptide
  Seed: KGKFQTAAQR
KTKFQTAAQH

SEQ ID NO: 42785 - protein, 10 aa, Artificial Sequence
  Description of Artificial Sequence: Synthetic peptide
  Seed: KGKFQTAAQR
KTKFQTAAQI

SEQ ID NO: 42786 - protein, 10 aa, Artificial Sequence
  Description of Artificial Sequence: Synthetic peptide
  Seed: KGKFQTAAQR
KTKFQTAAQL

SEQ ID NO: 42787 - protein, 10 aa, Artificial Sequence
  Description of Artificial Sequence: Synthetic peptide
  Seed: KGKFQTAAQR
KTKFQTAAQK

SEQ ID NO: 42788 - protein, 10 aa, Artificial Sequence
  Description of Artificial Sequence: Synthetic peptide
  Seed: KGKFQTAAQR
KTKFQTAAQM

SEQ ID NO: 42789 - protein, 10 aa, Artificial Sequence
  Description of Artificial Sequence: Synthetic peptide
  Seed: KGKFQTAAQR
KTKFQTAAQF

SEQ ID NO: 42790 - protein, 10 aa, Artificial Sequence
  Description of Artificial Sequence: Synthetic peptide
  Seed: KGKFQTAAQR
KTKFQTAAQP

SEQ ID NO: 42791 - protein, 10 aa, Artificial Sequence
  Description of Artificial Sequence: Synthetic peptide
  Seed: KGKFQTAAQR
KTKFQTAAQS

SEQ ID NO: 42792 - protein, 10 aa, Artificial Sequence
  Description of Artificial Sequence: Synthetic peptide
  Seed: KGKFQTAAQR
KTKFQTAAQT

SEQ ID NO: 42793 - protein, 10 aa, Artificial Sequence
  Description of Artificial Sequence: Synthetic peptide
  Seed: KGKFQTAAQR
KTKFQTAAQY

SEQ ID NO: 42794 - protein, 10 aa, Artificial Sequence
  Description of Artificial Sequence: Synthetic peptide
  Seed: KGKFQTAAQR
KTKFQTAAQV

SEQ ID NO: 42795 - protein, 10 aa, Artificial Sequence
  Description of Artificial Sequence: Synthetic peptide
  Seed: KGKFQTAAQR
KWKFQTAAQA

SEQ ID NO: 42796 - protein, 10 aa, Artificial Sequence
  Description of Artificial Sequence: Synthetic peptide
  Seed: KGKFQTAAQR
KWKFQTAAQI

SEQ ID NO: 42797 - protein, 10 aa, Artificial Sequence
  Description of Artificial Sequence: Synthetic peptide
  Seed: KGKFQTAAQR
KWKFQTAAQL

SEQ ID NO: 42798 - protein, 10 aa, Artificial Sequence
  Description of Artificial Sequence: Synthetic peptide
  Seed: KGKFQTAAQR
KTKFQTAAQA

SEQ ID NO: 42799 - protein, 10 aa, Artificial Sequence
  Description of Artificial Sequence: Synthetic peptide
  Seed: KGKFQTAAQR
KSKFQTAAQY

SEQ ID NO: 42800 - protein, 10 aa, Artificial Sequence
  Description of Artificial Sequence: Synthetic peptide
  Seed: KGKFQTAAQR
KIKFQTAAQR

SEQ ID NO: 42801 - protein, 10 aa, Artificial Sequence
  Description of Artificial Sequence: Synthetic peptide
  Seed: KGKFQTAAQR
KSKFQTAAQT

SEQ ID NO: 42802 - protein, 10 aa, Artificial Sequence
  Description of Artificial Sequence: Synthetic peptide
  Seed: KGKFQTAAQR
KIKFQTAAQK

SEQ ID NO: 42803 - protein, 10 aa, Artificial Sequence
  Description of Artificial Sequence: Synthetic peptide
  Seed: KGKFQTAAQR
KLKFQTAAQR

SEQ ID NO: 42804 - protein, 10 aa, Artificial Sequence
  Description of Artificial Sequence: Synthetic peptide
  Seed: KGKFQTAAQR
KLKFQTAAQK

SEQ ID NO: 42805 - protein, 10 aa, Artificial Sequence
  Description of Artificial Sequence: Synthetic peptide
  Seed: KGKFQTAAQR
KMKFQTAAQR

SEQ ID NO: 42806 - protein, 10 aa, Artificial Sequence
  Description of Artificial Sequence: Synthetic peptide
  Seed: KGKFQTAAQR
KMKFQTAAQK

SEQ ID NO: 42807 - protein, 10 aa, Artificial Sequence
  Description of Artificial Sequence: Synthetic peptide
  Seed: KGKFQTAAQR
KFKFQTAAQR

SEQ ID NO: 42808 - protein, 10 aa, Artificial Sequence
  Description of Artificial Sequence: Synthetic peptide
  Seed: KGKFQTAAQR
KFKFQTAAQK

SEQ ID NO: 42809 - protein, 10 aa, Artificial Sequence
  Description of Artificial Sequence: Synthetic peptide
  Seed: KGKFQTAAQR
KFKFQTAAQV

SEQ ID NO: 42810 - protein, 10 aa, Artificial Sequence
  Description of Artificial Sequence: Synthetic peptide
  Seed: KGKFQTAAQR
KSKFQTAAQA

SEQ ID NO: 42811 - protein, 10 aa, Artificial Sequence
  Description of Artificial Sequence: Synthetic peptide
  Seed: KGKFQTAAQR
KSKFQTAAQR

SEQ ID NO: 42812 - protein, 10 aa, Artificial Sequence
  Description of Artificial Sequence: Synthetic peptide
  Seed: KGKFQTAAQR
KSKFQTAAQC

SEQ ID NO: 42813 - protein, 10 aa, Artificial Sequence
  Description of Artificial Sequence: Synthetic peptide
  Seed: KGKFQTAAQR
KSKFQTAAQG

SEQ ID NO: 42814 - protein, 10 aa, Artificial Sequence
  Description of Artificial Sequence: Synthetic peptide
  Seed: KGKFQTAAQR
KSKFQTAAQI

SEQ ID NO: 42815 - protein, 10 aa, Artificial Sequence
  Description of Artificial Sequence: Synthetic peptide
  Seed: KGKFQTAAQR
KSKFQTAAQL

SEQ ID NO: 42816 - protein, 10 aa, Artificial Sequence
  Description of Artificial Sequence: Synthetic peptide
  Seed: KGKFQTAAQR
KSKFQTAAQK

SEQ ID NO: 42817 - protein, 10 aa, Artificial Sequence
  Description of Artificial Sequence: Synthetic peptide
  Seed: KGKFQTAAQR
KSKFQTAAQM

SEQ ID NO: 42818 - protein, 10 aa, Artificial Sequence
  Description of Artificial Sequence: Synthetic peptide
  Seed: KGKFQTAAQR
KSKFQTAAQF

SEQ ID NO: 42819 - protein, 10 aa, Artificial Sequence
  Description of Artificial Sequence: Synthetic peptide
  Seed: KGKFQTAAQR
KSKFQTAAQP

SEQ ID NO: 42820 - protein, 10 aa, Artificial Sequence
  Description of Artificial Sequence: Synthetic peptide
  Seed: KGKFQTAAQR
KSKFQTAAQS

SEQ ID NO: 42821 - protein, 10 aa, Artificial Sequence
  Description of Artificial Sequence: Synthetic peptide
  Seed: KKTGGPIYRR
KWTGGPIYRK

SEQ ID NO: 42822 - protein, 10 aa, Artificial Sequence
  Description of Artificial Sequence: Synthetic peptide
  Seed: KKTGGPIYRR
KVTGGPIYRR

SEQ ID NO: 42823 - protein, 10 aa, Artificial Sequence
  Description of Artificial Sequence: Synthetic peptide
  Seed: KLLQNSQVYS
KLLQNSQVYP

SEQ ID NO: 42824 - protein, 9 aa, Artificial Sequence
  Description of Artificial Sequence: Synthetic peptide
  Seed: KLLQNSQVY
KVLQNSQVM

SEQ ID NO: 42825 - protein, 9 aa, Artificial Sequence
  Description of Artificial Sequence: Synthetic peptide
  Seed: KLLQNSQVY
KYLQNSQVI

SEQ ID NO: 42826 - protein, 9 aa, Artificial Sequence
  Description of Artificial Sequence: Synthetic peptide
  Seed: KLLQNSQVY
KYLQNSQVL

SEQ ID NO: 42827 - protein, 9 aa, Artificial Sequence
  Description of Artificial Sequence: Synthetic peptide
  Seed: KLLQNSQVY
KYLQNSQVM

SEQ ID NO: 42828 - protein, 9 aa, Artificial Sequence
  Description of Artificial Sequence: Synthetic peptide
  Seed: KLLQNSQVY
KYLQNSQVF

SEQ ID NO: 42829 - protein, 9 aa, Artificial Sequence
  Description of Artificial Sequence: Synthetic peptide
  Seed: KLLQNSQVY
KYLQNSQVW

SEQ ID NO: 42830 - protein, 9 aa, Artificial Sequence
  Description of Artificial Sequence: Synthetic peptide
  Seed: KLLQNSQVY
KYLQNSQVY

SEQ ID NO: 42831 - protein, 9 aa, Artificial Sequence
  Description of Artificial Sequence: Synthetic peptide
  Seed: KLLQNSQVY
KYLQNSQVV

SEQ ID NO: 42832 - protein, 9 aa, Artificial Sequence
  Description of Artificial Sequence: Synthetic peptide
  Seed: KLLQNSQVY
KVLQNSQVI

SEQ ID NO: 42833 - protein, 9 aa, Artificial Sequence
  Description of Artificial Sequence: Synthetic peptide
  Seed: KLLQNSQVY
KVLQNSQVL

SEQ ID NO: 42834 - protein, 9 aa, Artificial Sequence
  Description of Artificial Sequence: Synthetic peptide
  Seed: KLLQNSQVY
KVLQNSQVF

SEQ ID NO: 42835 - protein, 10 aa, Artificial Sequence
  Description of Artificial Sequence: Synthetic peptide
  Seed: KLLQNSQVYS
KDLQNSQVYY

SEQ ID NO: 42836 - protein, 9 aa, Artificial Sequence
  Description of Artificial Sequence: Synthetic peptide
  Seed: KLLQNSQVY
KVLQNSQVW

SEQ ID NO: 42837 - protein, 9 aa, Artificial Sequence
  Description of Artificial Sequence: Synthetic peptide
  Seed: KLLQNSQVY
KVLQNSQVY

SEQ ID NO: 42838 - protein, 10 aa, Artificial Sequence
  Description of Artificial Sequence: Synthetic peptide
  Seed: KLLQNSQVYS
KALQNSQVYM

SEQ ID NO: 42839 - protein, 10 aa, Artificial Sequence
  Description of Artificial Sequence: Synthetic peptide
  Seed: KLLQNSQVYS
KALQNSQVYF

SEQ ID NO: 42840 - protein, 10 aa, Artificial Sequence
  Description of Artificial Sequence: Synthetic peptide
  Seed: KLLQNSQVYS
KALQNSQVYY

SEQ ID NO: 42841 - protein, 10 aa, Artificial Sequence
  Description of Artificial Sequence: Synthetic peptide
  Seed: KLLQNSQVYS
KRLQNSQVYF

SEQ ID NO: 42842 - protein, 10 aa, Artificial Sequence
  Description of Artificial Sequence: Synthetic peptide
  Seed: KLLQNSQVYS
KRLQNSQVYY

SEQ ID NO: 42843 - protein, 10 aa, Artificial Sequence
  Description of Artificial Sequence: Synthetic peptide
  Seed: KLLQNSQVYS
KNLQNSQVYF

SEQ ID NO: 42844 - protein, 10 aa, Artificial Sequence
  Description of Artificial Sequence: Synthetic peptide
  Seed: KLLQNSQVYS
KNLQNSQVYY

SEQ ID NO: 42845 - protein, 9 aa, Artificial Sequence
  Description of Artificial Sequence: Synthetic peptide
  Seed: KLLQNSQVY
KYLQNSQVC

SEQ ID NO: 42846 - protein, 9 aa, Artificial Sequence
  Description of Artificial Sequence: Synthetic peptide
  Seed: KLLQNSQVY
KWLQNSQVV

SEQ ID NO: 42847 - protein, 9 aa, Artificial Sequence
  Description of Artificial Sequence: Synthetic peptide
  Seed: KLLQNSQVY
KWLQNSQVY

SEQ ID NO: 42848 - protein, 9 aa, Artificial Sequence
  Description of Artificial Sequence: Synthetic peptide
  Seed: KLLQNSQVY
KWLQNSQVW

SEQ ID NO: 42849 - protein, 9 aa, Artificial Sequence
  Description of Artificial Sequence: Synthetic peptide
  Seed: KLLQNSQVY
KPLQNSQVY

SEQ ID NO: 42850 - protein, 9 aa, Artificial Sequence
  Description of Artificial Sequence: Synthetic peptide
  Seed: KLLQNSQVY
KSLQNSQVI

SEQ ID NO: 42851 - protein, 9 aa, Artificial Sequence
  Description of Artificial Sequence: Synthetic peptide
  Seed: KLLQNSQVY
KSLQNSQVL

SEQ ID NO: 42852 - protein, 9 aa, Artificial Sequence
  Description of Artificial Sequence: Synthetic peptide
  Seed: KLLQNSQVY
KSLQNSQVM

SEQ ID NO: 42853 - protein, 9 aa, Artificial Sequence
  Description of Artificial Sequence: Synthetic peptide
  Seed: KLLQNSQVY
KSLQNSQVF

SEQ ID NO: 42854 - protein, 9 aa, Artificial Sequence
  Description of Artificial Sequence: Synthetic peptide
  Seed: KLLQNSQVY
KSLQNSQVW

SEQ ID NO: 42855 - protein, 9 aa, Artificial Sequence
  Description of Artificial Sequence: Synthetic peptide
  Seed: KLLQNSQVY
KSLQNSQVY

SEQ ID NO: 42856 - protein, 9 aa, Artificial Sequence
  Description of Artificial Sequence: Synthetic peptide
  Seed: KLLQNSQVY
KSLQNSQVV

SEQ ID NO: 42857 - protein, 9 aa, Artificial Sequence
  Description of Artificial Sequence: Synthetic peptide
  Seed: KLLQNSQVY
KTLQNSQVI

SEQ ID NO: 42858 - protein, 9 aa, Artificial Sequence
  Description of Artificial Sequence: Synthetic peptide
  Seed: KLLQNSQVY
KTLQNSQVL

SEQ ID NO: 42859 - protein, 9 aa, Artificial Sequence
  Description of Artificial Sequence: Synthetic peptide
  Seed: KLLQNSQVY
KTLQNSQVM

SEQ ID NO: 42860 - protein, 9 aa, Artificial Sequence
  Description of Artificial Sequence: Synthetic peptide
  Seed: KLLQNSQVY
KTLQNSQVF

SEQ ID NO: 42861 - protein, 9 aa, Artificial Sequence
  Description of Artificial Sequence: Synthetic peptide
  Seed: KLLQNSQVY
KTLQNSQVW

SEQ ID NO: 42862 - protein, 9 aa, Artificial Sequence
  Description of Artificial Sequence: Synthetic peptide
  Seed: KLLQNSQVY
KTLQNSQVY

SEQ ID NO: 42863 - protein, 9 aa, Artificial Sequence
  Description of Artificial Sequence: Synthetic peptide
  Seed: KLLQNSQVY
KTLQNSQVV

SEQ ID NO: 42864 - protein, 9 aa, Artificial Sequence
  Description of Artificial Sequence: Synthetic peptide
  Seed: KLLQNSQVY
KWLQNSQVI

SEQ ID NO: 42865 - protein, 9 aa, Artificial Sequence
  Description of Artificial Sequence: Synthetic peptide
  Seed: KLLQNSQVY
KWLQNSQVL

SEQ ID NO: 42866 - protein, 9 aa, Artificial Sequence
  Description of Artificial Sequence: Synthetic peptide
  Seed: KLLQNSQVY
KWLQNSQVM

SEQ ID NO: 42867 - protein, 9 aa, Artificial Sequence
  Description of Artificial Sequence: Synthetic peptide
  Seed: KLLQNSQVY
KWLQNSQVF

SEQ ID NO: 42868 - protein, 10 aa, Artificial Sequence
  Description of Artificial Sequence: Synthetic peptide
  Seed: KLLQNSQVYS
KDLQNSQVYF

SEQ ID NO: 42869 - protein, 10 aa, Artificial Sequence
  Description of Artificial Sequence: Synthetic peptide
  Seed: KLLQNSQVYS
KCLQNSQVYF

SEQ ID NO: 42870 - protein, 10 aa, Artificial Sequence
  Description of Artificial Sequence: Synthetic peptide
  Seed: KKTGGPIYRR
KVTGGPIYRK

SEQ ID NO: 42871 - protein, 10 aa, Artificial Sequence
  Description of Artificial Sequence: Synthetic peptide
  Seed: KLLQNSQVYS
KLLQNSQVYD

SEQ ID NO: 42872 - protein, 10 aa, Artificial Sequence
  Description of Artificial Sequence: Synthetic peptide
  Seed: KLLQNSQVYS
KGLQNSQVYY

SEQ ID NO: 42873 - protein, 10 aa, Artificial Sequence
  Description of Artificial Sequence: Synthetic peptide
  Seed: KLLQNSQVYS
KHLQNSQVYF

SEQ ID NO: 42874 - protein, 10 aa, Artificial Sequence
  Description of Artificial Sequence: Synthetic peptide
  Seed: KLLQNSQVYS
KHLQNSQVYY

SEQ ID NO: 42875 - protein, 10 aa, Artificial Sequence
  Description of Artificial Sequence: Synthetic peptide
  Seed: KLLQNSQVYS
KILQNSQVYM

SEQ ID NO: 42876 - protein, 10 aa, Artificial Sequence
  Description of Artificial Sequence: Synthetic peptide
  Seed: KLLQNSQVYS
KILQNSQVYF

SEQ ID NO: 42877 - protein, 10 aa, Artificial Sequence
  Description of Artificial Sequence: Synthetic peptide
  Seed: KLLQNSQVYS
KILQNSQVYY

SEQ ID NO: 42878 - protein, 10 aa, Artificial Sequence
  Description of Artificial Sequence: Synthetic peptide
  Seed: KLLQNSQVYS
KLLQNSQVYA

SEQ ID NO: 42879 - protein, 10 aa, Artificial Sequence
  Description of Artificial Sequence: Synthetic peptide
  Seed: KLLQNSQVYS
KLLQNSQVYR

SEQ ID NO: 42880 - protein, 10 aa, Artificial Sequence
  Description of Artificial Sequence: Synthetic peptide
  Seed: KLLQNSQVYS
KLLQNSQVYN

SEQ ID NO: 42881 - protein, 10 aa, Artificial Sequence
  Description of Artificial Sequence: Synthetic peptide
  Seed: KLLQNSQVYS
KLLQNSQVYC

SEQ ID NO: 42882 - protein, 10 aa, Artificial Sequence
  Description of Artificial Sequence: Synthetic peptide
  Seed: KLLQNSQVYS
KCLQNSQVYY

SEQ ID NO: 42883 - protein, 10 aa, Artificial Sequence
  Description of Artificial Sequence: Synthetic peptide
  Seed: KLLQNSQVYS
KLLQNSQVYQ

SEQ ID NO: 42884 - protein, 10 aa, Artificial Sequence
  Description of Artificial Sequence: Synthetic peptide
  Seed: KLLQNSQVYS
KLLQNSQVYE

SEQ ID NO: 42885 - protein, 10 aa, Artificial Sequence
  Description of Artificial Sequence: Synthetic peptide
  Seed: KLLQNSQVYS
KLLQNSQVYG

SEQ ID NO: 42886 - protein, 10 aa, Artificial Sequence
  Description of Artificial Sequence: Synthetic peptide
  Seed: KLLQNSQVYS
KLLQNSQVYH

SEQ ID NO: 42887 - protein, 10 aa, Artificial Sequence
  Description of Artificial Sequence: Synthetic peptide
  Seed: KLLQNSQVYS
KLLQNSQVYI

SEQ ID NO: 42888 - protein, 10 aa, Artificial Sequence
  Description of Artificial Sequence: Synthetic peptide
  Seed: KLLQNSQVYS
KLLQNSQVYL

SEQ ID NO: 42889 - protein, 10 aa, Artificial Sequence
  Description of Artificial Sequence: Synthetic peptide
  Seed: KLLQNSQVYS
KLLQNSQVYK

SEQ ID NO: 42890 - protein, 10 aa, Artificial Sequence
  Description of Artificial Sequence: Synthetic peptide
  Seed: KLLQNSQVYS
KLLQNSQVYM

SEQ ID NO: 42891 - protein, 10 aa, Artificial Sequence
  Description of Artificial Sequence: Synthetic peptide
  Seed: KLLQNSQVYS
KLLQNSQVYF

SEQ ID NO: 42892 - protein, 10 aa, Artificial Sequence
  Description of Artificial Sequence: Synthetic peptide
  Seed: KLLQNSQVYS
KGLQNSQVYF

SEQ ID NO: 42893 - protein, 10 aa, Artificial Sequence
  Description of Artificial Sequence: Synthetic peptide
  Seed: KLLQNSQVYS
KELQNSQVYY

SEQ ID NO: 42894 - protein, 10 aa, Artificial Sequence
  Description of Artificial Sequence: Synthetic peptide
  Seed: KLLQNSQVYS
KELQNSQVYF

SEQ ID NO: 42895 - protein, 10 aa, Artificial Sequence
  Description of Artificial Sequence: Synthetic peptide
  Seed: KLLQNSQVYS
KQLQNSQVYV

SEQ ID NO: 42896 - protein, 10 aa, Artificial Sequence
  Description of Artificial Sequence: Synthetic peptide
  Seed: KLLQNSQVYS
KQLQNSQVYA

SEQ ID NO: 42897 - protein, 10 aa, Artificial Sequence
  Description of Artificial Sequence: Synthetic peptide
  Seed: KLLQNSQVYS
KQLQNSQVYR

SEQ ID NO: 42898 - protein, 10 aa, Artificial Sequence
  Description of Artificial Sequence: Synthetic peptide
  Seed: KLLQNSQVYS
KQLQNSQVYN

SEQ ID NO: 42899 - protein, 10 aa, Artificial Sequence
  Description of Artificial Sequence: Synthetic peptide
  Seed: KLLQNSQVYS
KQLQNSQVYD

SEQ ID NO: 42900 - protein, 10 aa, Artificial Sequence
  Description of Artificial Sequence: Synthetic peptide
  Seed: KLLQNSQVYS
KQLQNSQVYC

SEQ ID NO: 42901 - protein, 10 aa, Artificial Sequence
  Description of Artificial Sequence: Synthetic peptide
  Seed: KLLQNSQVYS
KQLQNSQVYQ

SEQ ID NO: 42902 - protein, 10 aa, Artificial Sequence
  Description of Artificial Sequence: Synthetic peptide
  Seed: KLLQNSQVYS
KQLQNSQVYE

SEQ ID NO: 42903 - protein, 10 aa, Artificial Sequence
  Description of Artificial Sequence: Synthetic peptide
  Seed: KLLQNSQVYS
KQLQNSQVYG

SEQ ID NO: 42904 - protein, 10 aa, Artificial Sequence
  Description of Artificial Sequence: Synthetic peptide
  Seed: KLLQNSQVYS
KQLQNSQVYH

SEQ ID NO: 42905 - protein, 10 aa, Artificial Sequence
  Description of Artificial Sequence: Synthetic peptide
  Seed: KLLQNSQVYS
KQLQNSQVYI

SEQ ID NO: 42906 - protein, 10 aa, Artificial Sequence
  Description of Artificial Sequence: Synthetic peptide
  Seed: KLLQNSQVYS
KQLQNSQVYL

SEQ ID NO: 42907 - protein, 10 aa, Artificial Sequence
  Description of Artificial Sequence: Synthetic peptide
  Seed: KLLQNSQVYS
KQLQNSQVYK

SEQ ID NO: 42908 - protein, 10 aa, Artificial Sequence
  Description of Artificial Sequence: Synthetic peptide
  Seed: KLLQNSQVYS
KQLQNSQVYM

SEQ ID NO: 42909 - protein, 10 aa, Artificial Sequence
  Description of Artificial Sequence: Synthetic peptide
  Seed: KLLQNSQVYS
KQLQNSQVYF

SEQ ID NO: 42910 - protein, 10 aa, Artificial Sequence
  Description of Artificial Sequence: Synthetic peptide
  Seed: KLLQNSQVYS
KQLQNSQVYP

SEQ ID NO: 42911 - protein, 10 aa, Artificial Sequence
  Description of Artificial Sequence: Synthetic peptide
  Seed: KLLQNSQVYS
KQLQNSQVYS

SEQ ID NO: 42912 - protein, 10 aa, Artificial Sequence
  Description of Artificial Sequence: Synthetic peptide
  Seed: KLLQNSQVYS
KQLQNSQVYT

SEQ ID NO: 42913 - protein, 10 aa, Artificial Sequence
  Description of Artificial Sequence: Synthetic peptide
  Seed: KLLQNSQVYS
KQLQNSQVYW

SEQ ID NO: 42914 - protein, 10 aa, Artificial Sequence
  Description of Artificial Sequence: Synthetic peptide
  Seed: KLLQNSQVYS
KQLQNSQVYY

SEQ ID NO: 42915 - protein, 9 aa, Artificial Sequence
  Description of Artificial Sequence: Synthetic peptide
  Seed: KLLQNSQVY
KPLQNSQVF

SEQ ID NO: 42916 - protein, 9 aa, Artificial Sequence
  Description of Artificial Sequence: Synthetic peptide
  Seed: KLLQNSQVY
KFLQNSQVV

SEQ ID NO: 42917 - protein, 9 aa, Artificial Sequence
  Description of Artificial Sequence: Synthetic peptide
  Seed: KLLQNSQVY
KFLQNSQVY

SEQ ID NO: 42918 - protein, 9 aa, Artificial Sequence
  Description of Artificial Sequence: Synthetic peptide
  Seed: KLLQNSQVY
KQLQNSQVW

SEQ ID NO: 42919 - protein, 9 aa, Artificial Sequence
  Description of Artificial Sequence: Synthetic peptide
  Seed: KLLQNSQVY
KQLQNSQVC

SEQ ID NO: 42920 - protein, 9 aa, Artificial Sequence
  Description of Artificial Sequence: Synthetic peptide
  Seed: KLLQNSQVY
KQLQNSQVG

SEQ ID NO: 42921 - protein, 9 aa, Artificial Sequence
  Description of Artificial Sequence: Synthetic peptide
  Seed: KLLQNSQVY
KQLQNSQVH

SEQ ID NO: 42922 - protein, 9 aa, Artificial Sequence
  Description of Artificial Sequence: Synthetic peptide
  Seed: KLLQNSQVY
KQLQNSQVI

SEQ ID NO: 42923 - protein, 9 aa, Artificial Sequence
  Description of Artificial Sequence: Synthetic peptide
  Seed: KLLQNSQVY
KQLQNSQVL

SEQ ID NO: 42924 - protein, 9 aa, Artificial Sequence
  Description of Artificial Sequence: Synthetic peptide
  Seed: KLLQNSQVY
KQLQNSQVM

SEQ ID NO: 42925 - protein, 9 aa, Artificial Sequence
  Description of Artificial Sequence: Synthetic peptide
  Seed: KLLQNSQVY
KQLQNSQVF

SEQ ID NO: 42926 - protein, 9 aa, Artificial Sequence
  Description of Artificial Sequence: Synthetic peptide
  Seed: KLLQNSQVY
KQLQNSQVS

SEQ ID NO: 42927 - protein, 9 aa, Artificial Sequence
  Description of Artificial Sequence: Synthetic peptide
  Seed: KLLQNSQVY
KQLQNSQVT

SEQ ID NO: 42928 - protein, 9 aa, Artificial Sequence
  Description of Artificial Sequence: Synthetic peptide
  Seed: KLLQNSQVY
KQLQNSQVY

SEQ ID NO: 42929 - protein, 9 aa, Artificial Sequence
  Description of Artificial Sequence: Synthetic peptide
  Seed: KLLQNSQVY
KFLQNSQVW

SEQ ID NO: 42930 - protein, 9 aa, Artificial Sequence
  Description of Artificial Sequence: Synthetic peptide
  Seed: KLLQNSQVY
KQLQNSQVV

SEQ ID NO: 42931 - protein, 9 aa, Artificial Sequence
  Description of Artificial Sequence: Synthetic peptide
  Seed: KLLQNSQVY
KELQNSQVI

SEQ ID NO: 42932 - protein, 9 aa, Artificial Sequence
  Description of Artificial Sequence: Synthetic peptide
  Seed: KLLQNSQVY
KELQNSQVL

SEQ ID NO: 42933 - protein, 9 aa, Artificial Sequence
  Description of Artificial Sequence: Synthetic peptide
  Seed: KLLQNSQVY
KELQNSQVM

SEQ ID NO: 42934 - protein, 9 aa, Artificial Sequence
  Description of Artificial Sequence: Synthetic peptide
  Seed: KLLQNSQVY
KELQNSQVF

SEQ ID NO: 42935 - protein, 9 aa, Artificial Sequence
  Description of Artificial Sequence: Synthetic peptide
  Seed: KLLQNSQVY
KELQNSQVW

SEQ ID NO: 42936 - protein, 9 aa, Artificial Sequence
  Description of Artificial Sequence: Synthetic peptide
  Seed: KLLQNSQVY
KELQNSQVY

SEQ ID NO: 42937 - protein, 9 aa, Artificial Sequence
  Description of Artificial Sequence: Synthetic peptide
  Seed: KLLQNSQVY
KGLQNSQVM

SEQ ID NO: 42938 - protein, 9 aa, Artificial Sequence
  Description of Artificial Sequence: Synthetic peptide
  Seed: KLLQNSQVY
KGLQNSQVF

SEQ ID NO: 42939 - protein, 9 aa, Artificial Sequence
  Description of Artificial Sequence: Synthetic peptide
  Seed: KLLQNSQVY
KQLQNSQVN

SEQ ID NO: 42940 - protein, 9 aa, Artificial Sequence
  Description of Artificial Sequence: Synthetic peptide
  Seed: KLLQNSQVY
KQLQNSQVA

SEQ ID NO: 42941 - protein, 9 aa, Artificial Sequence
  Description of Artificial Sequence: Synthetic peptide
  Seed: KLLQNSQVY
KCLQNSQVY

SEQ ID NO: 42942 - protein, 9 aa, Artificial Sequence
  Description of Artificial Sequence: Synthetic peptide
  Seed: KLLQNSQVY
KCLQNSQVW

SEQ ID NO: 42943 - protein, 9 aa, Artificial Sequence
  Description of Artificial Sequence: Synthetic peptide
  Seed: KLLQNSQVY
KALQNSQVH

SEQ ID NO: 42944 - protein, 9 aa, Artificial Sequence
  Description of Artificial Sequence: Synthetic peptide
  Seed: KLLQNSQVY
KALQNSQVI

SEQ ID NO: 42945 - protein, 9 aa, Artificial Sequence
  Description of Artificial Sequence: Synthetic peptide
  Seed: KLLQNSQVY
KALQNSQVL

SEQ ID NO: 42946 - protein, 9 aa, Artificial Sequence
  Description of Artificial Sequence: Synthetic peptide
  Seed: KLLQNSQVY
KALQNSQVM

SEQ ID NO: 42947 - protein, 9 aa, Artificial Sequence
  Description of Artificial Sequence: Synthetic peptide
  Seed: KLLQNSQVY
KALQNSQVF

SEQ ID NO: 42948 - protein, 9 aa, Artificial Sequence
  Description of Artificial Sequence: Synthetic peptide
  Seed: KLLQNSQVY
KALQNSQVW

SEQ ID NO: 42949 - protein, 9 aa, Artificial Sequence
  Description of Artificial Sequence: Synthetic peptide
  Seed: KLLQNSQVY
KALQNSQVY

SEQ ID NO: 42950 - protein, 9 aa, Artificial Sequence
  Description of Artificial Sequence: Synthetic peptide
  Seed: KLLQNSQVY
KALQNSQVV

SEQ ID NO: 42951 - protein, 9 aa, Artificial Sequence
  Description of Artificial Sequence: Synthetic peptide
  Seed: KLLQNSQVY
KRLQNSQVI

SEQ ID NO: 42952 - protein, 9 aa, Artificial Sequence
  Description of Artificial Sequence: Synthetic peptide
  Seed: KLLQNSQVY
KRLQNSQVL

SEQ ID NO: 42953 - protein, 9 aa, Artificial Sequence
  Description of Artificial Sequence: Synthetic peptide
  Seed: KLLQNSQVY
KRLQNSQVM

SEQ ID NO: 42954 - protein, 9 aa, Artificial Sequence
  Description of Artificial Sequence: Synthetic peptide
  Seed: KLLQNSQVY
KRLQNSQVF

SEQ ID NO: 42955 - protein, 9 aa, Artificial Sequence
  Description of Artificial Sequence: Synthetic peptide
  Seed: KLLQNSQVY
KRLQNSQVW

SEQ ID NO: 42956 - protein, 9 aa, Artificial Sequence
  Description of Artificial Sequence: Synthetic peptide
  Seed: KLLQNSQVY
KRLQNSQVY

SEQ ID NO: 42957 - protein, 9 aa, Artificial Sequence
  Description of Artificial Sequence: Synthetic peptide
  Seed: KLLQNSQVY
KNLQNSQVL

SEQ ID NO: 42958 - protein, 9 aa, Artificial Sequence
  Description of Artificial Sequence: Synthetic peptide
  Seed: KLLQNSQVY
KNLQNSQVM

SEQ ID NO: 42959 - protein, 9 aa, Artificial Sequence
  Description of Artificial Sequence: Synthetic peptide
  Seed: KLLQNSQVY
KNLQNSQVF

SEQ ID NO: 42960 - protein, 9 aa, Artificial Sequence
  Description of Artificial Sequence: Synthetic peptide
  Seed: KLLQNSQVY
KNLQNSQVY

SEQ ID NO: 42961 - protein, 9 aa, Artificial Sequence
  Description of Artificial Sequence: Synthetic peptide
  Seed: KLLQNSQVY
KCLQNSQVF

SEQ ID NO: 42962 - protein, 9 aa, Artificial Sequence
  Description of Artificial Sequence: Synthetic peptide
  Seed: KLLQNSQVY
KGLQNSQVW

SEQ ID NO: 42963 - protein, 9 aa, Artificial Sequence
  Description of Artificial Sequence: Synthetic peptide
  Seed: KLLQNSQVY
KGLQNSQVY

SEQ ID NO: 42964 - protein, 9 aa, Artificial Sequence
  Description of Artificial Sequence: Synthetic peptide
  Seed: KLLQNSQVY
KHLQNSQVH

SEQ ID NO: 42965 - protein, 9 aa, Artificial Sequence
  Description of Artificial Sequence: Synthetic peptide
  Seed: KLLQNSQVY
KKLQNSQVI

SEQ ID NO: 42966 - protein, 9 aa, Artificial Sequence
  Description of Artificial Sequence: Synthetic peptide
  Seed: KLLQNSQVY
KKLQNSQVM

SEQ ID NO: 42967 - protein, 9 aa, Artificial Sequence
  Description of Artificial Sequence: Synthetic peptide
  Seed: KLLQNSQVY
KKLQNSQVF

SEQ ID NO: 42968 - protein, 9 aa, Artificial Sequence
  Description of Artificial Sequence: Synthetic peptide
  Seed: KLLQNSQVY
KKLQNSQVW

SEQ ID NO: 42969 - protein, 9 aa, Artificial Sequence
  Description of Artificial Sequence: Synthetic peptide
  Seed: KLLQNSQVY
KKLQNSQVY

SEQ ID NO: 42970 - protein, 9 aa, Artificial Sequence
  Description of Artificial Sequence: Synthetic peptide
  Seed: KLLQNSQVY
KKLQNSQVV

SEQ ID NO: 42971 - protein, 9 aa, Artificial Sequence
  Description of Artificial Sequence: Synthetic peptide
  Seed: KLLQNSQVY
KMLQNSQVA

SEQ ID NO: 42972 - protein, 9 aa, Artificial Sequence
  Description of Artificial Sequence: Synthetic peptide
  Seed: KLLQNSQVY
KMLQNSQVG

SEQ ID NO: 42973 - protein, 9 aa, Artificial Sequence
  Description of Artificial Sequence: Synthetic peptide
  Seed: KLLQNSQVY
KMLQNSQVH

SEQ ID NO: 42974 - protein, 9 aa, Artificial Sequence
  Description of Artificial Sequence: Synthetic peptide
  Seed: KLLQNSQVY
KMLQNSQVI

SEQ ID NO: 42975 - protein, 9 aa, Artificial Sequence
  Description of Artificial Sequence: Synthetic peptide
  Seed: KLLQNSQVY
KMLQNSQVL

SEQ ID NO: 42976 - protein, 9 aa, Artificial Sequence
  Description of Artificial Sequence: Synthetic peptide
  Seed: KLLQNSQVY
KMLQNSQVM

SEQ ID NO: 42977 - protein, 9 aa, Artificial Sequence
  Description of Artificial Sequence: Synthetic peptide
  Seed: KLLQNSQVY
KMLQNSQVF

SEQ ID NO: 42978 - protein, 9 aa, Artificial Sequence
  Description of Artificial Sequence: Synthetic peptide
  Seed: KLLQNSQVY
KMLQNSQVW

SEQ ID NO: 42979 - protein, 9 aa, Artificial Sequence
  Description of Artificial Sequence: Synthetic peptide
  Seed: KLLQNSQVY
KMLQNSQVY

SEQ ID NO: 42980 - protein, 9 aa, Artificial Sequence
  Description of Artificial Sequence: Synthetic peptide
  Seed: KLLQNSQVY
KMLQNSQVV

SEQ ID NO: 42981 - protein, 9 aa, Artificial Sequence
  Description of Artificial Sequence: Synthetic peptide
  Seed: KLLQNSQVY
KFLQNSQVI

SEQ ID NO: 42982 - protein, 9 aa, Artificial Sequence
  Description of Artificial Sequence: Synthetic peptide
  Seed: KLLQNSQVY
KFLQNSQVL

SEQ ID NO: 42983 - protein, 9 aa, Artificial Sequence
  Description of Artificial Sequence: Synthetic peptide
  Seed: KLLQNSQVY
KFLQNSQVM

SEQ ID NO: 42984 - protein, 9 aa, Artificial Sequence
  Description of Artificial Sequence: Synthetic peptide
  Seed: KLLQNSQVY
KFLQNSQVF

SEQ ID NO: 42985 - protein, 9 aa, Artificial Sequence
  Description of Artificial Sequence: Synthetic peptide
  Seed: KLLQNSQVY
KKLQNSQVL

SEQ ID NO: 42986 - protein, 9 aa, Artificial Sequence
  Description of Artificial Sequence: Synthetic peptide
  Seed: KLLQNSQVY
KKLQNSQVH

SEQ ID NO: 42987 - protein, 9 aa, Artificial Sequence
  Description of Artificial Sequence: Synthetic peptide
  Seed: KLLQNSQVY
KHLQNSQVI

SEQ ID NO: 42988 - protein, 9 aa, Artificial Sequence
  Description of Artificial Sequence: Synthetic peptide
  Seed: KLLQNSQVY
KKLQNSQVA

SEQ ID NO: 42989 - protein, 9 aa, Artificial Sequence
  Description of Artificial Sequence: Synthetic peptide
  Seed: KLLQNSQVY
KHLQNSQVL

SEQ ID NO: 42990 - protein, 9 aa, Artificial Sequence
  Description of Artificial Sequence: Synthetic peptide
  Seed: KLLQNSQVY
KHLQNSQVM

SEQ ID NO: 42991 - protein, 9 aa, Artificial Sequence
  Description of Artificial Sequence: Synthetic peptide
  Seed: KLLQNSQVY
KHLQNSQVF

SEQ ID NO: 42992 - protein, 9 aa, Artificial Sequence
  Description of Artificial Sequence: Synthetic peptide
  Seed: KLLQNSQVY
KHLQNSQVW

SEQ ID NO: 42993 - protein, 9 aa, Artificial Sequence
  Description of Artificial Sequence: Synthetic peptide
  Seed: KLLQNSQVY
KHLQNSQVY

SEQ ID NO: 42994 - protein, 9 aa, Artificial Sequence
  Description of Artificial Sequence: Synthetic peptide
  Seed: KLLQNSQVY
KHLQNSQVV

SEQ ID NO: 42995 - protein, 9 aa, Artificial Sequence
  Description of Artificial Sequence: Synthetic peptide
  Seed: KLLQNSQVY
KILQNSQVI

SEQ ID NO: 42996 - protein, 9 aa, Artificial Sequence
  Description of Artificial Sequence: Synthetic peptide
  Seed: KLLQNSQVY
KILQNSQVL

SEQ ID NO: 42997 - protein, 9 aa, Artificial Sequence
  Description of Artificial Sequence: Synthetic peptide
  Seed: KLLQNSQVY
KILQNSQVM

SEQ ID NO: 42998 - protein, 9 aa, Artificial Sequence
  Description of Artificial Sequence: Synthetic peptide
  Seed: KLLQNSQVY
KILQNSQVF

SEQ ID NO: 42999 - protein, 9 aa, Artificial Sequence
  Description of Artificial Sequence: Synthetic peptide
  Seed: KLLQNSQVY
KILQNSQVW

SEQ ID NO: 43000 - protein, 9 aa, Artificial Sequence
  Description of Artificial Sequence: Synthetic peptide
  Seed: KLLQNSQVY
KILQNSQVY

SEQ ID NO: 43001 - protein, 9 aa, Artificial Sequence
  Description of Artificial Sequence: Synthetic peptide
  Seed: KLLQNSQVY
KLLQNSQVH

SEQ ID NO: 43002 - protein, 9 aa, Artificial Sequence
  Description of Artificial Sequence: Synthetic peptide
  Seed: KLLQNSQVY
KLLQNSQVI

SEQ ID NO: 43003 - protein, 9 aa, Artificial Sequence
  Description of Artificial Sequence: Synthetic peptide
  Seed: KLLQNSQVY
KLLQNSQVL

SEQ ID NO: 43004 - protein, 9 aa, Artificial Sequence
  Description of Artificial Sequence: Synthetic peptide
  Seed: KLLQNSQVY
KLLQNSQVM

SEQ ID NO: 43005 - protein, 9 aa, Artificial Sequence
  Description of Artificial Sequence: Synthetic peptide
  Seed: KLLQNSQVY
KLLQNSQVW

SEQ ID NO: 43006 - protein, 9 aa, Artificial Sequence
  Description of Artificial Sequence: Synthetic peptide
  Seed: KLLQNSQVY
KLLQNSQVV

SEQ ID NO: 43007 - protein, 9 aa, Artificial Sequence
  Description of Artificial Sequence: Synthetic peptide
  Seed: KMIDGIGRF
KEIDGIGRF

SEQ ID NO: 43008 - protein, 9 aa, Artificial Sequence
  Description of Artificial Sequence: Synthetic peptide
  Seed: KMIDGIGRF
KGIDGIGRF

SEQ ID NO: 43009 - protein, 10 aa, Artificial Sequence
  Description of Artificial Sequence: Synthetic peptide
  Seed: LLQNSQVFSL
LMQNSQVFSF

SEQ ID NO: 43010 - protein, 11 aa, Artificial Sequence
  Description of Artificial Sequence: Synthetic peptide
  Seed: KSCLPACVYGL
KYCLPACVYGI

SEQ ID NO: 43011 - protein, 11 aa, Artificial Sequence
  Description of Artificial Sequence: Synthetic peptide
  Seed: KSCLPACVYGL
KPCLPACVYGV

SEQ ID NO: 43012 - protein, 11 aa, Artificial Sequence
  Description of Artificial Sequence: Synthetic peptide
  Seed: KSCLPACVYGL
KSCLPACVYGI

SEQ ID NO: 43013 - protein, 11 aa, Artificial Sequence
  Description of Artificial Sequence: Synthetic peptide
  Seed: KSCLPACVYGL
KSCLPACVYGV

SEQ ID NO: 43014 - protein, 11 aa, Artificial Sequence
  Description of Artificial Sequence: Synthetic peptide
  Seed: KSCLPACVYGL
KTCLPACVYGI

SEQ ID NO: 43015 - protein, 11 aa, Artificial Sequence
  Description of Artificial Sequence: Synthetic peptide
  Seed: KSCLPACVYGL
KTCLPACVYGL

SEQ ID NO: 43016 - protein, 11 aa, Artificial Sequence
  Description of Artificial Sequence: Synthetic peptide
  Seed: KSCLPACVYGL
KTCLPACVYGV

SEQ ID NO: 43017 - protein, 11 aa, Artificial Sequence
  Description of Artificial Sequence: Synthetic peptide
  Seed: KSCLPACVYGL
KWCLPACVYGI

SEQ ID NO: 43018 - protein, 11 aa, Artificial Sequence
  Description of Artificial Sequence: Synthetic peptide
  Seed: KSCLPACVYGL
KWCLPACVYGL

SEQ ID NO: 43019 - protein, 11 aa, Artificial Sequence
  Description of Artificial Sequence: Synthetic peptide
  Seed: KSCLPACVYGL
KWCLPACVYGV

SEQ ID NO: 43020 - protein, 11 aa, Artificial Sequence
  Description of Artificial Sequence: Synthetic peptide
  Seed: KSCLPACVYGL
KYCLPACVYGL

SEQ ID NO: 43021 - protein, 8 aa, Artificial Sequence
  Description of Artificial Sequence: Synthetic peptide
  Seed: KSTVMAAF
KQTVMAAY

SEQ ID NO: 43022 - protein, 11 aa, Artificial Sequence
  Description of Artificial Sequence: Synthetic peptide
  Seed: KSCLPACVYGL
KYCLPACVYGV

SEQ ID NO: 43023 - protein, 11 aa, Artificial Sequence
  Description of Artificial Sequence: Synthetic peptide
  Seed: KSCLPACVYGL
KVCLPACVYGI

SEQ ID NO: 43024 - protein, 11 aa, Artificial Sequence
  Description of Artificial Sequence: Synthetic peptide
  Seed: KSCLPACVYGL
KVCLPACVYGL

SEQ ID NO: 43025 - protein, 11 aa, Artificial Sequence
  Description of Artificial Sequence: Synthetic peptide
  Seed: KSCLPACVYGL
KVCLPACVYGV

SEQ ID NO: 43026 - protein, 8 aa, Artificial Sequence
  Description of Artificial Sequence: Synthetic peptide
  Seed: KSTVMAAF
KATVMAAF

SEQ ID NO: 43027 - protein, 8 aa, Artificial Sequence
  Description of Artificial Sequence: Synthetic peptide
  Seed: KSTVMAAF
KATVMAAW

SEQ ID NO: 43028 - protein, 8 aa, Artificial Sequence
  Description of Artificial Sequence: Synthetic peptide
  Seed: KSTVMAAF
KATVMAAY

SEQ ID NO: 43029 - protein, 8 aa, Artificial Sequence
  Description of Artificial Sequence: Synthetic peptide
  Seed: KSTVMAAF
KQTVMAAL

SEQ ID NO: 43030 - protein, 8 aa, Artificial Sequence
  Description of Artificial Sequence: Synthetic peptide
  Seed: KSTVMAAF
KQTVMAAM

SEQ ID NO: 43031 - protein, 11 aa, Artificial Sequence
  Description of Artificial Sequence: Synthetic peptide
  Seed: KSCLPACVYGL
KPCLPACVYGL

SEQ ID NO: 43032 - protein, 11 aa, Artificial Sequence
  Description of Artificial Sequence: Synthetic peptide
  Seed: KSCLPACVYGL
KPCLPACVYGI

SEQ ID NO: 43033 - protein, 11 aa, Artificial Sequence
  Description of Artificial Sequence: Synthetic peptide
  Seed: KSCLPACVYGL
KFCLPACVYGV

SEQ ID NO: 43034 - protein, 11 aa, Artificial Sequence
  Description of Artificial Sequence: Synthetic peptide
  Seed: KSCLPACVYGL
KFCLPACVYGL

SEQ ID NO: 43035 - protein, 11 aa, Artificial Sequence
  Description of Artificial Sequence: Synthetic peptide
  Seed: KSCLPACVYGL
KGCLPACVYGL

SEQ ID NO: 43036 - protein, 11 aa, Artificial Sequence
  Description of Artificial Sequence: Synthetic peptide
  Seed: KSCLPACVYGL
KGCLPACVYGV

SEQ ID NO: 43037 - protein, 11 aa, Artificial Sequence
  Description of Artificial Sequence: Synthetic peptide
  Seed: KSCLPACVYGL
KHCLPACVYGI

SEQ ID NO: 43038 - protein, 11 aa, Artificial Sequence
  Description of Artificial Sequence: Synthetic peptide
  Seed: KSCLPACVYGL
KHCLPACVYGL

SEQ ID NO: 43039 - protein, 11 aa, Artificial Sequence
  Description of Artificial Sequence: Synthetic peptide
  Seed: KSCLPACVYGL
KHCLPACVYGV

SEQ ID NO: 43040 - protein, 11 aa, Artificial Sequence
  Description of Artificial Sequence: Synthetic peptide
  Seed: KSCLPACVYGL
KICLPACVYGI

SEQ ID NO: 43041 - protein, 11 aa, Artificial Sequence
  Description of Artificial Sequence: Synthetic peptide
  Seed: KSCLPACVYGL
KICLPACVYGL

SEQ ID NO: 43042 - protein, 11 aa, Artificial Sequence
  Description of Artificial Sequence: Synthetic peptide
  Seed: KSCLPACVYGL
KICLPACVYGV

SEQ ID NO: 43043 - protein, 11 aa, Artificial Sequence
  Description of Artificial Sequence: Synthetic peptide
  Seed: KSCLPACVYGL
KLCLPACVYGI

SEQ ID NO: 43044 - protein, 11 aa, Artificial Sequence
  Description of Artificial Sequence: Synthetic peptide
  Seed: KSCLPACVYGL
KLCLPACVYGL

SEQ ID NO: 43045 - protein, 11 aa, Artificial Sequence
  Description of Artificial Sequence: Synthetic peptide
  Seed: KSCLPACVYGL
KLCLPACVYGV

SEQ ID NO: 43046 - protein, 11 aa, Artificial Sequence
  Description of Artificial Sequence: Synthetic peptide
  Seed: KSCLPACVYGL
KKCLPACVYGI

SEQ ID NO: 43047 - protein, 11 aa, Artificial Sequence
  Description of Artificial Sequence: Synthetic peptide
  Seed: KSCLPACVYGL
KKCLPACVYGL

SEQ ID NO: 43048 - protein, 11 aa, Artificial Sequence
  Description of Artificial Sequence: Synthetic peptide
  Seed: KSCLPACVYGL
KKCLPACVYGV

SEQ ID NO: 43049 - protein, 11 aa, Artificial Sequence
  Description of Artificial Sequence: Synthetic peptide
  Seed: KSCLPACVYGL
KMCLPACVYGA

SEQ ID NO: 43050 - protein, 11 aa, Artificial Sequence
  Description of Artificial Sequence: Synthetic peptide
  Seed: KSCLPACVYGL
KMCLPACVYGI

SEQ ID NO: 43051 - protein, 11 aa, Artificial Sequence
  Description of Artificial Sequence: Synthetic peptide
  Seed: KSCLPACVYGL
KMCLPACVYGL

SEQ ID NO: 43052 - protein, 11 aa, Artificial Sequence
  Description of Artificial Sequence: Synthetic peptide
  Seed: KSCLPACVYGL
KMCLPACVYGV

SEQ ID NO: 43053 - protein, 11 aa, Artificial Sequence
  Description of Artificial Sequence: Synthetic peptide
  Seed: KSCLPACVYGL
KFCLPACVYGI

SEQ ID NO: 43054 - protein, 8 aa, Artificial Sequence
  Description of Artificial Sequence: Synthetic peptide
  Seed: KSTVMAAF
KQTVMAAF

SEQ ID NO: 43055 - protein, 8 aa, Artificial Sequence
  Description of Artificial Sequence: Synthetic peptide
  Seed: KSTVMAAF
KETVMAAY

SEQ ID NO: 43056 - protein, 11 aa, Artificial Sequence
  Description of Artificial Sequence: Synthetic peptide
  Seed: KSCLPACVYGL
KECLPACVYGV

SEQ ID NO: 43057 - protein, 10 aa, Artificial Sequence
  Description of Artificial Sequence: Synthetic peptide
  Seed: KSTVMAAFTG
KRTVMAAFTM

SEQ ID NO: 43058 - protein, 10 aa, Artificial Sequence
  Description of Artificial Sequence: Synthetic peptide
  Seed: KSTVMAAFTG
KATVMAAFTI

SEQ ID NO: 43059 - protein, 10 aa, Artificial Sequence
  Description of Artificial Sequence: Synthetic peptide
  Seed: KSTVMAAFTG
KATVMAAFTL

SEQ ID NO: 43060 - protein, 10 aa, Artificial Sequence
  Description of Artificial Sequence: Synthetic peptide
  Seed: KSTVMAAFTG
KATVMAAFTM

SEQ ID NO: 43061 - protein, 10 aa, Artificial Sequence
  Description of Artificial Sequence: Synthetic peptide
  Seed: KSTVMAAFTG
KATVMAAFTF

SEQ ID NO: 43062 - protein, 10 aa, Artificial Sequence
  Description of Artificial Sequence: Synthetic peptide
  Seed: KSTVMAAFTG
KATVMAAFTW

SEQ ID NO: 43063 - protein, 10 aa, Artificial Sequence
  Description of Artificial Sequence: Synthetic peptide
  Seed: KSTVMAAFTG
KATVMAAFTY

SEQ ID NO: 43064 - protein, 10 aa, Artificial Sequence
  Description of Artificial Sequence: Synthetic peptide
  Seed: KSTVMAAFTG
KATVMAAFTV

SEQ ID NO: 43065 - protein, 10 aa, Artificial Sequence
  Description of Artificial Sequence: Synthetic peptide
  Seed: KSTVMAAFTG
KRTVMAAFTI

SEQ ID NO: 43066 - protein, 10 aa, Artificial Sequence
  Description of Artificial Sequence: Synthetic peptide
  Seed: KSTVMAAFTG
KRTVMAAFTL

SEQ ID NO: 43067 - protein, 10 aa, Artificial Sequence
  Description of Artificial Sequence: Synthetic peptide
  Seed: KSTVMAAFTG
KRTVMAAFTF

SEQ ID NO: 43068 - protein, 8 aa, Artificial Sequence
  Description of Artificial Sequence: Synthetic peptide
  Seed: KSTVMAAF
KGTVMAAW

SEQ ID NO: 43069 - protein, 10 aa, Artificial Sequence
  Description of Artificial Sequence: Synthetic peptide
  Seed: KSTVMAAFTG
KRTVMAAFTW

SEQ ID NO: 43070 - protein, 10 aa, Artificial Sequence
  Description of Artificial Sequence: Synthetic peptide
  Seed: KSTVMAAFTG
KRTVMAAFTY

SEQ ID NO: 43071 - protein, 10 aa, Artificial Sequence
  Description of Artificial Sequence: Synthetic peptide
  Seed: KSTVMAAFTG
KRTVMAAFTV

SEQ ID NO: 43072 - protein, 10 aa, Artificial Sequence
  Description of Artificial Sequence: Synthetic peptide
  Seed: KSTVMAAFTG
KNTVMAAFTI

SEQ ID NO: 43073 - protein, 10 aa, Artificial Sequence
  Description of Artificial Sequence: Synthetic peptide
  Seed: KSTVMAAFTG
KNTVMAAFTL

SEQ ID NO: 43074 - protein, 10 aa, Artificial Sequence
  Description of Artificial Sequence: Synthetic peptide
  Seed: KSTVMAAFTG
KNTVMAAFTM

SEQ ID NO: 43075 - protein, 10 aa, Artificial Sequence
  Description of Artificial Sequence: Synthetic peptide
  Seed: KSTVMAAFTG
KNTVMAAFTF

SEQ ID NO: 43076 - protein, 10 aa, Artificial Sequence
  Description of Artificial Sequence: Synthetic peptide
  Seed: KSTVMAAFTG
KNTVMAAFTW

SEQ ID NO: 43077 - protein, 10 aa, Artificial Sequence
  Description of Artificial Sequence: Synthetic peptide
  Seed: KSTVMAAFTG
KNTVMAAFTY

SEQ ID NO: 43078 - protein, 10 aa, Artificial Sequence
  Description of Artificial Sequence: Synthetic peptide
  Seed: KSTVMAAFTG
KATVMAAFTG

SEQ ID NO: 43079 - protein, 8 aa, Artificial Sequence
  Description of Artificial Sequence: Synthetic peptide
  Seed: KSTVMAAF
KVTVMAAW

SEQ ID NO: 43080 - protein, 8 aa, Artificial Sequence
  Description of Artificial Sequence: Synthetic peptide
  Seed: KSTVMAAF
KYTVMAAY

SEQ ID NO: 43081 - protein, 8 aa, Artificial Sequence
  Description of Artificial Sequence: Synthetic peptide
  Seed: KSTVMAAF
KYTVMAAF

SEQ ID NO: 43082 - protein, 8 aa, Artificial Sequence
  Description of Artificial Sequence: Synthetic peptide
  Seed: KSTVMAAF
KHTVMAAF

SEQ ID NO: 43083 - protein, 8 aa, Artificial Sequence
  Description of Artificial Sequence: Synthetic peptide
  Seed: KSTVMAAF
KHTVMAAY

SEQ ID NO: 43084 - protein, 8 aa, Artificial Sequence
  Description of Artificial Sequence: Synthetic peptide
  Seed: KSTVMAAF
KITVMAAW

SEQ ID NO: 43085 - protein, 8 aa, Artificial Sequence
  Description of Artificial Sequence: Synthetic peptide
  Seed: KSTVMAAF
KLTVMAAY

SEQ ID NO: 43086 - protein, 8 aa, Artificial Sequence
  Description of Artificial Sequence: Synthetic peptide
  Seed: KSTVMAAF
KKTVMAAM

SEQ ID NO: 43087 - protein, 8 aa, Artificial Sequence
  Description of Artificial Sequence: Synthetic peptide
  Seed: KSTVMAAF
KKTVMAAF

SEQ ID NO: 43088 - protein, 8 aa, Artificial Sequence
  Description of Artificial Sequence: Synthetic peptide
  Seed: KSTVMAAF
KKTVMAAY

SEQ ID NO: 43089 - protein, 8 aa, Artificial Sequence
  Description of Artificial Sequence: Synthetic peptide
  Seed: KSTVMAAF
KMTVMAAM

SEQ ID NO: 43090 - protein, 8 aa, Artificial Sequence
  Description of Artificial Sequence: Synthetic peptide
  Seed: KSTVMAAF
KMTVMAAF

SEQ ID NO: 43091 - protein, 8 aa, Artificial Sequence
  Description of Artificial Sequence: Synthetic peptide
  Seed: KSTVMAAF
KMTVMAAW

SEQ ID NO: 43092 - protein, 8 aa, Artificial Sequence
  Description of Artificial Sequence: Synthetic peptide
  Seed: KSTVMAAF
KMTVMAAY

SEQ ID NO: 43093 - protein, 8 aa, Artificial Sequence
  Description of Artificial Sequence: Synthetic peptide
  Seed: KSTVMAAF
KFTVMAAY

SEQ ID NO: 43094 - protein, 8 aa, Artificial Sequence
  Description of Artificial Sequence: Synthetic peptide
  Seed: KSTVMAAF
KSTVMAAM

SEQ ID NO: 43095 - protein, 8 aa, Artificial Sequence
  Description of Artificial Sequence: Synthetic peptide
  Seed: KSTVMAAF
KSTVMAAW

SEQ ID NO: 43096 - protein, 8 aa, Artificial Sequence
  Description of Artificial Sequence: Synthetic peptide
  Seed: KSTVMAAF
KSTVMAAY

SEQ ID NO: 43097 - protein, 8 aa, Artificial Sequence
  Description of Artificial Sequence: Synthetic peptide
  Seed: KSTVMAAF
KTTVMAAM

SEQ ID NO: 43098 - protein, 8 aa, Artificial Sequence
  Description of Artificial Sequence: Synthetic peptide
  Seed: KSTVMAAF
KTTVMAAF

SEQ ID NO: 43099 - protein, 8 aa, Artificial Sequence
  Description of Artificial Sequence: Synthetic peptide
  Seed: KSTVMAAF
KTTVMAAW

SEQ ID NO: 43100 - protein, 8 aa, Artificial Sequence
  Description of Artificial Sequence: Synthetic peptide
  Seed: KSTVMAAF
KTTVMAAY

SEQ ID NO: 43101 - protein, 11 aa, Artificial Sequence
  Description of Artificial Sequence: Synthetic peptide
  Seed: KSCLPACVYGL
KGCLPACVYGI

SEQ ID NO: 43102 - protein, 11 aa, Artificial Sequence
  Description of Artificial Sequence: Synthetic peptide
  Seed: KSCLPACVYGL
KECLPACVYGL

SEQ ID NO: 43103 - protein, 9 aa, Artificial Sequence
  Description of Artificial Sequence: Synthetic peptide
  Seed: KMIDGIGRF
KGIDGIGRW

SEQ ID NO: 43104 - protein, 9 aa, Artificial Sequence
  Description of Artificial Sequence: Synthetic peptide
  Seed: KSCLPACVY
KHCLPACVF

SEQ ID NO: 43105 - protein, 9 aa, Artificial Sequence
  Description of Artificial Sequence: Synthetic peptide
  Seed: KSCLPACVY
KQCLPACVY

SEQ ID NO: 43106 - protein, 9 aa, Artificial Sequence
  Description of Artificial Sequence: Synthetic peptide
  Seed: KSCLPACVY
KQCLPACVV

SEQ ID NO: 43107 - protein, 9 aa, Artificial Sequence
  Description of Artificial Sequence: Synthetic peptide
  Seed: KSCLPACVY
KECLPACVM

SEQ ID NO: 43108 - protein, 9 aa, Artificial Sequence
  Description of Artificial Sequence: Synthetic peptide
  Seed: KSCLPACVY
KECLPACVF

SEQ ID NO: 43109 - protein, 9 aa, Artificial Sequence
  Description of Artificial Sequence: Synthetic peptide
  Seed: KSCLPACVY
KECLPACVY

SEQ ID NO: 43110 - protein, 9 aa, Artificial Sequence
  Description of Artificial Sequence: Synthetic peptide
  Seed: KSCLPACVY
KGCLPACVF

SEQ ID NO: 43111 - protein, 9 aa, Artificial Sequence
  Description of Artificial Sequence: Synthetic peptide
  Seed: KSCLPACVY
KGCLPACVW

SEQ ID NO: 43112 - protein, 9 aa, Artificial Sequence
  Description of Artificial Sequence: Synthetic peptide
  Seed: KSCLPACVY
KGCLPACVY

SEQ ID NO: 43113 - protein, 9 aa, Artificial Sequence
  Description of Artificial Sequence: Synthetic peptide
  Seed: KSCLPACVY
KHCLPACVM

SEQ ID NO: 43114 - protein, 9 aa, Artificial Sequence
  Description of Artificial Sequence: Synthetic peptide
  Seed: KSCLPACVY
KHCLPACVY

SEQ ID NO: 43115 - protein, 9 aa, Artificial Sequence
  Description of Artificial Sequence: Synthetic peptide
  Seed: KSCLPACVY
KKCLPACVM

SEQ ID NO: 43116 - protein, 9 aa, Artificial Sequence
  Description of Artificial Sequence: Synthetic peptide
  Seed: KSCLPACVY
KICLPACVM

SEQ ID NO: 43117 - protein, 9 aa, Artificial Sequence
  Description of Artificial Sequence: Synthetic peptide
  Seed: KSCLPACVY
KICLPACVF

SEQ ID NO: 43118 - protein, 9 aa, Artificial Sequence
  Description of Artificial Sequence: Synthetic peptide
  Seed: KSCLPACVY
KICLPACVW

SEQ ID NO: 43119 - protein, 9 aa, Artificial Sequence
  Description of Artificial Sequence: Synthetic peptide
  Seed: KSCLPACVY
KICLPACVY

SEQ ID NO: 43120 - protein, 9 aa, Artificial Sequence
  Description of Artificial Sequence: Synthetic peptide
  Seed: KSCLPACVY
KLCLPACVM

SEQ ID NO: 43121 - protein, 9 aa, Artificial Sequence
  Description of Artificial Sequence: Synthetic peptide
  Seed: KSCLPACVY
KLCLPACVF

SEQ ID NO: 43122 - protein, 9 aa, Artificial Sequence
  Description of Artificial Sequence: Synthetic peptide
  Seed: KSCLPACVY
KLCLPACVW

SEQ ID NO: 43123 - protein, 9 aa, Artificial Sequence
  Description of Artificial Sequence: Synthetic peptide
  Seed: KSCLPACVY
KLCLPACVY

SEQ ID NO: 43124 - protein, 9 aa, Artificial Sequence
  Description of Artificial Sequence: Synthetic peptide
  Seed: KSCLPACVY
KKCLPACVI

SEQ ID NO: 43125 - protein, 9 aa, Artificial Sequence
  Description of Artificial Sequence: Synthetic peptide
  Seed: KSCLPACVY
KQCLPACVW

SEQ ID NO: 43126 - protein, 9 aa, Artificial Sequence
  Description of Artificial Sequence: Synthetic peptide
  Seed: KSCLPACVY
KQCLPACVF

SEQ ID NO: 43127 - protein, 9 aa, Artificial Sequence
  Description of Artificial Sequence: Synthetic peptide
  Seed: KSCLPACVY
KQCLPACVM

SEQ ID NO: 43128 - protein, 9 aa, Artificial Sequence
  Description of Artificial Sequence: Synthetic peptide
  Seed: KSCLPACVY
KQCLPACVL

SEQ ID NO: 43129 - protein, 11 aa, Artificial Sequence
  Description of Artificial Sequence: Synthetic peptide
  Seed: KRVDGKWMREL
KRVDGKWMREV

SEQ ID NO: 43130 - protein, 9 aa, Artificial Sequence
  Description of Artificial Sequence: Synthetic peptide
  Seed: KSCLPACVY
KACLPACVI

SEQ ID NO: 43131 - protein, 9 aa, Artificial Sequence
  Description of Artificial Sequence: Synthetic peptide
  Seed: KSCLPACVY
KACLPACVL

SEQ ID NO: 43132 - protein, 9 aa, Artificial Sequence
  Description of Artificial Sequence: Synthetic peptide
  Seed: KSCLPACVY
KACLPACVM

SEQ ID NO: 43133 - protein, 9 aa, Artificial Sequence
  Description of Artificial Sequence: Synthetic peptide
  Seed: KSCLPACVY
KACLPACVF

SEQ ID NO: 43134 - protein, 9 aa, Artificial Sequence
  Description of Artificial Sequence: Synthetic peptide
  Seed: KSCLPACVY
KACLPACVW

SEQ ID NO: 43135 - protein, 9 aa, Artificial Sequence
  Description of Artificial Sequence: Synthetic peptide
  Seed: KSCLPACVY
KACLPACVY

SEQ ID NO: 43136 - protein, 9 aa, Artificial Sequence
  Description of Artificial Sequence: Synthetic peptide
  Seed: KSCLPACVY
KACLPACVV

SEQ ID NO: 43137 - protein, 9 aa, Artificial Sequence
  Description of Artificial Sequence: Synthetic peptide
  Seed: KSCLPACVY
KRCLPACVM

SEQ ID NO: 43138 - protein, 9 aa, Artificial Sequence
  Description of Artificial Sequence: Synthetic peptide
  Seed: KSCLPACVY
KRCLPACVF

SEQ ID NO: 43139 - protein, 9 aa, Artificial Sequence
  Description of Artificial Sequence: Synthetic peptide
  Seed: KSCLPACVY
KRCLPACVY

SEQ ID NO: 43140 - protein, 9 aa, Artificial Sequence
  Description of Artificial Sequence: Synthetic peptide
  Seed: KSCLPACVY
KNCLPACVM

SEQ ID NO: 43141 - protein, 9 aa, Artificial Sequence
  Description of Artificial Sequence: Synthetic peptide
  Seed: KSCLPACVY
KNCLPACVF

SEQ ID NO: 43142 - protein, 9 aa, Artificial Sequence
  Description of Artificial Sequence: Synthetic peptide
  Seed: KSCLPACVY
KNCLPACVW

SEQ ID NO: 43143 - protein, 9 aa, Artificial Sequence
  Description of Artificial Sequence: Synthetic peptide
  Seed: KSCLPACVY
KNCLPACVY

SEQ ID NO: 43144 - protein, 9 aa, Artificial Sequence
  Description of Artificial Sequence: Synthetic peptide
  Seed: KSCLPACVY
KCCLPACVW

SEQ ID NO: 43145 - protein, 9 aa, Artificial Sequence
  Description of Artificial Sequence: Synthetic peptide
  Seed: KSCLPACVY
KQCLPACVA

SEQ ID NO: 43146 - protein, 9 aa, Artificial Sequence
  Description of Artificial Sequence: Synthetic peptide
  Seed: KSCLPACVY
KQCLPACVH

SEQ ID NO: 43147 - protein, 9 aa, Artificial Sequence
  Description of Artificial Sequence: Synthetic peptide
  Seed: KSCLPACVY
KQCLPACVI

SEQ ID NO: 43148 - protein, 9 aa, Artificial Sequence
  Description of Artificial Sequence: Synthetic peptide
  Seed: KSCLPACVY
KKCLPACVL

SEQ ID NO: 43149 - protein, 9 aa, Artificial Sequence
  Description of Artificial Sequence: Synthetic peptide
  Seed: KSCLPACVY
KKCLPACVF

SEQ ID NO: 43150 - protein, 11 aa, Artificial Sequence
  Description of Artificial Sequence: Synthetic peptide
  Seed: KSCLPACVYGL
KECLPACVYGI

SEQ ID NO: 43151 - protein, 11 aa, Artificial Sequence
  Description of Artificial Sequence: Synthetic peptide
  Seed: KSCLPACVYGL
KNCLPACVYGL

SEQ ID NO: 43152 - protein, 9 aa, Artificial Sequence
  Description of Artificial Sequence: Synthetic peptide
  Seed: KSCLPACVY
KVCLPACVW

SEQ ID NO: 43153 - protein, 9 aa, Artificial Sequence
  Description of Artificial Sequence: Synthetic peptide
  Seed: KSCLPACVY
KVCLPACVY

SEQ ID NO: 43154 - protein, 11 aa, Artificial Sequence
  Description of Artificial Sequence: Synthetic peptide
  Seed: KSCLPACVYGL
KACLPACVYGI

SEQ ID NO: 43155 - protein, 11 aa, Artificial Sequence
  Description of Artificial Sequence: Synthetic peptide
  Seed: KSCLPACVYGL
KACLPACVYGL

SEQ ID NO: 43156 - protein, 11 aa, Artificial Sequence
  Description of Artificial Sequence: Synthetic peptide
  Seed: KSCLPACVYGL
KACLPACVYGV

SEQ ID NO: 43157 - protein, 11 aa, Artificial Sequence
  Description of Artificial Sequence: Synthetic peptide
  Seed: KSCLPACVYGL
KRCLPACVYGI

SEQ ID NO: 43158 - protein, 11 aa, Artificial Sequence
  Description of Artificial Sequence: Synthetic peptide
  Seed: KSCLPACVYGL
KRCLPACVYGL

SEQ ID NO: 43159 - protein, 11 aa, Artificial Sequence
  Description of Artificial Sequence: Synthetic peptide
  Seed: KSCLPACVYGL
KRCLPACVYGV

SEQ ID NO: 43160 - protein, 11 aa, Artificial Sequence
  Description of Artificial Sequence: Synthetic peptide
  Seed: KSCLPACVYGL
KNCLPACVYGI

SEQ ID NO: 43161 - protein, 11 aa, Artificial Sequence
  Description of Artificial Sequence: Synthetic peptide
  Seed: KSCLPACVYGL
KNCLPACVYGV

SEQ ID NO: 43162 - protein, 9 aa, Artificial Sequence
  Description of Artificial Sequence: Synthetic peptide
  Seed: KSCLPACVY
KKCLPACVY

SEQ ID NO: 43163 - protein, 11 aa, Artificial Sequence
  Description of Artificial Sequence: Synthetic peptide
  Seed: KSCLPACVYGL
KDCLPACVYGI

SEQ ID NO: 43164 - protein, 11 aa, Artificial Sequence
  Description of Artificial Sequence: Synthetic peptide
  Seed: KSCLPACVYGL
KDCLPACVYGL

SEQ ID NO: 43165 - protein, 11 aa, Artificial Sequence
  Description of Artificial Sequence: Synthetic peptide
  Seed: KSCLPACVYGL
KDCLPACVYGV

SEQ ID NO: 43166 - protein, 11 aa, Artificial Sequence
  Description of Artificial Sequence: Synthetic peptide
  Seed: KSCLPACVYGL
KCCLPACVYGI

SEQ ID NO: 43167 - protein, 11 aa, Artificial Sequence
  Description of Artificial Sequence: Synthetic peptide
  Seed: KSCLPACVYGL
KCCLPACVYGL

SEQ ID NO: 43168 - protein, 11 aa, Artificial Sequence
  Description of Artificial Sequence: Synthetic peptide
  Seed: KSCLPACVYGL
KCCLPACVYGV

SEQ ID NO: 43169 - protein, 11 aa, Artificial Sequence
  Description of Artificial Sequence: Synthetic peptide
  Seed: KSCLPACVYGL
KQCLPACVYGI

SEQ ID NO: 43170 - protein, 11 aa, Artificial Sequence
  Description of Artificial Sequence: Synthetic peptide
  Seed: KSCLPACVYGL
KQCLPACVYGL

SEQ ID NO: 43171 - protein, 11 aa, Artificial Sequence
  Description of Artificial Sequence: Synthetic peptide
  Seed: KSCLPACVYGL
KQCLPACVYGV

SEQ ID NO: 43172 - protein, 9 aa, Artificial Sequence
  Description of Artificial Sequence: Synthetic peptide
  Seed: KSCLPACVY
KVCLPACVF

SEQ ID NO: 43173 - protein, 9 aa, Artificial Sequence
  Description of Artificial Sequence: Synthetic peptide
  Seed: KSCLPACVY
KVCLPACVM

SEQ ID NO: 43174 - protein, 9 aa, Artificial Sequence
  Description of Artificial Sequence: Synthetic peptide
  Seed: KSCLPACVY
KYCLPACVY

SEQ ID NO: 43175 - protein, 9 aa, Artificial Sequence
  Description of Artificial Sequence: Synthetic peptide
  Seed: KSCLPACVY
KWCLPACVY

SEQ ID NO: 43176 - protein, 9 aa, Artificial Sequence
  Description of Artificial Sequence: Synthetic peptide
  Seed: KSCLPACVY
KMCLPACVH

SEQ ID NO: 43177 - protein, 9 aa, Artificial Sequence
  Description of Artificial Sequence: Synthetic peptide
  Seed: KSCLPACVY
KMCLPACVI

SEQ ID NO: 43178 - protein, 9 aa, Artificial Sequence
  Description of Artificial Sequence: Synthetic peptide
  Seed: KSCLPACVY
KMCLPACVL

SEQ ID NO: 43179 - protein, 9 aa, Artificial Sequence
  Description of Artificial Sequence: Synthetic peptide
  Seed: KSCLPACVY
KMCLPACVM

SEQ ID NO: 43180 - protein, 9 aa, Artificial Sequence
  Description of Artificial Sequence: Synthetic peptide
  Seed: KSCLPACVY
KMCLPACVF

SEQ ID NO: 43181 - protein, 9 aa, Artificial Sequence
  Description of Artificial Sequence: Synthetic peptide
  Seed: KSCLPACVY
KMCLPACVW

SEQ ID NO: 43182 - protein, 9 aa, Artificial Sequence
  Description of Artificial Sequence: Synthetic peptide
  Seed: KSCLPACVY
KFCLPACVY

SEQ ID NO: 43183 - protein, 9 aa, Artificial Sequence
  Description of Artificial Sequence: Synthetic peptide
  Seed: KSCLPACVY
KSCLPACVI

SEQ ID NO: 43184 - protein, 9 aa, Artificial Sequence
  Description of Artificial Sequence: Synthetic peptide
  Seed: KSCLPACVY
KSCLPACVL

SEQ ID NO: 43185 - protein, 9 aa, Artificial Sequence
  Description of Artificial Sequence: Synthetic peptide
  Seed: KSCLPACVY
KSCLPACVM

SEQ ID NO: 43186 - protein, 9 aa, Artificial Sequence
  Description of Artificial Sequence: Synthetic peptide
  Seed: KSCLPACVY
KSCLPACVF

SEQ ID NO: 43187 - protein, 9 aa, Artificial Sequence
  Description of Artificial Sequence: Synthetic peptide
  Seed: KSCLPACVY
KSCLPACVW

SEQ ID NO: 43188 - protein, 9 aa, Artificial Sequence
  Description of Artificial Sequence: Synthetic peptide
  Seed: KSCLPACVY
KTCLPACVI

SEQ ID NO: 43189 - protein, 9 aa, Artificial Sequence
  Description of Artificial Sequence: Synthetic peptide
  Seed: KSCLPACVY
KTCLPACVL

SEQ ID NO: 43190 - protein, 9 aa, Artificial Sequence
  Description of Artificial Sequence: Synthetic peptide
  Seed: KSCLPACVY
KTCLPACVM

SEQ ID NO: 43191 - protein, 9 aa, Artificial Sequence
  Description of Artificial Sequence: Synthetic peptide
  Seed: KSCLPACVY
KTCLPACVF

SEQ ID NO: 43192 - protein, 9 aa, Artificial Sequence
  Description of Artificial Sequence: Synthetic peptide
  Seed: KSCLPACVY
KTCLPACVW

SEQ ID NO: 43193 - protein, 9 aa, Artificial Sequence
  Description of Artificial Sequence: Synthetic peptide
  Seed: KSCLPACVY
KTCLPACVY

SEQ ID NO: 43194 - protein, 10 aa, Artificial Sequence
  Description of Artificial Sequence: Synthetic peptide
  Seed: KSTVMAAFTG
KNTVMAAFTV

SEQ ID NO: 43195 - protein, 10 aa, Artificial Sequence
  Description of Artificial Sequence: Synthetic peptide
  Seed: KSTVMAAFTG
KDTVMAAFTI

SEQ ID NO: 43196 - protein, 10 aa, Artificial Sequence
  Description of Artificial Sequence: Synthetic peptide
  Seed: KSTVMAAFTG
KDTVMAAFTL

SEQ ID NO: 43197 - protein, 8 aa, Artificial Sequence
  Description of Artificial Sequence: Synthetic peptide
  Seed: KTGGPIYK
KMGGPIYK

SEQ ID NO: 43198 - protein, 10 aa, Artificial Sequence
  Description of Artificial Sequence: Synthetic peptide
  Seed: KSTVMAAFTG
KVTVMAAFTF

SEQ ID NO: 43199 - protein, 10 aa, Artificial Sequence
  Description of Artificial Sequence: Synthetic peptide
  Seed: KSTVMAAFTG
KVTVMAAFTW

SEQ ID NO: 43200 - protein, 10 aa, Artificial Sequence
  Description of Artificial Sequence: Synthetic peptide
  Seed: KSTVMAAFTG
KVTVMAAFTY

SEQ ID NO: 43201 - protein, 10 aa, Artificial Sequence
  Description of Artificial Sequence: Synthetic peptide
  Seed: KSTVMAAFTG
KVTVMAAFTV

SEQ ID NO: 43202 - protein, 8 aa, Artificial Sequence
  Description of Artificial Sequence: Synthetic peptide
  Seed: KTGGPIYK
KAGGPIYR

SEQ ID NO: 43203 - protein, 8 aa, Artificial Sequence
  Description of Artificial Sequence: Synthetic peptide
  Seed: KTGGPIYK
KQGGPIYR

SEQ ID NO: 43204 - protein, 8 aa, Artificial Sequence
  Description of Artificial Sequence: Synthetic peptide
  Seed: KTGGPIYK
KIGGPIYR

SEQ ID NO: 43205 - protein, 8 aa, Artificial Sequence
  Description of Artificial Sequence: Synthetic peptide
  Seed: KTGGPIYK
KLGGPIYR

SEQ ID NO: 43206 - protein, 8 aa, Artificial Sequence
  Description of Artificial Sequence: Synthetic peptide
  Seed: KTGGPIYK
KMGGPIYR

SEQ ID NO: 43207 - protein, 8 aa, Artificial Sequence
  Description of Artificial Sequence: Synthetic peptide
  Seed: KTGGPIYK
KFGGPIYR

SEQ ID NO: 43208 - protein, 9 aa, Artificial Sequence
  Description of Artificial Sequence: Synthetic peptide
  Seed: KTGGPIYKR
KNGGPIYKR

SEQ ID NO: 43209 - protein, 8 aa, Artificial Sequence
  Description of Artificial Sequence: Synthetic peptide
  Seed: KTGGPIYK
KFGGPIYK

SEQ ID NO: 43210 - protein, 8 aa, Artificial Sequence
  Description of Artificial Sequence: Synthetic peptide
  Seed: KTGGPIYK
KSGGPIYR

SEQ ID NO: 43211 - protein, 8 aa, Artificial Sequence
  Description of Artificial Sequence: Synthetic peptide
  Seed: KTGGPIYK
KWGGPIYR

SEQ ID NO: 43212 - protein, 8 aa, Artificial Sequence
  Description of Artificial Sequence: Synthetic peptide
  Seed: KTGGPIYK
KWGGPIYK

SEQ ID NO: 43213 - protein, 8 aa, Artificial Sequence
  Description of Artificial Sequence: Synthetic peptide
  Seed: KTGGPIYK
KYGGPIYR

SEQ ID NO: 43214 - protein, 8 aa, Artificial Sequence
  Description of Artificial Sequence: Synthetic peptide
  Seed: KTGGPIYK
KYGGPIYK

SEQ ID NO: 43215 - protein, 8 aa, Artificial Sequence
  Description of Artificial Sequence: Synthetic peptide
  Seed: KTGGPIYK
KVGGPIYR

SEQ ID NO: 43216 - protein, 9 aa, Artificial Sequence
  Description of Artificial Sequence: Synthetic peptide
  Seed: KTGGPIYKR
KAGGPIYKR

SEQ ID NO: 43217 - protein, 10 aa, Artificial Sequence
  Description of Artificial Sequence: Synthetic peptide
  Seed: KSTVMAAFTG
KVTVMAAFTM

SEQ ID NO: 43218 - protein, 10 aa, Artificial Sequence
  Description of Artificial Sequence: Synthetic peptide
  Seed: KSTVMAAFTG
KVTVMAAFTL

SEQ ID NO: 43219 - protein, 10 aa, Artificial Sequence
  Description of Artificial Sequence: Synthetic peptide
  Seed: KSTVMAAFTG
KVTVMAAFTI

SEQ ID NO: 43220 - protein, 10 aa, Artificial Sequence
  Description of Artificial Sequence: Synthetic peptide
  Seed: KSTVMAAFTG
KYTVMAAFTV

SEQ ID NO: 43221 - protein, 10 aa, Artificial Sequence
  Description of Artificial Sequence: Synthetic peptide
  Seed: KSTVMAAFTG
KTTVMAAFTL

SEQ ID NO: 43222 - protein, 10 aa, Artificial Sequence
  Description of Artificial Sequence: Synthetic peptide
  Seed: KSTVMAAFTG
KTTVMAAFTM

SEQ ID NO: 43223 - protein, 10 aa, Artificial Sequence
  Description of Artificial Sequence: Synthetic peptide
  Seed: KSTVMAAFTG
KTTVMAAFTF

SEQ ID NO: 43224 - protein, 10 aa, Artificial Sequence
  Description of Artificial Sequence: Synthetic peptide
  Seed: KSTVMAAFTG
KTTVMAAFTW

SEQ ID NO: 43225 - protein, 10 aa, Artificial Sequence
  Description of Artificial Sequence: Synthetic peptide
  Seed: KSTVMAAFTG
KTTVMAAFTY

SEQ ID NO: 43226 - protein, 10 aa, Artificial Sequence
  Description of Artificial Sequence: Synthetic peptide
  Seed: KSTVMAAFTG
KTTVMAAFTV

SEQ ID NO: 43227 - protein, 10 aa, Artificial Sequence
  Description of Artificial Sequence: Synthetic peptide
  Seed: KSTVMAAFTG
KWTVMAAFTI

SEQ ID NO: 43228 - protein, 10 aa, Artificial Sequence
  Description of Artificial Sequence: Synthetic peptide
  Seed: KSTVMAAFTG
KWTVMAAFTL

SEQ ID NO: 43229 - protein, 10 aa, Artificial Sequence
  Description of Artificial Sequence: Synthetic peptide
  Seed: KSTVMAAFTG
KWTVMAAFTM

SEQ ID NO: 43230 - protein, 10 aa, Artificial Sequence
  Description of Artificial Sequence: Synthetic peptide
  Seed: KSTVMAAFTG
KWTVMAAFTF

SEQ ID NO: 43231 - protein, 10 aa, Artificial Sequence
  Description of Artificial Sequence: Synthetic peptide
  Seed: KSTVMAAFTG
KWTVMAAFTW

SEQ ID NO: 43232 - protein, 10 aa, Artificial Sequence
  Description of Artificial Sequence: Synthetic peptide
  Seed: KSTVMAAFTG
KWTVMAAFTY

SEQ ID NO: 43233 - protein, 10 aa, Artificial Sequence
  Description of Artificial Sequence: Synthetic peptide
  Seed: KSTVMAAFTG
KWTVMAAFTV

SEQ ID NO: 43234 - protein, 10 aa, Artificial Sequence
  Description of Artificial Sequence: Synthetic peptide
  Seed: KSTVMAAFTG
KYTVMAAFTI

SEQ ID NO: 43235 - protein, 10 aa, Artificial Sequence
  Description of Artificial Sequence: Synthetic peptide
  Seed: KSTVMAAFTG
KYTVMAAFTL

SEQ ID NO: 43236 - protein, 10 aa, Artificial Sequence
  Description of Artificial Sequence: Synthetic peptide
  Seed: KSTVMAAFTG
KYTVMAAFTM

SEQ ID NO: 43237 - protein, 10 aa, Artificial Sequence
  Description of Artificial Sequence: Synthetic peptide
  Seed: KSTVMAAFTG
KYTVMAAFTF

SEQ ID NO: 43238 - protein, 10 aa, Artificial Sequence
  Description of Artificial Sequence: Synthetic peptide
  Seed: KSTVMAAFTG
KYTVMAAFTW

SEQ ID NO: 43239 - protein, 10 aa, Artificial Sequence
  Description of Artificial Sequence: Synthetic peptide
  Seed: KSTVMAAFTG
KYTVMAAFTY

SEQ ID NO: 43240 - protein, 9 aa, Artificial Sequence
  Description of Artificial Sequence: Synthetic peptide
  Seed: KTGGPIYKR
KAGGPIYKK

SEQ ID NO: 43241 - protein, 9 aa, Artificial Sequence
  Description of Artificial Sequence: Synthetic peptide
  Seed: KTGGPIYKR
KCGGPIYKR

SEQ ID NO: 43242 - protein, 10 aa, Artificial Sequence
  Description of Artificial Sequence: Synthetic peptide
  Seed: KSTVMAAFTG
KDTVMAAFTM

SEQ ID NO: 43243 - protein, 9 aa, Artificial Sequence
  Description of Artificial Sequence: Synthetic peptide
  Seed: KTGGPIYKR
KVGGPIYKY

SEQ ID NO: 43244 - protein, 9 aa, Artificial Sequence
  Description of Artificial Sequence: Synthetic peptide
  Seed: KTGGPIYKR
KQGGPIYKR

SEQ ID NO: 43245 - protein, 9 aa, Artificial Sequence
  Description of Artificial Sequence: Synthetic peptide
  Seed: KTGGPIYRR
KAGGPIYRR

SEQ ID NO: 43246 - protein, 9 aa, Artificial Sequence
  Description of Artificial Sequence: Synthetic peptide
  Seed: KTGGPIYRR
KAGGPIYRK

SEQ ID NO: 43247 - protein, 9 aa, Artificial Sequence
  Description of Artificial Sequence: Synthetic peptide
  Seed: KTGGPIYRR
KNGGPIYRR

SEQ ID NO: 43248 - protein, 9 aa, Artificial Sequence
  Description of Artificial Sequence: Synthetic peptide
  Seed: KTGGPIYRR
KNGGPIYRK

SEQ ID NO: 43249 - protein, 9 aa, Artificial Sequence
  Description of Artificial Sequence: Synthetic peptide
  Seed: KTGGPIYKR
KVGGPIYKK

SEQ ID NO: 43250 - protein, 9 aa, Artificial Sequence
  Description of Artificial Sequence: Synthetic peptide
  Seed: KTGGPIYKR
KVGGPIYKR

SEQ ID NO: 43251 - protein, 9 aa, Artificial Sequence
  Description of Artificial Sequence: Synthetic peptide
  Seed: KTGGPIYKR
KYGGPIYKK

SEQ ID NO: 43252 - protein, 9 aa, Artificial Sequence
  Description of Artificial Sequence: Synthetic peptide
  Seed: KTGGPIYKR
KYGGPIYKR

SEQ ID NO: 43253 - protein, 9 aa, Artificial Sequence
  Description of Artificial Sequence: Synthetic peptide
  Seed: KTGGPIYKR
KQGGPIYKK

SEQ ID NO: 43254 - protein, 9 aa, Artificial Sequence
  Description of Artificial Sequence: Synthetic peptide
  Seed: KTGGPIYKR
KGGGPIYKR

SEQ ID NO: 43255 - protein, 9 aa, Artificial Sequence
  Description of Artificial Sequence: Synthetic peptide
  Seed: KTGGPIYKR
KGGGPIYKK

SEQ ID NO: 43256 - protein, 9 aa, Artificial Sequence
  Description of Artificial Sequence: Synthetic peptide
  Seed: KTGGPIYKR
KHGGPIYKR

SEQ ID NO: 43257 - protein, 9 aa, Artificial Sequence
  Description of Artificial Sequence: Synthetic peptide
  Seed: KTGGPIYKR
KIGGPIYKR

SEQ ID NO: 43258 - protein, 9 aa, Artificial Sequence
  Description of Artificial Sequence: Synthetic peptide
  Seed: KTGGPIYKR
KIGGPIYKK

SEQ ID NO: 43259 - protein, 9 aa, Artificial Sequence
  Description of Artificial Sequence: Synthetic peptide
  Seed: KTGGPIYKR
KLGGPIYKR

SEQ ID NO: 43260 - protein, 9 aa, Artificial Sequence
  Description of Artificial Sequence: Synthetic peptide
  Seed: KTGGPIYKR
KLGGPIYKK

SEQ ID NO: 43261 - protein, 9 aa, Artificial Sequence
  Description of Artificial Sequence: Synthetic peptide
  Seed: KTGGPIYKR
KMGGPIYKR

SEQ ID NO: 43262 - protein, 9 aa, Artificial Sequence
  Description of Artificial Sequence: Synthetic peptide
  Seed: KTGGPIYKR
KMGGPIYKK

SEQ ID NO: 43263 - protein, 9 aa, Artificial Sequence
  Description of Artificial Sequence: Synthetic peptide
  Seed: KTGGPIYKR
KMGGPIYKY

SEQ ID NO: 43264 - protein, 9 aa, Artificial Sequence
  Description of Artificial Sequence: Synthetic peptide
  Seed: KTGGPIYKR
KFGGPIYKR

SEQ ID NO: 43265 - protein, 9 aa, Artificial Sequence
  Description of Artificial Sequence: Synthetic peptide
  Seed: KTGGPIYKR
KFGGPIYKK

SEQ ID NO: 43266 - protein, 9 aa, Artificial Sequence
  Description of Artificial Sequence: Synthetic peptide
  Seed: KTGGPIYKR
KSGGPIYKR

SEQ ID NO: 43267 - protein, 9 aa, Artificial Sequence
  Description of Artificial Sequence: Synthetic peptide
  Seed: KTGGPIYKR
KSGGPIYKK

SEQ ID NO: 43268 - protein, 9 aa, Artificial Sequence
  Description of Artificial Sequence: Synthetic peptide
  Seed: KTGGPIYKR
KTGGPIYKY

SEQ ID NO: 43269 - protein, 9 aa, Artificial Sequence
  Description of Artificial Sequence: Synthetic peptide
  Seed: KTGGPIYKR
KWGGPIYKR

SEQ ID NO: 43270 - protein, 9 aa, Artificial Sequence
  Description of Artificial Sequence: Synthetic peptide
  Seed: KTGGPIYKR
KWGGPIYKK

SEQ ID NO: 43271 - protein, 10 aa, Artificial Sequence
  Description of Artificial Sequence: Synthetic peptide
  Seed: KSTVMAAFTG
KTTVMAAFTI

SEQ ID NO: 43272 - protein, 10 aa, Artificial Sequence
  Description of Artificial Sequence: Synthetic peptide
  Seed: KSTVMAAFTG
KTTVMAAFTG

SEQ ID NO: 43273 - protein, 10 aa, Artificial Sequence
  Description of Artificial Sequence: Synthetic peptide
  Seed: KSTVMAAFTG
KSTVMAAFTV

SEQ ID NO: 43274 - protein, 10 aa, Artificial Sequence
  Description of Artificial Sequence: Synthetic peptide
  Seed: KSTVMAAFTG
KHTVMAAFTI

SEQ ID NO: 43275 - protein, 10 aa, Artificial Sequence
  Description of Artificial Sequence: Synthetic peptide
  Seed: KSTVMAAFTG
KETVMAAFTY

SEQ ID NO: 43276 - protein, 10 aa, Artificial Sequence
  Description of Artificial Sequence: Synthetic peptide
  Seed: KSTVMAAFTG
KETVMAAFTV

SEQ ID NO: 43277 - protein, 10 aa, Artificial Sequence
  Description of Artificial Sequence: Synthetic peptide
  Seed: KSTVMAAFTG
KGTVMAAFTI

SEQ ID NO: 43278 - protein, 10 aa, Artificial Sequence
  Description of Artificial Sequence: Synthetic peptide
  Seed: KSTVMAAFTG
KGTVMAAFTL

SEQ ID NO: 43279 - protein, 10 aa, Artificial Sequence
  Description of Artificial Sequence: Synthetic peptide
  Seed: KSTVMAAFTG
KGTVMAAFTM

SEQ ID NO: 43280 - protein, 10 aa, Artificial Sequence
  Description of Artificial Sequence: Synthetic peptide
  Seed: KSTVMAAFTG
KGTVMAAFTF

SEQ ID NO: 43281 - protein, 10 aa, Artificial Sequence
  Description of Artificial Sequence: Synthetic peptide
  Seed: KSTVMAAFTG
KGTVMAAFTW

SEQ ID NO: 43282 - protein, 10 aa, Artificial Sequence
  Description of Artificial Sequence: Synthetic peptide
  Seed: KSTVMAAFTG
KGTVMAAFTY

SEQ ID NO: 43283 - protein, 10 aa, Artificial Sequence
  Description of Artificial Sequence: Synthetic peptide
  Seed: KSTVMAAFTG
KGTVMAAFTV

SEQ ID NO: 43284 - protein, 10 aa, Artificial Sequence
  Description of Artificial Sequence: Synthetic peptide
  Seed: KSTVMAAFTG
KHTVMAAFTL

SEQ ID NO: 43285 - protein, 10 aa, Artificial Sequence
  Description of Artificial Sequence: Synthetic peptide
  Seed: KSTVMAAFTG
KSTVMAAFTY

SEQ ID NO: 43286 - protein, 10 aa, Artificial Sequence
  Description of Artificial Sequence: Synthetic peptide
  Seed: KSTVMAAFTG
KHTVMAAFTM

SEQ ID NO: 43287 - protein, 10 aa, Artificial Sequence
  Description of Artificial Sequence: Synthetic peptide
  Seed: KSTVMAAFTG
KHTVMAAFTF

SEQ ID NO: 43288 - protein, 10 aa, Artificial Sequence
  Description of Artificial Sequence: Synthetic peptide
  Seed: KSTVMAAFTG
KHTVMAAFTW

SEQ ID NO: 43289 - protein, 10 aa, Artificial Sequence
  Description of Artificial Sequence: Synthetic peptide
  Seed: KSTVMAAFTG
KHTVMAAFTY

SEQ ID NO: 43290 - protein, 10 aa, Artificial Sequence
  Description of Artificial Sequence: Synthetic peptide
  Seed: KSTVMAAFTG
KHTVMAAFTV

SEQ ID NO: 43291 - protein, 10 aa, Artificial Sequence
  Description of Artificial Sequence: Synthetic peptide
  Seed: KSTVMAAFTG
KITVMAAFTI

SEQ ID NO: 43292 - protein, 10 aa, Artificial Sequence
  Description of Artificial Sequence: Synthetic peptide
  Seed: KSTVMAAFTG
KITVMAAFTL

SEQ ID NO: 43293 - protein, 10 aa, Artificial Sequence
  Description of Artificial Sequence: Synthetic peptide
  Seed: KSTVMAAFTG
KITVMAAFTM

SEQ ID NO: 43294 - protein, 10 aa, Artificial Sequence
  Description of Artificial Sequence: Synthetic peptide
  Seed: KSTVMAAFTG
KITVMAAFTF

SEQ ID NO: 43295 - protein, 10 aa, Artificial Sequence
  Description of Artificial Sequence: Synthetic peptide
  Seed: KSTVMAAFTG
KETVMAAFTW

SEQ ID NO: 43296 - protein, 10 aa, Artificial Sequence
  Description of Artificial Sequence: Synthetic peptide
  Seed: KSTVMAAFTG
KETVMAAFTF

SEQ ID NO: 43297 - protein, 10 aa, Artificial Sequence
  Description of Artificial Sequence: Synthetic peptide
  Seed: KSTVMAAFTG
KETVMAAFTM

SEQ ID NO: 43298 - protein, 10 aa, Artificial Sequence
  Description of Artificial Sequence: Synthetic peptide
  Seed: KSTVMAAFTG
KETVMAAFTL

SEQ ID NO: 43299 - protein, 10 aa, Artificial Sequence
  Description of Artificial Sequence: Synthetic peptide
  Seed: KSTVMAAFTG
KDTVMAAFTF

SEQ ID NO: 43300 - protein, 10 aa, Artificial Sequence
  Description of Artificial Sequence: Synthetic peptide
  Seed: KSTVMAAFTG
KDTVMAAFTW

SEQ ID NO: 43301 - protein, 10 aa, Artificial Sequence
  Description of Artificial Sequence: Synthetic peptide
  Seed: KSTVMAAFTG
KDTVMAAFTY

SEQ ID NO: 43302 - protein, 10 aa, Artificial Sequence
  Description of Artificial Sequence: Synthetic peptide
  Seed: KSTVMAAFTG
KDTVMAAFTV

SEQ ID NO: 43303 - protein, 10 aa, Artificial Sequence
  Description of Artificial Sequence: Synthetic peptide
  Seed: KSTVMAAFTG
KCTVMAAFTI

SEQ ID NO: 43304 - protein, 10 aa, Artificial Sequence
  Description of Artificial Sequence: Synthetic peptide
  Seed: KSTVMAAFTG
KCTVMAAFTL

SEQ ID NO: 43305 - protein, 10 aa, Artificial Sequence
  Description of Artificial Sequence: Synthetic peptide
  Seed: KSTVMAAFTG
KCTVMAAFTM

SEQ ID NO: 43306 - protein, 10 aa, Artificial Sequence
  Description of Artificial Sequence: Synthetic peptide
  Seed: KSTVMAAFTG
KCTVMAAFTF

SEQ ID NO: 43307 - protein, 10 aa, Artificial Sequence
  Description of Artificial Sequence: Synthetic peptide
  Seed: KSTVMAAFTG
KCTVMAAFTW

SEQ ID NO: 43308 - protein, 10 aa, Artificial Sequence
  Description of Artificial Sequence: Synthetic peptide
  Seed: KSTVMAAFTG
KCTVMAAFTY

SEQ ID NO: 43309 - protein, 10 aa, Artificial Sequence
  Description of Artificial Sequence: Synthetic peptide
  Seed: KSTVMAAFTG
KCTVMAAFTV

SEQ ID NO: 43310 - protein, 10 aa, Artificial Sequence
  Description of Artificial Sequence: Synthetic peptide
  Seed: KSTVMAAFTG
KQTVMAAFTI

SEQ ID NO: 43311 - protein, 10 aa, Artificial Sequence
  Description of Artificial Sequence: Synthetic peptide
  Seed: KSTVMAAFTG
KQTVMAAFTL

SEQ ID NO: 43312 - protein, 10 aa, Artificial Sequence
  Description of Artificial Sequence: Synthetic peptide
  Seed: KSTVMAAFTG
KQTVMAAFTM

SEQ ID NO: 43313 - protein, 10 aa, Artificial Sequence
  Description of Artificial Sequence: Synthetic peptide
  Seed: KSTVMAAFTG
KQTVMAAFTF

SEQ ID NO: 43314 - protein, 10 aa, Artificial Sequence
  Description of Artificial Sequence: Synthetic peptide
  Seed: KSTVMAAFTG
KQTVMAAFTW

SEQ ID NO: 43315 - protein, 10 aa, Artificial Sequence
  Description of Artificial Sequence: Synthetic peptide
  Seed: KSTVMAAFTG
KQTVMAAFTY

SEQ ID NO: 43316 - protein, 10 aa, Artificial Sequence
  Description of Artificial Sequence: Synthetic peptide
  Seed: KSTVMAAFTG
KQTVMAAFTV

SEQ ID NO: 43317 - protein, 10 aa, Artificial Sequence
  Description of Artificial Sequence: Synthetic peptide
  Seed: KSTVMAAFTG
KETVMAAFTI

SEQ ID NO: 43318 - protein, 10 aa, Artificial Sequence
  Description of Artificial Sequence: Synthetic peptide
  Seed: KSTVMAAFTG
KITVMAAFTW

SEQ ID NO: 43319 - protein, 10 aa, Artificial Sequence
  Description of Artificial Sequence: Synthetic peptide
  Seed: KSTVMAAFTG
KITVMAAFTY

SEQ ID NO: 43320 - protein, 10 aa, Artificial Sequence
  Description of Artificial Sequence: Synthetic peptide
  Seed: KSTVMAAFTG
KITVMAAFTV

SEQ ID NO: 43321 - protein, 10 aa, Artificial Sequence
  Description of Artificial Sequence: Synthetic peptide
  Seed: KSTVMAAFTG
KFTVMAAFTL

SEQ ID NO: 43322 - protein, 10 aa, Artificial Sequence
  Description of Artificial Sequence: Synthetic peptide
  Seed: KSTVMAAFTG
KFTVMAAFTF

SEQ ID NO: 43323 - protein, 10 aa, Artificial Sequence
  Description of Artificial Sequence: Synthetic peptide
  Seed: KSTVMAAFTG
KFTVMAAFTW

SEQ ID NO: 43324 - protein, 10 aa, Artificial Sequence
  Description of Artificial Sequence: Synthetic peptide
  Seed: KSTVMAAFTG
KFTVMAAFTY

SEQ ID NO: 43325 - protein, 10 aa, Artificial Sequence
  Description of Artificial Sequence: Synthetic peptide
  Seed: KSTVMAAFTG
KFTVMAAFTV

SEQ ID NO: 43326 - protein, 10 aa, Artificial Sequence
  Description of Artificial Sequence: Synthetic peptide
  Seed: KSTVMAAFTG
KPTVMAAFTI

SEQ ID NO: 43327 - protein, 10 aa, Artificial Sequence
  Description of Artificial Sequence: Synthetic peptide
  Seed: KSTVMAAFTG
KPTVMAAFTL

SEQ ID NO: 43328 - protein, 10 aa, Artificial Sequence
  Description of Artificial Sequence: Synthetic peptide
  Seed: KSTVMAAFTG
KPTVMAAFTM

SEQ ID NO: 43329 - protein, 10 aa, Artificial Sequence
  Description of Artificial Sequence: Synthetic peptide
  Seed: KSTVMAAFTG
KPTVMAAFTF

SEQ ID NO: 43330 - protein, 10 aa, Artificial Sequence
  Description of Artificial Sequence: Synthetic peptide
  Seed: KSTVMAAFTG
KPTVMAAFTW

SEQ ID NO: 43331 - protein, 10 aa, Artificial Sequence
  Description of Artificial Sequence: Synthetic peptide
  Seed: KSTVMAAFTG
KPTVMAAFTY

SEQ ID NO: 43332 - protein, 10 aa, Artificial Sequence
  Description of Artificial Sequence: Synthetic peptide
  Seed: KSTVMAAFTG
KPTVMAAFTV

SEQ ID NO: 43333 - protein, 10 aa, Artificial Sequence
  Description of Artificial Sequence: Synthetic peptide
  Seed: KSTVMAAFTG
KSTVMAAFTA

SEQ ID NO: 43334 - protein, 10 aa, Artificial Sequence
  Description of Artificial Sequence: Synthetic peptide
  Seed: KSTVMAAFTG
KSTVMAAFTN

SEQ ID NO: 43335 - protein, 10 aa, Artificial Sequence
  Description of Artificial Sequence: Synthetic peptide
  Seed: KSTVMAAFTG
KSTVMAAFTC

SEQ ID NO: 43336 - protein, 10 aa, Artificial Sequence
  Description of Artificial Sequence: Synthetic peptide
  Seed: KSTVMAAFTG
KSTVMAAFTI

SEQ ID NO: 43337 - protein, 10 aa, Artificial Sequence
  Description of Artificial Sequence: Synthetic peptide
  Seed: KSTVMAAFTG
KSTVMAAFTL

SEQ ID NO: 43338 - protein, 10 aa, Artificial Sequence
  Description of Artificial Sequence: Synthetic peptide
  Seed: KSTVMAAFTG
KSTVMAAFTM

SEQ ID NO: 43339 - protein, 10 aa, Artificial Sequence
  Description of Artificial Sequence: Synthetic peptide
  Seed: KSTVMAAFTG
KSTVMAAFTF

SEQ ID NO: 43340 - protein, 10 aa, Artificial Sequence
  Description of Artificial Sequence: Synthetic peptide
  Seed: KSTVMAAFTG
KSTVMAAFTW

SEQ ID NO: 43341 - protein, 10 aa, Artificial Sequence
  Description of Artificial Sequence: Synthetic peptide
  Seed: KSTVMAAFTG
KFTVMAAFTM

SEQ ID NO: 43342 - protein, 10 aa, Artificial Sequence
  Description of Artificial Sequence: Synthetic peptide
  Seed: KSTVMAAFTG
KFTVMAAFTI

SEQ ID NO: 43343 - protein, 10 aa, Artificial Sequence
  Description of Artificial Sequence: Synthetic peptide
  Seed: KSTVMAAFTG
KLTVMAAFTI

SEQ ID NO: 43344 - protein, 10 aa, Artificial Sequence
  Description of Artificial Sequence: Synthetic peptide
  Seed: KSTVMAAFTG
KMTVMAAFTV

SEQ ID NO: 43345 - protein, 10 aa, Artificial Sequence
  Description of Artificial Sequence: Synthetic peptide
  Seed: KSTVMAAFTG
KLTVMAAFTL

SEQ ID NO: 43346 - protein, 10 aa, Artificial Sequence
  Description of Artificial Sequence: Synthetic peptide
  Seed: KSTVMAAFTG
KLTVMAAFTM

SEQ ID NO: 43347 - protein, 10 aa, Artificial Sequence
  Description of Artificial Sequence: Synthetic peptide
  Seed: KSTVMAAFTG
KLTVMAAFTF

SEQ ID NO: 43348 - protein, 10 aa, Artificial Sequence
  Description of Artificial Sequence: Synthetic peptide
  Seed: KSTVMAAFTG
KLTVMAAFTW

SEQ ID NO: 43349 - protein, 10 aa, Artificial Sequence
  Description of Artificial Sequence: Synthetic peptide
  Seed: KSTVMAAFTG
KLTVMAAFTY

SEQ ID NO: 43350 - protein, 10 aa, Artificial Sequence
  Description of Artificial Sequence: Synthetic peptide
  Seed: KSTVMAAFTG
KLTVMAAFTV

SEQ ID NO: 43351 - protein, 10 aa, Artificial Sequence
  Description of Artificial Sequence: Synthetic peptide
  Seed: KSTVMAAFTG
KKTVMAAFTI

SEQ ID NO: 43352 - protein, 10 aa, Artificial Sequence
  Description of Artificial Sequence: Synthetic peptide
  Seed: KSTVMAAFTG
KKTVMAAFTL

SEQ ID NO: 43353 - protein, 10 aa, Artificial Sequence
  Description of Artificial Sequence: Synthetic peptide
  Seed: KSTVMAAFTG
KKTVMAAFTM

SEQ ID NO: 43354 - protein, 10 aa, Artificial Sequence
  Description of Artificial Sequence: Synthetic peptide
  Seed: KSTVMAAFTG
KKTVMAAFTF

SEQ ID NO: 43355 - protein, 10 aa, Artificial Sequence
  Description of Artificial Sequence: Synthetic peptide
  Seed: KSTVMAAFTG
KKTVMAAFTW

SEQ ID NO: 43356 - protein, 10 aa, Artificial Sequence
  Description of Artificial Sequence: Synthetic peptide
  Seed: KSTVMAAFTG
KKTVMAAFTY

SEQ ID NO: 43357 - protein, 10 aa, Artificial Sequence
  Description of Artificial Sequence: Synthetic peptide
  Seed: KSTVMAAFTG
KKTVMAAFTV

SEQ ID NO: 43358 - protein, 10 aa, Artificial Sequence
  Description of Artificial Sequence: Synthetic peptide
  Seed: KSTVMAAFTG
KMTVMAAFTI

SEQ ID NO: 43359 - protein, 10 aa, Artificial Sequence
  Description of Artificial Sequence: Synthetic peptide
  Seed: KSTVMAAFTG
KMTVMAAFTL

SEQ ID NO: 43360 - protein, 10 aa, Artificial Sequence
  Description of Artificial Sequence: Synthetic peptide
  Seed: KSTVMAAFTG
KMTVMAAFTM

SEQ ID NO: 43361 - protein, 10 aa, Artificial Sequence
  Description of Artificial Sequence: Synthetic peptide
  Seed: KSTVMAAFTG
KMTVMAAFTF

SEQ ID NO: 43362 - protein, 10 aa, Artificial Sequence
  Description of Artificial Sequence: Synthetic peptide
  Seed: KSTVMAAFTG
KMTVMAAFTW

SEQ ID NO: 43363 - protein, 10 aa, Artificial Sequence
  Description of Artificial Sequence: Synthetic peptide
  Seed: KSTVMAAFTG
KMTVMAAFTY

SEQ ID NO: 43364 - protein, 11 aa, Artificial Sequence
  Description of Artificial Sequence: Synthetic peptide
  Seed: KRVDGKWMREL
KRVDGKWMREF

SEQ ID NO: 43365 - protein, 11 aa, Artificial Sequence
  Description of Artificial Sequence: Synthetic peptide
  Seed: KRVDGKWMREL
KRVDGKWMREM

SEQ ID NO: 43366 - protein, 11 aa, Artificial Sequence
  Description of Artificial Sequence: Synthetic peptide
  Seed: KRVDGKWMREL
KRVDGKWMREK

SEQ ID NO: 43367 - protein, 10 aa, Artificial Sequence
  Description of Artificial Sequence: Synthetic peptide
  Seed: KMIDGIGRFY
KQIDGIGRFS

SEQ ID NO: 43368 - protein, 10 aa, Artificial Sequence
  Description of Artificial Sequence: Synthetic peptide
  Seed: KMIDGIGRFY
KQIDGIGRFE

SEQ ID NO: 43369 - protein, 10 aa, Artificial Sequence
  Description of Artificial Sequence: Synthetic peptide
  Seed: KMIDGIGRFY
KQIDGIGRFG

SEQ ID NO: 43370 - protein, 10 aa, Artificial Sequence
  Description of Artificial Sequence: Synthetic peptide
  Seed: KMIDGIGRFY
KQIDGIGRFH

SEQ ID NO: 43371 - protein, 10 aa, Artificial Sequence
  Description of Artificial Sequence: Synthetic peptide
  Seed: KMIDGIGRFY
KQIDGIGRFI

SEQ ID NO: 43372 - protein, 10 aa, Artificial Sequence
  Description of Artificial Sequence: Synthetic peptide
  Seed: KMIDGIGRFY
KQIDGIGRFL

SEQ ID NO: 43373 - protein, 10 aa, Artificial Sequence
  Description of Artificial Sequence: Synthetic peptide
  Seed: KMIDGIGRFY
KQIDGIGRFK

SEQ ID NO: 43374 - protein, 10 aa, Artificial Sequence
  Description of Artificial Sequence: Synthetic peptide
  Seed: KMIDGIGRFY
KQIDGIGRFM

SEQ ID NO: 43375 - protein, 10 aa, Artificial Sequence
  Description of Artificial Sequence: Synthetic peptide
  Seed: KMIDGIGRFY
KQIDGIGRFF

SEQ ID NO: 43376 - protein, 10 aa, Artificial Sequence
  Description of Artificial Sequence: Synthetic peptide
  Seed: KMIDGIGRFY
KQIDGIGRFP

SEQ ID NO: 43377 - protein, 10 aa, Artificial Sequence
  Description of Artificial Sequence: Synthetic peptide
  Seed: KMIDGIGRFY
KQIDGIGRFT

SEQ ID NO: 43378 - protein, 10 aa, Artificial Sequence
  Description of Artificial Sequence: Synthetic peptide
  Seed: KMIDGIGRFY
KHIDGIGRFM

SEQ ID NO: 43379 - protein, 10 aa, Artificial Sequence
  Description of Artificial Sequence: Synthetic peptide
  Seed: KMIDGIGRFY
KQIDGIGRFW

SEQ ID NO: 43380 - protein, 10 aa, Artificial Sequence
  Description of Artificial Sequence: Synthetic peptide
  Seed: KMIDGIGRFY
KQIDGIGRFY

SEQ ID NO: 43381 - protein, 10 aa, Artificial Sequence
  Description of Artificial Sequence: Synthetic peptide
  Seed: KMIDGIGRFY
KQIDGIGRFV

SEQ ID NO: 43382 - protein, 10 aa, Artificial Sequence
  Description of Artificial Sequence: Synthetic peptide
  Seed: KMIDGIGRFY
KEIDGIGRFK

SEQ ID NO: 43383 - protein, 10 aa, Artificial Sequence
  Description of Artificial Sequence: Synthetic peptide
  Seed: KMIDGIGRFY
KEIDGIGRFF

SEQ ID NO: 43384 - protein, 10 aa, Artificial Sequence
  Description of Artificial Sequence: Synthetic peptide
  Seed: KMIDGIGRFY
KEIDGIGRFY

SEQ ID NO: 43385 - protein, 10 aa, Artificial Sequence
  Description of Artificial Sequence: Synthetic peptide
  Seed: KMIDGIGRFY
KGIDGIGRFK

SEQ ID NO: 43386 - protein, 10 aa, Artificial Sequence
  Description of Artificial Sequence: Synthetic peptide
  Seed: KMIDGIGRFY
KGIDGIGRFW

SEQ ID NO: 43387 - protein, 10 aa, Artificial Sequence
  Description of Artificial Sequence: Synthetic peptide
  Seed: KMIDGIGRFY
KGIDGIGRFY

SEQ ID NO: 43388 - protein, 10 aa, Artificial Sequence
  Description of Artificial Sequence: Synthetic peptide
  Seed: KMIDGIGRFY
KQIDGIGRFQ

SEQ ID NO: 43389 - protein, 10 aa, Artificial Sequence
  Description of Artificial Sequence: Synthetic peptide
  Seed: KMIDGIGRFY
KQIDGIGRFC

SEQ ID NO: 43390 - protein, 10 aa, Artificial Sequence
  Description of Artificial Sequence: Synthetic peptide
  Seed: KMIDGIGRFY
KQIDGIGRFD

SEQ ID NO: 43391 - protein, 10 aa, Artificial Sequence
  Description of Artificial Sequence: Synthetic peptide
  Seed: KMIDGIGRFY
KQIDGIGRFN

SEQ ID NO: 43392 - protein, 10 aa, Artificial Sequence
  Description of Artificial Sequence: Synthetic peptide
  Seed: KMIDGIGRFY
KAIDGIGRFI

SEQ ID NO: 43393 - protein, 10 aa, Artificial Sequence
  Description of Artificial Sequence: Synthetic peptide
  Seed: KMIDGIGRFY
KAIDGIGRFL

SEQ ID NO: 43394 - protein, 10 aa, Artificial Sequence
  Description of Artificial Sequence: Synthetic peptide
  Seed: KMIDGIGRFY
KAIDGIGRFK

SEQ ID NO: 43395 - protein, 10 aa, Artificial Sequence
  Description of Artificial Sequence: Synthetic peptide
  Seed: KMIDGIGRFY
KAIDGIGRFM

SEQ ID NO: 43396 - protein, 10 aa, Artificial Sequence
  Description of Artificial Sequence: Synthetic peptide
  Seed: KMIDGIGRFY
KAIDGIGRFF

SEQ ID NO: 43397 - protein, 10 aa, Artificial Sequence
  Description of Artificial Sequence: Synthetic peptide
  Seed: KMIDGIGRFY
KAIDGIGRFW

SEQ ID NO: 43398 - protein, 10 aa, Artificial Sequence
  Description of Artificial Sequence: Synthetic peptide
  Seed: KMIDGIGRFY
KAIDGIGRFY

SEQ ID NO: 43399 - protein, 10 aa, Artificial Sequence
  Description of Artificial Sequence: Synthetic peptide
  Seed: KMIDGIGRFY
KAIDGIGRFV

SEQ ID NO: 43400 - protein, 10 aa, Artificial Sequence
  Description of Artificial Sequence: Synthetic peptide
  Seed: KMIDGIGRFY
KRIDGIGRFK

SEQ ID NO: 43401 - protein, 10 aa, Artificial Sequence
  Description of Artificial Sequence: Synthetic peptide
  Seed: KMIDGIGRFY
KRIDGIGRFF

SEQ ID NO: 43402 - protein, 10 aa, Artificial Sequence
  Description of Artificial Sequence: Synthetic peptide
  Seed: KMIDGIGRFY
KRIDGIGRFY

SEQ ID NO: 43403 - protein, 10 aa, Artificial Sequence
  Description of Artificial Sequence: Synthetic peptide
  Seed: KMIDGIGRFY
KNIDGIGRFK

SEQ ID NO: 43404 - protein, 10 aa, Artificial Sequence
  Description of Artificial Sequence: Synthetic peptide
  Seed: KMIDGIGRFY
KNIDGIGRFY

SEQ ID NO: 43405 - protein, 10 aa, Artificial Sequence
  Description of Artificial Sequence: Synthetic peptide
  Seed: KMIDGIGRFY
KDIDGIGRFK

SEQ ID NO: 43406 - protein, 10 aa, Artificial Sequence
  Description of Artificial Sequence: Synthetic peptide
  Seed: KMIDGIGRFY
KDIDGIGRFY

SEQ ID NO: 43407 - protein, 10 aa, Artificial Sequence
  Description of Artificial Sequence: Synthetic peptide
  Seed: KMIDGIGRFY
KCIDGIGRFK

SEQ ID NO: 43408 - protein, 10 aa, Artificial Sequence
  Description of Artificial Sequence: Synthetic peptide
  Seed: KMIDGIGRFY
KCIDGIGRFY

SEQ ID NO: 43409 - protein, 10 aa, Artificial Sequence
  Description of Artificial Sequence: Synthetic peptide
  Seed: KMIDGIGRFY
KQIDGIGRFA

SEQ ID NO: 43410 - protein, 10 aa, Artificial Sequence
  Description of Artificial Sequence: Synthetic peptide
  Seed: KMIDGIGRFY
KQIDGIGRFR

SEQ ID NO: 43411 - protein, 10 aa, Artificial Sequence
  Description of Artificial Sequence: Synthetic peptide
  Seed: KMIDGIGRFY
KHIDGIGRFK

SEQ ID NO: 43412 - protein, 10 aa, Artificial Sequence
  Description of Artificial Sequence: Synthetic peptide
  Seed: KMIDGIGRFY
KHIDGIGRFF

SEQ ID NO: 43413 - protein, 10 aa, Artificial Sequence
  Description of Artificial Sequence: Synthetic peptide
  Seed: KMIDGIGRFY
KWIDGIGRFF

SEQ ID NO: 43414 - protein, 10 aa, Artificial Sequence
  Description of Artificial Sequence: Synthetic peptide
  Seed: KMIDGIGRFY
KSIDGIGRFW

SEQ ID NO: 43415 - protein, 10 aa, Artificial Sequence
  Description of Artificial Sequence: Synthetic peptide
  Seed: KMIDGIGRFY
KFIDGIGRFF

SEQ ID NO: 43416 - protein, 10 aa, Artificial Sequence
  Description of Artificial Sequence: Synthetic peptide
  Seed: KMIDGIGRFY
KFIDGIGRFY

SEQ ID NO: 43417 - protein, 10 aa, Artificial Sequence
  Description of Artificial Sequence: Synthetic peptide
  Seed: KMIDGIGRFY
KPIDGIGRFK

SEQ ID NO: 43418 - protein, 10 aa, Artificial Sequence
  Description of Artificial Sequence: Synthetic peptide
  Seed: KMIDGIGRFY
KPIDGIGRFY

SEQ ID NO: 43419 - protein, 10 aa, Artificial Sequence
  Description of Artificial Sequence: Synthetic peptide
  Seed: KMIDGIGRFY
KSIDGIGRFI

SEQ ID NO: 43420 - protein, 10 aa, Artificial Sequence
  Description of Artificial Sequence: Synthetic peptide
  Seed: KMIDGIGRFY
KSIDGIGRFL

SEQ ID NO: 43421 - protein, 10 aa, Artificial Sequence
  Description of Artificial Sequence: Synthetic peptide
  Seed: KMIDGIGRFY
KSIDGIGRFK

SEQ ID NO: 43422 - protein, 10 aa, Artificial Sequence
  Description of Artificial Sequence: Synthetic peptide
  Seed: KMIDGIGRFY
KSIDGIGRFM

SEQ ID NO: 43423 - protein, 10 aa, Artificial Sequence
  Description of Artificial Sequence: Synthetic peptide
  Seed: KMIDGIGRFY
KSIDGIGRFF

SEQ ID NO: 43424 - protein, 10 aa, Artificial Sequence
  Description of Artificial Sequence: Synthetic peptide
  Seed: KMIDGIGRFY
KSIDGIGRFY

SEQ ID NO: 43425 - protein, 10 aa, Artificial Sequence
  Description of Artificial Sequence: Synthetic peptide
  Seed: KMIDGIGRFY
KHIDGIGRFY

SEQ ID NO: 43426 - protein, 10 aa, Artificial Sequence
  Description of Artificial Sequence: Synthetic peptide
  Seed: KMIDGIGRFY
KSIDGIGRFV

SEQ ID NO: 43427 - protein, 10 aa, Artificial Sequence
  Description of Artificial Sequence: Synthetic peptide
  Seed: KMIDGIGRFY
KTIDGIGRFI

SEQ ID NO: 43428 - protein, 10 aa, Artificial Sequence
  Description of Artificial Sequence: Synthetic peptide
  Seed: KMIDGIGRFY
KTIDGIGRFL

SEQ ID NO: 43429 - protein, 10 aa, Artificial Sequence
  Description of Artificial Sequence: Synthetic peptide
  Seed: KMIDGIGRFY
KTIDGIGRFK

SEQ ID NO: 43430 - protein, 10 aa, Artificial Sequence
  Description of Artificial Sequence: Synthetic peptide
  Seed: KMIDGIGRFY
KTIDGIGRFM

SEQ ID NO: 43431 - protein, 10 aa, Artificial Sequence
  Description of Artificial Sequence: Synthetic peptide
  Seed: KMIDGIGRFY
KTIDGIGRFF

SEQ ID NO: 43432 - protein, 10 aa, Artificial Sequence
  Description of Artificial Sequence: Synthetic peptide
  Seed: KMIDGIGRFY
KTIDGIGRFW

SEQ ID NO: 43433 - protein, 10 aa, Artificial Sequence
  Description of Artificial Sequence: Synthetic peptide
  Seed: KMIDGIGRFY
KTIDGIGRFY

SEQ ID NO: 43434 - protein, 10 aa, Artificial Sequence
  Description of Artificial Sequence: Synthetic peptide
  Seed: KMIDGIGRFY
KTIDGIGRFV

SEQ ID NO: 43435 - protein, 10 aa, Artificial Sequence
  Description of Artificial Sequence: Synthetic peptide
  Seed: KMIDGIGRFY
KFIDGIGRFK

SEQ ID NO: 43436 - protein, 10 aa, Artificial Sequence
  Description of Artificial Sequence: Synthetic peptide
  Seed: KMIDGIGRFY
KMIDGIGRFW

SEQ ID NO: 43437 - protein, 10 aa, Artificial Sequence
  Description of Artificial Sequence: Synthetic peptide
  Seed: KMIDGIGRFY
KMIDGIGRFF

SEQ ID NO: 43438 - protein, 10 aa, Artificial Sequence
  Description of Artificial Sequence: Synthetic peptide
  Seed: KMIDGIGRFY
KMIDGIGRFM

SEQ ID NO: 43439 - protein, 10 aa, Artificial Sequence
  Description of Artificial Sequence: Synthetic peptide
  Seed: KMIDGIGRFY
KIIDGIGRFR

SEQ ID NO: 43440 - protein, 10 aa, Artificial Sequence
  Description of Artificial Sequence: Synthetic peptide
  Seed: KMIDGIGRFY
KIIDGIGRFK

SEQ ID NO: 43441 - protein, 10 aa, Artificial Sequence
  Description of Artificial Sequence: Synthetic peptide
  Seed: KMIDGIGRFY
KIIDGIGRFF

SEQ ID NO: 43442 - protein, 10 aa, Artificial Sequence
  Description of Artificial Sequence: Synthetic peptide
  Seed: KMIDGIGRFY
KIIDGIGRFW

SEQ ID NO: 43443 - protein, 10 aa, Artificial Sequence
  Description of Artificial Sequence: Synthetic peptide
  Seed: KMIDGIGRFY
KIIDGIGRFY

SEQ ID NO: 43444 - protein, 10 aa, Artificial Sequence
  Description of Artificial Sequence: Synthetic peptide
  Seed: KMIDGIGRFY
KLIDGIGRFR

SEQ ID NO: 43445 - protein, 10 aa, Artificial Sequence
  Description of Artificial Sequence: Synthetic peptide
  Seed: KMIDGIGRFY
KLIDGIGRFK

SEQ ID NO: 43446 - protein, 10 aa, Artificial Sequence
  Description of Artificial Sequence: Synthetic peptide
  Seed: KMIDGIGRFY
KLIDGIGRFM

SEQ ID NO: 43447 - protein, 10 aa, Artificial Sequence
  Description of Artificial Sequence: Synthetic peptide
  Seed: KMIDGIGRFY
KLIDGIGRFF

SEQ ID NO: 43448 - protein, 10 aa, Artificial Sequence
  Description of Artificial Sequence: Synthetic peptide
  Seed: KMIDGIGRFY
KLIDGIGRFW

SEQ ID NO: 43449 - protein, 10 aa, Artificial Sequence
  Description of Artificial Sequence: Synthetic peptide
  Seed: KMIDGIGRFY
KLIDGIGRFY

SEQ ID NO: 43450 - protein, 10 aa, Artificial Sequence
  Description of Artificial Sequence: Synthetic peptide
  Seed: KMIDGIGRFY
KKIDGIGRFK

SEQ ID NO: 43451 - protein, 10 aa, Artificial Sequence
  Description of Artificial Sequence: Synthetic peptide
  Seed: KMIDGIGRFY
KKIDGIGRFM

SEQ ID NO: 43452 - protein, 10 aa, Artificial Sequence
  Description of Artificial Sequence: Synthetic peptide
  Seed: KMIDGIGRFY
KKIDGIGRFF

SEQ ID NO: 43453 - protein, 10 aa, Artificial Sequence
  Description of Artificial Sequence: Synthetic peptide
  Seed: KMIDGIGRFY
KKIDGIGRFY

SEQ ID NO: 43454 - protein, 10 aa, Artificial Sequence
  Description of Artificial Sequence: Synthetic peptide
  Seed: KMIDGIGRFY
KMIDGIGRFR

SEQ ID NO: 43455 - protein, 10 aa, Artificial Sequence
  Description of Artificial Sequence: Synthetic peptide
  Seed: KMIDGIGRFY
KMIDGIGRFH

SEQ ID NO: 43456 - protein, 10 aa, Artificial Sequence
  Description of Artificial Sequence: Synthetic peptide
  Seed: KMIDGIGRFY
KMIDGIGRFL

SEQ ID NO: 43457 - protein, 10 aa, Artificial Sequence
  Description of Artificial Sequence: Synthetic peptide
  Seed: KMIDGIGRFY
KMIDGIGRFK

SEQ ID NO: 43458 - protein, 9 aa, Artificial Sequence
  Description of Artificial Sequence: Synthetic peptide
  Seed: KMIDGIGRF
KVIDGIGRV

SEQ ID NO: 43459 - protein, 9 aa, Artificial Sequence
  Description of Artificial Sequence: Synthetic peptide
  Seed: KMIDGIGRF
KVIDGIGRY

SEQ ID NO: 43460 - protein, 9 aa, Artificial Sequence
  Description of Artificial Sequence: Synthetic peptide
  Seed: KMIDGIGRF
KVIDGIGRW

SEQ ID NO: 43461 - protein, 9 aa, Artificial Sequence
  Description of Artificial Sequence: Synthetic peptide
  Seed: KMIDGIGRF
KMIDGIGRC

SEQ ID NO: 43462 - protein, 9 aa, Artificial Sequence
  Description of Artificial Sequence: Synthetic peptide
  Seed: KMIDGIGRF
KLIDGIGRT

SEQ ID NO: 43463 - protein, 9 aa, Artificial Sequence
  Description of Artificial Sequence: Synthetic peptide
  Seed: KMIDGIGRF
KLIDGIGRW

SEQ ID NO: 43464 - protein, 9 aa, Artificial Sequence
  Description of Artificial Sequence: Synthetic peptide
  Seed: KMIDGIGRF
KLIDGIGRY

SEQ ID NO: 43465 - protein, 9 aa, Artificial Sequence
  Description of Artificial Sequence: Synthetic peptide
  Seed: KMIDGIGRF
KLIDGIGRV

SEQ ID NO: 43466 - protein, 9 aa, Artificial Sequence
  Description of Artificial Sequence: Synthetic peptide
  Seed: KMIDGIGRF
KKIDGIGRL

SEQ ID NO: 43467 - protein, 9 aa, Artificial Sequence
  Description of Artificial Sequence: Synthetic peptide
  Seed: KMIDGIGRF
KKIDGIGRM

SEQ ID NO: 43468 - protein, 9 aa, Artificial Sequence
  Description of Artificial Sequence: Synthetic peptide
  Seed: KMIDGIGRF
KKIDGIGRF

SEQ ID NO: 43469 - protein, 9 aa, Artificial Sequence
  Description of Artificial Sequence: Synthetic peptide
  Seed: KMIDGIGRF
KKIDGIGRY

SEQ ID NO: 43470 - protein, 9 aa, Artificial Sequence
  Description of Artificial Sequence: Synthetic peptide
  Seed: KMIDGIGRF
KMIDGIGRA

SEQ ID NO: 43471 - protein, 9 aa, Artificial Sequence
  Description of Artificial Sequence: Synthetic peptide
  Seed: KMIDGIGRF
KMIDGIGRG

SEQ ID NO: 43472 - protein, 9 aa, Artificial Sequence
  Description of Artificial Sequence: Synthetic peptide
  Seed: KMIDGIGRF
KVIDGIGRT

SEQ ID NO: 43473 - protein, 9 aa, Artificial Sequence
  Description of Artificial Sequence: Synthetic peptide
  Seed: KMIDGIGRF
KMIDGIGRH

SEQ ID NO: 43474 - protein, 9 aa, Artificial Sequence
  Description of Artificial Sequence: Synthetic peptide
  Seed: KMIDGIGRF
KMIDGIGRI

SEQ ID NO: 43475 - protein, 9 aa, Artificial Sequence
  Description of Artificial Sequence: Synthetic peptide
  Seed: KMIDGIGRF
KMIDGIGRL

SEQ ID NO: 43476 - protein, 9 aa, Artificial Sequence
  Description of Artificial Sequence: Synthetic peptide
  Seed: KMIDGIGRF
KMIDGIGRM

SEQ ID NO: 43477 - protein, 9 aa, Artificial Sequence
  Description of Artificial Sequence: Synthetic peptide
  Seed: KMIDGIGRF
KMIDGIGRP

SEQ ID NO: 43478 - protein, 9 aa, Artificial Sequence
  Description of Artificial Sequence: Synthetic peptide
  Seed: KMIDGIGRF
KMIDGIGRS

SEQ ID NO: 43479 - protein, 9 aa, Artificial Sequence
  Description of Artificial Sequence: Synthetic peptide
  Seed: KMIDGIGRF
KMIDGIGRT

SEQ ID NO: 43480 - protein, 9 aa, Artificial Sequence
  Description of Artificial Sequence: Synthetic peptide
  Seed: KMIDGIGRF
KMIDGIGRW

SEQ ID NO: 43481 - protein, 9 aa, Artificial Sequence
  Description of Artificial Sequence: Synthetic peptide
  Seed: KMIDGIGRF
KMIDGIGRY

SEQ ID NO: 43482 - protein, 9 aa, Artificial Sequence
  Description of Artificial Sequence: Synthetic peptide
  Seed: KMIDGIGRF
KLIDGIGRS

SEQ ID NO: 43483 - protein, 9 aa, Artificial Sequence
  Description of Artificial Sequence: Synthetic peptide
  Seed: KMIDGIGRF
KLIDGIGRP

SEQ ID NO: 43484 - protein, 9 aa, Artificial Sequence
  Description of Artificial Sequence: Synthetic peptide
  Seed: KMIDGIGRF
KLIDGIGRF

SEQ ID NO: 43485 - protein, 9 aa, Artificial Sequence
  Description of Artificial Sequence: Synthetic peptide
  Seed: KMIDGIGRF
KLIDGIGRM

SEQ ID NO: 43486 - protein, 9 aa, Artificial Sequence
  Description of Artificial Sequence: Synthetic peptide
  Seed: KMIDGIGRF
KGIDGIGRY

SEQ ID NO: 43487 - protein, 9 aa, Artificial Sequence
  Description of Artificial Sequence: Synthetic peptide
  Seed: KMIDGIGRF
KHIDGIGRM

SEQ ID NO: 43488 - protein, 9 aa, Artificial Sequence
  Description of Artificial Sequence: Synthetic peptide
  Seed: KMIDGIGRF
KHIDGIGRF

SEQ ID NO: 43489 - protein, 9 aa, Artificial Sequence
  Description of Artificial Sequence: Synthetic peptide
  Seed: KMIDGIGRF
KHIDGIGRY

SEQ ID NO: 43490 - protein, 9 aa, Artificial Sequence
  Description of Artificial Sequence: Synthetic peptide
  Seed: KMIDGIGRF
KIIDGIGRA

SEQ ID NO: 43491 - protein, 9 aa, Artificial Sequence
  Description of Artificial Sequence: Synthetic peptide
  Seed: KMIDGIGRF
KIIDGIGRC

SEQ ID NO: 43492 - protein, 9 aa, Artificial Sequence
  Description of Artificial Sequence: Synthetic peptide
  Seed: KMIDGIGRF
KIIDGIGRI

SEQ ID NO: 43493 - protein, 9 aa, Artificial Sequence
  Description of Artificial Sequence: Synthetic peptide
  Seed: KMIDGIGRF
KIIDGIGRL

SEQ ID NO: 43494 - protein, 9 aa, Artificial Sequence
  Description of Artificial Sequence: Synthetic peptide
  Seed: KMIDGIGRF
KIIDGIGRM

SEQ ID NO: 43495 - protein, 9 aa, Artificial Sequence
  Description of Artificial Sequence: Synthetic peptide
  Seed: KMIDGIGRF
KIIDGIGRF

SEQ ID NO: 43496 - protein, 9 aa, Artificial Sequence
  Description of Artificial Sequence: Synthetic peptide
  Seed: KMIDGIGRF
KIIDGIGRT

SEQ ID NO: 43497 - protein, 9 aa, Artificial Sequence
  Description of Artificial Sequence: Synthetic peptide
  Seed: KMIDGIGRF
KIIDGIGRW

SEQ ID NO: 43498 - protein, 9 aa, Artificial Sequence
  Description of Artificial Sequence: Synthetic peptide
  Seed: KMIDGIGRF
KIIDGIGRY

SEQ ID NO: 43499 - protein, 9 aa, Artificial Sequence
  Description of Artificial Sequence: Synthetic peptide
  Seed: KMIDGIGRF
KIIDGIGRV

SEQ ID NO: 43500 - protein, 9 aa, Artificial Sequence
  Description of Artificial Sequence: Synthetic peptide
  Seed: KMIDGIGRF
KLIDGIGRA

SEQ ID NO: 43501 - protein, 9 aa, Artificial Sequence
  Description of Artificial Sequence: Synthetic peptide
  Seed: KMIDGIGRF
KLIDGIGRC

SEQ ID NO: 43502 - protein, 9 aa, Artificial Sequence
  Description of Artificial Sequence: Synthetic peptide
  Seed: KMIDGIGRF
KLIDGIGRG

SEQ ID NO: 43503 - protein, 9 aa, Artificial Sequence
  Description of Artificial Sequence: Synthetic peptide
  Seed: KMIDGIGRF
KLIDGIGRI

SEQ ID NO: 43504 - protein, 9 aa, Artificial Sequence
  Description of Artificial Sequence: Synthetic peptide
  Seed: KMIDGIGRF
KLIDGIGRL

SEQ ID NO: 43505 - protein, 9 aa, Artificial Sequence
  Description of Artificial Sequence: Synthetic peptide
  Seed: KMIDGIGRF
KMIDGIGRV

SEQ ID NO: 43506 - protein, 9 aa, Artificial Sequence
  Description of Artificial Sequence: Synthetic peptide
  Seed: KMIDGIGRF
KFIDGIGRI

SEQ ID NO: 43507 - protein, 9 aa, Artificial Sequence
  Description of Artificial Sequence: Synthetic peptide
  Seed: KMIDGIGRF
KFIDGIGRL

SEQ ID NO: 43508 - protein, 9 aa, Artificial Sequence
  Description of Artificial Sequence: Synthetic peptide
  Seed: KMIDGIGRF
KTIDGIGRV

SEQ ID NO: 43509 - protein, 9 aa, Artificial Sequence
  Description of Artificial Sequence: Synthetic peptide
  Seed: KMIDGIGRF
KWIDGIGRL

SEQ ID NO: 43510 - protein, 9 aa, Artificial Sequence
  Description of Artificial Sequence: Synthetic peptide
  Seed: KMIDGIGRF
KWIDGIGRM

SEQ ID NO: 43511 - protein, 9 aa, Artificial Sequence
  Description of Artificial Sequence: Synthetic peptide
  Seed: KMIDGIGRF
KWIDGIGRF

SEQ ID NO: 43512 - protein, 9 aa, Artificial Sequence
  Description of Artificial Sequence: Synthetic peptide
  Seed: KMIDGIGRF
KWIDGIGRW

SEQ ID NO: 43513 - protein, 9 aa, Artificial Sequence
  Description of Artificial Sequence: Synthetic peptide
  Seed: KMIDGIGRF
KWIDGIGRY

SEQ ID NO: 43514 - protein, 9 aa, Artificial Sequence
  Description of Artificial Sequence: Synthetic peptide
  Seed: KMIDGIGRF
KWIDGIGRV

SEQ ID NO: 43515 - protein, 9 aa, Artificial Sequence
  Description of Artificial Sequence: Synthetic peptide
  Seed: KMIDGIGRF
KYIDGIGRI

SEQ ID NO: 43516 - protein, 9 aa, Artificial Sequence
  Description of Artificial Sequence: Synthetic peptide
  Seed: KMIDGIGRF
KYIDGIGRL

SEQ ID NO: 43517 - protein, 9 aa, Artificial Sequence
  Description of Artificial Sequence: Synthetic peptide
  Seed: KMIDGIGRF
KYIDGIGRM

SEQ ID NO: 43518 - protein, 9 aa, Artificial Sequence
  Description of Artificial Sequence: Synthetic peptide
  Seed: KMIDGIGRF
KYIDGIGRF

SEQ ID NO: 43519 - protein, 9 aa, Artificial Sequence
  Description of Artificial Sequence: Synthetic peptide
  Seed: KMIDGIGRF
KYIDGIGRW

SEQ ID NO: 43520 - protein, 9 aa, Artificial Sequence
  Description of Artificial Sequence: Synthetic peptide
  Seed: KMIDGIGRF
KYIDGIGRY

SEQ ID NO: 43521 - protein, 9 aa, Artificial Sequence
  Description of Artificial Sequence: Synthetic peptide
  Seed: KMIDGIGRF
KYIDGIGRV

SEQ ID NO: 43522 - protein, 9 aa, Artificial Sequence
  Description of Artificial Sequence: Synthetic peptide
  Seed: KMIDGIGRF
KVIDGIGRA

SEQ ID NO: 43523 - protein, 9 aa, Artificial Sequence
  Description of Artificial Sequence: Synthetic peptide
  Seed: KMIDGIGRF
KVIDGIGRC

SEQ ID NO: 43524 - protein, 9 aa, Artificial Sequence
  Description of Artificial Sequence: Synthetic peptide
  Seed: KMIDGIGRF
KVIDGIGRI

SEQ ID NO: 43525 - protein, 9 aa, Artificial Sequence
  Description of Artificial Sequence: Synthetic peptide
  Seed: KMIDGIGRF
KVIDGIGRL

SEQ ID NO: 43526 - protein, 9 aa, Artificial Sequence
  Description of Artificial Sequence: Synthetic peptide
  Seed: KMIDGIGRF
KVIDGIGRM

SEQ ID NO: 43527 - protein, 9 aa, Artificial Sequence
  Description of Artificial Sequence: Synthetic peptide
  Seed: KMIDGIGRF
KVIDGIGRF

SEQ ID NO: 43528 - protein, 9 aa, Artificial Sequence
  Description of Artificial Sequence: Synthetic peptide
  Seed: KMIDGIGRF
KWIDGIGRI

SEQ ID NO: 43529 - protein, 9 aa, Artificial Sequence
  Description of Artificial Sequence: Synthetic peptide
  Seed: KMIDGIGRF
KTIDGIGRY

SEQ ID NO: 43530 - protein, 9 aa, Artificial Sequence
  Description of Artificial Sequence: Synthetic peptide
  Seed: KMIDGIGRF
KFIDGIGRM

SEQ ID NO: 43531 - protein, 9 aa, Artificial Sequence
  Description of Artificial Sequence: Synthetic peptide
  Seed: KMIDGIGRF
KTIDGIGRW

SEQ ID NO: 43532 - protein, 9 aa, Artificial Sequence
  Description of Artificial Sequence: Synthetic peptide
  Seed: KMIDGIGRF
KFIDGIGRF

SEQ ID NO: 43533 - protein, 9 aa, Artificial Sequence
  Description of Artificial Sequence: Synthetic peptide
  Seed: KMIDGIGRF
KFIDGIGRW

SEQ ID NO: 43534 - protein, 9 aa, Artificial Sequence
  Description of Artificial Sequence: Synthetic peptide
  Seed: KMIDGIGRF
KFIDGIGRY

SEQ ID NO: 43535 - protein, 9 aa, Artificial Sequence
  Description of Artificial Sequence: Synthetic peptide
  Seed: KMIDGIGRF
KFIDGIGRV

SEQ ID NO: 43536 - protein, 9 aa, Artificial Sequence
  Description of Artificial Sequence: Synthetic peptide
  Seed: KMIDGIGRF
KSIDGIGRA

SEQ ID NO: 43537 - protein, 9 aa, Artificial Sequence
  Description of Artificial Sequence: Synthetic peptide
  Seed: KMIDGIGRF
KSIDGIGRH

SEQ ID NO: 43538 - protein, 9 aa, Artificial Sequence
  Description of Artificial Sequence: Synthetic peptide
  Seed: KMIDGIGRF
KSIDGIGRI

SEQ ID NO: 43539 - protein, 9 aa, Artificial Sequence
  Description of Artificial Sequence: Synthetic peptide
  Seed: KMIDGIGRF
KSIDGIGRL

SEQ ID NO: 43540 - protein, 9 aa, Artificial Sequence
  Description of Artificial Sequence: Synthetic peptide
  Seed: KMIDGIGRF
KSIDGIGRM

SEQ ID NO: 43541 - protein, 9 aa, Artificial Sequence
  Description of Artificial Sequence: Synthetic peptide
  Seed: KMIDGIGRF
KSIDGIGRF

SEQ ID NO: 43542 - protein, 9 aa, Artificial Sequence
  Description of Artificial Sequence: Synthetic peptide
  Seed: KMIDGIGRF
KSIDGIGRW

SEQ ID NO: 43543 - protein, 9 aa, Artificial Sequence
  Description of Artificial Sequence: Synthetic peptide
  Seed: KMIDGIGRF
KSIDGIGRY

SEQ ID NO: 43544 - protein, 9 aa, Artificial Sequence
  Description of Artificial Sequence: Synthetic peptide
  Seed: KMIDGIGRF
KSIDGIGRV

SEQ ID NO: 43545 - protein, 9 aa, Artificial Sequence
  Description of Artificial Sequence: Synthetic peptide
  Seed: KMIDGIGRF
KTIDGIGRA

SEQ ID NO: 43546 - protein, 9 aa, Artificial Sequence
  Description of Artificial Sequence: Synthetic peptide
  Seed: KMIDGIGRF
KTIDGIGRH

SEQ ID NO: 43547 - protein, 9 aa, Artificial Sequence
  Description of Artificial Sequence: Synthetic peptide
  Seed: KMIDGIGRF
KTIDGIGRI

SEQ ID NO: 43548 - protein, 9 aa, Artificial Sequence
  Description of Artificial Sequence: Synthetic peptide
  Seed: KMIDGIGRF
KTIDGIGRL

SEQ ID NO: 43549 - protein, 9 aa, Artificial Sequence
  Description of Artificial Sequence: Synthetic peptide
  Seed: KMIDGIGRF
KTIDGIGRM

SEQ ID NO: 43550 - protein, 9 aa, Artificial Sequence
  Description of Artificial Sequence: Synthetic peptide
  Seed: KMIDGIGRF
KTIDGIGRF

SEQ ID NO: 43551 - protein, 10 aa, Artificial Sequence
  Description of Artificial Sequence: Synthetic peptide
  Seed: KMIDGIGRFY
KWIDGIGRFK

SEQ ID NO: 43552 - protein, 10 aa, Artificial Sequence
  Description of Artificial Sequence: Synthetic peptide
  Seed: KMIDGIGRFY
KWIDGIGRFY

SEQ ID NO: 43553 - protein, 11 aa, Artificial Sequence
  Description of Artificial Sequence: Synthetic peptide
  Seed: KRVDGKWMREL
KRVDGKWMREI

SEQ ID NO: 43554 - protein, 10 aa, Artificial Sequence
  Description of Artificial Sequence: Synthetic peptide
  Seed: KRGINDRNFW
KKGINDRNFW

SEQ ID NO: 43555 - protein, 10 aa, Artificial Sequence
  Description of Artificial Sequence: Synthetic peptide
  Seed: KRGINDRNFW
KNGINDRNFW

SEQ ID NO: 43556 - protein, 10 aa, Artificial Sequence
  Description of Artificial Sequence: Synthetic peptide
  Seed: KRGINDRNFW
KDGINDRNFW

SEQ ID NO: 43557 - protein, 10 aa, Artificial Sequence
  Description of Artificial Sequence: Synthetic peptide
  Seed: KRGINDRNFW
KCGINDRNFW

SEQ ID NO: 43558 - protein, 10 aa, Artificial Sequence
  Description of Artificial Sequence: Synthetic peptide
  Seed: KRGINDRNFW
KQGINDRNFW

SEQ ID NO: 43559 - protein, 10 aa, Artificial Sequence
  Description of Artificial Sequence: Synthetic peptide
  Seed: KRGINDRNFW
KEGINDRNFW

SEQ ID NO: 43560 - protein, 10 aa, Artificial Sequence
  Description of Artificial Sequence: Synthetic peptide
  Seed: KRGINDRNFW
KGGINDRNFW

SEQ ID NO: 43561 - protein, 10 aa, Artificial Sequence
  Description of Artificial Sequence: Synthetic peptide
  Seed: KRGINDRNFW
KHGINDRNFW

SEQ ID NO: 43562 - protein, 10 aa, Artificial Sequence
  Description of Artificial Sequence: Synthetic peptide
  Seed: KRGINDRNFW
KIGINDRNFW

SEQ ID NO: 43563 - protein, 10 aa, Artificial Sequence
  Description of Artificial Sequence: Synthetic peptide
  Seed: KRGINDRNFW
KLGINDRNFW

SEQ ID NO: 43564 - protein, 10 aa, Artificial Sequence
  Description of Artificial Sequence: Synthetic peptide
  Seed: KRGINDRNFW
KMGINDRNFW

SEQ ID NO: 43565 - protein, 11 aa, Artificial Sequence
  Description of Artificial Sequence: Synthetic peptide
  Seed: KRGINDRNFWR
KAGINDRNFWR

SEQ ID NO: 43566 - protein, 10 aa, Artificial Sequence
  Description of Artificial Sequence: Synthetic peptide
  Seed: KRGINDRNFW
KFGINDRNFW

SEQ ID NO: 43567 - protein, 10 aa, Artificial Sequence
  Description of Artificial Sequence: Synthetic peptide
  Seed: KRGINDRNFW
KPGINDRNFW

SEQ ID NO: 43568 - protein, 10 aa, Artificial Sequence
  Description of Artificial Sequence: Synthetic peptide
  Seed: KRGINDRNFW
KSGINDRNFF

SEQ ID NO: 43569 - protein, 10 aa, Artificial Sequence
  Description of Artificial Sequence: Synthetic peptide
  Seed: KRGINDRNFW
KSGINDRNFW

SEQ ID NO: 43570 - protein, 10 aa, Artificial Sequence
  Description of Artificial Sequence: Synthetic peptide
  Seed: KRGINDRNFW
KSGINDRNFY

SEQ ID NO: 43571 - protein, 10 aa, Artificial Sequence
  Description of Artificial Sequence: Synthetic peptide
  Seed: KRGINDRNFW
KTGINDRNFF

SEQ ID NO: 43572 - protein, 10 aa, Artificial Sequence
  Description of Artificial Sequence: Synthetic peptide
  Seed: KRGINDRNFW
KTGINDRNFW

SEQ ID NO: 43573 - protein, 10 aa, Artificial Sequence
  Description of Artificial Sequence: Synthetic peptide
  Seed: KRGINDRNFW
KWGINDRNFW

SEQ ID NO: 43574 - protein, 10 aa, Artificial Sequence
  Description of Artificial Sequence: Synthetic peptide
  Seed: KRGINDRNFW
KYGINDRNFW

SEQ ID NO: 43575 - protein, 10 aa, Artificial Sequence
  Description of Artificial Sequence: Synthetic peptide
  Seed: KRGINDRNFW
KAGINDRNFW

SEQ ID NO: 43576 - protein, 10 aa, Artificial Sequence
  Description of Artificial Sequence: Synthetic peptide
  Seed: KRGINDRNFW
KAGINDRNFF

SEQ ID NO: 43577 - protein, 11 aa, Artificial Sequence
  Description of Artificial Sequence: Synthetic peptide
  Seed: KMIDGIGRFYI
KVIDGIGRFYV

SEQ ID NO: 43578 - protein, 11 aa, Artificial Sequence
  Description of Artificial Sequence: Synthetic peptide
  Seed: KMIDGIGRFYI
KVIDGIGRFYY

SEQ ID NO: 43579 - protein, 11 aa, Artificial Sequence
  Description of Artificial Sequence: Synthetic peptide
  Seed: KMIDGIGRFYI
KTIDGIGRFYM

SEQ ID NO: 43580 - protein, 11 aa, Artificial Sequence
  Description of Artificial Sequence: Synthetic peptide
  Seed: KMIDGIGRFYI
KTIDGIGRFYF

SEQ ID NO: 43581 - protein, 11 aa, Artificial Sequence
  Description of Artificial Sequence: Synthetic peptide
  Seed: KMIDGIGRFYI
KTIDGIGRFYT

SEQ ID NO: 43582 - protein, 11 aa, Artificial Sequence
  Description of Artificial Sequence: Synthetic peptide
  Seed: KMIDGIGRFYI
KTIDGIGRFYW

SEQ ID NO: 43583 - protein, 11 aa, Artificial Sequence
  Description of Artificial Sequence: Synthetic peptide
  Seed: KMIDGIGRFYI
KTIDGIGRFYY

SEQ ID NO: 43584 - protein, 11 aa, Artificial Sequence
  Description of Artificial Sequence: Synthetic peptide
  Seed: KMIDGIGRFYI
KTIDGIGRFYV

SEQ ID NO: 43585 - protein, 11 aa, Artificial Sequence
  Description of Artificial Sequence: Synthetic peptide
  Seed: KMIDGIGRFYI
KWIDGIGRFYY

SEQ ID NO: 43586 - protein, 11 aa, Artificial Sequence
  Description of Artificial Sequence: Synthetic peptide
  Seed: KMIDGIGRFYI
KWIDGIGRFYV

SEQ ID NO: 43587 - protein, 11 aa, Artificial Sequence
  Description of Artificial Sequence: Synthetic peptide
  Seed: KMIDGIGRFYI
KYIDGIGRFYI

SEQ ID NO: 43588 - protein, 11 aa, Artificial Sequence
  Description of Artificial Sequence: Synthetic peptide
  Seed: KMIDGIGRFYI
KYIDGIGRFYL

SEQ ID NO: 43589 - protein, 11 aa, Artificial Sequence
  Description of Artificial Sequence: Synthetic peptide
  Seed: KMIDGIGRFYI
KYIDGIGRFYY

SEQ ID NO: 43590 - protein, 11 aa, Artificial Sequence
  Description of Artificial Sequence: Synthetic peptide
  Seed: KMIDGIGRFYI
KYIDGIGRFYV

SEQ ID NO: 43591 - protein, 11 aa, Artificial Sequence
  Description of Artificial Sequence: Synthetic peptide
  Seed: KMIDGIGRFYI
KVIDGIGRFYA

SEQ ID NO: 43592 - protein, 11 aa, Artificial Sequence
  Description of Artificial Sequence: Synthetic peptide
  Seed: KMIDGIGRFYI
KVIDGIGRFYI

SEQ ID NO: 43593 - protein, 11 aa, Artificial Sequence
  Description of Artificial Sequence: Synthetic peptide
  Seed: KMIDGIGRFYI
KVIDGIGRFYL

SEQ ID NO: 43594 - protein, 11 aa, Artificial Sequence
  Description of Artificial Sequence: Synthetic peptide
  Seed: KMIDGIGRFYI
KVIDGIGRFYM

SEQ ID NO: 43595 - protein, 11 aa, Artificial Sequence
  Description of Artificial Sequence: Synthetic peptide
  Seed: KMIDGIGRFYI
KVIDGIGRFYF

SEQ ID NO: 43596 - protein, 11 aa, Artificial Sequence
  Description of Artificial Sequence: Synthetic peptide
  Seed: KMIDGIGRFYI
KVIDGIGRFYT

SEQ ID NO: 43597 - protein, 11 aa, Artificial Sequence
  Description of Artificial Sequence: Synthetic peptide
  Seed: KMIDGIGRFYI
KVIDGIGRFYW

SEQ ID NO: 43598 - protein, 10 aa, Artificial Sequence
  Description of Artificial Sequence: Synthetic peptide
  Seed: KRGINDRNFW
KVGINDRNFW

SEQ ID NO: 43599 - protein, 11 aa, Artificial Sequence
  Description of Artificial Sequence: Synthetic peptide
  Seed: KRGINDRNFWR
KAGINDRNFWK

SEQ ID NO: 43600 - protein, 10 aa, Artificial Sequence
  Description of Artificial Sequence: Synthetic peptide
  Seed: KMIDGIGRFY
KYIDGIGRFK

SEQ ID NO: 43601 - protein, 11 aa, Artificial Sequence
  Description of Artificial Sequence: Synthetic peptide
  Seed: KRGINDRNFWR
KYGINDRNFWR

SEQ ID NO: 43602 - protein, 11 aa, Artificial Sequence
  Description of Artificial Sequence: Synthetic peptide
  Seed: KRGINDRNFWR
KFGINDRNFWK

SEQ ID NO: 43603 - protein, 11 aa, Artificial Sequence
  Description of Artificial Sequence: Synthetic peptide
  Seed: KRGINDRNFWR
KPGINDRNFWR

SEQ ID NO: 43604 - protein, 11 aa, Artificial Sequence
  Description of Artificial Sequence: Synthetic peptide
  Seed: KRGINDRNFWR
KPGINDRNFWK

SEQ ID NO: 43605 - protein, 11 aa, Artificial Sequence
  Description of Artificial Sequence: Synthetic peptide
  Seed: KRGINDRNFWR
KSGINDRNFWR

SEQ ID NO: 43606 - protein, 11 aa, Artificial Sequence
  Description of Artificial Sequence: Synthetic peptide
  Seed: KRGINDRNFWR
KSGINDRNFWK

SEQ ID NO: 43607 - protein, 11 aa, Artificial Sequence
  Description of Artificial Sequence: Synthetic peptide
  Seed: KRGINDRNFWR
KTGINDRNFWR

SEQ ID NO: 43608 - protein, 11 aa, Artificial Sequence
  Description of Artificial Sequence: Synthetic peptide
  Seed: KRGINDRNFWR
KTGINDRNFWK

SEQ ID NO: 43609 - protein, 11 aa, Artificial Sequence
  Description of Artificial Sequence: Synthetic peptide
  Seed: KRGINDRNFWR
KWGINDRNFWR

SEQ ID NO: 43610 - protein, 11 aa, Artificial Sequence
  Description of Artificial Sequence: Synthetic peptide
  Seed: KRGINDRNFWR
KWGINDRNFWK

SEQ ID NO: 43611 - protein, 11 aa, Artificial Sequence
  Description of Artificial Sequence: Synthetic peptide
  Seed: KRGINDRNFWR
KYGINDRNFWK

SEQ ID NO: 43612 - protein, 11 aa, Artificial Sequence
  Description of Artificial Sequence: Synthetic peptide
  Seed: KRGINDRNFWR
KRGINDRNFWK

SEQ ID NO: 43613 - protein, 11 aa, Artificial Sequence
  Description of Artificial Sequence: Synthetic peptide
  Seed: KRGINDRNFWR
KVGINDRNFWR

SEQ ID NO: 43614 - protein, 11 aa, Artificial Sequence
  Description of Artificial Sequence: Synthetic peptide
  Seed: KRGINDRNFWR
KVGINDRNFWK

SEQ ID NO: 43615 - protein, 9 aa, Artificial Sequence
  Description of Artificial Sequence: Synthetic peptide
  Seed: KRVDGKWMR
KRVDGKWMI

SEQ ID NO: 43616 - protein, 9 aa, Artificial Sequence
  Description of Artificial Sequence: Synthetic peptide
  Seed: KRVDGKWMR
KRVDGKWML

SEQ ID NO: 43617 - protein, 9 aa, Artificial Sequence
  Description of Artificial Sequence: Synthetic peptide
  Seed: KRVDGKWMR
KRVDGKWMK

SEQ ID NO: 43618 - protein, 9 aa, Artificial Sequence
  Description of Artificial Sequence: Synthetic peptide
  Seed: KRVDGKWMR
KRVDGKWMM

SEQ ID NO: 43619 - protein, 9 aa, Artificial Sequence
  Description of Artificial Sequence: Synthetic peptide
  Seed: KRVDGKWMR
KRVDGKWMF

SEQ ID NO: 43620 - protein, 9 aa, Artificial Sequence
  Description of Artificial Sequence: Synthetic peptide
  Seed: KRVDGKWMR
KRVDGKWMY

SEQ ID NO: 43621 - protein, 9 aa, Artificial Sequence
  Description of Artificial Sequence: Synthetic peptide
  Seed: KRVDGKWMR
KRVDGKWMV

SEQ ID NO: 43622 - protein, 11 aa, Artificial Sequence
  Description of Artificial Sequence: Synthetic peptide
  Seed: KRGINDRNFWR
KFGINDRNFWR

SEQ ID NO: 43623 - protein, 11 aa, Artificial Sequence
  Description of Artificial Sequence: Synthetic peptide
  Seed: KRGINDRNFWR
KMGINDRNFWK

SEQ ID NO: 43624 - protein, 11 aa, Artificial Sequence
  Description of Artificial Sequence: Synthetic peptide
  Seed: KRGINDRNFWR
KMGINDRNFWR

SEQ ID NO: 43625 - protein, 11 aa, Artificial Sequence
  Description of Artificial Sequence: Synthetic peptide
  Seed: KRGINDRNFWR
KKGINDRNFWK

SEQ ID NO: 43626 - protein, 11 aa, Artificial Sequence
  Description of Artificial Sequence: Synthetic peptide
  Seed: KRGINDRNFWR
KNGINDRNFWR

SEQ ID NO: 43627 - protein, 11 aa, Artificial Sequence
  Description of Artificial Sequence: Synthetic peptide
  Seed: KRGINDRNFWR
KNGINDRNFWK

SEQ ID NO: 43628 - protein, 11 aa, Artificial Sequence
  Description of Artificial Sequence: Synthetic peptide
  Seed: KRGINDRNFWR
KDGINDRNFWR

SEQ ID NO: 43629 - protein, 11 aa, Artificial Sequence
  Description of Artificial Sequence: Synthetic peptide
  Seed: KRGINDRNFWR
KDGINDRNFWK

SEQ ID NO: 43630 - protein, 11 aa, Artificial Sequence
  Description of Artificial Sequence: Synthetic peptide
  Seed: KRGINDRNFWR
KCGINDRNFWR

SEQ ID NO: 43631 - protein, 11 aa, Artificial Sequence
  Description of Artificial Sequence: Synthetic peptide
  Seed: KRGINDRNFWR
KCGINDRNFWK

SEQ ID NO: 43632 - protein, 11 aa, Artificial Sequence
  Description of Artificial Sequence: Synthetic peptide
  Seed: KRGINDRNFWR
KQGINDRNFWR

SEQ ID NO: 43633 - protein, 11 aa, Artificial Sequence
  Description of Artificial Sequence: Synthetic peptide
  Seed: KRGINDRNFWR
KQGINDRNFWK

SEQ ID NO: 43634 - protein, 11 aa, Artificial Sequence
  Description of Artificial Sequence: Synthetic peptide
  Seed: KRGINDRNFWR
KEGINDRNFWR

SEQ ID NO: 43635 - protein, 11 aa, Artificial Sequence
  Description of Artificial Sequence: Synthetic peptide
  Seed: KRGINDRNFWR
KEGINDRNFWK

SEQ ID NO: 43636 - protein, 11 aa, Artificial Sequence
  Description of Artificial Sequence: Synthetic peptide
  Seed: KRGINDRNFWR
KGGINDRNFWR

SEQ ID NO: 43637 - protein, 11 aa, Artificial Sequence
  Description of Artificial Sequence: Synthetic peptide
  Seed: KRGINDRNFWR
KGGINDRNFWK

SEQ ID NO: 43638 - protein, 11 aa, Artificial Sequence
  Description of Artificial Sequence: Synthetic peptide
  Seed: KRGINDRNFWR
KHGINDRNFWR

SEQ ID NO: 43639 - protein, 11 aa, Artificial Sequence
  Description of Artificial Sequence: Synthetic peptide
  Seed: KRGINDRNFWR
KHGINDRNFWK

SEQ ID NO: 43640 - protein, 11 aa, Artificial Sequence
  Description of Artificial Sequence: Synthetic peptide
  Seed: KRGINDRNFWR
KIGINDRNFWR

SEQ ID NO: 43641 - protein, 11 aa, Artificial Sequence
  Description of Artificial Sequence: Synthetic peptide
  Seed: KRGINDRNFWR
KIGINDRNFWK

SEQ ID NO: 43642 - protein, 11 aa, Artificial Sequence
  Description of Artificial Sequence: Synthetic peptide
  Seed: KRGINDRNFWR
KLGINDRNFWR

SEQ ID NO: 43643 - protein, 11 aa, Artificial Sequence
  Description of Artificial Sequence: Synthetic peptide
  Seed: KRGINDRNFWR
KLGINDRNFWK

SEQ ID NO: 43644 - protein, 11 aa, Artificial Sequence
  Description of Artificial Sequence: Synthetic peptide
  Seed: KRGINDRNFWR
KKGINDRNFWR

SEQ ID NO: 43645 - protein, 11 aa, Artificial Sequence
  Description of Artificial Sequence: Synthetic peptide
  Seed: KMIDGIGRFYI
KTIDGIGRFYL

SEQ ID NO: 43646 - protein, 11 aa, Artificial Sequence
  Description of Artificial Sequence: Synthetic peptide
  Seed: KMIDGIGRFYI
KTIDGIGRFYI

SEQ ID NO: 43647 - protein, 11 aa, Artificial Sequence
  Description of Artificial Sequence: Synthetic peptide
  Seed: KMIDGIGRFYI
KTIDGIGRFYH

SEQ ID NO: 43648 - protein, 11 aa, Artificial Sequence
  Description of Artificial Sequence: Synthetic peptide
  Seed: KMIDGIGRFYI
KGIDGIGRFYY

SEQ ID NO: 43649 - protein, 11 aa, Artificial Sequence
  Description of Artificial Sequence: Synthetic peptide
  Seed: KMIDGIGRFYI
KQIDGIGRFYL

SEQ ID NO: 43650 - protein, 11 aa, Artificial Sequence
  Description of Artificial Sequence: Synthetic peptide
  Seed: KMIDGIGRFYI
KQIDGIGRFYM

SEQ ID NO: 43651 - protein, 11 aa, Artificial Sequence
  Description of Artificial Sequence: Synthetic peptide
  Seed: KMIDGIGRFYI
KQIDGIGRFYF

SEQ ID NO: 43652 - protein, 11 aa, Artificial Sequence
  Description of Artificial Sequence: Synthetic peptide
  Seed: KMIDGIGRFYI
KQIDGIGRFYS

SEQ ID NO: 43653 - protein, 11 aa, Artificial Sequence
  Description of Artificial Sequence: Synthetic peptide
  Seed: KMIDGIGRFYI
KQIDGIGRFYT

SEQ ID NO: 43654 - protein, 11 aa, Artificial Sequence
  Description of Artificial Sequence: Synthetic peptide
  Seed: KMIDGIGRFYI
KQIDGIGRFYY

SEQ ID NO: 43655 - protein, 11 aa, Artificial Sequence
  Description of Artificial Sequence: Synthetic peptide
  Seed: KMIDGIGRFYI
KQIDGIGRFYV

SEQ ID NO: 43656 - protein, 11 aa, Artificial Sequence
  Description of Artificial Sequence: Synthetic peptide
  Seed: KMIDGIGRFYI
KEIDGIGRFYI

SEQ ID NO: 43657 - protein, 11 aa, Artificial Sequence
  Description of Artificial Sequence: Synthetic peptide
  Seed: KMIDGIGRFYI
KEIDGIGRFYV

SEQ ID NO: 43658 - protein, 11 aa, Artificial Sequence
  Description of Artificial Sequence: Synthetic peptide
  Seed: KMIDGIGRFYI
KGIDGIGRFYV

SEQ ID NO: 43659 - protein, 11 aa, Artificial Sequence
  Description of Artificial Sequence: Synthetic peptide
  Seed: KMIDGIGRFYI
KTIDGIGRFYA

SEQ ID NO: 43660 - protein, 11 aa, Artificial Sequence
  Description of Artificial Sequence: Synthetic peptide
  Seed: KMIDGIGRFYI
KHIDGIGRFYY

SEQ ID NO: 43661 - protein, 11 aa, Artificial Sequence
  Description of Artificial Sequence: Synthetic peptide
  Seed: KMIDGIGRFYI
KIIDGIGRFYA

SEQ ID NO: 43662 - protein, 11 aa, Artificial Sequence
  Description of Artificial Sequence: Synthetic peptide
  Seed: KMIDGIGRFYI
KIIDGIGRFYI

SEQ ID NO: 43663 - protein, 11 aa, Artificial Sequence
  Description of Artificial Sequence: Synthetic peptide
  Seed: KMIDGIGRFYI
KIIDGIGRFYL

SEQ ID NO: 43664 - protein, 11 aa, Artificial Sequence
  Description of Artificial Sequence: Synthetic peptide
  Seed: KMIDGIGRFYI
KIIDGIGRFYM

SEQ ID NO: 43665 - protein, 11 aa, Artificial Sequence
  Description of Artificial Sequence: Synthetic peptide
  Seed: KMIDGIGRFYI
KIIDGIGRFYF

SEQ ID NO: 43666 - protein, 11 aa, Artificial Sequence
  Description of Artificial Sequence: Synthetic peptide
  Seed: KMIDGIGRFYI
KIIDGIGRFYT

SEQ ID NO: 43667 - protein, 11 aa, Artificial Sequence
  Description of Artificial Sequence: Synthetic peptide
  Seed: KMIDGIGRFYI
KIIDGIGRFYW

SEQ ID NO: 43668 - protein, 11 aa, Artificial Sequence
  Description of Artificial Sequence: Synthetic peptide
  Seed: KMIDGIGRFYI
KIIDGIGRFYY

SEQ ID NO: 43669 - protein, 11 aa, Artificial Sequence
  Description of Artificial Sequence: Synthetic peptide
  Seed: KMIDGIGRFYI
KQIDGIGRFYI

SEQ ID NO: 43670 - protein, 11 aa, Artificial Sequence
  Description of Artificial Sequence: Synthetic peptide
  Seed: KMIDGIGRFYI
KQIDGIGRFYC

SEQ ID NO: 43671 - protein, 11 aa, Artificial Sequence
  Description of Artificial Sequence: Synthetic peptide
  Seed: KMIDGIGRFYI
KQIDGIGRFYA

SEQ ID NO: 43672 - protein, 11 aa, Artificial Sequence
  Description of Artificial Sequence: Synthetic peptide
  Seed: KMIDGIGRFYI
KCIDGIGRFYV

SEQ ID NO: 43673 - protein, 10 aa, Artificial Sequence
  Description of Artificial Sequence: Synthetic peptide
  Seed: KMIDGIGRFY
KYIDGIGRFM

SEQ ID NO: 43674 - protein, 10 aa, Artificial Sequence
  Description of Artificial Sequence: Synthetic peptide
  Seed: KMIDGIGRFY
KYIDGIGRFF

SEQ ID NO: 43675 - protein, 10 aa, Artificial Sequence
  Description of Artificial Sequence: Synthetic peptide
  Seed: KMIDGIGRFY
KYIDGIGRFY

SEQ ID NO: 43676 - protein, 10 aa, Artificial Sequence
  Description of Artificial Sequence: Synthetic peptide
  Seed: KMIDGIGRFY
KVIDGIGRFR

SEQ ID NO: 43677 - protein, 10 aa, Artificial Sequence
  Description of Artificial Sequence: Synthetic peptide
  Seed: KMIDGIGRFY
KVIDGIGRFK

SEQ ID NO: 43678 - protein, 10 aa, Artificial Sequence
  Description of Artificial Sequence: Synthetic peptide
  Seed: KMIDGIGRFY
KVIDGIGRFM

SEQ ID NO: 43679 - protein, 10 aa, Artificial Sequence
  Description of Artificial Sequence: Synthetic peptide
  Seed: KMIDGIGRFY
KVIDGIGRFF

SEQ ID NO: 43680 - protein, 10 aa, Artificial Sequence
  Description of Artificial Sequence: Synthetic peptide
  Seed: KMIDGIGRFY
KVIDGIGRFW

SEQ ID NO: 43681 - protein, 10 aa, Artificial Sequence
  Description of Artificial Sequence: Synthetic peptide
  Seed: KMIDGIGRFY
KVIDGIGRFY

SEQ ID NO: 43682 - protein, 11 aa, Artificial Sequence
  Description of Artificial Sequence: Synthetic peptide
  Seed: KMIDGIGRFYI
KAIDGIGRFYA

SEQ ID NO: 43683 - protein, 11 aa, Artificial Sequence
  Description of Artificial Sequence: Synthetic peptide
  Seed: KMIDGIGRFYI
KAIDGIGRFYI

SEQ ID NO: 43684 - protein, 11 aa, Artificial Sequence
  Description of Artificial Sequence: Synthetic peptide
  Seed: KMIDGIGRFYI
KAIDGIGRFYL

SEQ ID NO: 43685 - protein, 11 aa, Artificial Sequence
  Description of Artificial Sequence: Synthetic peptide
  Seed: KMIDGIGRFYI
KAIDGIGRFYM

SEQ ID NO: 43686 - protein, 11 aa, Artificial Sequence
  Description of Artificial Sequence: Synthetic peptide
  Seed: KMIDGIGRFYI
KAIDGIGRFYY

SEQ ID NO: 43687 - protein, 11 aa, Artificial Sequence
  Description of Artificial Sequence: Synthetic peptide
  Seed: KMIDGIGRFYI
KAIDGIGRFYV

SEQ ID NO: 43688 - protein, 11 aa, Artificial Sequence
  Description of Artificial Sequence: Synthetic peptide
  Seed: KMIDGIGRFYI
KRIDGIGRFYY

SEQ ID NO: 43689 - protein, 11 aa, Artificial Sequence
  Description of Artificial Sequence: Synthetic peptide
  Seed: KMIDGIGRFYI
KRIDGIGRFYV

SEQ ID NO: 43690 - protein, 11 aa, Artificial Sequence
  Description of Artificial Sequence: Synthetic peptide
  Seed: KMIDGIGRFYI
KNIDGIGRFYY

SEQ ID NO: 43691 - protein, 11 aa, Artificial Sequence
  Description of Artificial Sequence: Synthetic peptide
  Seed: KMIDGIGRFYI
KCIDGIGRFYY

SEQ ID NO: 43692 - protein, 11 aa, Artificial Sequence
  Description of Artificial Sequence: Synthetic peptide
  Seed: KMIDGIGRFYI
KIIDGIGRFYV

SEQ ID NO: 43693 - protein, 11 aa, Artificial Sequence
  Description of Artificial Sequence: Synthetic peptide
  Seed: KMIDGIGRFYI
KLIDGIGRFYA

SEQ ID NO: 43694 - protein, 11 aa, Artificial Sequence
  Description of Artificial Sequence: Synthetic peptide
  Seed: KMIDGIGRFYI
KLIDGIGRFYC

SEQ ID NO: 43695 - protein, 11 aa, Artificial Sequence
  Description of Artificial Sequence: Synthetic peptide
  Seed: KMIDGIGRFYI
KMIDGIGRFYL

SEQ ID NO: 43696 - protein, 11 aa, Artificial Sequence
  Description of Artificial Sequence: Synthetic peptide
  Seed: KMIDGIGRFYI
KMIDGIGRFYM

SEQ ID NO: 43697 - protein, 11 aa, Artificial Sequence
  Description of Artificial Sequence: Synthetic peptide
  Seed: KMIDGIGRFYI
KMIDGIGRFYF

SEQ ID NO: 43698 - protein, 11 aa, Artificial Sequence
  Description of Artificial Sequence: Synthetic peptide
  Seed: KMIDGIGRFYI
KMIDGIGRFYP

SEQ ID NO: 43699 - protein, 11 aa, Artificial Sequence
  Description of Artificial Sequence: Synthetic peptide
  Seed: KMIDGIGRFYI
KMIDGIGRFYS

SEQ ID NO: 43700 - protein, 11 aa, Artificial Sequence
  Description of Artificial Sequence: Synthetic peptide
  Seed: KMIDGIGRFYI
KMIDGIGRFYT

SEQ ID NO: 43701 - protein, 11 aa, Artificial Sequence
  Description of Artificial Sequence: Synthetic peptide
  Seed: KMIDGIGRFYI
KMIDGIGRFYW

SEQ ID NO: 43702 - protein, 11 aa, Artificial Sequence
  Description of Artificial Sequence: Synthetic peptide
  Seed: KMIDGIGRFYI
KMIDGIGRFYY

SEQ ID NO: 43703 - protein, 11 aa, Artificial Sequence
  Description of Artificial Sequence: Synthetic peptide
  Seed: KMIDGIGRFYI
KMIDGIGRFYV

SEQ ID NO: 43704 - protein, 11 aa, Artificial Sequence
  Description of Artificial Sequence: Synthetic peptide
  Seed: KMIDGIGRFYI
KFIDGIGRFYA

SEQ ID NO: 43705 - protein, 11 aa, Artificial Sequence
  Description of Artificial Sequence: Synthetic peptide
  Seed: KMIDGIGRFYI
KFIDGIGRFYI

SEQ ID NO: 43706 - protein, 11 aa, Artificial Sequence
  Description of Artificial Sequence: Synthetic peptide
  Seed: KMIDGIGRFYI
KFIDGIGRFYL

SEQ ID NO: 43707 - protein, 11 aa, Artificial Sequence
  Description of Artificial Sequence: Synthetic peptide
  Seed: KMIDGIGRFYI
KFIDGIGRFYY

SEQ ID NO: 43708 - protein, 11 aa, Artificial Sequence
  Description of Artificial Sequence: Synthetic peptide
  Seed: KMIDGIGRFYI
KFIDGIGRFYV

SEQ ID NO: 43709 - protein, 11 aa, Artificial Sequence
  Description of Artificial Sequence: Synthetic peptide
  Seed: KMIDGIGRFYI
KSIDGIGRFYA

SEQ ID NO: 43710 - protein, 11 aa, Artificial Sequence
  Description of Artificial Sequence: Synthetic peptide
  Seed: KMIDGIGRFYI
KSIDGIGRFYI

SEQ ID NO: 43711 - protein, 11 aa, Artificial Sequence
  Description of Artificial Sequence: Synthetic peptide
  Seed: KMIDGIGRFYI
KSIDGIGRFYL

SEQ ID NO: 43712 - protein, 11 aa, Artificial Sequence
  Description of Artificial Sequence: Synthetic peptide
  Seed: KMIDGIGRFYI
KSIDGIGRFYF

SEQ ID NO: 43713 - protein, 11 aa, Artificial Sequence
  Description of Artificial Sequence: Synthetic peptide
  Seed: KMIDGIGRFYI
KSIDGIGRFYY

SEQ ID NO: 43714 - protein, 11 aa, Artificial Sequence
  Description of Artificial Sequence: Synthetic peptide
  Seed: KMIDGIGRFYI
KSIDGIGRFYV

SEQ ID NO: 43715 - protein, 11 aa, Artificial Sequence
  Description of Artificial Sequence: Synthetic peptide
  Seed: KMIDGIGRFYI
KMIDGIGRFYK

SEQ ID NO: 43716 - protein, 11 aa, Artificial Sequence
  Description of Artificial Sequence: Synthetic peptide
  Seed: KMIDGIGRFYI
KMIDGIGRFYH

SEQ ID NO: 43717 - protein, 11 aa, Artificial Sequence
  Description of Artificial Sequence: Synthetic peptide
  Seed: KMIDGIGRFYI
KLIDGIGRFYG

SEQ ID NO: 43718 - protein, 11 aa, Artificial Sequence
  Description of Artificial Sequence: Synthetic peptide
  Seed: KMIDGIGRFYI
KMIDGIGRFYG

SEQ ID NO: 43719 - protein, 11 aa, Artificial Sequence
  Description of Artificial Sequence: Synthetic peptide
  Seed: KMIDGIGRFYI
KLIDGIGRFYI

SEQ ID NO: 43720 - protein, 11 aa, Artificial Sequence
  Description of Artificial Sequence: Synthetic peptide
  Seed: KMIDGIGRFYI
KLIDGIGRFYL

SEQ ID NO: 43721 - protein, 11 aa, Artificial Sequence
  Description of Artificial Sequence: Synthetic peptide
  Seed: KMIDGIGRFYI
KLIDGIGRFYM

SEQ ID NO: 43722 - protein, 11 aa, Artificial Sequence
  Description of Artificial Sequence: Synthetic peptide
  Seed: KMIDGIGRFYI
KLIDGIGRFYF

SEQ ID NO: 43723 - protein, 11 aa, Artificial Sequence
  Description of Artificial Sequence: Synthetic peptide
  Seed: KMIDGIGRFYI
KLIDGIGRFYP

SEQ ID NO: 43724 - protein, 11 aa, Artificial Sequence
  Description of Artificial Sequence: Synthetic peptide
  Seed: KMIDGIGRFYI
KLIDGIGRFYS

SEQ ID NO: 43725 - protein, 11 aa, Artificial Sequence
  Description of Artificial Sequence: Synthetic peptide
  Seed: KMIDGIGRFYI
KLIDGIGRFYT

SEQ ID NO: 43726 - protein, 11 aa, Artificial Sequence
  Description of Artificial Sequence: Synthetic peptide
  Seed: KMIDGIGRFYI
KLIDGIGRFYW

SEQ ID NO: 43727 - protein, 11 aa, Artificial Sequence
  Description of Artificial Sequence: Synthetic peptide
  Seed: KMIDGIGRFYI
KLIDGIGRFYY

SEQ ID NO: 43728 - protein, 11 aa, Artificial Sequence
  Description of Artificial Sequence: Synthetic peptide
  Seed: KMIDGIGRFYI
KLIDGIGRFYV

SEQ ID NO: 43729 - protein, 11 aa, Artificial Sequence
  Description of Artificial Sequence: Synthetic peptide
  Seed: KMIDGIGRFYI
KKIDGIGRFYY

SEQ ID NO: 43730 - protein, 11 aa, Artificial Sequence
  Description of Artificial Sequence: Synthetic peptide
  Seed: KMIDGIGRFYI
KKIDGIGRFYV

SEQ ID NO: 43731 - protein, 11 aa, Artificial Sequence
  Description of Artificial Sequence: Synthetic peptide
  Seed: KMIDGIGRFYI
KMIDGIGRFYA

SEQ ID NO: 43732 - protein, 11 aa, Artificial Sequence
  Description of Artificial Sequence: Synthetic peptide
  Seed: KMIDGIGRFYI
KMIDGIGRFYR

SEQ ID NO: 43733 - protein, 11 aa, Artificial Sequence
  Description of Artificial Sequence: Synthetic peptide
  Seed: KMIDGIGRFYI
KMIDGIGRFYN

SEQ ID NO: 43734 - protein, 11 aa, Artificial Sequence
  Description of Artificial Sequence: Synthetic peptide
  Seed: KMIDGIGRFYI
KMIDGIGRFYD

SEQ ID NO: 43735 - protein, 11 aa, Artificial Sequence
  Description of Artificial Sequence: Synthetic peptide
  Seed: KMIDGIGRFYI
KMIDGIGRFYC

SEQ ID NO: 43736 - protein, 11 aa, Artificial Sequence
  Description of Artificial Sequence: Synthetic peptide
  Seed: KMIDGIGRFYI
KMIDGIGRFYQ

SEQ ID NO: 43737 - protein, 11 aa, Artificial Sequence
  Description of Artificial Sequence: Synthetic peptide
  Seed: KMIDGIGRFYI
KMIDGIGRFYE

SEQ ID NO: 43738 - protein, 10 aa, Artificial Sequence
  Description of Artificial Sequence: Synthetic peptide
  Seed: KFQTAAQRAM
KLQTAAQRAM

SEQ ID NO: 43739 - protein, 10 aa, Artificial Sequence
  Description of Artificial Sequence: Synthetic peptide
  Seed: KFQTAAQRAM
KLQTAAQRAL

SEQ ID NO: 43740 - protein, 10 aa, Artificial Sequence
  Description of Artificial Sequence: Synthetic peptide
  Seed: KFQTAAQRAM
KIQTAAQRAY

SEQ ID NO: 43741 - protein, 9 aa, Artificial Sequence
  Description of Artificial Sequence: Synthetic peptide
  Seed: IQNSLTIER
IQNSLTIEK

SEQ ID NO: 43742 - protein, 10 aa, Artificial Sequence
  Description of Artificial Sequence: Synthetic peptide
  Seed: IQNSITIERM
ISNSITIERY

SEQ ID NO: 43743 - protein, 10 aa, Artificial Sequence
  Description of Artificial Sequence: Synthetic peptide
  Seed: IQNSITIERM
ITNSITIERF

SEQ ID NO: 43744 - protein, 10 aa, Artificial Sequence
  Description of Artificial Sequence: Synthetic peptide
  Seed: IQNSITIERM
ITNSITIERY

SEQ ID NO: 43745 - protein, 10 aa, Artificial Sequence
  Description of Artificial Sequence: Synthetic peptide
  Seed: IQNSITIERM
IVNSITIERF

SEQ ID NO: 43746 - protein, 10 aa, Artificial Sequence
  Description of Artificial Sequence: Synthetic peptide
  Seed: IQNSITIERM
IVNSITIERY

SEQ ID NO: 43747 - protein, 9 aa, Artificial Sequence
  Description of Artificial Sequence: Synthetic peptide
  Seed: IQNSLTIER
IANSLTIER

SEQ ID NO: 43748 - protein, 9 aa, Artificial Sequence
  Description of Artificial Sequence: Synthetic peptide
  Seed: IQNSLTIER
IANSLTIEK

SEQ ID NO: 43749 - protein, 9 aa, Artificial Sequence
  Description of Artificial Sequence: Synthetic peptide
  Seed: IQNSLTIER
INNSLTIER

SEQ ID NO: 43750 - protein, 9 aa, Artificial Sequence
  Description of Artificial Sequence: Synthetic peptide
  Seed: IQNSLTIER
ICNSLTIER

SEQ ID NO: 43751 - protein, 9 aa, Artificial Sequence
  Description of Artificial Sequence: Synthetic peptide
  Seed: IQNSLTIER
IGNSLTIER

SEQ ID NO: 43752 - protein, 9 aa, Artificial Sequence
  Description of Artificial Sequence: Synthetic peptide
  Seed: IQNSLTIER
IFNSLTIEK

SEQ ID NO: 43753 - protein, 9 aa, Artificial Sequence
  Description of Artificial Sequence: Synthetic peptide
  Seed: IQNSLTIER
IGNSLTIEK

SEQ ID NO: 43754 - protein, 9 aa, Artificial Sequence
  Description of Artificial Sequence: Synthetic peptide
  Seed: IQNSLTIER
IHNSLTIER

SEQ ID NO: 43755 - protein, 9 aa, Artificial Sequence
  Description of Artificial Sequence: Synthetic peptide
  Seed: IQNSLTIER
IINSLTIER

SEQ ID NO: 43756 - protein, 9 aa, Artificial Sequence
  Description of Artificial Sequence: Synthetic peptide
  Seed: IQNSLTIER
IINSLTIEK

SEQ ID NO: 43757 - protein, 9 aa, Artificial Sequence
  Description of Artificial Sequence: Synthetic peptide
  Seed: IQNSLTIER
ILNSLTIER

SEQ ID NO: 43758 - protein, 9 aa, Artificial Sequence
  Description of Artificial Sequence: Synthetic peptide
  Seed: IQNSLTIER
ILNSLTIEK

SEQ ID NO: 43759 - protein, 9 aa, Artificial Sequence
  Description of Artificial Sequence: Synthetic peptide
  Seed: IQNSLTIER
IMNSLTIER

SEQ ID NO: 43760 - protein, 9 aa, Artificial Sequence
  Description of Artificial Sequence: Synthetic peptide
  Seed: IQNSLTIER
IMNSLTIEH

SEQ ID NO: 43761 - protein, 9 aa, Artificial Sequence
  Description of Artificial Sequence: Synthetic peptide
  Seed: IQNSLTIER
IMNSLTIEK

SEQ ID NO: 43762 - protein, 10 aa, Artificial Sequence
  Description of Artificial Sequence: Synthetic peptide
  Seed: IQNSITIERM
ISNSITIERF

SEQ ID NO: 43763 - protein, 10 aa, Artificial Sequence
  Description of Artificial Sequence: Synthetic peptide
  Seed: IQNSITIERM
IMNSITIERY

SEQ ID NO: 43764 - protein, 10 aa, Artificial Sequence
  Description of Artificial Sequence: Synthetic peptide
  Seed: IQNSITIERM
IMNSITIERF

SEQ ID NO: 43765 - protein, 10 aa, Artificial Sequence
  Description of Artificial Sequence: Synthetic peptide
  Seed: IQNSITIERM
IMNSITIERM

SEQ ID NO: 43766 - protein, 9 aa, Artificial Sequence
  Description of Artificial Sequence: Synthetic peptide
  Seed: IQNSITIER
IVNSITIEY

SEQ ID NO: 43767 - protein, 10 aa, Artificial Sequence
  Description of Artificial Sequence: Synthetic peptide
  Seed: IQNSITIERM
IANSITIERF

SEQ ID NO: 43768 - protein, 10 aa, Artificial Sequence
  Description of Artificial Sequence: Synthetic peptide
  Seed: IQNSITIERM
IANSITIERY

SEQ ID NO: 43769 - protein, 10 aa, Artificial Sequence
  Description of Artificial Sequence: Synthetic peptide
  Seed: IQNSITIERM
IRNSITIERF

SEQ ID NO: 43770 - protein, 10 aa, Artificial Sequence
  Description of Artificial Sequence: Synthetic peptide
  Seed: IQNSITIERM
IRNSITIERY

SEQ ID NO: 43771 - protein, 10 aa, Artificial Sequence
  Description of Artificial Sequence: Synthetic peptide
  Seed: IQNSITIERM
IQNSITIERL

SEQ ID NO: 43772 - protein, 10 aa, Artificial Sequence
  Description of Artificial Sequence: Synthetic peptide
  Seed: IQNSITIERM
IQNSITIERF

SEQ ID NO: 43773 - protein, 10 aa, Artificial Sequence
  Description of Artificial Sequence: Synthetic peptide
  Seed: IQNSITIERM
IQNSITIERY

SEQ ID NO: 43774 - protein, 10 aa, Artificial Sequence
  Description of Artificial Sequence: Synthetic peptide
  Seed: IQNSITIERM
IENSITIERF

SEQ ID NO: 43775 - protein, 10 aa, Artificial Sequence
  Description of Artificial Sequence: Synthetic peptide
  Seed: IQNSITIERM
IHNSITIERF

SEQ ID NO: 43776 - protein, 10 aa, Artificial Sequence
  Description of Artificial Sequence: Synthetic peptide
  Seed: IQNSITIERM
IHNSITIERY

SEQ ID NO: 43777 - protein, 10 aa, Artificial Sequence
  Description of Artificial Sequence: Synthetic peptide
  Seed: IQNSITIERM
IINSITIERF

SEQ ID NO: 43778 - protein, 10 aa, Artificial Sequence
  Description of Artificial Sequence: Synthetic peptide
  Seed: IQNSITIERM
IINSITIERY

SEQ ID NO: 43779 - protein, 10 aa, Artificial Sequence
  Description of Artificial Sequence: Synthetic peptide
  Seed: IQNSITIERM
ILNSITIERM

SEQ ID NO: 43780 - protein, 10 aa, Artificial Sequence
  Description of Artificial Sequence: Synthetic peptide
  Seed: IQNSITIERM
ILNSITIERF

SEQ ID NO: 43781 - protein, 10 aa, Artificial Sequence
  Description of Artificial Sequence: Synthetic peptide
  Seed: IQNSITIERM
ILNSITIERY

SEQ ID NO: 43782 - protein, 10 aa, Artificial Sequence
  Description of Artificial Sequence: Synthetic peptide
  Seed: IQNSITIERM
IKNSITIERM

SEQ ID NO: 43783 - protein, 10 aa, Artificial Sequence
  Description of Artificial Sequence: Synthetic peptide
  Seed: IQNSITIERM
IKNSITIERF

SEQ ID NO: 43784 - protein, 10 aa, Artificial Sequence
  Description of Artificial Sequence: Synthetic peptide
  Seed: IQNSITIERM
IKNSITIERY

SEQ ID NO: 43785 - protein, 9 aa, Artificial Sequence
  Description of Artificial Sequence: Synthetic peptide
  Seed: IQNSLTIER
IFNSLTIER

SEQ ID NO: 43786 - protein, 9 aa, Artificial Sequence
  Description of Artificial Sequence: Synthetic peptide
  Seed: IQNSLTIER
ISNSLTIER

SEQ ID NO: 43787 - protein, 9 aa, Artificial Sequence
  Description of Artificial Sequence: Synthetic peptide
  Seed: IQNSITIER
IVNSITIER

SEQ ID NO: 43788 - protein, 10 aa, Artificial Sequence
  Description of Artificial Sequence: Synthetic peptide
  Seed: IQNSLTIERM
ITNSLTIERF

SEQ ID NO: 43789 - protein, 10 aa, Artificial Sequence
  Description of Artificial Sequence: Synthetic peptide
  Seed: IQNSLTIERM
IKNSLTIERM

SEQ ID NO: 43790 - protein, 10 aa, Artificial Sequence
  Description of Artificial Sequence: Synthetic peptide
  Seed: IQNSLTIERM
IKNSLTIERF

SEQ ID NO: 43791 - protein, 10 aa, Artificial Sequence
  Description of Artificial Sequence: Synthetic peptide
  Seed: IQNSLTIERM
IKNSLTIERY

SEQ ID NO: 43792 - protein, 10 aa, Artificial Sequence
  Description of Artificial Sequence: Synthetic peptide
  Seed: IQNSLTIERM
IMNSLTIERL

SEQ ID NO: 43793 - protein, 10 aa, Artificial Sequence
  Description of Artificial Sequence: Synthetic peptide
  Seed: IQNSLTIERM
IMNSLTIERM

SEQ ID NO: 43794 - protein, 10 aa, Artificial Sequence
  Description of Artificial Sequence: Synthetic peptide
  Seed: IQNSLTIERM
IMNSLTIERF

SEQ ID NO: 43795 - protein, 10 aa, Artificial Sequence
  Description of Artificial Sequence: Synthetic peptide
  Seed: IQNSLTIERM
IMNSLTIERY

SEQ ID NO: 43796 - protein, 10 aa, Artificial Sequence
  Description of Artificial Sequence: Synthetic peptide
  Seed: IQNSLTIERM
ISNSLTIERF

SEQ ID NO: 43797 - protein, 10 aa, Artificial Sequence
  Description of Artificial Sequence: Synthetic peptide
  Seed: IQNSLTIERM
ISNSLTIERY

SEQ ID NO: 43798 - protein, 10 aa, Artificial Sequence
  Description of Artificial Sequence: Synthetic peptide
  Seed: IQNSLTIERM
ITNSLTIERY

SEQ ID NO: 43799 - protein, 9 aa, Artificial Sequence
  Description of Artificial Sequence: Synthetic peptide
  Seed: IQNSLTIER
ISNSLTIEK

SEQ ID NO: 43800 - protein, 10 aa, Artificial Sequence
  Description of Artificial Sequence: Synthetic peptide
  Seed: IQNSLTIERM
IVNSLTIERF

SEQ ID NO: 43801 - protein, 10 aa, Artificial Sequence
  Description of Artificial Sequence: Synthetic peptide
  Seed: IQNSLTIERM
IVNSLTIERY

SEQ ID NO: 43802 - protein, 9 aa, Artificial Sequence
  Description of Artificial Sequence: Synthetic peptide
  Seed: IQPTFSVQR
IAPTFSVQR

SEQ ID NO: 43803 - protein, 9 aa, Artificial Sequence
  Description of Artificial Sequence: Synthetic peptide
  Seed: IQPTFSVQR
IGPTFSVQR

SEQ ID NO: 43804 - protein, 9 aa, Artificial Sequence
  Description of Artificial Sequence: Synthetic peptide
  Seed: IQPTFSVQR
IIPTFSVQR

SEQ ID NO: 43805 - protein, 9 aa, Artificial Sequence
  Description of Artificial Sequence: Synthetic peptide
  Seed: IQPTFSVQR
IIPTFSVQK

SEQ ID NO: 43806 - protein, 9 aa, Artificial Sequence
  Description of Artificial Sequence: Synthetic peptide
  Seed: IQPTFSVQR
ILPTFSVQR

SEQ ID NO: 43807 - protein, 9 aa, Artificial Sequence
  Description of Artificial Sequence: Synthetic peptide
  Seed: IQPTFSVQR
ILPTFSVQK

SEQ ID NO: 43808 - protein, 9 aa, Artificial Sequence
  Description of Artificial Sequence: Synthetic peptide
  Seed: IQPTFSVQR
IMPTFSVQR

SEQ ID NO: 43809 - protein, 10 aa, Artificial Sequence
  Description of Artificial Sequence: Synthetic peptide
  Seed: IQNSLTIERM
ILNSLTIERY

SEQ ID NO: 43810 - protein, 10 aa, Artificial Sequence
  Description of Artificial Sequence: Synthetic peptide
  Seed: IQNSLTIERM
ILNSLTIERF

SEQ ID NO: 43811 - protein, 10 aa, Artificial Sequence
  Description of Artificial Sequence: Synthetic peptide
  Seed: IQNSLTIERM
ILNSLTIERM

SEQ ID NO: 43812 - protein, 10 aa, Artificial Sequence
  Description of Artificial Sequence: Synthetic peptide
  Seed: IQNSLTIERM
IINSLTIERY

SEQ ID NO: 43813 - protein, 9 aa, Artificial Sequence
  Description of Artificial Sequence: Synthetic peptide
  Seed: IQNSLTIER
ITNSLTIER

SEQ ID NO: 43814 - protein, 9 aa, Artificial Sequence
  Description of Artificial Sequence: Synthetic peptide
  Seed: IQNSLTIER
ITNSLTIEK

SEQ ID NO: 43815 - protein, 9 aa, Artificial Sequence
  Description of Artificial Sequence: Synthetic peptide
  Seed: IQNSLTIER
IWNSLTIER

SEQ ID NO: 43816 - protein, 9 aa, Artificial Sequence
  Description of Artificial Sequence: Synthetic peptide
  Seed: IQNSLTIER
IWNSLTIEK

SEQ ID NO: 43817 - protein, 9 aa, Artificial Sequence
  Description of Artificial Sequence: Synthetic peptide
  Seed: IQNSLTIER
IYNSLTIER

SEQ ID NO: 43818 - protein, 9 aa, Artificial Sequence
  Description of Artificial Sequence: Synthetic peptide
  Seed: IQNSLTIER
IYNSLTIEK

SEQ ID NO: 43819 - protein, 9 aa, Artificial Sequence
  Description of Artificial Sequence: Synthetic peptide
  Seed: IQNSLTIER
IVNSLTIER

SEQ ID NO: 43820 - protein, 9 aa, Artificial Sequence
  Description of Artificial Sequence: Synthetic peptide
  Seed: IQNSLTIER
IVNSLTIEK

SEQ ID NO: 43821 - protein, 10 aa, Artificial Sequence
  Description of Artificial Sequence: Synthetic peptide
  Seed: IQNSLTIERM
IANSLTIERF

SEQ ID NO: 43822 - protein, 10 aa, Artificial Sequence
  Description of Artificial Sequence: Synthetic peptide
  Seed: IQNSLTIERM
IANSLTIERY

SEQ ID NO: 43823 - protein, 10 aa, Artificial Sequence
  Description of Artificial Sequence: Synthetic peptide
  Seed: IQNSLTIERM
IRNSLTIERF

SEQ ID NO: 43824 - protein, 10 aa, Artificial Sequence
  Description of Artificial Sequence: Synthetic peptide
  Seed: IQNSLTIERM
IRNSLTIERY

SEQ ID NO: 43825 - protein, 10 aa, Artificial Sequence
  Description of Artificial Sequence: Synthetic peptide
  Seed: IQNSLTIERM
IQNSLTIERL

SEQ ID NO: 43826 - protein, 10 aa, Artificial Sequence
  Description of Artificial Sequence: Synthetic peptide
  Seed: IQNSLTIERM
IQNSLTIERF

SEQ ID NO: 43827 - protein, 10 aa, Artificial Sequence
  Description of Artificial Sequence: Synthetic peptide
  Seed: IQNSLTIERM
IQNSLTIERY

SEQ ID NO: 43828 - protein, 10 aa, Artificial Sequence
  Description of Artificial Sequence: Synthetic peptide
  Seed: IQNSLTIERM
IENSLTIERF

SEQ ID NO: 43829 - protein, 10 aa, Artificial Sequence
  Description of Artificial Sequence: Synthetic peptide
  Seed: IQNSLTIERM
IHNSLTIERF

SEQ ID NO: 43830 - protein, 10 aa, Artificial Sequence
  Description of Artificial Sequence: Synthetic peptide
  Seed: IQNSLTIERM
IHNSLTIERY

SEQ ID NO: 43831 - protein, 10 aa, Artificial Sequence
  Description of Artificial Sequence: Synthetic peptide
  Seed: IQNSLTIERM
IINSLTIERF

SEQ ID NO: 43832 - protein, 9 aa, Artificial Sequence
  Description of Artificial Sequence: Synthetic peptide
  Seed: IQNSITIER
IVNSITIEK

SEQ ID NO: 43833 - protein, 9 aa, Artificial Sequence
  Description of Artificial Sequence: Synthetic peptide
  Seed: IQNSITIER
IYNSITIEK

SEQ ID NO: 43834 - protein, 10 aa, Artificial Sequence
  Description of Artificial Sequence: Synthetic peptide
  Seed: KFQTAAQRAM
KIQTAAQRAF

SEQ ID NO: 43835 - protein, 9 aa, Artificial Sequence
  Description of Artificial Sequence: Synthetic peptide
  Seed: IQMCTELKL
IMMCTELKV

SEQ ID NO: 43836 - protein, 9 aa, Artificial Sequence
  Description of Artificial Sequence: Synthetic peptide
  Seed: IQMCTELKL
IMMCTELKC

SEQ ID NO: 43837 - protein, 9 aa, Artificial Sequence
  Description of Artificial Sequence: Synthetic peptide
  Seed: IQMCTELKL
IMMCTELKH

SEQ ID NO: 43838 - protein, 9 aa, Artificial Sequence
  Description of Artificial Sequence: Synthetic peptide
  Seed: IQMCTELKL
IMMCTELKI

SEQ ID NO: 43839 - protein, 9 aa, Artificial Sequence
  Description of Artificial Sequence: Synthetic peptide
  Seed: IQMCTELKL
IMMCTELKL

SEQ ID NO: 43840 - protein, 9 aa, Artificial Sequence
  Description of Artificial Sequence: Synthetic peptide
  Seed: IQMCTELKL
IMMCTELKM

SEQ ID NO: 43841 - protein, 9 aa, Artificial Sequence
  Description of Artificial Sequence: Synthetic peptide
  Seed: IQMCTELKL
IMMCTELKF

SEQ ID NO: 43842 - protein, 9 aa, Artificial Sequence
  Description of Artificial Sequence: Synthetic peptide
  Seed: IQMCTELKL
IMMCTELKT

SEQ ID NO: 43843 - protein, 9 aa, Artificial Sequence
  Description of Artificial Sequence: Synthetic peptide
  Seed: IQMCTELKL
IMMCTELKW

SEQ ID NO: 43844 - protein, 9 aa, Artificial Sequence
  Description of Artificial Sequence: Synthetic peptide
  Seed: IQMCTELKL
IMMCTELKY

SEQ ID NO: 43845 - protein, 9 aa, Artificial Sequence
  Description of Artificial Sequence: Synthetic peptide
  Seed: IQMCTELKL
IFMCTELKF

SEQ ID NO: 43846 - protein, 9 aa, Artificial Sequence
  Description of Artificial Sequence: Synthetic peptide
  Seed: IQMCTELKL
ITMCTELKM

SEQ ID NO: 43847 - protein, 9 aa, Artificial Sequence
  Description of Artificial Sequence: Synthetic peptide
  Seed: IQMCTELKL
IFMCTELKY

SEQ ID NO: 43848 - protein, 9 aa, Artificial Sequence
  Description of Artificial Sequence: Synthetic peptide
  Seed: IQMCTELKL
IPMCTELKF

SEQ ID NO: 43849 - protein, 9 aa, Artificial Sequence
  Description of Artificial Sequence: Synthetic peptide
  Seed: IQMCTELKL
IPMCTELKY

SEQ ID NO: 43850 - protein, 9 aa, Artificial Sequence
  Description of Artificial Sequence: Synthetic peptide
  Seed: IQMCTELKL
ISMCTELKL

SEQ ID NO: 43851 - protein, 9 aa, Artificial Sequence
  Description of Artificial Sequence: Synthetic peptide
  Seed: IQMCTELKL
ISMCTELKM

SEQ ID NO: 43852 - protein, 9 aa, Artificial Sequence
  Description of Artificial Sequence: Synthetic peptide
  Seed: IQMCTELKL
ISMCTELKF

SEQ ID NO: 43853 - protein, 9 aa, Artificial Sequence
  Description of Artificial Sequence: Synthetic peptide
  Seed: IQMCTELKL
ISMCTELKY

SEQ ID NO: 43854 - protein, 9 aa, Artificial Sequence
  Description of Artificial Sequence: Synthetic peptide
  Seed: IQMCTELKL
ISMCTELKV

SEQ ID NO: 43855 - protein, 9 aa, Artificial Sequence
  Description of Artificial Sequence: Synthetic peptide
  Seed: IQMCTELKL
ITMCTELKI

SEQ ID NO: 43856 - protein, 9 aa, Artificial Sequence
  Description of Artificial Sequence: Synthetic peptide
  Seed: IQMCTELKL
IMMCTELKA

SEQ ID NO: 43857 - protein, 9 aa, Artificial Sequence
  Description of Artificial Sequence: Synthetic peptide
  Seed: IQMCTELKL
IKMCTELKY

SEQ ID NO: 43858 - protein, 9 aa, Artificial Sequence
  Description of Artificial Sequence: Synthetic peptide
  Seed: IQMCTELKL
IKMCTELKW

SEQ ID NO: 43859 - protein, 9 aa, Artificial Sequence
  Description of Artificial Sequence: Synthetic peptide
  Seed: IQMCTELKL
IKMCTELKF

SEQ ID NO: 43860 - protein, 9 aa, Artificial Sequence
  Description of Artificial Sequence: Synthetic peptide
  Seed: IQMCTELKL
IIMCTELKA

SEQ ID NO: 43861 - protein, 9 aa, Artificial Sequence
  Description of Artificial Sequence: Synthetic peptide
  Seed: IQMCTELKL
IIMCTELKI

SEQ ID NO: 43862 - protein, 9 aa, Artificial Sequence
  Description of Artificial Sequence: Synthetic peptide
  Seed: IQMCTELKL
IIMCTELKL

SEQ ID NO: 43863 - protein, 9 aa, Artificial Sequence
  Description of Artificial Sequence: Synthetic peptide
  Seed: IQMCTELKL
IIMCTELKM

SEQ ID NO: 43864 - protein, 9 aa, Artificial Sequence
  Description of Artificial Sequence: Synthetic peptide
  Seed: IQMCTELKL
IIMCTELKF

SEQ ID NO: 43865 - protein, 9 aa, Artificial Sequence
  Description of Artificial Sequence: Synthetic peptide
  Seed: IQMCTELKL
IIMCTELKY

SEQ ID NO: 43866 - protein, 9 aa, Artificial Sequence
  Description of Artificial Sequence: Synthetic peptide
  Seed: IQMCTELKL
IIMCTELKV

SEQ ID NO: 43867 - protein, 9 aa, Artificial Sequence
  Description of Artificial Sequence: Synthetic peptide
  Seed: IQMCTELKL
ILMCTELKA

SEQ ID NO: 43868 - protein, 9 aa, Artificial Sequence
  Description of Artificial Sequence: Synthetic peptide
  Seed: IQMCTELKL
ILMCTELKC

SEQ ID NO: 43869 - protein, 9 aa, Artificial Sequence
  Description of Artificial Sequence: Synthetic peptide
  Seed: IQMCTELKL
ILMCTELKI

SEQ ID NO: 43870 - protein, 9 aa, Artificial Sequence
  Description of Artificial Sequence: Synthetic peptide
  Seed: IQMCTELKL
ILMCTELKL

SEQ ID NO: 43871 - protein, 9 aa, Artificial Sequence
  Description of Artificial Sequence: Synthetic peptide
  Seed: IQMCTELKL
ILMCTELKM

SEQ ID NO: 43872 - protein, 9 aa, Artificial Sequence
  Description of Artificial Sequence: Synthetic peptide
  Seed: IQMCTELKL
ILMCTELKF

SEQ ID NO: 43873 - protein, 9 aa, Artificial Sequence
  Description of Artificial Sequence: Synthetic peptide
  Seed: IQMCTELKL
ILMCTELKT

SEQ ID NO: 43874 - protein, 9 aa, Artificial Sequence
  Description of Artificial Sequence: Synthetic peptide
  Seed: IQMCTELKL
ILMCTELKY

SEQ ID NO: 43875 - protein, 9 aa, Artificial Sequence
  Description of Artificial Sequence: Synthetic peptide
  Seed: IQMCTELKL
ILMCTELKV

SEQ ID NO: 43876 - protein, 9 aa, Artificial Sequence
  Description of Artificial Sequence: Synthetic peptide
  Seed: IQMCTELKL
IKMCTELKI

SEQ ID NO: 43877 - protein, 9 aa, Artificial Sequence
  Description of Artificial Sequence: Synthetic peptide
  Seed: IQMCTELKL
IKMCTELKL

SEQ ID NO: 43878 - protein, 9 aa, Artificial Sequence
  Description of Artificial Sequence: Synthetic peptide
  Seed: IQMCTELKL
IKMCTELKM

SEQ ID NO: 43879 - protein, 9 aa, Artificial Sequence
  Description of Artificial Sequence: Synthetic peptide
  Seed: IQMCTELKL
ITMCTELKL

SEQ ID NO: 43880 - protein, 9 aa, Artificial Sequence
  Description of Artificial Sequence: Synthetic peptide
  Seed: IQMCTELKL
ITMCTELKF

SEQ ID NO: 43881 - protein, 9 aa, Artificial Sequence
  Description of Artificial Sequence: Synthetic peptide
  Seed: IQNSITIER
IYNSITIER

SEQ ID NO: 43882 - protein, 9 aa, Artificial Sequence
  Description of Artificial Sequence: Synthetic peptide
  Seed: IQNSITIER
IPNSITIER

SEQ ID NO: 43883 - protein, 9 aa, Artificial Sequence
  Description of Artificial Sequence: Synthetic peptide
  Seed: IQNSITIER
ILNSITIER

SEQ ID NO: 43884 - protein, 9 aa, Artificial Sequence
  Description of Artificial Sequence: Synthetic peptide
  Seed: IQNSITIER
ILNSITIEK

SEQ ID NO: 43885 - protein, 9 aa, Artificial Sequence
  Description of Artificial Sequence: Synthetic peptide
  Seed: IQNSITIER
ILNSITIEY

SEQ ID NO: 43886 - protein, 9 aa, Artificial Sequence
  Description of Artificial Sequence: Synthetic peptide
  Seed: IQNSITIER
IMNSITIER

SEQ ID NO: 43887 - protein, 9 aa, Artificial Sequence
  Description of Artificial Sequence: Synthetic peptide
  Seed: IQNSITIER
IMNSITIEH

SEQ ID NO: 43888 - protein, 9 aa, Artificial Sequence
  Description of Artificial Sequence: Synthetic peptide
  Seed: IQNSITIER
IMNSITIEK

SEQ ID NO: 43889 - protein, 9 aa, Artificial Sequence
  Description of Artificial Sequence: Synthetic peptide
  Seed: IQNSITIER
IMNSITIEY

SEQ ID NO: 43890 - protein, 9 aa, Artificial Sequence
  Description of Artificial Sequence: Synthetic peptide
  Seed: IQNSITIER
IFNSITIER

SEQ ID NO: 43891 - protein, 9 aa, Artificial Sequence
  Description of Artificial Sequence: Synthetic peptide
  Seed: IQNSITIER
IFNSITIEK

SEQ ID NO: 43892 - protein, 9 aa, Artificial Sequence
  Description of Artificial Sequence: Synthetic peptide
  Seed: IQNSITIER
IPNSITIEK

SEQ ID NO: 43893 - protein, 9 aa, Artificial Sequence
  Description of Artificial Sequence: Synthetic peptide
  Seed: IQMCTELKL
ITMCTELKY

SEQ ID NO: 43894 - protein, 9 aa, Artificial Sequence
  Description of Artificial Sequence: Synthetic peptide
  Seed: IQNSITIER
ISNSITIER

SEQ ID NO: 43895 - protein, 9 aa, Artificial Sequence
  Description of Artificial Sequence: Synthetic peptide
  Seed: IQNSITIER
ISNSITIEK

SEQ ID NO: 43896 - protein, 9 aa, Artificial Sequence
  Description of Artificial Sequence: Synthetic peptide
  Seed: IQNSITIER
ISNSITIEY

SEQ ID NO: 43897 - protein, 9 aa, Artificial Sequence
  Description of Artificial Sequence: Synthetic peptide
  Seed: IQNSITIER
ITNSITIER

SEQ ID NO: 43898 - protein, 9 aa, Artificial Sequence
  Description of Artificial Sequence: Synthetic peptide
  Seed: IQNSITIER
ITNSITIEH

SEQ ID NO: 43899 - protein, 9 aa, Artificial Sequence
  Description of Artificial Sequence: Synthetic peptide
  Seed: IQNSITIER
ITNSITIEK

SEQ ID NO: 43900 - protein, 9 aa, Artificial Sequence
  Description of Artificial Sequence: Synthetic peptide
  Seed: IQNSITIER
ITNSITIEY

SEQ ID NO: 43901 - protein, 9 aa, Artificial Sequence
  Description of Artificial Sequence: Synthetic peptide
  Seed: IQNSITIER
IWNSITIER

SEQ ID NO: 43902 - protein, 9 aa, Artificial Sequence
  Description of Artificial Sequence: Synthetic peptide
  Seed: IQNSITIER
IWNSITIEK

SEQ ID NO: 43903 - protein, 9 aa, Artificial Sequence
  Description of Artificial Sequence: Synthetic peptide
  Seed: IQNSITIER
IINSITIEY

SEQ ID NO: 43904 - protein, 9 aa, Artificial Sequence
  Description of Artificial Sequence: Synthetic peptide
  Seed: IQNSITIER
IINSITIEK

SEQ ID NO: 43905 - protein, 9 aa, Artificial Sequence
  Description of Artificial Sequence: Synthetic peptide
  Seed: IQNSITIER
IINSITIER

SEQ ID NO: 43906 - protein, 9 aa, Artificial Sequence
  Description of Artificial Sequence: Synthetic peptide
  Seed: IQNSITIER
IHNSITIER

SEQ ID NO: 43907 - protein, 9 aa, Artificial Sequence
  Description of Artificial Sequence: Synthetic peptide
  Seed: IQMCTELKL
ITMCTELKV

SEQ ID NO: 43908 - protein, 9 aa, Artificial Sequence
  Description of Artificial Sequence: Synthetic peptide
  Seed: IQMCTELKL
IWMCTELKF

SEQ ID NO: 43909 - protein, 9 aa, Artificial Sequence
  Description of Artificial Sequence: Synthetic peptide
  Seed: IQMCTELKL
IYMCTELKF

SEQ ID NO: 43910 - protein, 9 aa, Artificial Sequence
  Description of Artificial Sequence: Synthetic peptide
  Seed: IQMCTELKL
IYMCTELKY

SEQ ID NO: 43911 - protein, 9 aa, Artificial Sequence
  Description of Artificial Sequence: Synthetic peptide
  Seed: IQMCTELKL
IVMCTELKI

SEQ ID NO: 43912 - protein, 9 aa, Artificial Sequence
  Description of Artificial Sequence: Synthetic peptide
  Seed: IQMCTELKL
IVMCTELKL

SEQ ID NO: 43913 - protein, 9 aa, Artificial Sequence
  Description of Artificial Sequence: Synthetic peptide
  Seed: IQMCTELKL
IVMCTELKM

SEQ ID NO: 43914 - protein, 9 aa, Artificial Sequence
  Description of Artificial Sequence: Synthetic peptide
  Seed: IQMCTELKL
IVMCTELKF

SEQ ID NO: 43915 - protein, 9 aa, Artificial Sequence
  Description of Artificial Sequence: Synthetic peptide
  Seed: IQMCTELKL
IVMCTELKY

SEQ ID NO: 43916 - protein, 9 aa, Artificial Sequence
  Description of Artificial Sequence: Synthetic peptide
  Seed: IQMCTELKL
IVMCTELKV

SEQ ID NO: 43917 - protein, 9 aa, Artificial Sequence
  Description of Artificial Sequence: Synthetic peptide
  Seed: IQNSITIER
IANSITIER

SEQ ID NO: 43918 - protein, 9 aa, Artificial Sequence
  Description of Artificial Sequence: Synthetic peptide
  Seed: IQNSITIER
IANSITIEK

SEQ ID NO: 43919 - protein, 9 aa, Artificial Sequence
  Description of Artificial Sequence: Synthetic peptide
  Seed: IQNSITIER
IANSITIEY

SEQ ID NO: 43920 - protein, 9 aa, Artificial Sequence
  Description of Artificial Sequence: Synthetic peptide
  Seed: IQNSITIER
INNSITIER

SEQ ID NO: 43921 - protein, 9 aa, Artificial Sequence
  Description of Artificial Sequence: Synthetic peptide
  Seed: IQNSITIER
INNSITIEK

SEQ ID NO: 43922 - protein, 9 aa, Artificial Sequence
  Description of Artificial Sequence: Synthetic peptide
  Seed: IQNSITIER
ICNSITIER

SEQ ID NO: 43923 - protein, 9 aa, Artificial Sequence
  Description of Artificial Sequence: Synthetic peptide
  Seed: IQNSITIER
IGNSITIER

SEQ ID NO: 43924 - protein, 9 aa, Artificial Sequence
  Description of Artificial Sequence: Synthetic peptide
  Seed: IQNSITIER
IGNSITIEK

SEQ ID NO: 43925 - protein, 9 aa, Artificial Sequence
  Description of Artificial Sequence: Synthetic peptide
  Seed: IQPTFSVQR
IMPTFSVQK

SEQ ID NO: 43926 - protein, 9 aa, Artificial Sequence
  Description of Artificial Sequence: Synthetic peptide
  Seed: IQPTFSVQR
IFPTFSVQR

SEQ ID NO: 43927 - protein, 9 aa, Artificial Sequence
  Description of Artificial Sequence: Synthetic peptide
  Seed: IQPTFSVQR
IFPTFSVQK

SEQ ID NO: 43928 - protein, 9 aa, Artificial Sequence
  Description of Artificial Sequence: Synthetic peptide
  Seed: ISIQPTFSV
IPIQPTFSL

SEQ ID NO: 43929 - protein, 9 aa, Artificial Sequence
  Description of Artificial Sequence: Synthetic peptide
  Seed: ISIQPTFSV
IMIQPTFST

SEQ ID NO: 43930 - protein, 9 aa, Artificial Sequence
  Description of Artificial Sequence: Synthetic peptide
  Seed: ISIQPTFSV
IMIQPTFSW

SEQ ID NO: 43931 - protein, 9 aa, Artificial Sequence
  Description of Artificial Sequence: Synthetic peptide
  Seed: ISIQPTFSV
IMIQPTFSY

SEQ ID NO: 43932 - protein, 9 aa, Artificial Sequence
  Description of Artificial Sequence: Synthetic peptide
  Seed: ISIQPTFSV
IMIQPTFSV

SEQ ID NO: 43933 - protein, 9 aa, Artificial Sequence
  Description of Artificial Sequence: Synthetic peptide
  Seed: ISIQPTFSV
IFIQPTFSM

SEQ ID NO: 43934 - protein, 9 aa, Artificial Sequence
  Description of Artificial Sequence: Synthetic peptide
  Seed: ISIQPTFSV
IFIQPTFSF

SEQ ID NO: 43935 - protein, 9 aa, Artificial Sequence
  Description of Artificial Sequence: Synthetic peptide
  Seed: ISIQPTFSV
IFIQPTFSW

SEQ ID NO: 43936 - protein, 9 aa, Artificial Sequence
  Description of Artificial Sequence: Synthetic peptide
  Seed: ISIQPTFSV
IFIQPTFSY

SEQ ID NO: 43937 - protein, 9 aa, Artificial Sequence
  Description of Artificial Sequence: Synthetic peptide
  Seed: ISIQPTFSV
IFIQPTFSV

SEQ ID NO: 43938 - protein, 9 aa, Artificial Sequence
  Description of Artificial Sequence: Synthetic peptide
  Seed: ISIQPTFSV
IPIQPTFSM

SEQ ID NO: 43939 - protein, 9 aa, Artificial Sequence
  Description of Artificial Sequence: Synthetic peptide
  Seed: ISIQPTFSV
ISIQPTFSF

SEQ ID NO: 43940 - protein, 9 aa, Artificial Sequence
  Description of Artificial Sequence: Synthetic peptide
  Seed: ISIQPTFSV
IPIQPTFSF

SEQ ID NO: 43941 - protein, 9 aa, Artificial Sequence
  Description of Artificial Sequence: Synthetic peptide
  Seed: ISIQPTFSV
IPIQPTFSW

SEQ ID NO: 43942 - protein, 9 aa, Artificial Sequence
  Description of Artificial Sequence: Synthetic peptide
  Seed: ISIQPTFSV
IPIQPTFSY

SEQ ID NO: 43943 - protein, 9 aa, Artificial Sequence
  Description of Artificial Sequence: Synthetic peptide
  Seed: ISIQPTFSV
IPIQPTFSV

SEQ ID NO: 43944 - protein, 9 aa, Artificial Sequence
  Description of Artificial Sequence: Synthetic peptide
  Seed: ISIQPTFSV
ISIQPTFSA

SEQ ID NO: 43945 - protein, 9 aa, Artificial Sequence
  Description of Artificial Sequence: Synthetic peptide
  Seed: ISIQPTFSV
ISIQPTFSG

SEQ ID NO: 43946 - protein, 9 aa, Artificial Sequence
  Description of Artificial Sequence: Synthetic peptide
  Seed: ISIQPTFSV
ISIQPTFSH

SEQ ID NO: 43947 - protein, 9 aa, Artificial Sequence
  Description of Artificial Sequence: Synthetic peptide
  Seed: ISIQPTFSV
ISIQPTFSI

SEQ ID NO: 43948 - protein, 9 aa, Artificial Sequence
  Description of Artificial Sequence: Synthetic peptide
  Seed: ISIQPTFSV
ISIQPTFSL

SEQ ID NO: 43949 - protein, 9 aa, Artificial Sequence
  Description of Artificial Sequence: Synthetic peptide
  Seed: ISIQPTFSV
IMIQPTFSS

SEQ ID NO: 43950 - protein, 9 aa, Artificial Sequence
  Description of Artificial Sequence: Synthetic peptide
  Seed: ISIQPTFSV
IMIQPTFSF

SEQ ID NO: 43951 - protein, 9 aa, Artificial Sequence
  Description of Artificial Sequence: Synthetic peptide
  Seed: ISIQPTFSV
IMIQPTFSM

SEQ ID NO: 43952 - protein, 9 aa, Artificial Sequence
  Description of Artificial Sequence: Synthetic peptide
  Seed: ISIQPTFSV
IMIQPTFSL

SEQ ID NO: 43953 - protein, 9 aa, Artificial Sequence
  Description of Artificial Sequence: Synthetic peptide
  Seed: ISIQPTFSV
IIIQPTFSW

SEQ ID NO: 43954 - protein, 9 aa, Artificial Sequence
  Description of Artificial Sequence: Synthetic peptide
  Seed: ISIQPTFSV
IIIQPTFSY

SEQ ID NO: 43955 - protein, 9 aa, Artificial Sequence
  Description of Artificial Sequence: Synthetic peptide
  Seed: ISIQPTFSV
IIIQPTFSV

SEQ ID NO: 43956 - protein, 9 aa, Artificial Sequence
  Description of Artificial Sequence: Synthetic peptide
  Seed: ISIQPTFSV
ILIQPTFSA

SEQ ID NO: 43957 - protein, 9 aa, Artificial Sequence
  Description of Artificial Sequence: Synthetic peptide
  Seed: ISIQPTFSV
ILIQPTFSC

SEQ ID NO: 43958 - protein, 9 aa, Artificial Sequence
  Description of Artificial Sequence: Synthetic peptide
  Seed: ISIQPTFSV
ILIQPTFSI

SEQ ID NO: 43959 - protein, 9 aa, Artificial Sequence
  Description of Artificial Sequence: Synthetic peptide
  Seed: ISIQPTFSV
ILIQPTFSL

SEQ ID NO: 43960 - protein, 9 aa, Artificial Sequence
  Description of Artificial Sequence: Synthetic peptide
  Seed: ISIQPTFSV
ILIQPTFSM

SEQ ID NO: 43961 - protein, 9 aa, Artificial Sequence
  Description of Artificial Sequence: Synthetic peptide
  Seed: ISIQPTFSV
ILIQPTFSF

SEQ ID NO: 43962 - protein, 9 aa, Artificial Sequence
  Description of Artificial Sequence: Synthetic peptide
  Seed: ISIQPTFSV
ILIQPTFSS

SEQ ID NO: 43963 - protein, 9 aa, Artificial Sequence
  Description of Artificial Sequence: Synthetic peptide
  Seed: ISIQPTFSV
ILIQPTFST

SEQ ID NO: 43964 - protein, 9 aa, Artificial Sequence
  Description of Artificial Sequence: Synthetic peptide
  Seed: ISIQPTFSV
ILIQPTFSW

SEQ ID NO: 43965 - protein, 9 aa, Artificial Sequence
  Description of Artificial Sequence: Synthetic peptide
  Seed: ISIQPTFSV
ILIQPTFSY

SEQ ID NO: 43966 - protein, 9 aa, Artificial Sequence
  Description of Artificial Sequence: Synthetic peptide
  Seed: ISIQPTFSV
ILIQPTFSV

SEQ ID NO: 43967 - protein, 9 aa, Artificial Sequence
  Description of Artificial Sequence: Synthetic peptide
  Seed: ISIQPTFSV
IKIQPTFSM

SEQ ID NO: 43968 - protein, 9 aa, Artificial Sequence
  Description of Artificial Sequence: Synthetic peptide
  Seed: ISIQPTFSV
IKIQPTFSY

SEQ ID NO: 43969 - protein, 9 aa, Artificial Sequence
  Description of Artificial Sequence: Synthetic peptide
  Seed: ISIQPTFSV
IMIQPTFSA

SEQ ID NO: 43970 - protein, 9 aa, Artificial Sequence
  Description of Artificial Sequence: Synthetic peptide
  Seed: ISIQPTFSV
IMIQPTFSC

SEQ ID NO: 43971 - protein, 9 aa, Artificial Sequence
  Description of Artificial Sequence: Synthetic peptide
  Seed: ISIQPTFSV
IMIQPTFSI

SEQ ID NO: 43972 - protein, 9 aa, Artificial Sequence
  Description of Artificial Sequence: Synthetic peptide
  Seed: ISIQPTFSV
ISIQPTFSM

SEQ ID NO: 43973 - protein, 9 aa, Artificial Sequence
  Description of Artificial Sequence: Synthetic peptide
  Seed: ISIQPTFSV
ISIQPTFSW

SEQ ID NO: 43974 - protein, 9 aa, Artificial Sequence
  Description of Artificial Sequence: Synthetic peptide
  Seed: IQPTFSVQR
ISPTFSVQR

SEQ ID NO: 43975 - protein, 11 aa, Artificial Sequence
  Description of Artificial Sequence: Synthetic peptide
  Seed: ISIQPTFSVQR
IKIQPTFSVQR

SEQ ID NO: 43976 - protein, 11 aa, Artificial Sequence
  Description of Artificial Sequence: Synthetic peptide
  Seed: ISIQPTFSVQR
IAIQPTFSVQR

SEQ ID NO: 43977 - protein, 11 aa, Artificial Sequence
  Description of Artificial Sequence: Synthetic peptide
  Seed: ISIQPTFSVQR
IRIQPTFSVQR

SEQ ID NO: 43978 - protein, 11 aa, Artificial Sequence
  Description of Artificial Sequence: Synthetic peptide
  Seed: ISIQPTFSVQR
IRIQPTFSVQK

SEQ ID NO: 43979 - protein, 11 aa, Artificial Sequence
  Description of Artificial Sequence: Synthetic peptide
  Seed: ISIQPTFSVQR
ICIQPTFSVQR

SEQ ID NO: 43980 - protein, 11 aa, Artificial Sequence
  Description of Artificial Sequence: Synthetic peptide
  Seed: ISIQPTFSVQR
IQIQPTFSVQR

SEQ ID NO: 43981 - protein, 11 aa, Artificial Sequence
  Description of Artificial Sequence: Synthetic peptide
  Seed: ISIQPTFSVQR
IGIQPTFSVQR

SEQ ID NO: 43982 - protein, 11 aa, Artificial Sequence
  Description of Artificial Sequence: Synthetic peptide
  Seed: ISIQPTFSVQR
IHIQPTFSVQR

SEQ ID NO: 43983 - protein, 11 aa, Artificial Sequence
  Description of Artificial Sequence: Synthetic peptide
  Seed: ISIQPTFSVQR
IIIQPTFSVQR

SEQ ID NO: 43984 - protein, 11 aa, Artificial Sequence
  Description of Artificial Sequence: Synthetic peptide
  Seed: ISIQPTFSVQR
ILIQPTFSVQR

SEQ ID NO: 43985 - protein, 11 aa, Artificial Sequence
  Description of Artificial Sequence: Synthetic peptide
  Seed: ISIQPTFSVQR
IMIQPTFSVQR

SEQ ID NO: 43986 - protein, 9 aa, Artificial Sequence
  Description of Artificial Sequence: Synthetic peptide
  Seed: ISIQPTFSV
ISIQPTFSY

SEQ ID NO: 43987 - protein, 11 aa, Artificial Sequence
  Description of Artificial Sequence: Synthetic peptide
  Seed: ISIQPTFSVQR
IMIQPTFSVQK

SEQ ID NO: 43988 - protein, 11 aa, Artificial Sequence
  Description of Artificial Sequence: Synthetic peptide
  Seed: ISIQPTFSVQR
IFIQPTFSVQR

SEQ ID NO: 43989 - protein, 11 aa, Artificial Sequence
  Description of Artificial Sequence: Synthetic peptide
  Seed: ISIQPTFSVQR
IFIQPTFSVQK

SEQ ID NO: 43990 - protein, 11 aa, Artificial Sequence
  Description of Artificial Sequence: Synthetic peptide
  Seed: ISIQPTFSVQR
ITIQPTFSVQR

SEQ ID NO: 43991 - protein, 11 aa, Artificial Sequence
  Description of Artificial Sequence: Synthetic peptide
  Seed: ISIQPTFSVQR
ITIQPTFSVQK

SEQ ID NO: 43992 - protein, 11 aa, Artificial Sequence
  Description of Artificial Sequence: Synthetic peptide
  Seed: ISIQPTFSVQR
IWIQPTFSVQR

SEQ ID NO: 43993 - protein, 11 aa, Artificial Sequence
  Description of Artificial Sequence: Synthetic peptide
  Seed: ISIQPTFSVQR
IWIQPTFSVQK

SEQ ID NO: 43994 - protein, 11 aa, Artificial Sequence
  Description of Artificial Sequence: Synthetic peptide
  Seed: ISIQPTFSVQR
IYIQPTFSVQR

SEQ ID NO: 43995 - protein, 11 aa, Artificial Sequence
  Description of Artificial Sequence: Synthetic peptide
  Seed: ISIQPTFSVQR
IYIQPTFSVQK

SEQ ID NO: 43996 - protein, 9 aa, Artificial Sequence
  Description of Artificial Sequence: Synthetic peptide
  Seed: ISIQPTFSV
IVIQPTFSV

SEQ ID NO: 43997 - protein, 9 aa, Artificial Sequence
  Description of Artificial Sequence: Synthetic peptide
  Seed: ISIQPTFSV
IVIQPTFSY

SEQ ID NO: 43998 - protein, 9 aa, Artificial Sequence
  Description of Artificial Sequence: Synthetic peptide
  Seed: ISIQPTFSV
IVIQPTFSW

SEQ ID NO: 43999 - protein, 9 aa, Artificial Sequence
  Description of Artificial Sequence: Synthetic peptide
  Seed: ISIQPTFSV
IVIQPTFST

SEQ ID NO: 44000 - protein, 9 aa, Artificial Sequence
  Description of Artificial Sequence: Synthetic peptide
  Seed: ISIQPTFSV
ITIQPTFSA

SEQ ID NO: 44001 - protein, 9 aa, Artificial Sequence
  Description of Artificial Sequence: Synthetic peptide
  Seed: ISIQPTFSV
ITIQPTFSH

SEQ ID NO: 44002 - protein, 9 aa, Artificial Sequence
  Description of Artificial Sequence: Synthetic peptide
  Seed: ISIQPTFSV
ITIQPTFSI

SEQ ID NO: 44003 - protein, 9 aa, Artificial Sequence
  Description of Artificial Sequence: Synthetic peptide
  Seed: ISIQPTFSV
ITIQPTFSL

SEQ ID NO: 44004 - protein, 9 aa, Artificial Sequence
  Description of Artificial Sequence: Synthetic peptide
  Seed: ISIQPTFSV
ITIQPTFSM

SEQ ID NO: 44005 - protein, 9 aa, Artificial Sequence
  Description of Artificial Sequence: Synthetic peptide
  Seed: ISIQPTFSV
ITIQPTFSF

SEQ ID NO: 44006 - protein, 9 aa, Artificial Sequence
  Description of Artificial Sequence: Synthetic peptide
  Seed: ISIQPTFSV
ITIQPTFST

SEQ ID NO: 44007 - protein, 9 aa, Artificial Sequence
  Description of Artificial Sequence: Synthetic peptide
  Seed: ISIQPTFSV
ITIQPTFSW

SEQ ID NO: 44008 - protein, 9 aa, Artificial Sequence
  Description of Artificial Sequence: Synthetic peptide
  Seed: ISIQPTFSV
ITIQPTFSY

SEQ ID NO: 44009 - protein, 9 aa, Artificial Sequence
  Description of Artificial Sequence: Synthetic peptide
  Seed: ISIQPTFSV
ITIQPTFSV

SEQ ID NO: 44010 - protein, 9 aa, Artificial Sequence
  Description of Artificial Sequence: Synthetic peptide
  Seed: ISIQPTFSV
IYIQPTFSM

SEQ ID NO: 44011 - protein, 9 aa, Artificial Sequence
  Description of Artificial Sequence: Synthetic peptide
  Seed: ISIQPTFSV
IYIQPTFSF

SEQ ID NO: 44012 - protein, 9 aa, Artificial Sequence
  Description of Artificial Sequence: Synthetic peptide
  Seed: ISIQPTFSV
IYIQPTFSW

SEQ ID NO: 44013 - protein, 9 aa, Artificial Sequence
  Description of Artificial Sequence: Synthetic peptide
  Seed: ISIQPTFSV
IYIQPTFSY

SEQ ID NO: 44014 - protein, 9 aa, Artificial Sequence
  Description of Artificial Sequence: Synthetic peptide
  Seed: ISIQPTFSV
IVIQPTFSA

SEQ ID NO: 44015 - protein, 9 aa, Artificial Sequence
  Description of Artificial Sequence: Synthetic peptide
  Seed: ISIQPTFSV
IVIQPTFSI

SEQ ID NO: 44016 - protein, 9 aa, Artificial Sequence
  Description of Artificial Sequence: Synthetic peptide
  Seed: ISIQPTFSV
IVIQPTFSL

SEQ ID NO: 44017 - protein, 9 aa, Artificial Sequence
  Description of Artificial Sequence: Synthetic peptide
  Seed: ISIQPTFSV
IVIQPTFSM

SEQ ID NO: 44018 - protein, 9 aa, Artificial Sequence
  Description of Artificial Sequence: Synthetic peptide
  Seed: ISIQPTFSV
IVIQPTFSF

SEQ ID NO: 44019 - protein, 9 aa, Artificial Sequence
  Description of Artificial Sequence: Synthetic peptide
  Seed: ISIQPTFSV
IIIQPTFST

SEQ ID NO: 44020 - protein, 9 aa, Artificial Sequence
  Description of Artificial Sequence: Synthetic peptide
  Seed: ISIQPTFSV
IIIQPTFSF

SEQ ID NO: 44021 - protein, 9 aa, Artificial Sequence
  Description of Artificial Sequence: Synthetic peptide
  Seed: ISIQPTFSV
IIIQPTFSM

SEQ ID NO: 44022 - protein, 9 aa, Artificial Sequence
  Description of Artificial Sequence: Synthetic peptide
  Seed: IRASVGRMV
IRASVGRMY

SEQ ID NO: 44023 - protein, 9 aa, Artificial Sequence
  Description of Artificial Sequence: Synthetic peptide
  Seed: IRASVGRMI
IYASVGRMF

SEQ ID NO: 44024 - protein, 9 aa, Artificial Sequence
  Description of Artificial Sequence: Synthetic peptide
  Seed: IRASVGRMI
IYASVGRMY

SEQ ID NO: 44025 - protein, 9 aa, Artificial Sequence
  Description of Artificial Sequence: Synthetic peptide
  Seed: IRASVGRMI
IYASVGRMV

SEQ ID NO: 44026 - protein, 9 aa, Artificial Sequence
  Description of Artificial Sequence: Synthetic peptide
  Seed: IRASVGRMV
IRASVGRMR

SEQ ID NO: 44027 - protein, 9 aa, Artificial Sequence
  Description of Artificial Sequence: Synthetic peptide
  Seed: IRASVGRMV
IRASVGRML

SEQ ID NO: 44028 - protein, 9 aa, Artificial Sequence
  Description of Artificial Sequence: Synthetic peptide
  Seed: IRASVGRMV
IRASVGRMK

SEQ ID NO: 44029 - protein, 9 aa, Artificial Sequence
  Description of Artificial Sequence: Synthetic peptide
  Seed: IRASVGRMV
IRASVGRMM

SEQ ID NO: 44030 - protein, 9 aa, Artificial Sequence
  Description of Artificial Sequence: Synthetic peptide
  Seed: IRASVGRMV
IRASVGRMF

SEQ ID NO: 44031 - protein, 9 aa, Artificial Sequence
  Description of Artificial Sequence: Synthetic peptide
  Seed: IRASVGRMV
IYASVGRML

SEQ ID NO: 44032 - protein, 9 aa, Artificial Sequence
  Description of Artificial Sequence: Synthetic peptide
  Seed: ISIQPTFSV
IIIQPTFSL

SEQ ID NO: 44033 - protein, 9 aa, Artificial Sequence
  Description of Artificial Sequence: Synthetic peptide
  Seed: IRASVGRMV
IYASVGRMM

SEQ ID NO: 44034 - protein, 9 aa, Artificial Sequence
  Description of Artificial Sequence: Synthetic peptide
  Seed: IRGTRVVPR
IRGTRVVPK

SEQ ID NO: 44035 - protein, 11 aa, Artificial Sequence
  Description of Artificial Sequence: Synthetic peptide
  Seed: IRMIKRGINDR
IKMIKRGINDR

SEQ ID NO: 44036 - protein, 11 aa, Artificial Sequence
  Description of Artificial Sequence: Synthetic peptide
  Seed: IRMIKRGINDR
IMMIKRGINDR

SEQ ID NO: 44037 - protein, 11 aa, Artificial Sequence
  Description of Artificial Sequence: Synthetic peptide
  Seed: IRMIKRGINDR
IFMIKRGINDR

SEQ ID NO: 44038 - protein, 11 aa, Artificial Sequence
  Description of Artificial Sequence: Synthetic peptide
  Seed: IRMIKRGINDR
ISMIKRGINDR

SEQ ID NO: 44039 - protein, 9 aa, Artificial Sequence
  Description of Artificial Sequence: Synthetic peptide
  Seed: IQPTFSVQR
ITPTFSVQR

SEQ ID NO: 44040 - protein, 9 aa, Artificial Sequence
  Description of Artificial Sequence: Synthetic peptide
  Seed: IQPTFSVQR
ITPTFSVQK

SEQ ID NO: 44041 - protein, 9 aa, Artificial Sequence
  Description of Artificial Sequence: Synthetic peptide
  Seed: IQPTFSVQR
IWPTFSVQR

SEQ ID NO: 44042 - protein, 9 aa, Artificial Sequence
  Description of Artificial Sequence: Synthetic peptide
  Seed: IQPTFSVQR
IWPTFSVQK

SEQ ID NO: 44043 - protein, 9 aa, Artificial Sequence
  Description of Artificial Sequence: Synthetic peptide
  Seed: IQPTFSVQR
IYPTFSVQR

SEQ ID NO: 44044 - protein, 9 aa, Artificial Sequence
  Description of Artificial Sequence: Synthetic peptide
  Seed: IQPTFSVQR
IYPTFSVQK

SEQ ID NO: 44045 - protein, 9 aa, Artificial Sequence
  Description of Artificial Sequence: Synthetic peptide
  Seed: IQPTFSVQR
IVPTFSVQR

SEQ ID NO: 44046 - protein, 9 aa, Artificial Sequence
  Description of Artificial Sequence: Synthetic peptide
  Seed: IQPTFSVQR
IVPTFSVQK

SEQ ID NO: 44047 - protein, 9 aa, Artificial Sequence
  Description of Artificial Sequence: Synthetic peptide
  Seed: IRASVGKMI
IRASVGKML

SEQ ID NO: 44048 - protein, 9 aa, Artificial Sequence
  Description of Artificial Sequence: Synthetic peptide
  Seed: IRASVGKMI
IRASVGKMK

SEQ ID NO: 44049 - protein, 9 aa, Artificial Sequence
  Description of Artificial Sequence: Synthetic peptide
  Seed: IRASVGKMI
IRASVGKMM

SEQ ID NO: 44050 - protein, 9 aa, Artificial Sequence
  Description of Artificial Sequence: Synthetic peptide
  Seed: IRASVGKMI
IRASVGKMF

SEQ ID NO: 44051 - protein, 9 aa, Artificial Sequence
  Description of Artificial Sequence: Synthetic peptide
  Seed: IRASVGKMI
IRASVGKMY

SEQ ID NO: 44052 - protein, 11 aa, Artificial Sequence
  Description of Artificial Sequence: Synthetic peptide
  Seed: IRMIKRGINDR
ITMIKRGINDR

SEQ ID NO: 44053 - protein, 11 aa, Artificial Sequence
  Description of Artificial Sequence: Synthetic peptide
  Seed: IRMIKRGINDR
IYMIKRGINDR

SEQ ID NO: 44054 - protein, 11 aa, Artificial Sequence
  Description of Artificial Sequence: Synthetic peptide
  Seed: IRMIKRGINDR
IVMIKRGINDR

SEQ ID NO: 44055 - protein, 9 aa, Artificial Sequence
  Description of Artificial Sequence: Synthetic peptide
  Seed: ISIQPTFSV
IQIQPTFSA

SEQ ID NO: 44056 - protein, 9 aa, Artificial Sequence
  Description of Artificial Sequence: Synthetic peptide
  Seed: ISIQPTFSV
IQIQPTFSI

SEQ ID NO: 44057 - protein, 9 aa, Artificial Sequence
  Description of Artificial Sequence: Synthetic peptide
  Seed: ISIQPTFSV
IQIQPTFSL

SEQ ID NO: 44058 - protein, 9 aa, Artificial Sequence
  Description of Artificial Sequence: Synthetic peptide
  Seed: ISIQPTFSV
IQIQPTFSM

SEQ ID NO: 44059 - protein, 9 aa, Artificial Sequence
  Description of Artificial Sequence: Synthetic peptide
  Seed: ISIQPTFSV
IQIQPTFSF

SEQ ID NO: 44060 - protein, 9 aa, Artificial Sequence
  Description of Artificial Sequence: Synthetic peptide
  Seed: ISIQPTFSV
IQIQPTFSS

SEQ ID NO: 44061 - protein, 9 aa, Artificial Sequence
  Description of Artificial Sequence: Synthetic peptide
  Seed: ISIQPTFSV
IQIQPTFST

SEQ ID NO: 44062 - protein, 9 aa, Artificial Sequence
  Description of Artificial Sequence: Synthetic peptide
  Seed: ISIQPTFSV
IQIQPTFSW

SEQ ID NO: 44063 - protein, 9 aa, Artificial Sequence
  Description of Artificial Sequence: Synthetic peptide
  Seed: ISIQPTFSV
IQIQPTFSY

SEQ ID NO: 44064 - protein, 9 aa, Artificial Sequence
  Description of Artificial Sequence: Synthetic peptide
  Seed: ISIQPTFSV
IQIQPTFSV

SEQ ID NO: 44065 - protein, 9 aa, Artificial Sequence
  Description of Artificial Sequence: Synthetic peptide
  Seed: ISIQPTFSV
IGIQPTFSI

SEQ ID NO: 44066 - protein, 9 aa, Artificial Sequence
  Description of Artificial Sequence: Synthetic peptide
  Seed: ISIQPTFSV
IGIQPTFSL

SEQ ID NO: 44067 - protein, 9 aa, Artificial Sequence
  Description of Artificial Sequence: Synthetic peptide
  Seed: ISIQPTFSV
IGIQPTFSM

SEQ ID NO: 44068 - protein, 9 aa, Artificial Sequence
  Description of Artificial Sequence: Synthetic peptide
  Seed: ISIQPTFSV
IGIQPTFSF

SEQ ID NO: 44069 - protein, 9 aa, Artificial Sequence
  Description of Artificial Sequence: Synthetic peptide
  Seed: ISIQPTFSV
IGIQPTFSW

SEQ ID NO: 44070 - protein, 9 aa, Artificial Sequence
  Description of Artificial Sequence: Synthetic peptide
  Seed: ISIQPTFSV
IGIQPTFSY

SEQ ID NO: 44071 - protein, 9 aa, Artificial Sequence
  Description of Artificial Sequence: Synthetic peptide
  Seed: ISIQPTFSV
IGIQPTFSV

SEQ ID NO: 44072 - protein, 9 aa, Artificial Sequence
  Description of Artificial Sequence: Synthetic peptide
  Seed: ISIQPTFSV
IHIQPTFSW

SEQ ID NO: 44073 - protein, 9 aa, Artificial Sequence
  Description of Artificial Sequence: Synthetic peptide
  Seed: ISIQPTFSV
IIIQPTFSA

SEQ ID NO: 44074 - protein, 9 aa, Artificial Sequence
  Description of Artificial Sequence: Synthetic peptide
  Seed: ISIQPTFSV
IIIQPTFSI

SEQ ID NO: 44075 - protein, 9 aa, Artificial Sequence
  Description of Artificial Sequence: Synthetic peptide
  Seed: ISIQPTFSV
IQIQPTFSC

SEQ ID NO: 44076 - protein, 9 aa, Artificial Sequence
  Description of Artificial Sequence: Synthetic peptide
  Seed: ISIQPTFSV
ICIQPTFSV

SEQ ID NO: 44077 - protein, 9 aa, Artificial Sequence
  Description of Artificial Sequence: Synthetic peptide
  Seed: ISIQPTFSV
IAIQPTFSA

SEQ ID NO: 44078 - protein, 9 aa, Artificial Sequence
  Description of Artificial Sequence: Synthetic peptide
  Seed: ISIQPTFSV
ICIQPTFSY

SEQ ID NO: 44079 - protein, 9 aa, Artificial Sequence
  Description of Artificial Sequence: Synthetic peptide
  Seed: ISIQPTFSV
IAIQPTFSC

SEQ ID NO: 44080 - protein, 9 aa, Artificial Sequence
  Description of Artificial Sequence: Synthetic peptide
  Seed: ISIQPTFSV
IAIQPTFSH

SEQ ID NO: 44081 - protein, 9 aa, Artificial Sequence
  Description of Artificial Sequence: Synthetic peptide
  Seed: ISIQPTFSV
IAIQPTFSI

SEQ ID NO: 44082 - protein, 9 aa, Artificial Sequence
  Description of Artificial Sequence: Synthetic peptide
  Seed: ISIQPTFSV
IAIQPTFSL

SEQ ID NO: 44083 - protein, 9 aa, Artificial Sequence
  Description of Artificial Sequence: Synthetic peptide
  Seed: ISIQPTFSV
IAIQPTFSM

SEQ ID NO: 44084 - protein, 9 aa, Artificial Sequence
  Description of Artificial Sequence: Synthetic peptide
  Seed: ISIQPTFSV
IAIQPTFSF

SEQ ID NO: 44085 - protein, 9 aa, Artificial Sequence
  Description of Artificial Sequence: Synthetic peptide
  Seed: ISIQPTFSV
IAIQPTFST

SEQ ID NO: 44086 - protein, 9 aa, Artificial Sequence
  Description of Artificial Sequence: Synthetic peptide
  Seed: ISIQPTFSV
IAIQPTFSW

SEQ ID NO: 44087 - protein, 9 aa, Artificial Sequence
  Description of Artificial Sequence: Synthetic peptide
  Seed: ISIQPTFSV
IAIQPTFSY

SEQ ID NO: 44088 - protein, 9 aa, Artificial Sequence
  Description of Artificial Sequence: Synthetic peptide
  Seed: ISIQPTFSV
IAIQPTFSV

SEQ ID NO: 44089 - protein, 9 aa, Artificial Sequence
  Description of Artificial Sequence: Synthetic peptide
  Seed: ISIQPTFSV
INIQPTFSL

SEQ ID NO: 44090 - protein, 9 aa, Artificial Sequence
  Description of Artificial Sequence: Synthetic peptide
  Seed: ISIQPTFSV
INIQPTFSM

SEQ ID NO: 44091 - protein, 9 aa, Artificial Sequence
  Description of Artificial Sequence: Synthetic peptide
  Seed: ISIQPTFSV
INIQPTFSF

SEQ ID NO: 44092 - protein, 9 aa, Artificial Sequence
  Description of Artificial Sequence: Synthetic peptide
  Seed: ISIQPTFSV
INIQPTFSW

SEQ ID NO: 44093 - protein, 9 aa, Artificial Sequence
  Description of Artificial Sequence: Synthetic peptide
  Seed: ISIQPTFSV
INIQPTFSY

SEQ ID NO: 44094 - protein, 9 aa, Artificial Sequence
  Description of Artificial Sequence: Synthetic peptide
  Seed: ISIQPTFSV
ICIQPTFSL

SEQ ID NO: 44095 - protein, 9 aa, Artificial Sequence
  Description of Artificial Sequence: Synthetic peptide
  Seed: ISIQPTFSV
ICIQPTFSM

SEQ ID NO: 44096 - protein, 9 aa, Artificial Sequence
  Description of Artificial Sequence: Synthetic peptide
  Seed: ISIQPTFSV
ICIQPTFSF

SEQ ID NO: 44097 - protein, 9 aa, Artificial Sequence
  Description of Artificial Sequence: Synthetic peptide
  Seed: ISIQPTFSV
ICIQPTFSW

SEQ ID NO: 44098 - protein, 9 aa, Artificial Sequence
  Description of Artificial Sequence: Synthetic peptide
  Seed: IQMCTELKL
IHMCTELKY

SEQ ID NO: 44099 - protein, 9 aa, Artificial Sequence
  Description of Artificial Sequence: Synthetic peptide
  Seed: IQMCTELKL
IHMCTELKF

SEQ ID NO: 44100 - protein, 9 aa, Artificial Sequence
  Description of Artificial Sequence: Synthetic peptide
  Seed: IQMCTELKL
IHMCTELKM

SEQ ID NO: 44101 - protein, 9 aa, Artificial Sequence
  Description of Artificial Sequence: Synthetic peptide
  Seed: ILRGSVAHK
ISRGSVAHL

SEQ ID NO: 44102 - protein, 9 aa, Artificial Sequence
  Description of Artificial Sequence: Synthetic peptide
  Seed: ILRGSVAHK
IMRGSVAHV

SEQ ID NO: 44103 - protein, 9 aa, Artificial Sequence
  Description of Artificial Sequence: Synthetic peptide
  Seed: ILRGSVAHK
IFRGSVAHA

SEQ ID NO: 44104 - protein, 9 aa, Artificial Sequence
  Description of Artificial Sequence: Synthetic peptide
  Seed: ILRGSVAHK
IFRGSVAHR

SEQ ID NO: 44105 - protein, 9 aa, Artificial Sequence
  Description of Artificial Sequence: Synthetic peptide
  Seed: ILRGSVAHK
IFRGSVAHK

SEQ ID NO: 44106 - protein, 9 aa, Artificial Sequence
  Description of Artificial Sequence: Synthetic peptide
  Seed: ILRGSVAHK
IFRGSVAHV

SEQ ID NO: 44107 - protein, 9 aa, Artificial Sequence
  Description of Artificial Sequence: Synthetic peptide
  Seed: ILRGSVAHK
ISRGSVAHA

SEQ ID NO: 44108 - protein, 9 aa, Artificial Sequence
  Description of Artificial Sequence: Synthetic peptide
  Seed: ILRGSVAHK
ISRGSVAHR

SEQ ID NO: 44109 - protein, 9 aa, Artificial Sequence
  Description of Artificial Sequence: Synthetic peptide
  Seed: ILRGSVAHK
ISRGSVAHG

SEQ ID NO: 44110 - protein, 9 aa, Artificial Sequence
  Description of Artificial Sequence: Synthetic peptide
  Seed: ILRGSVAHK
ISRGSVAHI

SEQ ID NO: 44111 - protein, 9 aa, Artificial Sequence
  Description of Artificial Sequence: Synthetic peptide
  Seed: ILRGSVAHK
ISRGSVAHK

SEQ ID NO: 44112 - protein, 9 aa, Artificial Sequence
  Description of Artificial Sequence: Synthetic peptide
  Seed: ILRGSVAHK
ITRGSVAHH

SEQ ID NO: 44113 - protein, 9 aa, Artificial Sequence
  Description of Artificial Sequence: Synthetic peptide
  Seed: ILRGSVAHK
ISRGSVAHM

SEQ ID NO: 44114 - protein, 9 aa, Artificial Sequence
  Description of Artificial Sequence: Synthetic peptide
  Seed: ILRGSVAHK
ISRGSVAHS

SEQ ID NO: 44115 - protein, 9 aa, Artificial Sequence
  Description of Artificial Sequence: Synthetic peptide
  Seed: ILRGSVAHK
ISRGSVAHT

SEQ ID NO: 44116 - protein, 9 aa, Artificial Sequence
  Description of Artificial Sequence: Synthetic peptide
  Seed: ILRGSVAHK
ISRGSVAHY

SEQ ID NO: 44117 - protein, 9 aa, Artificial Sequence
  Description of Artificial Sequence: Synthetic peptide
  Seed: ILRGSVAHK
ISRGSVAHV

SEQ ID NO: 44118 - protein, 9 aa, Artificial Sequence
  Description of Artificial Sequence: Synthetic peptide
  Seed: ILRGSVAHK
ITRGSVAHA

SEQ ID NO: 44119 - protein, 9 aa, Artificial Sequence
  Description of Artificial Sequence: Synthetic peptide
  Seed: ILRGSVAHK
ITRGSVAHR

SEQ ID NO: 44120 - protein, 9 aa, Artificial Sequence
  Description of Artificial Sequence: Synthetic peptide
  Seed: ILRGSVAHK
ITRGSVAHC

SEQ ID NO: 44121 - protein, 9 aa, Artificial Sequence
  Description of Artificial Sequence: Synthetic peptide
  Seed: ILRGSVAHK
ITRGSVAHQ

SEQ ID NO: 44122 - protein, 9 aa, Artificial Sequence
  Description of Artificial Sequence: Synthetic peptide
  Seed: ILRGSVAHK
IMRGSVAHY

SEQ ID NO: 44123 - protein, 9 aa, Artificial Sequence
  Description of Artificial Sequence: Synthetic peptide
  Seed: ILRGSVAHK
IMRGSVAHS

SEQ ID NO: 44124 - protein, 9 aa, Artificial Sequence
  Description of Artificial Sequence: Synthetic peptide
  Seed: ILRGSVAHK
IMRGSVAHM

SEQ ID NO: 44125 - protein, 9 aa, Artificial Sequence
  Description of Artificial Sequence: Synthetic peptide
  Seed: ILRGSVAHK
IMRGSVAHK

SEQ ID NO: 44126 - protein, 9 aa, Artificial Sequence
  Description of Artificial Sequence: Synthetic peptide
  Seed: ILRGSVAHK
IGRGSVAHK

SEQ ID NO: 44127 - protein, 9 aa, Artificial Sequence
  Description of Artificial Sequence: Synthetic peptide
  Seed: ILRGSVAHK
IGRGSVAHV

SEQ ID NO: 44128 - protein, 9 aa, Artificial Sequence
  Description of Artificial Sequence: Synthetic peptide
  Seed: ILRGSVAHK
IHRGSVAHK

SEQ ID NO: 44129 - protein, 9 aa, Artificial Sequence
  Description of Artificial Sequence: Synthetic peptide
  Seed: ILRGSVAHK
IIRGSVAHA

SEQ ID NO: 44130 - protein, 9 aa, Artificial Sequence
  Description of Artificial Sequence: Synthetic peptide
  Seed: ILRGSVAHK
IIRGSVAHR

SEQ ID NO: 44131 - protein, 9 aa, Artificial Sequence
  Description of Artificial Sequence: Synthetic peptide
  Seed: ILRGSVAHK
IIRGSVAHG

SEQ ID NO: 44132 - protein, 9 aa, Artificial Sequence
  Description of Artificial Sequence: Synthetic peptide
  Seed: ILRGSVAHK
IIRGSVAHI

SEQ ID NO: 44133 - protein, 9 aa, Artificial Sequence
  Description of Artificial Sequence: Synthetic peptide
  Seed: ILRGSVAHK
IIRGSVAHL

SEQ ID NO: 44134 - protein, 9 aa, Artificial Sequence
  Description of Artificial Sequence: Synthetic peptide
  Seed: ILRGSVAHK
IIRGSVAHK

SEQ ID NO: 44135 - protein, 9 aa, Artificial Sequence
  Description of Artificial Sequence: Synthetic peptide
  Seed: ILRGSVAHK
IIRGSVAHM

SEQ ID NO: 44136 - protein, 9 aa, Artificial Sequence
  Description of Artificial Sequence: Synthetic peptide
  Seed: ILRGSVAHK
IIRGSVAHS

SEQ ID NO: 44137 - protein, 9 aa, Artificial Sequence
  Description of Artificial Sequence: Synthetic peptide
  Seed: ILRGSVAHK
IIRGSVAHV

SEQ ID NO: 44138 - protein, 9 aa, Artificial Sequence
  Description of Artificial Sequence: Synthetic peptide
  Seed: ILRGSVAHK
ILRGSVAHA

SEQ ID NO: 44139 - protein, 9 aa, Artificial Sequence
  Description of Artificial Sequence: Synthetic peptide
  Seed: ILRGSVAHK
ILRGSVAHR

SEQ ID NO: 44140 - protein, 9 aa, Artificial Sequence
  Description of Artificial Sequence: Synthetic peptide
  Seed: ILRGSVAHK
IMRGSVAHA

SEQ ID NO: 44141 - protein, 9 aa, Artificial Sequence
  Description of Artificial Sequence: Synthetic peptide
  Seed: ILRGSVAHK
IMRGSVAHR

SEQ ID NO: 44142 - protein, 9 aa, Artificial Sequence
  Description of Artificial Sequence: Synthetic peptide
  Seed: ILRGSVAHK
IMRGSVAHG

SEQ ID NO: 44143 - protein, 9 aa, Artificial Sequence
  Description of Artificial Sequence: Synthetic peptide
  Seed: ILRGSVAHK
IMRGSVAHI

SEQ ID NO: 44144 - protein, 9 aa, Artificial Sequence
  Description of Artificial Sequence: Synthetic peptide
  Seed: ILRGSVAHK
IMRGSVAHL

SEQ ID NO: 44145 - protein, 9 aa, Artificial Sequence
  Description of Artificial Sequence: Synthetic peptide
  Seed: ILRGSVAHK
ITRGSVAHG

SEQ ID NO: 44146 - protein, 9 aa, Artificial Sequence
  Description of Artificial Sequence: Synthetic peptide
  Seed: ILRGSVAHK
ITRGSVAHI

SEQ ID NO: 44147 - protein, 9 aa, Artificial Sequence
  Description of Artificial Sequence: Synthetic peptide
  Seed: ILYDKEEIR
IQYDKEEIV

SEQ ID NO: 44148 - protein, 9 aa, Artificial Sequence
  Description of Artificial Sequence: Synthetic peptide
  Seed: ILYDKEEIR
IAYDKEEIY

SEQ ID NO: 44149 - protein, 9 aa, Artificial Sequence
  Description of Artificial Sequence: Synthetic peptide
  Seed: ILRGSVAHK
IVRGSVAHL

SEQ ID NO: 44150 - protein, 9 aa, Artificial Sequence
  Description of Artificial Sequence: Synthetic peptide
  Seed: ILRGSVAHK
IVRGSVAHK

SEQ ID NO: 44151 - protein, 9 aa, Artificial Sequence
  Description of Artificial Sequence: Synthetic peptide
  Seed: ILRGSVAHK
IVRGSVAHM

SEQ ID NO: 44152 - protein, 9 aa, Artificial Sequence
  Description of Artificial Sequence: Synthetic peptide
  Seed: ILRGSVAHK
IVRGSVAHS

SEQ ID NO: 44153 - protein, 9 aa, Artificial Sequence
  Description of Artificial Sequence: Synthetic peptide
  Seed: ILRGSVAHK
IVRGSVAHT

SEQ ID NO: 44154 - protein, 9 aa, Artificial Sequence
  Description of Artificial Sequence: Synthetic peptide
  Seed: ILRGSVAHK
IVRGSVAHY

SEQ ID NO: 44155 - protein, 9 aa, Artificial Sequence
  Description of Artificial Sequence: Synthetic peptide
  Seed: ILRGSVAHK
IVRGSVAHV

SEQ ID NO: 44156 - protein, 9 aa, Artificial Sequence
  Description of Artificial Sequence: Synthetic peptide
  Seed: ILYDKEEIR
IAYDKEEIM

SEQ ID NO: 44157 - protein, 9 aa, Artificial Sequence
  Description of Artificial Sequence: Synthetic peptide
  Seed: ILYDKEEIR
IAYDKEEIF

SEQ ID NO: 44158 - protein, 9 aa, Artificial Sequence
  Description of Artificial Sequence: Synthetic peptide
  Seed: ILYDKEEIR
IRYDKEEIF

SEQ ID NO: 44159 - protein, 9 aa, Artificial Sequence
  Description of Artificial Sequence: Synthetic peptide
  Seed: ILRGSVAHK
ITRGSVAHL

SEQ ID NO: 44160 - protein, 9 aa, Artificial Sequence
  Description of Artificial Sequence: Synthetic peptide
  Seed: ILYDKEEIR
IRYDKEEIY

SEQ ID NO: 44161 - protein, 9 aa, Artificial Sequence
  Description of Artificial Sequence: Synthetic peptide
  Seed: ILYDKEEIR
INYDKEEIF

SEQ ID NO: 44162 - protein, 9 aa, Artificial Sequence
  Description of Artificial Sequence: Synthetic peptide
  Seed: ILYDKEEIR
INYDKEEIY

SEQ ID NO: 44163 - protein, 9 aa, Artificial Sequence
  Description of Artificial Sequence: Synthetic peptide
  Seed: ILYDKEEIR
IQYDKEEIH

SEQ ID NO: 44164 - protein, 9 aa, Artificial Sequence
  Description of Artificial Sequence: Synthetic peptide
  Seed: ILYDKEEIR
IQYDKEEII

SEQ ID NO: 44165 - protein, 9 aa, Artificial Sequence
  Description of Artificial Sequence: Synthetic peptide
  Seed: ILYDKEEIR
IQYDKEEIL

SEQ ID NO: 44166 - protein, 9 aa, Artificial Sequence
  Description of Artificial Sequence: Synthetic peptide
  Seed: ILYDKEEIR
IQYDKEEIM

SEQ ID NO: 44167 - protein, 9 aa, Artificial Sequence
  Description of Artificial Sequence: Synthetic peptide
  Seed: ILYDKEEIR
IQYDKEEIF

SEQ ID NO: 44168 - protein, 9 aa, Artificial Sequence
  Description of Artificial Sequence: Synthetic peptide
  Seed: ILYDKEEIR
IQYDKEEIW

SEQ ID NO: 44169 - protein, 9 aa, Artificial Sequence
  Description of Artificial Sequence: Synthetic peptide
  Seed: ILRGSVAHK
IVRGSVAHI

SEQ ID NO: 44170 - protein, 9 aa, Artificial Sequence
  Description of Artificial Sequence: Synthetic peptide
  Seed: ILRGSVAHK
IVRGSVAHG

SEQ ID NO: 44171 - protein, 9 aa, Artificial Sequence
  Description of Artificial Sequence: Synthetic peptide
  Seed: ILRGSVAHK
IVRGSVAHR

SEQ ID NO: 44172 - protein, 9 aa, Artificial Sequence
  Description of Artificial Sequence: Synthetic peptide
  Seed: ILRGSVAHK
IVRGSVAHA

SEQ ID NO: 44173 - protein, 9 aa, Artificial Sequence
  Description of Artificial Sequence: Synthetic peptide
  Seed: ILRGSVAHK
ITRGSVAHK

SEQ ID NO: 44174 - protein, 9 aa, Artificial Sequence
  Description of Artificial Sequence: Synthetic peptide
  Seed: ILRGSVAHK
ITRGSVAHM

SEQ ID NO: 44175 - protein, 9 aa, Artificial Sequence
  Description of Artificial Sequence: Synthetic peptide
  Seed: ILRGSVAHK
ITRGSVAHF

SEQ ID NO: 44176 - protein, 9 aa, Artificial Sequence
  Description of Artificial Sequence: Synthetic peptide
  Seed: ILRGSVAHK
ITRGSVAHP

SEQ ID NO: 44177 - protein, 9 aa, Artificial Sequence
  Description of Artificial Sequence: Synthetic peptide
  Seed: ILRGSVAHK
ITRGSVAHS

SEQ ID NO: 44178 - protein, 9 aa, Artificial Sequence
  Description of Artificial Sequence: Synthetic peptide
  Seed: ILRGSVAHK
ITRGSVAHT

SEQ ID NO: 44179 - protein, 9 aa, Artificial Sequence
  Description of Artificial Sequence: Synthetic peptide
  Seed: ILRGSVAHK
ITRGSVAHY

SEQ ID NO: 44180 - protein, 9 aa, Artificial Sequence
  Description of Artificial Sequence: Synthetic peptide
  Seed: ILRGSVAHK
ITRGSVAHV

SEQ ID NO: 44181 - protein, 9 aa, Artificial Sequence
  Description of Artificial Sequence: Synthetic peptide
  Seed: ILRGSVAHK
IWRGSVAHA

SEQ ID NO: 44182 - protein, 9 aa, Artificial Sequence
  Description of Artificial Sequence: Synthetic peptide
  Seed: ILRGSVAHK
IWRGSVAHR

SEQ ID NO: 44183 - protein, 9 aa, Artificial Sequence
  Description of Artificial Sequence: Synthetic peptide
  Seed: ILRGSVAHK
IWRGSVAHI

SEQ ID NO: 44184 - protein, 9 aa, Artificial Sequence
  Description of Artificial Sequence: Synthetic peptide
  Seed: ILRGSVAHK
IWRGSVAHK

SEQ ID NO: 44185 - protein, 9 aa, Artificial Sequence
  Description of Artificial Sequence: Synthetic peptide
  Seed: ILRGSVAHK
IWRGSVAHV

SEQ ID NO: 44186 - protein, 9 aa, Artificial Sequence
  Description of Artificial Sequence: Synthetic peptide
  Seed: ILRGSVAHK
IYRGSVAHA

SEQ ID NO: 44187 - protein, 9 aa, Artificial Sequence
  Description of Artificial Sequence: Synthetic peptide
  Seed: ILRGSVAHK
IYRGSVAHR

SEQ ID NO: 44188 - protein, 9 aa, Artificial Sequence
  Description of Artificial Sequence: Synthetic peptide
  Seed: ILRGSVAHK
IYRGSVAHI

SEQ ID NO: 44189 - protein, 9 aa, Artificial Sequence
  Description of Artificial Sequence: Synthetic peptide
  Seed: ILRGSVAHK
IYRGSVAHK

SEQ ID NO: 44190 - protein, 9 aa, Artificial Sequence
  Description of Artificial Sequence: Synthetic peptide
  Seed: ILRGSVAHK
IYRGSVAHS

SEQ ID NO: 44191 - protein, 9 aa, Artificial Sequence
  Description of Artificial Sequence: Synthetic peptide
  Seed: ILRGSVAHK
IYRGSVAHV

SEQ ID NO: 44192 - protein, 9 aa, Artificial Sequence
  Description of Artificial Sequence: Synthetic peptide
  Seed: ILRGSVAHK
IGRGSVAHR

SEQ ID NO: 44193 - protein, 9 aa, Artificial Sequence
  Description of Artificial Sequence: Synthetic peptide
  Seed: ILRGSVAHK
IGRGSVAHA

SEQ ID NO: 44194 - protein, 9 aa, Artificial Sequence
  Description of Artificial Sequence: Synthetic peptide
  Seed: ILRGSVAHK
IQRGSVAHV

SEQ ID NO: 44195 - protein, 9 aa, Artificial Sequence
  Description of Artificial Sequence: Synthetic peptide
  Seed: ILKGKFQTA
IVKGKFQTA

SEQ ID NO: 44196 - protein, 9 aa, Artificial Sequence
  Description of Artificial Sequence: Synthetic peptide
  Seed: ILKGKFQTA
ISKGKFQTI

SEQ ID NO: 44197 - protein, 9 aa, Artificial Sequence
  Description of Artificial Sequence: Synthetic peptide
  Seed: ILKGKFQTA
ISKGKFQTL

SEQ ID NO: 44198 - protein, 9 aa, Artificial Sequence
  Description of Artificial Sequence: Synthetic peptide
  Seed: ILKGKFQTA
ISKGKFQTM

SEQ ID NO: 44199 - protein, 9 aa, Artificial Sequence
  Description of Artificial Sequence: Synthetic peptide
  Seed: ILKGKFQTA
ISKGKFQTV

SEQ ID NO: 44200 - protein, 9 aa, Artificial Sequence
  Description of Artificial Sequence: Synthetic peptide
  Seed: ILKGKFQTA
ITKGKFQTI

SEQ ID NO: 44201 - protein, 9 aa, Artificial Sequence
  Description of Artificial Sequence: Synthetic peptide
  Seed: ILKGKFQTA
ITKGKFQTL

SEQ ID NO: 44202 - protein, 9 aa, Artificial Sequence
  Description of Artificial Sequence: Synthetic peptide
  Seed: ILKGKFQTA
ITKGKFQTM

SEQ ID NO: 44203 - protein, 9 aa, Artificial Sequence
  Description of Artificial Sequence: Synthetic peptide
  Seed: ILKGKFQTA
ITKGKFQTV

SEQ ID NO: 44204 - protein, 9 aa, Artificial Sequence
  Description of Artificial Sequence: Synthetic peptide
  Seed: ILKGKFQTA
IWKGKFQTL

SEQ ID NO: 44205 - protein, 9 aa, Artificial Sequence
  Description of Artificial Sequence: Synthetic peptide
  Seed: ILKGKFQTA
IVKGKFQTI

SEQ ID NO: 44206 - protein, 9 aa, Artificial Sequence
  Description of Artificial Sequence: Synthetic peptide
  Seed: ILRGSVAHK
IQRGSVAHK

SEQ ID NO: 44207 - protein, 9 aa, Artificial Sequence
  Description of Artificial Sequence: Synthetic peptide
  Seed: ILKGKFQTA
IVKGKFQTL

SEQ ID NO: 44208 - protein, 9 aa, Artificial Sequence
  Description of Artificial Sequence: Synthetic peptide
  Seed: ILKGKFQTA
IVKGKFQTM

SEQ ID NO: 44209 - protein, 9 aa, Artificial Sequence
  Description of Artificial Sequence: Synthetic peptide
  Seed: ILKGKFQTA
IVKGKFQTF

SEQ ID NO: 44210 - protein, 9 aa, Artificial Sequence
  Description of Artificial Sequence: Synthetic peptide
  Seed: ILKGKFQTA
IVKGKFQTV

SEQ ID NO: 44211 - protein, 10 aa, Artificial Sequence
  Description of Artificial Sequence: Synthetic peptide
  Seed: ILKGKFQTAA
IAKGKFQTAI

SEQ ID NO: 44212 - protein, 10 aa, Artificial Sequence
  Description of Artificial Sequence: Synthetic peptide
  Seed: ILKGKFQTAA
IAKGKFQTAL

SEQ ID NO: 44213 - protein, 10 aa, Artificial Sequence
  Description of Artificial Sequence: Synthetic peptide
  Seed: ILKGKFQTAA
IAKGKFQTAM

SEQ ID NO: 44214 - protein, 10 aa, Artificial Sequence
  Description of Artificial Sequence: Synthetic peptide
  Seed: ILKGKFQTAA
IAKGKFQTAV

SEQ ID NO: 44215 - protein, 10 aa, Artificial Sequence
  Description of Artificial Sequence: Synthetic peptide
  Seed: ILKGKFQTAA
INKGKFQTAL

SEQ ID NO: 44216 - protein, 9 aa, Artificial Sequence
  Description of Artificial Sequence: Synthetic peptide
  Seed: ILKGKFQTA
IPKGKFQTV

SEQ ID NO: 44217 - protein, 9 aa, Artificial Sequence
  Description of Artificial Sequence: Synthetic peptide
  Seed: ILKGKFQTA
IPKGKFQTT

SEQ ID NO: 44218 - protein, 9 aa, Artificial Sequence
  Description of Artificial Sequence: Synthetic peptide
  Seed: ILKGKFQTA
IPKGKFQTF

SEQ ID NO: 44219 - protein, 9 aa, Artificial Sequence
  Description of Artificial Sequence: Synthetic peptide
  Seed: ILKGKFQTA
IPKGKFQTM

SEQ ID NO: 44220 - protein, 9 aa, Artificial Sequence
  Description of Artificial Sequence: Synthetic peptide
  Seed: ILKGKFQTA
IKKGKFQTL

SEQ ID NO: 44221 - protein, 9 aa, Artificial Sequence
  Description of Artificial Sequence: Synthetic peptide
  Seed: ILKGKFQTA
IKKGKFQTM

SEQ ID NO: 44222 - protein, 9 aa, Artificial Sequence
  Description of Artificial Sequence: Synthetic peptide
  Seed: ILKGKFQTA
IMKGKFQTC

SEQ ID NO: 44223 - protein, 9 aa, Artificial Sequence
  Description of Artificial Sequence: Synthetic peptide
  Seed: ILKGKFQTA
IMKGKFQTG

SEQ ID NO: 44224 - protein, 9 aa, Artificial Sequence
  Description of Artificial Sequence: Synthetic peptide
  Seed: ILKGKFQTA
IMKGKFQTL

SEQ ID NO: 44225 - protein, 9 aa, Artificial Sequence
  Description of Artificial Sequence: Synthetic peptide
  Seed: ILKGKFQTA
IMKGKFQTM

SEQ ID NO: 44226 - protein, 9 aa, Artificial Sequence
  Description of Artificial Sequence: Synthetic peptide
  Seed: ILKGKFQTA
IMKGKFQTF

SEQ ID NO: 44227 - protein, 9 aa, Artificial Sequence
  Description of Artificial Sequence: Synthetic peptide
  Seed: ILKGKFQTA
IMKGKFQTT

SEQ ID NO: 44228 - protein, 9 aa, Artificial Sequence
  Description of Artificial Sequence: Synthetic peptide
  Seed: ILKGKFQTA
IFKGKFQTI

SEQ ID NO: 44229 - protein, 9 aa, Artificial Sequence
  Description of Artificial Sequence: Synthetic peptide
  Seed: ILKGKFQTA
IFKGKFQTL

SEQ ID NO: 44230 - protein, 9 aa, Artificial Sequence
  Description of Artificial Sequence: Synthetic peptide
  Seed: ILKGKFQTA
IFKGKFQTM

SEQ ID NO: 44231 - protein, 9 aa, Artificial Sequence
  Description of Artificial Sequence: Synthetic peptide
  Seed: ILKGKFQTA
IFKGKFQTV

SEQ ID NO: 44232 - protein, 9 aa, Artificial Sequence
  Description of Artificial Sequence: Synthetic peptide
  Seed: ILKGKFQTA
IPKGKFQTA

SEQ ID NO: 44233 - protein, 9 aa, Artificial Sequence
  Description of Artificial Sequence: Synthetic peptide
  Seed: ILKGKFQTA
IPKGKFQTC

SEQ ID NO: 44234 - protein, 9 aa, Artificial Sequence
  Description of Artificial Sequence: Synthetic peptide
  Seed: ILKGKFQTA
IPKGKFQTI

SEQ ID NO: 44235 - protein, 9 aa, Artificial Sequence
  Description of Artificial Sequence: Synthetic peptide
  Seed: ILKGKFQTA
IPKGKFQTL

SEQ ID NO: 44236 - protein, 10 aa, Artificial Sequence
  Description of Artificial Sequence: Synthetic peptide
  Seed: ILKGKFQTAA
IQKGKFQTAL

SEQ ID NO: 44237 - protein, 10 aa, Artificial Sequence
  Description of Artificial Sequence: Synthetic peptide
  Seed: ILKGKFQTAA
IQKGKFQTAM

SEQ ID NO: 44238 - protein, 10 aa, Artificial Sequence
  Description of Artificial Sequence: Synthetic peptide
  Seed: ILKGKFQTAA
IQKGKFQTAV

SEQ ID NO: 44239 - protein, 10 aa, Artificial Sequence
  Description of Artificial Sequence: Synthetic peptide
  Seed: ILKGKFQTAA
IPKGKFQTAM

SEQ ID NO: 44240 - protein, 10 aa, Artificial Sequence
  Description of Artificial Sequence: Synthetic peptide
  Seed: ILKGKFQTAA
IPKGKFQTAV

SEQ ID NO: 44241 - protein, 10 aa, Artificial Sequence
  Description of Artificial Sequence: Synthetic peptide
  Seed: ILKGKFQTAA
ISKGKFQTAL

SEQ ID NO: 44242 - protein, 10 aa, Artificial Sequence
  Description of Artificial Sequence: Synthetic peptide
  Seed: ILKGKFQTAA
ITKGKFQTAL

SEQ ID NO: 44243 - protein, 10 aa, Artificial Sequence
  Description of Artificial Sequence: Synthetic peptide
  Seed: ILKGKFQTAA
IVKGKFQTAI

SEQ ID NO: 44244 - protein, 10 aa, Artificial Sequence
  Description of Artificial Sequence: Synthetic peptide
  Seed: ILKGKFQTAA
IVKGKFQTAL

SEQ ID NO: 44245 - protein, 10 aa, Artificial Sequence
  Description of Artificial Sequence: Synthetic peptide
  Seed: ILKGKFQTAA
IVKGKFQTAM

SEQ ID NO: 44246 - protein, 10 aa, Artificial Sequence
  Description of Artificial Sequence: Synthetic peptide
  Seed: ILKGKFQTAA
IVKGKFQTAV

SEQ ID NO: 44247 - protein, 9 aa, Artificial Sequence
  Description of Artificial Sequence: Synthetic peptide
  Seed: ILRGSVAHK
IARGSVAHA

SEQ ID NO: 44248 - protein, 9 aa, Artificial Sequence
  Description of Artificial Sequence: Synthetic peptide
  Seed: ILRGSVAHK
IARGSVAHR

SEQ ID NO: 44249 - protein, 9 aa, Artificial Sequence
  Description of Artificial Sequence: Synthetic peptide
  Seed: ILRGSVAHK
IARGSVAHI

SEQ ID NO: 44250 - protein, 9 aa, Artificial Sequence
  Description of Artificial Sequence: Synthetic peptide
  Seed: ILRGSVAHK
IARGSVAHK

SEQ ID NO: 44251 - protein, 9 aa, Artificial Sequence
  Description of Artificial Sequence: Synthetic peptide
  Seed: ILRGSVAHK
IARGSVAHV

SEQ ID NO: 44252 - protein, 9 aa, Artificial Sequence
  Description of Artificial Sequence: Synthetic peptide
  Seed: ILRGSVAHK
INRGSVAHR

SEQ ID NO: 44253 - protein, 9 aa, Artificial Sequence
  Description of Artificial Sequence: Synthetic peptide
  Seed: ILRGSVAHK
INRGSVAHK

SEQ ID NO: 44254 - protein, 9 aa, Artificial Sequence
  Description of Artificial Sequence: Synthetic peptide
  Seed: ILRGSVAHK
ICRGSVAHR

SEQ ID NO: 44255 - protein, 9 aa, Artificial Sequence
  Description of Artificial Sequence: Synthetic peptide
  Seed: ILRGSVAHK
ICRGSVAHK

SEQ ID NO: 44256 - protein, 9 aa, Artificial Sequence
  Description of Artificial Sequence: Synthetic peptide
  Seed: ILRGSVAHK
IQRGSVAHA

SEQ ID NO: 44257 - protein, 9 aa, Artificial Sequence
  Description of Artificial Sequence: Synthetic peptide
  Seed: ILRGSVAHK
IQRGSVAHR

SEQ ID NO: 44258 - protein, 9 aa, Artificial Sequence
  Description of Artificial Sequence: Synthetic peptide
  Seed: ILRGSVAHK
IQRGSVAHI

SEQ ID NO: 44259 - protein, 10 aa, Artificial Sequence
  Description of Artificial Sequence: Synthetic peptide
  Seed: ILKGKFQTAA
IPKGKFQTAF

SEQ ID NO: 44260 - protein, 10 aa, Artificial Sequence
  Description of Artificial Sequence: Synthetic peptide
  Seed: ILKGKFQTAA
IPKGKFQTAL

SEQ ID NO: 44261 - protein, 10 aa, Artificial Sequence
  Description of Artificial Sequence: Synthetic peptide
  Seed: ILKGKFQTAA
IGKGKFQTAL

SEQ ID NO: 44262 - protein, 10 aa, Artificial Sequence
  Description of Artificial Sequence: Synthetic peptide
  Seed: ILKGKFQTAA
IPKGKFQTAI

SEQ ID NO: 44263 - protein, 10 aa, Artificial Sequence
  Description of Artificial Sequence: Synthetic peptide
  Seed: ILKGKFQTAA
IIKGKFQTAI

SEQ ID NO: 44264 - protein, 10 aa, Artificial Sequence
  Description of Artificial Sequence: Synthetic peptide
  Seed: ILKGKFQTAA
IIKGKFQTAL

SEQ ID NO: 44265 - protein, 10 aa, Artificial Sequence
  Description of Artificial Sequence: Synthetic peptide
  Seed: ILKGKFQTAA
IIKGKFQTAM

SEQ ID NO: 44266 - protein, 10 aa, Artificial Sequence
  Description of Artificial Sequence: Synthetic peptide
  Seed: ILKGKFQTAA
IIKGKFQTAF

SEQ ID NO: 44267 - protein, 10 aa, Artificial Sequence
  Description of Artificial Sequence: Synthetic peptide
  Seed: ILKGKFQTAA
IIKGKFQTAV

SEQ ID NO: 44268 - protein, 10 aa, Artificial Sequence
  Description of Artificial Sequence: Synthetic peptide
  Seed: ILKGKFQTAA
ILKGKFQTAI

SEQ ID NO: 44269 - protein, 10 aa, Artificial Sequence
  Description of Artificial Sequence: Synthetic peptide
  Seed: ILKGKFQTAA
ILKGKFQTAL

SEQ ID NO: 44270 - protein, 10 aa, Artificial Sequence
  Description of Artificial Sequence: Synthetic peptide
  Seed: ILKGKFQTAA
ILKGKFQTAM

SEQ ID NO: 44271 - protein, 10 aa, Artificial Sequence
  Description of Artificial Sequence: Synthetic peptide
  Seed: ILKGKFQTAA
ILKGKFQTAF

SEQ ID NO: 44272 - protein, 10 aa, Artificial Sequence
  Description of Artificial Sequence: Synthetic peptide
  Seed: ILKGKFQTAA
ILKGKFQTAT

SEQ ID NO: 44273 - protein, 10 aa, Artificial Sequence
  Description of Artificial Sequence: Synthetic peptide
  Seed: ILKGKFQTAA
ILKGKFQTAV

SEQ ID NO: 44274 - protein, 10 aa, Artificial Sequence
  Description of Artificial Sequence: Synthetic peptide
  Seed: ILKGKFQTAA
IMKGKFQTAA

SEQ ID NO: 44275 - protein, 10 aa, Artificial Sequence
  Description of Artificial Sequence: Synthetic peptide
  Seed: ILKGKFQTAA
IMKGKFQTAI

SEQ ID NO: 44276 - protein, 10 aa, Artificial Sequence
  Description of Artificial Sequence: Synthetic peptide
  Seed: ILKGKFQTAA
IMKGKFQTAL

SEQ ID NO: 44277 - protein, 10 aa, Artificial Sequence
  Description of Artificial Sequence: Synthetic peptide
  Seed: ILKGKFQTAA
IMKGKFQTAM

SEQ ID NO: 44278 - protein, 10 aa, Artificial Sequence
  Description of Artificial Sequence: Synthetic peptide
  Seed: ILKGKFQTAA
IMKGKFQTAF

SEQ ID NO: 44279 - protein, 10 aa, Artificial Sequence
  Description of Artificial Sequence: Synthetic peptide
  Seed: ILKGKFQTAA
IMKGKFQTAV

SEQ ID NO: 44280 - protein, 10 aa, Artificial Sequence
  Description of Artificial Sequence: Synthetic peptide
  Seed: ILKGKFQTAA
IFKGKFQTAL

SEQ ID NO: 44281 - protein, 10 aa, Artificial Sequence
  Description of Artificial Sequence: Synthetic peptide
  Seed: ILKGKFQTAA
IPKGKFQTAA

SEQ ID NO: 44282 - protein, 9 aa, Artificial Sequence
  Description of Artificial Sequence: Synthetic peptide
  Seed: ILYDKEEIR
IQYDKEEIY

SEQ ID NO: 44283 - protein, 9 aa, Artificial Sequence
  Description of Artificial Sequence: Synthetic peptide
  Seed: ILYDKEEIR
IEYDKEEIM

SEQ ID NO: 44284 - protein, 9 aa, Artificial Sequence
  Description of Artificial Sequence: Synthetic peptide
  Seed: IQMCTELKL
IHMCTELKL

SEQ ID NO: 44285 - protein, 9 aa, Artificial Sequence
  Description of Artificial Sequence: Synthetic peptide
  Seed: IMAAFTGNT
ILAAFTGNM

SEQ ID NO: 44286 - protein, 9 aa, Artificial Sequence
  Description of Artificial Sequence: Synthetic peptide
  Seed: IMAAFTGNT
IIAAFTGNI

SEQ ID NO: 44287 - protein, 9 aa, Artificial Sequence
  Description of Artificial Sequence: Synthetic peptide
  Seed: IMAAFTGNT
IIAAFTGNL

SEQ ID NO: 44288 - protein, 9 aa, Artificial Sequence
  Description of Artificial Sequence: Synthetic peptide
  Seed: IMAAFTGNT
IIAAFTGNM

SEQ ID NO: 44289 - protein, 9 aa, Artificial Sequence
  Description of Artificial Sequence: Synthetic peptide
  Seed: IMAAFTGNT
IIAAFTGNV

SEQ ID NO: 44290 - protein, 9 aa, Artificial Sequence
  Description of Artificial Sequence: Synthetic peptide
  Seed: IMAAFTGNT
ILAAFTGNA

SEQ ID NO: 44291 - protein, 9 aa, Artificial Sequence
  Description of Artificial Sequence: Synthetic peptide
  Seed: IMAAFTGNT
ILAAFTGNC

SEQ ID NO: 44292 - protein, 9 aa, Artificial Sequence
  Description of Artificial Sequence: Synthetic peptide
  Seed: IMAAFTGNT
ILAAFTGNG

SEQ ID NO: 44293 - protein, 9 aa, Artificial Sequence
  Description of Artificial Sequence: Synthetic peptide
  Seed: IMAAFTGNT
ILAAFTGNI

SEQ ID NO: 44294 - protein, 9 aa, Artificial Sequence
  Description of Artificial Sequence: Synthetic peptide
  Seed: IMAAFTGNT
ILAAFTGNL

SEQ ID NO: 44295 - protein, 9 aa, Artificial Sequence
  Description of Artificial Sequence: Synthetic peptide
  Seed: IMAAFTGNT
ILAAFTGNF

SEQ ID NO: 44296 - protein, 9 aa, Artificial Sequence
  Description of Artificial Sequence: Synthetic peptide
  Seed: IMAAFTGNT
ILAAFTGNP

SEQ ID NO: 44297 - protein, 9 aa, Artificial Sequence
  Description of Artificial Sequence: Synthetic peptide
  Seed: IMAAFTGNT
ILAAFTGNS

SEQ ID NO: 44298 - protein, 9 aa, Artificial Sequence
  Description of Artificial Sequence: Synthetic peptide
  Seed: IMAAFTGNT
ILAAFTGNT

SEQ ID NO: 44299 - protein, 9 aa, Artificial Sequence
  Description of Artificial Sequence: Synthetic peptide
  Seed: IMAAFTGNT
ILAAFTGNV

SEQ ID NO: 44300 - protein, 9 aa, Artificial Sequence
  Description of Artificial Sequence: Synthetic peptide
  Seed: IMAAFTGNT
IMAAFTGNC

SEQ ID NO: 44301 - protein, 9 aa, Artificial Sequence
  Description of Artificial Sequence: Synthetic peptide
  Seed: IMAAFTGNT
IMAAFTGNI

SEQ ID NO: 44302 - protein, 9 aa, Artificial Sequence
  Description of Artificial Sequence: Synthetic peptide
  Seed: IMAAFTGNT
IMAAFTGNL

SEQ ID NO: 44303 - protein, 9 aa, Artificial Sequence
  Description of Artificial Sequence: Synthetic peptide
  Seed: IMAAFTGNT
IMAAFTGNM

SEQ ID NO: 44304 - protein, 9 aa, Artificial Sequence
  Description of Artificial Sequence: Synthetic peptide
  Seed: IMAAFTGNT
IIAAFTGNA

SEQ ID NO: 44305 - protein, 9 aa, Artificial Sequence
  Description of Artificial Sequence: Synthetic peptide
  Seed: IMAAFTGNT
IQAAFTGNV

SEQ ID NO: 44306 - protein, 9 aa, Artificial Sequence
  Description of Artificial Sequence: Synthetic peptide
  Seed: IMAAFTGNT
IQAAFTGNM

SEQ ID NO: 44307 - protein, 9 aa, Artificial Sequence
  Description of Artificial Sequence: Synthetic peptide
  Seed: IMAAFTGNT
IQAAFTGNL

SEQ ID NO: 44308 - protein, 9 aa, Artificial Sequence
  Description of Artificial Sequence: Synthetic peptide
  Seed: IMAAFTGNA
IMAAFTGNF

SEQ ID NO: 44309 - protein, 9 aa, Artificial Sequence
  Description of Artificial Sequence: Synthetic peptide
  Seed: IMAAFTGNA
IMAAFTGNS

SEQ ID NO: 44310 - protein, 9 aa, Artificial Sequence
  Description of Artificial Sequence: Synthetic peptide
  Seed: IMAAFTGNA
IMAAFTGNV

SEQ ID NO: 44311 - protein, 9 aa, Artificial Sequence
  Description of Artificial Sequence: Synthetic peptide
  Seed: IMAAFTGNA
ISAAFTGNV

SEQ ID NO: 44312 - protein, 9 aa, Artificial Sequence
  Description of Artificial Sequence: Synthetic peptide
  Seed: IMAAFTGNA
ITAAFTGNA

SEQ ID NO: 44313 - protein, 9 aa, Artificial Sequence
  Description of Artificial Sequence: Synthetic peptide
  Seed: IMAAFTGNA
ITAAFTGNI

SEQ ID NO: 44314 - protein, 9 aa, Artificial Sequence
  Description of Artificial Sequence: Synthetic peptide
  Seed: IMAAFTGNA
ITAAFTGNL

SEQ ID NO: 44315 - protein, 9 aa, Artificial Sequence
  Description of Artificial Sequence: Synthetic peptide
  Seed: IMAAFTGNA
ITAAFTGNV

SEQ ID NO: 44316 - protein, 9 aa, Artificial Sequence
  Description of Artificial Sequence: Synthetic peptide
  Seed: IMAAFTGNA
IVAAFTGNA

SEQ ID NO: 44317 - protein, 9 aa, Artificial Sequence
  Description of Artificial Sequence: Synthetic peptide
  Seed: IMAAFTGNA
IVAAFTGNI

SEQ ID NO: 44318 - protein, 9 aa, Artificial Sequence
  Description of Artificial Sequence: Synthetic peptide
  Seed: IMAAFTGNA
IVAAFTGNL

SEQ ID NO: 44319 - protein, 9 aa, Artificial Sequence
  Description of Artificial Sequence: Synthetic peptide
  Seed: IMAAFTGNA
IVAAFTGNM

SEQ ID NO: 44320 - protein, 9 aa, Artificial Sequence
  Description of Artificial Sequence: Synthetic peptide
  Seed: IMAAFTGNA
IVAAFTGNV

SEQ ID NO: 44321 - protein, 9 aa, Artificial Sequence
  Description of Artificial Sequence: Synthetic peptide
  Seed: IMAAFTGNT
IAAAFTGNI

SEQ ID NO: 44322 - protein, 9 aa, Artificial Sequence
  Description of Artificial Sequence: Synthetic peptide
  Seed: IMAAFTGNT
IAAAFTGNV

SEQ ID NO: 44323 - protein, 9 aa, Artificial Sequence
  Description of Artificial Sequence: Synthetic peptide
  Seed: IMAAFTGNT
IQAAFTGNA

SEQ ID NO: 44324 - protein, 9 aa, Artificial Sequence
  Description of Artificial Sequence: Synthetic peptide
  Seed: IMAAFTGNT
IQAAFTGNI

SEQ ID NO: 44325 - protein, 9 aa, Artificial Sequence
  Description of Artificial Sequence: Synthetic peptide
  Seed: ILYDKEEIR
IEYDKEEIF

SEQ ID NO: 44326 - protein, 9 aa, Artificial Sequence
  Description of Artificial Sequence: Synthetic peptide
  Seed: IQMCTELKL
IQMCTELKY

SEQ ID NO: 44327 - protein, 9 aa, Artificial Sequence
  Description of Artificial Sequence: Synthetic peptide
  Seed: IQMCTELKL
INMCTELKF

SEQ ID NO: 44328 - protein, 9 aa, Artificial Sequence
  Description of Artificial Sequence: Synthetic peptide
  Seed: IQMCTELKL
INMCTELKY

SEQ ID NO: 44329 - protein, 9 aa, Artificial Sequence
  Description of Artificial Sequence: Synthetic peptide
  Seed: IQMCTELKL
ICMCTELKF

SEQ ID NO: 44330 - protein, 9 aa, Artificial Sequence
  Description of Artificial Sequence: Synthetic peptide
  Seed: IQMCTELKL
IQMCTELKA

SEQ ID NO: 44331 - protein, 9 aa, Artificial Sequence
  Description of Artificial Sequence: Synthetic peptide
  Seed: IQMCTELKL
IQMCTELKH

SEQ ID NO: 44332 - protein, 9 aa, Artificial Sequence
  Description of Artificial Sequence: Synthetic peptide
  Seed: IQMCTELKL
IQMCTELKI

SEQ ID NO: 44333 - protein, 9 aa, Artificial Sequence
  Description of Artificial Sequence: Synthetic peptide
  Seed: IQMCTELKL
IQMCTELKM

SEQ ID NO: 44334 - protein, 9 aa, Artificial Sequence
  Description of Artificial Sequence: Synthetic peptide
  Seed: IQMCTELKL
IQMCTELKF

SEQ ID NO: 44335 - protein, 9 aa, Artificial Sequence
  Description of Artificial Sequence: Synthetic peptide
  Seed: IQMCTELKL
IQMCTELKW

SEQ ID NO: 44336 - protein, 9 aa, Artificial Sequence
  Description of Artificial Sequence: Synthetic peptide
  Seed: IQMCTELKL
IQMCTELKV

SEQ ID NO: 44337 - protein, 9 aa, Artificial Sequence
  Description of Artificial Sequence: Synthetic peptide
  Seed: IQMCTELKL
IEMCTELKI

SEQ ID NO: 44338 - protein, 9 aa, Artificial Sequence
  Description of Artificial Sequence: Synthetic peptide
  Seed: IQMCTELKL
IEMCTELKL

SEQ ID NO: 44339 - protein, 9 aa, Artificial Sequence
  Description of Artificial Sequence: Synthetic peptide
  Seed: IQMCTELKL
IEMCTELKM

SEQ ID NO: 44340 - protein, 9 aa, Artificial Sequence
  Description of Artificial Sequence: Synthetic peptide
  Seed: IQMCTELKL
IEMCTELKF

SEQ ID NO: 44341 - protein, 9 aa, Artificial Sequence
  Description of Artificial Sequence: Synthetic peptide
  Seed: IQMCTELKL
IEMCTELKW

SEQ ID NO: 44342 - protein, 9 aa, Artificial Sequence
  Description of Artificial Sequence: Synthetic peptide
  Seed: IQMCTELKL
IEMCTELKY

SEQ ID NO: 44343 - protein, 9 aa, Artificial Sequence
  Description of Artificial Sequence: Synthetic peptide
  Seed: IQMCTELKL
IGMCTELKF

SEQ ID NO: 44344 - protein, 9 aa, Artificial Sequence
  Description of Artificial Sequence: Synthetic peptide
  Seed: IQMCTELKL
IGMCTELKY

SEQ ID NO: 44345 - protein, 9 aa, Artificial Sequence
  Description of Artificial Sequence: Synthetic peptide
  Seed: IQMCTELKL
IHMCTELKI

SEQ ID NO: 44346 - protein, 9 aa, Artificial Sequence
  Description of Artificial Sequence: Synthetic peptide
  Seed: IQMCTELKL
INMCTELKM

SEQ ID NO: 44347 - protein, 9 aa, Artificial Sequence
  Description of Artificial Sequence: Synthetic peptide
  Seed: IQMCTELKL
IRMCTELKV

SEQ ID NO: 44348 - protein, 9 aa, Artificial Sequence
  Description of Artificial Sequence: Synthetic peptide
  Seed: IQMCTELKL
IRMCTELKY

SEQ ID NO: 44349 - protein, 9 aa, Artificial Sequence
  Description of Artificial Sequence: Synthetic peptide
  Seed: IQMCTELKL
IRMCTELKF

SEQ ID NO: 44350 - protein, 9 aa, Artificial Sequence
  Description of Artificial Sequence: Synthetic peptide
  Seed: IQMCTELKL
IAMCTELKL

SEQ ID NO: 44351 - protein, 9 aa, Artificial Sequence
  Description of Artificial Sequence: Synthetic peptide
  Seed: IQMCTELKL
IAMCTELKM

SEQ ID NO: 44352 - protein, 9 aa, Artificial Sequence
  Description of Artificial Sequence: Synthetic peptide
  Seed: IQMCTELKL
IAMCTELKF

SEQ ID NO: 44353 - protein, 9 aa, Artificial Sequence
  Description of Artificial Sequence: Synthetic peptide
  Seed: IQMCTELKL
IAMCTELKY

SEQ ID NO: 44354 - protein, 9 aa, Artificial Sequence
  Description of Artificial Sequence: Synthetic peptide
  Seed: IQMCTELKL
IAMCTELKV

SEQ ID NO: 44355 - protein, 9 aa, Artificial Sequence
  Description of Artificial Sequence: Synthetic peptide
  Seed: IQMCTELKL
IRMCTELKA

SEQ ID NO: 44356 - protein, 9 aa, Artificial Sequence
  Description of Artificial Sequence: Synthetic peptide
  Seed: IQMCTELKL
IRMCTELKI

SEQ ID NO: 44357 - protein, 9 aa, Artificial Sequence
  Description of Artificial Sequence: Synthetic peptide
  Seed: IQMCTELKL
IRMCTELKL

SEQ ID NO: 44358 - protein, 9 aa, Artificial Sequence
  Description of Artificial Sequence: Synthetic peptide
  Seed: IQMCTELKL
IRMCTELKM

SEQ ID NO: 44359 - protein, 9 aa, Artificial Sequence
  Description of Artificial Sequence: Synthetic peptide
  Seed: ILYDKEEIR
IMYDKEEIY

SEQ ID NO: 44360 - protein, 9 aa, Artificial Sequence
  Description of Artificial Sequence: Synthetic peptide
  Seed: ILYDKEEIR
IMYDKEEIA

SEQ ID NO: 44361 - protein, 9 aa, Artificial Sequence
  Description of Artificial Sequence: Synthetic peptide
  Seed: ILYDKEEIR
IMYDKEEIC

SEQ ID NO: 44362 - protein, 9 aa, Artificial Sequence
  Description of Artificial Sequence: Synthetic peptide
  Seed: ILYDKEEIR
IMYDKEEIH

SEQ ID NO: 44363 - protein, 9 aa, Artificial Sequence
  Description of Artificial Sequence: Synthetic peptide
  Seed: ILYDKEEIR
IMYDKEEII

SEQ ID NO: 44364 - protein, 9 aa, Artificial Sequence
  Description of Artificial Sequence: Synthetic peptide
  Seed: ILYDKEEIR
IMYDKEEIL

SEQ ID NO: 44365 - protein, 9 aa, Artificial Sequence
  Description of Artificial Sequence: Synthetic peptide
  Seed: ILYDKEEIR
IMYDKEEIM

SEQ ID NO: 44366 - protein, 9 aa, Artificial Sequence
  Description of Artificial Sequence: Synthetic peptide
  Seed: ILYDKEEIR
IMYDKEEIF

SEQ ID NO: 44367 - protein, 9 aa, Artificial Sequence
  Description of Artificial Sequence: Synthetic peptide
  Seed: ILYDKEEIR
IMYDKEEIT

SEQ ID NO: 44368 - protein, 9 aa, Artificial Sequence
  Description of Artificial Sequence: Synthetic peptide
  Seed: ILYDKEEIR
IMYDKEEIW

SEQ ID NO: 44369 - protein, 9 aa, Artificial Sequence
  Description of Artificial Sequence: Synthetic peptide
  Seed: ILYDKEEIR
IMYDKEEIV

SEQ ID NO: 44370 - protein, 9 aa, Artificial Sequence
  Description of Artificial Sequence: Synthetic peptide
  Seed: ILYDKEEIR
IFYDKEEIF

SEQ ID NO: 44371 - protein, 9 aa, Artificial Sequence
  Description of Artificial Sequence: Synthetic peptide
  Seed: ILYDKEEIR
IFYDKEEIY

SEQ ID NO: 44372 - protein, 9 aa, Artificial Sequence
  Description of Artificial Sequence: Synthetic peptide
  Seed: ILYDKEEIR
ISYDKEEIM

SEQ ID NO: 44373 - protein, 9 aa, Artificial Sequence
  Description of Artificial Sequence: Synthetic peptide
  Seed: ILYDKEEIR
ISYDKEEIF

SEQ ID NO: 44374 - protein, 9 aa, Artificial Sequence
  Description of Artificial Sequence: Synthetic peptide
  Seed: ILYDKEEIR
ISYDKEEIY

SEQ ID NO: 44375 - protein, 9 aa, Artificial Sequence
  Description of Artificial Sequence: Synthetic peptide
  Seed: ILYDKEEIR
ITYDKEEIF

SEQ ID NO: 44376 - protein, 9 aa, Artificial Sequence
  Description of Artificial Sequence: Synthetic peptide
  Seed: ILYDKEEIR
ITYDKEEIY

SEQ ID NO: 44377 - protein, 9 aa, Artificial Sequence
  Description of Artificial Sequence: Synthetic peptide
  Seed: ILYDKEEIR
ITYDKEEIV

SEQ ID NO: 44378 - protein, 9 aa, Artificial Sequence
  Description of Artificial Sequence: Synthetic peptide
  Seed: ILYDKEEIR
IVYDKEEIL

SEQ ID NO: 44379 - protein, 9 aa, Artificial Sequence
  Description of Artificial Sequence: Synthetic peptide
  Seed: ILYDKEEIR
IKYDKEEIY

SEQ ID NO: 44380 - protein, 9 aa, Artificial Sequence
  Description of Artificial Sequence: Synthetic peptide
  Seed: ILYDKEEIR
IKYDKEEIF

SEQ ID NO: 44381 - protein, 9 aa, Artificial Sequence
  Description of Artificial Sequence: Synthetic peptide
  Seed: ILYDKEEIR
IKYDKEEIM

SEQ ID NO: 44382 - protein, 9 aa, Artificial Sequence
  Description of Artificial Sequence: Synthetic peptide
  Seed: ILYDKEEIR
IKYDKEEIL

SEQ ID NO: 44383 - protein, 9 aa, Artificial Sequence
  Description of Artificial Sequence: Synthetic peptide
  Seed: ILYDKEEIR
IEYDKEEIY

SEQ ID NO: 44384 - protein, 9 aa, Artificial Sequence
  Description of Artificial Sequence: Synthetic peptide
  Seed: ILYDKEEIR
IGYDKEEIY

SEQ ID NO: 44385 - protein, 9 aa, Artificial Sequence
  Description of Artificial Sequence: Synthetic peptide
  Seed: ILYDKEEIR
IHYDKEEIM

SEQ ID NO: 44386 - protein, 9 aa, Artificial Sequence
  Description of Artificial Sequence: Synthetic peptide
  Seed: ILYDKEEIR
IHYDKEEIF

SEQ ID NO: 44387 - protein, 9 aa, Artificial Sequence
  Description of Artificial Sequence: Synthetic peptide
  Seed: ILYDKEEIR
IHYDKEEIY

SEQ ID NO: 44388 - protein, 9 aa, Artificial Sequence
  Description of Artificial Sequence: Synthetic peptide
  Seed: ILYDKEEIR
IIYDKEEII

SEQ ID NO: 44389 - protein, 9 aa, Artificial Sequence
  Description of Artificial Sequence: Synthetic peptide
  Seed: ILYDKEEIR
IIYDKEEIL

SEQ ID NO: 44390 - protein, 9 aa, Artificial Sequence
  Description of Artificial Sequence: Synthetic peptide
  Seed: ILYDKEEIR
IIYDKEEIF

SEQ ID NO: 44391 - protein, 9 aa, Artificial Sequence
  Description of Artificial Sequence: Synthetic peptide
  Seed: ILYDKEEIR
IIYDKEEIY

SEQ ID NO: 44392 - protein, 9 aa, Artificial Sequence
  Description of Artificial Sequence: Synthetic peptide
  Seed: ILYDKEEIR
IIYDKEEIV

SEQ ID NO: 44393 - protein, 9 aa, Artificial Sequence
  Description of Artificial Sequence: Synthetic peptide
  Seed: ILYDKEEIR
ILYDKEEIA

SEQ ID NO: 44394 - protein, 9 aa, Artificial Sequence
  Description of Artificial Sequence: Synthetic peptide
  Seed: ILYDKEEIR
ILYDKEEIC

SEQ ID NO: 44395 - protein, 9 aa, Artificial Sequence
  Description of Artificial Sequence: Synthetic peptide
  Seed: ILYDKEEIR
ILYDKEEII

SEQ ID NO: 44396 - protein, 9 aa, Artificial Sequence
  Description of Artificial Sequence: Synthetic peptide
  Seed: ILYDKEEIR
ILYDKEEIL

SEQ ID NO: 44397 - protein, 9 aa, Artificial Sequence
  Description of Artificial Sequence: Synthetic peptide
  Seed: ILYDKEEIR
ILYDKEEIF

SEQ ID NO: 44398 - protein, 9 aa, Artificial Sequence
  Description of Artificial Sequence: Synthetic peptide
  Seed: ILYDKEEIR
ILYDKEEIT

SEQ ID NO: 44399 - protein, 9 aa, Artificial Sequence
  Description of Artificial Sequence: Synthetic peptide
  Seed: ILYDKEEIR
ILYDKEEIY

SEQ ID NO: 44400 - protein, 9 aa, Artificial Sequence
  Description of Artificial Sequence: Synthetic peptide
  Seed: ILYDKEEIR
ILYDKEEIV

SEQ ID NO: 44401 - protein, 9 aa, Artificial Sequence
  Description of Artificial Sequence: Synthetic peptide
  Seed: ILYDKEEIR
IVYDKEEIF

SEQ ID NO: 44402 - protein, 9 aa, Artificial Sequence
  Description of Artificial Sequence: Synthetic peptide
  Seed: ILYDKEEIR
IVYDKEEIY

SEQ ID NO: 44403 - protein, 9 aa, Artificial Sequence
  Description of Artificial Sequence: Synthetic peptide
  Seed: ILYDKEEIR
IVYDKEEIV

SEQ ID NO: 44404 - protein, 10 aa, Artificial Sequence
  Description of Artificial Sequence: Synthetic peptide
  Seed: ILYDKEEIRR
IAYDKEEIRR

SEQ ID NO: 44405 - protein, 10 aa, Artificial Sequence
  Description of Artificial Sequence: Synthetic peptide
  Seed: ILYDKEEIRR
IQYDKEEIRR

SEQ ID NO: 44406 - protein, 10 aa, Artificial Sequence
  Description of Artificial Sequence: Synthetic peptide
  Seed: ILYDKEEIRR
IIYDKEEIRR

SEQ ID NO: 44407 - protein, 10 aa, Artificial Sequence
  Description of Artificial Sequence: Synthetic peptide
  Seed: ILYDKEEIRR
IMYDKEEIRR

SEQ ID NO: 44408 - protein, 10 aa, Artificial Sequence
  Description of Artificial Sequence: Synthetic peptide
  Seed: ILYDKEEIRR
IMYDKEEIRK

SEQ ID NO: 44409 - protein, 10 aa, Artificial Sequence
  Description of Artificial Sequence: Synthetic peptide
  Seed: ILYDKEEIRR
IFYDKEEIRR

SEQ ID NO: 44410 - protein, 10 aa, Artificial Sequence
  Description of Artificial Sequence: Synthetic peptide
  Seed: ILYDKEEIRR
IFYDKEEIRK

SEQ ID NO: 44411 - protein, 10 aa, Artificial Sequence
  Description of Artificial Sequence: Synthetic peptide
  Seed: ILYDKEEIRR
ISYDKEEIRR

SEQ ID NO: 44412 - protein, 10 aa, Artificial Sequence
  Description of Artificial Sequence: Synthetic peptide
  Seed: ILYDKEEIRR
ITYDKEEIRR

SEQ ID NO: 44413 - protein, 10 aa, Artificial Sequence
  Description of Artificial Sequence: Synthetic peptide
  Seed: ILYDKEEIRR
IWYDKEEIRR

SEQ ID NO: 44414 - protein, 10 aa, Artificial Sequence
  Description of Artificial Sequence: Synthetic peptide
  Seed: ILYDKEEIRR
IYYDKEEIRR

SEQ ID NO: 44415 - protein, 10 aa, Artificial Sequence
  Description of Artificial Sequence: Synthetic peptide
  Seed: ILYDKEEIRR
IVYDKEEIRR

SEQ ID NO: 44416 - protein, 11 aa, Artificial Sequence
  Description of Artificial Sequence: Synthetic peptide
  Seed: ILYDKEEIRRI
IIYDKEEIRRV

SEQ ID NO: 44417 - protein, 11 aa, Artificial Sequence
  Description of Artificial Sequence: Synthetic peptide
  Seed: ILYDKEEIRRI
ILYDKEEIRRA

SEQ ID NO: 44418 - protein, 11 aa, Artificial Sequence
  Description of Artificial Sequence: Synthetic peptide
  Seed: ILYDKEEIRRI
ILYDKEEIRRL

SEQ ID NO: 44419 - protein, 11 aa, Artificial Sequence
  Description of Artificial Sequence: Synthetic peptide
  Seed: ILYDKEEIRRI
IMYDKEEIRRA

SEQ ID NO: 44420 - protein, 11 aa, Artificial Sequence
  Description of Artificial Sequence: Synthetic peptide
  Seed: ILYDKEEIRRI
IMYDKEEIRRI

SEQ ID NO: 44421 - protein, 11 aa, Artificial Sequence
  Description of Artificial Sequence: Synthetic peptide
  Seed: ILYDKEEIRRI
IMYDKEEIRRL

SEQ ID NO: 44422 - protein, 11 aa, Artificial Sequence
  Description of Artificial Sequence: Synthetic peptide
  Seed: ILYDKEEIRRI
IMYDKEEIRRV

SEQ ID NO: 44423 - protein, 11 aa, Artificial Sequence
  Description of Artificial Sequence: Synthetic peptide
  Seed: ISIQPTFSVQR
IVIQPTFSVQR

SEQ ID NO: 44424 - protein, 9 aa, Artificial Sequence
  Description of Artificial Sequence: Synthetic peptide
  Seed: ISVQPTFSV
IAVQPTFSA

SEQ ID NO: 44425 - protein, 9 aa, Artificial Sequence
  Description of Artificial Sequence: Synthetic peptide
  Seed: ISVQPTFSV
IAVQPTFSH

SEQ ID NO: 44426 - protein, 10 aa, Artificial Sequence
  Description of Artificial Sequence: Synthetic peptide
  Seed: KDPKKTGGPI
KDPKKTGGPT

SEQ ID NO: 44427 - protein, 10 aa, Artificial Sequence
  Description of Artificial Sequence: Synthetic peptide
  Seed: KDPKKTGGPI
KNPKKTGGPM

SEQ ID NO: 44428 - protein, 10 aa, Artificial Sequence
  Description of Artificial Sequence: Synthetic peptide
  Seed: KDPKKTGGPI
KNPKKTGGPF

SEQ ID NO: 44429 - protein, 10 aa, Artificial Sequence
  Description of Artificial Sequence: Synthetic peptide
  Seed: KDPKKTGGPI
KNPKKTGGPT

SEQ ID NO: 44430 - protein, 10 aa, Artificial Sequence
  Description of Artificial Sequence: Synthetic peptide
  Seed: KDPKKTGGPI
KNPKKTGGPV

SEQ ID NO: 44431 - protein, 10 aa, Artificial Sequence
  Description of Artificial Sequence: Synthetic peptide
  Seed: KDPKKTGGPI
KDPKKTGGPA

SEQ ID NO: 44432 - protein, 10 aa, Artificial Sequence
  Description of Artificial Sequence: Synthetic peptide
  Seed: KDPKKTGGPI
KDPKKTGGPC

SEQ ID NO: 44433 - protein, 10 aa, Artificial Sequence
  Description of Artificial Sequence: Synthetic peptide
  Seed: KDPKKTGGPI
KDPKKTGGPL

SEQ ID NO: 44434 - protein, 10 aa, Artificial Sequence
  Description of Artificial Sequence: Synthetic peptide
  Seed: KDPKKTGGPI
KDPKKTGGPM

SEQ ID NO: 44435 - protein, 10 aa, Artificial Sequence
  Description of Artificial Sequence: Synthetic peptide
  Seed: KDPKKTGGPI
KDPKKTGGPF

SEQ ID NO: 44436 - protein, 10 aa, Artificial Sequence
  Description of Artificial Sequence: Synthetic peptide
  Seed: KDPKKTGGPI
KDPKKTGGPV

SEQ ID NO: 44437 - protein, 10 aa, Artificial Sequence
  Description of Artificial Sequence: Synthetic peptide
  Seed: KDPKKTGGPI
KQPKKTGGPI

SEQ ID NO: 44438 - protein, 10 aa, Artificial Sequence
  Description of Artificial Sequence: Synthetic peptide
  Seed: KDPKKTGGPI
KCPKKTGGPA

SEQ ID NO: 44439 - protein, 10 aa, Artificial Sequence
  Description of Artificial Sequence: Synthetic peptide
  Seed: KDPKKTGGPI
KCPKKTGGPC

SEQ ID NO: 44440 - protein, 10 aa, Artificial Sequence
  Description of Artificial Sequence: Synthetic peptide
  Seed: KDPKKTGGPI
KCPKKTGGPI

SEQ ID NO: 44441 - protein, 10 aa, Artificial Sequence
  Description of Artificial Sequence: Synthetic peptide
  Seed: KDPKKTGGPI
KCPKKTGGPL

SEQ ID NO: 44442 - protein, 10 aa, Artificial Sequence
  Description of Artificial Sequence: Synthetic peptide
  Seed: KDPKKTGGPI
KCPKKTGGPM

SEQ ID NO: 44443 - protein, 10 aa, Artificial Sequence
  Description of Artificial Sequence: Synthetic peptide
  Seed: KDPKKTGGPI
KCPKKTGGPF

SEQ ID NO: 44444 - protein, 10 aa, Artificial Sequence
  Description of Artificial Sequence: Synthetic peptide
  Seed: KDPKKTGGPI
KCPKKTGGPT

SEQ ID NO: 44445 - protein, 10 aa, Artificial Sequence
  Description of Artificial Sequence: Synthetic peptide
  Seed: KDPKKTGGPI
KCPKKTGGPV

SEQ ID NO: 44446 - protein, 10 aa, Artificial Sequence
  Description of Artificial Sequence: Synthetic peptide
  Seed: KDPKKTGGPI
KQPKKTGGPA

SEQ ID NO: 44447 - protein, 10 aa, Artificial Sequence
  Description of Artificial Sequence: Synthetic peptide
  Seed: KDPKKTGGPI
KNPKKTGGPL

SEQ ID NO: 44448 - protein, 10 aa, Artificial Sequence
  Description of Artificial Sequence: Synthetic peptide
  Seed: KDPKKTGGPI
KNPKKTGGPI

SEQ ID NO: 44449 - protein, 10 aa, Artificial Sequence
  Description of Artificial Sequence: Synthetic peptide
  Seed: KDPKKTGGPI
KNPKKTGGPC

SEQ ID NO: 44450 - protein, 10 aa, Artificial Sequence
  Description of Artificial Sequence: Synthetic peptide
  Seed: KDPKKTGGPI
KNPKKTGGPA

SEQ ID NO: 44451 - protein, 10 aa, Artificial Sequence
  Description of Artificial Sequence: Synthetic peptide
  Seed: KATNPIVPSF
KVTNPIVPSF

SEQ ID NO: 44452 - protein, 10 aa, Artificial Sequence
  Description of Artificial Sequence: Synthetic peptide
  Seed: KATNPIVPSF
KVTNPIVPSW

SEQ ID NO: 44453 - protein, 10 aa, Artificial Sequence
  Description of Artificial Sequence: Synthetic peptide
  Seed: KATNPIVPSF
KVTNPIVPSY

SEQ ID NO: 44454 - protein, 10 aa, Artificial Sequence
  Description of Artificial Sequence: Synthetic peptide
  Seed: KDPKKTGGPI
KAPKKTGGPA

SEQ ID NO: 44455 - protein, 10 aa, Artificial Sequence
  Description of Artificial Sequence: Synthetic peptide
  Seed: KDPKKTGGPI
KAPKKTGGPC

SEQ ID NO: 44456 - protein, 10 aa, Artificial Sequence
  Description of Artificial Sequence: Synthetic peptide
  Seed: KDPKKTGGPI
KAPKKTGGPI

SEQ ID NO: 44457 - protein, 10 aa, Artificial Sequence
  Description of Artificial Sequence: Synthetic peptide
  Seed: KDPKKTGGPI
KAPKKTGGPL

SEQ ID NO: 44458 - protein, 10 aa, Artificial Sequence
  Description of Artificial Sequence: Synthetic peptide
  Seed: KDPKKTGGPI
KAPKKTGGPM

SEQ ID NO: 44459 - protein, 10 aa, Artificial Sequence
  Description of Artificial Sequence: Synthetic peptide
  Seed: KDPKKTGGPI
KAPKKTGGPF

SEQ ID NO: 44460 - protein, 10 aa, Artificial Sequence
  Description of Artificial Sequence: Synthetic peptide
  Seed: KDPKKTGGPI
KAPKKTGGPT

SEQ ID NO: 44461 - protein, 10 aa, Artificial Sequence
  Description of Artificial Sequence: Synthetic peptide
  Seed: KDPKKTGGPI
KAPKKTGGPV

SEQ ID NO: 44462 - protein, 10 aa, Artificial Sequence
  Description of Artificial Sequence: Synthetic peptide
  Seed: KDPKKTGGPI
KRPKKTGGPA

SEQ ID NO: 44463 - protein, 10 aa, Artificial Sequence
  Description of Artificial Sequence: Synthetic peptide
  Seed: KDPKKTGGPI
KRPKKTGGPC

SEQ ID NO: 44464 - protein, 10 aa, Artificial Sequence
  Description of Artificial Sequence: Synthetic peptide
  Seed: KDPKKTGGPI
KRPKKTGGPI

SEQ ID NO: 44465 - protein, 10 aa, Artificial Sequence
  Description of Artificial Sequence: Synthetic peptide
  Seed: KDPKKTGGPI
KRPKKTGGPL

SEQ ID NO: 44466 - protein, 10 aa, Artificial Sequence
  Description of Artificial Sequence: Synthetic peptide
  Seed: KDPKKTGGPI
KRPKKTGGPM

SEQ ID NO: 44467 - protein, 10 aa, Artificial Sequence
  Description of Artificial Sequence: Synthetic peptide
  Seed: KDPKKTGGPI
KRPKKTGGPF

SEQ ID NO: 44468 - protein, 10 aa, Artificial Sequence
  Description of Artificial Sequence: Synthetic peptide
  Seed: KDPKKTGGPI
KRPKKTGGPT

SEQ ID NO: 44469 - protein, 10 aa, Artificial Sequence
  Description of Artificial Sequence: Synthetic peptide
  Seed: KDPKKTGGPI
KRPKKTGGPV

SEQ ID NO: 44470 - protein, 10 aa, Artificial Sequence
  Description of Artificial Sequence: Synthetic peptide
  Seed: KDPKKTGGPI
KQPKKTGGPC

SEQ ID NO: 44471 - protein, 10 aa, Artificial Sequence
  Description of Artificial Sequence: Synthetic peptide
  Seed: KDPKKTGGPI
KQPKKTGGPL

SEQ ID NO: 44472 - protein, 10 aa, Artificial Sequence
  Description of Artificial Sequence: Synthetic peptide
  Seed: KDPKKTGGPI
KKPKKTGGPC

SEQ ID NO: 44473 - protein, 10 aa, Artificial Sequence
  Description of Artificial Sequence: Synthetic peptide
  Seed: KDPKKTGGPI
KIPKKTGGPF

SEQ ID NO: 44474 - protein, 10 aa, Artificial Sequence
  Description of Artificial Sequence: Synthetic peptide
  Seed: KDPKKTGGPI
KHPKKTGGPM

SEQ ID NO: 44475 - protein, 10 aa, Artificial Sequence
  Description of Artificial Sequence: Synthetic peptide
  Seed: KDPKKTGGPI
KHPKKTGGPF

SEQ ID NO: 44476 - protein, 10 aa, Artificial Sequence
  Description of Artificial Sequence: Synthetic peptide
  Seed: KDPKKTGGPI
KHPKKTGGPT

SEQ ID NO: 44477 - protein, 10 aa, Artificial Sequence
  Description of Artificial Sequence: Synthetic peptide
  Seed: KDPKKTGGPI
KHPKKTGGPV

SEQ ID NO: 44478 - protein, 10 aa, Artificial Sequence
  Description of Artificial Sequence: Synthetic peptide
  Seed: KDPKKTGGPI
KIPKKTGGPA

SEQ ID NO: 44479 - protein, 10 aa, Artificial Sequence
  Description of Artificial Sequence: Synthetic peptide
  Seed: KDPKKTGGPI
KIPKKTGGPC

SEQ ID NO: 44480 - protein, 10 aa, Artificial Sequence
  Description of Artificial Sequence: Synthetic peptide
  Seed: KDPKKTGGPI
KIPKKTGGPI

SEQ ID NO: 44481 - protein, 10 aa, Artificial Sequence
  Description of Artificial Sequence: Synthetic peptide
  Seed: KDPKKTGGPI
KIPKKTGGPL

SEQ ID NO: 44482 - protein, 10 aa, Artificial Sequence
  Description of Artificial Sequence: Synthetic peptide
  Seed: KDPKKTGGPI
KIPKKTGGPM

SEQ ID NO: 44483 - protein, 10 aa, Artificial Sequence
  Description of Artificial Sequence: Synthetic peptide
  Seed: KDPKKTGGPI
KIPKKTGGPT

SEQ ID NO: 44484 - protein, 10 aa, Artificial Sequence
  Description of Artificial Sequence: Synthetic peptide
  Seed: KDPKKTGGPI
KQPKKTGGPM

SEQ ID NO: 44485 - protein, 10 aa, Artificial Sequence
  Description of Artificial Sequence: Synthetic peptide
  Seed: KDPKKTGGPI
KIPKKTGGPV

SEQ ID NO: 44486 - protein, 10 aa, Artificial Sequence
  Description of Artificial Sequence: Synthetic peptide
  Seed: KDPKKTGGPI
KLPKKTGGPA

SEQ ID NO: 44487 - protein, 10 aa, Artificial Sequence
  Description of Artificial Sequence: Synthetic peptide
  Seed: KDPKKTGGPI
KLPKKTGGPC

SEQ ID NO: 44488 - protein, 10 aa, Artificial Sequence
  Description of Artificial Sequence: Synthetic peptide
  Seed: KDPKKTGGPI
KLPKKTGGPI

SEQ ID NO: 44489 - protein, 10 aa, Artificial Sequence
  Description of Artificial Sequence: Synthetic peptide
  Seed: KDPKKTGGPI
KLPKKTGGPL

SEQ ID NO: 44490 - protein, 10 aa, Artificial Sequence
  Description of Artificial Sequence: Synthetic peptide
  Seed: KDPKKTGGPI
KLPKKTGGPM

SEQ ID NO: 44491 - protein, 10 aa, Artificial Sequence
  Description of Artificial Sequence: Synthetic peptide
  Seed: KDPKKTGGPI
KLPKKTGGPF

SEQ ID NO: 44492 - protein, 10 aa, Artificial Sequence
  Description of Artificial Sequence: Synthetic peptide
  Seed: KDPKKTGGPI
KLPKKTGGPT

SEQ ID NO: 44493 - protein, 10 aa, Artificial Sequence
  Description of Artificial Sequence: Synthetic peptide
  Seed: KDPKKTGGPI
KLPKKTGGPV

SEQ ID NO: 44494 - protein, 10 aa, Artificial Sequence
  Description of Artificial Sequence: Synthetic peptide
  Seed: KDPKKTGGPI
KHPKKTGGPL

SEQ ID NO: 44495 - protein, 10 aa, Artificial Sequence
  Description of Artificial Sequence: Synthetic peptide
  Seed: KDPKKTGGPI
KHPKKTGGPI

SEQ ID NO: 44496 - protein, 10 aa, Artificial Sequence
  Description of Artificial Sequence: Synthetic peptide
  Seed: KDPKKTGGPI
KHPKKTGGPC

SEQ ID NO: 44497 - protein, 10 aa, Artificial Sequence
  Description of Artificial Sequence: Synthetic peptide
  Seed: KDPKKTGGPI
KHPKKTGGPA

SEQ ID NO: 44498 - protein, 10 aa, Artificial Sequence
  Description of Artificial Sequence: Synthetic peptide
  Seed: KDPKKTGGPI
KQPKKTGGPF

SEQ ID NO: 44499 - protein, 10 aa, Artificial Sequence
  Description of Artificial Sequence: Synthetic peptide
  Seed: KDPKKTGGPI
KQPKKTGGPT

SEQ ID NO: 44500 - protein, 10 aa, Artificial Sequence
  Description of Artificial Sequence: Synthetic peptide
  Seed: KDPKKTGGPI
KQPKKTGGPV

SEQ ID NO: 44501 - protein, 10 aa, Artificial Sequence
  Description of Artificial Sequence: Synthetic peptide
  Seed: KDPKKTGGPI
KEPKKTGGPA

SEQ ID NO: 44502 - protein, 10 aa, Artificial Sequence
  Description of Artificial Sequence: Synthetic peptide
  Seed: KDPKKTGGPI
KEPKKTGGPC

SEQ ID NO: 44503 - protein, 10 aa, Artificial Sequence
  Description of Artificial Sequence: Synthetic peptide
  Seed: KDPKKTGGPI
KEPKKTGGPI

SEQ ID NO: 44504 - protein, 10 aa, Artificial Sequence
  Description of Artificial Sequence: Synthetic peptide
  Seed: KDPKKTGGPI
KEPKKTGGPL

SEQ ID NO: 44505 - protein, 10 aa, Artificial Sequence
  Description of Artificial Sequence: Synthetic peptide
  Seed: KDPKKTGGPI
KEPKKTGGPM

SEQ ID NO: 44506 - protein, 10 aa, Artificial Sequence
  Description of Artificial Sequence: Synthetic peptide
  Seed: KDPKKTGGPI
KEPKKTGGPF

SEQ ID NO: 44507 - protein, 10 aa, Artificial Sequence
  Description of Artificial Sequence: Synthetic peptide
  Seed: KDPKKTGGPI
KEPKKTGGPT

SEQ ID NO: 44508 - protein, 10 aa, Artificial Sequence
  Description of Artificial Sequence: Synthetic peptide
  Seed: KDPKKTGGPI
KEPKKTGGPV

SEQ ID NO: 44509 - protein, 10 aa, Artificial Sequence
  Description of Artificial Sequence: Synthetic peptide
  Seed: KDPKKTGGPI
KGPKKTGGPA

SEQ ID NO: 44510 - protein, 10 aa, Artificial Sequence
  Description of Artificial Sequence: Synthetic peptide
  Seed: KDPKKTGGPI
KGPKKTGGPC

SEQ ID NO: 44511 - protein, 10 aa, Artificial Sequence
  Description of Artificial Sequence: Synthetic peptide
  Seed: KDPKKTGGPI
KGPKKTGGPI

SEQ ID NO: 44512 - protein, 10 aa, Artificial Sequence
  Description of Artificial Sequence: Synthetic peptide
  Seed: KDPKKTGGPI
KGPKKTGGPL

SEQ ID NO: 44513 - protein, 10 aa, Artificial Sequence
  Description of Artificial Sequence: Synthetic peptide
  Seed: KDPKKTGGPI
KGPKKTGGPM

SEQ ID NO: 44514 - protein, 10 aa, Artificial Sequence
  Description of Artificial Sequence: Synthetic peptide
  Seed: KDPKKTGGPI
KGPKKTGGPF

SEQ ID NO: 44515 - protein, 10 aa, Artificial Sequence
  Description of Artificial Sequence: Synthetic peptide
  Seed: KDPKKTGGPI
KGPKKTGGPT

SEQ ID NO: 44516 - protein, 10 aa, Artificial Sequence
  Description of Artificial Sequence: Synthetic peptide
  Seed: KDPKKTGGPI
KGPKKTGGPV

SEQ ID NO: 44517 - protein, 10 aa, Artificial Sequence
  Description of Artificial Sequence: Synthetic peptide
  Seed: KATNPIVPSF
KVTNPIVPSM

SEQ ID NO: 44518 - protein, 10 aa, Artificial Sequence
  Description of Artificial Sequence: Synthetic peptide
  Seed: KATNPIVPSF
KVTNPIVPSL

SEQ ID NO: 44519 - protein, 10 aa, Artificial Sequence
  Description of Artificial Sequence: Synthetic peptide
  Seed: KATNPIVPSF
KVTNPIVPSI

SEQ ID NO: 44520 - protein, 10 aa, Artificial Sequence
  Description of Artificial Sequence: Synthetic peptide
  Seed: KATNPIVPSF
KLTNPIVPSA

SEQ ID NO: 44521 - protein, 10 aa, Artificial Sequence
  Description of Artificial Sequence: Synthetic peptide
  Seed: KATNPIVPSF
KITNPIVPSI

SEQ ID NO: 44522 - protein, 10 aa, Artificial Sequence
  Description of Artificial Sequence: Synthetic peptide
  Seed: KATNPIVPSF
KITNPIVPSL

SEQ ID NO: 44523 - protein, 10 aa, Artificial Sequence
  Description of Artificial Sequence: Synthetic peptide
  Seed: KATNPIVPSF
KITNPIVPSK

SEQ ID NO: 44524 - protein, 10 aa, Artificial Sequence
  Description of Artificial Sequence: Synthetic peptide
  Seed: KATNPIVPSF
KITNPIVPSM

SEQ ID NO: 44525 - protein, 10 aa, Artificial Sequence
  Description of Artificial Sequence: Synthetic peptide
  Seed: KATNPIVPSF
KITNPIVPSF

SEQ ID NO: 44526 - protein, 10 aa, Artificial Sequence
  Description of Artificial Sequence: Synthetic peptide
  Seed: KATNPIVPSF
KITNPIVPSS

SEQ ID NO: 44527 - protein, 10 aa, Artificial Sequence
  Description of Artificial Sequence: Synthetic peptide
  Seed: KATNPIVPSF
KITNPIVPSW

SEQ ID NO: 44528 - protein, 10 aa, Artificial Sequence
  Description of Artificial Sequence: Synthetic peptide
  Seed: KATNPIVPSF
KITNPIVPSY

SEQ ID NO: 44529 - protein, 10 aa, Artificial Sequence
  Description of Artificial Sequence: Synthetic peptide
  Seed: KATNPIVPSF
KITNPIVPSV

SEQ ID NO: 44530 - protein, 10 aa, Artificial Sequence
  Description of Artificial Sequence: Synthetic peptide
  Seed: KATNPIVPSF
KLTNPIVPSI

SEQ ID NO: 44531 - protein, 10 aa, Artificial Sequence
  Description of Artificial Sequence: Synthetic peptide
  Seed: KATNPIVPSF
KYTNPIVPSY

SEQ ID NO: 44532 - protein, 10 aa, Artificial Sequence
  Description of Artificial Sequence: Synthetic peptide
  Seed: KATNPIVPSF
KLTNPIVPSL

SEQ ID NO: 44533 - protein, 10 aa, Artificial Sequence
  Description of Artificial Sequence: Synthetic peptide
  Seed: KATNPIVPSF
KLTNPIVPSK

SEQ ID NO: 44534 - protein, 10 aa, Artificial Sequence
  Description of Artificial Sequence: Synthetic peptide
  Seed: KATNPIVPSF
KLTNPIVPSM

SEQ ID NO: 44535 - protein, 10 aa, Artificial Sequence
  Description of Artificial Sequence: Synthetic peptide
  Seed: KATNPIVPSF
KLTNPIVPSF

SEQ ID NO: 44536 - protein, 10 aa, Artificial Sequence
  Description of Artificial Sequence: Synthetic peptide
  Seed: KATNPIVPSF
KLTNPIVPSS

SEQ ID NO: 44537 - protein, 10 aa, Artificial Sequence
  Description of Artificial Sequence: Synthetic peptide
  Seed: KATNPIVPSF
KLTNPIVPSW

SEQ ID NO: 44538 - protein, 10 aa, Artificial Sequence
  Description of Artificial Sequence: Synthetic peptide
  Seed: KATNPIVPSF
KLTNPIVPSY

SEQ ID NO: 44539 - protein, 10 aa, Artificial Sequence
  Description of Artificial Sequence: Synthetic peptide
  Seed: KATNPIVPSF
KKTNPIVPSI

SEQ ID NO: 44540 - protein, 10 aa, Artificial Sequence
  Description of Artificial Sequence: Synthetic peptide
  Seed: KATNPIVPSF
KKTNPIVPSL

SEQ ID NO: 44541 - protein, 10 aa, Artificial Sequence
  Description of Artificial Sequence: Synthetic peptide
  Seed: KATNPIVPSF
KITNPIVPSG

SEQ ID NO: 44542 - protein, 10 aa, Artificial Sequence
  Description of Artificial Sequence: Synthetic peptide
  Seed: KATNPIVPSF
KITNPIVPSA

SEQ ID NO: 44543 - protein, 10 aa, Artificial Sequence
  Description of Artificial Sequence: Synthetic peptide
  Seed: KATNPIVPSF
KHTNPIVPSV

SEQ ID NO: 44544 - protein, 10 aa, Artificial Sequence
  Description of Artificial Sequence: Synthetic peptide
  Seed: KATNPIVPSF
KHTNPIVPSY

SEQ ID NO: 44545 - protein, 10 aa, Artificial Sequence
  Description of Artificial Sequence: Synthetic peptide
  Seed: KATNPIVPSF
KETNPIVPSV

SEQ ID NO: 44546 - protein, 10 aa, Artificial Sequence
  Description of Artificial Sequence: Synthetic peptide
  Seed: KATNPIVPSF
KGTNPIVPSA

SEQ ID NO: 44547 - protein, 10 aa, Artificial Sequence
  Description of Artificial Sequence: Synthetic peptide
  Seed: KATNPIVPSF
KGTNPIVPSI

SEQ ID NO: 44548 - protein, 10 aa, Artificial Sequence
  Description of Artificial Sequence: Synthetic peptide
  Seed: KATNPIVPSF
KGTNPIVPSL

SEQ ID NO: 44549 - protein, 10 aa, Artificial Sequence
  Description of Artificial Sequence: Synthetic peptide
  Seed: KATNPIVPSF
KGTNPIVPSK

SEQ ID NO: 44550 - protein, 10 aa, Artificial Sequence
  Description of Artificial Sequence: Synthetic peptide
  Seed: KATNPIVPSF
KGTNPIVPSM

SEQ ID NO: 44551 - protein, 10 aa, Artificial Sequence
  Description of Artificial Sequence: Synthetic peptide
  Seed: KATNPIVPSF
KGTNPIVPSF

SEQ ID NO: 44552 - protein, 10 aa, Artificial Sequence
  Description of Artificial Sequence: Synthetic peptide
  Seed: KATNPIVPSF
KGTNPIVPSS

SEQ ID NO: 44553 - protein, 10 aa, Artificial Sequence
  Description of Artificial Sequence: Synthetic peptide
  Seed: KATNPIVPSF
KGTNPIVPSW

SEQ ID NO: 44554 - protein, 10 aa, Artificial Sequence
  Description of Artificial Sequence: Synthetic peptide
  Seed: KATNPIVPSF
KGTNPIVPSY

SEQ ID NO: 44555 - protein, 10 aa, Artificial Sequence
  Description of Artificial Sequence: Synthetic peptide
  Seed: KATNPIVPSF
KGTNPIVPSV

SEQ ID NO: 44556 - protein, 10 aa, Artificial Sequence
  Description of Artificial Sequence: Synthetic peptide
  Seed: KATNPIVPSF
KHTNPIVPSA

SEQ ID NO: 44557 - protein, 10 aa, Artificial Sequence
  Description of Artificial Sequence: Synthetic peptide
  Seed: KATNPIVPSF
KHTNPIVPSI

SEQ ID NO: 44558 - protein, 10 aa, Artificial Sequence
  Description of Artificial Sequence: Synthetic peptide
  Seed: KATNPIVPSF
KHTNPIVPSL

SEQ ID NO: 44559 - protein, 10 aa, Artificial Sequence
  Description of Artificial Sequence: Synthetic peptide
  Seed: KATNPIVPSF
KHTNPIVPSK

SEQ ID NO: 44560 - protein, 10 aa, Artificial Sequence
  Description of Artificial Sequence: Synthetic peptide
  Seed: KATNPIVPSF
KHTNPIVPSM

SEQ ID NO: 44561 - protein, 10 aa, Artificial Sequence
  Description of Artificial Sequence: Synthetic peptide
  Seed: KATNPIVPSF
KHTNPIVPSF

SEQ ID NO: 44562 - protein, 10 aa, Artificial Sequence
  Description of Artificial Sequence: Synthetic peptide
  Seed: KATNPIVPSF
KHTNPIVPSS

SEQ ID NO: 44563 - protein, 10 aa, Artificial Sequence
  Description of Artificial Sequence: Synthetic peptide
  Seed: KATNPIVPSF
KHTNPIVPSW

SEQ ID NO: 44564 - protein, 10 aa, Artificial Sequence
  Description of Artificial Sequence: Synthetic peptide
  Seed: KATNPIVPSF
KKTNPIVPSM

SEQ ID NO: 44565 - protein, 10 aa, Artificial Sequence
  Description of Artificial Sequence: Synthetic peptide
  Seed: KATNPIVPSF
KKTNPIVPSF

SEQ ID NO: 44566 - protein, 10 aa, Artificial Sequence
  Description of Artificial Sequence: Synthetic peptide
  Seed: KATNPIVPSF
KKTNPIVPSW

SEQ ID NO: 44567 - protein, 10 aa, Artificial Sequence
  Description of Artificial Sequence: Synthetic peptide
  Seed: KATNPIVPSF
KSTNPIVPSF

SEQ ID NO: 44568 - protein, 10 aa, Artificial Sequence
  Description of Artificial Sequence: Synthetic peptide
  Seed: KATNPIVPSF
KSTNPIVPSY

SEQ ID NO: 44569 - protein, 10 aa, Artificial Sequence
  Description of Artificial Sequence: Synthetic peptide
  Seed: KATNPIVPSF
KSTNPIVPSV

SEQ ID NO: 44570 - protein, 10 aa, Artificial Sequence
  Description of Artificial Sequence: Synthetic peptide
  Seed: KATNPIVPSF
KTTNPIVPSI

SEQ ID NO: 44571 - protein, 10 aa, Artificial Sequence
  Description of Artificial Sequence: Synthetic peptide
  Seed: KATNPIVPSF
KTTNPIVPSL

SEQ ID NO: 44572 - protein, 10 aa, Artificial Sequence
  Description of Artificial Sequence: Synthetic peptide
  Seed: KATNPIVPSF
KTTNPIVPSM

SEQ ID NO: 44573 - protein, 10 aa, Artificial Sequence
  Description of Artificial Sequence: Synthetic peptide
  Seed: KATNPIVPSF
KTTNPIVPSF

SEQ ID NO: 44574 - protein, 10 aa, Artificial Sequence
  Description of Artificial Sequence: Synthetic peptide
  Seed: KATNPIVPSF
KTTNPIVPSW

SEQ ID NO: 44575 - protein, 10 aa, Artificial Sequence
  Description of Artificial Sequence: Synthetic peptide
  Seed: KATNPIVPSF
KTTNPIVPSY

SEQ ID NO: 44576 - protein, 10 aa, Artificial Sequence
  Description of Artificial Sequence: Synthetic peptide
  Seed: KATNPIVPSF
KWTNPIVPSI

SEQ ID NO: 44577 - protein, 10 aa, Artificial Sequence
  Description of Artificial Sequence: Synthetic peptide
  Seed: KATNPIVPSF
KWTNPIVPSL

SEQ ID NO: 44578 - protein, 10 aa, Artificial Sequence
  Description of Artificial Sequence: Synthetic peptide
  Seed: KATNPIVPSF
KWTNPIVPSM

SEQ ID NO: 44579 - protein, 10 aa, Artificial Sequence
  Description of Artificial Sequence: Synthetic peptide
  Seed: KATNPIVPSF
KWTNPIVPSF

SEQ ID NO: 44580 - protein, 10 aa, Artificial Sequence
  Description of Artificial Sequence: Synthetic peptide
  Seed: KATNPIVPSF
KWTNPIVPSW

SEQ ID NO: 44581 - protein, 10 aa, Artificial Sequence
  Description of Artificial Sequence: Synthetic peptide
  Seed: KATNPIVPSF
KWTNPIVPSY

SEQ ID NO: 44582 - protein, 10 aa, Artificial Sequence
  Description of Artificial Sequence: Synthetic peptide
  Seed: KATNPIVPSF
KYTNPIVPSI

SEQ ID NO: 44583 - protein, 10 aa, Artificial Sequence
  Description of Artificial Sequence: Synthetic peptide
  Seed: KATNPIVPSF
KYTNPIVPSL

SEQ ID NO: 44584 - protein, 10 aa, Artificial Sequence
  Description of Artificial Sequence: Synthetic peptide
  Seed: KATNPIVPSF
KYTNPIVPSM

SEQ ID NO: 44585 - protein, 10 aa, Artificial Sequence
  Description of Artificial Sequence: Synthetic peptide
  Seed: KATNPIVPSF
KYTNPIVPSF

SEQ ID NO: 44586 - protein, 10 aa, Artificial Sequence
  Description of Artificial Sequence: Synthetic peptide
  Seed: KATNPIVPSF
KYTNPIVPSW

SEQ ID NO: 44587 - protein, 10 aa, Artificial Sequence
  Description of Artificial Sequence: Synthetic peptide
  Seed: KATNPIVPSF
KSTNPIVPSW

SEQ ID NO: 44588 - protein, 10 aa, Artificial Sequence
  Description of Artificial Sequence: Synthetic peptide
  Seed: KATNPIVPSF
KSTNPIVPSM

SEQ ID NO: 44589 - protein, 10 aa, Artificial Sequence
  Description of Artificial Sequence: Synthetic peptide
  Seed: KATNPIVPSF
KKTNPIVPSY

SEQ ID NO: 44590 - protein, 10 aa, Artificial Sequence
  Description of Artificial Sequence: Synthetic peptide
  Seed: KATNPIVPSF
KSTNPIVPSL

SEQ ID NO: 44591 - protein, 10 aa, Artificial Sequence
  Description of Artificial Sequence: Synthetic peptide
  Seed: KATNPIVPSF
KMTNPIVPSI

SEQ ID NO: 44592 - protein, 10 aa, Artificial Sequence
  Description of Artificial Sequence: Synthetic peptide
  Seed: KATNPIVPSF
KMTNPIVPSL

SEQ ID NO: 44593 - protein, 10 aa, Artificial Sequence
  Description of Artificial Sequence: Synthetic peptide
  Seed: KATNPIVPSF
KMTNPIVPSM

SEQ ID NO: 44594 - protein, 10 aa, Artificial Sequence
  Description of Artificial Sequence: Synthetic peptide
  Seed: KATNPIVPSF
KMTNPIVPSF

SEQ ID NO: 44595 - protein, 10 aa, Artificial Sequence
  Description of Artificial Sequence: Synthetic peptide
  Seed: KATNPIVPSF
KMTNPIVPSW

SEQ ID NO: 44596 - protein, 10 aa, Artificial Sequence
  Description of Artificial Sequence: Synthetic peptide
  Seed: KATNPIVPSF
KMTNPIVPSY

SEQ ID NO: 44597 - protein, 10 aa, Artificial Sequence
  Description of Artificial Sequence: Synthetic peptide
  Seed: KATNPIVPSF
KFTNPIVPSI

SEQ ID NO: 44598 - protein, 10 aa, Artificial Sequence
  Description of Artificial Sequence: Synthetic peptide
  Seed: KATNPIVPSF
KFTNPIVPSL

SEQ ID NO: 44599 - protein, 10 aa, Artificial Sequence
  Description of Artificial Sequence: Synthetic peptide
  Seed: KATNPIVPSF
KFTNPIVPSM

SEQ ID NO: 44600 - protein, 10 aa, Artificial Sequence
  Description of Artificial Sequence: Synthetic peptide
  Seed: KATNPIVPSF
KFTNPIVPSF

SEQ ID NO: 44601 - protein, 10 aa, Artificial Sequence
  Description of Artificial Sequence: Synthetic peptide
  Seed: KATNPIVPSF
KFTNPIVPSW

SEQ ID NO: 44602 - protein, 10 aa, Artificial Sequence
  Description of Artificial Sequence: Synthetic peptide
  Seed: KATNPIVPSF
KFTNPIVPSY

SEQ ID NO: 44603 - protein, 10 aa, Artificial Sequence
  Description of Artificial Sequence: Synthetic peptide
  Seed: KATNPIVPSF
KPTNPIVPSI

SEQ ID NO: 44604 - protein, 10 aa, Artificial Sequence
  Description of Artificial Sequence: Synthetic peptide
  Seed: KATNPIVPSF
KPTNPIVPSL

SEQ ID NO: 44605 - protein, 10 aa, Artificial Sequence
  Description of Artificial Sequence: Synthetic peptide
  Seed: KATNPIVPSF
KPTNPIVPSM

SEQ ID NO: 44606 - protein, 10 aa, Artificial Sequence
  Description of Artificial Sequence: Synthetic peptide
  Seed: KATNPIVPSF
KPTNPIVPSF

SEQ ID NO: 44607 - protein, 10 aa, Artificial Sequence
  Description of Artificial Sequence: Synthetic peptide
  Seed: KATNPIVPSF
KPTNPIVPSW

SEQ ID NO: 44608 - protein, 10 aa, Artificial Sequence
  Description of Artificial Sequence: Synthetic peptide
  Seed: KATNPIVPSF
KPTNPIVPSY

SEQ ID NO: 44609 - protein, 10 aa, Artificial Sequence
  Description of Artificial Sequence: Synthetic peptide
  Seed: KATNPIVPSF
KSTNPIVPSI

SEQ ID NO: 44610 - protein, 10 aa, Artificial Sequence
  Description of Artificial Sequence: Synthetic peptide
  Seed: KDPKKTGGPI
KKPKKTGGPA

SEQ ID NO: 44611 - protein, 10 aa, Artificial Sequence
  Description of Artificial Sequence: Synthetic peptide
  Seed: KDPKKTGGPI
KKPKKTGGPI

SEQ ID NO: 44612 - protein, 10 aa, Artificial Sequence
  Description of Artificial Sequence: Synthetic peptide
  Seed: KATNPIVPSF
KETNPIVPSW

SEQ ID NO: 44613 - protein, 11 aa, Artificial Sequence
  Description of Artificial Sequence: Synthetic peptide
  Seed: KEEIRRIWRQA
KVEIRRIWRQA

SEQ ID NO: 44614 - protein, 11 aa, Artificial Sequence
  Description of Artificial Sequence: Synthetic peptide
  Seed: KEEIRRIWRQA
KWEIRRIWRQK

SEQ ID NO: 44615 - protein, 11 aa, Artificial Sequence
  Description of Artificial Sequence: Synthetic peptide
  Seed: KEEIRRIWRQA
KWEIRRIWRQM

SEQ ID NO: 44616 - protein, 11 aa, Artificial Sequence
  Description of Artificial Sequence: Synthetic peptide
  Seed: KEEIRRIWRQA
KWEIRRIWRQV

SEQ ID NO: 44617 - protein, 11 aa, Artificial Sequence
  Description of Artificial Sequence: Synthetic peptide
  Seed: KEEIRRIWRQA
KYEIRRIWRQA

SEQ ID NO: 44618 - protein, 11 aa, Artificial Sequence
  Description of Artificial Sequence: Synthetic peptide
  Seed: KEEIRRIWRQA
KYEIRRIWRQI

SEQ ID NO: 44619 - protein, 11 aa, Artificial Sequence
  Description of Artificial Sequence: Synthetic peptide
  Seed: KEEIRRIWRQA
KYEIRRIWRQL

SEQ ID NO: 44620 - protein, 11 aa, Artificial Sequence
  Description of Artificial Sequence: Synthetic peptide
  Seed: KEEIRRIWRQA
KYEIRRIWRQK

SEQ ID NO: 44621 - protein, 11 aa, Artificial Sequence
  Description of Artificial Sequence: Synthetic peptide
  Seed: KEEIRRIWRQA
KYEIRRIWRQM

SEQ ID NO: 44622 - protein, 11 aa, Artificial Sequence
  Description of Artificial Sequence: Synthetic peptide
  Seed: KEEIRRIWRQA
KYEIRRIWRQV

SEQ ID NO: 44623 - protein, 11 aa, Artificial Sequence
  Description of Artificial Sequence: Synthetic peptide
  Seed: KEEIRRIWRQA
KVEIRRIWRQI

SEQ ID NO: 44624 - protein, 11 aa, Artificial Sequence
  Description of Artificial Sequence: Synthetic peptide
  Seed: KEEIRRIWRQA
KVEIRRIWRQL

SEQ ID NO: 44625 - protein, 11 aa, Artificial Sequence
  Description of Artificial Sequence: Synthetic peptide
  Seed: KEEIRRIWRQA
KVEIRRIWRQK

SEQ ID NO: 44626 - protein, 11 aa, Artificial Sequence
  Description of Artificial Sequence: Synthetic peptide
  Seed: KEEIRRIWRQA
KVEIRRIWRQM

SEQ ID NO: 44627 - protein, 11 aa, Artificial Sequence
  Description of Artificial Sequence: Synthetic peptide
  Seed: KEEIRRIWRQA
KVEIRRIWRQS

SEQ ID NO: 44628 - protein, 11 aa, Artificial Sequence
  Description of Artificial Sequence: Synthetic peptide
  Seed: KEEIRRIWRQA
KVEIRRIWRQV

SEQ ID NO: 44629 - protein, 9 aa, Artificial Sequence
  Description of Artificial Sequence: Synthetic peptide
  Seed: KEGYSLVGI
KEGYSLVGA

SEQ ID NO: 44630 - protein, 9 aa, Artificial Sequence
  Description of Artificial Sequence: Synthetic peptide
  Seed: KEGYSLVGI
KEGYSLVGL

SEQ ID NO: 44631 - protein, 9 aa, Artificial Sequence
  Description of Artificial Sequence: Synthetic peptide
  Seed: KEGYSLVGI
KEGYSLVGM

SEQ ID NO: 44632 - protein, 9 aa, Artificial Sequence
  Description of Artificial Sequence: Synthetic peptide
  Seed: KEGYSLVGI
KEGYSLVGF

SEQ ID NO: 44633 - protein, 11 aa, Artificial Sequence
  Description of Artificial Sequence: Synthetic peptide
  Seed: KEEIRRIWRQA
KWEIRRIWRQL

SEQ ID NO: 44634 - protein, 11 aa, Artificial Sequence
  Description of Artificial Sequence: Synthetic peptide
  Seed: KEEIRRIWRQA
KWEIRRIWRQI

SEQ ID NO: 44635 - protein, 11 aa, Artificial Sequence
  Description of Artificial Sequence: Synthetic peptide
  Seed: KEEIRRIWRQA
KWEIRRIWRQA

SEQ ID NO: 44636 - protein, 11 aa, Artificial Sequence
  Description of Artificial Sequence: Synthetic peptide
  Seed: KEEIRRIWRQA
KTEIRRIWRQV

SEQ ID NO: 44637 - protein, 11 aa, Artificial Sequence
  Description of Artificial Sequence: Synthetic peptide
  Seed: KEEIRRIWRQA
KFEIRRIWRQV

SEQ ID NO: 44638 - protein, 11 aa, Artificial Sequence
  Description of Artificial Sequence: Synthetic peptide
  Seed: KEEIRRIWRQA
KPEIRRIWRQA

SEQ ID NO: 44639 - protein, 11 aa, Artificial Sequence
  Description of Artificial Sequence: Synthetic peptide
  Seed: KEEIRRIWRQA
KPEIRRIWRQK

SEQ ID NO: 44640 - protein, 11 aa, Artificial Sequence
  Description of Artificial Sequence: Synthetic peptide
  Seed: KEEIRRIWRQA
KPEIRRIWRQV

SEQ ID NO: 44641 - protein, 11 aa, Artificial Sequence
  Description of Artificial Sequence: Synthetic peptide
  Seed: KEEIRRIWRQA
KSEIRRIWRQA

SEQ ID NO: 44642 - protein, 11 aa, Artificial Sequence
  Description of Artificial Sequence: Synthetic peptide
  Seed: KEEIRRIWRQA
KSEIRRIWRQI

SEQ ID NO: 44643 - protein, 11 aa, Artificial Sequence
  Description of Artificial Sequence: Synthetic peptide
  Seed: KEEIRRIWRQA
KSEIRRIWRQL

SEQ ID NO: 44644 - protein, 11 aa, Artificial Sequence
  Description of Artificial Sequence: Synthetic peptide
  Seed: KEEIRRIWRQA
KSEIRRIWRQK

SEQ ID NO: 44645 - protein, 11 aa, Artificial Sequence
  Description of Artificial Sequence: Synthetic peptide
  Seed: KEEIRRIWRQA
KSEIRRIWRQM

SEQ ID NO: 44646 - protein, 11 aa, Artificial Sequence
  Description of Artificial Sequence: Synthetic peptide
  Seed: KEEIRRIWRQA
KSEIRRIWRQS

SEQ ID NO: 44647 - protein, 11 aa, Artificial Sequence
  Description of Artificial Sequence: Synthetic peptide
  Seed: KEEIRRIWRQA
KSEIRRIWRQV

SEQ ID NO: 44648 - protein, 11 aa, Artificial Sequence
  Description of Artificial Sequence: Synthetic peptide
  Seed: KEEIRRIWRQA
KTEIRRIWRQA

SEQ ID NO: 44649 - protein, 11 aa, Artificial Sequence
  Description of Artificial Sequence: Synthetic peptide
  Seed: KEEIRRIWRQA
KTEIRRIWRQI

SEQ ID NO: 44650 - protein, 11 aa, Artificial Sequence
  Description of Artificial Sequence: Synthetic peptide
  Seed: KEEIRRIWRQA
KTEIRRIWRQL

SEQ ID NO: 44651 - protein, 11 aa, Artificial Sequence
  Description of Artificial Sequence: Synthetic peptide
  Seed: KEEIRRIWRQA
KTEIRRIWRQK

SEQ ID NO: 44652 - protein, 11 aa, Artificial Sequence
  Description of Artificial Sequence: Synthetic peptide
  Seed: KEEIRRIWRQA
KTEIRRIWRQM

SEQ ID NO: 44653 - protein, 11 aa, Artificial Sequence
  Description of Artificial Sequence: Synthetic peptide
  Seed: KEEIRRIWRQA
KTEIRRIWRQS

SEQ ID NO: 44654 - protein, 11 aa, Artificial Sequence
  Description of Artificial Sequence: Synthetic peptide
  Seed: KEEIRRIWRQA
KTEIRRIWRQT

SEQ ID NO: 44655 - protein, 11 aa, Artificial Sequence
  Description of Artificial Sequence: Synthetic peptide
  Seed: KEEIRRIWRQA
KTEIRRIWRQY

SEQ ID NO: 44656 - protein, 9 aa, Artificial Sequence
  Description of Artificial Sequence: Synthetic peptide
  Seed: KEGYSLVGI
KEGYSLVGP

SEQ ID NO: 44657 - protein, 8 aa, Artificial Sequence
  Description of Artificial Sequence: Synthetic peptide
  Seed: KFQTAAQR
KLQTAAQR

SEQ ID NO: 44658 - protein, 10 aa, Artificial Sequence
  Description of Artificial Sequence: Synthetic peptide
  Seed: KDPKKTGGPI
KKPKKTGGPL

SEQ ID NO: 44659 - protein, 10 aa, Artificial Sequence
  Description of Artificial Sequence: Synthetic peptide
  Seed: KFQTAAQRAM
KEQTAAQRAY

SEQ ID NO: 44660 - protein, 10 aa, Artificial Sequence
  Description of Artificial Sequence: Synthetic peptide
  Seed: KFQTAAQRAM
KQQTAAQRAI

SEQ ID NO: 44661 - protein, 10 aa, Artificial Sequence
  Description of Artificial Sequence: Synthetic peptide
  Seed: KFQTAAQRAM
KQQTAAQRAL

SEQ ID NO: 44662 - protein, 10 aa, Artificial Sequence
  Description of Artificial Sequence: Synthetic peptide
  Seed: KFQTAAQRAM
KQQTAAQRAM

SEQ ID NO: 44663 - protein, 10 aa, Artificial Sequence
  Description of Artificial Sequence: Synthetic peptide
  Seed: KFQTAAQRAM
KQQTAAQRAF

SEQ ID NO: 44664 - protein, 10 aa, Artificial Sequence
  Description of Artificial Sequence: Synthetic peptide
  Seed: KFQTAAQRAM
KQQTAAQRAW

SEQ ID NO: 44665 - protein, 10 aa, Artificial Sequence
  Description of Artificial Sequence: Synthetic peptide
  Seed: KFQTAAQRAM
KQQTAAQRAY

SEQ ID NO: 44666 - protein, 10 aa, Artificial Sequence
  Description of Artificial Sequence: Synthetic peptide
  Seed: KFQTAAQRAM
KEQTAAQRAL

SEQ ID NO: 44667 - protein, 10 aa, Artificial Sequence
  Description of Artificial Sequence: Synthetic peptide
  Seed: KFQTAAQRAM
KEQTAAQRAM

SEQ ID NO: 44668 - protein, 10 aa, Artificial Sequence
  Description of Artificial Sequence: Synthetic peptide
  Seed: KFQTAAQRAM
KEQTAAQRAF

SEQ ID NO: 44669 - protein, 10 aa, Artificial Sequence
  Description of Artificial Sequence: Synthetic peptide
  Seed: KFQTAAQRAM
KGQTAAQRAL

SEQ ID NO: 44670 - protein, 8 aa, Artificial Sequence
  Description of Artificial Sequence: Synthetic peptide
  Seed: KFQTAAQR
KMQTAAQR

SEQ ID NO: 44671 - protein, 10 aa, Artificial Sequence
  Description of Artificial Sequence: Synthetic peptide
  Seed: KFQTAAQRAM
KGQTAAQRAM

SEQ ID NO: 44672 - protein, 10 aa, Artificial Sequence
  Description of Artificial Sequence: Synthetic peptide
  Seed: KFQTAAQRAM
KGQTAAQRAF

SEQ ID NO: 44673 - protein, 10 aa, Artificial Sequence
  Description of Artificial Sequence: Synthetic peptide
  Seed: KFQTAAQRAM
KGQTAAQRAY

SEQ ID NO: 44674 - protein, 10 aa, Artificial Sequence
  Description of Artificial Sequence: Synthetic peptide
  Seed: KFQTAAQRAM
KHQTAAQRAL

SEQ ID NO: 44675 - protein, 10 aa, Artificial Sequence
  Description of Artificial Sequence: Synthetic peptide
  Seed: KFQTAAQRAM
KHQTAAQRAM

SEQ ID NO: 44676 - protein, 10 aa, Artificial Sequence
  Description of Artificial Sequence: Synthetic peptide
  Seed: KFQTAAQRAM
KHQTAAQRAF

SEQ ID NO: 44677 - protein, 10 aa, Artificial Sequence
  Description of Artificial Sequence: Synthetic peptide
  Seed: KFQTAAQRAM
KHQTAAQRAY

SEQ ID NO: 44678 - protein, 10 aa, Artificial Sequence
  Description of Artificial Sequence: Synthetic peptide
  Seed: KFQTAAQRAM
KIQTAAQRAL

SEQ ID NO: 44679 - protein, 10 aa, Artificial Sequence
  Description of Artificial Sequence: Synthetic peptide
  Seed: KFQTAAQRAM
KIQTAAQRAM

SEQ ID NO: 44680 - protein, 10 aa, Artificial Sequence
  Description of Artificial Sequence: Synthetic peptide
  Seed: KFQTAAQRAM
KCQTAAQRAY

SEQ ID NO: 44681 - protein, 10 aa, Artificial Sequence
  Description of Artificial Sequence: Synthetic peptide
  Seed: KFQTAAQRAM
KCQTAAQRAF

SEQ ID NO: 44682 - protein, 10 aa, Artificial Sequence
  Description of Artificial Sequence: Synthetic peptide
  Seed: KFQTAAQRAM
KCQTAAQRAM

SEQ ID NO: 44683 - protein, 10 aa, Artificial Sequence
  Description of Artificial Sequence: Synthetic peptide
  Seed: KFQTAAQRAM
KCQTAAQRAL

SEQ ID NO: 44684 - protein, 8 aa, Artificial Sequence
  Description of Artificial Sequence: Synthetic peptide
  Seed: KFQTAAQR
KTQTAAQR

SEQ ID NO: 44685 - protein, 8 aa, Artificial Sequence
  Description of Artificial Sequence: Synthetic peptide
  Seed: KFQTAAQR
KYQTAAQR

SEQ ID NO: 44686 - protein, 8 aa, Artificial Sequence
  Description of Artificial Sequence: Synthetic peptide
  Seed: KFQTAAQR
KVQTAAQR

SEQ ID NO: 44687 - protein, 10 aa, Artificial Sequence
  Description of Artificial Sequence: Synthetic peptide
  Seed: KFQTAAQRAM
KAQTAAQRAL

SEQ ID NO: 44688 - protein, 10 aa, Artificial Sequence
  Description of Artificial Sequence: Synthetic peptide
  Seed: KFQTAAQRAM
KAQTAAQRAM

SEQ ID NO: 44689 - protein, 10 aa, Artificial Sequence
  Description of Artificial Sequence: Synthetic peptide
  Seed: KFQTAAQRAM
KAQTAAQRAF

SEQ ID NO: 44690 - protein, 10 aa, Artificial Sequence
  Description of Artificial Sequence: Synthetic peptide
  Seed: KFQTAAQRAM
KAQTAAQRAY

SEQ ID NO: 44691 - protein, 10 aa, Artificial Sequence
  Description of Artificial Sequence: Synthetic peptide
  Seed: KFQTAAQRAM
KRQTAAQRAL

SEQ ID NO: 44692 - protein, 10 aa, Artificial Sequence
  Description of Artificial Sequence: Synthetic peptide
  Seed: KFQTAAQRAM
KRQTAAQRAM

SEQ ID NO: 44693 - protein, 10 aa, Artificial Sequence
  Description of Artificial Sequence: Synthetic peptide
  Seed: KFQTAAQRAM
KRQTAAQRAF

SEQ ID NO: 44694 - protein, 10 aa, Artificial Sequence
  Description of Artificial Sequence: Synthetic peptide
  Seed: KFQTAAQRAM
KRQTAAQRAY

SEQ ID NO: 44695 - protein, 10 aa, Artificial Sequence
  Description of Artificial Sequence: Synthetic peptide
  Seed: KFQTAAQRAM
KNQTAAQRAL

SEQ ID NO: 44696 - protein, 10 aa, Artificial Sequence
  Description of Artificial Sequence: Synthetic peptide
  Seed: KFQTAAQRAM
KNQTAAQRAM

SEQ ID NO: 44697 - protein, 10 aa, Artificial Sequence
  Description of Artificial Sequence: Synthetic peptide
  Seed: KFQTAAQRAM
KNQTAAQRAF

SEQ ID NO: 44698 - protein, 10 aa, Artificial Sequence
  Description of Artificial Sequence: Synthetic peptide
  Seed: KFQTAAQRAM
KNQTAAQRAY

SEQ ID NO: 44699 - protein, 10 aa, Artificial Sequence
  Description of Artificial Sequence: Synthetic peptide
  Seed: KFQTAAQRAM
KDQTAAQRAL

SEQ ID NO: 44700 - protein, 10 aa, Artificial Sequence
  Description of Artificial Sequence: Synthetic peptide
  Seed: KFQTAAQRAM
KDQTAAQRAM

SEQ ID NO: 44701 - protein, 10 aa, Artificial Sequence
  Description of Artificial Sequence: Synthetic peptide
  Seed: KFQTAAQRAM
KDQTAAQRAF

SEQ ID NO: 44702 - protein, 10 aa, Artificial Sequence
  Description of Artificial Sequence: Synthetic peptide
  Seed: KFQTAAQRAM
KDQTAAQRAY

SEQ ID NO: 44703 - protein, 11 aa, Artificial Sequence
  Description of Artificial Sequence: Synthetic peptide
  Seed: KEEIRRIWRQA
KFEIRRIWRQM

SEQ ID NO: 44704 - protein, 11 aa, Artificial Sequence
  Description of Artificial Sequence: Synthetic peptide
  Seed: KEEIRRIWRQA
KFEIRRIWRQK

SEQ ID NO: 44705 - protein, 11 aa, Artificial Sequence
  Description of Artificial Sequence: Synthetic peptide
  Seed: KEEIRRIWRQA
KFEIRRIWRQL

SEQ ID NO: 44706 - protein, 10 aa, Artificial Sequence
  Description of Artificial Sequence: Synthetic peptide
  Seed: KDPKKTGGPI
KSPKKTGGPM

SEQ ID NO: 44707 - protein, 10 aa, Artificial Sequence
  Description of Artificial Sequence: Synthetic peptide
  Seed: KDPKKTGGPI
KPPKKTGGPL

SEQ ID NO: 44708 - protein, 10 aa, Artificial Sequence
  Description of Artificial Sequence: Synthetic peptide
  Seed: KDPKKTGGPI
KPPKKTGGPM

SEQ ID NO: 44709 - protein, 10 aa, Artificial Sequence
  Description of Artificial Sequence: Synthetic peptide
  Seed: KDPKKTGGPI
KPPKKTGGPF

SEQ ID NO: 44710 - protein, 10 aa, Artificial Sequence
  Description of Artificial Sequence: Synthetic peptide
  Seed: KDPKKTGGPI
KPPKKTGGPT

SEQ ID NO: 44711 - protein, 10 aa, Artificial Sequence
  Description of Artificial Sequence: Synthetic peptide
  Seed: KDPKKTGGPI
KPPKKTGGPV

SEQ ID NO: 44712 - protein, 10 aa, Artificial Sequence
  Description of Artificial Sequence: Synthetic peptide
  Seed: KDPKKTGGPI
KSPKKTGGPA

SEQ ID NO: 44713 - protein, 10 aa, Artificial Sequence
  Description of Artificial Sequence: Synthetic peptide
  Seed: KDPKKTGGPI
KSPKKTGGPC

SEQ ID NO: 44714 - protein, 10 aa, Artificial Sequence
  Description of Artificial Sequence: Synthetic peptide
  Seed: KDPKKTGGPI
KSPKKTGGPI

SEQ ID NO: 44715 - protein, 10 aa, Artificial Sequence
  Description of Artificial Sequence: Synthetic peptide
  Seed: KDPKKTGGPI
KSPKKTGGPL

SEQ ID NO: 44716 - protein, 10 aa, Artificial Sequence
  Description of Artificial Sequence: Synthetic peptide
  Seed: KDPKKTGGPI
KSPKKTGGPF

SEQ ID NO: 44717 - protein, 11 aa, Artificial Sequence
  Description of Artificial Sequence: Synthetic peptide
  Seed: KEEIRRIWRQA
KFEIRRIWRQI

SEQ ID NO: 44718 - protein, 10 aa, Artificial Sequence
  Description of Artificial Sequence: Synthetic peptide
  Seed: KDPKKTGGPI
KSPKKTGGPT

SEQ ID NO: 44719 - protein, 10 aa, Artificial Sequence
  Description of Artificial Sequence: Synthetic peptide
  Seed: KDPKKTGGPI
KSPKKTGGPV

SEQ ID NO: 44720 - protein, 10 aa, Artificial Sequence
  Description of Artificial Sequence: Synthetic peptide
  Seed: KDPKKTGGPI
KTPKKTGGPA

SEQ ID NO: 44721 - protein, 10 aa, Artificial Sequence
  Description of Artificial Sequence: Synthetic peptide
  Seed: KDPKKTGGPI
KTPKKTGGPC

SEQ ID NO: 44722 - protein, 10 aa, Artificial Sequence
  Description of Artificial Sequence: Synthetic peptide
  Seed: KDPKKTGGPI
KTPKKTGGPI

SEQ ID NO: 44723 - protein, 10 aa, Artificial Sequence
  Description of Artificial Sequence: Synthetic peptide
  Seed: KDPKKTGGPI
KTPKKTGGPL

SEQ ID NO: 44724 - protein, 10 aa, Artificial Sequence
  Description of Artificial Sequence: Synthetic peptide
  Seed: KDPKKTGGPI
KTPKKTGGPM

SEQ ID NO: 44725 - protein, 10 aa, Artificial Sequence
  Description of Artificial Sequence: Synthetic peptide
  Seed: KDPKKTGGPI
KTPKKTGGPF

SEQ ID NO: 44726 - protein, 10 aa, Artificial Sequence
  Description of Artificial Sequence: Synthetic peptide
  Seed: KDPKKTGGPI
KTPKKTGGPT

SEQ ID NO: 44727 - protein, 10 aa, Artificial Sequence
  Description of Artificial Sequence: Synthetic peptide
  Seed: KDPKKTGGPI
KPPKKTGGPI

SEQ ID NO: 44728 - protein, 10 aa, Artificial Sequence
  Description of Artificial Sequence: Synthetic peptide
  Seed: KDPKKTGGPI
KPPKKTGGPC

SEQ ID NO: 44729 - protein, 10 aa, Artificial Sequence
  Description of Artificial Sequence: Synthetic peptide
  Seed: KDPKKTGGPI
KPPKKTGGPA

SEQ ID NO: 44730 - protein, 10 aa, Artificial Sequence
  Description of Artificial Sequence: Synthetic peptide
  Seed: KDPKKTGGPI
KFPKKTGGPV

SEQ ID NO: 44731 - protein, 10 aa, Artificial Sequence
  Description of Artificial Sequence: Synthetic peptide
  Seed: KDPKKTGGPI
KKPKKTGGPM

SEQ ID NO: 44732 - protein, 10 aa, Artificial Sequence
  Description of Artificial Sequence: Synthetic peptide
  Seed: KDPKKTGGPI
KKPKKTGGPF

SEQ ID NO: 44733 - protein, 10 aa, Artificial Sequence
  Description of Artificial Sequence: Synthetic peptide
  Seed: KDPKKTGGPI
KKPKKTGGPT

SEQ ID NO: 44734 - protein, 10 aa, Artificial Sequence
  Description of Artificial Sequence: Synthetic peptide
  Seed: KDPKKTGGPI
KKPKKTGGPV

SEQ ID NO: 44735 - protein, 10 aa, Artificial Sequence
  Description of Artificial Sequence: Synthetic peptide
  Seed: KDPKKTGGPI
KMPKKTGGPA

SEQ ID NO: 44736 - protein, 10 aa, Artificial Sequence
  Description of Artificial Sequence: Synthetic peptide
  Seed: KDPKKTGGPI
KMPKKTGGPC

SEQ ID NO: 44737 - protein, 10 aa, Artificial Sequence
  Description of Artificial Sequence: Synthetic peptide
  Seed: KDPKKTGGPI
KMPKKTGGPI

SEQ ID NO: 44738 - protein, 10 aa, Artificial Sequence
  Description of Artificial Sequence: Synthetic peptide
  Seed: KDPKKTGGPI
KMPKKTGGPL

SEQ ID NO: 44739 - protein, 10 aa, Artificial Sequence
  Description of Artificial Sequence: Synthetic peptide
  Seed: KDPKKTGGPI
KMPKKTGGPM

SEQ ID NO: 44740 - protein, 10 aa, Artificial Sequence
  Description of Artificial Sequence: Synthetic peptide
  Seed: KDPKKTGGPI
KMPKKTGGPF

SEQ ID NO: 44741 - protein, 10 aa, Artificial Sequence
  Description of Artificial Sequence: Synthetic peptide
  Seed: KDPKKTGGPI
KMPKKTGGPT

SEQ ID NO: 44742 - protein, 10 aa, Artificial Sequence
  Description of Artificial Sequence: Synthetic peptide
  Seed: KDPKKTGGPI
KMPKKTGGPV

SEQ ID NO: 44743 - protein, 10 aa, Artificial Sequence
  Description of Artificial Sequence: Synthetic peptide
  Seed: KDPKKTGGPI
KFPKKTGGPA

SEQ ID NO: 44744 - protein, 10 aa, Artificial Sequence
  Description of Artificial Sequence: Synthetic peptide
  Seed: KDPKKTGGPI
KFPKKTGGPC

SEQ ID NO: 44745 - protein, 10 aa, Artificial Sequence
  Description of Artificial Sequence: Synthetic peptide
  Seed: KDPKKTGGPI
KFPKKTGGPI

SEQ ID NO: 44746 - protein, 10 aa, Artificial Sequence
  Description of Artificial Sequence: Synthetic peptide
  Seed: KDPKKTGGPI
KFPKKTGGPL

SEQ ID NO: 44747 - protein, 10 aa, Artificial Sequence
  Description of Artificial Sequence: Synthetic peptide
  Seed: KDPKKTGGPI
KFPKKTGGPM

SEQ ID NO: 44748 - protein, 10 aa, Artificial Sequence
  Description of Artificial Sequence: Synthetic peptide
  Seed: KDPKKTGGPI
KFPKKTGGPF

SEQ ID NO: 44749 - protein, 10 aa, Artificial Sequence
  Description of Artificial Sequence: Synthetic peptide
  Seed: KDPKKTGGPI
KFPKKTGGPT

SEQ ID NO: 44750 - protein, 10 aa, Artificial Sequence
  Description of Artificial Sequence: Synthetic peptide
  Seed: KDPKKTGGPI
KTPKKTGGPV

SEQ ID NO: 44751 - protein, 10 aa, Artificial Sequence
  Description of Artificial Sequence: Synthetic peptide
  Seed: KDPKKTGGPI
KWPKKTGGPA

SEQ ID NO: 44752 - protein, 10 aa, Artificial Sequence
  Description of Artificial Sequence: Synthetic peptide
  Seed: KDPKKTGGPI
KWPKKTGGPC

SEQ ID NO: 44753 - protein, 11 aa, Artificial Sequence
  Description of Artificial Sequence: Synthetic peptide
  Seed: KEEIRRIWRQA
KAEIRRIWRQR

SEQ ID NO: 44754 - protein, 11 aa, Artificial Sequence
  Description of Artificial Sequence: Synthetic peptide
  Seed: KEEIRRIWRQA
KNEIRRIWRQR

SEQ ID NO: 44755 - protein, 11 aa, Artificial Sequence
  Description of Artificial Sequence: Synthetic peptide
  Seed: KEEIRRIWRQA
KDEIRRIWRQR

SEQ ID NO: 44756 - protein, 11 aa, Artificial Sequence
  Description of Artificial Sequence: Synthetic peptide
  Seed: KEEIRRIWRQA
KCEIRRIWRQR

SEQ ID NO: 44757 - protein, 11 aa, Artificial Sequence
  Description of Artificial Sequence: Synthetic peptide
  Seed: KEEIRRIWRQA
KQEIRRIWRQR

SEQ ID NO: 44758 - protein, 11 aa, Artificial Sequence
  Description of Artificial Sequence: Synthetic peptide
  Seed: KEEIRRIWRQA
KGEIRRIWRQR

SEQ ID NO: 44759 - protein, 11 aa, Artificial Sequence
  Description of Artificial Sequence: Synthetic peptide
  Seed: KEEIRRIWRQA
KHEIRRIWRQR

SEQ ID NO: 44760 - protein, 11 aa, Artificial Sequence
  Description of Artificial Sequence: Synthetic peptide
  Seed: KEEIRRIWRQA
KIEIRRIWRQR

SEQ ID NO: 44761 - protein, 11 aa, Artificial Sequence
  Description of Artificial Sequence: Synthetic peptide
  Seed: KEEIRRIWRQA
KLEIRRIWRQR

SEQ ID NO: 44762 - protein, 11 aa, Artificial Sequence
  Description of Artificial Sequence: Synthetic peptide
  Seed: KEEIRRIWRQA
KLEIRRIWRQK

SEQ ID NO: 44763 - protein, 11 aa, Artificial Sequence
  Description of Artificial Sequence: Synthetic peptide
  Seed: KEEIRRIWRQA
KKEIRRIWRQR

SEQ ID NO: 44764 - protein, 11 aa, Artificial Sequence
  Description of Artificial Sequence: Synthetic peptide
  Seed: KEEIRRIWRQA
KKEIRRIWRQV

SEQ ID NO: 44765 - protein, 11 aa, Artificial Sequence
  Description of Artificial Sequence: Synthetic peptide
  Seed: KEEIRRIWRQA
KMEIRRIWRQA

SEQ ID NO: 44766 - protein, 11 aa, Artificial Sequence
  Description of Artificial Sequence: Synthetic peptide
  Seed: KEEIRRIWRQA
KMEIRRIWRQK

SEQ ID NO: 44767 - protein, 11 aa, Artificial Sequence
  Description of Artificial Sequence: Synthetic peptide
  Seed: KEEIRRIWRQA
KMEIRRIWRQM

SEQ ID NO: 44768 - protein, 11 aa, Artificial Sequence
  Description of Artificial Sequence: Synthetic peptide
  Seed: KEEIRRIWRQA
KMEIRRIWRQV

SEQ ID NO: 44769 - protein, 11 aa, Artificial Sequence
  Description of Artificial Sequence: Synthetic peptide
  Seed: KEEIRRIWRQA
KFEIRRIWRQA

SEQ ID NO: 44770 - protein, 11 aa, Artificial Sequence
  Description of Artificial Sequence: Synthetic peptide
  Seed: KEEIRRIWRQA
KREIRRIWRQR

SEQ ID NO: 44771 - protein, 10 aa, Artificial Sequence
  Description of Artificial Sequence: Synthetic peptide
  Seed: KDPKKTGGPI
KVPKKTGGPV

SEQ ID NO: 44772 - protein, 10 aa, Artificial Sequence
  Description of Artificial Sequence: Synthetic peptide
  Seed: KDPKKTGGPI
KWPKKTGGPI

SEQ ID NO: 44773 - protein, 10 aa, Artificial Sequence
  Description of Artificial Sequence: Synthetic peptide
  Seed: KDPKKTGGPI
KVPKKTGGPT

SEQ ID NO: 44774 - protein, 10 aa, Artificial Sequence
  Description of Artificial Sequence: Synthetic peptide
  Seed: KDPKKTGGPI
KWPKKTGGPL

SEQ ID NO: 44775 - protein, 10 aa, Artificial Sequence
  Description of Artificial Sequence: Synthetic peptide
  Seed: KDPKKTGGPI
KWPKKTGGPM

SEQ ID NO: 44776 - protein, 10 aa, Artificial Sequence
  Description of Artificial Sequence: Synthetic peptide
  Seed: KDPKKTGGPI
KWPKKTGGPF

SEQ ID NO: 44777 - protein, 10 aa, Artificial Sequence
  Description of Artificial Sequence: Synthetic peptide
  Seed: KDPKKTGGPI
KWPKKTGGPT

SEQ ID NO: 44778 - protein, 10 aa, Artificial Sequence
  Description of Artificial Sequence: Synthetic peptide
  Seed: KDPKKTGGPI
KWPKKTGGPV

SEQ ID NO: 44779 - protein, 10 aa, Artificial Sequence
  Description of Artificial Sequence: Synthetic peptide
  Seed: KDPKKTGGPI
KYPKKTGGPA

SEQ ID NO: 44780 - protein, 10 aa, Artificial Sequence
  Description of Artificial Sequence: Synthetic peptide
  Seed: KDPKKTGGPI
KYPKKTGGPC

SEQ ID NO: 44781 - protein, 10 aa, Artificial Sequence
  Description of Artificial Sequence: Synthetic peptide
  Seed: KDPKKTGGPI
KYPKKTGGPI

SEQ ID NO: 44782 - protein, 10 aa, Artificial Sequence
  Description of Artificial Sequence: Synthetic peptide
  Seed: KDPKKTGGPI
KYPKKTGGPL

SEQ ID NO: 44783 - protein, 10 aa, Artificial Sequence
  Description of Artificial Sequence: Synthetic peptide
  Seed: KDPKKTGGPI
KYPKKTGGPM

SEQ ID NO: 44784 - protein, 10 aa, Artificial Sequence
  Description of Artificial Sequence: Synthetic peptide
  Seed: KDPKKTGGPI
KYPKKTGGPF

SEQ ID NO: 44785 - protein, 10 aa, Artificial Sequence
  Description of Artificial Sequence: Synthetic peptide
  Seed: KDPKKTGGPI
KYPKKTGGPT

SEQ ID NO: 44786 - protein, 10 aa, Artificial Sequence
  Description of Artificial Sequence: Synthetic peptide
  Seed: KDPKKTGGPI
KYPKKTGGPV

SEQ ID NO: 44787 - protein, 10 aa, Artificial Sequence
  Description of Artificial Sequence: Synthetic peptide
  Seed: KDPKKTGGPI
KVPKKTGGPA

SEQ ID NO: 44788 - protein, 10 aa, Artificial Sequence
  Description of Artificial Sequence: Synthetic peptide
  Seed: KDPKKTGGPI
KVPKKTGGPC

SEQ ID NO: 44789 - protein, 10 aa, Artificial Sequence
  Description of Artificial Sequence: Synthetic peptide
  Seed: KDPKKTGGPI
KVPKKTGGPI

SEQ ID NO: 44790 - protein, 10 aa, Artificial Sequence
  Description of Artificial Sequence: Synthetic peptide
  Seed: KDPKKTGGPI
KVPKKTGGPL

SEQ ID NO: 44791 - protein, 10 aa, Artificial Sequence
  Description of Artificial Sequence: Synthetic peptide
  Seed: KDPKKTGGPI
KVPKKTGGPM

SEQ ID NO: 44792 - protein, 10 aa, Artificial Sequence
  Description of Artificial Sequence: Synthetic peptide
  Seed: KDPKKTGGPI
KVPKKTGGPF

SEQ ID NO: 44793 - protein, 10 aa, Artificial Sequence
  Description of Artificial Sequence: Synthetic peptide
  Seed: KATNPIVPSF
KETNPIVPSY

SEQ ID NO: 44794 - protein, 10 aa, Artificial Sequence
  Description of Artificial Sequence: Synthetic peptide
  Seed: KATNPIVPSF
KETNPIVPSS

SEQ ID NO: 44795 - protein, 9 aa, Artificial Sequence
  Description of Artificial Sequence: Synthetic peptide
  Seed: ISVQPTFSV
IAVQPTFSI

SEQ ID NO: 44796 - protein, 8 aa, Artificial Sequence
  Description of Artificial Sequence: Synthetic peptide
  Seed: ITIERMVL
ITIERMVY

SEQ ID NO: 44797 - protein, 8 aa, Artificial Sequence
  Description of Artificial Sequence: Synthetic peptide
  Seed: ITIERMVL
IAIERMVV

SEQ ID NO: 44798 - protein, 8 aa, Artificial Sequence
  Description of Artificial Sequence: Synthetic peptide
  Seed: ITIERMVL
ISIERMVI

SEQ ID NO: 44799 - protein, 8 aa, Artificial Sequence
  Description of Artificial Sequence: Synthetic peptide
  Seed: ITIERMVL
ISIERMVL

SEQ ID NO: 44800 - protein, 8 aa, Artificial Sequence
  Description of Artificial Sequence: Synthetic peptide
  Seed: ITIERMVL
ISIERMVM

SEQ ID NO: 44801 - protein, 8 aa, Artificial Sequence
  Description of Artificial Sequence: Synthetic peptide
  Seed: ITIERMVL
ISIERMVF

SEQ ID NO: 44802 - protein, 8 aa, Artificial Sequence
  Description of Artificial Sequence: Synthetic peptide
  Seed: ITIERMVL
ISIERMVY

SEQ ID NO: 44803 - protein, 8 aa, Artificial Sequence
  Description of Artificial Sequence: Synthetic peptide
  Seed: ITIERMVL
ISIERMVV

SEQ ID NO: 44804 - protein, 8 aa, Artificial Sequence
  Description of Artificial Sequence: Synthetic peptide
  Seed: ITIERMVL
ITIERMVM

SEQ ID NO: 44805 - protein, 8 aa, Artificial Sequence
  Description of Artificial Sequence: Synthetic peptide
  Seed: ITIERMVL
ITIERMVF

SEQ ID NO: 44806 - protein, 8 aa, Artificial Sequence
  Description of Artificial Sequence: Synthetic peptide
  Seed: ITIERMVL
IVIERMVM

SEQ ID NO: 44807 - protein, 10 aa, Artificial Sequence
  Description of Artificial Sequence: Synthetic peptide
  Seed: ITIERMVLSA
IIIERMVLSL

SEQ ID NO: 44808 - protein, 10 aa, Artificial Sequence
  Description of Artificial Sequence: Synthetic peptide
  Seed: ITIERMVLSA
IAIERMVLSV

SEQ ID NO: 44809 - protein, 10 aa, Artificial Sequence
  Description of Artificial Sequence: Synthetic peptide
  Seed: ITIERMVLSA
IQIERMVLSA

SEQ ID NO: 44810 - protein, 10 aa, Artificial Sequence
  Description of Artificial Sequence: Synthetic peptide
  Seed: ITIERMVLSA
IQIERMVLSI

SEQ ID NO: 44811 - protein, 10 aa, Artificial Sequence
  Description of Artificial Sequence: Synthetic peptide
  Seed: ITIERMVLSA
IQIERMVLSL

SEQ ID NO: 44812 - protein, 10 aa, Artificial Sequence
  Description of Artificial Sequence: Synthetic peptide
  Seed: ITIERMVLSA
IQIERMVLSM

SEQ ID NO: 44813 - protein, 10 aa, Artificial Sequence
  Description of Artificial Sequence: Synthetic peptide
  Seed: ITIERMVLSA
IQIERMVLSF

SEQ ID NO: 44814 - protein, 10 aa, Artificial Sequence
  Description of Artificial Sequence: Synthetic peptide
  Seed: ITIERMVLSA
IQIERMVLST

SEQ ID NO: 44815 - protein, 10 aa, Artificial Sequence
  Description of Artificial Sequence: Synthetic peptide
  Seed: ITIERMVLSA
IQIERMVLSV

SEQ ID NO: 44816 - protein, 10 aa, Artificial Sequence
  Description of Artificial Sequence: Synthetic peptide
  Seed: ITIERMVLSA
IIIERMVLSA

SEQ ID NO: 44817 - protein, 8 aa, Artificial Sequence
  Description of Artificial Sequence: Synthetic peptide
  Seed: ITIERMVL
IAIERMVY

SEQ ID NO: 44818 - protein, 8 aa, Artificial Sequence
  Description of Artificial Sequence: Synthetic peptide
  Seed: ITIERMVL
IAIERMVF

SEQ ID NO: 44819 - protein, 8 aa, Artificial Sequence
  Description of Artificial Sequence: Synthetic peptide
  Seed: ITIERMVL
IAIERMVM

SEQ ID NO: 44820 - protein, 8 aa, Artificial Sequence
  Description of Artificial Sequence: Synthetic peptide
  Seed: ITIERMVL
IAIERMVL

SEQ ID NO: 44821 - protein, 11 aa, Artificial Sequence
  Description of Artificial Sequence: Synthetic peptide
  Seed: ISVQPTFSVQR
IRVQPTFSVQK

SEQ ID NO: 44822 - protein, 11 aa, Artificial Sequence
  Description of Artificial Sequence: Synthetic peptide
  Seed: ISVQPTFSVQR
ICVQPTFSVQR

SEQ ID NO: 44823 - protein, 11 aa, Artificial Sequence
  Description of Artificial Sequence: Synthetic peptide
  Seed: ISVQPTFSVQR
IQVQPTFSVQR

SEQ ID NO: 44824 - protein, 11 aa, Artificial Sequence
  Description of Artificial Sequence: Synthetic peptide
  Seed: ISVQPTFSVQR
IEVQPTFSVQR

SEQ ID NO: 44825 - protein, 11 aa, Artificial Sequence
  Description of Artificial Sequence: Synthetic peptide
  Seed: ISVQPTFSVQR
IGVQPTFSVQR

SEQ ID NO: 44826 - protein, 11 aa, Artificial Sequence
  Description of Artificial Sequence: Synthetic peptide
  Seed: ISVQPTFSVQR
IHVQPTFSVQR

SEQ ID NO: 44827 - protein, 11 aa, Artificial Sequence
  Description of Artificial Sequence: Synthetic peptide
  Seed: ISVQPTFSVQR
IIVQPTFSVQR

SEQ ID NO: 44828 - protein, 11 aa, Artificial Sequence
  Description of Artificial Sequence: Synthetic peptide
  Seed: ISVQPTFSVQR
ILVQPTFSVQR

SEQ ID NO: 44829 - protein, 11 aa, Artificial Sequence
  Description of Artificial Sequence: Synthetic peptide
  Seed: ISVQPTFSVQR
IKVQPTFSVQR

SEQ ID NO: 44830 - protein, 11 aa, Artificial Sequence
  Description of Artificial Sequence: Synthetic peptide
  Seed: ISVQPTFSVQR
IMVQPTFSVQR

SEQ ID NO: 44831 - protein, 11 aa, Artificial Sequence
  Description of Artificial Sequence: Synthetic peptide
  Seed: ISVQPTFSVQR
IMVQPTFSVQK

SEQ ID NO: 44832 - protein, 11 aa, Artificial Sequence
  Description of Artificial Sequence: Synthetic peptide
  Seed: ISVQPTFSVQR
IFVQPTFSVQR

SEQ ID NO: 44833 - protein, 11 aa, Artificial Sequence
  Description of Artificial Sequence: Synthetic peptide
  Seed: ISVQPTFSVQR
IFVQPTFSVQK

SEQ ID NO: 44834 - protein, 11 aa, Artificial Sequence
  Description of Artificial Sequence: Synthetic peptide
  Seed: ISVQPTFSVQR
ITVQPTFSVQR

SEQ ID NO: 44835 - protein, 11 aa, Artificial Sequence
  Description of Artificial Sequence: Synthetic peptide
  Seed: ISVQPTFSVQR
IWVQPTFSVQR

SEQ ID NO: 44836 - protein, 11 aa, Artificial Sequence
  Description of Artificial Sequence: Synthetic peptide
  Seed: ISVQPTFSVQR
IYVQPTFSVQR

SEQ ID NO: 44837 - protein, 11 aa, Artificial Sequence
  Description of Artificial Sequence: Synthetic peptide
  Seed: ISVQPTFSVQR
IYVQPTFSVQK

SEQ ID NO: 44838 - protein, 11 aa, Artificial Sequence
  Description of Artificial Sequence: Synthetic peptide
  Seed: ISVQPTFSVQR
IVVQPTFSVQR

SEQ ID NO: 44839 - protein, 8 aa, Artificial Sequence
  Description of Artificial Sequence: Synthetic peptide
  Seed: ITIERMVL
IAIERMVI

SEQ ID NO: 44840 - protein, 10 aa, Artificial Sequence
  Description of Artificial Sequence: Synthetic peptide
  Seed: ITIERMVLSA
IIIERMVLSI

SEQ ID NO: 44841 - protein, 10 aa, Artificial Sequence
  Description of Artificial Sequence: Synthetic peptide
  Seed: ITIERMVLSA
IIIERMVLST

SEQ ID NO: 44842 - protein, 11 aa, Artificial Sequence
  Description of Artificial Sequence: Synthetic peptide
  Seed: ITIERMVLSAF
IIIERMVLSAF

SEQ ID NO: 44843 - protein, 11 aa, Artificial Sequence
  Description of Artificial Sequence: Synthetic peptide
  Seed: ITIERMVLSAF
IQIERMVLSAL

SEQ ID NO: 44844 - protein, 10 aa, Artificial Sequence
  Description of Artificial Sequence: Synthetic peptide
  Seed: ITIERMVLSA
IVIERMVLSV

SEQ ID NO: 44845 - protein, 11 aa, Artificial Sequence
  Description of Artificial Sequence: Synthetic peptide
  Seed: ITIERMVLSAF
IAIERMVLSAF

SEQ ID NO: 44846 - protein, 11 aa, Artificial Sequence
  Description of Artificial Sequence: Synthetic peptide
  Seed: ITIERMVLSAF
IAIERMVLSAW

SEQ ID NO: 44847 - protein, 11 aa, Artificial Sequence
  Description of Artificial Sequence: Synthetic peptide
  Seed: ITIERMVLSAF
IAIERMVLSAY

SEQ ID NO: 44848 - protein, 11 aa, Artificial Sequence
  Description of Artificial Sequence: Synthetic peptide
  Seed: ITIERMVLSAF
IRIERMVLSAF

SEQ ID NO: 44849 - protein, 11 aa, Artificial Sequence
  Description of Artificial Sequence: Synthetic peptide
  Seed: ITIERMVLSAF
IRIERMVLSAY

SEQ ID NO: 44850 - protein, 11 aa, Artificial Sequence
  Description of Artificial Sequence: Synthetic peptide
  Seed: ITIERMVLSAF
INIERMVLSAF

SEQ ID NO: 44851 - protein, 11 aa, Artificial Sequence
  Description of Artificial Sequence: Synthetic peptide
  Seed: ITIERMVLSAF
INIERMVLSAY

SEQ ID NO: 44852 - protein, 11 aa, Artificial Sequence
  Description of Artificial Sequence: Synthetic peptide
  Seed: ITIERMVLSAF
IQIERMVLSAI

SEQ ID NO: 44853 - protein, 11 aa, Artificial Sequence
  Description of Artificial Sequence: Synthetic peptide
  Seed: ITIERMVLSAF
IQIERMVLSAM

SEQ ID NO: 44854 - protein, 10 aa, Artificial Sequence
  Description of Artificial Sequence: Synthetic peptide
  Seed: ITIERMVLSA
IIIERMVLSV

SEQ ID NO: 44855 - protein, 11 aa, Artificial Sequence
  Description of Artificial Sequence: Synthetic peptide
  Seed: ITIERMVLSAF
IQIERMVLSAF

SEQ ID NO: 44856 - protein, 11 aa, Artificial Sequence
  Description of Artificial Sequence: Synthetic peptide
  Seed: ITIERMVLSAF
IQIERMVLSAW

SEQ ID NO: 44857 - protein, 11 aa, Artificial Sequence
  Description of Artificial Sequence: Synthetic peptide
  Seed: ITIERMVLSAF
IQIERMVLSAY

SEQ ID NO: 44858 - protein, 11 aa, Artificial Sequence
  Description of Artificial Sequence: Synthetic peptide
  Seed: ITIERMVLSAF
IEIERMVLSAF

SEQ ID NO: 44859 - protein, 11 aa, Artificial Sequence
  Description of Artificial Sequence: Synthetic peptide
  Seed: ITIERMVLSAF
IEIERMVLSAY

SEQ ID NO: 44860 - protein, 11 aa, Artificial Sequence
  Description of Artificial Sequence: Synthetic peptide
  Seed: ITIERMVLSAF
IGIERMVLSAF

SEQ ID NO: 44861 - protein, 11 aa, Artificial Sequence
  Description of Artificial Sequence: Synthetic peptide
  Seed: ITIERMVLSAF
IGIERMVLSAY

SEQ ID NO: 44862 - protein, 11 aa, Artificial Sequence
  Description of Artificial Sequence: Synthetic peptide
  Seed: ITIERMVLSAF
IHIERMVLSAM

SEQ ID NO: 44863 - protein, 11 aa, Artificial Sequence
  Description of Artificial Sequence: Synthetic peptide
  Seed: ITIERMVLSAF
IHIERMVLSAF

SEQ ID NO: 44864 - protein, 10 aa, Artificial Sequence
  Description of Artificial Sequence: Synthetic peptide
  Seed: ITIERMVLSA
IVIERMVLSL

SEQ ID NO: 44865 - protein, 10 aa, Artificial Sequence
  Description of Artificial Sequence: Synthetic peptide
  Seed: ITIERMVLSA
IVIERMVLSI

SEQ ID NO: 44866 - protein, 10 aa, Artificial Sequence
  Description of Artificial Sequence: Synthetic peptide
  Seed: ITIERMVLSA
IVIERMVLSA

SEQ ID NO: 44867 - protein, 10 aa, Artificial Sequence
  Description of Artificial Sequence: Synthetic peptide
  Seed: ITIERMVLSA
ITIERMVLSV

SEQ ID NO: 44868 - protein, 10 aa, Artificial Sequence
  Description of Artificial Sequence: Synthetic peptide
  Seed: ITIERMVLSA
ILIERMVLSA

SEQ ID NO: 44869 - protein, 10 aa, Artificial Sequence
  Description of Artificial Sequence: Synthetic peptide
  Seed: ITIERMVLSA
ILIERMVLSC

SEQ ID NO: 44870 - protein, 10 aa, Artificial Sequence
  Description of Artificial Sequence: Synthetic peptide
  Seed: ITIERMVLSA
ILIERMVLSI

SEQ ID NO: 44871 - protein, 10 aa, Artificial Sequence
  Description of Artificial Sequence: Synthetic peptide
  Seed: ITIERMVLSA
ILIERMVLSL

SEQ ID NO: 44872 - protein, 10 aa, Artificial Sequence
  Description of Artificial Sequence: Synthetic peptide
  Seed: ITIERMVLSA
ILIERMVLSM

SEQ ID NO: 44873 - protein, 10 aa, Artificial Sequence
  Description of Artificial Sequence: Synthetic peptide
  Seed: ITIERMVLSA
ILIERMVLSS

SEQ ID NO: 44874 - protein, 10 aa, Artificial Sequence
  Description of Artificial Sequence: Synthetic peptide
  Seed: ITIERMVLSA
ILIERMVLST

SEQ ID NO: 44875 - protein, 10 aa, Artificial Sequence
  Description of Artificial Sequence: Synthetic peptide
  Seed: ITIERMVLSA
ILIERMVLSV

SEQ ID NO: 44876 - protein, 10 aa, Artificial Sequence
  Description of Artificial Sequence: Synthetic peptide
  Seed: ITIERMVLSA
IMIERMVLSA

SEQ ID NO: 44877 - protein, 10 aa, Artificial Sequence
  Description of Artificial Sequence: Synthetic peptide
  Seed: ITIERMVLSA
IMIERMVLSC

SEQ ID NO: 44878 - protein, 10 aa, Artificial Sequence
  Description of Artificial Sequence: Synthetic peptide
  Seed: ITIERMVLSA
IMIERMVLSI

SEQ ID NO: 44879 - protein, 10 aa, Artificial Sequence
  Description of Artificial Sequence: Synthetic peptide
  Seed: ITIERMVLSA
IMIERMVLSL

SEQ ID NO: 44880 - protein, 10 aa, Artificial Sequence
  Description of Artificial Sequence: Synthetic peptide
  Seed: ITIERMVLSA
IMIERMVLSM

SEQ ID NO: 44881 - protein, 10 aa, Artificial Sequence
  Description of Artificial Sequence: Synthetic peptide
  Seed: ITIERMVLSA
IMIERMVLSS

SEQ ID NO: 44882 - protein, 10 aa, Artificial Sequence
  Description of Artificial Sequence: Synthetic peptide
  Seed: ITIERMVLSA
IMIERMVLST

SEQ ID NO: 44883 - protein, 10 aa, Artificial Sequence
  Description of Artificial Sequence: Synthetic peptide
  Seed: ITIERMVLSA
IMIERMVLSV

SEQ ID NO: 44884 - protein, 10 aa, Artificial Sequence
  Description of Artificial Sequence: Synthetic peptide
  Seed: ITIERMVLSA
ISIERMVLSV

SEQ ID NO: 44885 - protein, 10 aa, Artificial Sequence
  Description of Artificial Sequence: Synthetic peptide
  Seed: ITIERMVLSA
ITIERMVLSI

SEQ ID NO: 44886 - protein, 10 aa, Artificial Sequence
  Description of Artificial Sequence: Synthetic peptide
  Seed: ITIERMVLSA
ITIERMVLSL

SEQ ID NO: 44887 - protein, 11 aa, Artificial Sequence
  Description of Artificial Sequence: Synthetic peptide
  Seed: ISVQPTFSVQR
IRVQPTFSVQR

SEQ ID NO: 44888 - protein, 11 aa, Artificial Sequence
  Description of Artificial Sequence: Synthetic peptide
  Seed: ISVQPTFSVQR
IAVQPTFSVQR

SEQ ID NO: 44889 - protein, 9 aa, Artificial Sequence
  Description of Artificial Sequence: Synthetic peptide
  Seed: ISVQPTFSV
IVVQPTFSV

SEQ ID NO: 44890 - protein, 9 aa, Artificial Sequence
  Description of Artificial Sequence: Synthetic peptide
  Seed: ISVQPTFSV
IIVQPTFSM

SEQ ID NO: 44891 - protein, 9 aa, Artificial Sequence
  Description of Artificial Sequence: Synthetic peptide
  Seed: ISVQPTFSV
IQVQPTFSV

SEQ ID NO: 44892 - protein, 9 aa, Artificial Sequence
  Description of Artificial Sequence: Synthetic peptide
  Seed: ISVQPTFSV
IGVQPTFSL

SEQ ID NO: 44893 - protein, 9 aa, Artificial Sequence
  Description of Artificial Sequence: Synthetic peptide
  Seed: ISVQPTFSV
IGVQPTFSM

SEQ ID NO: 44894 - protein, 9 aa, Artificial Sequence
  Description of Artificial Sequence: Synthetic peptide
  Seed: ISVQPTFSV
IGVQPTFSF

SEQ ID NO: 44895 - protein, 9 aa, Artificial Sequence
  Description of Artificial Sequence: Synthetic peptide
  Seed: ISVQPTFSV
IGVQPTFSW

SEQ ID NO: 44896 - protein, 9 aa, Artificial Sequence
  Description of Artificial Sequence: Synthetic peptide
  Seed: ISVQPTFSV
IGVQPTFSY

SEQ ID NO: 44897 - protein, 9 aa, Artificial Sequence
  Description of Artificial Sequence: Synthetic peptide
  Seed: ISVQPTFSV
IIVQPTFSA

SEQ ID NO: 44898 - protein, 9 aa, Artificial Sequence
  Description of Artificial Sequence: Synthetic peptide
  Seed: ISVQPTFSV
IIVQPTFSI

SEQ ID NO: 44899 - protein, 9 aa, Artificial Sequence
  Description of Artificial Sequence: Synthetic peptide
  Seed: ISVQPTFSV
IIVQPTFSL

SEQ ID NO: 44900 - protein, 9 aa, Artificial Sequence
  Description of Artificial Sequence: Synthetic peptide
  Seed: ISVQPTFSV
IIVQPTFSF

SEQ ID NO: 44901 - protein, 9 aa, Artificial Sequence
  Description of Artificial Sequence: Synthetic peptide
  Seed: ISVQPTFSV
IVVQPTFSY

SEQ ID NO: 44902 - protein, 9 aa, Artificial Sequence
  Description of Artificial Sequence: Synthetic peptide
  Seed: ISVQPTFSV
IIVQPTFSW

SEQ ID NO: 44903 - protein, 9 aa, Artificial Sequence
  Description of Artificial Sequence: Synthetic peptide
  Seed: ISVQPTFSV
IIVQPTFSY

SEQ ID NO: 44904 - protein, 9 aa, Artificial Sequence
  Description of Artificial Sequence: Synthetic peptide
  Seed: ISVQPTFSV
IIVQPTFSV

SEQ ID NO: 44905 - protein, 9 aa, Artificial Sequence
  Description of Artificial Sequence: Synthetic peptide
  Seed: ISVQPTFSV
ILVQPTFSA

SEQ ID NO: 44906 - protein, 9 aa, Artificial Sequence
  Description of Artificial Sequence: Synthetic peptide
  Seed: ISVQPTFSV
ILVQPTFSC

SEQ ID NO: 44907 - protein, 9 aa, Artificial Sequence
  Description of Artificial Sequence: Synthetic peptide
  Seed: ISVQPTFSV
ILVQPTFSI

SEQ ID NO: 44908 - protein, 9 aa, Artificial Sequence
  Description of Artificial Sequence: Synthetic peptide
  Seed: ISVQPTFSV
ILVQPTFSL

SEQ ID NO: 44909 - protein, 9 aa, Artificial Sequence
  Description of Artificial Sequence: Synthetic peptide
  Seed: ISVQPTFSV
ILVQPTFSM

SEQ ID NO: 44910 - protein, 9 aa, Artificial Sequence
  Description of Artificial Sequence: Synthetic peptide
  Seed: ISVQPTFSV
ILVQPTFSF

SEQ ID NO: 44911 - protein, 9 aa, Artificial Sequence
  Description of Artificial Sequence: Synthetic peptide
  Seed: ISVQPTFSV
IQVQPTFSY

SEQ ID NO: 44912 - protein, 9 aa, Artificial Sequence
  Description of Artificial Sequence: Synthetic peptide
  Seed: ISVQPTFSV
IQVQPTFSW

SEQ ID NO: 44913 - protein, 9 aa, Artificial Sequence
  Description of Artificial Sequence: Synthetic peptide
  Seed: ISVQPTFSV
IQVQPTFST

SEQ ID NO: 44914 - protein, 9 aa, Artificial Sequence
  Description of Artificial Sequence: Synthetic peptide
  Seed: ISVQPTFSV
IQVQPTFSF

SEQ ID NO: 44915 - protein, 9 aa, Artificial Sequence
  Description of Artificial Sequence: Synthetic peptide
  Seed: ISVQPTFSV
IAVQPTFSL

SEQ ID NO: 44916 - protein, 9 aa, Artificial Sequence
  Description of Artificial Sequence: Synthetic peptide
  Seed: ISVQPTFSV
IAVQPTFSM

SEQ ID NO: 44917 - protein, 9 aa, Artificial Sequence
  Description of Artificial Sequence: Synthetic peptide
  Seed: ISVQPTFSV
IAVQPTFSF

SEQ ID NO: 44918 - protein, 9 aa, Artificial Sequence
  Description of Artificial Sequence: Synthetic peptide
  Seed: ISVQPTFSV
IAVQPTFSW

SEQ ID NO: 44919 - protein, 9 aa, Artificial Sequence
  Description of Artificial Sequence: Synthetic peptide
  Seed: ISVQPTFSV
IAVQPTFSY

SEQ ID NO: 44920 - protein, 9 aa, Artificial Sequence
  Description of Artificial Sequence: Synthetic peptide
  Seed: ISVQPTFSV
IAVQPTFSV

SEQ ID NO: 44921 - protein, 9 aa, Artificial Sequence
  Description of Artificial Sequence: Synthetic peptide
  Seed: ISVQPTFSV
INVQPTFSM

SEQ ID NO: 44922 - protein, 9 aa, Artificial Sequence
  Description of Artificial Sequence: Synthetic peptide
  Seed: ISVQPTFSV
INVQPTFSF

SEQ ID NO: 44923 - protein, 9 aa, Artificial Sequence
  Description of Artificial Sequence: Synthetic peptide
  Seed: ISVQPTFSV
INVQPTFSW

SEQ ID NO: 44924 - protein, 9 aa, Artificial Sequence
  Description of Artificial Sequence: Synthetic peptide
  Seed: ISVQPTFSV
INVQPTFSY

SEQ ID NO: 44925 - protein, 9 aa, Artificial Sequence
  Description of Artificial Sequence: Synthetic peptide
  Seed: ISVQPTFSV
ICVQPTFSL

SEQ ID NO: 44926 - protein, 9 aa, Artificial Sequence
  Description of Artificial Sequence: Synthetic peptide
  Seed: ISVQPTFSV
ICVQPTFSM

SEQ ID NO: 44927 - protein, 9 aa, Artificial Sequence
  Description of Artificial Sequence: Synthetic peptide
  Seed: ISVQPTFSV
ICVQPTFSF

SEQ ID NO: 44928 - protein, 9 aa, Artificial Sequence
  Description of Artificial Sequence: Synthetic peptide
  Seed: ISVQPTFSV
ICVQPTFSW

SEQ ID NO: 44929 - protein, 9 aa, Artificial Sequence
  Description of Artificial Sequence: Synthetic peptide
  Seed: ISVQPTFSV
ICVQPTFSY

SEQ ID NO: 44930 - protein, 9 aa, Artificial Sequence
  Description of Artificial Sequence: Synthetic peptide
  Seed: ISVQPTFSV
IQVQPTFSA

SEQ ID NO: 44931 - protein, 9 aa, Artificial Sequence
  Description of Artificial Sequence: Synthetic peptide
  Seed: ISVQPTFSV
IQVQPTFSI

SEQ ID NO: 44932 - protein, 9 aa, Artificial Sequence
  Description of Artificial Sequence: Synthetic peptide
  Seed: ISVQPTFSV
IQVQPTFSL

SEQ ID NO: 44933 - protein, 9 aa, Artificial Sequence
  Description of Artificial Sequence: Synthetic peptide
  Seed: ISVQPTFSV
IQVQPTFSM

SEQ ID NO: 44934 - protein, 9 aa, Artificial Sequence
  Description of Artificial Sequence: Synthetic peptide
  Seed: ISVQPTFSV
ILVQPTFSS

SEQ ID NO: 44935 - protein, 9 aa, Artificial Sequence
  Description of Artificial Sequence: Synthetic peptide
  Seed: ISVQPTFSV
ILVQPTFST

SEQ ID NO: 44936 - protein, 9 aa, Artificial Sequence
  Description of Artificial Sequence: Synthetic peptide
  Seed: ISVQPTFSV
ILVQPTFSW

SEQ ID NO: 44937 - protein, 9 aa, Artificial Sequence
  Description of Artificial Sequence: Synthetic peptide
  Seed: ISVQPTFSV
ISVQPTFSL

SEQ ID NO: 44938 - protein, 9 aa, Artificial Sequence
  Description of Artificial Sequence: Synthetic peptide
  Seed: ISVQPTFSV
ISVQPTFSF

SEQ ID NO: 44939 - protein, 9 aa, Artificial Sequence
  Description of Artificial Sequence: Synthetic peptide
  Seed: ISVQPTFSV
ISVQPTFSW

SEQ ID NO: 44940 - protein, 9 aa, Artificial Sequence
  Description of Artificial Sequence: Synthetic peptide
  Seed: ISVQPTFSV
ISVQPTFSY

SEQ ID NO: 44941 - protein, 9 aa, Artificial Sequence
  Description of Artificial Sequence: Synthetic peptide
  Seed: ISVQPTFSV
ITVQPTFSA

SEQ ID NO: 44942 - protein, 9 aa, Artificial Sequence
  Description of Artificial Sequence: Synthetic peptide
  Seed: ISVQPTFSV
ITVQPTFSI

SEQ ID NO: 44943 - protein, 9 aa, Artificial Sequence
  Description of Artificial Sequence: Synthetic peptide
  Seed: ISVQPTFSV
ITVQPTFSL

SEQ ID NO: 44944 - protein, 9 aa, Artificial Sequence
  Description of Artificial Sequence: Synthetic peptide
  Seed: ISVQPTFSV
ITVQPTFSM

SEQ ID NO: 44945 - protein, 9 aa, Artificial Sequence
  Description of Artificial Sequence: Synthetic peptide
  Seed: ISVQPTFSV
ITVQPTFSF

SEQ ID NO: 44946 - protein, 9 aa, Artificial Sequence
  Description of Artificial Sequence: Synthetic peptide
  Seed: ISVQPTFSV
ITVQPTFSW

SEQ ID NO: 44947 - protein, 9 aa, Artificial Sequence
  Description of Artificial Sequence: Synthetic peptide
  Seed: ISVQPTFSV
ITVQPTFSY

SEQ ID NO: 44948 - protein, 9 aa, Artificial Sequence
  Description of Artificial Sequence: Synthetic peptide
  Seed: ISVQPTFSV
ITVQPTFSV

SEQ ID NO: 44949 - protein, 9 aa, Artificial Sequence
  Description of Artificial Sequence: Synthetic peptide
  Seed: ISVQPTFSV
IYVQPTFSM

SEQ ID NO: 44950 - protein, 9 aa, Artificial Sequence
  Description of Artificial Sequence: Synthetic peptide
  Seed: ISVQPTFSV
IYVQPTFSW

SEQ ID NO: 44951 - protein, 9 aa, Artificial Sequence
  Description of Artificial Sequence: Synthetic peptide
  Seed: ISVQPTFSV
IVVQPTFSA

SEQ ID NO: 44952 - protein, 9 aa, Artificial Sequence
  Description of Artificial Sequence: Synthetic peptide
  Seed: ISVQPTFSV
IVVQPTFSI

SEQ ID NO: 44953 - protein, 9 aa, Artificial Sequence
  Description of Artificial Sequence: Synthetic peptide
  Seed: ISVQPTFSV
IVVQPTFSL

SEQ ID NO: 44954 - protein, 9 aa, Artificial Sequence
  Description of Artificial Sequence: Synthetic peptide
  Seed: ISVQPTFSV
IVVQPTFSM

SEQ ID NO: 44955 - protein, 9 aa, Artificial Sequence
  Description of Artificial Sequence: Synthetic peptide
  Seed: ISVQPTFSV
IVVQPTFSF

SEQ ID NO: 44956 - protein, 9 aa, Artificial Sequence
  Description of Artificial Sequence: Synthetic peptide
  Seed: ISVQPTFSV
IVVQPTFSW

SEQ ID NO: 44957 - protein, 9 aa, Artificial Sequence
  Description of Artificial Sequence: Synthetic peptide
  Seed: ISVQPTFSV
ISVQPTFSM

SEQ ID NO: 44958 - protein, 9 aa, Artificial Sequence
  Description of Artificial Sequence: Synthetic peptide
  Seed: ISVQPTFSV
ISVQPTFSI

SEQ ID NO: 44959 - protein, 9 aa, Artificial Sequence
  Description of Artificial Sequence: Synthetic peptide
  Seed: ISVQPTFSV
ILVQPTFSY

SEQ ID NO: 44960 - protein, 9 aa, Artificial Sequence
  Description of Artificial Sequence: Synthetic peptide
  Seed: ISVQPTFSV
ISVQPTFSH

SEQ ID NO: 44961 - protein, 9 aa, Artificial Sequence
  Description of Artificial Sequence: Synthetic peptide
  Seed: ISVQPTFSV
ILVQPTFSV

SEQ ID NO: 44962 - protein, 9 aa, Artificial Sequence
  Description of Artificial Sequence: Synthetic peptide
  Seed: ISVQPTFSV
IKVQPTFSY

SEQ ID NO: 44963 - protein, 9 aa, Artificial Sequence
  Description of Artificial Sequence: Synthetic peptide
  Seed: ISVQPTFSV
IMVQPTFSA

SEQ ID NO: 44964 - protein, 9 aa, Artificial Sequence
  Description of Artificial Sequence: Synthetic peptide
  Seed: ISVQPTFSV
IMVQPTFSC

SEQ ID NO: 44965 - protein, 9 aa, Artificial Sequence
  Description of Artificial Sequence: Synthetic peptide
  Seed: ISVQPTFSV
IMVQPTFSI

SEQ ID NO: 44966 - protein, 9 aa, Artificial Sequence
  Description of Artificial Sequence: Synthetic peptide
  Seed: ISVQPTFSV
IMVQPTFSL

SEQ ID NO: 44967 - protein, 9 aa, Artificial Sequence
  Description of Artificial Sequence: Synthetic peptide
  Seed: ISVQPTFSV
IMVQPTFSM

SEQ ID NO: 44968 - protein, 9 aa, Artificial Sequence
  Description of Artificial Sequence: Synthetic peptide
  Seed: ISVQPTFSV
IMVQPTFSF

SEQ ID NO: 44969 - protein, 9 aa, Artificial Sequence
  Description of Artificial Sequence: Synthetic peptide
  Seed: ISVQPTFSV
IMVQPTFSS

SEQ ID NO: 44970 - protein, 9 aa, Artificial Sequence
  Description of Artificial Sequence: Synthetic peptide
  Seed: ISVQPTFSV
IMVQPTFST

SEQ ID NO: 44971 - protein, 9 aa, Artificial Sequence
  Description of Artificial Sequence: Synthetic peptide
  Seed: ISVQPTFSV
IMVQPTFSW

SEQ ID NO: 44972 - protein, 9 aa, Artificial Sequence
  Description of Artificial Sequence: Synthetic peptide
  Seed: ISVQPTFSV
IMVQPTFSY

SEQ ID NO: 44973 - protein, 9 aa, Artificial Sequence
  Description of Artificial Sequence: Synthetic peptide
  Seed: ISVQPTFSV
IMVQPTFSV

SEQ ID NO: 44974 - protein, 9 aa, Artificial Sequence
  Description of Artificial Sequence: Synthetic peptide
  Seed: ISVQPTFSV
IFVQPTFSM

SEQ ID NO: 44975 - protein, 9 aa, Artificial Sequence
  Description of Artificial Sequence: Synthetic peptide
  Seed: ISVQPTFSV
IFVQPTFSF

SEQ ID NO: 44976 - protein, 9 aa, Artificial Sequence
  Description of Artificial Sequence: Synthetic peptide
  Seed: ISVQPTFSV
IFVQPTFSW

SEQ ID NO: 44977 - protein, 9 aa, Artificial Sequence
  Description of Artificial Sequence: Synthetic peptide
  Seed: ISVQPTFSV
IFVQPTFSY

SEQ ID NO: 44978 - protein, 9 aa, Artificial Sequence
  Description of Artificial Sequence: Synthetic peptide
  Seed: ISVQPTFSV
IFVQPTFSV

SEQ ID NO: 44979 - protein, 9 aa, Artificial Sequence
  Description of Artificial Sequence: Synthetic peptide
  Seed: ISVQPTFSV
IPVQPTFSW

SEQ ID NO: 44980 - protein, 11 aa, Artificial Sequence
  Description of Artificial Sequence: Synthetic peptide
  Seed: ITIERMVLSAF
IHIERMVLSAY

SEQ ID NO: 44981 - protein, 11 aa, Artificial Sequence
  Description of Artificial Sequence: Synthetic peptide
  Seed: ITIERMVLSAF
IIIERMVLSAW

SEQ ID NO: 44982 - protein, 10 aa, Artificial Sequence
  Description of Artificial Sequence: Synthetic peptide
  Seed: KATNPIVPSF
KETNPIVPSF

SEQ ID NO: 44983 - protein, 10 aa, Artificial Sequence
  Description of Artificial Sequence: Synthetic peptide
  Seed: KATNPIVPSF
KATNPIVPSW

SEQ ID NO: 44984 - protein, 11 aa, Artificial Sequence
  Description of Artificial Sequence: Synthetic peptide
  Seed: IYRRRDGKWVR
ISRRRDGKWVR

SEQ ID NO: 44985 - protein, 11 aa, Artificial Sequence
  Description of Artificial Sequence: Synthetic peptide
  Seed: IYRRRDGKWVR
ITRRRDGKWVR

SEQ ID NO: 44986 - protein, 11 aa, Artificial Sequence
  Description of Artificial Sequence: Synthetic peptide
  Seed: IYRRRDGKWVR
IVRRRDGKWVR

SEQ ID NO: 44987 - protein, 10 aa, Artificial Sequence
  Description of Artificial Sequence: Synthetic peptide
  Seed: KATNPIVPSF
KATNPIVPSA

SEQ ID NO: 44988 - protein, 10 aa, Artificial Sequence
  Description of Artificial Sequence: Synthetic peptide
  Seed: KATNPIVPSF
KATNPIVPSI

SEQ ID NO: 44989 - protein, 10 aa, Artificial Sequence
  Description of Artificial Sequence: Synthetic peptide
  Seed: KATNPIVPSF
KATNPIVPSK

SEQ ID NO: 44990 - protein, 10 aa, Artificial Sequence
  Description of Artificial Sequence: Synthetic peptide
  Seed: KATNPIVPSF
KATNPIVPSM

SEQ ID NO: 44991 - protein, 10 aa, Artificial Sequence
  Description of Artificial Sequence: Synthetic peptide
  Seed: KATNPIVPSF
KATNPIVPSS

SEQ ID NO: 44992 - protein, 10 aa, Artificial Sequence
  Description of Artificial Sequence: Synthetic peptide
  Seed: KATNPIVPSF
KATNPIVPSY

SEQ ID NO: 44993 - protein, 10 aa, Artificial Sequence
  Description of Artificial Sequence: Synthetic peptide
  Seed: KATNPIVPSF
KRTNPIVPSV

SEQ ID NO: 44994 - protein, 10 aa, Artificial Sequence
  Description of Artificial Sequence: Synthetic peptide
  Seed: KATNPIVPSF
KATNPIVPSV

SEQ ID NO: 44995 - protein, 10 aa, Artificial Sequence
  Description of Artificial Sequence: Synthetic peptide
  Seed: KATNPIVPSF
KRTNPIVPSA

SEQ ID NO: 44996 - protein, 10 aa, Artificial Sequence
  Description of Artificial Sequence: Synthetic peptide
  Seed: KATNPIVPSF
KRTNPIVPSI

SEQ ID NO: 44997 - protein, 10 aa, Artificial Sequence
  Description of Artificial Sequence: Synthetic peptide
  Seed: KATNPIVPSF
KRTNPIVPSL

SEQ ID NO: 44998 - protein, 10 aa, Artificial Sequence
  Description of Artificial Sequence: Synthetic peptide
  Seed: KATNPIVPSF
KRTNPIVPSK

SEQ ID NO: 44999 - protein, 10 aa, Artificial Sequence
  Description of Artificial Sequence: Synthetic peptide
  Seed: KATNPIVPSF
KRTNPIVPSM

SEQ ID NO: 45000 - protein, 10 aa, Artificial Sequence
  Description of Artificial Sequence: Synthetic peptide
  Seed: KATNPIVPSF
KRTNPIVPSF

SEQ ID NO: 45001 - protein, 10 aa, Artificial Sequence
  Description of Artificial Sequence: Synthetic peptide
  Seed: KATNPIVPSF
KRTNPIVPSS

SEQ ID NO: 45002 - protein, 10 aa, Artificial Sequence
  Description of Artificial Sequence: Synthetic peptide
  Seed: KATNPIVPSF
KRTNPIVPSW

SEQ ID NO: 45003 - protein, 11 aa, Artificial Sequence
  Description of Artificial Sequence: Synthetic peptide
  Seed: IYRRRDGKWVR
IFRRRDGKWVR

SEQ ID NO: 45004 - protein, 11 aa, Artificial Sequence
  Description of Artificial Sequence: Synthetic peptide
  Seed: IYRRRDGKWVR
IMRRRDGKWVK

SEQ ID NO: 45005 - protein, 11 aa, Artificial Sequence
  Description of Artificial Sequence: Synthetic peptide
  Seed: IYRRRDGKWVR
IMRRRDGKWVR

SEQ ID NO: 45006 - protein, 11 aa, Artificial Sequence
  Description of Artificial Sequence: Synthetic peptide
  Seed: IYRRRDGKWVR
ILRRRDGKWVR

SEQ ID NO: 45007 - protein, 11 aa, Artificial Sequence
  Description of Artificial Sequence: Synthetic peptide
  Seed: IYKRVDGKWMR
ISKRVDGKWMR

SEQ ID NO: 45008 - protein, 11 aa, Artificial Sequence
  Description of Artificial Sequence: Synthetic peptide
  Seed: IYKRVDGKWMR
ITKRVDGKWMR

SEQ ID NO: 45009 - protein, 11 aa, Artificial Sequence
  Description of Artificial Sequence: Synthetic peptide
  Seed: IYKRVDGKWMR
IWKRVDGKWMR

SEQ ID NO: 45010 - protein, 11 aa, Artificial Sequence
  Description of Artificial Sequence: Synthetic peptide
  Seed: IYKRVDGKWMR
IYKRVDGKWMK

SEQ ID NO: 45011 - protein, 11 aa, Artificial Sequence
  Description of Artificial Sequence: Synthetic peptide
  Seed: IYKRVDGKWMR
IVKRVDGKWMR

SEQ ID NO: 45012 - protein, 11 aa, Artificial Sequence
  Description of Artificial Sequence: Synthetic peptide
  Seed: IYRRRDGKWMR
IARRRDGKWMR

SEQ ID NO: 45013 - protein, 11 aa, Artificial Sequence
  Description of Artificial Sequence: Synthetic peptide
  Seed: IYRRRDGKWMR
IQRRRDGKWMR

SEQ ID NO: 45014 - protein, 11 aa, Artificial Sequence
  Description of Artificial Sequence: Synthetic peptide
  Seed: IYRRRDGKWMR
IIRRRDGKWMR

SEQ ID NO: 45015 - protein, 11 aa, Artificial Sequence
  Description of Artificial Sequence: Synthetic peptide
  Seed: IYRRRDGKWMR
ILRRRDGKWMR

SEQ ID NO: 45016 - protein, 11 aa, Artificial Sequence
  Description of Artificial Sequence: Synthetic peptide
  Seed: IYRRRDGKWMR
IMRRRDGKWMR

SEQ ID NO: 45017 - protein, 11 aa, Artificial Sequence
  Description of Artificial Sequence: Synthetic peptide
  Seed: IYRRRDGKWMR
IMRRRDGKWMK

SEQ ID NO: 45018 - protein, 11 aa, Artificial Sequence
  Description of Artificial Sequence: Synthetic peptide
  Seed: IYRRRDGKWMR
IFRRRDGKWMR

SEQ ID NO: 45019 - protein, 11 aa, Artificial Sequence
  Description of Artificial Sequence: Synthetic peptide
  Seed: IYRRRDGKWMR
IFRRRDGKWMK

SEQ ID NO: 45020 - protein, 11 aa, Artificial Sequence
  Description of Artificial Sequence: Synthetic peptide
  Seed: IYRRRDGKWMR
ISRRRDGKWMR

SEQ ID NO: 45021 - protein, 11 aa, Artificial Sequence
  Description of Artificial Sequence: Synthetic peptide
  Seed: IYRRRDGKWMR
ITRRRDGKWMR

SEQ ID NO: 45022 - protein, 11 aa, Artificial Sequence
  Description of Artificial Sequence: Synthetic peptide
  Seed: IYRRRDGKWMR
IWRRRDGKWMR

SEQ ID NO: 45023 - protein, 11 aa, Artificial Sequence
  Description of Artificial Sequence: Synthetic peptide
  Seed: IYRRRDGKWMR
IVRRRDGKWMR

SEQ ID NO: 45024 - protein, 11 aa, Artificial Sequence
  Description of Artificial Sequence: Synthetic peptide
  Seed: IYRRRDGKWVR
IQRRRDGKWVR

SEQ ID NO: 45025 - protein, 11 aa, Artificial Sequence
  Description of Artificial Sequence: Synthetic peptide
  Seed: IYRRRDGKWVR
IIRRRDGKWVR

SEQ ID NO: 45026 - protein, 10 aa, Artificial Sequence
  Description of Artificial Sequence: Synthetic peptide
  Seed: KATNPIVPSF
KRTNPIVPSY

SEQ ID NO: 45027 - protein, 10 aa, Artificial Sequence
  Description of Artificial Sequence: Synthetic peptide
  Seed: KATNPIVPSF
KNTNPIVPSA

SEQ ID NO: 45028 - protein, 11 aa, Artificial Sequence
  Description of Artificial Sequence: Synthetic peptide
  Seed: ITIERMVLSAF
IIIERMVLSAY

SEQ ID NO: 45029 - protein, 10 aa, Artificial Sequence
  Description of Artificial Sequence: Synthetic peptide
  Seed: KATNPIVPSF
KQTNPIVPSM

SEQ ID NO: 45030 - protein, 10 aa, Artificial Sequence
  Description of Artificial Sequence: Synthetic peptide
  Seed: KATNPIVPSF
KCTNPIVPSF

SEQ ID NO: 45031 - protein, 10 aa, Artificial Sequence
  Description of Artificial Sequence: Synthetic peptide
  Seed: KATNPIVPSF
KCTNPIVPSS

SEQ ID NO: 45032 - protein, 10 aa, Artificial Sequence
  Description of Artificial Sequence: Synthetic peptide
  Seed: KATNPIVPSF
KCTNPIVPSW

SEQ ID NO: 45033 - protein, 10 aa, Artificial Sequence
  Description of Artificial Sequence: Synthetic peptide
  Seed: KATNPIVPSF
KCTNPIVPSY

SEQ ID NO: 45034 - protein, 10 aa, Artificial Sequence
  Description of Artificial Sequence: Synthetic peptide
  Seed: KATNPIVPSF
KCTNPIVPSV

SEQ ID NO: 45035 - protein, 10 aa, Artificial Sequence
  Description of Artificial Sequence: Synthetic peptide
  Seed: KATNPIVPSF
KQTNPIVPSA

SEQ ID NO: 45036 - protein, 10 aa, Artificial Sequence
  Description of Artificial Sequence: Synthetic peptide
  Seed: KATNPIVPSF
KQTNPIVPSI

SEQ ID NO: 45037 - protein, 10 aa, Artificial Sequence
  Description of Artificial Sequence: Synthetic peptide
  Seed: KATNPIVPSF
KQTNPIVPSL

SEQ ID NO: 45038 - protein, 10 aa, Artificial Sequence
  Description of Artificial Sequence: Synthetic peptide
  Seed: KATNPIVPSF
KQTNPIVPSK

SEQ ID NO: 45039 - protein, 10 aa, Artificial Sequence
  Description of Artificial Sequence: Synthetic peptide
  Seed: KATNPIVPSF
KQTNPIVPSF

SEQ ID NO: 45040 - protein, 10 aa, Artificial Sequence
  Description of Artificial Sequence: Synthetic peptide
  Seed: KATNPIVPSF
KNTNPIVPSI

SEQ ID NO: 45041 - protein, 10 aa, Artificial Sequence
  Description of Artificial Sequence: Synthetic peptide
  Seed: KATNPIVPSF
KQTNPIVPSS

SEQ ID NO: 45042 - protein, 10 aa, Artificial Sequence
  Description of Artificial Sequence: Synthetic peptide
  Seed: KATNPIVPSF
KQTNPIVPSW

SEQ ID NO: 45043 - protein, 10 aa, Artificial Sequence
  Description of Artificial Sequence: Synthetic peptide
  Seed: KATNPIVPSF
KQTNPIVPSY

SEQ ID NO: 45044 - protein, 10 aa, Artificial Sequence
  Description of Artificial Sequence: Synthetic peptide
  Seed: KATNPIVPSF
KQTNPIVPSV

SEQ ID NO: 45045 - protein, 10 aa, Artificial Sequence
  Description of Artificial Sequence: Synthetic peptide
  Seed: KATNPIVPSF
KETNPIVPSA

SEQ ID NO: 45046 - protein, 10 aa, Artificial Sequence
  Description of Artificial Sequence: Synthetic peptide
  Seed: KATNPIVPSF
KETNPIVPSI

SEQ ID NO: 45047 - protein, 10 aa, Artificial Sequence
  Description of Artificial Sequence: Synthetic peptide
  Seed: KATNPIVPSF
KETNPIVPSL

SEQ ID NO: 45048 - protein, 10 aa, Artificial Sequence
  Description of Artificial Sequence: Synthetic peptide
  Seed: KATNPIVPSF
KETNPIVPSK

SEQ ID NO: 45049 - protein, 10 aa, Artificial Sequence
  Description of Artificial Sequence: Synthetic peptide
  Seed: KATNPIVPSF
KETNPIVPSM

SEQ ID NO: 45050 - protein, 10 aa, Artificial Sequence
  Description of Artificial Sequence: Synthetic peptide
  Seed: KATNPIVPSF
KCTNPIVPSM

SEQ ID NO: 45051 - protein, 10 aa, Artificial Sequence
  Description of Artificial Sequence: Synthetic peptide
  Seed: KATNPIVPSF
KCTNPIVPSK

SEQ ID NO: 45052 - protein, 10 aa, Artificial Sequence
  Description of Artificial Sequence: Synthetic peptide
  Seed: KATNPIVPSF
KCTNPIVPSL

SEQ ID NO: 45053 - protein, 10 aa, Artificial Sequence
  Description of Artificial Sequence: Synthetic peptide
  Seed: KATNPIVPSF
KCTNPIVPSI

SEQ ID NO: 45054 - protein, 10 aa, Artificial Sequence
  Description of Artificial Sequence: Synthetic peptide
  Seed: KATNPIVPSF
KNTNPIVPSL

SEQ ID NO: 45055 - protein, 10 aa, Artificial Sequence
  Description of Artificial Sequence: Synthetic peptide
  Seed: KATNPIVPSF
KNTNPIVPSK

SEQ ID NO: 45056 - protein, 10 aa, Artificial Sequence
  Description of Artificial Sequence: Synthetic peptide
  Seed: KATNPIVPSF
KNTNPIVPSM

SEQ ID NO: 45057 - protein, 10 aa, Artificial Sequence
  Description of Artificial Sequence: Synthetic peptide
  Seed: KATNPIVPSF
KNTNPIVPSF

SEQ ID NO: 45058 - protein, 10 aa, Artificial Sequence
  Description of Artificial Sequence: Synthetic peptide
  Seed: KATNPIVPSF
KNTNPIVPSS

SEQ ID NO: 45059 - protein, 10 aa, Artificial Sequence
  Description of Artificial Sequence: Synthetic peptide
  Seed: KATNPIVPSF
KNTNPIVPSW

SEQ ID NO: 45060 - protein, 10 aa, Artificial Sequence
  Description of Artificial Sequence: Synthetic peptide
  Seed: KATNPIVPSF
KNTNPIVPSY

SEQ ID NO: 45061 - protein, 10 aa, Artificial Sequence
  Description of Artificial Sequence: Synthetic peptide
  Seed: KATNPIVPSF
KNTNPIVPSV

SEQ ID NO: 45062 - protein, 10 aa, Artificial Sequence
  Description of Artificial Sequence: Synthetic peptide
  Seed: KATNPIVPSF
KDTNPIVPSA

SEQ ID NO: 45063 - protein, 10 aa, Artificial Sequence
  Description of Artificial Sequence: Synthetic peptide
  Seed: KATNPIVPSF
KDTNPIVPSI

SEQ ID NO: 45064 - protein, 10 aa, Artificial Sequence
  Description of Artificial Sequence: Synthetic peptide
  Seed: KATNPIVPSF
KDTNPIVPSL

SEQ ID NO: 45065 - protein, 10 aa, Artificial Sequence
  Description of Artificial Sequence: Synthetic peptide
  Seed: KATNPIVPSF
KDTNPIVPSK

SEQ ID NO: 45066 - protein, 10 aa, Artificial Sequence
  Description of Artificial Sequence: Synthetic peptide
  Seed: KATNPIVPSF
KDTNPIVPSM

SEQ ID NO: 45067 - protein, 10 aa, Artificial Sequence
  Description of Artificial Sequence: Synthetic peptide
  Seed: KATNPIVPSF
KDTNPIVPSF

SEQ ID NO: 45068 - protein, 10 aa, Artificial Sequence
  Description of Artificial Sequence: Synthetic peptide
  Seed: KATNPIVPSF
KDTNPIVPSS

SEQ ID NO: 45069 - protein, 10 aa, Artificial Sequence
  Description of Artificial Sequence: Synthetic peptide
  Seed: KATNPIVPSF
KDTNPIVPSW

SEQ ID NO: 45070 - protein, 10 aa, Artificial Sequence
  Description of Artificial Sequence: Synthetic peptide
  Seed: KATNPIVPSF
KDTNPIVPSY

SEQ ID NO: 45071 - protein, 10 aa, Artificial Sequence
  Description of Artificial Sequence: Synthetic peptide
  Seed: KATNPIVPSF
KDTNPIVPSV

SEQ ID NO: 45072 - protein, 10 aa, Artificial Sequence
  Description of Artificial Sequence: Synthetic peptide
  Seed: KATNPIVPSF
KCTNPIVPSA

SEQ ID NO: 45073 - protein, 11 aa, Artificial Sequence
  Description of Artificial Sequence: Synthetic peptide
  Seed: IYKRVDGKWMR
IFKRVDGKWMK

SEQ ID NO: 45074 - protein, 11 aa, Artificial Sequence
  Description of Artificial Sequence: Synthetic peptide
  Seed: IYKRVDGKWMR
IFKRVDGKWMR

SEQ ID NO: 45075 - protein, 11 aa, Artificial Sequence
  Description of Artificial Sequence: Synthetic peptide
  Seed: IYKRVDGKWMR
IMKRVDGKWMK

SEQ ID NO: 45076 - protein, 11 aa, Artificial Sequence
  Description of Artificial Sequence: Synthetic peptide
  Seed: IWHSNLNDATY
INHSNLNDATF

SEQ ID NO: 45077 - protein, 11 aa, Artificial Sequence
  Description of Artificial Sequence: Synthetic peptide
  Seed: ITIERMVLSAF
IYIERMVLSAY

SEQ ID NO: 45078 - protein, 11 aa, Artificial Sequence
  Description of Artificial Sequence: Synthetic peptide
  Seed: ITIERMVLSAF
IVIERMVLSAF

SEQ ID NO: 45079 - protein, 11 aa, Artificial Sequence
  Description of Artificial Sequence: Synthetic peptide
  Seed: ITIERMVLSAF
IVIERMVLSAW

SEQ ID NO: 45080 - protein, 11 aa, Artificial Sequence
  Description of Artificial Sequence: Synthetic peptide
  Seed: ITIERMVLSAF
IVIERMVLSAY

SEQ ID NO: 45081 - protein, 11 aa, Artificial Sequence
  Description of Artificial Sequence: Synthetic peptide
  Seed: IWHSNLNDATY
IAHSNLNDATF

SEQ ID NO: 45082 - protein, 11 aa, Artificial Sequence
  Description of Artificial Sequence: Synthetic peptide
  Seed: IWHSNLNDATY
IAHSNLNDATW

SEQ ID NO: 45083 - protein, 11 aa, Artificial Sequence
  Description of Artificial Sequence: Synthetic peptide
  Seed: IWHSNLNDATY
IAHSNLNDATY

SEQ ID NO: 45084 - protein, 11 aa, Artificial Sequence
  Description of Artificial Sequence: Synthetic peptide
  Seed: IWHSNLNDATY
IRHSNLNDATF

SEQ ID NO: 45085 - protein, 11 aa, Artificial Sequence
  Description of Artificial Sequence: Synthetic peptide
  Seed: IWHSNLNDATY
IRHSNLNDATW

SEQ ID NO: 45086 - protein, 11 aa, Artificial Sequence
  Description of Artificial Sequence: Synthetic peptide
  Seed: IWHSNLNDATY
INHSNLNDATW

SEQ ID NO: 45087 - protein, 11 aa, Artificial Sequence
  Description of Artificial Sequence: Synthetic peptide
  Seed: IYKRVDGKWMR
IMKRVDGKWMR

SEQ ID NO: 45088 - protein, 11 aa, Artificial Sequence
  Description of Artificial Sequence: Synthetic peptide
  Seed: IWHSNLNDATY
IDHSNLNDATF

SEQ ID NO: 45089 - protein, 11 aa, Artificial Sequence
  Description of Artificial Sequence: Synthetic peptide
  Seed: IWHSNLNDATY
IDHSNLNDATW

SEQ ID NO: 45090 - protein, 11 aa, Artificial Sequence
  Description of Artificial Sequence: Synthetic peptide
  Seed: IWHSNLNDATY
ICHSNLNDATF

SEQ ID NO: 45091 - protein, 11 aa, Artificial Sequence
  Description of Artificial Sequence: Synthetic peptide
  Seed: IWHSNLNDATY
ICHSNLNDATW

SEQ ID NO: 45092 - protein, 11 aa, Artificial Sequence
  Description of Artificial Sequence: Synthetic peptide
  Seed: IWHSNLNDATY
IQHSNLNDATF

SEQ ID NO: 45093 - protein, 11 aa, Artificial Sequence
  Description of Artificial Sequence: Synthetic peptide
  Seed: IWHSNLNDATY
IQHSNLNDATW

SEQ ID NO: 45094 - protein, 11 aa, Artificial Sequence
  Description of Artificial Sequence: Synthetic peptide
  Seed: IWHSNLNDATY
IQHSNLNDATY

SEQ ID NO: 45095 - protein, 11 aa, Artificial Sequence
  Description of Artificial Sequence: Synthetic peptide
  Seed: IWHSNLNDATY
IEHSNLNDATF

SEQ ID NO: 45096 - protein, 11 aa, Artificial Sequence
  Description of Artificial Sequence: Synthetic peptide
  Seed: IWHSNLNDATY
IEHSNLNDATW

SEQ ID NO: 45097 - protein, 11 aa, Artificial Sequence
  Description of Artificial Sequence: Synthetic peptide
  Seed: ITIERMVLSAF
IYIERMVLSAF

SEQ ID NO: 45098 - protein, 11 aa, Artificial Sequence
  Description of Artificial Sequence: Synthetic peptide
  Seed: ITIERMVLSAF
ITIERMVLSAY

SEQ ID NO: 45099 - protein, 11 aa, Artificial Sequence
  Description of Artificial Sequence: Synthetic peptide
  Seed: ITIERMVLSAF
ITIERMVLSAW

SEQ ID NO: 45100 - protein, 11 aa, Artificial Sequence
  Description of Artificial Sequence: Synthetic peptide
  Seed: ITIERMVLSAF
ITIERMVLSAM

SEQ ID NO: 45101 - protein, 11 aa, Artificial Sequence
  Description of Artificial Sequence: Synthetic peptide
  Seed: ITIERMVLSAF
ILIERMVLSAM

SEQ ID NO: 45102 - protein, 11 aa, Artificial Sequence
  Description of Artificial Sequence: Synthetic peptide
  Seed: ITIERMVLSAF
ILIERMVLSAF

SEQ ID NO: 45103 - protein, 11 aa, Artificial Sequence
  Description of Artificial Sequence: Synthetic peptide
  Seed: ITIERMVLSAF
ILIERMVLSAY

SEQ ID NO: 45104 - protein, 11 aa, Artificial Sequence
  Description of Artificial Sequence: Synthetic peptide
  Seed: ITIERMVLSAF
IKIERMVLSAM

SEQ ID NO: 45105 - protein, 11 aa, Artificial Sequence
  Description of Artificial Sequence: Synthetic peptide
  Seed: ITIERMVLSAF
IKIERMVLSAF

SEQ ID NO: 45106 - protein, 11 aa, Artificial Sequence
  Description of Artificial Sequence: Synthetic peptide
  Seed: ITIERMVLSAF
IKIERMVLSAY

SEQ ID NO: 45107 - protein, 11 aa, Artificial Sequence
  Description of Artificial Sequence: Synthetic peptide
  Seed: ITIERMVLSAF
IMIERMVLSAL

SEQ ID NO: 45108 - protein, 11 aa, Artificial Sequence
  Description of Artificial Sequence: Synthetic peptide
  Seed: ITIERMVLSAF
IMIERMVLSAM

SEQ ID NO: 45109 - protein, 11 aa, Artificial Sequence
  Description of Artificial Sequence: Synthetic peptide
  Seed: ITIERMVLSAF
IMIERMVLSAF

SEQ ID NO: 45110 - protein, 11 aa, Artificial Sequence
  Description of Artificial Sequence: Synthetic peptide
  Seed: ITIERMVLSAF
IMIERMVLSAW

SEQ ID NO: 45111 - protein, 11 aa, Artificial Sequence
  Description of Artificial Sequence: Synthetic peptide
  Seed: ITIERMVLSAF
IMIERMVLSAY

SEQ ID NO: 45112 - protein, 11 aa, Artificial Sequence
  Description of Artificial Sequence: Synthetic peptide
  Seed: ITIERMVLSAF
IFIERMVLSAF

SEQ ID NO: 45113 - protein, 11 aa, Artificial Sequence
  Description of Artificial Sequence: Synthetic peptide
  Seed: ITIERMVLSAF
ISIERMVLSAI

SEQ ID NO: 45114 - protein, 11 aa, Artificial Sequence
  Description of Artificial Sequence: Synthetic peptide
  Seed: ITIERMVLSAF
ISIERMVLSAL

SEQ ID NO: 45115 - protein, 11 aa, Artificial Sequence
  Description of Artificial Sequence: Synthetic peptide
  Seed: ITIERMVLSAF
ISIERMVLSAM

SEQ ID NO: 45116 - protein, 11 aa, Artificial Sequence
  Description of Artificial Sequence: Synthetic peptide
  Seed: ITIERMVLSAF
ISIERMVLSAF

SEQ ID NO: 45117 - protein, 11 aa, Artificial Sequence
  Description of Artificial Sequence: Synthetic peptide
  Seed: ITIERMVLSAF
ISIERMVLSAW

SEQ ID NO: 45118 - protein, 11 aa, Artificial Sequence
  Description of Artificial Sequence: Synthetic peptide
  Seed: ITIERMVLSAF
ISIERMVLSAY

SEQ ID NO: 45119 - protein, 11 aa, Artificial Sequence
  Description of Artificial Sequence: Synthetic peptide
  Seed: ITIERMVLSAF
ITIERMVLSAL

SEQ ID NO: 45120 - protein, 11 aa, Artificial Sequence
  Description of Artificial Sequence: Synthetic peptide
  Seed: IWHSNLNDATY
IGHSNLNDATF

SEQ ID NO: 45121 - protein, 11 aa, Artificial Sequence
  Description of Artificial Sequence: Synthetic peptide
  Seed: IWHSNLNDATY
IGHSNLNDATW

SEQ ID NO: 45122 - protein, 11 aa, Artificial Sequence
  Description of Artificial Sequence: Synthetic peptide
  Seed: IWHSNLNDATY
IHHSNLNDATF

SEQ ID NO: 45123 - protein, 11 aa, Artificial Sequence
  Description of Artificial Sequence: Synthetic peptide
  Seed: IWHSNLNDATY
ITHSNLNDATF

SEQ ID NO: 45124 - protein, 11 aa, Artificial Sequence
  Description of Artificial Sequence: Synthetic peptide
  Seed: IWHSNLNDATY
ITHSNLNDATY

SEQ ID NO: 45125 - protein, 11 aa, Artificial Sequence
  Description of Artificial Sequence: Synthetic peptide
  Seed: IWHSNLNDATY
IWHSNLNDATF

SEQ ID NO: 45126 - protein, 11 aa, Artificial Sequence
  Description of Artificial Sequence: Synthetic peptide
  Seed: IWHSNLNDATY
IWHSNLNDATW

SEQ ID NO: 45127 - protein, 11 aa, Artificial Sequence
  Description of Artificial Sequence: Synthetic peptide
  Seed: IWHSNLNDATY
IYHSNLNDATF

SEQ ID NO: 45128 - protein, 11 aa, Artificial Sequence
  Description of Artificial Sequence: Synthetic peptide
  Seed: IWHSNLNDATY
IYHSNLNDATW

SEQ ID NO: 45129 - protein, 11 aa, Artificial Sequence
  Description of Artificial Sequence: Synthetic peptide
  Seed: IWHSNLNDATY
IVHSNLNDATF

SEQ ID NO: 45130 - protein, 11 aa, Artificial Sequence
  Description of Artificial Sequence: Synthetic peptide
  Seed: IWHSNLNDATY
IVHSNLNDATW

SEQ ID NO: 45131 - protein, 11 aa, Artificial Sequence
  Description of Artificial Sequence: Synthetic peptide
  Seed: IWHSNLNDATY
IVHSNLNDATY

SEQ ID NO: 45132 - protein, 9 aa, Artificial Sequence
  Description of Artificial Sequence: Synthetic peptide
  Seed: IYKRVDGKW
IFKRVDGKF

SEQ ID NO: 45133 - protein, 9 aa, Artificial Sequence
  Description of Artificial Sequence: Synthetic peptide
  Seed: IYKRVDGKW
IWKRVDGKF

SEQ ID NO: 45134 - protein, 9 aa, Artificial Sequence
  Description of Artificial Sequence: Synthetic peptide
  Seed: IYKRVDGKW
IWKRVDGKW

SEQ ID NO: 45135 - protein, 9 aa, Artificial Sequence
  Description of Artificial Sequence: Synthetic peptide
  Seed: IYKRVDGKW
IYKRVDGKI

SEQ ID NO: 45136 - protein, 9 aa, Artificial Sequence
  Description of Artificial Sequence: Synthetic peptide
  Seed: IYKRVDGKW
IYKRVDGKL

SEQ ID NO: 45137 - protein, 9 aa, Artificial Sequence
  Description of Artificial Sequence: Synthetic peptide
  Seed: IYKRVDGKW
IYKRVDGKM

SEQ ID NO: 45138 - protein, 9 aa, Artificial Sequence
  Description of Artificial Sequence: Synthetic peptide
  Seed: IYKRVDGKW
IYKRVDGKF

SEQ ID NO: 45139 - protein, 11 aa, Artificial Sequence
  Description of Artificial Sequence: Synthetic peptide
  Seed: IYKRVDGKWMR
IAKRVDGKWMR

SEQ ID NO: 45140 - protein, 11 aa, Artificial Sequence
  Description of Artificial Sequence: Synthetic peptide
  Seed: IYKRVDGKWMR
IQKRVDGKWMR

SEQ ID NO: 45141 - protein, 11 aa, Artificial Sequence
  Description of Artificial Sequence: Synthetic peptide
  Seed: IYKRVDGKWMR
IIKRVDGKWMR

SEQ ID NO: 45142 - protein, 11 aa, Artificial Sequence
  Description of Artificial Sequence: Synthetic peptide
  Seed: IYKRVDGKWMR
ILKRVDGKWMR

SEQ ID NO: 45143 - protein, 11 aa, Artificial Sequence
  Description of Artificial Sequence: Synthetic peptide
  Seed: IWHSNLNDATY
ITHSNLNDATW

SEQ ID NO: 45144 - protein, 11 aa, Artificial Sequence
  Description of Artificial Sequence: Synthetic peptide
  Seed: IWHSNLNDATY
ITHSNLNDATM

SEQ ID NO: 45145 - protein, 11 aa, Artificial Sequence
  Description of Artificial Sequence: Synthetic peptide
  Seed: IWHSNLNDATY
IHHSNLNDATW

SEQ ID NO: 45146 - protein, 11 aa, Artificial Sequence
  Description of Artificial Sequence: Synthetic peptide
  Seed: IWHSNLNDATY
ISHSNLNDATY

SEQ ID NO: 45147 - protein, 11 aa, Artificial Sequence
  Description of Artificial Sequence: Synthetic peptide
  Seed: IWHSNLNDATY
IHHSNLNDATY

SEQ ID NO: 45148 - protein, 11 aa, Artificial Sequence
  Description of Artificial Sequence: Synthetic peptide
  Seed: IWHSNLNDATY
IIHSNLNDATF

SEQ ID NO: 45149 - protein, 11 aa, Artificial Sequence
  Description of Artificial Sequence: Synthetic peptide
  Seed: IWHSNLNDATY
IIHSNLNDATW

SEQ ID NO: 45150 - protein, 11 aa, Artificial Sequence
  Description of Artificial Sequence: Synthetic peptide
  Seed: IWHSNLNDATY
IIHSNLNDATY

SEQ ID NO: 45151 - protein, 11 aa, Artificial Sequence
  Description of Artificial Sequence: Synthetic peptide
  Seed: IWHSNLNDATY
ILHSNLNDATF

SEQ ID NO: 45152 - protein, 11 aa, Artificial Sequence
  Description of Artificial Sequence: Synthetic peptide
  Seed: IWHSNLNDATY
ILHSNLNDATW

SEQ ID NO: 45153 - protein, 11 aa, Artificial Sequence
  Description of Artificial Sequence: Synthetic peptide
  Seed: IWHSNLNDATY
ILHSNLNDATY

SEQ ID NO: 45154 - protein, 11 aa, Artificial Sequence
  Description of Artificial Sequence: Synthetic peptide
  Seed: IWHSNLNDATY
IKHSNLNDATF

SEQ ID NO: 45155 - protein, 11 aa, Artificial Sequence
  Description of Artificial Sequence: Synthetic peptide
  Seed: IWHSNLNDATY
IKHSNLNDATW

SEQ ID NO: 45156 - protein, 11 aa, Artificial Sequence
  Description of Artificial Sequence: Synthetic peptide
  Seed: IWHSNLNDATY
IMHSNLNDATF

SEQ ID NO: 45157 - protein, 11 aa, Artificial Sequence
  Description of Artificial Sequence: Synthetic peptide
  Seed: IWHSNLNDATY
IMHSNLNDATW

SEQ ID NO: 45158 - protein, 11 aa, Artificial Sequence
  Description of Artificial Sequence: Synthetic peptide
  Seed: IWHSNLNDATY
IMHSNLNDATY

SEQ ID NO: 45159 - protein, 11 aa, Artificial Sequence
  Description of Artificial Sequence: Synthetic peptide
  Seed: IWHSNLNDATY
IFHSNLNDATF

SEQ ID NO: 45160 - protein, 11 aa, Artificial Sequence
  Description of Artificial Sequence: Synthetic peptide
  Seed: IWHSNLNDATY
IFHSNLNDATW

SEQ ID NO: 45161 - protein, 11 aa, Artificial Sequence
  Description of Artificial Sequence: Synthetic peptide
  Seed: IWHSNLNDATY
IPHSNLNDATF

SEQ ID NO: 45162 - protein, 11 aa, Artificial Sequence
  Description of Artificial Sequence: Synthetic peptide
  Seed: IWHSNLNDATY
IPHSNLNDATW

SEQ ID NO: 45163 - protein, 11 aa, Artificial Sequence
  Description of Artificial Sequence: Synthetic peptide
  Seed: IWHSNLNDATY
ISHSNLNDATM

SEQ ID NO: 45164 - protein, 11 aa, Artificial Sequence
  Description of Artificial Sequence: Synthetic peptide
  Seed: IWHSNLNDATY
ISHSNLNDATF

SEQ ID NO: 45165 - protein, 11 aa, Artificial Sequence
  Description of Artificial Sequence: Synthetic peptide
  Seed: IWHSNLNDATY
ISHSNLNDATW

SEQ ID NO: 45166 - protein, 9 aa, Artificial Sequence
  Description of Artificial Sequence: Synthetic peptide
  Seed: KTGGPIYRR
KCGGPIYRR

SEQ ID NO: 45167 - protein, 9 aa, Artificial Sequence
  Description of Artificial Sequence: Synthetic peptide
  Seed: KTGGPIYRR
KQGGPIYRR

SEQ ID NO: 45168 - protein, 9 aa, Artificial Sequence
  Description of Artificial Sequence: Synthetic peptide
  Seed: KTGGPIYRR
KQGGPIYRK

SEQ ID NO: 45169 - protein, 10 aa, Artificial Sequence
  Description of Artificial Sequence: Synthetic peptide
  Seed: LELRSRYWAI
LPLRSRYWAV

SEQ ID NO: 45170 - protein, 10 aa, Artificial Sequence
  Description of Artificial Sequence: Synthetic peptide
  Seed: LELRSRYWAI
LPLRSRYWAA

SEQ ID NO: 45171 - protein, 10 aa, Artificial Sequence
  Description of Artificial Sequence: Synthetic peptide
  Seed: LELRSRYWAI
LPLRSRYWAC

SEQ ID NO: 45172 - protein, 10 aa, Artificial Sequence
  Description of Artificial Sequence: Synthetic peptide
  Seed: LELRSRYWAI
LPLRSRYWAG

SEQ ID NO: 45173 - protein, 10 aa, Artificial Sequence
  Description of Artificial Sequence: Synthetic peptide
  Seed: LELRSRYWAI
LPLRSRYWAI

SEQ ID NO: 45174 - protein, 10 aa, Artificial Sequence
  Description of Artificial Sequence: Synthetic peptide
  Seed: LELRSRYWAI
LPLRSRYWAL

SEQ ID NO: 45175 - protein, 10 aa, Artificial Sequence
  Description of Artificial Sequence: Synthetic peptide
  Seed: LELRSRYWAI
LPLRSRYWAM

SEQ ID NO: 45176 - protein, 10 aa, Artificial Sequence
  Description of Artificial Sequence: Synthetic peptide
  Seed: LELRSRYWAI
LPLRSRYWAF

SEQ ID NO: 45177 - protein, 10 aa, Artificial Sequence
  Description of Artificial Sequence: Synthetic peptide
  Seed: LELRSRYWAI
LPLRSRYWAS

SEQ ID NO: 45178 - protein, 10 aa, Artificial Sequence
  Description of Artificial Sequence: Synthetic peptide
  Seed: LELRSRYWAI
LPLRSRYWAT

SEQ ID NO: 45179 - protein, 10 aa, Artificial Sequence
  Description of Artificial Sequence: Synthetic peptide
  Seed: LELRSRYWAI
LSLRSRYWAA

SEQ ID NO: 45180 - protein, 10 aa, Artificial Sequence
  Description of Artificial Sequence: Synthetic peptide
  Seed: LELRSRYWAI
LTLRSRYWAL

SEQ ID NO: 45181 - protein, 10 aa, Artificial Sequence
  Description of Artificial Sequence: Synthetic peptide
  Seed: LELRSRYWAI
LSLRSRYWAC

SEQ ID NO: 45182 - protein, 10 aa, Artificial Sequence
  Description of Artificial Sequence: Synthetic peptide
  Seed: LELRSRYWAI
LSLRSRYWAI

SEQ ID NO: 45183 - protein, 10 aa, Artificial Sequence
  Description of Artificial Sequence: Synthetic peptide
  Seed: LELRSRYWAI
LSLRSRYWAL

SEQ ID NO: 45184 - protein, 10 aa, Artificial Sequence
  Description of Artificial Sequence: Synthetic peptide
  Seed: LELRSRYWAI
LSLRSRYWAM

SEQ ID NO: 45185 - protein, 10 aa, Artificial Sequence
  Description of Artificial Sequence: Synthetic peptide
  Seed: LELRSRYWAI
LSLRSRYWAF

SEQ ID NO: 45186 - protein, 10 aa, Artificial Sequence
  Description of Artificial Sequence: Synthetic peptide
  Seed: LELRSRYWAI
LSLRSRYWAT

SEQ ID NO: 45187 - protein, 10 aa, Artificial Sequence
  Description of Artificial Sequence: Synthetic peptide
  Seed: LELRSRYWAI
LSLRSRYWAV

SEQ ID NO: 45188 - protein, 10 aa, Artificial Sequence
  Description of Artificial Sequence: Synthetic peptide
  Seed: LELRSRYWAI
LTLRSRYWAA

SEQ ID NO: 45189 - protein, 10 aa, Artificial Sequence
  Description of Artificial Sequence: Synthetic peptide
  Seed: LELRSRYWAI
LTLRSRYWAC

SEQ ID NO: 45190 - protein, 10 aa, Artificial Sequence
  Description of Artificial Sequence: Synthetic peptide
  Seed: LELRSRYWAI
LFLRSRYWAV

SEQ ID NO: 45191 - protein, 10 aa, Artificial Sequence
  Description of Artificial Sequence: Synthetic peptide
  Seed: LELRSRYWAI
LFLRSRYWAT

SEQ ID NO: 45192 - protein, 10 aa, Artificial Sequence
  Description of Artificial Sequence: Synthetic peptide
  Seed: LELRSRYWAI
LFLRSRYWAF

SEQ ID NO: 45193 - protein, 10 aa, Artificial Sequence
  Description of Artificial Sequence: Synthetic peptide
  Seed: LELRSRYWAI
LFLRSRYWAM

SEQ ID NO: 45194 - protein, 10 aa, Artificial Sequence
  Description of Artificial Sequence: Synthetic peptide
  Seed: LELRSRYWAI
LKLRSRYWAI

SEQ ID NO: 45195 - protein, 10 aa, Artificial Sequence
  Description of Artificial Sequence: Synthetic peptide
  Seed: LELRSRYWAI
LKLRSRYWAL

SEQ ID NO: 45196 - protein, 10 aa, Artificial Sequence
  Description of Artificial Sequence: Synthetic peptide
  Seed: LELRSRYWAI
LKLRSRYWAM

SEQ ID NO: 45197 - protein, 10 aa, Artificial Sequence
  Description of Artificial Sequence: Synthetic peptide
  Seed: LELRSRYWAI
LKLRSRYWAF

SEQ ID NO: 45198 - protein, 10 aa, Artificial Sequence
  Description of Artificial Sequence: Synthetic peptide
  Seed: LELRSRYWAI
LKLRSRYWAV

SEQ ID NO: 45199 - protein, 10 aa, Artificial Sequence
  Description of Artificial Sequence: Synthetic peptide
  Seed: LELRSRYWAI
LMLRSRYWAA

SEQ ID NO: 45200 - protein, 10 aa, Artificial Sequence
  Description of Artificial Sequence: Synthetic peptide
  Seed: LELRSRYWAI
LMLRSRYWAC

SEQ ID NO: 45201 - protein, 10 aa, Artificial Sequence
  Description of Artificial Sequence: Synthetic peptide
  Seed: LELRSRYWAI
LMLRSRYWAG

SEQ ID NO: 45202 - protein, 10 aa, Artificial Sequence
  Description of Artificial Sequence: Synthetic peptide
  Seed: LELRSRYWAI
LMLRSRYWAI

SEQ ID NO: 45203 - protein, 10 aa, Artificial Sequence
  Description of Artificial Sequence: Synthetic peptide
  Seed: LELRSRYWAI
LMLRSRYWAL

SEQ ID NO: 45204 - protein, 10 aa, Artificial Sequence
  Description of Artificial Sequence: Synthetic peptide
  Seed: LELRSRYWAI
LMLRSRYWAM

SEQ ID NO: 45205 - protein, 10 aa, Artificial Sequence
  Description of Artificial Sequence: Synthetic peptide
  Seed: LELRSRYWAI
LMLRSRYWAF

SEQ ID NO: 45206 - protein, 10 aa, Artificial Sequence
  Description of Artificial Sequence: Synthetic peptide
  Seed: LELRSRYWAI
LMLRSRYWAS

SEQ ID NO: 45207 - protein, 10 aa, Artificial Sequence
  Description of Artificial Sequence: Synthetic peptide
  Seed: LELRSRYWAI
LMLRSRYWAT

SEQ ID NO: 45208 - protein, 10 aa, Artificial Sequence
  Description of Artificial Sequence: Synthetic peptide
  Seed: LELRSRYWAI
LMLRSRYWAV

SEQ ID NO: 45209 - protein, 10 aa, Artificial Sequence
  Description of Artificial Sequence: Synthetic peptide
  Seed: LELRSRYWAI
LFLRSRYWAA

SEQ ID NO: 45210 - protein, 10 aa, Artificial Sequence
  Description of Artificial Sequence: Synthetic peptide
  Seed: LELRSRYWAI
LFLRSRYWAC

SEQ ID NO: 45211 - protein, 10 aa, Artificial Sequence
  Description of Artificial Sequence: Synthetic peptide
  Seed: LELRSRYWAI
LFLRSRYWAI

SEQ ID NO: 45212 - protein, 10 aa, Artificial Sequence
  Description of Artificial Sequence: Synthetic peptide
  Seed: LELRSRYWAI
LFLRSRYWAL

SEQ ID NO: 45213 - protein, 10 aa, Artificial Sequence
  Description of Artificial Sequence: Synthetic peptide
  Seed: LELRSRYWAI
LTLRSRYWAI

SEQ ID NO: 45214 - protein, 10 aa, Artificial Sequence
  Description of Artificial Sequence: Synthetic peptide
  Seed: LELRSRYWAI
LTLRSRYWAM

SEQ ID NO: 45215 - protein, 10 aa, Artificial Sequence
  Description of Artificial Sequence: Synthetic peptide
  Seed: LELRSRYWAI
LKLRSRYWAA

SEQ ID NO: 45216 - protein, 9 aa, Artificial Sequence
  Description of Artificial Sequence: Synthetic peptide
  Seed: LIFLARSAL
LAFLARSAT

SEQ ID NO: 45217 - protein, 10 aa, Artificial Sequence
  Description of Artificial Sequence: Synthetic peptide
  Seed: LELRSRYWAI
LVLRSRYWAF

SEQ ID NO: 45218 - protein, 10 aa, Artificial Sequence
  Description of Artificial Sequence: Synthetic peptide
  Seed: LELRSRYWAI
LVLRSRYWAT

SEQ ID NO: 45219 - protein, 10 aa, Artificial Sequence
  Description of Artificial Sequence: Synthetic peptide
  Seed: LELRSRYWAI
LVLRSRYWAV

SEQ ID NO: 45220 - protein, 9 aa, Artificial Sequence
  Description of Artificial Sequence: Synthetic peptide
  Seed: LIFLARSAL
LAFLARSAA

SEQ ID NO: 45221 - protein, 9 aa, Artificial Sequence
  Description of Artificial Sequence: Synthetic peptide
  Seed: LIFLARSAL
LAFLARSAH

SEQ ID NO: 45222 - protein, 9 aa, Artificial Sequence
  Description of Artificial Sequence: Synthetic peptide
  Seed: LIFLARSAL
LAFLARSAI

SEQ ID NO: 45223 - protein, 9 aa, Artificial Sequence
  Description of Artificial Sequence: Synthetic peptide
  Seed: LIFLARSAL
LAFLARSAL

SEQ ID NO: 45224 - protein, 9 aa, Artificial Sequence
  Description of Artificial Sequence: Synthetic peptide
  Seed: LIFLARSAL
LAFLARSAM

SEQ ID NO: 45225 - protein, 9 aa, Artificial Sequence
  Description of Artificial Sequence: Synthetic peptide
  Seed: LIFLARSAL
LAFLARSAF

SEQ ID NO: 45226 - protein, 9 aa, Artificial Sequence
  Description of Artificial Sequence: Synthetic peptide
  Seed: LIFLARSAL
LAFLARSAW

SEQ ID NO: 45227 - protein, 10 aa, Artificial Sequence
  Description of Artificial Sequence: Synthetic peptide
  Seed: LELRSRYWAI
LTLRSRYWAF

SEQ ID NO: 45228 - protein, 9 aa, Artificial Sequence
  Description of Artificial Sequence: Synthetic peptide
  Seed: LIFLARSAL
LAFLARSAY

SEQ ID NO: 45229 - protein, 9 aa, Artificial Sequence
  Description of Artificial Sequence: Synthetic peptide
  Seed: LIFLARSAL
LAFLARSAV

SEQ ID NO: 45230 - protein, 9 aa, Artificial Sequence
  Description of Artificial Sequence: Synthetic peptide
  Seed: LIFLARSAL
LRFLARSAH

SEQ ID NO: 45231 - protein, 9 aa, Artificial Sequence
  Description of Artificial Sequence: Synthetic peptide
  Seed: LIFLARSAL
LRFLARSAI

SEQ ID NO: 45232 - protein, 9 aa, Artificial Sequence
  Description of Artificial Sequence: Synthetic peptide
  Seed: LIFLARSAL
LRFLARSAL

SEQ ID NO: 45233 - protein, 9 aa, Artificial Sequence
  Description of Artificial Sequence: Synthetic peptide
  Seed: LIFLARSAL
LRFLARSAM

SEQ ID NO: 45234 - protein, 9 aa, Artificial Sequence
  Description of Artificial Sequence: Synthetic peptide
  Seed: LIFLARSAL
LRFLARSAF

SEQ ID NO: 45235 - protein, 9 aa, Artificial Sequence
  Description of Artificial Sequence: Synthetic peptide
  Seed: LIFLARSAL
LRFLARSAW

SEQ ID NO: 45236 - protein, 9 aa, Artificial Sequence
  Description of Artificial Sequence: Synthetic peptide
  Seed: LIFLARSAL
LRFLARSAY

SEQ ID NO: 45237 - protein, 10 aa, Artificial Sequence
  Description of Artificial Sequence: Synthetic peptide
  Seed: LELRSRYWAI
LVLRSRYWAM

SEQ ID NO: 45238 - protein, 10 aa, Artificial Sequence
  Description of Artificial Sequence: Synthetic peptide
  Seed: LELRSRYWAI
LVLRSRYWAL

SEQ ID NO: 45239 - protein, 10 aa, Artificial Sequence
  Description of Artificial Sequence: Synthetic peptide
  Seed: LELRSRYWAI
LVLRSRYWAI

SEQ ID NO: 45240 - protein, 10 aa, Artificial Sequence
  Description of Artificial Sequence: Synthetic peptide
  Seed: LELRSRYWAI
LVLRSRYWAC

SEQ ID NO: 45241 - protein, 10 aa, Artificial Sequence
  Description of Artificial Sequence: Synthetic peptide
  Seed: LELRSRYWAI
LTLRSRYWAT

SEQ ID NO: 45242 - protein, 10 aa, Artificial Sequence
  Description of Artificial Sequence: Synthetic peptide
  Seed: LELRSRYWAI
LTLRSRYWAV

SEQ ID NO: 45243 - protein, 10 aa, Artificial Sequence
  Description of Artificial Sequence: Synthetic peptide
  Seed: LELRSRYWAI
LWLRSRYWAA

SEQ ID NO: 45244 - protein, 10 aa, Artificial Sequence
  Description of Artificial Sequence: Synthetic peptide
  Seed: LELRSRYWAI
LWLRSRYWAC

SEQ ID NO: 45245 - protein, 10 aa, Artificial Sequence
  Description of Artificial Sequence: Synthetic peptide
  Seed: LELRSRYWAI
LWLRSRYWAI

SEQ ID NO: 45246 - protein, 10 aa, Artificial Sequence
  Description of Artificial Sequence: Synthetic peptide
  Seed: LELRSRYWAI
LWLRSRYWAL

SEQ ID NO: 45247 - protein, 10 aa, Artificial Sequence
  Description of Artificial Sequence: Synthetic peptide
  Seed: LELRSRYWAI
LWLRSRYWAM

SEQ ID NO: 45248 - protein, 10 aa, Artificial Sequence
  Description of Artificial Sequence: Synthetic peptide
  Seed: LELRSRYWAI
LWLRSRYWAF

SEQ ID NO: 45249 - protein, 10 aa, Artificial Sequence
  Description of Artificial Sequence: Synthetic peptide
  Seed: LELRSRYWAI
LWLRSRYWAT

SEQ ID NO: 45250 - protein, 10 aa, Artificial Sequence
  Description of Artificial Sequence: Synthetic peptide
  Seed: LELRSRYWAI
LWLRSRYWAV

SEQ ID NO: 45251 - protein, 10 aa, Artificial Sequence
  Description of Artificial Sequence: Synthetic peptide
  Seed: LELRSRYWAI
LYLRSRYWAA

SEQ ID NO: 45252 - protein, 10 aa, Artificial Sequence
  Description of Artificial Sequence: Synthetic peptide
  Seed: LELRSRYWAI
LYLRSRYWAC

SEQ ID NO: 45253 - protein, 10 aa, Artificial Sequence
  Description of Artificial Sequence: Synthetic peptide
  Seed: LELRSRYWAI
LYLRSRYWAI

SEQ ID NO: 45254 - protein, 10 aa, Artificial Sequence
  Description of Artificial Sequence: Synthetic peptide
  Seed: LELRSRYWAI
LYLRSRYWAL

SEQ ID NO: 45255 - protein, 10 aa, Artificial Sequence
  Description of Artificial Sequence: Synthetic peptide
  Seed: LELRSRYWAI
LYLRSRYWAM

SEQ ID NO: 45256 - protein, 10 aa, Artificial Sequence
  Description of Artificial Sequence: Synthetic peptide
  Seed: LELRSRYWAI
LYLRSRYWAF

SEQ ID NO: 45257 - protein, 10 aa, Artificial Sequence
  Description of Artificial Sequence: Synthetic peptide
  Seed: LELRSRYWAI
LYLRSRYWAT

SEQ ID NO: 45258 - protein, 10 aa, Artificial Sequence
  Description of Artificial Sequence: Synthetic peptide
  Seed: LELRSRYWAI
LYLRSRYWAV

SEQ ID NO: 45259 - protein, 10 aa, Artificial Sequence
  Description of Artificial Sequence: Synthetic peptide
  Seed: LELRSRYWAI
LVLRSRYWAA

SEQ ID NO: 45260 - protein, 10 aa, Artificial Sequence
  Description of Artificial Sequence: Synthetic peptide
  Seed: LELRSRYWAI
LKLRSRYWAC

SEQ ID NO: 45261 - protein, 10 aa, Artificial Sequence
  Description of Artificial Sequence: Synthetic peptide
  Seed: LELRSRYWAI
LLLRSRYWAV

SEQ ID NO: 45262 - protein, 9 aa, Artificial Sequence
  Description of Artificial Sequence: Synthetic peptide
  Seed: LARSALILR
LARSALILK

SEQ ID NO: 45263 - protein, 10 aa, Artificial Sequence
  Description of Artificial Sequence: Synthetic peptide
  Seed: LELRSRYWAI
LDLRSRYWAL

SEQ ID NO: 45264 - protein, 10 aa, Artificial Sequence
  Description of Artificial Sequence: Synthetic peptide
  Seed: LELRSRYWAI
LNLRSRYWAI

SEQ ID NO: 45265 - protein, 10 aa, Artificial Sequence
  Description of Artificial Sequence: Synthetic peptide
  Seed: LELRSRYWAI
LNLRSRYWAL

SEQ ID NO: 45266 - protein, 10 aa, Artificial Sequence
  Description of Artificial Sequence: Synthetic peptide
  Seed: LELRSRYWAI
LNLRSRYWAM

SEQ ID NO: 45267 - protein, 10 aa, Artificial Sequence
  Description of Artificial Sequence: Synthetic peptide
  Seed: LELRSRYWAI
LNLRSRYWAF

SEQ ID NO: 45268 - protein, 10 aa, Artificial Sequence
  Description of Artificial Sequence: Synthetic peptide
  Seed: LELRSRYWAI
LNLRSRYWAT

SEQ ID NO: 45269 - protein, 10 aa, Artificial Sequence
  Description of Artificial Sequence: Synthetic peptide
  Seed: LELRSRYWAI
LNLRSRYWAV

SEQ ID NO: 45270 - protein, 10 aa, Artificial Sequence
  Description of Artificial Sequence: Synthetic peptide
  Seed: LELRSRYWAI
LDLRSRYWAA

SEQ ID NO: 45271 - protein, 10 aa, Artificial Sequence
  Description of Artificial Sequence: Synthetic peptide
  Seed: LELRSRYWAI
LDLRSRYWAC

SEQ ID NO: 45272 - protein, 10 aa, Artificial Sequence
  Description of Artificial Sequence: Synthetic peptide
  Seed: LELRSRYWAI
LDLRSRYWAI

SEQ ID NO: 45273 - protein, 10 aa, Artificial Sequence
  Description of Artificial Sequence: Synthetic peptide
  Seed: LELRSRYWAI
LDLRSRYWAM

SEQ ID NO: 45274 - protein, 10 aa, Artificial Sequence
  Description of Artificial Sequence: Synthetic peptide
  Seed: LELRSRYWAI
LQLRSRYWAA

SEQ ID NO: 45275 - protein, 10 aa, Artificial Sequence
  Description of Artificial Sequence: Synthetic peptide
  Seed: LELRSRYWAI
LDLRSRYWAF

SEQ ID NO: 45276 - protein, 10 aa, Artificial Sequence
  Description of Artificial Sequence: Synthetic peptide
  Seed: LELRSRYWAI
LDLRSRYWAT

SEQ ID NO: 45277 - protein, 10 aa, Artificial Sequence
  Description of Artificial Sequence: Synthetic peptide
  Seed: LELRSRYWAI
LDLRSRYWAV

SEQ ID NO: 45278 - protein, 10 aa, Artificial Sequence
  Description of Artificial Sequence: Synthetic peptide
  Seed: LELRSRYWAI
LCLRSRYWAA

SEQ ID NO: 45279 - protein, 10 aa, Artificial Sequence
  Description of Artificial Sequence: Synthetic peptide
  Seed: LELRSRYWAI
LCLRSRYWAC

SEQ ID NO: 45280 - protein, 10 aa, Artificial Sequence
  Description of Artificial Sequence: Synthetic peptide
  Seed: LELRSRYWAI
LCLRSRYWAI

SEQ ID NO: 45281 - protein, 10 aa, Artificial Sequence
  Description of Artificial Sequence: Synthetic peptide
  Seed: LELRSRYWAI
LCLRSRYWAL

SEQ ID NO: 45282 - protein, 10 aa, Artificial Sequence
  Description of Artificial Sequence: Synthetic peptide
  Seed: LELRSRYWAI
LCLRSRYWAM

SEQ ID NO: 45283 - protein, 10 aa, Artificial Sequence
  Description of Artificial Sequence: Synthetic peptide
  Seed: LELRSRYWAI
LCLRSRYWAF

SEQ ID NO: 45284 - protein, 10 aa, Artificial Sequence
  Description of Artificial Sequence: Synthetic peptide
  Seed: LELRSRYWAI
LNLRSRYWAC

SEQ ID NO: 45285 - protein, 10 aa, Artificial Sequence
  Description of Artificial Sequence: Synthetic peptide
  Seed: LELRSRYWAI
LNLRSRYWAA

SEQ ID NO: 45286 - protein, 10 aa, Artificial Sequence
  Description of Artificial Sequence: Synthetic peptide
  Seed: LELRSRYWAI
LRLRSRYWAV

SEQ ID NO: 45287 - protein, 10 aa, Artificial Sequence
  Description of Artificial Sequence: Synthetic peptide
  Seed: LELRSRYWAI
LRLRSRYWAT

SEQ ID NO: 45288 - protein, 9 aa, Artificial Sequence
  Description of Artificial Sequence: Synthetic peptide
  Seed: LELRSRYWA
LELRSRYWL

SEQ ID NO: 45289 - protein, 9 aa, Artificial Sequence
  Description of Artificial Sequence: Synthetic peptide
  Seed: LELRSRYWA
LELRSRYWM

SEQ ID NO: 45290 - protein, 9 aa, Artificial Sequence
  Description of Artificial Sequence: Synthetic peptide
  Seed: LELRSRYWA
LELRSRYWF

SEQ ID NO: 45291 - protein, 9 aa, Artificial Sequence
  Description of Artificial Sequence: Synthetic peptide
  Seed: LELRSRYWA
LELRSRYWP

SEQ ID NO: 45292 - protein, 9 aa, Artificial Sequence
  Description of Artificial Sequence: Synthetic peptide
  Seed: LELRSRYWA
LELRSRYWV

SEQ ID NO: 45293 - protein, 10 aa, Artificial Sequence
  Description of Artificial Sequence: Synthetic peptide
  Seed: LELRSRYWAI
LALRSRYWAA

SEQ ID NO: 45294 - protein, 10 aa, Artificial Sequence
  Description of Artificial Sequence: Synthetic peptide
  Seed: LELRSRYWAI
LALRSRYWAC

SEQ ID NO: 45295 - protein, 10 aa, Artificial Sequence
  Description of Artificial Sequence: Synthetic peptide
  Seed: LELRSRYWAI
LALRSRYWAI

SEQ ID NO: 45296 - protein, 10 aa, Artificial Sequence
  Description of Artificial Sequence: Synthetic peptide
  Seed: LELRSRYWAI
LALRSRYWAL

SEQ ID NO: 45297 - protein, 10 aa, Artificial Sequence
  Description of Artificial Sequence: Synthetic peptide
  Seed: LELRSRYWAI
LALRSRYWAM

SEQ ID NO: 45298 - protein, 10 aa, Artificial Sequence
  Description of Artificial Sequence: Synthetic peptide
  Seed: LELRSRYWAI
LALRSRYWAF

SEQ ID NO: 45299 - protein, 10 aa, Artificial Sequence
  Description of Artificial Sequence: Synthetic peptide
  Seed: LELRSRYWAI
LALRSRYWAT

SEQ ID NO: 45300 - protein, 10 aa, Artificial Sequence
  Description of Artificial Sequence: Synthetic peptide
  Seed: LELRSRYWAI
LALRSRYWAV

SEQ ID NO: 45301 - protein, 10 aa, Artificial Sequence
  Description of Artificial Sequence: Synthetic peptide
  Seed: LELRSRYWAI
LRLRSRYWAA

SEQ ID NO: 45302 - protein, 10 aa, Artificial Sequence
  Description of Artificial Sequence: Synthetic peptide
  Seed: LELRSRYWAI
LRLRSRYWAC

SEQ ID NO: 45303 - protein, 10 aa, Artificial Sequence
  Description of Artificial Sequence: Synthetic peptide
  Seed: LELRSRYWAI
LRLRSRYWAI

SEQ ID NO: 45304 - protein, 10 aa, Artificial Sequence
  Description of Artificial Sequence: Synthetic peptide
  Seed: LELRSRYWAI
LRLRSRYWAL

SEQ ID NO: 45305 - protein, 10 aa, Artificial Sequence
  Description of Artificial Sequence: Synthetic peptide
  Seed: LELRSRYWAI
LRLRSRYWAM

SEQ ID NO: 45306 - protein, 10 aa, Artificial Sequence
  Description of Artificial Sequence: Synthetic peptide
  Seed: LELRSRYWAI
LRLRSRYWAF

SEQ ID NO: 45307 - protein, 10 aa, Artificial Sequence
  Description of Artificial Sequence: Synthetic peptide
  Seed: LELRSRYWAI
LCLRSRYWAV

SEQ ID NO: 45308 - protein, 10 aa, Artificial Sequence
  Description of Artificial Sequence: Synthetic peptide
  Seed: LELRSRYWAI
LQLRSRYWAC

SEQ ID NO: 45309 - protein, 10 aa, Artificial Sequence
  Description of Artificial Sequence: Synthetic peptide
  Seed: LELRSRYWAI
LLLRSRYWAT

SEQ ID NO: 45310 - protein, 10 aa, Artificial Sequence
  Description of Artificial Sequence: Synthetic peptide
  Seed: LELRSRYWAI
LILRSRYWAL

SEQ ID NO: 45311 - protein, 10 aa, Artificial Sequence
  Description of Artificial Sequence: Synthetic peptide
  Seed: LELRSRYWAI
LHLRSRYWAI

SEQ ID NO: 45312 - protein, 10 aa, Artificial Sequence
  Description of Artificial Sequence: Synthetic peptide
  Seed: LELRSRYWAI
LHLRSRYWAL

SEQ ID NO: 45313 - protein, 10 aa, Artificial Sequence
  Description of Artificial Sequence: Synthetic peptide
  Seed: LELRSRYWAI
LHLRSRYWAM

SEQ ID NO: 45314 - protein, 10 aa, Artificial Sequence
  Description of Artificial Sequence: Synthetic peptide
  Seed: LELRSRYWAI
LHLRSRYWAF

SEQ ID NO: 45315 - protein, 10 aa, Artificial Sequence
  Description of Artificial Sequence: Synthetic peptide
  Seed: LELRSRYWAI
LHLRSRYWAT

SEQ ID NO: 45316 - protein, 10 aa, Artificial Sequence
  Description of Artificial Sequence: Synthetic peptide
  Seed: LELRSRYWAI
LHLRSRYWAV

SEQ ID NO: 45317 - protein, 10 aa, Artificial Sequence
  Description of Artificial Sequence: Synthetic peptide
  Seed: LELRSRYWAI
LILRSRYWAA

SEQ ID NO: 45318 - protein, 10 aa, Artificial Sequence
  Description of Artificial Sequence: Synthetic peptide
  Seed: LELRSRYWAI
LILRSRYWAC

SEQ ID NO: 45319 - protein, 10 aa, Artificial Sequence
  Description of Artificial Sequence: Synthetic peptide
  Seed: LELRSRYWAI
LILRSRYWAI

SEQ ID NO: 45320 - protein, 10 aa, Artificial Sequence
  Description of Artificial Sequence: Synthetic peptide
  Seed: LELRSRYWAI
LILRSRYWAM

SEQ ID NO: 45321 - protein, 10 aa, Artificial Sequence
  Description of Artificial Sequence: Synthetic peptide
  Seed: LELRSRYWAI
LQLRSRYWAI

SEQ ID NO: 45322 - protein, 10 aa, Artificial Sequence
  Description of Artificial Sequence: Synthetic peptide
  Seed: LELRSRYWAI
LILRSRYWAF

SEQ ID NO: 45323 - protein, 10 aa, Artificial Sequence
  Description of Artificial Sequence: Synthetic peptide
  Seed: LELRSRYWAI
LILRSRYWAT

SEQ ID NO: 45324 - protein, 10 aa, Artificial Sequence
  Description of Artificial Sequence: Synthetic peptide
  Seed: LELRSRYWAI
LILRSRYWAV

SEQ ID NO: 45325 - protein, 10 aa, Artificial Sequence
  Description of Artificial Sequence: Synthetic peptide
  Seed: LELRSRYWAI
LLLRSRYWAA

SEQ ID NO: 45326 - protein, 10 aa, Artificial Sequence
  Description of Artificial Sequence: Synthetic peptide
  Seed: LELRSRYWAI
LLLRSRYWAC

SEQ ID NO: 45327 - protein, 10 aa, Artificial Sequence
  Description of Artificial Sequence: Synthetic peptide
  Seed: LELRSRYWAI
LLLRSRYWAI

SEQ ID NO: 45328 - protein, 10 aa, Artificial Sequence
  Description of Artificial Sequence: Synthetic peptide
  Seed: LELRSRYWAI
LLLRSRYWAL

SEQ ID NO: 45329 - protein, 10 aa, Artificial Sequence
  Description of Artificial Sequence: Synthetic peptide
  Seed: LELRSRYWAI
LLLRSRYWAM

SEQ ID NO: 45330 - protein, 10 aa, Artificial Sequence
  Description of Artificial Sequence: Synthetic peptide
  Seed: LELRSRYWAI
LLLRSRYWAF

SEQ ID NO: 45331 - protein, 10 aa, Artificial Sequence
  Description of Artificial Sequence: Synthetic peptide
  Seed: LELRSRYWAI
LHLRSRYWAC

SEQ ID NO: 45332 - protein, 10 aa, Artificial Sequence
  Description of Artificial Sequence: Synthetic peptide
  Seed: LELRSRYWAI
LHLRSRYWAA

SEQ ID NO: 45333 - protein, 10 aa, Artificial Sequence
  Description of Artificial Sequence: Synthetic peptide
  Seed: LELRSRYWAI
LGLRSRYWAV

SEQ ID NO: 45334 - protein, 10 aa, Artificial Sequence
  Description of Artificial Sequence: Synthetic peptide
  Seed: LELRSRYWAI
LGLRSRYWAT

SEQ ID NO: 45335 - protein, 10 aa, Artificial Sequence
  Description of Artificial Sequence: Synthetic peptide
  Seed: LELRSRYWAI
LQLRSRYWAL

SEQ ID NO: 45336 - protein, 10 aa, Artificial Sequence
  Description of Artificial Sequence: Synthetic peptide
  Seed: LELRSRYWAI
LQLRSRYWAM

SEQ ID NO: 45337 - protein, 10 aa, Artificial Sequence
  Description of Artificial Sequence: Synthetic peptide
  Seed: LELRSRYWAI
LQLRSRYWAF

SEQ ID NO: 45338 - protein, 10 aa, Artificial Sequence
  Description of Artificial Sequence: Synthetic peptide
  Seed: LELRSRYWAI
LQLRSRYWAT

SEQ ID NO: 45339 - protein, 10 aa, Artificial Sequence
  Description of Artificial Sequence: Synthetic peptide
  Seed: LELRSRYWAI
LQLRSRYWAV

SEQ ID NO: 45340 - protein, 10 aa, Artificial Sequence
  Description of Artificial Sequence: Synthetic peptide
  Seed: LELRSRYWAI
LELRSRYWAA

SEQ ID NO: 45341 - protein, 10 aa, Artificial Sequence
  Description of Artificial Sequence: Synthetic peptide
  Seed: LELRSRYWAI
LELRSRYWAC

SEQ ID NO: 45342 - protein, 10 aa, Artificial Sequence
  Description of Artificial Sequence: Synthetic peptide
  Seed: LELRSRYWAI
LELRSRYWAL

SEQ ID NO: 45343 - protein, 10 aa, Artificial Sequence
  Description of Artificial Sequence: Synthetic peptide
  Seed: LELRSRYWAI
LELRSRYWAM

SEQ ID NO: 45344 - protein, 10 aa, Artificial Sequence
  Description of Artificial Sequence: Synthetic peptide
  Seed: LELRSRYWAI
LELRSRYWAF

SEQ ID NO: 45345 - protein, 10 aa, Artificial Sequence
  Description of Artificial Sequence: Synthetic peptide
  Seed: LELRSRYWAI
LELRSRYWAP

SEQ ID NO: 45346 - protein, 10 aa, Artificial Sequence
  Description of Artificial Sequence: Synthetic peptide
  Seed: LELRSRYWAI
LELRSRYWAT

SEQ ID NO: 45347 - protein, 10 aa, Artificial Sequence
  Description of Artificial Sequence: Synthetic peptide
  Seed: LELRSRYWAI
LELRSRYWAV

SEQ ID NO: 45348 - protein, 10 aa, Artificial Sequence
  Description of Artificial Sequence: Synthetic peptide
  Seed: LELRSRYWAI
LGLRSRYWAA

SEQ ID NO: 45349 - protein, 10 aa, Artificial Sequence
  Description of Artificial Sequence: Synthetic peptide
  Seed: LELRSRYWAI
LGLRSRYWAC

SEQ ID NO: 45350 - protein, 10 aa, Artificial Sequence
  Description of Artificial Sequence: Synthetic peptide
  Seed: LELRSRYWAI
LGLRSRYWAI

SEQ ID NO: 45351 - protein, 10 aa, Artificial Sequence
  Description of Artificial Sequence: Synthetic peptide
  Seed: LELRSRYWAI
LGLRSRYWAL

SEQ ID NO: 45352 - protein, 10 aa, Artificial Sequence
  Description of Artificial Sequence: Synthetic peptide
  Seed: LELRSRYWAI
LGLRSRYWAM

SEQ ID NO: 45353 - protein, 10 aa, Artificial Sequence
  Description of Artificial Sequence: Synthetic peptide
  Seed: LELRSRYWAI
LGLRSRYWAF

SEQ ID NO: 45354 - protein, 9 aa, Artificial Sequence
  Description of Artificial Sequence: Synthetic peptide
  Seed: LIFLARSAL
LRFLARSAV

SEQ ID NO: 45355 - protein, 9 aa, Artificial Sequence
  Description of Artificial Sequence: Synthetic peptide
  Seed: LIFLARSAL
LNFLARSAI

SEQ ID NO: 45356 - protein, 9 aa, Artificial Sequence
  Description of Artificial Sequence: Synthetic peptide
  Seed: LIFLARSAL
LNFLARSAL

SEQ ID NO: 45357 - protein, 9 aa, Artificial Sequence
  Description of Artificial Sequence: Synthetic peptide
  Seed: LIFLARSAL
LPFLARSAF

SEQ ID NO: 45358 - protein, 9 aa, Artificial Sequence
  Description of Artificial Sequence: Synthetic peptide
  Seed: LIFLARSAL
LPFLARSAC

SEQ ID NO: 45359 - protein, 9 aa, Artificial Sequence
  Description of Artificial Sequence: Synthetic peptide
  Seed: LIFLARSAL
LPFLARSAQ

SEQ ID NO: 45360 - protein, 9 aa, Artificial Sequence
  Description of Artificial Sequence: Synthetic peptide
  Seed: LIFLARSAL
LPFLARSAE

SEQ ID NO: 45361 - protein, 9 aa, Artificial Sequence
  Description of Artificial Sequence: Synthetic peptide
  Seed: LIFLARSAL
LPFLARSAG

SEQ ID NO: 45362 - protein, 9 aa, Artificial Sequence
  Description of Artificial Sequence: Synthetic peptide
  Seed: LIFLARSAL
LPFLARSAH

SEQ ID NO: 45363 - protein, 9 aa, Artificial Sequence
  Description of Artificial Sequence: Synthetic peptide
  Seed: LIFLARSAL
LPFLARSAI

SEQ ID NO: 45364 - protein, 9 aa, Artificial Sequence
  Description of Artificial Sequence: Synthetic peptide
  Seed: LIFLARSAL
LPFLARSAL

SEQ ID NO: 45365 - protein, 9 aa, Artificial Sequence
  Description of Artificial Sequence: Synthetic peptide
  Seed: LIFLARSAL
LPFLARSAK

SEQ ID NO: 45366 - protein, 9 aa, Artificial Sequence
  Description of Artificial Sequence: Synthetic peptide
  Seed: LIFLARSAL
LPFLARSAM

SEQ ID NO: 45367 - protein, 9 aa, Artificial Sequence
  Description of Artificial Sequence: Synthetic peptide
  Seed: LIFLARSAL
LPFLARSAP

SEQ ID NO: 45368 - protein, 9 aa, Artificial Sequence
  Description of Artificial Sequence: Synthetic peptide
  Seed: LIFLARSAL
LSFLARSAF

SEQ ID NO: 45369 - protein, 9 aa, Artificial Sequence
  Description of Artificial Sequence: Synthetic peptide
  Seed: LIFLARSAL
LPFLARSAS

SEQ ID NO: 45370 - protein, 9 aa, Artificial Sequence
  Description of Artificial Sequence: Synthetic peptide
  Seed: LIFLARSAL
LPFLARSAT

SEQ ID NO: 45371 - protein, 9 aa, Artificial Sequence
  Description of Artificial Sequence: Synthetic peptide
  Seed: LIFLARSAL
LPFLARSAW

SEQ ID NO: 45372 - protein, 9 aa, Artificial Sequence
  Description of Artificial Sequence: Synthetic peptide
  Seed: LIFLARSAL
LPFLARSAY

SEQ ID NO: 45373 - protein, 9 aa, Artificial Sequence
  Description of Artificial Sequence: Synthetic peptide
  Seed: LIFLARSAL
LPFLARSAV

SEQ ID NO: 45374 - protein, 9 aa, Artificial Sequence
  Description of Artificial Sequence: Synthetic peptide
  Seed: LIFLARSAL
LSFLARSAA

SEQ ID NO: 45375 - protein, 9 aa, Artificial Sequence
  Description of Artificial Sequence: Synthetic peptide
  Seed: LIFLARSAL
LSFLARSAH

SEQ ID NO: 45376 - protein, 9 aa, Artificial Sequence
  Description of Artificial Sequence: Synthetic peptide
  Seed: LIFLARSAL
LSFLARSAI

SEQ ID NO: 45377 - protein, 9 aa, Artificial Sequence
  Description of Artificial Sequence: Synthetic peptide
  Seed: LIFLARSAL
LSFLARSAL

SEQ ID NO: 45378 - protein, 9 aa, Artificial Sequence
  Description of Artificial Sequence: Synthetic peptide
  Seed: LIFLARSAL
LPFLARSAN

SEQ ID NO: 45379 - protein, 9 aa, Artificial Sequence
  Description of Artificial Sequence: Synthetic peptide
  Seed: LIFLARSAL
LPFLARSAA

SEQ ID NO: 45380 - protein, 9 aa, Artificial Sequence
  Description of Artificial Sequence: Synthetic peptide
  Seed: LIFLARSAL
LFFLARSAV

SEQ ID NO: 45381 - protein, 9 aa, Artificial Sequence
  Description of Artificial Sequence: Synthetic peptide
  Seed: LIFLARSAL
LFFLARSAY

SEQ ID NO: 45382 - protein, 9 aa, Artificial Sequence
  Description of Artificial Sequence: Synthetic peptide
  Seed: LIFLARSAL
LMFLARSAH

SEQ ID NO: 45383 - protein, 9 aa, Artificial Sequence
  Description of Artificial Sequence: Synthetic peptide
  Seed: LIFLARSAL
LMFLARSAI

SEQ ID NO: 45384 - protein, 9 aa, Artificial Sequence
  Description of Artificial Sequence: Synthetic peptide
  Seed: LIFLARSAL
LMFLARSAL

SEQ ID NO: 45385 - protein, 9 aa, Artificial Sequence
  Description of Artificial Sequence: Synthetic peptide
  Seed: LIFLARSAL
LMFLARSAM

SEQ ID NO: 45386 - protein, 9 aa, Artificial Sequence
  Description of Artificial Sequence: Synthetic peptide
  Seed: LIFLARSAL
LMFLARSAF

SEQ ID NO: 45387 - protein, 9 aa, Artificial Sequence
  Description of Artificial Sequence: Synthetic peptide
  Seed: LIFLARSAL
LMFLARSAP

SEQ ID NO: 45388 - protein, 9 aa, Artificial Sequence
  Description of Artificial Sequence: Synthetic peptide
  Seed: LIFLARSAL
LMFLARSAS

SEQ ID NO: 45389 - protein, 9 aa, Artificial Sequence
  Description of Artificial Sequence: Synthetic peptide
  Seed: LIFLARSAL
LMFLARSAT

SEQ ID NO: 45390 - protein, 9 aa, Artificial Sequence
  Description of Artificial Sequence: Synthetic peptide
  Seed: LIFLARSAL
LMFLARSAW

SEQ ID NO: 45391 - protein, 9 aa, Artificial Sequence
  Description of Artificial Sequence: Synthetic peptide
  Seed: LIFLARSAL
LMFLARSAY

SEQ ID NO: 45392 - protein, 9 aa, Artificial Sequence
  Description of Artificial Sequence: Synthetic peptide
  Seed: LIFLARSAL
LMFLARSAV

SEQ ID NO: 45393 - protein, 9 aa, Artificial Sequence
  Description of Artificial Sequence: Synthetic peptide
  Seed: LIFLARSAL
LFFLARSAA

SEQ ID NO: 45394 - protein, 9 aa, Artificial Sequence
  Description of Artificial Sequence: Synthetic peptide
  Seed: LIFLARSAL
LFFLARSAH

SEQ ID NO: 45395 - protein, 9 aa, Artificial Sequence
  Description of Artificial Sequence: Synthetic peptide
  Seed: LIFLARSAL
LFFLARSAI

SEQ ID NO: 45396 - protein, 9 aa, Artificial Sequence
  Description of Artificial Sequence: Synthetic peptide
  Seed: LIFLARSAL
LFFLARSAL

SEQ ID NO: 45397 - protein, 9 aa, Artificial Sequence
  Description of Artificial Sequence: Synthetic peptide
  Seed: LIFLARSAL
LFFLARSAM

SEQ ID NO: 45398 - protein, 9 aa, Artificial Sequence
  Description of Artificial Sequence: Synthetic peptide
  Seed: LIFLARSAL
LFFLARSAF

SEQ ID NO: 45399 - protein, 9 aa, Artificial Sequence
  Description of Artificial Sequence: Synthetic peptide
  Seed: LIFLARSAL
LFFLARSAT

SEQ ID NO: 45400 - protein, 9 aa, Artificial Sequence
  Description of Artificial Sequence: Synthetic peptide
  Seed: LIFLARSAL
LFFLARSAW

SEQ ID NO: 45401 - protein, 9 aa, Artificial Sequence
  Description of Artificial Sequence: Synthetic peptide
  Seed: LIFLARSAL
LSFLARSAM

SEQ ID NO: 45402 - protein, 9 aa, Artificial Sequence
  Description of Artificial Sequence: Synthetic peptide
  Seed: LIFLARSAL
LSFLARSAW

SEQ ID NO: 45403 - protein, 9 aa, Artificial Sequence
  Description of Artificial Sequence: Synthetic peptide
  Seed: LIFLARSAL
LNFLARSAM

SEQ ID NO: 45404 - protein, 9 aa, Artificial Sequence
  Description of Artificial Sequence: Synthetic peptide
  Seed: LIFLARSAL
LVFLARSAA

SEQ ID NO: 45405 - protein, 9 aa, Artificial Sequence
  Description of Artificial Sequence: Synthetic peptide
  Seed: LIFLARSAL
LYFLARSAL

SEQ ID NO: 45406 - protein, 9 aa, Artificial Sequence
  Description of Artificial Sequence: Synthetic peptide
  Seed: LIFLARSAL
LYFLARSAK

SEQ ID NO: 45407 - protein, 9 aa, Artificial Sequence
  Description of Artificial Sequence: Synthetic peptide
  Seed: LIFLARSAL
LYFLARSAM

SEQ ID NO: 45408 - protein, 9 aa, Artificial Sequence
  Description of Artificial Sequence: Synthetic peptide
  Seed: LIFLARSAL
LYFLARSAF

SEQ ID NO: 45409 - protein, 9 aa, Artificial Sequence
  Description of Artificial Sequence: Synthetic peptide
  Seed: LIFLARSAL
LYFLARSAS

SEQ ID NO: 45410 - protein, 9 aa, Artificial Sequence
  Description of Artificial Sequence: Synthetic peptide
  Seed: LIFLARSAL
LYFLARSAT

SEQ ID NO: 45411 - protein, 9 aa, Artificial Sequence
  Description of Artificial Sequence: Synthetic peptide
  Seed: LIFLARSAL
LYFLARSAW

SEQ ID NO: 45412 - protein, 9 aa, Artificial Sequence
  Description of Artificial Sequence: Synthetic peptide
  Seed: LIFLARSAL
LYFLARSAY

SEQ ID NO: 45413 - protein, 9 aa, Artificial Sequence
  Description of Artificial Sequence: Synthetic peptide
  Seed: LIFLARSAL
LYFLARSAV

SEQ ID NO: 45414 - protein, 9 aa, Artificial Sequence
  Description of Artificial Sequence: Synthetic peptide
  Seed: LIFLARSAL
LVFLARSAH

SEQ ID NO: 45415 - protein, 9 aa, Artificial Sequence
  Description of Artificial Sequence: Synthetic peptide
  Seed: LIFLARSAL
LSFLARSAY

SEQ ID NO: 45416 - protein, 9 aa, Artificial Sequence
  Description of Artificial Sequence: Synthetic peptide
  Seed: LIFLARSAL
LVFLARSAI

SEQ ID NO: 45417 - protein, 9 aa, Artificial Sequence
  Description of Artificial Sequence: Synthetic peptide
  Seed: LIFLARSAL
LVFLARSAL

SEQ ID NO: 45418 - protein, 9 aa, Artificial Sequence
  Description of Artificial Sequence: Synthetic peptide
  Seed: LIFLARSAL
LVFLARSAM

SEQ ID NO: 45419 - protein, 9 aa, Artificial Sequence
  Description of Artificial Sequence: Synthetic peptide
  Seed: LIFLARSAL
LVFLARSAF

SEQ ID NO: 45420 - protein, 9 aa, Artificial Sequence
  Description of Artificial Sequence: Synthetic peptide
  Seed: LIFLARSAL
LVFLARSAW

SEQ ID NO: 45421 - protein, 9 aa, Artificial Sequence
  Description of Artificial Sequence: Synthetic peptide
  Seed: LIFLARSAL
LVFLARSAY

SEQ ID NO: 45422 - protein, 9 aa, Artificial Sequence
  Description of Artificial Sequence: Synthetic peptide
  Seed: LIFLARSAL
LVFLARSAV

SEQ ID NO: 45423 - protein, 10 aa, Artificial Sequence
  Description of Artificial Sequence: Synthetic peptide
  Seed: LIFLARSALI
LAFLARSALI

SEQ ID NO: 45424 - protein, 10 aa, Artificial Sequence
  Description of Artificial Sequence: Synthetic peptide
  Seed: LIFLARSALI
LAFLARSALV

SEQ ID NO: 45425 - protein, 9 aa, Artificial Sequence
  Description of Artificial Sequence: Synthetic peptide
  Seed: LIFLARSAL
LYFLARSAI

SEQ ID NO: 45426 - protein, 9 aa, Artificial Sequence
  Description of Artificial Sequence: Synthetic peptide
  Seed: LIFLARSAL
LYFLARSAH

SEQ ID NO: 45427 - protein, 9 aa, Artificial Sequence
  Description of Artificial Sequence: Synthetic peptide
  Seed: LIFLARSAL
LYFLARSAG

SEQ ID NO: 45428 - protein, 9 aa, Artificial Sequence
  Description of Artificial Sequence: Synthetic peptide
  Seed: LIFLARSAL
LYFLARSAQ

SEQ ID NO: 45429 - protein, 9 aa, Artificial Sequence
  Description of Artificial Sequence: Synthetic peptide
  Seed: LIFLARSAL
LSFLARSAV

SEQ ID NO: 45430 - protein, 9 aa, Artificial Sequence
  Description of Artificial Sequence: Synthetic peptide
  Seed: LIFLARSAL
LTFLARSAH

SEQ ID NO: 45431 - protein, 9 aa, Artificial Sequence
  Description of Artificial Sequence: Synthetic peptide
  Seed: LIFLARSAL
LTFLARSAI

SEQ ID NO: 45432 - protein, 9 aa, Artificial Sequence
  Description of Artificial Sequence: Synthetic peptide
  Seed: LIFLARSAL
LTFLARSAM

SEQ ID NO: 45433 - protein, 9 aa, Artificial Sequence
  Description of Artificial Sequence: Synthetic peptide
  Seed: LIFLARSAL
LTFLARSAF

SEQ ID NO: 45434 - protein, 9 aa, Artificial Sequence
  Description of Artificial Sequence: Synthetic peptide
  Seed: LIFLARSAL
LTFLARSAW

SEQ ID NO: 45435 - protein, 9 aa, Artificial Sequence
  Description of Artificial Sequence: Synthetic peptide
  Seed: LIFLARSAL
LTFLARSAY

SEQ ID NO: 45436 - protein, 9 aa, Artificial Sequence
  Description of Artificial Sequence: Synthetic peptide
  Seed: LIFLARSAL
LTFLARSAV

SEQ ID NO: 45437 - protein, 9 aa, Artificial Sequence
  Description of Artificial Sequence: Synthetic peptide
  Seed: LIFLARSAL
LWFLARSAA

SEQ ID NO: 45438 - protein, 9 aa, Artificial Sequence
  Description of Artificial Sequence: Synthetic peptide
  Seed: LIFLARSAL
LWFLARSAI

SEQ ID NO: 45439 - protein, 9 aa, Artificial Sequence
  Description of Artificial Sequence: Synthetic peptide
  Seed: LIFLARSAL
LWFLARSAL

SEQ ID NO: 45440 - protein, 9 aa, Artificial Sequence
  Description of Artificial Sequence: Synthetic peptide
  Seed: LIFLARSAL
LWFLARSAM

SEQ ID NO: 45441 - protein, 9 aa, Artificial Sequence
  Description of Artificial Sequence: Synthetic peptide
  Seed: LIFLARSAL
LWFLARSAF

SEQ ID NO: 45442 - protein, 9 aa, Artificial Sequence
  Description of Artificial Sequence: Synthetic peptide
  Seed: LIFLARSAL
LWFLARSAW

SEQ ID NO: 45443 - protein, 9 aa, Artificial Sequence
  Description of Artificial Sequence: Synthetic peptide
  Seed: LIFLARSAL
LWFLARSAY

SEQ ID NO: 45444 - protein, 9 aa, Artificial Sequence
  Description of Artificial Sequence: Synthetic peptide
  Seed: LIFLARSAL
LWFLARSAV

SEQ ID NO: 45445 - protein, 9 aa, Artificial Sequence
  Description of Artificial Sequence: Synthetic peptide
  Seed: LIFLARSAL
LYFLARSAA

SEQ ID NO: 45446 - protein, 9 aa, Artificial Sequence
  Description of Artificial Sequence: Synthetic peptide
  Seed: LIFLARSAL
LYFLARSAC

SEQ ID NO: 45447 - protein, 9 aa, Artificial Sequence
  Description of Artificial Sequence: Synthetic peptide
  Seed: LIFLARSAL
LMFLARSAG

SEQ ID NO: 45448 - protein, 9 aa, Artificial Sequence
  Description of Artificial Sequence: Synthetic peptide
  Seed: LIFLARSAL
LMFLARSAQ

SEQ ID NO: 45449 - protein, 9 aa, Artificial Sequence
  Description of Artificial Sequence: Synthetic peptide
  Seed: LIFLARSAL
LMFLARSAC

SEQ ID NO: 45450 - protein, 9 aa, Artificial Sequence
  Description of Artificial Sequence: Synthetic peptide
  Seed: LIFLARSAL
LEFLARSAI

SEQ ID NO: 45451 - protein, 9 aa, Artificial Sequence
  Description of Artificial Sequence: Synthetic peptide
  Seed: LIFLARSAL
LQFLARSAF

SEQ ID NO: 45452 - protein, 9 aa, Artificial Sequence
  Description of Artificial Sequence: Synthetic peptide
  Seed: LIFLARSAL
LQFLARSAP

SEQ ID NO: 45453 - protein, 9 aa, Artificial Sequence
  Description of Artificial Sequence: Synthetic peptide
  Seed: LIFLARSAL
LQFLARSAS

SEQ ID NO: 45454 - protein, 9 aa, Artificial Sequence
  Description of Artificial Sequence: Synthetic peptide
  Seed: LIFLARSAL
LQFLARSAT

SEQ ID NO: 45455 - protein, 9 aa, Artificial Sequence
  Description of Artificial Sequence: Synthetic peptide
  Seed: LIFLARSAL
LQFLARSAW

SEQ ID NO: 45456 - protein, 9 aa, Artificial Sequence
  Description of Artificial Sequence: Synthetic peptide
  Seed: LIFLARSAL
LQFLARSAY

SEQ ID NO: 45457 - protein, 9 aa, Artificial Sequence
  Description of Artificial Sequence: Synthetic peptide
  Seed: LIFLARSAL
LQFLARSAV

SEQ ID NO: 45458 - protein, 9 aa, Artificial Sequence
  Description of Artificial Sequence: Synthetic peptide
  Seed: LIFLARSAL
LEFLARSAA

SEQ ID NO: 45459 - protein, 9 aa, Artificial Sequence
  Description of Artificial Sequence: Synthetic peptide
  Seed: LIFLARSAL
LEFLARSAH

SEQ ID NO: 45460 - protein, 9 aa, Artificial Sequence
  Description of Artificial Sequence: Synthetic peptide
  Seed: LIFLARSAL
LEFLARSAL

SEQ ID NO: 45461 - protein, 9 aa, Artificial Sequence
  Description of Artificial Sequence: Synthetic peptide
  Seed: LIFLARSAL
LMFLARSAN

SEQ ID NO: 45462 - protein, 9 aa, Artificial Sequence
  Description of Artificial Sequence: Synthetic peptide
  Seed: LIFLARSAL
LEFLARSAM

SEQ ID NO: 45463 - protein, 9 aa, Artificial Sequence
  Description of Artificial Sequence: Synthetic peptide
  Seed: LIFLARSAL
LEFLARSAF

SEQ ID NO: 45464 - protein, 9 aa, Artificial Sequence
  Description of Artificial Sequence: Synthetic peptide
  Seed: LIFLARSAL
LEFLARSAW

SEQ ID NO: 45465 - protein, 9 aa, Artificial Sequence
  Description of Artificial Sequence: Synthetic peptide
  Seed: LIFLARSAL
LEFLARSAY

SEQ ID NO: 45466 - protein, 9 aa, Artificial Sequence
  Description of Artificial Sequence: Synthetic peptide
  Seed: LIFLARSAL
LEFLARSAV

SEQ ID NO: 45467 - protein, 9 aa, Artificial Sequence
  Description of Artificial Sequence: Synthetic peptide
  Seed: LIFLARSAL
LGFLARSAI

SEQ ID NO: 45468 - protein, 9 aa, Artificial Sequence
  Description of Artificial Sequence: Synthetic peptide
  Seed: LIFLARSAL
LGFLARSAL

SEQ ID NO: 45469 - protein, 9 aa, Artificial Sequence
  Description of Artificial Sequence: Synthetic peptide
  Seed: LIFLARSAL
LGFLARSAM

SEQ ID NO: 45470 - protein, 9 aa, Artificial Sequence
  Description of Artificial Sequence: Synthetic peptide
  Seed: LIFLARSAL
LGFLARSAF

SEQ ID NO: 45471 - protein, 9 aa, Artificial Sequence
  Description of Artificial Sequence: Synthetic peptide
  Seed: LIFLARSAL
LQFLARSAM

SEQ ID NO: 45472 - protein, 9 aa, Artificial Sequence
  Description of Artificial Sequence: Synthetic peptide
  Seed: LIFLARSAL
LQFLARSAK

SEQ ID NO: 45473 - protein, 9 aa, Artificial Sequence
  Description of Artificial Sequence: Synthetic peptide
  Seed: LIFLARSAL
LQFLARSAL

SEQ ID NO: 45474 - protein, 9 aa, Artificial Sequence
  Description of Artificial Sequence: Synthetic peptide
  Seed: LIFLARSAL
LQFLARSAI

SEQ ID NO: 45475 - protein, 9 aa, Artificial Sequence
  Description of Artificial Sequence: Synthetic peptide
  Seed: LIFLARSAL
LNFLARSAF

SEQ ID NO: 45476 - protein, 9 aa, Artificial Sequence
  Description of Artificial Sequence: Synthetic peptide
  Seed: LIFLARSAL
LNFLARSAW

SEQ ID NO: 45477 - protein, 9 aa, Artificial Sequence
  Description of Artificial Sequence: Synthetic peptide
  Seed: LIFLARSAL
LNFLARSAY

SEQ ID NO: 45478 - protein, 9 aa, Artificial Sequence
  Description of Artificial Sequence: Synthetic peptide
  Seed: LIFLARSAL
LNFLARSAV

SEQ ID NO: 45479 - protein, 9 aa, Artificial Sequence
  Description of Artificial Sequence: Synthetic peptide
  Seed: LIFLARSAL
LDFLARSAM

SEQ ID NO: 45480 - protein, 9 aa, Artificial Sequence
  Description of Artificial Sequence: Synthetic peptide
  Seed: LIFLARSAL
LDFLARSAF

SEQ ID NO: 45481 - protein, 9 aa, Artificial Sequence
  Description of Artificial Sequence: Synthetic peptide
  Seed: LIFLARSAL
LDFLARSAY

SEQ ID NO: 45482 - protein, 9 aa, Artificial Sequence
  Description of Artificial Sequence: Synthetic peptide
  Seed: LIFLARSAL
LCFLARSAL

SEQ ID NO: 45483 - protein, 9 aa, Artificial Sequence
  Description of Artificial Sequence: Synthetic peptide
  Seed: LIFLARSAL
LCFLARSAM

SEQ ID NO: 45484 - protein, 9 aa, Artificial Sequence
  Description of Artificial Sequence: Synthetic peptide
  Seed: LIFLARSAL
LCFLARSAF

SEQ ID NO: 45485 - protein, 9 aa, Artificial Sequence
  Description of Artificial Sequence: Synthetic peptide
  Seed: LIFLARSAL
LCFLARSAY

SEQ ID NO: 45486 - protein, 9 aa, Artificial Sequence
  Description of Artificial Sequence: Synthetic peptide
  Seed: LIFLARSAL
LQFLARSAA

SEQ ID NO: 45487 - protein, 9 aa, Artificial Sequence
  Description of Artificial Sequence: Synthetic peptide
  Seed: LIFLARSAL
LQFLARSAN

SEQ ID NO: 45488 - protein, 9 aa, Artificial Sequence
  Description of Artificial Sequence: Synthetic peptide
  Seed: LIFLARSAL
LQFLARSAD

SEQ ID NO: 45489 - protein, 9 aa, Artificial Sequence
  Description of Artificial Sequence: Synthetic peptide
  Seed: LIFLARSAL
LQFLARSAC

SEQ ID NO: 45490 - protein, 9 aa, Artificial Sequence
  Description of Artificial Sequence: Synthetic peptide
  Seed: LIFLARSAL
LQFLARSAQ

SEQ ID NO: 45491 - protein, 9 aa, Artificial Sequence
  Description of Artificial Sequence: Synthetic peptide
  Seed: LIFLARSAL
LQFLARSAE

SEQ ID NO: 45492 - protein, 9 aa, Artificial Sequence
  Description of Artificial Sequence: Synthetic peptide
  Seed: LIFLARSAL
LQFLARSAG

SEQ ID NO: 45493 - protein, 9 aa, Artificial Sequence
  Description of Artificial Sequence: Synthetic peptide
  Seed: LIFLARSAL
LQFLARSAH

SEQ ID NO: 45494 - protein, 9 aa, Artificial Sequence
  Description of Artificial Sequence: Synthetic peptide
  Seed: LIFLARSAL
LGFLARSAW

SEQ ID NO: 45495 - protein, 9 aa, Artificial Sequence
  Description of Artificial Sequence: Synthetic peptide
  Seed: LIFLARSAL
LGFLARSAY

SEQ ID NO: 45496 - protein, 9 aa, Artificial Sequence
  Description of Artificial Sequence: Synthetic peptide
  Seed: LIFLARSAL
LGFLARSAV

SEQ ID NO: 45497 - protein, 9 aa, Artificial Sequence
  Description of Artificial Sequence: Synthetic peptide
  Seed: LIFLARSAL
LLFLARSAM

SEQ ID NO: 45498 - protein, 9 aa, Artificial Sequence
  Description of Artificial Sequence: Synthetic peptide
  Seed: LIFLARSAL
LLFLARSAS

SEQ ID NO: 45499 - protein, 9 aa, Artificial Sequence
  Description of Artificial Sequence: Synthetic peptide
  Seed: LIFLARSAL
LLFLARSAT

SEQ ID NO: 45500 - protein, 9 aa, Artificial Sequence
  Description of Artificial Sequence: Synthetic peptide
  Seed: LIFLARSAL
LLFLARSAW

SEQ ID NO: 45501 - protein, 9 aa, Artificial Sequence
  Description of Artificial Sequence: Synthetic peptide
  Seed: LIFLARSAL
LLFLARSAY

SEQ ID NO: 45502 - protein, 9 aa, Artificial Sequence
  Description of Artificial Sequence: Synthetic peptide
  Seed: LIFLARSAL
LLFLARSAV

SEQ ID NO: 45503 - protein, 9 aa, Artificial Sequence
  Description of Artificial Sequence: Synthetic peptide
  Seed: LIFLARSAL
LKFLARSAA

SEQ ID NO: 45504 - protein, 9 aa, Artificial Sequence
  Description of Artificial Sequence: Synthetic peptide
  Seed: LIFLARSAL
LKFLARSAC

SEQ ID NO: 45505 - protein, 9 aa, Artificial Sequence
  Description of Artificial Sequence: Synthetic peptide
  Seed: LIFLARSAL
LKFLARSAG

SEQ ID NO: 45506 - protein, 9 aa, Artificial Sequence
  Description of Artificial Sequence: Synthetic peptide
  Seed: LIFLARSAL
LKFLARSAH

SEQ ID NO: 45507 - protein, 9 aa, Artificial Sequence
  Description of Artificial Sequence: Synthetic peptide
  Seed: LIFLARSAL
LKFLARSAI

SEQ ID NO: 45508 - protein, 9 aa, Artificial Sequence
  Description of Artificial Sequence: Synthetic peptide
  Seed: LIFLARSAL
LKFLARSAL

SEQ ID NO: 45509 - protein, 9 aa, Artificial Sequence
  Description of Artificial Sequence: Synthetic peptide
  Seed: LIFLARSAL
LKFLARSAM

SEQ ID NO: 45510 - protein, 9 aa, Artificial Sequence
  Description of Artificial Sequence: Synthetic peptide
  Seed: LIFLARSAL
LKFLARSAF

SEQ ID NO: 45511 - protein, 9 aa, Artificial Sequence
  Description of Artificial Sequence: Synthetic peptide
  Seed: LIFLARSAL
LKFLARSAS

SEQ ID NO: 45512 - protein, 9 aa, Artificial Sequence
  Description of Artificial Sequence: Synthetic peptide
  Seed: LIFLARSAL
LKFLARSAT

SEQ ID NO: 45513 - protein, 9 aa, Artificial Sequence
  Description of Artificial Sequence: Synthetic peptide
  Seed: LIFLARSAL
LKFLARSAW

SEQ ID NO: 45514 - protein, 9 aa, Artificial Sequence
  Description of Artificial Sequence: Synthetic peptide
  Seed: LIFLARSAL
LKFLARSAY

SEQ ID NO: 45515 - protein, 9 aa, Artificial Sequence
  Description of Artificial Sequence: Synthetic peptide
  Seed: LIFLARSAL
LKFLARSAV

SEQ ID NO: 45516 - protein, 9 aa, Artificial Sequence
  Description of Artificial Sequence: Synthetic peptide
  Seed: LIFLARSAL
LMFLARSAA

SEQ ID NO: 45517 - protein, 9 aa, Artificial Sequence
  Description of Artificial Sequence: Synthetic peptide
  Seed: LIFLARSAL
LLFLARSAF

SEQ ID NO: 45518 - protein, 9 aa, Artificial Sequence
  Description of Artificial Sequence: Synthetic peptide
  Seed: LIFLARSAL
LLFLARSAL

SEQ ID NO: 45519 - protein, 9 aa, Artificial Sequence
  Description of Artificial Sequence: Synthetic peptide
  Seed: LIFLARSAL
LHFLARSAA

SEQ ID NO: 45520 - protein, 9 aa, Artificial Sequence
  Description of Artificial Sequence: Synthetic peptide
  Seed: LIFLARSAL
LLFLARSAI

SEQ ID NO: 45521 - protein, 9 aa, Artificial Sequence
  Description of Artificial Sequence: Synthetic peptide
  Seed: LIFLARSAL
LHFLARSAH

SEQ ID NO: 45522 - protein, 9 aa, Artificial Sequence
  Description of Artificial Sequence: Synthetic peptide
  Seed: LIFLARSAL
LHFLARSAI

SEQ ID NO: 45523 - protein, 9 aa, Artificial Sequence
  Description of Artificial Sequence: Synthetic peptide
  Seed: LIFLARSAL
LHFLARSAL

SEQ ID NO: 45524 - protein, 9 aa, Artificial Sequence
  Description of Artificial Sequence: Synthetic peptide
  Seed: LIFLARSAL
LHFLARSAM

SEQ ID NO: 45525 - protein, 9 aa, Artificial Sequence
  Description of Artificial Sequence: Synthetic peptide
  Seed: LIFLARSAL
LHFLARSAF

SEQ ID NO: 45526 - protein, 9 aa, Artificial Sequence
  Description of Artificial Sequence: Synthetic peptide
  Seed: LIFLARSAL
LHFLARSAW

SEQ ID NO: 45527 - protein, 9 aa, Artificial Sequence
  Description of Artificial Sequence: Synthetic peptide
  Seed: LIFLARSAL
LHFLARSAY

SEQ ID NO: 45528 - protein, 9 aa, Artificial Sequence
  Description of Artificial Sequence: Synthetic peptide
  Seed: LIFLARSAL
LHFLARSAV

SEQ ID NO: 45529 - protein, 9 aa, Artificial Sequence
  Description of Artificial Sequence: Synthetic peptide
  Seed: LIFLARSAL
LIFLARSAA

SEQ ID NO: 45530 - protein, 9 aa, Artificial Sequence
  Description of Artificial Sequence: Synthetic peptide
  Seed: LIFLARSAL
LIFLARSAH

SEQ ID NO: 45531 - protein, 9 aa, Artificial Sequence
  Description of Artificial Sequence: Synthetic peptide
  Seed: LIFLARSAL
LIFLARSAI

SEQ ID NO: 45532 - protein, 9 aa, Artificial Sequence
  Description of Artificial Sequence: Synthetic peptide
  Seed: LIFLARSAL
LIFLARSAM

SEQ ID NO: 45533 - protein, 9 aa, Artificial Sequence
  Description of Artificial Sequence: Synthetic peptide
  Seed: LIFLARSAL
LIFLARSAF

SEQ ID NO: 45534 - protein, 9 aa, Artificial Sequence
  Description of Artificial Sequence: Synthetic peptide
  Seed: LIFLARSAL
LIFLARSAW

SEQ ID NO: 45535 - protein, 9 aa, Artificial Sequence
  Description of Artificial Sequence: Synthetic peptide
  Seed: LIFLARSAL
LIFLARSAY

SEQ ID NO: 45536 - protein, 9 aa, Artificial Sequence
  Description of Artificial Sequence: Synthetic peptide
  Seed: LIFLARSAL
LIFLARSAV

SEQ ID NO: 45537 - protein, 9 aa, Artificial Sequence
  Description of Artificial Sequence: Synthetic peptide
  Seed: LIFLARSAL
LLFLARSAA

SEQ ID NO: 45538 - protein, 9 aa, Artificial Sequence
  Description of Artificial Sequence: Synthetic peptide
  Seed: LIFLARSAL
LLFLARSAG

SEQ ID NO: 45539 - protein, 9 aa, Artificial Sequence
  Description of Artificial Sequence: Synthetic peptide
  Seed: LIFLARSAL
LLFLARSAH

SEQ ID NO: 45540 - protein, 9 aa, Artificial Sequence
  Description of Artificial Sequence: Synthetic peptide
  Seed: LELRSRYWA
LELRSRYWI

SEQ ID NO: 45541 - protein, 9 aa, Artificial Sequence
  Description of Artificial Sequence: Synthetic peptide
  Seed: LELRSRYWA
LDLRSRYWL

SEQ ID NO: 45542 - protein, 11 aa, Artificial Sequence
  Description of Artificial Sequence: Synthetic peptide
  Seed: LAVASGYDFER
LVVASGYDFEK

SEQ ID NO: 45543 - protein, 9 aa, Artificial Sequence
  Description of Artificial Sequence: Synthetic peptide
  Seed: LARSALILR
LTRSALILV

SEQ ID NO: 45544 - protein, 9 aa, Artificial Sequence
  Description of Artificial Sequence: Synthetic peptide
  Seed: LARSALILR
LTRSALILI

SEQ ID NO: 45545 - protein, 9 aa, Artificial Sequence
  Description of Artificial Sequence: Synthetic peptide
  Seed: LARSALILR
LTRSALILL

SEQ ID NO: 45546 - protein, 9 aa, Artificial Sequence
  Description of Artificial Sequence: Synthetic peptide
  Seed: LARSALILR
LTRSALILK

SEQ ID NO: 45547 - protein, 9 aa, Artificial Sequence
  Description of Artificial Sequence: Synthetic peptide
  Seed: LARSALILR
LTRSALILM

SEQ ID NO: 45548 - protein, 9 aa, Artificial Sequence
  Description of Artificial Sequence: Synthetic peptide
  Seed: LARSALILR
LTRSALILF

SEQ ID NO: 45549 - protein, 9 aa, Artificial Sequence
  Description of Artificial Sequence: Synthetic peptide
  Seed: LARSALILR
LTRSALILP

SEQ ID NO: 45550 - protein, 9 aa, Artificial Sequence
  Description of Artificial Sequence: Synthetic peptide
  Seed: LARSALILR
LTRSALILS

SEQ ID NO: 45551 - protein, 9 aa, Artificial Sequence
  Description of Artificial Sequence: Synthetic peptide
  Seed: LARSALILR
LTRSALILT

SEQ ID NO: 45552 - protein, 9 aa, Artificial Sequence
  Description of Artificial Sequence: Synthetic peptide
  Seed: LARSALILR
LTRSALILY

SEQ ID NO: 45553 - protein, 9 aa, Artificial Sequence
  Description of Artificial Sequence: Synthetic peptide
  Seed: LARSALILR
LWRSALILA

SEQ ID NO: 45554 - protein, 9 aa, Artificial Sequence
  Description of Artificial Sequence: Synthetic peptide
  Seed: LARSALILR
LYRSALILN

SEQ ID NO: 45555 - protein, 9 aa, Artificial Sequence
  Description of Artificial Sequence: Synthetic peptide
  Seed: LARSALILR
LWRSALILR

SEQ ID NO: 45556 - protein, 9 aa, Artificial Sequence
  Description of Artificial Sequence: Synthetic peptide
  Seed: LARSALILR
LWRSALILG

SEQ ID NO: 45557 - protein, 9 aa, Artificial Sequence
  Description of Artificial Sequence: Synthetic peptide
  Seed: LARSALILR
LWRSALILI

SEQ ID NO: 45558 - protein, 9 aa, Artificial Sequence
  Description of Artificial Sequence: Synthetic peptide
  Seed: LARSALILR
LWRSALILL

SEQ ID NO: 45559 - protein, 9 aa, Artificial Sequence
  Description of Artificial Sequence: Synthetic peptide
  Seed: LARSALILR
LWRSALILK

SEQ ID NO: 45560 - protein, 9 aa, Artificial Sequence
  Description of Artificial Sequence: Synthetic peptide
  Seed: LARSALILR
LWRSALILM

SEQ ID NO: 45561 - protein, 9 aa, Artificial Sequence
  Description of Artificial Sequence: Synthetic peptide
  Seed: LARSALILR
LWRSALILS

SEQ ID NO: 45562 - protein, 9 aa, Artificial Sequence
  Description of Artificial Sequence: Synthetic peptide
  Seed: LARSALILR
LWRSALILV

SEQ ID NO: 45563 - protein, 9 aa, Artificial Sequence
  Description of Artificial Sequence: Synthetic peptide
  Seed: LARSALILR
LYRSALILA

SEQ ID NO: 45564 - protein, 9 aa, Artificial Sequence
  Description of Artificial Sequence: Synthetic peptide
  Seed: LARSALILR
LTRSALILH

SEQ ID NO: 45565 - protein, 9 aa, Artificial Sequence
  Description of Artificial Sequence: Synthetic peptide
  Seed: LARSALILR
LTRSALILG

SEQ ID NO: 45566 - protein, 9 aa, Artificial Sequence
  Description of Artificial Sequence: Synthetic peptide
  Seed: LARSALILR
LTRSALILE

SEQ ID NO: 45567 - protein, 9 aa, Artificial Sequence
  Description of Artificial Sequence: Synthetic peptide
  Seed: LARSALILR
LTRSALILQ

SEQ ID NO: 45568 - protein, 9 aa, Artificial Sequence
  Description of Artificial Sequence: Synthetic peptide
  Seed: LARSALILR
LSRSALILC

SEQ ID NO: 45569 - protein, 9 aa, Artificial Sequence
  Description of Artificial Sequence: Synthetic peptide
  Seed: LARSALILR
LSRSALILQ

SEQ ID NO: 45570 - protein, 9 aa, Artificial Sequence
  Description of Artificial Sequence: Synthetic peptide
  Seed: LARSALILR
LSRSALILE

SEQ ID NO: 45571 - protein, 9 aa, Artificial Sequence
  Description of Artificial Sequence: Synthetic peptide
  Seed: LARSALILR
LSRSALILG

SEQ ID NO: 45572 - protein, 9 aa, Artificial Sequence
  Description of Artificial Sequence: Synthetic peptide
  Seed: LARSALILR
LSRSALILH

SEQ ID NO: 45573 - protein, 9 aa, Artificial Sequence
  Description of Artificial Sequence: Synthetic peptide
  Seed: LARSALILR
LSRSALILI

SEQ ID NO: 45574 - protein, 9 aa, Artificial Sequence
  Description of Artificial Sequence: Synthetic peptide
  Seed: LARSALILR
LSRSALILL

SEQ ID NO: 45575 - protein, 9 aa, Artificial Sequence
  Description of Artificial Sequence: Synthetic peptide
  Seed: LARSALILR
LSRSALILK

SEQ ID NO: 45576 - protein, 9 aa, Artificial Sequence
  Description of Artificial Sequence: Synthetic peptide
  Seed: LARSALILR
LSRSALILM

SEQ ID NO: 45577 - protein, 9 aa, Artificial Sequence
  Description of Artificial Sequence: Synthetic peptide
  Seed: LARSALILR
LSRSALILF

SEQ ID NO: 45578 - protein, 9 aa, Artificial Sequence
  Description of Artificial Sequence: Synthetic peptide
  Seed: LARSALILR
LSRSALILP

SEQ ID NO: 45579 - protein, 9 aa, Artificial Sequence
  Description of Artificial Sequence: Synthetic peptide
  Seed: LARSALILR
LSRSALILS

SEQ ID NO: 45580 - protein, 9 aa, Artificial Sequence
  Description of Artificial Sequence: Synthetic peptide
  Seed: LARSALILR
LSRSALILT

SEQ ID NO: 45581 - protein, 9 aa, Artificial Sequence
  Description of Artificial Sequence: Synthetic peptide
  Seed: LARSALILR
LSRSALILY

SEQ ID NO: 45582 - protein, 9 aa, Artificial Sequence
  Description of Artificial Sequence: Synthetic peptide
  Seed: LARSALILR
LSRSALILV

SEQ ID NO: 45583 - protein, 9 aa, Artificial Sequence
  Description of Artificial Sequence: Synthetic peptide
  Seed: LARSALILR
LTRSALILA

SEQ ID NO: 45584 - protein, 9 aa, Artificial Sequence
  Description of Artificial Sequence: Synthetic peptide
  Seed: LARSALILR
LTRSALILN

SEQ ID NO: 45585 - protein, 9 aa, Artificial Sequence
  Description of Artificial Sequence: Synthetic peptide
  Seed: LARSALILR
LTRSALILC

SEQ ID NO: 45586 - protein, 9 aa, Artificial Sequence
  Description of Artificial Sequence: Synthetic peptide
  Seed: LARSALILR
LYRSALILR

SEQ ID NO: 45587 - protein, 9 aa, Artificial Sequence
  Description of Artificial Sequence: Synthetic peptide
  Seed: LARSALILR
LYRSALILQ

SEQ ID NO: 45588 - protein, 9 aa, Artificial Sequence
  Description of Artificial Sequence: Synthetic peptide
  Seed: LAVASGHDF
LQVASGHDY

SEQ ID NO: 45589 - protein, 9 aa, Artificial Sequence
  Description of Artificial Sequence: Synthetic peptide
  Seed: LAVASGHDF
LRVASGHDM

SEQ ID NO: 45590 - protein, 9 aa, Artificial Sequence
  Description of Artificial Sequence: Synthetic peptide
  Seed: LARSALILR
LVRSALILT

SEQ ID NO: 45591 - protein, 9 aa, Artificial Sequence
  Description of Artificial Sequence: Synthetic peptide
  Seed: LARSALILR
LVRSALILY

SEQ ID NO: 45592 - protein, 9 aa, Artificial Sequence
  Description of Artificial Sequence: Synthetic peptide
  Seed: LARSALILR
LVRSALILV

SEQ ID NO: 45593 - protein, 9 aa, Artificial Sequence
  Description of Artificial Sequence: Synthetic peptide
  Seed: LAVASGHDF
LAVASGHDI

SEQ ID NO: 45594 - protein, 9 aa, Artificial Sequence
  Description of Artificial Sequence: Synthetic peptide
  Seed: LAVASGHDF
LAVASGHDL

SEQ ID NO: 45595 - protein, 9 aa, Artificial Sequence
  Description of Artificial Sequence: Synthetic peptide
  Seed: LAVASGHDF
LAVASGHDM

SEQ ID NO: 45596 - protein, 9 aa, Artificial Sequence
  Description of Artificial Sequence: Synthetic peptide
  Seed: LAVASGHDF
LAVASGHDW

SEQ ID NO: 45597 - protein, 9 aa, Artificial Sequence
  Description of Artificial Sequence: Synthetic peptide
  Seed: LAVASGHDF
LAVASGHDY

SEQ ID NO: 45598 - protein, 9 aa, Artificial Sequence
  Description of Artificial Sequence: Synthetic peptide
  Seed: LAVASGHDF
LAVASGHDV

SEQ ID NO: 45599 - protein, 9 aa, Artificial Sequence
  Description of Artificial Sequence: Synthetic peptide
  Seed: LAVASGHDF
LRVASGHDF

SEQ ID NO: 45600 - protein, 9 aa, Artificial Sequence
  Description of Artificial Sequence: Synthetic peptide
  Seed: LARSALILR
LYRSALILG

SEQ ID NO: 45601 - protein, 9 aa, Artificial Sequence
  Description of Artificial Sequence: Synthetic peptide
  Seed: LAVASGHDF
LRVASGHDY

SEQ ID NO: 45602 - protein, 9 aa, Artificial Sequence
  Description of Artificial Sequence: Synthetic peptide
  Seed: LAVASGHDF
LNVASGHDF

SEQ ID NO: 45603 - protein, 9 aa, Artificial Sequence
  Description of Artificial Sequence: Synthetic peptide
  Seed: LAVASGHDF
LNVASGHDY

SEQ ID NO: 45604 - protein, 9 aa, Artificial Sequence
  Description of Artificial Sequence: Synthetic peptide
  Seed: LAVASGHDF
LQVASGHDA

SEQ ID NO: 45605 - protein, 9 aa, Artificial Sequence
  Description of Artificial Sequence: Synthetic peptide
  Seed: LAVASGHDF
LQVASGHDH

SEQ ID NO: 45606 - protein, 9 aa, Artificial Sequence
  Description of Artificial Sequence: Synthetic peptide
  Seed: LAVASGHDF
LQVASGHDI

SEQ ID NO: 45607 - protein, 9 aa, Artificial Sequence
  Description of Artificial Sequence: Synthetic peptide
  Seed: LAVASGHDF
LQVASGHDL

SEQ ID NO: 45608 - protein, 9 aa, Artificial Sequence
  Description of Artificial Sequence: Synthetic peptide
  Seed: LAVASGHDF
LQVASGHDM

SEQ ID NO: 45609 - protein, 9 aa, Artificial Sequence
  Description of Artificial Sequence: Synthetic peptide
  Seed: LAVASGHDF
LQVASGHDF

SEQ ID NO: 45610 - protein, 9 aa, Artificial Sequence
  Description of Artificial Sequence: Synthetic peptide
  Seed: LARSALILR
LVRSALILS

SEQ ID NO: 45611 - protein, 9 aa, Artificial Sequence
  Description of Artificial Sequence: Synthetic peptide
  Seed: LARSALILR
LVRSALILP

SEQ ID NO: 45612 - protein, 9 aa, Artificial Sequence
  Description of Artificial Sequence: Synthetic peptide
  Seed: LARSALILR
LVRSALILF

SEQ ID NO: 45613 - protein, 9 aa, Artificial Sequence
  Description of Artificial Sequence: Synthetic peptide
  Seed: LARSALILR
LVRSALILM

SEQ ID NO: 45614 - protein, 9 aa, Artificial Sequence
  Description of Artificial Sequence: Synthetic peptide
  Seed: LARSALILR
LYRSALILH

SEQ ID NO: 45615 - protein, 9 aa, Artificial Sequence
  Description of Artificial Sequence: Synthetic peptide
  Seed: LARSALILR
LYRSALILI

SEQ ID NO: 45616 - protein, 9 aa, Artificial Sequence
  Description of Artificial Sequence: Synthetic peptide
  Seed: LARSALILR
LYRSALILL

SEQ ID NO: 45617 - protein, 9 aa, Artificial Sequence
  Description of Artificial Sequence: Synthetic peptide
  Seed: LARSALILR
LYRSALILK

SEQ ID NO: 45618 - protein, 9 aa, Artificial Sequence
  Description of Artificial Sequence: Synthetic peptide
  Seed: LARSALILR
LYRSALILM

SEQ ID NO: 45619 - protein, 9 aa, Artificial Sequence
  Description of Artificial Sequence: Synthetic peptide
  Seed: LARSALILR
LYRSALILP

SEQ ID NO: 45620 - protein, 9 aa, Artificial Sequence
  Description of Artificial Sequence: Synthetic peptide
  Seed: LARSALILR
LYRSALILS

SEQ ID NO: 45621 - protein, 9 aa, Artificial Sequence
  Description of Artificial Sequence: Synthetic peptide
  Seed: LARSALILR
LYRSALILT

SEQ ID NO: 45622 - protein, 9 aa, Artificial Sequence
  Description of Artificial Sequence: Synthetic peptide
  Seed: LARSALILR
LYRSALILY

SEQ ID NO: 45623 - protein, 9 aa, Artificial Sequence
  Description of Artificial Sequence: Synthetic peptide
  Seed: LARSALILR
LYRSALILV

SEQ ID NO: 45624 - protein, 9 aa, Artificial Sequence
  Description of Artificial Sequence: Synthetic peptide
  Seed: LARSALILR
LVRSALILA

SEQ ID NO: 45625 - protein, 9 aa, Artificial Sequence
  Description of Artificial Sequence: Synthetic peptide
  Seed: LARSALILR
LVRSALILR

SEQ ID NO: 45626 - protein, 9 aa, Artificial Sequence
  Description of Artificial Sequence: Synthetic peptide
  Seed: LARSALILR
LVRSALILN

SEQ ID NO: 45627 - protein, 9 aa, Artificial Sequence
  Description of Artificial Sequence: Synthetic peptide
  Seed: LARSALILR
LVRSALILQ

SEQ ID NO: 45628 - protein, 9 aa, Artificial Sequence
  Description of Artificial Sequence: Synthetic peptide
  Seed: LARSALILR
LVRSALILG

SEQ ID NO: 45629 - protein, 9 aa, Artificial Sequence
  Description of Artificial Sequence: Synthetic peptide
  Seed: LARSALILR
LVRSALILH

SEQ ID NO: 45630 - protein, 9 aa, Artificial Sequence
  Description of Artificial Sequence: Synthetic peptide
  Seed: LARSALILR
LVRSALILI

SEQ ID NO: 45631 - protein, 9 aa, Artificial Sequence
  Description of Artificial Sequence: Synthetic peptide
  Seed: LARSALILR
LVRSALILL

SEQ ID NO: 45632 - protein, 9 aa, Artificial Sequence
  Description of Artificial Sequence: Synthetic peptide
  Seed: LARSALILR
LVRSALILK

SEQ ID NO: 45633 - protein, 9 aa, Artificial Sequence
  Description of Artificial Sequence: Synthetic peptide
  Seed: LARSALILR
LSRSALILN

SEQ ID NO: 45634 - protein, 9 aa, Artificial Sequence
  Description of Artificial Sequence: Synthetic peptide
  Seed: LARSALILR
LSRSALILR

SEQ ID NO: 45635 - protein, 9 aa, Artificial Sequence
  Description of Artificial Sequence: Synthetic peptide
  Seed: LARSALILR
LSRSALILA

SEQ ID NO: 45636 - protein, 9 aa, Artificial Sequence
  Description of Artificial Sequence: Synthetic peptide
  Seed: LARSALILR
LGRSALILM

SEQ ID NO: 45637 - protein, 9 aa, Artificial Sequence
  Description of Artificial Sequence: Synthetic peptide
  Seed: LARSALILR
LQRSALILT

SEQ ID NO: 45638 - protein, 9 aa, Artificial Sequence
  Description of Artificial Sequence: Synthetic peptide
  Seed: LARSALILR
LQRSALILY

SEQ ID NO: 45639 - protein, 9 aa, Artificial Sequence
  Description of Artificial Sequence: Synthetic peptide
  Seed: LARSALILR
LQRSALILV

SEQ ID NO: 45640 - protein, 9 aa, Artificial Sequence
  Description of Artificial Sequence: Synthetic peptide
  Seed: LARSALILR
LGRSALILA

SEQ ID NO: 45641 - protein, 9 aa, Artificial Sequence
  Description of Artificial Sequence: Synthetic peptide
  Seed: LARSALILR
LGRSALILR

SEQ ID NO: 45642 - protein, 9 aa, Artificial Sequence
  Description of Artificial Sequence: Synthetic peptide
  Seed: LARSALILR
LGRSALILG

SEQ ID NO: 45643 - protein, 9 aa, Artificial Sequence
  Description of Artificial Sequence: Synthetic peptide
  Seed: LARSALILR
LGRSALILI

SEQ ID NO: 45644 - protein, 9 aa, Artificial Sequence
  Description of Artificial Sequence: Synthetic peptide
  Seed: LARSALILR
LGRSALILL

SEQ ID NO: 45645 - protein, 9 aa, Artificial Sequence
  Description of Artificial Sequence: Synthetic peptide
  Seed: LARSALILR
LGRSALILK

SEQ ID NO: 45646 - protein, 9 aa, Artificial Sequence
  Description of Artificial Sequence: Synthetic peptide
  Seed: LARSALILR
LGRSALILS

SEQ ID NO: 45647 - protein, 9 aa, Artificial Sequence
  Description of Artificial Sequence: Synthetic peptide
  Seed: LARSALILR
LPRSALILR

SEQ ID NO: 45648 - protein, 9 aa, Artificial Sequence
  Description of Artificial Sequence: Synthetic peptide
  Seed: LARSALILR
LGRSALILT

SEQ ID NO: 45649 - protein, 9 aa, Artificial Sequence
  Description of Artificial Sequence: Synthetic peptide
  Seed: LARSALILR
LGRSALILY

SEQ ID NO: 45650 - protein, 9 aa, Artificial Sequence
  Description of Artificial Sequence: Synthetic peptide
  Seed: LARSALILR
LGRSALILV

SEQ ID NO: 45651 - protein, 9 aa, Artificial Sequence
  Description of Artificial Sequence: Synthetic peptide
  Seed: LARSALILR
LHRSALILR

SEQ ID NO: 45652 - protein, 9 aa, Artificial Sequence
  Description of Artificial Sequence: Synthetic peptide
  Seed: LARSALILR
LHRSALILK

SEQ ID NO: 45653 - protein, 9 aa, Artificial Sequence
  Description of Artificial Sequence: Synthetic peptide
  Seed: LARSALILR
LIRSALILA

SEQ ID NO: 45654 - protein, 9 aa, Artificial Sequence
  Description of Artificial Sequence: Synthetic peptide
  Seed: LARSALILR
LIRSALILR

SEQ ID NO: 45655 - protein, 9 aa, Artificial Sequence
  Description of Artificial Sequence: Synthetic peptide
  Seed: LARSALILR
LIRSALILN

SEQ ID NO: 45656 - protein, 9 aa, Artificial Sequence
  Description of Artificial Sequence: Synthetic peptide
  Seed: LARSALILR
LIRSALILG

SEQ ID NO: 45657 - protein, 9 aa, Artificial Sequence
  Description of Artificial Sequence: Synthetic peptide
  Seed: LARSALILR
LQRSALILS

SEQ ID NO: 45658 - protein, 9 aa, Artificial Sequence
  Description of Artificial Sequence: Synthetic peptide
  Seed: LARSALILR
LQRSALILM

SEQ ID NO: 45659 - protein, 9 aa, Artificial Sequence
  Description of Artificial Sequence: Synthetic peptide
  Seed: LARSALILR
LQRSALILK

SEQ ID NO: 45660 - protein, 9 aa, Artificial Sequence
  Description of Artificial Sequence: Synthetic peptide
  Seed: LARSALILR
LQRSALILL

SEQ ID NO: 45661 - protein, 9 aa, Artificial Sequence
  Description of Artificial Sequence: Synthetic peptide
  Seed: LARSALILR
LARSALILS

SEQ ID NO: 45662 - protein, 9 aa, Artificial Sequence
  Description of Artificial Sequence: Synthetic peptide
  Seed: LARSALILR
LARSALILT

SEQ ID NO: 45663 - protein, 9 aa, Artificial Sequence
  Description of Artificial Sequence: Synthetic peptide
  Seed: LARSALILR
LARSALILY

SEQ ID NO: 45664 - protein, 9 aa, Artificial Sequence
  Description of Artificial Sequence: Synthetic peptide
  Seed: LARSALILR
LARSALILV

SEQ ID NO: 45665 - protein, 9 aa, Artificial Sequence
  Description of Artificial Sequence: Synthetic peptide
  Seed: LARSALILR
LRRSALILK

SEQ ID NO: 45666 - protein, 9 aa, Artificial Sequence
  Description of Artificial Sequence: Synthetic peptide
  Seed: LARSALILR
LNRSALILA

SEQ ID NO: 45667 - protein, 9 aa, Artificial Sequence
  Description of Artificial Sequence: Synthetic peptide
  Seed: LARSALILR
LNRSALILR

SEQ ID NO: 45668 - protein, 9 aa, Artificial Sequence
  Description of Artificial Sequence: Synthetic peptide
  Seed: LARSALILR
LNRSALILI

SEQ ID NO: 45669 - protein, 9 aa, Artificial Sequence
  Description of Artificial Sequence: Synthetic peptide
  Seed: LARSALILR
LNRSALILL

SEQ ID NO: 45670 - protein, 9 aa, Artificial Sequence
  Description of Artificial Sequence: Synthetic peptide
  Seed: LARSALILR
LNRSALILK

SEQ ID NO: 45671 - protein, 9 aa, Artificial Sequence
  Description of Artificial Sequence: Synthetic peptide
  Seed: LARSALILR
LNRSALILM

SEQ ID NO: 45672 - protein, 9 aa, Artificial Sequence
  Description of Artificial Sequence: Synthetic peptide
  Seed: LARSALILR
LNRSALILS

SEQ ID NO: 45673 - protein, 9 aa, Artificial Sequence
  Description of Artificial Sequence: Synthetic peptide
  Seed: LARSALILR
LNRSALILV

SEQ ID NO: 45674 - protein, 9 aa, Artificial Sequence
  Description of Artificial Sequence: Synthetic peptide
  Seed: LARSALILR
LCRSALILR

SEQ ID NO: 45675 - protein, 9 aa, Artificial Sequence
  Description of Artificial Sequence: Synthetic peptide
  Seed: LARSALILR
LCRSALILK

SEQ ID NO: 45676 - protein, 9 aa, Artificial Sequence
  Description of Artificial Sequence: Synthetic peptide
  Seed: LARSALILR
LQRSALILA

SEQ ID NO: 45677 - protein, 9 aa, Artificial Sequence
  Description of Artificial Sequence: Synthetic peptide
  Seed: LARSALILR
LQRSALILR

SEQ ID NO: 45678 - protein, 9 aa, Artificial Sequence
  Description of Artificial Sequence: Synthetic peptide
  Seed: LARSALILR
LQRSALILG

SEQ ID NO: 45679 - protein, 9 aa, Artificial Sequence
  Description of Artificial Sequence: Synthetic peptide
  Seed: LARSALILR
LQRSALILI

SEQ ID NO: 45680 - protein, 9 aa, Artificial Sequence
  Description of Artificial Sequence: Synthetic peptide
  Seed: LARSALILR
LIRSALILI

SEQ ID NO: 45681 - protein, 9 aa, Artificial Sequence
  Description of Artificial Sequence: Synthetic peptide
  Seed: LARSALILR
LIRSALILL

SEQ ID NO: 45682 - protein, 9 aa, Artificial Sequence
  Description of Artificial Sequence: Synthetic peptide
  Seed: LARSALILR
LIRSALILK

SEQ ID NO: 45683 - protein, 9 aa, Artificial Sequence
  Description of Artificial Sequence: Synthetic peptide
  Seed: LARSALILR
LMRSALILH

SEQ ID NO: 45684 - protein, 9 aa, Artificial Sequence
  Description of Artificial Sequence: Synthetic peptide
  Seed: LARSALILR
LMRSALILL

SEQ ID NO: 45685 - protein, 9 aa, Artificial Sequence
  Description of Artificial Sequence: Synthetic peptide
  Seed: LARSALILR
LMRSALILK

SEQ ID NO: 45686 - protein, 9 aa, Artificial Sequence
  Description of Artificial Sequence: Synthetic peptide
  Seed: LARSALILR
LMRSALILM

SEQ ID NO: 45687 - protein, 9 aa, Artificial Sequence
  Description of Artificial Sequence: Synthetic peptide
  Seed: LARSALILR
LMRSALILF

SEQ ID NO: 45688 - protein, 9 aa, Artificial Sequence
  Description of Artificial Sequence: Synthetic peptide
  Seed: LARSALILR
LMRSALILP

SEQ ID NO: 45689 - protein, 9 aa, Artificial Sequence
  Description of Artificial Sequence: Synthetic peptide
  Seed: LARSALILR
LMRSALILS

SEQ ID NO: 45690 - protein, 9 aa, Artificial Sequence
  Description of Artificial Sequence: Synthetic peptide
  Seed: LARSALILR
LMRSALILT

SEQ ID NO: 45691 - protein, 9 aa, Artificial Sequence
  Description of Artificial Sequence: Synthetic peptide
  Seed: LARSALILR
LMRSALILY

SEQ ID NO: 45692 - protein, 9 aa, Artificial Sequence
  Description of Artificial Sequence: Synthetic peptide
  Seed: LARSALILR
LMRSALILV

SEQ ID NO: 45693 - protein, 9 aa, Artificial Sequence
  Description of Artificial Sequence: Synthetic peptide
  Seed: LARSALILR
LFRSALILA

SEQ ID NO: 45694 - protein, 9 aa, Artificial Sequence
  Description of Artificial Sequence: Synthetic peptide
  Seed: LARSALILR
LFRSALILR

SEQ ID NO: 45695 - protein, 9 aa, Artificial Sequence
  Description of Artificial Sequence: Synthetic peptide
  Seed: LARSALILR
LFRSALILG

SEQ ID NO: 45696 - protein, 9 aa, Artificial Sequence
  Description of Artificial Sequence: Synthetic peptide
  Seed: LARSALILR
LFRSALILI

SEQ ID NO: 45697 - protein, 9 aa, Artificial Sequence
  Description of Artificial Sequence: Synthetic peptide
  Seed: LARSALILR
LFRSALILL

SEQ ID NO: 45698 - protein, 9 aa, Artificial Sequence
  Description of Artificial Sequence: Synthetic peptide
  Seed: LARSALILR
LFRSALILK

SEQ ID NO: 45699 - protein, 9 aa, Artificial Sequence
  Description of Artificial Sequence: Synthetic peptide
  Seed: LARSALILR
LFRSALILM

SEQ ID NO: 45700 - protein, 9 aa, Artificial Sequence
  Description of Artificial Sequence: Synthetic peptide
  Seed: LARSALILR
LFRSALILS

SEQ ID NO: 45701 - protein, 9 aa, Artificial Sequence
  Description of Artificial Sequence: Synthetic peptide
  Seed: LARSALILR
LFRSALILT

SEQ ID NO: 45702 - protein, 9 aa, Artificial Sequence
  Description of Artificial Sequence: Synthetic peptide
  Seed: LARSALILR
LFRSALILV

SEQ ID NO: 45703 - protein, 9 aa, Artificial Sequence
  Description of Artificial Sequence: Synthetic peptide
  Seed: LARSALILR
LMRSALILI

SEQ ID NO: 45704 - protein, 9 aa, Artificial Sequence
  Description of Artificial Sequence: Synthetic peptide
  Seed: LARSALILR
LMRSALILG

SEQ ID NO: 45705 - protein, 9 aa, Artificial Sequence
  Description of Artificial Sequence: Synthetic peptide
  Seed: LARSALILR
LIRSALILM

SEQ ID NO: 45706 - protein, 9 aa, Artificial Sequence
  Description of Artificial Sequence: Synthetic peptide
  Seed: LARSALILR
LMRSALILQ

SEQ ID NO: 45707 - protein, 9 aa, Artificial Sequence
  Description of Artificial Sequence: Synthetic peptide
  Seed: LARSALILR
LIRSALILP

SEQ ID NO: 45708 - protein, 9 aa, Artificial Sequence
  Description of Artificial Sequence: Synthetic peptide
  Seed: LARSALILR
LIRSALILS

SEQ ID NO: 45709 - protein, 9 aa, Artificial Sequence
  Description of Artificial Sequence: Synthetic peptide
  Seed: LARSALILR
LIRSALILT

SEQ ID NO: 45710 - protein, 9 aa, Artificial Sequence
  Description of Artificial Sequence: Synthetic peptide
  Seed: LARSALILR
LIRSALILY

SEQ ID NO: 45711 - protein, 9 aa, Artificial Sequence
  Description of Artificial Sequence: Synthetic peptide
  Seed: LARSALILR
LIRSALILV

SEQ ID NO: 45712 - protein, 9 aa, Artificial Sequence
  Description of Artificial Sequence: Synthetic peptide
  Seed: LARSALILR
LLRSALILA

SEQ ID NO: 45713 - protein, 9 aa, Artificial Sequence
  Description of Artificial Sequence: Synthetic peptide
  Seed: LARSALILR
LLRSALILR

SEQ ID NO: 45714 - protein, 9 aa, Artificial Sequence
  Description of Artificial Sequence: Synthetic peptide
  Seed: LARSALILR
LLRSALILG

SEQ ID NO: 45715 - protein, 9 aa, Artificial Sequence
  Description of Artificial Sequence: Synthetic peptide
  Seed: LARSALILR
LLRSALILI

SEQ ID NO: 45716 - protein, 9 aa, Artificial Sequence
  Description of Artificial Sequence: Synthetic peptide
  Seed: LARSALILR
LLRSALILL

SEQ ID NO: 45717 - protein, 9 aa, Artificial Sequence
  Description of Artificial Sequence: Synthetic peptide
  Seed: LARSALILR
LLRSALILK

SEQ ID NO: 45718 - protein, 9 aa, Artificial Sequence
  Description of Artificial Sequence: Synthetic peptide
  Seed: LARSALILR
LLRSALILM

SEQ ID NO: 45719 - protein, 9 aa, Artificial Sequence
  Description of Artificial Sequence: Synthetic peptide
  Seed: LARSALILR
LLRSALILS

SEQ ID NO: 45720 - protein, 9 aa, Artificial Sequence
  Description of Artificial Sequence: Synthetic peptide
  Seed: LARSALILR
LLRSALILY

SEQ ID NO: 45721 - protein, 9 aa, Artificial Sequence
  Description of Artificial Sequence: Synthetic peptide
  Seed: LARSALILR
LLRSALILV

SEQ ID NO: 45722 - protein, 9 aa, Artificial Sequence
  Description of Artificial Sequence: Synthetic peptide
  Seed: LARSALILR
LKRSALILK

SEQ ID NO: 45723 - protein, 9 aa, Artificial Sequence
  Description of Artificial Sequence: Synthetic peptide
  Seed: LARSALILR
LMRSALILA

SEQ ID NO: 45724 - protein, 9 aa, Artificial Sequence
  Description of Artificial Sequence: Synthetic peptide
  Seed: LARSALILR
LMRSALILR

SEQ ID NO: 45725 - protein, 9 aa, Artificial Sequence
  Description of Artificial Sequence: Synthetic peptide
  Seed: LARSALILR
LMRSALILN

SEQ ID NO: 45726 - protein, 9 aa, Artificial Sequence
  Description of Artificial Sequence: Synthetic peptide
  Seed: LAVASGHDF
LQVASGHDW

SEQ ID NO: 45727 - protein, 9 aa, Artificial Sequence
  Description of Artificial Sequence: Synthetic peptide
  Seed: LAVASGHDF
LQVASGHDV

SEQ ID NO: 45728 - protein, 9 aa, Artificial Sequence
  Description of Artificial Sequence: Synthetic peptide
  Seed: LAVASGYDF
LKVASGYDM

SEQ ID NO: 45729 - protein, 9 aa, Artificial Sequence
  Description of Artificial Sequence: Synthetic peptide
  Seed: LAVASGYDF
LIVASGYDM

SEQ ID NO: 45730 - protein, 9 aa, Artificial Sequence
  Description of Artificial Sequence: Synthetic peptide
  Seed: LAVASGYDF
LIVASGYDY

SEQ ID NO: 45731 - protein, 9 aa, Artificial Sequence
  Description of Artificial Sequence: Synthetic peptide
  Seed: LAVASGYDF
LLVASGYDL

SEQ ID NO: 45732 - protein, 9 aa, Artificial Sequence
  Description of Artificial Sequence: Synthetic peptide
  Seed: LAVASGYDF
LLVASGYDM

SEQ ID NO: 45733 - protein, 9 aa, Artificial Sequence
  Description of Artificial Sequence: Synthetic peptide
  Seed: LAVASGYDF
LLVASGYDF

SEQ ID NO: 45734 - protein, 9 aa, Artificial Sequence
  Description of Artificial Sequence: Synthetic peptide
  Seed: LAVASGYDF
LLVASGYDY

SEQ ID NO: 45735 - protein, 9 aa, Artificial Sequence
  Description of Artificial Sequence: Synthetic peptide
  Seed: LAVASGYDF
LKVASGYDI

SEQ ID NO: 45736 - protein, 9 aa, Artificial Sequence
  Description of Artificial Sequence: Synthetic peptide
  Seed: LAVASGYDF
LKVASGYDL

SEQ ID NO: 45737 - protein, 9 aa, Artificial Sequence
  Description of Artificial Sequence: Synthetic peptide
  Seed: LAVASGYDF
LKVASGYDF

SEQ ID NO: 45738 - protein, 9 aa, Artificial Sequence
  Description of Artificial Sequence: Synthetic peptide
  Seed: LAVASGYDF
LFVASGYDF

SEQ ID NO: 45739 - protein, 9 aa, Artificial Sequence
  Description of Artificial Sequence: Synthetic peptide
  Seed: LAVASGYDF
LKVASGYDW

SEQ ID NO: 45740 - protein, 9 aa, Artificial Sequence
  Description of Artificial Sequence: Synthetic peptide
  Seed: LAVASGYDF
LKVASGYDY

SEQ ID NO: 45741 - protein, 9 aa, Artificial Sequence
  Description of Artificial Sequence: Synthetic peptide
  Seed: LAVASGYDF
LMVASGYDH

SEQ ID NO: 45742 - protein, 9 aa, Artificial Sequence
  Description of Artificial Sequence: Synthetic peptide
  Seed: LAVASGYDF
LMVASGYDI

SEQ ID NO: 45743 - protein, 9 aa, Artificial Sequence
  Description of Artificial Sequence: Synthetic peptide
  Seed: LAVASGYDF
LMVASGYDL

SEQ ID NO: 45744 - protein, 9 aa, Artificial Sequence
  Description of Artificial Sequence: Synthetic peptide
  Seed: LAVASGYDF
LMVASGYDM

SEQ ID NO: 45745 - protein, 9 aa, Artificial Sequence
  Description of Artificial Sequence: Synthetic peptide
  Seed: LAVASGYDF
LMVASGYDF

SEQ ID NO: 45746 - protein, 9 aa, Artificial Sequence
  Description of Artificial Sequence: Synthetic peptide
  Seed: LAVASGYDF
LMVASGYDW

SEQ ID NO: 45747 - protein, 9 aa, Artificial Sequence
  Description of Artificial Sequence: Synthetic peptide
  Seed: LAVASGYDF
LMVASGYDY

SEQ ID NO: 45748 - protein, 9 aa, Artificial Sequence
  Description of Artificial Sequence: Synthetic peptide
  Seed: LAVASGYDF
LHVASGYDY

SEQ ID NO: 45749 - protein, 9 aa, Artificial Sequence
  Description of Artificial Sequence: Synthetic peptide
  Seed: LAVASGYDF
LHVASGYDF

SEQ ID NO: 45750 - protein, 9 aa, Artificial Sequence
  Description of Artificial Sequence: Synthetic peptide
  Seed: LAVASGYDF
LHVASGYDM

SEQ ID NO: 45751 - protein, 9 aa, Artificial Sequence
  Description of Artificial Sequence: Synthetic peptide
  Seed: LAVASGYDF
LHVASGYDL

SEQ ID NO: 45752 - protein, 9 aa, Artificial Sequence
  Description of Artificial Sequence: Synthetic peptide
  Seed: LAVASGYDF
LRVASGYDM

SEQ ID NO: 45753 - protein, 9 aa, Artificial Sequence
  Description of Artificial Sequence: Synthetic peptide
  Seed: LAVASGYDF
LRVASGYDF

SEQ ID NO: 45754 - protein, 9 aa, Artificial Sequence
  Description of Artificial Sequence: Synthetic peptide
  Seed: LAVASGYDF
LRVASGYDY

SEQ ID NO: 45755 - protein, 9 aa, Artificial Sequence
  Description of Artificial Sequence: Synthetic peptide
  Seed: LAVASGYDF
LNVASGYDF

SEQ ID NO: 45756 - protein, 9 aa, Artificial Sequence
  Description of Artificial Sequence: Synthetic peptide
  Seed: LAVASGYDF
LNVASGYDY

SEQ ID NO: 45757 - protein, 9 aa, Artificial Sequence
  Description of Artificial Sequence: Synthetic peptide
  Seed: LAVASGYDF
LQVASGYDA

SEQ ID NO: 45758 - protein, 9 aa, Artificial Sequence
  Description of Artificial Sequence: Synthetic peptide
  Seed: LAVASGYDF
LQVASGYDH

SEQ ID NO: 45759 - protein, 9 aa, Artificial Sequence
  Description of Artificial Sequence: Synthetic peptide
  Seed: LAVASGYDF
LQVASGYDI

SEQ ID NO: 45760 - protein, 9 aa, Artificial Sequence
  Description of Artificial Sequence: Synthetic peptide
  Seed: LAVASGYDF
LQVASGYDL

SEQ ID NO: 45761 - protein, 9 aa, Artificial Sequence
  Description of Artificial Sequence: Synthetic peptide
  Seed: LAVASGYDF
LQVASGYDM

SEQ ID NO: 45762 - protein, 9 aa, Artificial Sequence
  Description of Artificial Sequence: Synthetic peptide
  Seed: LAVASGYDF
LQVASGYDF

SEQ ID NO: 45763 - protein, 9 aa, Artificial Sequence
  Description of Artificial Sequence: Synthetic peptide
  Seed: LAVASGYDF
LQVASGYDW

SEQ ID NO: 45764 - protein, 9 aa, Artificial Sequence
  Description of Artificial Sequence: Synthetic peptide
  Seed: LAVASGYDF
LQVASGYDY

SEQ ID NO: 45765 - protein, 9 aa, Artificial Sequence
  Description of Artificial Sequence: Synthetic peptide
  Seed: LAVASGYDF
LQVASGYDV

SEQ ID NO: 45766 - protein, 9 aa, Artificial Sequence
  Description of Artificial Sequence: Synthetic peptide
  Seed: LAVASGYDF
LEVASGYDM

SEQ ID NO: 45767 - protein, 9 aa, Artificial Sequence
  Description of Artificial Sequence: Synthetic peptide
  Seed: LAVASGYDF
LEVASGYDF

SEQ ID NO: 45768 - protein, 9 aa, Artificial Sequence
  Description of Artificial Sequence: Synthetic peptide
  Seed: LAVASGYDF
LEVASGYDY

SEQ ID NO: 45769 - protein, 9 aa, Artificial Sequence
  Description of Artificial Sequence: Synthetic peptide
  Seed: LAVASGYDF
LGVASGYDF

SEQ ID NO: 45770 - protein, 9 aa, Artificial Sequence
  Description of Artificial Sequence: Synthetic peptide
  Seed: LAVASGYDF
LGVASGYDY

SEQ ID NO: 45771 - protein, 9 aa, Artificial Sequence
  Description of Artificial Sequence: Synthetic peptide
  Seed: LAVASGYDF
LMVASGYDV

SEQ ID NO: 45772 - protein, 9 aa, Artificial Sequence
  Description of Artificial Sequence: Synthetic peptide
  Seed: LAVASGYDF
LFVASGYDY

SEQ ID NO: 45773 - protein, 9 aa, Artificial Sequence
  Description of Artificial Sequence: Synthetic peptide
  Seed: LAVASGHDF
LEVASGHDM

SEQ ID NO: 45774 - protein, 11 aa, Artificial Sequence
  Description of Artificial Sequence: Synthetic peptide
  Seed: LAVASGYDFER
LKVASGYDFER

SEQ ID NO: 45775 - protein, 11 aa, Artificial Sequence
  Description of Artificial Sequence: Synthetic peptide
  Seed: LAVASGYDFER
LNVASGYDFER

SEQ ID NO: 45776 - protein, 11 aa, Artificial Sequence
  Description of Artificial Sequence: Synthetic peptide
  Seed: LAVASGYDFER
LDVASGYDFER

SEQ ID NO: 45777 - protein, 11 aa, Artificial Sequence
  Description of Artificial Sequence: Synthetic peptide
  Seed: LAVASGYDFER
LQVASGYDFER

SEQ ID NO: 45778 - protein, 11 aa, Artificial Sequence
  Description of Artificial Sequence: Synthetic peptide
  Seed: LAVASGYDFER
LEVASGYDFER

SEQ ID NO: 45779 - protein, 11 aa, Artificial Sequence
  Description of Artificial Sequence: Synthetic peptide
  Seed: LAVASGYDFER
LEVASGYDFEK

SEQ ID NO: 45780 - protein, 11 aa, Artificial Sequence
  Description of Artificial Sequence: Synthetic peptide
  Seed: LAVASGYDFER
LGVASGYDFER

SEQ ID NO: 45781 - protein, 11 aa, Artificial Sequence
  Description of Artificial Sequence: Synthetic peptide
  Seed: LAVASGYDFER
LHVASGYDFER

SEQ ID NO: 45782 - protein, 11 aa, Artificial Sequence
  Description of Artificial Sequence: Synthetic peptide
  Seed: LAVASGYDFER
LLVASGYDFER

SEQ ID NO: 45783 - protein, 11 aa, Artificial Sequence
  Description of Artificial Sequence: Synthetic peptide
  Seed: LAVASGYDFER
LMVASGYDFER

SEQ ID NO: 45784 - protein, 9 aa, Artificial Sequence
  Description of Artificial Sequence: Synthetic peptide
  Seed: LAVASGYDF
LPVASGYDA

SEQ ID NO: 45785 - protein, 11 aa, Artificial Sequence
  Description of Artificial Sequence: Synthetic peptide
  Seed: LAVASGYDFER
LMVASGYDFEK

SEQ ID NO: 45786 - protein, 11 aa, Artificial Sequence
  Description of Artificial Sequence: Synthetic peptide
  Seed: LAVASGYDFER
LFVASGYDFER

SEQ ID NO: 45787 - protein, 11 aa, Artificial Sequence
  Description of Artificial Sequence: Synthetic peptide
  Seed: LAVASGYDFER
LFVASGYDFEK

SEQ ID NO: 45788 - protein, 11 aa, Artificial Sequence
  Description of Artificial Sequence: Synthetic peptide
  Seed: LAVASGYDFER
LTVASGYDFEK

SEQ ID NO: 45789 - protein, 11 aa, Artificial Sequence
  Description of Artificial Sequence: Synthetic peptide
  Seed: LAVASGYDFER
LWVASGYDFER

SEQ ID NO: 45790 - protein, 11 aa, Artificial Sequence
  Description of Artificial Sequence: Synthetic peptide
  Seed: LAVASGYDFER
LYVASGYDFER

SEQ ID NO: 45791 - protein, 11 aa, Artificial Sequence
  Description of Artificial Sequence: Synthetic peptide
  Seed: LAVASGYDFER
LYVASGYDFEK

SEQ ID NO: 45792 - protein, 11 aa, Artificial Sequence
  Description of Artificial Sequence: Synthetic peptide
  Seed: LAVASGYDFER
LRVASGYDFER

SEQ ID NO: 45793 - protein, 9 aa, Artificial Sequence
  Description of Artificial Sequence: Synthetic peptide
  Seed: LAVASGYDF
LVVASGYDY

SEQ ID NO: 45794 - protein, 9 aa, Artificial Sequence
  Description of Artificial Sequence: Synthetic peptide
  Seed: LAVASGYDF
LPVASGYDH

SEQ ID NO: 45795 - protein, 9 aa, Artificial Sequence
  Description of Artificial Sequence: Synthetic peptide
  Seed: LAVASGYDF
LPVASGYDI

SEQ ID NO: 45796 - protein, 9 aa, Artificial Sequence
  Description of Artificial Sequence: Synthetic peptide
  Seed: LAVASGYDF
LPVASGYDL

SEQ ID NO: 45797 - protein, 9 aa, Artificial Sequence
  Description of Artificial Sequence: Synthetic peptide
  Seed: LAVASGYDF
LPVASGYDM

SEQ ID NO: 45798 - protein, 9 aa, Artificial Sequence
  Description of Artificial Sequence: Synthetic peptide
  Seed: LAVASGYDF
LPVASGYDF

SEQ ID NO: 45799 - protein, 9 aa, Artificial Sequence
  Description of Artificial Sequence: Synthetic peptide
  Seed: LAVASGYDF
LPVASGYDW

SEQ ID NO: 45800 - protein, 9 aa, Artificial Sequence
  Description of Artificial Sequence: Synthetic peptide
  Seed: LAVASGYDF
LPVASGYDY

SEQ ID NO: 45801 - protein, 9 aa, Artificial Sequence
  Description of Artificial Sequence: Synthetic peptide
  Seed: LAVASGYDF
LPVASGYDV

SEQ ID NO: 45802 - protein, 9 aa, Artificial Sequence
  Description of Artificial Sequence: Synthetic peptide
  Seed: LAVASGYDF
LSVASGYDL

SEQ ID NO: 45803 - protein, 9 aa, Artificial Sequence
  Description of Artificial Sequence: Synthetic peptide
  Seed: LAVASGYDF
LSVASGYDM

SEQ ID NO: 45804 - protein, 9 aa, Artificial Sequence
  Description of Artificial Sequence: Synthetic peptide
  Seed: LAVASGYDF
LSVASGYDY

SEQ ID NO: 45805 - protein, 9 aa, Artificial Sequence
  Description of Artificial Sequence: Synthetic peptide
  Seed: LAVASGYDF
LTVASGYDL

SEQ ID NO: 45806 - protein, 9 aa, Artificial Sequence
  Description of Artificial Sequence: Synthetic peptide
  Seed: LAVASGYDF
LTVASGYDM

SEQ ID NO: 45807 - protein, 9 aa, Artificial Sequence
  Description of Artificial Sequence: Synthetic peptide
  Seed: LAVASGYDF
LTVASGYDY

SEQ ID NO: 45808 - protein, 9 aa, Artificial Sequence
  Description of Artificial Sequence: Synthetic peptide
  Seed: LAVASGYDF
LYVASGYDF

SEQ ID NO: 45809 - protein, 9 aa, Artificial Sequence
  Description of Artificial Sequence: Synthetic peptide
  Seed: LAVASGYDF
LYVASGYDY

SEQ ID NO: 45810 - protein, 9 aa, Artificial Sequence
  Description of Artificial Sequence: Synthetic peptide
  Seed: LAVASGYDF
LVVASGYDM

SEQ ID NO: 45811 - protein, 9 aa, Artificial Sequence
  Description of Artificial Sequence: Synthetic peptide
  Seed: LAVASGYDF
LRVASGYDL

SEQ ID NO: 45812 - protein, 9 aa, Artificial Sequence
  Description of Artificial Sequence: Synthetic peptide
  Seed: LAVASGYDF
LAVASGYDV

SEQ ID NO: 45813 - protein, 9 aa, Artificial Sequence
  Description of Artificial Sequence: Synthetic peptide
  Seed: LAVASGYDF
LAVASGYDY

SEQ ID NO: 45814 - protein, 9 aa, Artificial Sequence
  Description of Artificial Sequence: Synthetic peptide
  Seed: LAVASGHDF
LMVASGHDV

SEQ ID NO: 45815 - protein, 9 aa, Artificial Sequence
  Description of Artificial Sequence: Synthetic peptide
  Seed: LAVASGHDF
LKVASGHDW

SEQ ID NO: 45816 - protein, 9 aa, Artificial Sequence
  Description of Artificial Sequence: Synthetic peptide
  Seed: LAVASGHDF
LKVASGHDY

SEQ ID NO: 45817 - protein, 9 aa, Artificial Sequence
  Description of Artificial Sequence: Synthetic peptide
  Seed: LAVASGHDF
LMVASGHDH

SEQ ID NO: 45818 - protein, 9 aa, Artificial Sequence
  Description of Artificial Sequence: Synthetic peptide
  Seed: LAVASGHDF
LMVASGHDI

SEQ ID NO: 45819 - protein, 9 aa, Artificial Sequence
  Description of Artificial Sequence: Synthetic peptide
  Seed: LAVASGHDF
LMVASGHDL

SEQ ID NO: 45820 - protein, 9 aa, Artificial Sequence
  Description of Artificial Sequence: Synthetic peptide
  Seed: LAVASGHDF
LMVASGHDM

SEQ ID NO: 45821 - protein, 9 aa, Artificial Sequence
  Description of Artificial Sequence: Synthetic peptide
  Seed: LAVASGHDF
LMVASGHDF

SEQ ID NO: 45822 - protein, 9 aa, Artificial Sequence
  Description of Artificial Sequence: Synthetic peptide
  Seed: LAVASGHDF
LMVASGHDW

SEQ ID NO: 45823 - protein, 9 aa, Artificial Sequence
  Description of Artificial Sequence: Synthetic peptide
  Seed: LAVASGHDF
LMVASGHDY

SEQ ID NO: 45824 - protein, 9 aa, Artificial Sequence
  Description of Artificial Sequence: Synthetic peptide
  Seed: LAVASGHDF
LFVASGHDF

SEQ ID NO: 45825 - protein, 9 aa, Artificial Sequence
  Description of Artificial Sequence: Synthetic peptide
  Seed: LAVASGYDF
LAVASGYDW

SEQ ID NO: 45826 - protein, 9 aa, Artificial Sequence
  Description of Artificial Sequence: Synthetic peptide
  Seed: LAVASGHDF
LFVASGHDY

SEQ ID NO: 45827 - protein, 9 aa, Artificial Sequence
  Description of Artificial Sequence: Synthetic peptide
  Seed: LAVASGHDF
LPVASGHDA

SEQ ID NO: 45828 - protein, 9 aa, Artificial Sequence
  Description of Artificial Sequence: Synthetic peptide
  Seed: LAVASGHDF
LPVASGHDH

SEQ ID NO: 45829 - protein, 9 aa, Artificial Sequence
  Description of Artificial Sequence: Synthetic peptide
  Seed: LAVASGHDF
LPVASGHDI

SEQ ID NO: 45830 - protein, 9 aa, Artificial Sequence
  Description of Artificial Sequence: Synthetic peptide
  Seed: LAVASGHDF
LPVASGHDL

SEQ ID NO: 45831 - protein, 9 aa, Artificial Sequence
  Description of Artificial Sequence: Synthetic peptide
  Seed: LAVASGHDF
LPVASGHDM

SEQ ID NO: 45832 - protein, 9 aa, Artificial Sequence
  Description of Artificial Sequence: Synthetic peptide
  Seed: LAVASGHDF
LPVASGHDF

SEQ ID NO: 45833 - protein, 9 aa, Artificial Sequence
  Description of Artificial Sequence: Synthetic peptide
  Seed: LAVASGHDF
LPVASGHDW

SEQ ID NO: 45834 - protein, 9 aa, Artificial Sequence
  Description of Artificial Sequence: Synthetic peptide
  Seed: LAVASGHDF
LPVASGHDY

SEQ ID NO: 45835 - protein, 9 aa, Artificial Sequence
  Description of Artificial Sequence: Synthetic peptide
  Seed: LAVASGHDF
LKVASGHDF

SEQ ID NO: 45836 - protein, 9 aa, Artificial Sequence
  Description of Artificial Sequence: Synthetic peptide
  Seed: LAVASGHDF
LKVASGHDM

SEQ ID NO: 45837 - protein, 9 aa, Artificial Sequence
  Description of Artificial Sequence: Synthetic peptide
  Seed: LAVASGHDF
LKVASGHDL

SEQ ID NO: 45838 - protein, 9 aa, Artificial Sequence
  Description of Artificial Sequence: Synthetic peptide
  Seed: LAVASGHDF
LKVASGHDI

SEQ ID NO: 45839 - protein, 9 aa, Artificial Sequence
  Description of Artificial Sequence: Synthetic peptide
  Seed: LAVASGHDF
LEVASGHDF

SEQ ID NO: 45840 - protein, 9 aa, Artificial Sequence
  Description of Artificial Sequence: Synthetic peptide
  Seed: LAVASGHDF
LEVASGHDY

SEQ ID NO: 45841 - protein, 9 aa, Artificial Sequence
  Description of Artificial Sequence: Synthetic peptide
  Seed: LAVASGHDF
LGVASGHDF

SEQ ID NO: 45842 - protein, 9 aa, Artificial Sequence
  Description of Artificial Sequence: Synthetic peptide
  Seed: LAVASGHDF
LGVASGHDW

SEQ ID NO: 45843 - protein, 9 aa, Artificial Sequence
  Description of Artificial Sequence: Synthetic peptide
  Seed: LAVASGHDF
LGVASGHDY

SEQ ID NO: 45844 - protein, 9 aa, Artificial Sequence
  Description of Artificial Sequence: Synthetic peptide
  Seed: LAVASGHDF
LHVASGHDL

SEQ ID NO: 45845 - protein, 9 aa, Artificial Sequence
  Description of Artificial Sequence: Synthetic peptide
  Seed: LAVASGHDF
LHVASGHDM

SEQ ID NO: 45846 - protein, 9 aa, Artificial Sequence
  Description of Artificial Sequence: Synthetic peptide
  Seed: LAVASGHDF
LHVASGHDF

SEQ ID NO: 45847 - protein, 9 aa, Artificial Sequence
  Description of Artificial Sequence: Synthetic peptide
  Seed: LAVASGHDF
LHVASGHDY

SEQ ID NO: 45848 - protein, 9 aa, Artificial Sequence
  Description of Artificial Sequence: Synthetic peptide
  Seed: LAVASGHDF
LIVASGHDL

SEQ ID NO: 45849 - protein, 9 aa, Artificial Sequence
  Description of Artificial Sequence: Synthetic peptide
  Seed: LAVASGHDF
LIVASGHDM

SEQ ID NO: 45850 - protein, 9 aa, Artificial Sequence
  Description of Artificial Sequence: Synthetic peptide
  Seed: LAVASGHDF
LIVASGHDF

SEQ ID NO: 45851 - protein, 9 aa, Artificial Sequence
  Description of Artificial Sequence: Synthetic peptide
  Seed: LAVASGHDF
LIVASGHDW

SEQ ID NO: 45852 - protein, 9 aa, Artificial Sequence
  Description of Artificial Sequence: Synthetic peptide
  Seed: LAVASGHDF
LIVASGHDY

SEQ ID NO: 45853 - protein, 9 aa, Artificial Sequence
  Description of Artificial Sequence: Synthetic peptide
  Seed: LAVASGHDF
LLVASGHDL

SEQ ID NO: 45854 - protein, 9 aa, Artificial Sequence
  Description of Artificial Sequence: Synthetic peptide
  Seed: LAVASGHDF
LLVASGHDM

SEQ ID NO: 45855 - protein, 9 aa, Artificial Sequence
  Description of Artificial Sequence: Synthetic peptide
  Seed: LAVASGHDF
LLVASGHDF

SEQ ID NO: 45856 - protein, 9 aa, Artificial Sequence
  Description of Artificial Sequence: Synthetic peptide
  Seed: LAVASGHDF
LLVASGHDW

SEQ ID NO: 45857 - protein, 9 aa, Artificial Sequence
  Description of Artificial Sequence: Synthetic peptide
  Seed: LAVASGHDF
LLVASGHDY

SEQ ID NO: 45858 - protein, 9 aa, Artificial Sequence
  Description of Artificial Sequence: Synthetic peptide
  Seed: LAVASGHDF
LPVASGHDV

SEQ ID NO: 45859 - protein, 9 aa, Artificial Sequence
  Description of Artificial Sequence: Synthetic peptide
  Seed: LAVASGHDF
LSVASGHDI

SEQ ID NO: 45860 - protein, 9 aa, Artificial Sequence
  Description of Artificial Sequence: Synthetic peptide
  Seed: LAVASGHDF
LSVASGHDL

SEQ ID NO: 45861 - protein, 11 aa, Artificial Sequence
  Description of Artificial Sequence: Synthetic peptide
  Seed: LAVASGHDFER
LEVASGHDFEK

SEQ ID NO: 45862 - protein, 11 aa, Artificial Sequence
  Description of Artificial Sequence: Synthetic peptide
  Seed: LAVASGHDFER
LHVASGHDFER

SEQ ID NO: 45863 - protein, 11 aa, Artificial Sequence
  Description of Artificial Sequence: Synthetic peptide
  Seed: LAVASGHDFER
LIVASGHDFER

SEQ ID NO: 45864 - protein, 11 aa, Artificial Sequence
  Description of Artificial Sequence: Synthetic peptide
  Seed: LAVASGHDFER
LLVASGHDFER

SEQ ID NO: 45865 - protein, 11 aa, Artificial Sequence
  Description of Artificial Sequence: Synthetic peptide
  Seed: LAVASGHDFER
LKVASGHDFER

SEQ ID NO: 45866 - protein, 11 aa, Artificial Sequence
  Description of Artificial Sequence: Synthetic peptide
  Seed: LAVASGHDFER
LMVASGHDFER

SEQ ID NO: 45867 - protein, 11 aa, Artificial Sequence
  Description of Artificial Sequence: Synthetic peptide
  Seed: LAVASGHDFER
LMVASGHDFEK

SEQ ID NO: 45868 - protein, 11 aa, Artificial Sequence
  Description of Artificial Sequence: Synthetic peptide
  Seed: LAVASGHDFER
LFVASGHDFER

SEQ ID NO: 45869 - protein, 11 aa, Artificial Sequence
  Description of Artificial Sequence: Synthetic peptide
  Seed: LAVASGHDFER
LFVASGHDFEK

SEQ ID NO: 45870 - protein, 11 aa, Artificial Sequence
  Description of Artificial Sequence: Synthetic peptide
  Seed: LAVASGHDFER
LSVASGHDFER

SEQ ID NO: 45871 - protein, 11 aa, Artificial Sequence
  Description of Artificial Sequence: Synthetic peptide
  Seed: LAVASGHDFER
LTVASGHDFER

SEQ ID NO: 45872 - protein, 11 aa, Artificial Sequence
  Description of Artificial Sequence: Synthetic peptide
  Seed: LAVASGHDFER
LTVASGHDFEK

SEQ ID NO: 45873 - protein, 11 aa, Artificial Sequence
  Description of Artificial Sequence: Synthetic peptide
  Seed: LAVASGHDFER
LWVASGHDFER

SEQ ID NO: 45874 - protein, 11 aa, Artificial Sequence
  Description of Artificial Sequence: Synthetic peptide
  Seed: LAVASGHDFER
LYVASGHDFER

SEQ ID NO: 45875 - protein, 11 aa, Artificial Sequence
  Description of Artificial Sequence: Synthetic peptide
  Seed: LAVASGHDFER
LYVASGHDFEK

SEQ ID NO: 45876 - protein, 11 aa, Artificial Sequence
  Description of Artificial Sequence: Synthetic peptide
  Seed: LAVASGHDFER
LVVASGHDFER

SEQ ID NO: 45877 - protein, 11 aa, Artificial Sequence
  Description of Artificial Sequence: Synthetic peptide
  Seed: LAVASGHDFER
LVVASGHDFEK

SEQ ID NO: 45878 - protein, 9 aa, Artificial Sequence
  Description of Artificial Sequence: Synthetic peptide
  Seed: LAVASGYDF
LAVASGYDI

SEQ ID NO: 45879 - protein, 9 aa, Artificial Sequence
  Description of Artificial Sequence: Synthetic peptide
  Seed: LAVASGYDF
LAVASGYDL

SEQ ID NO: 45880 - protein, 9 aa, Artificial Sequence
  Description of Artificial Sequence: Synthetic peptide
  Seed: LAVASGYDF
LAVASGYDM

SEQ ID NO: 45881 - protein, 11 aa, Artificial Sequence
  Description of Artificial Sequence: Synthetic peptide
  Seed: LAVASGHDFER
LGVASGHDFER

SEQ ID NO: 45882 - protein, 11 aa, Artificial Sequence
  Description of Artificial Sequence: Synthetic peptide
  Seed: LAVASGHDFER
LEVASGHDFER

SEQ ID NO: 45883 - protein, 9 aa, Artificial Sequence
  Description of Artificial Sequence: Synthetic peptide
  Seed: LAVASGHDF
LSVASGHDM

SEQ ID NO: 45884 - protein, 11 aa, Artificial Sequence
  Description of Artificial Sequence: Synthetic peptide
  Seed: LAVASGHDFER
LQVASGHDFER

SEQ ID NO: 45885 - protein, 9 aa, Artificial Sequence
  Description of Artificial Sequence: Synthetic peptide
  Seed: LAVASGHDF
LSVASGHDF

SEQ ID NO: 45886 - protein, 9 aa, Artificial Sequence
  Description of Artificial Sequence: Synthetic peptide
  Seed: LAVASGHDF
LSVASGHDW

SEQ ID NO: 45887 - protein, 9 aa, Artificial Sequence
  Description of Artificial Sequence: Synthetic peptide
  Seed: LAVASGHDF
LSVASGHDY

SEQ ID NO: 45888 - protein, 9 aa, Artificial Sequence
  Description of Artificial Sequence: Synthetic peptide
  Seed: LAVASGHDF
LTVASGHDI

SEQ ID NO: 45889 - protein, 9 aa, Artificial Sequence
  Description of Artificial Sequence: Synthetic peptide
  Seed: LAVASGHDF
LTVASGHDL

SEQ ID NO: 45890 - protein, 9 aa, Artificial Sequence
  Description of Artificial Sequence: Synthetic peptide
  Seed: LAVASGHDF
LTVASGHDM

SEQ ID NO: 45891 - protein, 9 aa, Artificial Sequence
  Description of Artificial Sequence: Synthetic peptide
  Seed: LAVASGHDF
LTVASGHDF

SEQ ID NO: 45892 - protein, 9 aa, Artificial Sequence
  Description of Artificial Sequence: Synthetic peptide
  Seed: LAVASGHDF
LTVASGHDW

SEQ ID NO: 45893 - protein, 9 aa, Artificial Sequence
  Description of Artificial Sequence: Synthetic peptide
  Seed: LAVASGHDF
LTVASGHDY

SEQ ID NO: 45894 - protein, 9 aa, Artificial Sequence
  Description of Artificial Sequence: Synthetic peptide
  Seed: LAVASGHDF
LYVASGHDF

SEQ ID NO: 45895 - protein, 9 aa, Artificial Sequence
  Description of Artificial Sequence: Synthetic peptide
  Seed: LAVASGHDF
LYVASGHDY

SEQ ID NO: 45896 - protein, 9 aa, Artificial Sequence
  Description of Artificial Sequence: Synthetic peptide
  Seed: LAVASGHDF
LVVASGHDL

SEQ ID NO: 45897 - protein, 9 aa, Artificial Sequence
  Description of Artificial Sequence: Synthetic peptide
  Seed: LAVASGHDF
LVVASGHDM

SEQ ID NO: 45898 - protein, 9 aa, Artificial Sequence
  Description of Artificial Sequence: Synthetic peptide
  Seed: LAVASGHDF
LVVASGHDF

SEQ ID NO: 45899 - protein, 9 aa, Artificial Sequence
  Description of Artificial Sequence: Synthetic peptide
  Seed: LAVASGHDF
LVVASGHDW

SEQ ID NO: 45900 - protein, 9 aa, Artificial Sequence
  Description of Artificial Sequence: Synthetic peptide
  Seed: LAVASGHDF
LVVASGHDY

SEQ ID NO: 45901 - protein, 11 aa, Artificial Sequence
  Description of Artificial Sequence: Synthetic peptide
  Seed: LAVASGHDFER
LRVASGHDFER

SEQ ID NO: 45902 - protein, 11 aa, Artificial Sequence
  Description of Artificial Sequence: Synthetic peptide
  Seed: LAVASGHDFER
LNVASGHDFER

SEQ ID NO: 45903 - protein, 11 aa, Artificial Sequence
  Description of Artificial Sequence: Synthetic peptide
  Seed: LAVASGHDFER
LDVASGHDFER

SEQ ID NO: 45904 - protein, 10 aa, Artificial Sequence
  Description of Artificial Sequence: Synthetic peptide
  Seed: LIFLARSALI
LQFLARSALA

SEQ ID NO: 45905 - protein, 10 aa, Artificial Sequence
  Description of Artificial Sequence: Synthetic peptide
  Seed: LIFLARSALI
LQFLARSALI

SEQ ID NO: 45906 - protein, 10 aa, Artificial Sequence
  Description of Artificial Sequence: Synthetic peptide
  Seed: LIFLARSALI
LQFLARSALL

SEQ ID NO: 45907 - protein, 10 aa, Artificial Sequence
  Description of Artificial Sequence: Synthetic peptide
  Seed: LIQNSITIER
LRQNSITIER

SEQ ID NO: 45908 - protein, 10 aa, Artificial Sequence
  Description of Artificial Sequence: Synthetic peptide
  Seed: LIQNSITIER
LAQNSITIER

SEQ ID NO: 45909 - protein, 10 aa, Artificial Sequence
  Description of Artificial Sequence: Synthetic peptide
  Seed: LIQNSITIER
LAQNSITIEK

SEQ ID NO: 45910 - protein, 10 aa, Artificial Sequence
  Description of Artificial Sequence: Synthetic peptide
  Seed: LIQNSITIER
LRQNSITIEK

SEQ ID NO: 45911 - protein, 10 aa, Artificial Sequence
  Description of Artificial Sequence: Synthetic peptide
  Seed: LIQNSITIER
LGQNSITIER

SEQ ID NO: 45912 - protein, 10 aa, Artificial Sequence
  Description of Artificial Sequence: Synthetic peptide
  Seed: LIQNSITIER
LNQNSITIER

SEQ ID NO: 45913 - protein, 10 aa, Artificial Sequence
  Description of Artificial Sequence: Synthetic peptide
  Seed: LIQNSITIER
LNQNSITIEK

SEQ ID NO: 45914 - protein, 10 aa, Artificial Sequence
  Description of Artificial Sequence: Synthetic peptide
  Seed: LIQNSITIER
LDQNSITIER

SEQ ID NO: 45915 - protein, 10 aa, Artificial Sequence
  Description of Artificial Sequence: Synthetic peptide
  Seed: LIQNSITIER
LDQNSITIEK

SEQ ID NO: 45916 - protein, 10 aa, Artificial Sequence
  Description of Artificial Sequence: Synthetic peptide
  Seed: LIQNSITIER
LCQNSITIER

SEQ ID NO: 45917 - protein, 10 aa, Artificial Sequence
  Description of Artificial Sequence: Synthetic peptide
  Seed: LIQNSITIER
LCQNSITIEK

SEQ ID NO: 45918 - protein, 10 aa, Artificial Sequence
  Description of Artificial Sequence: Synthetic peptide
  Seed: LIQNSITIER
LQQNSITIER

SEQ ID NO: 45919 - protein, 10 aa, Artificial Sequence
  Description of Artificial Sequence: Synthetic peptide
  Seed: LIQNSITIER
LQQNSITIEK

SEQ ID NO: 45920 - protein, 10 aa, Artificial Sequence
  Description of Artificial Sequence: Synthetic peptide
  Seed: LIQNSITIER
LEQNSITIER

SEQ ID NO: 45921 - protein, 10 aa, Artificial Sequence
  Description of Artificial Sequence: Synthetic peptide
  Seed: LIQNSITIER
LEQNSITIEK

SEQ ID NO: 45922 - protein, 10 aa, Artificial Sequence
  Description of Artificial Sequence: Synthetic peptide
  Seed: LIQNSITIER
LGQNSITIEK

SEQ ID NO: 45923 - protein, 10 aa, Artificial Sequence
  Description of Artificial Sequence: Synthetic peptide
  Seed: LIQNSLTIER
LSQNSLTIEK

SEQ ID NO: 45924 - protein, 10 aa, Artificial Sequence
  Description of Artificial Sequence: Synthetic peptide
  Seed: LIQNSLTIER
LGQNSLTIER

SEQ ID NO: 45925 - protein, 10 aa, Artificial Sequence
  Description of Artificial Sequence: Synthetic peptide
  Seed: LIQNSITIER
LVQNSITIEK

SEQ ID NO: 45926 - protein, 10 aa, Artificial Sequence
  Description of Artificial Sequence: Synthetic peptide
  Seed: LIQNSLTIER
LAQNSLTIER

SEQ ID NO: 45927 - protein, 10 aa, Artificial Sequence
  Description of Artificial Sequence: Synthetic peptide
  Seed: LIQNSLTIER
LAQNSLTIEK

SEQ ID NO: 45928 - protein, 10 aa, Artificial Sequence
  Description of Artificial Sequence: Synthetic peptide
  Seed: LIQNSLTIER
LRQNSLTIER

SEQ ID NO: 45929 - protein, 10 aa, Artificial Sequence
  Description of Artificial Sequence: Synthetic peptide
  Seed: LIQNSLTIER
LNQNSLTIER

SEQ ID NO: 45930 - protein, 10 aa, Artificial Sequence
  Description of Artificial Sequence: Synthetic peptide
  Seed: LIQNSLTIER
LDQNSLTIER

SEQ ID NO: 45931 - protein, 10 aa, Artificial Sequence
  Description of Artificial Sequence: Synthetic peptide
  Seed: LIQNSLTIER
LCQNSLTIER

SEQ ID NO: 45932 - protein, 10 aa, Artificial Sequence
  Description of Artificial Sequence: Synthetic peptide
  Seed: LIQNSLTIER
LQQNSLTIER

SEQ ID NO: 45933 - protein, 10 aa, Artificial Sequence
  Description of Artificial Sequence: Synthetic peptide
  Seed: LIQNSLTIER
LEQNSLTIER

SEQ ID NO: 45934 - protein, 10 aa, Artificial Sequence
  Description of Artificial Sequence: Synthetic peptide
  Seed: LIQNSLTIER
LHQNSLTIER

SEQ ID NO: 45935 - protein, 10 aa, Artificial Sequence
  Description of Artificial Sequence: Synthetic peptide
  Seed: LIQNSITIER
LHQNSITIER

SEQ ID NO: 45936 - protein, 10 aa, Artificial Sequence
  Description of Artificial Sequence: Synthetic peptide
  Seed: LIQNSLTIER
LIQNSLTIEK

SEQ ID NO: 45937 - protein, 10 aa, Artificial Sequence
  Description of Artificial Sequence: Synthetic peptide
  Seed: LIQNSLTIER
LLQNSLTIER

SEQ ID NO: 45938 - protein, 10 aa, Artificial Sequence
  Description of Artificial Sequence: Synthetic peptide
  Seed: LIQNSLTIER
LLQNSLTIEK

SEQ ID NO: 45939 - protein, 10 aa, Artificial Sequence
  Description of Artificial Sequence: Synthetic peptide
  Seed: LIQNSLTIER
LKQNSLTIER

SEQ ID NO: 45940 - protein, 10 aa, Artificial Sequence
  Description of Artificial Sequence: Synthetic peptide
  Seed: LIQNSLTIER
LMQNSLTIER

SEQ ID NO: 45941 - protein, 10 aa, Artificial Sequence
  Description of Artificial Sequence: Synthetic peptide
  Seed: LIQNSLTIER
LMQNSLTIEK

SEQ ID NO: 45942 - protein, 10 aa, Artificial Sequence
  Description of Artificial Sequence: Synthetic peptide
  Seed: LIQNSLTIER
LFQNSLTIER

SEQ ID NO: 45943 - protein, 10 aa, Artificial Sequence
  Description of Artificial Sequence: Synthetic peptide
  Seed: LIQNSLTIER
LFQNSLTIEK

SEQ ID NO: 45944 - protein, 10 aa, Artificial Sequence
  Description of Artificial Sequence: Synthetic peptide
  Seed: LIQNSLTIER
LPQNSLTIER

SEQ ID NO: 45945 - protein, 10 aa, Artificial Sequence
  Description of Artificial Sequence: Synthetic peptide
  Seed: LIQNSITIER
LVQNSITIER

SEQ ID NO: 45946 - protein, 10 aa, Artificial Sequence
  Description of Artificial Sequence: Synthetic peptide
  Seed: LIQNSITIER
LYQNSITIEK

SEQ ID NO: 45947 - protein, 10 aa, Artificial Sequence
  Description of Artificial Sequence: Synthetic peptide
  Seed: LIQNSITIER
LYQNSITIER

SEQ ID NO: 45948 - protein, 10 aa, Artificial Sequence
  Description of Artificial Sequence: Synthetic peptide
  Seed: LIQNSITIER
LWQNSITIEK

SEQ ID NO: 45949 - protein, 10 aa, Artificial Sequence
  Description of Artificial Sequence: Synthetic peptide
  Seed: LIQNSITIER
LHQNSITIEK

SEQ ID NO: 45950 - protein, 10 aa, Artificial Sequence
  Description of Artificial Sequence: Synthetic peptide
  Seed: LIQNSITIER
LLQNSITIER

SEQ ID NO: 45951 - protein, 10 aa, Artificial Sequence
  Description of Artificial Sequence: Synthetic peptide
  Seed: LIQNSITIER
LLQNSITIEK

SEQ ID NO: 45952 - protein, 10 aa, Artificial Sequence
  Description of Artificial Sequence: Synthetic peptide
  Seed: LIQNSITIER
LKQNSITIER

SEQ ID NO: 45953 - protein, 10 aa, Artificial Sequence
  Description of Artificial Sequence: Synthetic peptide
  Seed: LIQNSITIER
LKQNSITIEK

SEQ ID NO: 45954 - protein, 10 aa, Artificial Sequence
  Description of Artificial Sequence: Synthetic peptide
  Seed: LIQNSITIER
LMQNSITIER

SEQ ID NO: 45955 - protein, 10 aa, Artificial Sequence
  Description of Artificial Sequence: Synthetic peptide
  Seed: LIQNSITIER
LMQNSITIEK

SEQ ID NO: 45956 - protein, 10 aa, Artificial Sequence
  Description of Artificial Sequence: Synthetic peptide
  Seed: LIQNSITIER
LMQNSITIEY

SEQ ID NO: 45957 - protein, 10 aa, Artificial Sequence
  Description of Artificial Sequence: Synthetic peptide
  Seed: LIQNSITIER
LFQNSITIER

SEQ ID NO: 45958 - protein, 10 aa, Artificial Sequence
  Description of Artificial Sequence: Synthetic peptide
  Seed: LIQNSITIER
LFQNSITIEK

SEQ ID NO: 45959 - protein, 10 aa, Artificial Sequence
  Description of Artificial Sequence: Synthetic peptide
  Seed: LIQNSITIER
LPQNSITIER

SEQ ID NO: 45960 - protein, 10 aa, Artificial Sequence
  Description of Artificial Sequence: Synthetic peptide
  Seed: LIQNSITIER
LPQNSITIEK

SEQ ID NO: 45961 - protein, 10 aa, Artificial Sequence
  Description of Artificial Sequence: Synthetic peptide
  Seed: LIQNSITIER
LSQNSITIER

SEQ ID NO: 45962 - protein, 10 aa, Artificial Sequence
  Description of Artificial Sequence: Synthetic peptide
  Seed: LIQNSITIER
LSQNSITIEK

SEQ ID NO: 45963 - protein, 10 aa, Artificial Sequence
  Description of Artificial Sequence: Synthetic peptide
  Seed: LIQNSITIER
LTQNSITIER

SEQ ID NO: 45964 - protein, 10 aa, Artificial Sequence
  Description of Artificial Sequence: Synthetic peptide
  Seed: LIQNSITIER
LTQNSITIEK

SEQ ID NO: 45965 - protein, 10 aa, Artificial Sequence
  Description of Artificial Sequence: Synthetic peptide
  Seed: LIQNSITIER
LTQNSITIEY

SEQ ID NO: 45966 - protein, 10 aa, Artificial Sequence
  Description of Artificial Sequence: Synthetic peptide
  Seed: LIQNSITIER
LWQNSITIER

SEQ ID NO: 45967 - protein, 11 aa, Artificial Sequence
  Description of Artificial Sequence: Synthetic peptide
  Seed: LIFSARSALIL
LTFSARSALIY

SEQ ID NO: 45968 - protein, 11 aa, Artificial Sequence
  Description of Artificial Sequence: Synthetic peptide
  Seed: LIFSARSALIL
LSFSARSALIF

SEQ ID NO: 45969 - protein, 11 aa, Artificial Sequence
  Description of Artificial Sequence: Synthetic peptide
  Seed: LIFSARSALIL
LSFSARSALIW

SEQ ID NO: 45970 - protein, 11 aa, Artificial Sequence
  Description of Artificial Sequence: Synthetic peptide
  Seed: LIFSARSALIL
LSFSARSALIY

SEQ ID NO: 45971 - protein, 11 aa, Artificial Sequence
  Description of Artificial Sequence: Synthetic peptide
  Seed: LIFSARSALIL
LSFSARSALIV

SEQ ID NO: 45972 - protein, 11 aa, Artificial Sequence
  Description of Artificial Sequence: Synthetic peptide
  Seed: LIFSARSALIL
LTFSARSALII

SEQ ID NO: 45973 - protein, 11 aa, Artificial Sequence
  Description of Artificial Sequence: Synthetic peptide
  Seed: LIFSARSALIL
LTFSARSALIL

SEQ ID NO: 45974 - protein, 11 aa, Artificial Sequence
  Description of Artificial Sequence: Synthetic peptide
  Seed: LIFSARSALIL
LTFSARSALIM

SEQ ID NO: 45975 - protein, 11 aa, Artificial Sequence
  Description of Artificial Sequence: Synthetic peptide
  Seed: LIFSARSALIL
LTFSARSALIF

SEQ ID NO: 45976 - protein, 11 aa, Artificial Sequence
  Description of Artificial Sequence: Synthetic peptide
  Seed: LIFSARSALIL
LTFSARSALIW

SEQ ID NO: 45977 - protein, 11 aa, Artificial Sequence
  Description of Artificial Sequence: Synthetic peptide
  Seed: LIFSARSALIL
LWFSARSALIL

SEQ ID NO: 45978 - protein, 11 aa, Artificial Sequence
  Description of Artificial Sequence: Synthetic peptide
  Seed: LIFSARSALIL
LWFSARSALIM

SEQ ID NO: 45979 - protein, 11 aa, Artificial Sequence
  Description of Artificial Sequence: Synthetic peptide
  Seed: LIFSARSALIL
LWFSARSALIF

SEQ ID NO: 45980 - protein, 11 aa, Artificial Sequence
  Description of Artificial Sequence: Synthetic peptide
  Seed: LIFSARSALIL
LWFSARSALIW

SEQ ID NO: 45981 - protein, 11 aa, Artificial Sequence
  Description of Artificial Sequence: Synthetic peptide
  Seed: LIFSARSALIL
LWFSARSALIY

SEQ ID NO: 45982 - protein, 11 aa, Artificial Sequence
  Description of Artificial Sequence: Synthetic peptide
  Seed: LIFSARSALIL
LYFSARSALIL

SEQ ID NO: 45983 - protein, 11 aa, Artificial Sequence
  Description of Artificial Sequence: Synthetic peptide
  Seed: LIFSARSALIL
LYFSARSALIM

SEQ ID NO: 45984 - protein, 11 aa, Artificial Sequence
  Description of Artificial Sequence: Synthetic peptide
  Seed: LIFSARSALIL
LYFSARSALIF

SEQ ID NO: 45985 - protein, 11 aa, Artificial Sequence
  Description of Artificial Sequence: Synthetic peptide
  Seed: LIFSARSALIL
LYFSARSALIW

SEQ ID NO: 45986 - protein, 11 aa, Artificial Sequence
  Description of Artificial Sequence: Synthetic peptide
  Seed: LIFSARSALIL
LYFSARSALIY

SEQ ID NO: 45987 - protein, 11 aa, Artificial Sequence
  Description of Artificial Sequence: Synthetic peptide
  Seed: LIFSARSALIL
LSFSARSALIM

SEQ ID NO: 45988 - protein, 11 aa, Artificial Sequence
  Description of Artificial Sequence: Synthetic peptide
  Seed: LIFSARSALIL
LSFSARSALIL

SEQ ID NO: 45989 - protein, 11 aa, Artificial Sequence
  Description of Artificial Sequence: Synthetic peptide
  Seed: LIFSARSALIL
LSFSARSALII

SEQ ID NO: 45990 - protein, 11 aa, Artificial Sequence
  Description of Artificial Sequence: Synthetic peptide
  Seed: LIFSARSALIL
LPFSARSALIY

SEQ ID NO: 45991 - protein, 11 aa, Artificial Sequence
  Description of Artificial Sequence: Synthetic peptide
  Seed: LIFSARSALIL
LKFSARSALIL

SEQ ID NO: 45992 - protein, 11 aa, Artificial Sequence
  Description of Artificial Sequence: Synthetic peptide
  Seed: LIFSARSALIL
LKFSARSALIM

SEQ ID NO: 45993 - protein, 11 aa, Artificial Sequence
  Description of Artificial Sequence: Synthetic peptide
  Seed: LIFSARSALIL
LKFSARSALIF

SEQ ID NO: 45994 - protein, 11 aa, Artificial Sequence
  Description of Artificial Sequence: Synthetic peptide
  Seed: LIFSARSALIL
LKFSARSALIW

SEQ ID NO: 45995 - protein, 11 aa, Artificial Sequence
  Description of Artificial Sequence: Synthetic peptide
  Seed: LIFSARSALIL
LKFSARSALIY

SEQ ID NO: 45996 - protein, 11 aa, Artificial Sequence
  Description of Artificial Sequence: Synthetic peptide
  Seed: LIFSARSALIL
LMFSARSALIL

SEQ ID NO: 45997 - protein, 11 aa, Artificial Sequence
  Description of Artificial Sequence: Synthetic peptide
  Seed: LIFSARSALIL
LMFSARSALIM

SEQ ID NO: 45998 - protein, 11 aa, Artificial Sequence
  Description of Artificial Sequence: Synthetic peptide
  Seed: LIFSARSALIL
LMFSARSALIF

SEQ ID NO: 45999 - protein, 11 aa, Artificial Sequence
  Description of Artificial Sequence: Synthetic peptide
  Seed: LIFSARSALIL
LMFSARSALIW

SEQ ID NO: 46000 - protein, 11 aa, Artificial Sequence
  Description of Artificial Sequence: Synthetic peptide
  Seed: LIFSARSALIL
LMFSARSALIY

SEQ ID NO: 46001 - protein, 11 aa, Artificial Sequence
  Description of Artificial Sequence: Synthetic peptide
  Seed: LIFSARSALIL
LFFSARSALIL

SEQ ID NO: 46002 - protein, 11 aa, Artificial Sequence
  Description of Artificial Sequence: Synthetic peptide
  Seed: LIFSARSALIL
LFFSARSALIM

SEQ ID NO: 46003 - protein, 11 aa, Artificial Sequence
  Description of Artificial Sequence: Synthetic peptide
  Seed: LIFSARSALIL
LFFSARSALIF

SEQ ID NO: 46004 - protein, 11 aa, Artificial Sequence
  Description of Artificial Sequence: Synthetic peptide
  Seed: LIFSARSALIL
LFFSARSALIW

SEQ ID NO: 46005 - protein, 11 aa, Artificial Sequence
  Description of Artificial Sequence: Synthetic peptide
  Seed: LIFSARSALIL
LFFSARSALIY

SEQ ID NO: 46006 - protein, 11 aa, Artificial Sequence
  Description of Artificial Sequence: Synthetic peptide
  Seed: LIFSARSALIL
LPFSARSALIL

SEQ ID NO: 46007 - protein, 11 aa, Artificial Sequence
  Description of Artificial Sequence: Synthetic peptide
  Seed: LIFSARSALIL
LPFSARSALIM

SEQ ID NO: 46008 - protein, 11 aa, Artificial Sequence
  Description of Artificial Sequence: Synthetic peptide
  Seed: LIFSARSALIL
LPFSARSALIF

SEQ ID NO: 46009 - protein, 11 aa, Artificial Sequence
  Description of Artificial Sequence: Synthetic peptide
  Seed: LIFSARSALIL
LPFSARSALIW

SEQ ID NO: 46010 - protein, 11 aa, Artificial Sequence
  Description of Artificial Sequence: Synthetic peptide
  Seed: LIFSARSALIL
LVFSARSALIL

SEQ ID NO: 46011 - protein, 11 aa, Artificial Sequence
  Description of Artificial Sequence: Synthetic peptide
  Seed: LIFSARSALIL
LVFSARSALIM

SEQ ID NO: 46012 - protein, 11 aa, Artificial Sequence
  Description of Artificial Sequence: Synthetic peptide
  Seed: LIFSARSALIL
LVFSARSALIF

SEQ ID NO: 46013 - protein, 10 aa, Artificial Sequence
  Description of Artificial Sequence: Synthetic peptide
  Seed: LILRGSVAHK
LLLRGSVAHK

SEQ ID NO: 46014 - protein, 10 aa, Artificial Sequence
  Description of Artificial Sequence: Synthetic peptide
  Seed: LILRGSVAHK
LKLRGSVAHK

SEQ ID NO: 46015 - protein, 10 aa, Artificial Sequence
  Description of Artificial Sequence: Synthetic peptide
  Seed: LILRGSVAHK
LMLRGSVAHR

SEQ ID NO: 46016 - protein, 10 aa, Artificial Sequence
  Description of Artificial Sequence: Synthetic peptide
  Seed: LILRGSVAHK
LMLRGSVAHK

SEQ ID NO: 46017 - protein, 10 aa, Artificial Sequence
  Description of Artificial Sequence: Synthetic peptide
  Seed: LILRGSVAHK
LFLRGSVAHR

SEQ ID NO: 46018 - protein, 10 aa, Artificial Sequence
  Description of Artificial Sequence: Synthetic peptide
  Seed: LILRGSVAHK
LFLRGSVAHK

SEQ ID NO: 46019 - protein, 10 aa, Artificial Sequence
  Description of Artificial Sequence: Synthetic peptide
  Seed: LILRGSVAHK
LPLRGSVAHR

SEQ ID NO: 46020 - protein, 10 aa, Artificial Sequence
  Description of Artificial Sequence: Synthetic peptide
  Seed: LILRGSVAHK
LPLRGSVAHK

SEQ ID NO: 46021 - protein, 10 aa, Artificial Sequence
  Description of Artificial Sequence: Synthetic peptide
  Seed: LILRGSVAHK
LSLRGSVAHA

SEQ ID NO: 46022 - protein, 10 aa, Artificial Sequence
  Description of Artificial Sequence: Synthetic peptide
  Seed: LILRGSVAHK
LSLRGSVAHR

SEQ ID NO: 46023 - protein, 10 aa, Artificial Sequence
  Description of Artificial Sequence: Synthetic peptide
  Seed: LILRGSVAHK
LSLRGSVAHK

SEQ ID NO: 46024 - protein, 10 aa, Artificial Sequence
  Description of Artificial Sequence: Synthetic peptide
  Seed: LILRGSVAHK
LTLRGSVAHA

SEQ ID NO: 46025 - protein, 10 aa, Artificial Sequence
  Description of Artificial Sequence: Synthetic peptide
  Seed: LILRGSVAHK
LTLRGSVAHR

SEQ ID NO: 46026 - protein, 10 aa, Artificial Sequence
  Description of Artificial Sequence: Synthetic peptide
  Seed: LILRGSVAHK
LTLRGSVAHK

SEQ ID NO: 46027 - protein, 10 aa, Artificial Sequence
  Description of Artificial Sequence: Synthetic peptide
  Seed: LILRGSVAHK
LWLRGSVAHR

SEQ ID NO: 46028 - protein, 10 aa, Artificial Sequence
  Description of Artificial Sequence: Synthetic peptide
  Seed: LILRGSVAHK
LWLRGSVAHK

SEQ ID NO: 46029 - protein, 10 aa, Artificial Sequence
  Description of Artificial Sequence: Synthetic peptide
  Seed: LILRGSVAHK
LYLRGSVAHR

SEQ ID NO: 46030 - protein, 10 aa, Artificial Sequence
  Description of Artificial Sequence: Synthetic peptide
  Seed: LILRGSVAHK
LYLRGSVAHK

SEQ ID NO: 46031 - protein, 10 aa, Artificial Sequence
  Description of Artificial Sequence: Synthetic peptide
  Seed: LILRGSVAHK
LVLRGSVAHR

SEQ ID NO: 46032 - protein, 10 aa, Artificial Sequence
  Description of Artificial Sequence: Synthetic peptide
  Seed: LILRGSVAHK
LKLRGSVAHR

SEQ ID NO: 46033 - protein, 10 aa, Artificial Sequence
  Description of Artificial Sequence: Synthetic peptide
  Seed: LILRGSVAHK
LLLRGSVAHR

SEQ ID NO: 46034 - protein, 11 aa, Artificial Sequence
  Description of Artificial Sequence: Synthetic peptide
  Seed: LIFSARSALIL
LVFSARSALIW

SEQ ID NO: 46035 - protein, 10 aa, Artificial Sequence
  Description of Artificial Sequence: Synthetic peptide
  Seed: LILRGSVAHK
LILRGSVAHR

SEQ ID NO: 46036 - protein, 11 aa, Artificial Sequence
  Description of Artificial Sequence: Synthetic peptide
  Seed: LIFSARSALIL
LVFSARSALIY

SEQ ID NO: 46037 - protein, 10 aa, Artificial Sequence
  Description of Artificial Sequence: Synthetic peptide
  Seed: LILRGSVAHK
LALRGSVAHR

SEQ ID NO: 46038 - protein, 10 aa, Artificial Sequence
  Description of Artificial Sequence: Synthetic peptide
  Seed: LILRGSVAHK
LALRGSVAHK

SEQ ID NO: 46039 - protein, 10 aa, Artificial Sequence
  Description of Artificial Sequence: Synthetic peptide
  Seed: LILRGSVAHK
LRLRGSVAHR

SEQ ID NO: 46040 - protein, 10 aa, Artificial Sequence
  Description of Artificial Sequence: Synthetic peptide
  Seed: LILRGSVAHK
LRLRGSVAHK

SEQ ID NO: 46041 - protein, 10 aa, Artificial Sequence
  Description of Artificial Sequence: Synthetic peptide
  Seed: LILRGSVAHK
LNLRGSVAHR

SEQ ID NO: 46042 - protein, 10 aa, Artificial Sequence
  Description of Artificial Sequence: Synthetic peptide
  Seed: LILRGSVAHK
LNLRGSVAHK

SEQ ID NO: 46043 - protein, 10 aa, Artificial Sequence
  Description of Artificial Sequence: Synthetic peptide
  Seed: LILRGSVAHK
LDLRGSVAHR

SEQ ID NO: 46044 - protein, 10 aa, Artificial Sequence
  Description of Artificial Sequence: Synthetic peptide
  Seed: LILRGSVAHK
LDLRGSVAHK

SEQ ID NO: 46045 - protein, 10 aa, Artificial Sequence
  Description of Artificial Sequence: Synthetic peptide
  Seed: LILRGSVAHK
LCLRGSVAHR

SEQ ID NO: 46046 - protein, 10 aa, Artificial Sequence
  Description of Artificial Sequence: Synthetic peptide
  Seed: LILRGSVAHK
LCLRGSVAHK

SEQ ID NO: 46047 - protein, 10 aa, Artificial Sequence
  Description of Artificial Sequence: Synthetic peptide
  Seed: LILRGSVAHK
LQLRGSVAHR

SEQ ID NO: 46048 - protein, 10 aa, Artificial Sequence
  Description of Artificial Sequence: Synthetic peptide
  Seed: LILRGSVAHK
LQLRGSVAHK

SEQ ID NO: 46049 - protein, 10 aa, Artificial Sequence
  Description of Artificial Sequence: Synthetic peptide
  Seed: LILRGSVAHK
LELRGSVAHR

SEQ ID NO: 46050 - protein, 10 aa, Artificial Sequence
  Description of Artificial Sequence: Synthetic peptide
  Seed: LILRGSVAHK
LELRGSVAHK

SEQ ID NO: 46051 - protein, 10 aa, Artificial Sequence
  Description of Artificial Sequence: Synthetic peptide
  Seed: LILRGSVAHK
LGLRGSVAHR

SEQ ID NO: 46052 - protein, 10 aa, Artificial Sequence
  Description of Artificial Sequence: Synthetic peptide
  Seed: LILRGSVAHK
LGLRGSVAHK

SEQ ID NO: 46053 - protein, 10 aa, Artificial Sequence
  Description of Artificial Sequence: Synthetic peptide
  Seed: LILRGSVAHK
LHLRGSVAHR

SEQ ID NO: 46054 - protein, 10 aa, Artificial Sequence
  Description of Artificial Sequence: Synthetic peptide
  Seed: LILRGSVAHK
LHLRGSVAHK

SEQ ID NO: 46055 - protein, 10 aa, Artificial Sequence
  Description of Artificial Sequence: Synthetic peptide
  Seed: LIQNSLTIER
LSQNSLTIER

SEQ ID NO: 46056 - protein, 10 aa, Artificial Sequence
  Description of Artificial Sequence: Synthetic peptide
  Seed: LIQNSLTIER
LTQNSLTIER

SEQ ID NO: 46057 - protein, 11 aa, Artificial Sequence
  Description of Artificial Sequence: Synthetic peptide
  Seed: LIFSARSALIL
LLFSARSALIW

SEQ ID NO: 46058 - protein, 10 aa, Artificial Sequence
  Description of Artificial Sequence: Synthetic peptide
  Seed: LLQNSQVFSL
LDQNSQVFSV

SEQ ID NO: 46059 - protein, 10 aa, Artificial Sequence
  Description of Artificial Sequence: Synthetic peptide
  Seed: LLQNSQVFSL
LNQNSQVFSM

SEQ ID NO: 46060 - protein, 10 aa, Artificial Sequence
  Description of Artificial Sequence: Synthetic peptide
  Seed: LLQNSQVFSL
LNQNSQVFSF

SEQ ID NO: 46061 - protein, 10 aa, Artificial Sequence
  Description of Artificial Sequence: Synthetic peptide
  Seed: LLQNSQVFSL
LNQNSQVFSY

SEQ ID NO: 46062 - protein, 10 aa, Artificial Sequence
  Description of Artificial Sequence: Synthetic peptide
  Seed: LLQNSQVFSL
LNQNSQVFSV

SEQ ID NO: 46063 - protein, 10 aa, Artificial Sequence
  Description of Artificial Sequence: Synthetic peptide
  Seed: LLQNSQVFSL
LDQNSQVFSI

SEQ ID NO: 46064 - protein, 10 aa, Artificial Sequence
  Description of Artificial Sequence: Synthetic peptide
  Seed: LLQNSQVFSL
LDQNSQVFSL

SEQ ID NO: 46065 - protein, 10 aa, Artificial Sequence
  Description of Artificial Sequence: Synthetic peptide
  Seed: LLQNSQVFSL
LDQNSQVFSM

SEQ ID NO: 46066 - protein, 10 aa, Artificial Sequence
  Description of Artificial Sequence: Synthetic peptide
  Seed: LLQNSQVFSL
LDQNSQVFSF

SEQ ID NO: 46067 - protein, 10 aa, Artificial Sequence
  Description of Artificial Sequence: Synthetic peptide
  Seed: LLQNSQVFSL
LDQNSQVFSY

SEQ ID NO: 46068 - protein, 10 aa, Artificial Sequence
  Description of Artificial Sequence: Synthetic peptide
  Seed: LLQNSQVFSL
LCQNSQVFSI

SEQ ID NO: 46069 - protein, 10 aa, Artificial Sequence
  Description of Artificial Sequence: Synthetic peptide
  Seed: LLQNSQVFSL
LQQNSQVFSW

SEQ ID NO: 46070 - protein, 10 aa, Artificial Sequence
  Description of Artificial Sequence: Synthetic peptide
  Seed: LLQNSQVFSL
LCQNSQVFSL

SEQ ID NO: 46071 - protein, 10 aa, Artificial Sequence
  Description of Artificial Sequence: Synthetic peptide
  Seed: LLQNSQVFSL
LCQNSQVFSM

SEQ ID NO: 46072 - protein, 10 aa, Artificial Sequence
  Description of Artificial Sequence: Synthetic peptide
  Seed: LLQNSQVFSL
LCQNSQVFSF

SEQ ID NO: 46073 - protein, 10 aa, Artificial Sequence
  Description of Artificial Sequence: Synthetic peptide
  Seed: LLQNSQVFSL
LCQNSQVFSY

SEQ ID NO: 46074 - protein, 10 aa, Artificial Sequence
  Description of Artificial Sequence: Synthetic peptide
  Seed: LLQNSQVFSL
LCQNSQVFSV

SEQ ID NO: 46075 - protein, 10 aa, Artificial Sequence
  Description of Artificial Sequence: Synthetic peptide
  Seed: LLQNSQVFSL
LQQNSQVFSA

SEQ ID NO: 46076 - protein, 10 aa, Artificial Sequence
  Description of Artificial Sequence: Synthetic peptide
  Seed: LLQNSQVFSL
LQQNSQVFSI

SEQ ID NO: 46077 - protein, 10 aa, Artificial Sequence
  Description of Artificial Sequence: Synthetic peptide
  Seed: LLQNSQVFSL
LQQNSQVFSL

SEQ ID NO: 46078 - protein, 10 aa, Artificial Sequence
  Description of Artificial Sequence: Synthetic peptide
  Seed: LLQNSQVFSL
LQQNSQVFSM

SEQ ID NO: 46079 - protein, 10 aa, Artificial Sequence
  Description of Artificial Sequence: Synthetic peptide
  Seed: LLQNSQVFSL
LNQNSQVFSL

SEQ ID NO: 46080 - protein, 10 aa, Artificial Sequence
  Description of Artificial Sequence: Synthetic peptide
  Seed: LLQNSQVFSL
LNQNSQVFSI

SEQ ID NO: 46081 - protein, 10 aa, Artificial Sequence
  Description of Artificial Sequence: Synthetic peptide
  Seed: LLQNSQVFSL
LRQNSQVFSV

SEQ ID NO: 46082 - protein, 10 aa, Artificial Sequence
  Description of Artificial Sequence: Synthetic peptide
  Seed: LLQNSQVFSL
LRQNSQVFSY

SEQ ID NO: 46083 - protein, 10 aa, Artificial Sequence
  Description of Artificial Sequence: Synthetic peptide
  Seed: LLQNSQVFSL
LAQNSQVFSI

SEQ ID NO: 46084 - protein, 10 aa, Artificial Sequence
  Description of Artificial Sequence: Synthetic peptide
  Seed: LLQNSQVFSL
LAQNSQVFSL

SEQ ID NO: 46085 - protein, 10 aa, Artificial Sequence
  Description of Artificial Sequence: Synthetic peptide
  Seed: LLQNSQVFSL
LAQNSQVFSM

SEQ ID NO: 46086 - protein, 10 aa, Artificial Sequence
  Description of Artificial Sequence: Synthetic peptide
  Seed: LLQNSQVFSL
LAQNSQVFSF

SEQ ID NO: 46087 - protein, 10 aa, Artificial Sequence
  Description of Artificial Sequence: Synthetic peptide
  Seed: LLQNSQVFSL
LAQNSQVFSY

SEQ ID NO: 46088 - protein, 10 aa, Artificial Sequence
  Description of Artificial Sequence: Synthetic peptide
  Seed: LLQNSQVFSL
LAQNSQVFSV

SEQ ID NO: 46089 - protein, 10 aa, Artificial Sequence
  Description of Artificial Sequence: Synthetic peptide
  Seed: LLQNSQVFSL
LRQNSQVFSI

SEQ ID NO: 46090 - protein, 10 aa, Artificial Sequence
  Description of Artificial Sequence: Synthetic peptide
  Seed: LLQNSQVFSL
LRQNSQVFSL

SEQ ID NO: 46091 - protein, 10 aa, Artificial Sequence
  Description of Artificial Sequence: Synthetic peptide
  Seed: LLQNSQVFSL
LRQNSQVFSM

SEQ ID NO: 46092 - protein, 10 aa, Artificial Sequence
  Description of Artificial Sequence: Synthetic peptide
  Seed: LLQNSQVFSL
LRQNSQVFSF

SEQ ID NO: 46093 - protein, 10 aa, Artificial Sequence
  Description of Artificial Sequence: Synthetic peptide
  Seed: LLQNSQVFSL
LQQNSQVFSF

SEQ ID NO: 46094 - protein, 10 aa, Artificial Sequence
  Description of Artificial Sequence: Synthetic peptide
  Seed: LLQNSQVFSL
LQQNSQVFSY

SEQ ID NO: 46095 - protein, 10 aa, Artificial Sequence
  Description of Artificial Sequence: Synthetic peptide
  Seed: LIQNSLTIER
LTQNSLTIEK

SEQ ID NO: 46096 - protein, 10 aa, Artificial Sequence
  Description of Artificial Sequence: Synthetic peptide
  Seed: LLQNSQVFSL
LKQNSQVFSI

SEQ ID NO: 46097 - protein, 10 aa, Artificial Sequence
  Description of Artificial Sequence: Synthetic peptide
  Seed: LLQNSQVFSL
LIQNSQVFSV

SEQ ID NO: 46098 - protein, 10 aa, Artificial Sequence
  Description of Artificial Sequence: Synthetic peptide
  Seed: LLQNSQVFSL
LLQNSQVFSA

SEQ ID NO: 46099 - protein, 10 aa, Artificial Sequence
  Description of Artificial Sequence: Synthetic peptide
  Seed: LLQNSQVFSL
LLQNSQVFSC

SEQ ID NO: 46100 - protein, 10 aa, Artificial Sequence
  Description of Artificial Sequence: Synthetic peptide
  Seed: LLQNSQVFSL
LLQNSQVFSM

SEQ ID NO: 46101 - protein, 10 aa, Artificial Sequence
  Description of Artificial Sequence: Synthetic peptide
  Seed: LLQNSQVFSL
LLQNSQVFSF

SEQ ID NO: 46102 - protein, 10 aa, Artificial Sequence
  Description of Artificial Sequence: Synthetic peptide
  Seed: LLQNSQVFSL
LLQNSQVFST

SEQ ID NO: 46103 - protein, 10 aa, Artificial Sequence
  Description of Artificial Sequence: Synthetic peptide
  Seed: LLQNSQVFSL
LLQNSQVFSY

SEQ ID NO: 46104 - protein, 10 aa, Artificial Sequence
  Description of Artificial Sequence: Synthetic peptide
  Seed: LLQNSQVFSL
LLQNSQVFSV

SEQ ID NO: 46105 - protein, 10 aa, Artificial Sequence
  Description of Artificial Sequence: Synthetic peptide
  Seed: LLQNSQVFSL
LKQNSQVFSL

SEQ ID NO: 46106 - protein, 10 aa, Artificial Sequence
  Description of Artificial Sequence: Synthetic peptide
  Seed: LLQNSQVFSL
LQQNSQVFSV

SEQ ID NO: 46107 - protein, 10 aa, Artificial Sequence
  Description of Artificial Sequence: Synthetic peptide
  Seed: LLQNSQVFSL
LKQNSQVFSM

SEQ ID NO: 46108 - protein, 10 aa, Artificial Sequence
  Description of Artificial Sequence: Synthetic peptide
  Seed: LLQNSQVFSL
LKQNSQVFSF

SEQ ID NO: 46109 - protein, 10 aa, Artificial Sequence
  Description of Artificial Sequence: Synthetic peptide
  Seed: LLQNSQVFSL
LKQNSQVFSY

SEQ ID NO: 46110 - protein, 10 aa, Artificial Sequence
  Description of Artificial Sequence: Synthetic peptide
  Seed: LLQNSQVFSL
LKQNSQVFSV

SEQ ID NO: 46111 - protein, 10 aa, Artificial Sequence
  Description of Artificial Sequence: Synthetic peptide
  Seed: LLQNSQVFSL
LMQNSQVFSA

SEQ ID NO: 46112 - protein, 10 aa, Artificial Sequence
  Description of Artificial Sequence: Synthetic peptide
  Seed: LLQNSQVFSL
LMQNSQVFSC

SEQ ID NO: 46113 - protein, 10 aa, Artificial Sequence
  Description of Artificial Sequence: Synthetic peptide
  Seed: LLQNSQVFSL
LMQNSQVFSI

SEQ ID NO: 46114 - protein, 10 aa, Artificial Sequence
  Description of Artificial Sequence: Synthetic peptide
  Seed: LLQNSQVFSL
LMQNSQVFSL

SEQ ID NO: 46115 - protein, 10 aa, Artificial Sequence
  Description of Artificial Sequence: Synthetic peptide
  Seed: LLQNSQVFSL
LMQNSQVFSM

SEQ ID NO: 46116 - protein, 10 aa, Artificial Sequence
  Description of Artificial Sequence: Synthetic peptide
  Seed: LLQNSQVFSL
LIQNSQVFSY

SEQ ID NO: 46117 - protein, 10 aa, Artificial Sequence
  Description of Artificial Sequence: Synthetic peptide
  Seed: LLQNSQVFSL
LIQNSQVFSF

SEQ ID NO: 46118 - protein, 10 aa, Artificial Sequence
  Description of Artificial Sequence: Synthetic peptide
  Seed: LLQNSQVFSL
LIQNSQVFSM

SEQ ID NO: 46119 - protein, 10 aa, Artificial Sequence
  Description of Artificial Sequence: Synthetic peptide
  Seed: LLQNSQVFSL
LIQNSQVFSL

SEQ ID NO: 46120 - protein, 10 aa, Artificial Sequence
  Description of Artificial Sequence: Synthetic peptide
  Seed: LLQNSQVFSL
LEQNSQVFSI

SEQ ID NO: 46121 - protein, 10 aa, Artificial Sequence
  Description of Artificial Sequence: Synthetic peptide
  Seed: LLQNSQVFSL
LEQNSQVFSL

SEQ ID NO: 46122 - protein, 10 aa, Artificial Sequence
  Description of Artificial Sequence: Synthetic peptide
  Seed: LLQNSQVFSL
LEQNSQVFSM

SEQ ID NO: 46123 - protein, 10 aa, Artificial Sequence
  Description of Artificial Sequence: Synthetic peptide
  Seed: LLQNSQVFSL
LEQNSQVFSF

SEQ ID NO: 46124 - protein, 10 aa, Artificial Sequence
  Description of Artificial Sequence: Synthetic peptide
  Seed: LLQNSQVFSL
LEQNSQVFSY

SEQ ID NO: 46125 - protein, 10 aa, Artificial Sequence
  Description of Artificial Sequence: Synthetic peptide
  Seed: LLQNSQVFSL
LEQNSQVFSV

SEQ ID NO: 46126 - protein, 10 aa, Artificial Sequence
  Description of Artificial Sequence: Synthetic peptide
  Seed: LLQNSQVFSL
LGQNSQVFSI

SEQ ID NO: 46127 - protein, 10 aa, Artificial Sequence
  Description of Artificial Sequence: Synthetic peptide
  Seed: LLQNSQVFSL
LGQNSQVFSL

SEQ ID NO: 46128 - protein, 10 aa, Artificial Sequence
  Description of Artificial Sequence: Synthetic peptide
  Seed: LLQNSQVFSL
LGQNSQVFSM

SEQ ID NO: 46129 - protein, 10 aa, Artificial Sequence
  Description of Artificial Sequence: Synthetic peptide
  Seed: LLQNSQVFSL
LGQNSQVFSF

SEQ ID NO: 46130 - protein, 10 aa, Artificial Sequence
  Description of Artificial Sequence: Synthetic peptide
  Seed: LLQNSQVFSL
LGQNSQVFSY

SEQ ID NO: 46131 - protein, 10 aa, Artificial Sequence
  Description of Artificial Sequence: Synthetic peptide
  Seed: LLQNSQVFSL
LGQNSQVFSV

SEQ ID NO: 46132 - protein, 10 aa, Artificial Sequence
  Description of Artificial Sequence: Synthetic peptide
  Seed: LLQNSQVFSL
LHQNSQVFSI

SEQ ID NO: 46133 - protein, 10 aa, Artificial Sequence
  Description of Artificial Sequence: Synthetic peptide
  Seed: LLQNSQVFSL
LHQNSQVFSL

SEQ ID NO: 46134 - protein, 10 aa, Artificial Sequence
  Description of Artificial Sequence: Synthetic peptide
  Seed: LLQNSQVFSL
LHQNSQVFSM

SEQ ID NO: 46135 - protein, 10 aa, Artificial Sequence
  Description of Artificial Sequence: Synthetic peptide
  Seed: LLQNSQVFSL
LHQNSQVFSF

SEQ ID NO: 46136 - protein, 10 aa, Artificial Sequence
  Description of Artificial Sequence: Synthetic peptide
  Seed: LLQNSQVFSL
LHQNSQVFSY

SEQ ID NO: 46137 - protein, 10 aa, Artificial Sequence
  Description of Artificial Sequence: Synthetic peptide
  Seed: LLQNSQVFSL
LHQNSQVFSV

SEQ ID NO: 46138 - protein, 10 aa, Artificial Sequence
  Description of Artificial Sequence: Synthetic peptide
  Seed: LLQNSQVFSL
LIQNSQVFSI

SEQ ID NO: 46139 - protein, 10 aa, Artificial Sequence
  Description of Artificial Sequence: Synthetic peptide
  Seed: LKLSDYEGRL
LCLSDYEGRL

SEQ ID NO: 46140 - protein, 10 aa, Artificial Sequence
  Description of Artificial Sequence: Synthetic peptide
  Seed: LKLSDYEGRL
LRLSDYEGRL

SEQ ID NO: 46141 - protein, 10 aa, Artificial Sequence
  Description of Artificial Sequence: Synthetic peptide
  Seed: LKLSDYEGRL
LRLSDYEGRV

SEQ ID NO: 46142 - protein, 10 aa, Artificial Sequence
  Description of Artificial Sequence: Synthetic peptide
  Seed: LKLSDYEGRL
LNLSDYEGRI

SEQ ID NO: 46143 - protein, 10 aa, Artificial Sequence
  Description of Artificial Sequence: Synthetic peptide
  Seed: LKLSDYEGRL
LNLSDYEGRL

SEQ ID NO: 46144 - protein, 10 aa, Artificial Sequence
  Description of Artificial Sequence: Synthetic peptide
  Seed: LKLSDYEGRL
LNLSDYEGRV

SEQ ID NO: 46145 - protein, 10 aa, Artificial Sequence
  Description of Artificial Sequence: Synthetic peptide
  Seed: LKLSDYEGRL
LDLSDYEGRI

SEQ ID NO: 46146 - protein, 10 aa, Artificial Sequence
  Description of Artificial Sequence: Synthetic peptide
  Seed: LKLSDYEGRL
LDLSDYEGRL

SEQ ID NO: 46147 - protein, 10 aa, Artificial Sequence
  Description of Artificial Sequence: Synthetic peptide
  Seed: LKLSDYEGRL
LDLSDYEGRV

SEQ ID NO: 46148 - protein, 10 aa, Artificial Sequence
  Description of Artificial Sequence: Synthetic peptide
  Seed: LKLSDYEGRL
LCLSDYEGRI

SEQ ID NO: 46149 - protein, 10 aa, Artificial Sequence
  Description of Artificial Sequence: Synthetic peptide
  Seed: LKLSDYEGRL
LCLSDYEGRV

SEQ ID NO: 46150 - protein, 10 aa, Artificial Sequence
  Description of Artificial Sequence: Synthetic peptide
  Seed: LKLSDYEGRL
LQLSDYEGRI

SEQ ID NO: 46151 - protein, 10 aa, Artificial Sequence
  Description of Artificial Sequence: Synthetic peptide
  Seed: LKLSDYEGRL
LQLSDYEGRV

SEQ ID NO: 46152 - protein, 10 aa, Artificial Sequence
  Description of Artificial Sequence: Synthetic peptide
  Seed: LKLSDYEGRL
LELSDYEGRI

SEQ ID NO: 46153 - protein, 10 aa, Artificial Sequence
  Description of Artificial Sequence: Synthetic peptide
  Seed: LKLSDYEGRL
LELSDYEGRL

SEQ ID NO: 46154 - protein, 10 aa, Artificial Sequence
  Description of Artificial Sequence: Synthetic peptide
  Seed: LKLSDYEGRL
LELSDYEGRV

SEQ ID NO: 46155 - protein, 10 aa, Artificial Sequence
  Description of Artificial Sequence: Synthetic peptide
  Seed: LKLSDYEGRL
LGLSDYEGRI

SEQ ID NO: 46156 - protein, 10 aa, Artificial Sequence
  Description of Artificial Sequence: Synthetic peptide
  Seed: LKLSDYEGRL
LGLSDYEGRL

SEQ ID NO: 46157 - protein, 10 aa, Artificial Sequence
  Description of Artificial Sequence: Synthetic peptide
  Seed: LKLSDYEGRL
LGLSDYEGRV

SEQ ID NO: 46158 - protein, 10 aa, Artificial Sequence
  Description of Artificial Sequence: Synthetic peptide
  Seed: LKLSDYEGRL
LRLSDYEGRI

SEQ ID NO: 46159 - protein, 10 aa, Artificial Sequence
  Description of Artificial Sequence: Synthetic peptide
  Seed: LKLSDYEGRL
LALSDYEGRV

SEQ ID NO: 46160 - protein, 10 aa, Artificial Sequence
  Description of Artificial Sequence: Synthetic peptide
  Seed: LKLSDYEGRL
LALSDYEGRL

SEQ ID NO: 46161 - protein, 10 aa, Artificial Sequence
  Description of Artificial Sequence: Synthetic peptide
  Seed: LKLSDYEGRL
LALSDYEGRI

SEQ ID NO: 46162 - protein, 10 aa, Artificial Sequence
  Description of Artificial Sequence: Synthetic peptide
  Seed: LIQNSLTIER
LWQNSLTIER

SEQ ID NO: 46163 - protein, 10 aa, Artificial Sequence
  Description of Artificial Sequence: Synthetic peptide
  Seed: LIQNSLTIER
LWQNSLTIEK

SEQ ID NO: 46164 - protein, 10 aa, Artificial Sequence
  Description of Artificial Sequence: Synthetic peptide
  Seed: LIQNSLTIER
LYQNSLTIER

SEQ ID NO: 46165 - protein, 10 aa, Artificial Sequence
  Description of Artificial Sequence: Synthetic peptide
  Seed: LIQNSLTIER
LYQNSLTIEK

SEQ ID NO: 46166 - protein, 10 aa, Artificial Sequence
  Description of Artificial Sequence: Synthetic peptide
  Seed: LIQNSLTIER
LVQNSLTIER

SEQ ID NO: 46167 - protein, 10 aa, Artificial Sequence
  Description of Artificial Sequence: Synthetic peptide
  Seed: LIQNSLTIER
LVQNSLTIEK

SEQ ID NO: 46168 - protein, 9 aa, Artificial Sequence
  Description of Artificial Sequence: Synthetic peptide
  Seed: LIRPNENPA
LLRPNENPA

SEQ ID NO: 46169 - protein, 9 aa, Artificial Sequence
  Description of Artificial Sequence: Synthetic peptide
  Seed: LIRPNENPA
LLRPNENPI

SEQ ID NO: 46170 - protein, 9 aa, Artificial Sequence
  Description of Artificial Sequence: Synthetic peptide
  Seed: LIRPNENPA
LLRPNENPL

SEQ ID NO: 46171 - protein, 9 aa, Artificial Sequence
  Description of Artificial Sequence: Synthetic peptide
  Seed: LIRPNENPA
LLRPNENPV

SEQ ID NO: 46172 - protein, 9 aa, Artificial Sequence
  Description of Artificial Sequence: Synthetic peptide
  Seed: LIRPNENPA
LMRPNENPA

SEQ ID NO: 46173 - protein, 9 aa, Artificial Sequence
  Description of Artificial Sequence: Synthetic peptide
  Seed: LIRPNENPA
LMRPNENPI

SEQ ID NO: 46174 - protein, 9 aa, Artificial Sequence
  Description of Artificial Sequence: Synthetic peptide
  Seed: LIRPNENPA
LMRPNENPL

SEQ ID NO: 46175 - protein, 9 aa, Artificial Sequence
  Description of Artificial Sequence: Synthetic peptide
  Seed: LIRPNENPA
LMRPNENPV

SEQ ID NO: 46176 - protein, 9 aa, Artificial Sequence
  Description of Artificial Sequence: Synthetic peptide
  Seed: LIRPNENPA
LVRPNENPI

SEQ ID NO: 46177 - protein, 9 aa, Artificial Sequence
  Description of Artificial Sequence: Synthetic peptide
  Seed: LIRPNENPA
LVRPNENPK

SEQ ID NO: 46178 - protein, 9 aa, Artificial Sequence
  Description of Artificial Sequence: Synthetic peptide
  Seed: LIRPNENPA
LVRPNENPV

SEQ ID NO: 46179 - protein, 10 aa, Artificial Sequence
  Description of Artificial Sequence: Synthetic peptide
  Seed: LKLSDYEGRL
LHLSDYEGRI

SEQ ID NO: 46180 - protein, 10 aa, Artificial Sequence
  Description of Artificial Sequence: Synthetic peptide
  Seed: LKLSDYEGRL
LHLSDYEGRL

SEQ ID NO: 46181 - protein, 10 aa, Artificial Sequence
  Description of Artificial Sequence: Synthetic peptide
  Seed: LKLSDYEGRL
LHLSDYEGRV

SEQ ID NO: 46182 - protein, 10 aa, Artificial Sequence
  Description of Artificial Sequence: Synthetic peptide
  Seed: LKLSDYEGRL
LSLSDYEGRV

SEQ ID NO: 46183 - protein, 10 aa, Artificial Sequence
  Description of Artificial Sequence: Synthetic peptide
  Seed: LKLSDYEGRL
LTLSDYEGRL

SEQ ID NO: 46184 - protein, 10 aa, Artificial Sequence
  Description of Artificial Sequence: Synthetic peptide
  Seed: LKLSDYEGRL
LTLSDYEGRV

SEQ ID NO: 46185 - protein, 10 aa, Artificial Sequence
  Description of Artificial Sequence: Synthetic peptide
  Seed: LKLSDYEGRL
LWLSDYEGRI

SEQ ID NO: 46186 - protein, 10 aa, Artificial Sequence
  Description of Artificial Sequence: Synthetic peptide
  Seed: LKLSDYEGRL
LWLSDYEGRL

SEQ ID NO: 46187 - protein, 10 aa, Artificial Sequence
  Description of Artificial Sequence: Synthetic peptide
  Seed: LKLSDYEGRL
LWLSDYEGRV

SEQ ID NO: 46188 - protein, 10 aa, Artificial Sequence
  Description of Artificial Sequence: Synthetic peptide
  Seed: LKLSDYEGRL
LYLSDYEGRI

SEQ ID NO: 46189 - protein, 10 aa, Artificial Sequence
  Description of Artificial Sequence: Synthetic peptide
  Seed: LKLSDYEGRL
LYLSDYEGRL

SEQ ID NO: 46190 - protein, 10 aa, Artificial Sequence
  Description of Artificial Sequence: Synthetic peptide
  Seed: LKLSDYEGRL
LYLSDYEGRV

SEQ ID NO: 46191 - protein, 10 aa, Artificial Sequence
  Description of Artificial Sequence: Synthetic peptide
  Seed: LKLSDYEGRL
LVLSDYEGRI

SEQ ID NO: 46192 - protein, 10 aa, Artificial Sequence
  Description of Artificial Sequence: Synthetic peptide
  Seed: LKLSDYEGRL
LVLSDYEGRL

SEQ ID NO: 46193 - protein, 10 aa, Artificial Sequence
  Description of Artificial Sequence: Synthetic peptide
  Seed: LKLSDYEGRL
LVLSDYEGRV

SEQ ID NO: 46194 - protein, 10 aa, Artificial Sequence
  Description of Artificial Sequence: Synthetic peptide
  Seed: LKLSDYEGRL
LTLSDYEGRI

SEQ ID NO: 46195 - protein, 10 aa, Artificial Sequence
  Description of Artificial Sequence: Synthetic peptide
  Seed: LKLSDYEGRL
LSLSDYEGRL

SEQ ID NO: 46196 - protein, 10 aa, Artificial Sequence
  Description of Artificial Sequence: Synthetic peptide
  Seed: LKLSDYEGRL
LILSDYEGRI

SEQ ID NO: 46197 - protein, 10 aa, Artificial Sequence
  Description of Artificial Sequence: Synthetic peptide
  Seed: LKLSDYEGRL
LSLSDYEGRI

SEQ ID NO: 46198 - protein, 10 aa, Artificial Sequence
  Description of Artificial Sequence: Synthetic peptide
  Seed: LKLSDYEGRL
LILSDYEGRL

SEQ ID NO: 46199 - protein, 10 aa, Artificial Sequence
  Description of Artificial Sequence: Synthetic peptide
  Seed: LKLSDYEGRL
LILSDYEGRV

SEQ ID NO: 46200 - protein, 10 aa, Artificial Sequence
  Description of Artificial Sequence: Synthetic peptide
  Seed: LKLSDYEGRL
LLLSDYEGRA

SEQ ID NO: 46201 - protein, 10 aa, Artificial Sequence
  Description of Artificial Sequence: Synthetic peptide
  Seed: LKLSDYEGRL
LLLSDYEGRI

SEQ ID NO: 46202 - protein, 10 aa, Artificial Sequence
  Description of Artificial Sequence: Synthetic peptide
  Seed: LKLSDYEGRL
LLLSDYEGRL

SEQ ID NO: 46203 - protein, 10 aa, Artificial Sequence
  Description of Artificial Sequence: Synthetic peptide
  Seed: LKLSDYEGRL
LLLSDYEGRM

SEQ ID NO: 46204 - protein, 10 aa, Artificial Sequence
  Description of Artificial Sequence: Synthetic peptide
  Seed: LKLSDYEGRL
LLLSDYEGRV

SEQ ID NO: 46205 - protein, 10 aa, Artificial Sequence
  Description of Artificial Sequence: Synthetic peptide
  Seed: LKLSDYEGRL
LKLSDYEGRI

SEQ ID NO: 46206 - protein, 10 aa, Artificial Sequence
  Description of Artificial Sequence: Synthetic peptide
  Seed: LKLSDYEGRL
LKLSDYEGRV

SEQ ID NO: 46207 - protein, 10 aa, Artificial Sequence
  Description of Artificial Sequence: Synthetic peptide
  Seed: LKLSDYEGRL
LMLSDYEGRA

SEQ ID NO: 46208 - protein, 10 aa, Artificial Sequence
  Description of Artificial Sequence: Synthetic peptide
  Seed: LKLSDYEGRL
LMLSDYEGRI

SEQ ID NO: 46209 - protein, 10 aa, Artificial Sequence
  Description of Artificial Sequence: Synthetic peptide
  Seed: LKLSDYEGRL
LMLSDYEGRL

SEQ ID NO: 46210 - protein, 10 aa, Artificial Sequence
  Description of Artificial Sequence: Synthetic peptide
  Seed: LKLSDYEGRL
LMLSDYEGRV

SEQ ID NO: 46211 - protein, 10 aa, Artificial Sequence
  Description of Artificial Sequence: Synthetic peptide
  Seed: LKLSDYEGRL
LFLSDYEGRI

SEQ ID NO: 46212 - protein, 10 aa, Artificial Sequence
  Description of Artificial Sequence: Synthetic peptide
  Seed: LKLSDYEGRL
LFLSDYEGRL

SEQ ID NO: 46213 - protein, 10 aa, Artificial Sequence
  Description of Artificial Sequence: Synthetic peptide
  Seed: LKLSDYEGRL
LFLSDYEGRV

SEQ ID NO: 46214 - protein, 10 aa, Artificial Sequence
  Description of Artificial Sequence: Synthetic peptide
  Seed: LKLSDYEGRL
LPLSDYEGRI

SEQ ID NO: 46215 - protein, 10 aa, Artificial Sequence
  Description of Artificial Sequence: Synthetic peptide
  Seed: LKLSDYEGRL
LPLSDYEGRL

SEQ ID NO: 46216 - protein, 10 aa, Artificial Sequence
  Description of Artificial Sequence: Synthetic peptide
  Seed: LKLSDYEGRL
LPLSDYEGRV

SEQ ID NO: 46217 - protein, 11 aa, Artificial Sequence
  Description of Artificial Sequence: Synthetic peptide
  Seed: LIFSARSALIL
LLFSARSALIY

SEQ ID NO: 46218 - protein, 11 aa, Artificial Sequence
  Description of Artificial Sequence: Synthetic peptide
  Seed: LIFSARSALIL
LLFSARSALIF

SEQ ID NO: 46219 - protein, 10 aa, Artificial Sequence
  Description of Artificial Sequence: Synthetic peptide
  Seed: LIFLARSALI
LQFLARSALM

SEQ ID NO: 46220 - protein, 9 aa, Artificial Sequence
  Description of Artificial Sequence: Synthetic peptide
  Seed: LIFSARSAL
LIFSARSAY

SEQ ID NO: 46221 - protein, 9 aa, Artificial Sequence
  Description of Artificial Sequence: Synthetic peptide
  Seed: LIFSARSAL
LHFSARSAW

SEQ ID NO: 46222 - protein, 9 aa, Artificial Sequence
  Description of Artificial Sequence: Synthetic peptide
  Seed: LIFSARSAL
LHFSARSAY

SEQ ID NO: 46223 - protein, 9 aa, Artificial Sequence
  Description of Artificial Sequence: Synthetic peptide
  Seed: LIFSARSAL
LHFSARSAV

SEQ ID NO: 46224 - protein, 9 aa, Artificial Sequence
  Description of Artificial Sequence: Synthetic peptide
  Seed: LIFSARSAL
LIFSARSAA

SEQ ID NO: 46225 - protein, 9 aa, Artificial Sequence
  Description of Artificial Sequence: Synthetic peptide
  Seed: LIFSARSAL
LIFSARSAH

SEQ ID NO: 46226 - protein, 9 aa, Artificial Sequence
  Description of Artificial Sequence: Synthetic peptide
  Seed: LIFSARSAL
LIFSARSAI

SEQ ID NO: 46227 - protein, 9 aa, Artificial Sequence
  Description of Artificial Sequence: Synthetic peptide
  Seed: LIFSARSAL
LIFSARSAM

SEQ ID NO: 46228 - protein, 9 aa, Artificial Sequence
  Description of Artificial Sequence: Synthetic peptide
  Seed: LIFSARSAL
LIFSARSAF

SEQ ID NO: 46229 - protein, 9 aa, Artificial Sequence
  Description of Artificial Sequence: Synthetic peptide
  Seed: LIFSARSAL
LIFSARSAW

SEQ ID NO: 46230 - protein, 9 aa, Artificial Sequence
  Description of Artificial Sequence: Synthetic peptide
  Seed: LIFSARSAL
LIFSARSAV

SEQ ID NO: 46231 - protein, 9 aa, Artificial Sequence
  Description of Artificial Sequence: Synthetic peptide
  Seed: LIFSARSAL
LLFSARSAY

SEQ ID NO: 46232 - protein, 9 aa, Artificial Sequence
  Description of Artificial Sequence: Synthetic peptide
  Seed: LIFSARSAL
LLFSARSAA

SEQ ID NO: 46233 - protein, 9 aa, Artificial Sequence
  Description of Artificial Sequence: Synthetic peptide
  Seed: LIFSARSAL
LLFSARSAG

SEQ ID NO: 46234 - protein, 9 aa, Artificial Sequence
  Description of Artificial Sequence: Synthetic peptide
  Seed: LIFSARSAL
LLFSARSAH

SEQ ID NO: 46235 - protein, 9 aa, Artificial Sequence
  Description of Artificial Sequence: Synthetic peptide
  Seed: LIFSARSAL
LLFSARSAI

SEQ ID NO: 46236 - protein, 9 aa, Artificial Sequence
  Description of Artificial Sequence: Synthetic peptide
  Seed: LIFSARSAL
LLFSARSAL

SEQ ID NO: 46237 - protein, 9 aa, Artificial Sequence
  Description of Artificial Sequence: Synthetic peptide
  Seed: LIFSARSAL
LLFSARSAM

SEQ ID NO: 46238 - protein, 9 aa, Artificial Sequence
  Description of Artificial Sequence: Synthetic peptide
  Seed: LIFSARSAL
LLFSARSAF

SEQ ID NO: 46239 - protein, 9 aa, Artificial Sequence
  Description of Artificial Sequence: Synthetic peptide
  Seed: LIFSARSAL
LLFSARSAS

SEQ ID NO: 46240 - protein, 9 aa, Artificial Sequence
  Description of Artificial Sequence: Synthetic peptide
  Seed: LIFSARSAL
LLFSARSAT

SEQ ID NO: 46241 - protein, 9 aa, Artificial Sequence
  Description of Artificial Sequence: Synthetic peptide
  Seed: LIFSARSAL
LHFSARSAF

SEQ ID NO: 46242 - protein, 9 aa, Artificial Sequence
  Description of Artificial Sequence: Synthetic peptide
  Seed: LIFSARSAL
LHFSARSAM

SEQ ID NO: 46243 - protein, 9 aa, Artificial Sequence
  Description of Artificial Sequence: Synthetic peptide
  Seed: LIFSARSAL
LHFSARSAL

SEQ ID NO: 46244 - protein, 9 aa, Artificial Sequence
  Description of Artificial Sequence: Synthetic peptide
  Seed: LIFSARSAL
LHFSARSAI

SEQ ID NO: 46245 - protein, 9 aa, Artificial Sequence
  Description of Artificial Sequence: Synthetic peptide
  Seed: LIFSARSAL
LEFSARSAH

SEQ ID NO: 46246 - protein, 9 aa, Artificial Sequence
  Description of Artificial Sequence: Synthetic peptide
  Seed: LIFSARSAL
LEFSARSAI

SEQ ID NO: 46247 - protein, 9 aa, Artificial Sequence
  Description of Artificial Sequence: Synthetic peptide
  Seed: LIFSARSAL
LEFSARSAL

SEQ ID NO: 46248 - protein, 9 aa, Artificial Sequence
  Description of Artificial Sequence: Synthetic peptide
  Seed: LIFSARSAL
LEFSARSAM

SEQ ID NO: 46249 - protein, 9 aa, Artificial Sequence
  Description of Artificial Sequence: Synthetic peptide
  Seed: LIFSARSAL
LEFSARSAF

SEQ ID NO: 46250 - protein, 9 aa, Artificial Sequence
  Description of Artificial Sequence: Synthetic peptide
  Seed: LIFSARSAL
LEFSARSAW

SEQ ID NO: 46251 - protein, 9 aa, Artificial Sequence
  Description of Artificial Sequence: Synthetic peptide
  Seed: LIFSARSAL
LEFSARSAY

SEQ ID NO: 46252 - protein, 9 aa, Artificial Sequence
  Description of Artificial Sequence: Synthetic peptide
  Seed: LIFSARSAL
LEFSARSAV

SEQ ID NO: 46253 - protein, 9 aa, Artificial Sequence
  Description of Artificial Sequence: Synthetic peptide
  Seed: LIFSARSAL
LGFSARSAH

SEQ ID NO: 46254 - protein, 9 aa, Artificial Sequence
  Description of Artificial Sequence: Synthetic peptide
  Seed: LIFSARSAL
LGFSARSAI

SEQ ID NO: 46255 - protein, 9 aa, Artificial Sequence
  Description of Artificial Sequence: Synthetic peptide
  Seed: LIFSARSAL
LGFSARSAL

SEQ ID NO: 46256 - protein, 9 aa, Artificial Sequence
  Description of Artificial Sequence: Synthetic peptide
  Seed: LIFSARSAL
LGFSARSAM

SEQ ID NO: 46257 - protein, 9 aa, Artificial Sequence
  Description of Artificial Sequence: Synthetic peptide
  Seed: LIFSARSAL
LGFSARSAF

SEQ ID NO: 46258 - protein, 9 aa, Artificial Sequence
  Description of Artificial Sequence: Synthetic peptide
  Seed: LIFSARSAL
LGFSARSAW

SEQ ID NO: 46259 - protein, 9 aa, Artificial Sequence
  Description of Artificial Sequence: Synthetic peptide
  Seed: LIFSARSAL
LGFSARSAY

SEQ ID NO: 46260 - protein, 9 aa, Artificial Sequence
  Description of Artificial Sequence: Synthetic peptide
  Seed: LIFSARSAL
LGFSARSAV

SEQ ID NO: 46261 - protein, 9 aa, Artificial Sequence
  Description of Artificial Sequence: Synthetic peptide
  Seed: LIFSARSAL
LHFSARSAA

SEQ ID NO: 46262 - protein, 9 aa, Artificial Sequence
  Description of Artificial Sequence: Synthetic peptide
  Seed: LIFSARSAL
LHFSARSAG

SEQ ID NO: 46263 - protein, 9 aa, Artificial Sequence
  Description of Artificial Sequence: Synthetic peptide
  Seed: LIFSARSAL
LHFSARSAH

SEQ ID NO: 46264 - protein, 9 aa, Artificial Sequence
  Description of Artificial Sequence: Synthetic peptide
  Seed: LIFSARSAL
LLFSARSAW

SEQ ID NO: 46265 - protein, 9 aa, Artificial Sequence
  Description of Artificial Sequence: Synthetic peptide
  Seed: LIFSARSAL
LLFSARSAV

SEQ ID NO: 46266 - protein, 9 aa, Artificial Sequence
  Description of Artificial Sequence: Synthetic peptide
  Seed: LIFSARSAL
LPFSARSAE

SEQ ID NO: 46267 - protein, 9 aa, Artificial Sequence
  Description of Artificial Sequence: Synthetic peptide
  Seed: LIFSARSAL
LFFSARSAI

SEQ ID NO: 46268 - protein, 9 aa, Artificial Sequence
  Description of Artificial Sequence: Synthetic peptide
  Seed: LIFSARSAL
LMFSARSAP

SEQ ID NO: 46269 - protein, 9 aa, Artificial Sequence
  Description of Artificial Sequence: Synthetic peptide
  Seed: LIFSARSAL
LMFSARSAS

SEQ ID NO: 46270 - protein, 9 aa, Artificial Sequence
  Description of Artificial Sequence: Synthetic peptide
  Seed: LIFSARSAL
LMFSARSAT

SEQ ID NO: 46271 - protein, 9 aa, Artificial Sequence
  Description of Artificial Sequence: Synthetic peptide
  Seed: LIFSARSAL
LMFSARSAW

SEQ ID NO: 46272 - protein, 9 aa, Artificial Sequence
  Description of Artificial Sequence: Synthetic peptide
  Seed: LIFSARSAL
LMFSARSAY

SEQ ID NO: 46273 - protein, 9 aa, Artificial Sequence
  Description of Artificial Sequence: Synthetic peptide
  Seed: LIFSARSAL
LMFSARSAV

SEQ ID NO: 46274 - protein, 9 aa, Artificial Sequence
  Description of Artificial Sequence: Synthetic peptide
  Seed: LIFSARSAL
LFFSARSAA

SEQ ID NO: 46275 - protein, 9 aa, Artificial Sequence
  Description of Artificial Sequence: Synthetic peptide
  Seed: LIFSARSAL
LFFSARSAC

SEQ ID NO: 46276 - protein, 9 aa, Artificial Sequence
  Description of Artificial Sequence: Synthetic peptide
  Seed: LIFSARSAL
LFFSARSAH

SEQ ID NO: 46277 - protein, 9 aa, Artificial Sequence
  Description of Artificial Sequence: Synthetic peptide
  Seed: LIFSARSAL
LFFSARSAL

SEQ ID NO: 46278 - protein, 9 aa, Artificial Sequence
  Description of Artificial Sequence: Synthetic peptide
  Seed: LIFSARSAL
LKFSARSAA

SEQ ID NO: 46279 - protein, 9 aa, Artificial Sequence
  Description of Artificial Sequence: Synthetic peptide
  Seed: LIFSARSAL
LFFSARSAM

SEQ ID NO: 46280 - protein, 9 aa, Artificial Sequence
  Description of Artificial Sequence: Synthetic peptide
  Seed: LIFSARSAL
LFFSARSAF

SEQ ID NO: 46281 - protein, 9 aa, Artificial Sequence
  Description of Artificial Sequence: Synthetic peptide
  Seed: LIFSARSAL
LFFSARSAT

SEQ ID NO: 46282 - protein, 9 aa, Artificial Sequence
  Description of Artificial Sequence: Synthetic peptide
  Seed: LIFSARSAL
LFFSARSAW

SEQ ID NO: 46283 - protein, 9 aa, Artificial Sequence
  Description of Artificial Sequence: Synthetic peptide
  Seed: LIFSARSAL
LFFSARSAY

SEQ ID NO: 46284 - protein, 9 aa, Artificial Sequence
  Description of Artificial Sequence: Synthetic peptide
  Seed: LIFSARSAL
LFFSARSAV

SEQ ID NO: 46285 - protein, 9 aa, Artificial Sequence
  Description of Artificial Sequence: Synthetic peptide
  Seed: LIFSARSAL
LPFSARSAA

SEQ ID NO: 46286 - protein, 9 aa, Artificial Sequence
  Description of Artificial Sequence: Synthetic peptide
  Seed: LIFSARSAL
LPFSARSAN

SEQ ID NO: 46287 - protein, 9 aa, Artificial Sequence
  Description of Artificial Sequence: Synthetic peptide
  Seed: LIFSARSAL
LPFSARSAC

SEQ ID NO: 46288 - protein, 9 aa, Artificial Sequence
  Description of Artificial Sequence: Synthetic peptide
  Seed: LIFSARSAL
LMFSARSAF

SEQ ID NO: 46289 - protein, 9 aa, Artificial Sequence
  Description of Artificial Sequence: Synthetic peptide
  Seed: LIFSARSAL
LMFSARSAM

SEQ ID NO: 46290 - protein, 9 aa, Artificial Sequence
  Description of Artificial Sequence: Synthetic peptide
  Seed: LIFSARSAL
LMFSARSAL

SEQ ID NO: 46291 - protein, 9 aa, Artificial Sequence
  Description of Artificial Sequence: Synthetic peptide
  Seed: LIFSARSAL
LMFSARSAI

SEQ ID NO: 46292 - protein, 9 aa, Artificial Sequence
  Description of Artificial Sequence: Synthetic peptide
  Seed: LIFSARSAL
LKFSARSAC

SEQ ID NO: 46293 - protein, 9 aa, Artificial Sequence
  Description of Artificial Sequence: Synthetic peptide
  Seed: LIFSARSAL
LKFSARSAG

SEQ ID NO: 46294 - protein, 9 aa, Artificial Sequence
  Description of Artificial Sequence: Synthetic peptide
  Seed: LIFSARSAL
LKFSARSAH

SEQ ID NO: 46295 - protein, 9 aa, Artificial Sequence
  Description of Artificial Sequence: Synthetic peptide
  Seed: LIFSARSAL
LKFSARSAI

SEQ ID NO: 46296 - protein, 9 aa, Artificial Sequence
  Description of Artificial Sequence: Synthetic peptide
  Seed: LIFSARSAL
LKFSARSAL

SEQ ID NO: 46297 - protein, 9 aa, Artificial Sequence
  Description of Artificial Sequence: Synthetic peptide
  Seed: LIFSARSAL
LKFSARSAM

SEQ ID NO: 46298 - protein, 9 aa, Artificial Sequence
  Description of Artificial Sequence: Synthetic peptide
  Seed: LIFSARSAL
LKFSARSAF

SEQ ID NO: 46299 - protein, 9 aa, Artificial Sequence
  Description of Artificial Sequence: Synthetic peptide
  Seed: LIFSARSAL
LKFSARSAS

SEQ ID NO: 46300 - protein, 9 aa, Artificial Sequence
  Description of Artificial Sequence: Synthetic peptide
  Seed: LIFSARSAL
LKFSARSAT

SEQ ID NO: 46301 - protein, 9 aa, Artificial Sequence
  Description of Artificial Sequence: Synthetic peptide
  Seed: LIFSARSAL
LKFSARSAW

SEQ ID NO: 46302 - protein, 9 aa, Artificial Sequence
  Description of Artificial Sequence: Synthetic peptide
  Seed: LIFSARSAL
LKFSARSAY

SEQ ID NO: 46303 - protein, 9 aa, Artificial Sequence
  Description of Artificial Sequence: Synthetic peptide
  Seed: LIFSARSAL
LKFSARSAV

SEQ ID NO: 46304 - protein, 9 aa, Artificial Sequence
  Description of Artificial Sequence: Synthetic peptide
  Seed: LIFSARSAL
LMFSARSAA

SEQ ID NO: 46305 - protein, 9 aa, Artificial Sequence
  Description of Artificial Sequence: Synthetic peptide
  Seed: LIFSARSAL
LMFSARSAN

SEQ ID NO: 46306 - protein, 9 aa, Artificial Sequence
  Description of Artificial Sequence: Synthetic peptide
  Seed: LIFSARSAL
LMFSARSAC

SEQ ID NO: 46307 - protein, 9 aa, Artificial Sequence
  Description of Artificial Sequence: Synthetic peptide
  Seed: LIFSARSAL
LMFSARSAQ

SEQ ID NO: 46308 - protein, 9 aa, Artificial Sequence
  Description of Artificial Sequence: Synthetic peptide
  Seed: LIFSARSAL
LMFSARSAE

SEQ ID NO: 46309 - protein, 9 aa, Artificial Sequence
  Description of Artificial Sequence: Synthetic peptide
  Seed: LIFSARSAL
LMFSARSAG

SEQ ID NO: 46310 - protein, 9 aa, Artificial Sequence
  Description of Artificial Sequence: Synthetic peptide
  Seed: LIFSARSAL
LMFSARSAH

SEQ ID NO: 46311 - protein, 9 aa, Artificial Sequence
  Description of Artificial Sequence: Synthetic peptide
  Seed: LIFSARSAL
LEFSARSAA

SEQ ID NO: 46312 - protein, 9 aa, Artificial Sequence
  Description of Artificial Sequence: Synthetic peptide
  Seed: LIFSARSAL
LQFSARSAV

SEQ ID NO: 46313 - protein, 9 aa, Artificial Sequence
  Description of Artificial Sequence: Synthetic peptide
  Seed: LIFSARSAL
LQFSARSAY

SEQ ID NO: 46314 - protein, 10 aa, Artificial Sequence
  Description of Artificial Sequence: Synthetic peptide
  Seed: LIFLARSALI
LTFLARSALM

SEQ ID NO: 46315 - protein, 10 aa, Artificial Sequence
  Description of Artificial Sequence: Synthetic peptide
  Seed: LIFLARSALI
LMFLARSALP

SEQ ID NO: 46316 - protein, 10 aa, Artificial Sequence
  Description of Artificial Sequence: Synthetic peptide
  Seed: LIFLARSALI
LMFLARSALS

SEQ ID NO: 46317 - protein, 10 aa, Artificial Sequence
  Description of Artificial Sequence: Synthetic peptide
  Seed: LIFLARSALI
LMFLARSALT

SEQ ID NO: 46318 - protein, 10 aa, Artificial Sequence
  Description of Artificial Sequence: Synthetic peptide
  Seed: LIFLARSALI
LMFLARSALV

SEQ ID NO: 46319 - protein, 10 aa, Artificial Sequence
  Description of Artificial Sequence: Synthetic peptide
  Seed: LIFLARSALI
LSFLARSALI

SEQ ID NO: 46320 - protein, 10 aa, Artificial Sequence
  Description of Artificial Sequence: Synthetic peptide
  Seed: LIFLARSALI
LSFLARSALV

SEQ ID NO: 46321 - protein, 10 aa, Artificial Sequence
  Description of Artificial Sequence: Synthetic peptide
  Seed: LIFLARSALI
LTFLARSALA

SEQ ID NO: 46322 - protein, 10 aa, Artificial Sequence
  Description of Artificial Sequence: Synthetic peptide
  Seed: LIFLARSALI
LTFLARSALL

SEQ ID NO: 46323 - protein, 10 aa, Artificial Sequence
  Description of Artificial Sequence: Synthetic peptide
  Seed: LIFLARSALI
LTFLARSALT

SEQ ID NO: 46324 - protein, 9 aa, Artificial Sequence
  Description of Artificial Sequence: Synthetic peptide
  Seed: LIFSARSAL
LQFSARSAW

SEQ ID NO: 46325 - protein, 10 aa, Artificial Sequence
  Description of Artificial Sequence: Synthetic peptide
  Seed: LIFLARSALI
LTFLARSALV

SEQ ID NO: 46326 - protein, 10 aa, Artificial Sequence
  Description of Artificial Sequence: Synthetic peptide
  Seed: LIFLARSALI
LVFLARSALA

SEQ ID NO: 46327 - protein, 10 aa, Artificial Sequence
  Description of Artificial Sequence: Synthetic peptide
  Seed: LIFLARSALI
LVFLARSALI

SEQ ID NO: 46328 - protein, 10 aa, Artificial Sequence
  Description of Artificial Sequence: Synthetic peptide
  Seed: LIFLARSALI
LVFLARSALL

SEQ ID NO: 46329 - protein, 10 aa, Artificial Sequence
  Description of Artificial Sequence: Synthetic peptide
  Seed: LIFLARSALI
LVFLARSALV

SEQ ID NO: 46330 - protein, 9 aa, Artificial Sequence
  Description of Artificial Sequence: Synthetic peptide
  Seed: LIFSARSAL
LAFSARSAA

SEQ ID NO: 46331 - protein, 9 aa, Artificial Sequence
  Description of Artificial Sequence: Synthetic peptide
  Seed: LIFSARSAL
LAFSARSAC

SEQ ID NO: 46332 - protein, 9 aa, Artificial Sequence
  Description of Artificial Sequence: Synthetic peptide
  Seed: LIFSARSAL
LAFSARSAH

SEQ ID NO: 46333 - protein, 9 aa, Artificial Sequence
  Description of Artificial Sequence: Synthetic peptide
  Seed: LIFSARSAL
LAFSARSAI

SEQ ID NO: 46334 - protein, 10 aa, Artificial Sequence
  Description of Artificial Sequence: Synthetic peptide
  Seed: LIFLARSALI
LMFLARSALF

SEQ ID NO: 46335 - protein, 10 aa, Artificial Sequence
  Description of Artificial Sequence: Synthetic peptide
  Seed: LIFLARSALI
LMFLARSALM

SEQ ID NO: 46336 - protein, 10 aa, Artificial Sequence
  Description of Artificial Sequence: Synthetic peptide
  Seed: LIFLARSALI
LMFLARSALL

SEQ ID NO: 46337 - protein, 10 aa, Artificial Sequence
  Description of Artificial Sequence: Synthetic peptide
  Seed: LIFLARSALI
LMFLARSALI

SEQ ID NO: 46338 - protein, 10 aa, Artificial Sequence
  Description of Artificial Sequence: Synthetic peptide
  Seed: LIFLARSALI
LQFLARSALV

SEQ ID NO: 46339 - protein, 10 aa, Artificial Sequence
  Description of Artificial Sequence: Synthetic peptide
  Seed: LIFLARSALI
LIFLARSALA

SEQ ID NO: 46340 - protein, 10 aa, Artificial Sequence
  Description of Artificial Sequence: Synthetic peptide
  Seed: LIFLARSALI
LIFLARSALL

SEQ ID NO: 46341 - protein, 10 aa, Artificial Sequence
  Description of Artificial Sequence: Synthetic peptide
  Seed: LIFLARSALI
LLFLARSALA

SEQ ID NO: 46342 - protein, 10 aa, Artificial Sequence
  Description of Artificial Sequence: Synthetic peptide
  Seed: LIFLARSALI
LLFLARSALC

SEQ ID NO: 46343 - protein, 10 aa, Artificial Sequence
  Description of Artificial Sequence: Synthetic peptide
  Seed: LIFLARSALI
LLFLARSALE

SEQ ID NO: 46344 - protein, 10 aa, Artificial Sequence
  Description of Artificial Sequence: Synthetic peptide
  Seed: LIFLARSALI
LLFLARSALG

SEQ ID NO: 46345 - protein, 10 aa, Artificial Sequence
  Description of Artificial Sequence: Synthetic peptide
  Seed: LIFLARSALI
LLFLARSALI

SEQ ID NO: 46346 - protein, 10 aa, Artificial Sequence
  Description of Artificial Sequence: Synthetic peptide
  Seed: LIFLARSALI
LLFLARSALL

SEQ ID NO: 46347 - protein, 10 aa, Artificial Sequence
  Description of Artificial Sequence: Synthetic peptide
  Seed: LIFLARSALI
LLFLARSALM

SEQ ID NO: 46348 - protein, 10 aa, Artificial Sequence
  Description of Artificial Sequence: Synthetic peptide
  Seed: LIFLARSALI
LLFLARSALF

SEQ ID NO: 46349 - protein, 10 aa, Artificial Sequence
  Description of Artificial Sequence: Synthetic peptide
  Seed: LIFLARSALI
LLFLARSALP

SEQ ID NO: 46350 - protein, 10 aa, Artificial Sequence
  Description of Artificial Sequence: Synthetic peptide
  Seed: LIFLARSALI
LLFLARSALS

SEQ ID NO: 46351 - protein, 10 aa, Artificial Sequence
  Description of Artificial Sequence: Synthetic peptide
  Seed: LIFLARSALI
LLFLARSALT

SEQ ID NO: 46352 - protein, 10 aa, Artificial Sequence
  Description of Artificial Sequence: Synthetic peptide
  Seed: LIFLARSALI
LLFLARSALV

SEQ ID NO: 46353 - protein, 10 aa, Artificial Sequence
  Description of Artificial Sequence: Synthetic peptide
  Seed: LIFLARSALI
LMFLARSALA

SEQ ID NO: 46354 - protein, 10 aa, Artificial Sequence
  Description of Artificial Sequence: Synthetic peptide
  Seed: LIFLARSALI
LMFLARSALC

SEQ ID NO: 46355 - protein, 10 aa, Artificial Sequence
  Description of Artificial Sequence: Synthetic peptide
  Seed: LIFLARSALI
LMFLARSALG

SEQ ID NO: 46356 - protein, 9 aa, Artificial Sequence
  Description of Artificial Sequence: Synthetic peptide
  Seed: LIFSARSAL
LAFSARSAL

SEQ ID NO: 46357 - protein, 9 aa, Artificial Sequence
  Description of Artificial Sequence: Synthetic peptide
  Seed: LIFSARSAL
LAFSARSAM

SEQ ID NO: 46358 - protein, 9 aa, Artificial Sequence
  Description of Artificial Sequence: Synthetic peptide
  Seed: LIFSARSAL
LAFSARSAF

SEQ ID NO: 46359 - protein, 9 aa, Artificial Sequence
  Description of Artificial Sequence: Synthetic peptide
  Seed: LIFSARSAL
LDFSARSAY

SEQ ID NO: 46360 - protein, 9 aa, Artificial Sequence
  Description of Artificial Sequence: Synthetic peptide
  Seed: LIFSARSAL
LCFSARSAM

SEQ ID NO: 46361 - protein, 9 aa, Artificial Sequence
  Description of Artificial Sequence: Synthetic peptide
  Seed: LIFSARSAL
LCFSARSAF

SEQ ID NO: 46362 - protein, 9 aa, Artificial Sequence
  Description of Artificial Sequence: Synthetic peptide
  Seed: LIFSARSAL
LCFSARSAY

SEQ ID NO: 46363 - protein, 9 aa, Artificial Sequence
  Description of Artificial Sequence: Synthetic peptide
  Seed: LIFSARSAL
LQFSARSAA

SEQ ID NO: 46364 - protein, 9 aa, Artificial Sequence
  Description of Artificial Sequence: Synthetic peptide
  Seed: LIFSARSAL
LQFSARSAN

SEQ ID NO: 46365 - protein, 9 aa, Artificial Sequence
  Description of Artificial Sequence: Synthetic peptide
  Seed: LIFSARSAL
LQFSARSAD

SEQ ID NO: 46366 - protein, 9 aa, Artificial Sequence
  Description of Artificial Sequence: Synthetic peptide
  Seed: LIFSARSAL
LQFSARSAC

SEQ ID NO: 46367 - protein, 9 aa, Artificial Sequence
  Description of Artificial Sequence: Synthetic peptide
  Seed: LIFSARSAL
LQFSARSAQ

SEQ ID NO: 46368 - protein, 9 aa, Artificial Sequence
  Description of Artificial Sequence: Synthetic peptide
  Seed: LIFSARSAL
LQFSARSAE

SEQ ID NO: 46369 - protein, 9 aa, Artificial Sequence
  Description of Artificial Sequence: Synthetic peptide
  Seed: LIFSARSAL
LQFSARSAG

SEQ ID NO: 46370 - protein, 9 aa, Artificial Sequence
  Description of Artificial Sequence: Synthetic peptide
  Seed: LIFSARSAL
LQFSARSAH

SEQ ID NO: 46371 - protein, 9 aa, Artificial Sequence
  Description of Artificial Sequence: Synthetic peptide
  Seed: LIFSARSAL
LQFSARSAI

SEQ ID NO: 46372 - protein, 9 aa, Artificial Sequence
  Description of Artificial Sequence: Synthetic peptide
  Seed: LIFSARSAL
LQFSARSAL

SEQ ID NO: 46373 - protein, 9 aa, Artificial Sequence
  Description of Artificial Sequence: Synthetic peptide
  Seed: LIFSARSAL
LQFSARSAK

SEQ ID NO: 46374 - protein, 9 aa, Artificial Sequence
  Description of Artificial Sequence: Synthetic peptide
  Seed: LIFSARSAL
LQFSARSAM

SEQ ID NO: 46375 - protein, 9 aa, Artificial Sequence
  Description of Artificial Sequence: Synthetic peptide
  Seed: LIFSARSAL
LQFSARSAF

SEQ ID NO: 46376 - protein, 9 aa, Artificial Sequence
  Description of Artificial Sequence: Synthetic peptide
  Seed: LIFSARSAL
LQFSARSAP

SEQ ID NO: 46377 - protein, 9 aa, Artificial Sequence
  Description of Artificial Sequence: Synthetic peptide
  Seed: LIFSARSAL
LQFSARSAS

SEQ ID NO: 46378 - protein, 9 aa, Artificial Sequence
  Description of Artificial Sequence: Synthetic peptide
  Seed: LIFSARSAL
LQFSARSAT

SEQ ID NO: 46379 - protein, 9 aa, Artificial Sequence
  Description of Artificial Sequence: Synthetic peptide
  Seed: LIFSARSAL
LCFSARSAL

SEQ ID NO: 46380 - protein, 9 aa, Artificial Sequence
  Description of Artificial Sequence: Synthetic peptide
  Seed: LIFSARSAL
LDFSARSAF

SEQ ID NO: 46381 - protein, 9 aa, Artificial Sequence
  Description of Artificial Sequence: Synthetic peptide
  Seed: LIFSARSAL
LAFSARSAT

SEQ ID NO: 46382 - protein, 9 aa, Artificial Sequence
  Description of Artificial Sequence: Synthetic peptide
  Seed: LIFSARSAL
LDFSARSAM

SEQ ID NO: 46383 - protein, 9 aa, Artificial Sequence
  Description of Artificial Sequence: Synthetic peptide
  Seed: LIFSARSAL
LAFSARSAW

SEQ ID NO: 46384 - protein, 9 aa, Artificial Sequence
  Description of Artificial Sequence: Synthetic peptide
  Seed: LIFSARSAL
LAFSARSAY

SEQ ID NO: 46385 - protein, 9 aa, Artificial Sequence
  Description of Artificial Sequence: Synthetic peptide
  Seed: LIFSARSAL
LAFSARSAV

SEQ ID NO: 46386 - protein, 9 aa, Artificial Sequence
  Description of Artificial Sequence: Synthetic peptide
  Seed: LIFSARSAL
LRFSARSAH

SEQ ID NO: 46387 - protein, 9 aa, Artificial Sequence
  Description of Artificial Sequence: Synthetic peptide
  Seed: LIFSARSAL
LRFSARSAI

SEQ ID NO: 46388 - protein, 9 aa, Artificial Sequence
  Description of Artificial Sequence: Synthetic peptide
  Seed: LIFSARSAL
LRFSARSAL

SEQ ID NO: 46389 - protein, 9 aa, Artificial Sequence
  Description of Artificial Sequence: Synthetic peptide
  Seed: LIFSARSAL
LRFSARSAM

SEQ ID NO: 46390 - protein, 9 aa, Artificial Sequence
  Description of Artificial Sequence: Synthetic peptide
  Seed: LIFSARSAL
LRFSARSAF

SEQ ID NO: 46391 - protein, 9 aa, Artificial Sequence
  Description of Artificial Sequence: Synthetic peptide
  Seed: LIFSARSAL
LRFSARSAW

SEQ ID NO: 46392 - protein, 9 aa, Artificial Sequence
  Description of Artificial Sequence: Synthetic peptide
  Seed: LIFSARSAL
LRFSARSAY

SEQ ID NO: 46393 - protein, 9 aa, Artificial Sequence
  Description of Artificial Sequence: Synthetic peptide
  Seed: LIFSARSAL
LRFSARSAV

SEQ ID NO: 46394 - protein, 9 aa, Artificial Sequence
  Description of Artificial Sequence: Synthetic peptide
  Seed: LIFSARSAL
LNFSARSAH

SEQ ID NO: 46395 - protein, 9 aa, Artificial Sequence
  Description of Artificial Sequence: Synthetic peptide
  Seed: LIFSARSAL
LNFSARSAI

SEQ ID NO: 46396 - protein, 9 aa, Artificial Sequence
  Description of Artificial Sequence: Synthetic peptide
  Seed: LIFSARSAL
LNFSARSAL

SEQ ID NO: 46397 - protein, 9 aa, Artificial Sequence
  Description of Artificial Sequence: Synthetic peptide
  Seed: LIFSARSAL
LNFSARSAM

SEQ ID NO: 46398 - protein, 9 aa, Artificial Sequence
  Description of Artificial Sequence: Synthetic peptide
  Seed: LIFSARSAL
LNFSARSAF

SEQ ID NO: 46399 - protein, 9 aa, Artificial Sequence
  Description of Artificial Sequence: Synthetic peptide
  Seed: LIFSARSAL
LNFSARSAW

SEQ ID NO: 46400 - protein, 9 aa, Artificial Sequence
  Description of Artificial Sequence: Synthetic peptide
  Seed: LIFSARSAL
LNFSARSAY

SEQ ID NO: 46401 - protein, 9 aa, Artificial Sequence
  Description of Artificial Sequence: Synthetic peptide
  Seed: LIFSARSAL
LNFSARSAV

SEQ ID NO: 46402 - protein, 9 aa, Artificial Sequence
  Description of Artificial Sequence: Synthetic peptide
  Seed: LIFSARSAL
LPFSARSAQ

SEQ ID NO: 46403 - protein, 9 aa, Artificial Sequence
  Description of Artificial Sequence: Synthetic peptide
  Seed: LIFSARSAL
LPFSARSAG

SEQ ID NO: 46404 - protein, 11 aa, Artificial Sequence
  Description of Artificial Sequence: Synthetic peptide
  Seed: LIFSARSALIL
LLFSARSALIM

SEQ ID NO: 46405 - protein, 10 aa, Artificial Sequence
  Description of Artificial Sequence: Synthetic peptide
  Seed: LIFSARSALI
LTFSARSALT

SEQ ID NO: 46406 - protein, 10 aa, Artificial Sequence
  Description of Artificial Sequence: Synthetic peptide
  Seed: LIFSARSALI
LMFSARSALV

SEQ ID NO: 46407 - protein, 10 aa, Artificial Sequence
  Description of Artificial Sequence: Synthetic peptide
  Seed: LIFSARSALI
LSFSARSALA

SEQ ID NO: 46408 - protein, 10 aa, Artificial Sequence
  Description of Artificial Sequence: Synthetic peptide
  Seed: LIFSARSALI
LSFSARSALI

SEQ ID NO: 46409 - protein, 10 aa, Artificial Sequence
  Description of Artificial Sequence: Synthetic peptide
  Seed: LIFSARSALI
LSFSARSALL

SEQ ID NO: 46410 - protein, 10 aa, Artificial Sequence
  Description of Artificial Sequence: Synthetic peptide
  Seed: LIFSARSALI
LSFSARSALV

SEQ ID NO: 46411 - protein, 10 aa, Artificial Sequence
  Description of Artificial Sequence: Synthetic peptide
  Seed: LIFSARSALI
LTFSARSALA

SEQ ID NO: 46412 - protein, 10 aa, Artificial Sequence
  Description of Artificial Sequence: Synthetic peptide
  Seed: LIFSARSALI
LTFSARSALI

SEQ ID NO: 46413 - protein, 10 aa, Artificial Sequence
  Description of Artificial Sequence: Synthetic peptide
  Seed: LIFSARSALI
LTFSARSALL

SEQ ID NO: 46414 - protein, 10 aa, Artificial Sequence
  Description of Artificial Sequence: Synthetic peptide
  Seed: LIFSARSALI
LTFSARSALM

SEQ ID NO: 46415 - protein, 10 aa, Artificial Sequence
  Description of Artificial Sequence: Synthetic peptide
  Seed: LIFSARSALI
LTFSARSALV

SEQ ID NO: 46416 - protein, 11 aa, Artificial Sequence
  Description of Artificial Sequence: Synthetic peptide
  Seed: LIFSARSALIL
LAFSARSALIY

SEQ ID NO: 46417 - protein, 10 aa, Artificial Sequence
  Description of Artificial Sequence: Synthetic peptide
  Seed: LIFSARSALI
LVFSARSALA

SEQ ID NO: 46418 - protein, 10 aa, Artificial Sequence
  Description of Artificial Sequence: Synthetic peptide
  Seed: LIFSARSALI
LVFSARSALI

SEQ ID NO: 46419 - protein, 10 aa, Artificial Sequence
  Description of Artificial Sequence: Synthetic peptide
  Seed: LIFSARSALI
LVFSARSALL

SEQ ID NO: 46420 - protein, 10 aa, Artificial Sequence
  Description of Artificial Sequence: Synthetic peptide
  Seed: LIFSARSALI
LVFSARSALM

SEQ ID NO: 46421 - protein, 10 aa, Artificial Sequence
  Description of Artificial Sequence: Synthetic peptide
  Seed: LIFSARSALI
LVFSARSALV

SEQ ID NO: 46422 - protein, 11 aa, Artificial Sequence
  Description of Artificial Sequence: Synthetic peptide
  Seed: LIFSARSALIL
LAFSARSALII

SEQ ID NO: 46423 - protein, 11 aa, Artificial Sequence
  Description of Artificial Sequence: Synthetic peptide
  Seed: LIFSARSALIL
LAFSARSALIL

SEQ ID NO: 46424 - protein, 11 aa, Artificial Sequence
  Description of Artificial Sequence: Synthetic peptide
  Seed: LIFSARSALIL
LAFSARSALIM

SEQ ID NO: 46425 - protein, 11 aa, Artificial Sequence
  Description of Artificial Sequence: Synthetic peptide
  Seed: LIFSARSALIL
LAFSARSALIF

SEQ ID NO: 46426 - protein, 10 aa, Artificial Sequence
  Description of Artificial Sequence: Synthetic peptide
  Seed: LIFSARSALI
LMFSARSALY

SEQ ID NO: 46427 - protein, 10 aa, Artificial Sequence
  Description of Artificial Sequence: Synthetic peptide
  Seed: LIFSARSALI
LMFSARSALW

SEQ ID NO: 46428 - protein, 10 aa, Artificial Sequence
  Description of Artificial Sequence: Synthetic peptide
  Seed: LIFSARSALI
LMFSARSALT

SEQ ID NO: 46429 - protein, 10 aa, Artificial Sequence
  Description of Artificial Sequence: Synthetic peptide
  Seed: LIFSARSALI
LMFSARSALS

SEQ ID NO: 46430 - protein, 10 aa, Artificial Sequence
  Description of Artificial Sequence: Synthetic peptide
  Seed: LIFSARSALI
LLFSARSALT

SEQ ID NO: 46431 - protein, 10 aa, Artificial Sequence
  Description of Artificial Sequence: Synthetic peptide
  Seed: LIFSARSALI
LLFSARSALW

SEQ ID NO: 46432 - protein, 10 aa, Artificial Sequence
  Description of Artificial Sequence: Synthetic peptide
  Seed: LIFSARSALI
LLFSARSALY

SEQ ID NO: 46433 - protein, 10 aa, Artificial Sequence
  Description of Artificial Sequence: Synthetic peptide
  Seed: LIFSARSALI
LLFSARSALV

SEQ ID NO: 46434 - protein, 10 aa, Artificial Sequence
  Description of Artificial Sequence: Synthetic peptide
  Seed: LIFSARSALI
LMFSARSALA

SEQ ID NO: 46435 - protein, 10 aa, Artificial Sequence
  Description of Artificial Sequence: Synthetic peptide
  Seed: LIFSARSALI
LMFSARSALR

SEQ ID NO: 46436 - protein, 10 aa, Artificial Sequence
  Description of Artificial Sequence: Synthetic peptide
  Seed: LIFSARSALI
LMFSARSALN

SEQ ID NO: 46437 - protein, 10 aa, Artificial Sequence
  Description of Artificial Sequence: Synthetic peptide
  Seed: LIFSARSALI
LMFSARSALD

SEQ ID NO: 46438 - protein, 10 aa, Artificial Sequence
  Description of Artificial Sequence: Synthetic peptide
  Seed: LIFSARSALI
LMFSARSALC

SEQ ID NO: 46439 - protein, 10 aa, Artificial Sequence
  Description of Artificial Sequence: Synthetic peptide
  Seed: LIFSARSALI
LMFSARSALQ

SEQ ID NO: 46440 - protein, 10 aa, Artificial Sequence
  Description of Artificial Sequence: Synthetic peptide
  Seed: LIFSARSALI
LMFSARSALE

SEQ ID NO: 46441 - protein, 10 aa, Artificial Sequence
  Description of Artificial Sequence: Synthetic peptide
  Seed: LIFSARSALI
LMFSARSALG

SEQ ID NO: 46442 - protein, 10 aa, Artificial Sequence
  Description of Artificial Sequence: Synthetic peptide
  Seed: LIFSARSALI
LMFSARSALH

SEQ ID NO: 46443 - protein, 10 aa, Artificial Sequence
  Description of Artificial Sequence: Synthetic peptide
  Seed: LIFSARSALI
LMFSARSALI

SEQ ID NO: 46444 - protein, 10 aa, Artificial Sequence
  Description of Artificial Sequence: Synthetic peptide
  Seed: LIFSARSALI
LMFSARSALL

SEQ ID NO: 46445 - protein, 10 aa, Artificial Sequence
  Description of Artificial Sequence: Synthetic peptide
  Seed: LIFSARSALI
LMFSARSALK

SEQ ID NO: 46446 - protein, 10 aa, Artificial Sequence
  Description of Artificial Sequence: Synthetic peptide
  Seed: LIFSARSALI
LMFSARSALM

SEQ ID NO: 46447 - protein, 10 aa, Artificial Sequence
  Description of Artificial Sequence: Synthetic peptide
  Seed: LIFSARSALI
LMFSARSALF

SEQ ID NO: 46448 - protein, 10 aa, Artificial Sequence
  Description of Artificial Sequence: Synthetic peptide
  Seed: LIFSARSALI
LMFSARSALP

SEQ ID NO: 46449 - protein, 11 aa, Artificial Sequence
  Description of Artificial Sequence: Synthetic peptide
  Seed: LIFSARSALIL
LAFSARSALIW

SEQ ID NO: 46450 - protein, 11 aa, Artificial Sequence
  Description of Artificial Sequence: Synthetic peptide
  Seed: LIFSARSALIL
LRFSARSALIL

SEQ ID NO: 46451 - protein, 9 aa, Artificial Sequence
  Description of Artificial Sequence: Synthetic peptide
  Seed: LIFSARSAL
LPFSARSAH

SEQ ID NO: 46452 - protein, 11 aa, Artificial Sequence
  Description of Artificial Sequence: Synthetic peptide
  Seed: LIFSARSALIL
LGFSARSALIY

SEQ ID NO: 46453 - protein, 11 aa, Artificial Sequence
  Description of Artificial Sequence: Synthetic peptide
  Seed: LIFSARSALIL
LEFSARSALIL

SEQ ID NO: 46454 - protein, 11 aa, Artificial Sequence
  Description of Artificial Sequence: Synthetic peptide
  Seed: LIFSARSALIL
LEFSARSALIM

SEQ ID NO: 46455 - protein, 11 aa, Artificial Sequence
  Description of Artificial Sequence: Synthetic peptide
  Seed: LIFSARSALIL
LEFSARSALIF

SEQ ID NO: 46456 - protein, 11 aa, Artificial Sequence
  Description of Artificial Sequence: Synthetic peptide
  Seed: LIFSARSALIL
LEFSARSALIW

SEQ ID NO: 46457 - protein, 11 aa, Artificial Sequence
  Description of Artificial Sequence: Synthetic peptide
  Seed: LIFSARSALIL
LEFSARSALIY

SEQ ID NO: 46458 - protein, 11 aa, Artificial Sequence
  Description of Artificial Sequence: Synthetic peptide
  Seed: LIFSARSALIL
LGFSARSALIL

SEQ ID NO: 46459 - protein, 11 aa, Artificial Sequence
  Description of Artificial Sequence: Synthetic peptide
  Seed: LIFSARSALIL
LGFSARSALIM

SEQ ID NO: 46460 - protein, 11 aa, Artificial Sequence
  Description of Artificial Sequence: Synthetic peptide
  Seed: LIFSARSALIL
LGFSARSALIF

SEQ ID NO: 46461 - protein, 11 aa, Artificial Sequence
  Description of Artificial Sequence: Synthetic peptide
  Seed: LIFSARSALIL
LGFSARSALIW

SEQ ID NO: 46462 - protein, 11 aa, Artificial Sequence
  Description of Artificial Sequence: Synthetic peptide
  Seed: LIFSARSALIL
LHFSARSALIL

SEQ ID NO: 46463 - protein, 11 aa, Artificial Sequence
  Description of Artificial Sequence: Synthetic peptide
  Seed: LIFSARSALIL
LRFSARSALIM

SEQ ID NO: 46464 - protein, 11 aa, Artificial Sequence
  Description of Artificial Sequence: Synthetic peptide
  Seed: LIFSARSALIL
LHFSARSALIM

SEQ ID NO: 46465 - protein, 11 aa, Artificial Sequence
  Description of Artificial Sequence: Synthetic peptide
  Seed: LIFSARSALIL
LHFSARSALIF

SEQ ID NO: 46466 - protein, 11 aa, Artificial Sequence
  Description of Artificial Sequence: Synthetic peptide
  Seed: LIFSARSALIL
LHFSARSALIW

SEQ ID NO: 46467 - protein, 11 aa, Artificial Sequence
  Description of Artificial Sequence: Synthetic peptide
  Seed: LIFSARSALIL
LHFSARSALIY

SEQ ID NO: 46468 - protein, 11 aa, Artificial Sequence
  Description of Artificial Sequence: Synthetic peptide
  Seed: LIFSARSALIL
LIFSARSALIM

SEQ ID NO: 46469 - protein, 11 aa, Artificial Sequence
  Description of Artificial Sequence: Synthetic peptide
  Seed: LIFSARSALIL
LIFSARSALIF

SEQ ID NO: 46470 - protein, 11 aa, Artificial Sequence
  Description of Artificial Sequence: Synthetic peptide
  Seed: LIFSARSALIL
LIFSARSALIW

SEQ ID NO: 46471 - protein, 11 aa, Artificial Sequence
  Description of Artificial Sequence: Synthetic peptide
  Seed: LIFSARSALIL
LIFSARSALIY

SEQ ID NO: 46472 - protein, 11 aa, Artificial Sequence
  Description of Artificial Sequence: Synthetic peptide
  Seed: LIFSARSALIL
LLFSARSALIL

SEQ ID NO: 46473 - protein, 11 aa, Artificial Sequence
  Description of Artificial Sequence: Synthetic peptide
  Seed: LIFSARSALIL
LQFSARSALIY

SEQ ID NO: 46474 - protein, 11 aa, Artificial Sequence
  Description of Artificial Sequence: Synthetic peptide
  Seed: LIFSARSALIL
LQFSARSALIW

SEQ ID NO: 46475 - protein, 11 aa, Artificial Sequence
  Description of Artificial Sequence: Synthetic peptide
  Seed: LIFSARSALIL
LQFSARSALIF

SEQ ID NO: 46476 - protein, 11 aa, Artificial Sequence
  Description of Artificial Sequence: Synthetic peptide
  Seed: LIFSARSALIL
LQFSARSALIM

SEQ ID NO: 46477 - protein, 11 aa, Artificial Sequence
  Description of Artificial Sequence: Synthetic peptide
  Seed: LIFSARSALIL
LRFSARSALIF

SEQ ID NO: 46478 - protein, 11 aa, Artificial Sequence
  Description of Artificial Sequence: Synthetic peptide
  Seed: LIFSARSALIL
LRFSARSALIW

SEQ ID NO: 46479 - protein, 11 aa, Artificial Sequence
  Description of Artificial Sequence: Synthetic peptide
  Seed: LIFSARSALIL
LRFSARSALIY

SEQ ID NO: 46480 - protein, 11 aa, Artificial Sequence
  Description of Artificial Sequence: Synthetic peptide
  Seed: LIFSARSALIL
LNFSARSALIL

SEQ ID NO: 46481 - protein, 11 aa, Artificial Sequence
  Description of Artificial Sequence: Synthetic peptide
  Seed: LIFSARSALIL
LNFSARSALIM

SEQ ID NO: 46482 - protein, 11 aa, Artificial Sequence
  Description of Artificial Sequence: Synthetic peptide
  Seed: LIFSARSALIL
LNFSARSALIF

SEQ ID NO: 46483 - protein, 11 aa, Artificial Sequence
  Description of Artificial Sequence: Synthetic peptide
  Seed: LIFSARSALIL
LNFSARSALIW

SEQ ID NO: 46484 - protein, 11 aa, Artificial Sequence
  Description of Artificial Sequence: Synthetic peptide
  Seed: LIFSARSALIL
LNFSARSALIY

SEQ ID NO: 46485 - protein, 11 aa, Artificial Sequence
  Description of Artificial Sequence: Synthetic peptide
  Seed: LIFSARSALIL
LDFSARSALIL

SEQ ID NO: 46486 - protein, 11 aa, Artificial Sequence
  Description of Artificial Sequence: Synthetic peptide
  Seed: LIFSARSALIL
LDFSARSALIM

SEQ ID NO: 46487 - protein, 11 aa, Artificial Sequence
  Description of Artificial Sequence: Synthetic peptide
  Seed: LIFSARSALIL
LDFSARSALIF

SEQ ID NO: 46488 - protein, 11 aa, Artificial Sequence
  Description of Artificial Sequence: Synthetic peptide
  Seed: LIFSARSALIL
LDFSARSALIW

SEQ ID NO: 46489 - protein, 11 aa, Artificial Sequence
  Description of Artificial Sequence: Synthetic peptide
  Seed: LIFSARSALIL
LDFSARSALIY

SEQ ID NO: 46490 - protein, 11 aa, Artificial Sequence
  Description of Artificial Sequence: Synthetic peptide
  Seed: LIFSARSALIL
LCFSARSALIL

SEQ ID NO: 46491 - protein, 11 aa, Artificial Sequence
  Description of Artificial Sequence: Synthetic peptide
  Seed: LIFSARSALIL
LCFSARSALIM

SEQ ID NO: 46492 - protein, 11 aa, Artificial Sequence
  Description of Artificial Sequence: Synthetic peptide
  Seed: LIFSARSALIL
LCFSARSALIF

SEQ ID NO: 46493 - protein, 11 aa, Artificial Sequence
  Description of Artificial Sequence: Synthetic peptide
  Seed: LIFSARSALIL
LCFSARSALIW

SEQ ID NO: 46494 - protein, 11 aa, Artificial Sequence
  Description of Artificial Sequence: Synthetic peptide
  Seed: LIFSARSALIL
LCFSARSALIY

SEQ ID NO: 46495 - protein, 11 aa, Artificial Sequence
  Description of Artificial Sequence: Synthetic peptide
  Seed: LIFSARSALIL
LQFSARSALIL

SEQ ID NO: 46496 - protein, 10 aa, Artificial Sequence
  Description of Artificial Sequence: Synthetic peptide
  Seed: LIFSARSALI
LLFSARSALS

SEQ ID NO: 46497 - protein, 10 aa, Artificial Sequence
  Description of Artificial Sequence: Synthetic peptide
  Seed: LIFSARSALI
LLFSARSALP

SEQ ID NO: 46498 - protein, 10 aa, Artificial Sequence
  Description of Artificial Sequence: Synthetic peptide
  Seed: LIFSARSALI
LLFSARSALF

SEQ ID NO: 46499 - protein, 9 aa, Artificial Sequence
  Description of Artificial Sequence: Synthetic peptide
  Seed: LIFSARSAL
LWFSARSAL

SEQ ID NO: 46500 - protein, 9 aa, Artificial Sequence
  Description of Artificial Sequence: Synthetic peptide
  Seed: LIFSARSAL
LTFSARSAL

SEQ ID NO: 46501 - protein, 9 aa, Artificial Sequence
  Description of Artificial Sequence: Synthetic peptide
  Seed: LIFSARSAL
LTFSARSAM

SEQ ID NO: 46502 - protein, 9 aa, Artificial Sequence
  Description of Artificial Sequence: Synthetic peptide
  Seed: LIFSARSAL
LTFSARSAF

SEQ ID NO: 46503 - protein, 9 aa, Artificial Sequence
  Description of Artificial Sequence: Synthetic peptide
  Seed: LIFSARSAL
LTFSARSAW

SEQ ID NO: 46504 - protein, 9 aa, Artificial Sequence
  Description of Artificial Sequence: Synthetic peptide
  Seed: LIFSARSAL
LTFSARSAY

SEQ ID NO: 46505 - protein, 9 aa, Artificial Sequence
  Description of Artificial Sequence: Synthetic peptide
  Seed: LIFSARSAL
LTFSARSAV

SEQ ID NO: 46506 - protein, 9 aa, Artificial Sequence
  Description of Artificial Sequence: Synthetic peptide
  Seed: LIFSARSAL
LWFSARSAA

SEQ ID NO: 46507 - protein, 9 aa, Artificial Sequence
  Description of Artificial Sequence: Synthetic peptide
  Seed: LIFSARSAL
LWFSARSAH

SEQ ID NO: 46508 - protein, 9 aa, Artificial Sequence
  Description of Artificial Sequence: Synthetic peptide
  Seed: LIFSARSAL
LWFSARSAI

SEQ ID NO: 46509 - protein, 9 aa, Artificial Sequence
  Description of Artificial Sequence: Synthetic peptide
  Seed: LIFSARSAL
LWFSARSAM

SEQ ID NO: 46510 - protein, 10 aa, Artificial Sequence
  Description of Artificial Sequence: Synthetic peptide
  Seed: LIFSARSALI
LLFSARSALM

SEQ ID NO: 46511 - protein, 9 aa, Artificial Sequence
  Description of Artificial Sequence: Synthetic peptide
  Seed: LIFSARSAL
LWFSARSAF

SEQ ID NO: 46512 - protein, 9 aa, Artificial Sequence
  Description of Artificial Sequence: Synthetic peptide
  Seed: LIFSARSAL
LWFSARSAW

SEQ ID NO: 46513 - protein, 9 aa, Artificial Sequence
  Description of Artificial Sequence: Synthetic peptide
  Seed: LIFSARSAL
LWFSARSAY

SEQ ID NO: 46514 - protein, 9 aa, Artificial Sequence
  Description of Artificial Sequence: Synthetic peptide
  Seed: LIFSARSAL
LWFSARSAV

SEQ ID NO: 46515 - protein, 9 aa, Artificial Sequence
  Description of Artificial Sequence: Synthetic peptide
  Seed: LIFSARSAL
LYFSARSAA

SEQ ID NO: 46516 - protein, 9 aa, Artificial Sequence
  Description of Artificial Sequence: Synthetic peptide
  Seed: LIFSARSAL
LYFSARSAR

SEQ ID NO: 46517 - protein, 9 aa, Artificial Sequence
  Description of Artificial Sequence: Synthetic peptide
  Seed: LIFSARSAL
LYFSARSAC

SEQ ID NO: 46518 - protein, 9 aa, Artificial Sequence
  Description of Artificial Sequence: Synthetic peptide
  Seed: LIFSARSAL
LYFSARSAQ

SEQ ID NO: 46519 - protein, 9 aa, Artificial Sequence
  Description of Artificial Sequence: Synthetic peptide
  Seed: LIFSARSAL
LYFSARSAE

SEQ ID NO: 46520 - protein, 9 aa, Artificial Sequence
  Description of Artificial Sequence: Synthetic peptide
  Seed: LIFSARSAL
LTFSARSAI

SEQ ID NO: 46521 - protein, 9 aa, Artificial Sequence
  Description of Artificial Sequence: Synthetic peptide
  Seed: LIFSARSAL
LTFSARSAH

SEQ ID NO: 46522 - protein, 9 aa, Artificial Sequence
  Description of Artificial Sequence: Synthetic peptide
  Seed: LIFSARSAL
LTFSARSAA

SEQ ID NO: 46523 - protein, 9 aa, Artificial Sequence
  Description of Artificial Sequence: Synthetic peptide
  Seed: LIFSARSAL
LSFSARSAV

SEQ ID NO: 46524 - protein, 9 aa, Artificial Sequence
  Description of Artificial Sequence: Synthetic peptide
  Seed: LIFSARSAL
LPFSARSAI

SEQ ID NO: 46525 - protein, 9 aa, Artificial Sequence
  Description of Artificial Sequence: Synthetic peptide
  Seed: LIFSARSAL
LPFSARSAL

SEQ ID NO: 46526 - protein, 9 aa, Artificial Sequence
  Description of Artificial Sequence: Synthetic peptide
  Seed: LIFSARSAL
LPFSARSAK

SEQ ID NO: 46527 - protein, 9 aa, Artificial Sequence
  Description of Artificial Sequence: Synthetic peptide
  Seed: LIFSARSAL
LPFSARSAM

SEQ ID NO: 46528 - protein, 9 aa, Artificial Sequence
  Description of Artificial Sequence: Synthetic peptide
  Seed: LIFSARSAL
LPFSARSAF

SEQ ID NO: 46529 - protein, 9 aa, Artificial Sequence
  Description of Artificial Sequence: Synthetic peptide
  Seed: LIFSARSAL
LPFSARSAP

SEQ ID NO: 46530 - protein, 9 aa, Artificial Sequence
  Description of Artificial Sequence: Synthetic peptide
  Seed: LIFSARSAL
LPFSARSAS

SEQ ID NO: 46531 - protein, 9 aa, Artificial Sequence
  Description of Artificial Sequence: Synthetic peptide
  Seed: LIFSARSAL
LPFSARSAT

SEQ ID NO: 46532 - protein, 9 aa, Artificial Sequence
  Description of Artificial Sequence: Synthetic peptide
  Seed: LIFSARSAL
LPFSARSAW

SEQ ID NO: 46533 - protein, 9 aa, Artificial Sequence
  Description of Artificial Sequence: Synthetic peptide
  Seed: LIFSARSAL
LPFSARSAY

SEQ ID NO: 46534 - protein, 9 aa, Artificial Sequence
  Description of Artificial Sequence: Synthetic peptide
  Seed: LIFSARSAL
LPFSARSAV

SEQ ID NO: 46535 - protein, 9 aa, Artificial Sequence
  Description of Artificial Sequence: Synthetic peptide
  Seed: LIFSARSAL
LSFSARSAA

SEQ ID NO: 46536 - protein, 9 aa, Artificial Sequence
  Description of Artificial Sequence: Synthetic peptide
  Seed: LIFSARSAL
LSFSARSAH

SEQ ID NO: 46537 - protein, 9 aa, Artificial Sequence
  Description of Artificial Sequence: Synthetic peptide
  Seed: LIFSARSAL
LSFSARSAI

SEQ ID NO: 46538 - protein, 9 aa, Artificial Sequence
  Description of Artificial Sequence: Synthetic peptide
  Seed: LIFSARSAL
LSFSARSAL

SEQ ID NO: 46539 - protein, 9 aa, Artificial Sequence
  Description of Artificial Sequence: Synthetic peptide
  Seed: LIFSARSAL
LSFSARSAM

SEQ ID NO: 46540 - protein, 9 aa, Artificial Sequence
  Description of Artificial Sequence: Synthetic peptide
  Seed: LIFSARSAL
LSFSARSAF

SEQ ID NO: 46541 - protein, 9 aa, Artificial Sequence
  Description of Artificial Sequence: Synthetic peptide
  Seed: LIFSARSAL
LSFSARSAW

SEQ ID NO: 46542 - protein, 9 aa, Artificial Sequence
  Description of Artificial Sequence: Synthetic peptide
  Seed: LIFSARSAL
LSFSARSAY

SEQ ID NO: 46543 - protein, 9 aa, Artificial Sequence
  Description of Artificial Sequence: Synthetic peptide
  Seed: LIFSARSAL
LYFSARSAG

SEQ ID NO: 46544 - protein, 9 aa, Artificial Sequence
  Description of Artificial Sequence: Synthetic peptide
  Seed: LIFSARSAL
LYFSARSAH

SEQ ID NO: 46545 - protein, 9 aa, Artificial Sequence
  Description of Artificial Sequence: Synthetic peptide
  Seed: LIFSARSAL
LYFSARSAI

SEQ ID NO: 46546 - protein, 10 aa, Artificial Sequence
  Description of Artificial Sequence: Synthetic peptide
  Seed: LIFSARSALI
LQFSARSALA

SEQ ID NO: 46547 - protein, 10 aa, Artificial Sequence
  Description of Artificial Sequence: Synthetic peptide
  Seed: LIFSARSALI
LQFSARSALL

SEQ ID NO: 46548 - protein, 10 aa, Artificial Sequence
  Description of Artificial Sequence: Synthetic peptide
  Seed: LIFSARSALI
LQFSARSALM

SEQ ID NO: 46549 - protein, 10 aa, Artificial Sequence
  Description of Artificial Sequence: Synthetic peptide
  Seed: LIFSARSALI
LQFSARSALV

SEQ ID NO: 46550 - protein, 10 aa, Artificial Sequence
  Description of Artificial Sequence: Synthetic peptide
  Seed: LIFSARSALI
LIFSARSALA

SEQ ID NO: 46551 - protein, 10 aa, Artificial Sequence
  Description of Artificial Sequence: Synthetic peptide
  Seed: LIFSARSALI
LIFSARSALL

SEQ ID NO: 46552 - protein, 10 aa, Artificial Sequence
  Description of Artificial Sequence: Synthetic peptide
  Seed: LIFSARSALI
LIFSARSALM

SEQ ID NO: 46553 - protein, 10 aa, Artificial Sequence
  Description of Artificial Sequence: Synthetic peptide
  Seed: LIFSARSALI
LIFSARSALV

SEQ ID NO: 46554 - protein, 10 aa, Artificial Sequence
  Description of Artificial Sequence: Synthetic peptide
  Seed: LIFSARSALI
LLFSARSALA

SEQ ID NO: 46555 - protein, 10 aa, Artificial Sequence
  Description of Artificial Sequence: Synthetic peptide
  Seed: LIFSARSALI
LLFSARSALR

SEQ ID NO: 46556 - protein, 10 aa, Artificial Sequence
  Description of Artificial Sequence: Synthetic peptide
  Seed: LIFSARSALI
LLFSARSALN

SEQ ID NO: 46557 - protein, 10 aa, Artificial Sequence
  Description of Artificial Sequence: Synthetic peptide
  Seed: LIFSARSALI
LLFSARSALD

SEQ ID NO: 46558 - protein, 10 aa, Artificial Sequence
  Description of Artificial Sequence: Synthetic peptide
  Seed: LIFSARSALI
LLFSARSALC

SEQ ID NO: 46559 - protein, 10 aa, Artificial Sequence
  Description of Artificial Sequence: Synthetic peptide
  Seed: LIFSARSALI
LLFSARSALQ

SEQ ID NO: 46560 - protein, 10 aa, Artificial Sequence
  Description of Artificial Sequence: Synthetic peptide
  Seed: LIFSARSALI
LLFSARSALE

SEQ ID NO: 46561 - protein, 10 aa, Artificial Sequence
  Description of Artificial Sequence: Synthetic peptide
  Seed: LIFSARSALI
LLFSARSALG

SEQ ID NO: 46562 - protein, 10 aa, Artificial Sequence
  Description of Artificial Sequence: Synthetic peptide
  Seed: LIFSARSALI
LLFSARSALH

SEQ ID NO: 46563 - protein, 10 aa, Artificial Sequence
  Description of Artificial Sequence: Synthetic peptide
  Seed: LIFSARSALI
LLFSARSALI

SEQ ID NO: 46564 - protein, 10 aa, Artificial Sequence
  Description of Artificial Sequence: Synthetic peptide
  Seed: LIFSARSALI
LLFSARSALL

SEQ ID NO: 46565 - protein, 10 aa, Artificial Sequence
  Description of Artificial Sequence: Synthetic peptide
  Seed: LIFSARSALI
LLFSARSALK

SEQ ID NO: 46566 - protein, 10 aa, Artificial Sequence
  Description of Artificial Sequence: Synthetic peptide
  Seed: LIFSARSALI
LQFSARSALI

SEQ ID NO: 46567 - protein, 10 aa, Artificial Sequence
  Description of Artificial Sequence: Synthetic peptide
  Seed: LIFSARSALI
LAFSARSALV

SEQ ID NO: 46568 - protein, 9 aa, Artificial Sequence
  Description of Artificial Sequence: Synthetic peptide
  Seed: LIFSARSAL
LYFSARSAL

SEQ ID NO: 46569 - protein, 10 aa, Artificial Sequence
  Description of Artificial Sequence: Synthetic peptide
  Seed: LIFSARSALI
LAFSARSALL

SEQ ID NO: 46570 - protein, 9 aa, Artificial Sequence
  Description of Artificial Sequence: Synthetic peptide
  Seed: LIFSARSAL
LYFSARSAK

SEQ ID NO: 46571 - protein, 9 aa, Artificial Sequence
  Description of Artificial Sequence: Synthetic peptide
  Seed: LIFSARSAL
LYFSARSAM

SEQ ID NO: 46572 - protein, 9 aa, Artificial Sequence
  Description of Artificial Sequence: Synthetic peptide
  Seed: LIFSARSAL
LYFSARSAF

SEQ ID NO: 46573 - protein, 9 aa, Artificial Sequence
  Description of Artificial Sequence: Synthetic peptide
  Seed: LIFSARSAL
LYFSARSAS

SEQ ID NO: 46574 - protein, 9 aa, Artificial Sequence
  Description of Artificial Sequence: Synthetic peptide
  Seed: LIFSARSAL
LYFSARSAT

SEQ ID NO: 46575 - protein, 9 aa, Artificial Sequence
  Description of Artificial Sequence: Synthetic peptide
  Seed: LIFSARSAL
LYFSARSAW

SEQ ID NO: 46576 - protein, 9 aa, Artificial Sequence
  Description of Artificial Sequence: Synthetic peptide
  Seed: LIFSARSAL
LYFSARSAY

SEQ ID NO: 46577 - protein, 9 aa, Artificial Sequence
  Description of Artificial Sequence: Synthetic peptide
  Seed: LIFSARSAL
LYFSARSAV

SEQ ID NO: 46578 - protein, 9 aa, Artificial Sequence
  Description of Artificial Sequence: Synthetic peptide
  Seed: LIFSARSAL
LVFSARSAA

SEQ ID NO: 46579 - protein, 9 aa, Artificial Sequence
  Description of Artificial Sequence: Synthetic peptide
  Seed: LIFSARSAL
LVFSARSAH

SEQ ID NO: 46580 - protein, 9 aa, Artificial Sequence
  Description of Artificial Sequence: Synthetic peptide
  Seed: LIFSARSAL
LVFSARSAI

SEQ ID NO: 46581 - protein, 9 aa, Artificial Sequence
  Description of Artificial Sequence: Synthetic peptide
  Seed: LIFSARSAL
LVFSARSAL

SEQ ID NO: 46582 - protein, 9 aa, Artificial Sequence
  Description of Artificial Sequence: Synthetic peptide
  Seed: LIFSARSAL
LVFSARSAM

SEQ ID NO: 46583 - protein, 9 aa, Artificial Sequence
  Description of Artificial Sequence: Synthetic peptide
  Seed: LIFSARSAL
LVFSARSAF

SEQ ID NO: 46584 - protein, 9 aa, Artificial Sequence
  Description of Artificial Sequence: Synthetic peptide
  Seed: LIFSARSAL
LVFSARSAW

SEQ ID NO: 46585 - protein, 9 aa, Artificial Sequence
  Description of Artificial Sequence: Synthetic peptide
  Seed: LIFSARSAL
LVFSARSAY

SEQ ID NO: 46586 - protein, 9 aa, Artificial Sequence
  Description of Artificial Sequence: Synthetic peptide
  Seed: LIFSARSAL
LVFSARSAV

SEQ ID NO: 46587 - protein, 10 aa, Artificial Sequence
  Description of Artificial Sequence: Synthetic peptide
  Seed: LIFSARSALI
LAFSARSALA

SEQ ID NO: 46588 - protein, 10 aa, Artificial Sequence
  Description of Artificial Sequence: Synthetic peptide
  Seed: LIFSARSALI
LAFSARSALI

SEQ ID NO: 46589 - protein, 9 aa, Artificial Sequence
  Description of Artificial Sequence: Synthetic peptide
  Seed: LARSALILR
LARSALILM

SEQ ID NO: 46590 - protein, 9 aa, Artificial Sequence
  Description of Artificial Sequence: Synthetic peptide
  Seed: LARSALILR
LARSALILL

SEQ ID NO: 46591 - protein, 9 aa, Artificial Sequence
  Description of Artificial Sequence: Synthetic peptide
  Seed: KTGGPIYRR
KGGGPIYRR

SEQ ID NO: 46592 - protein, 10 aa, Artificial Sequence
  Description of Artificial Sequence: Synthetic peptide
  Seed: KTRIAYERMC
KVRIAYERMN

SEQ ID NO: 46593 - protein, 10 aa, Artificial Sequence
  Description of Artificial Sequence: Synthetic peptide
  Seed: KTRIAYERMC
KYRIAYERMK

SEQ ID NO: 46594 - protein, 10 aa, Artificial Sequence
  Description of Artificial Sequence: Synthetic peptide
  Seed: KTRIAYERMC
KYRIAYERMM

SEQ ID NO: 46595 - protein, 10 aa, Artificial Sequence
  Description of Artificial Sequence: Synthetic peptide
  Seed: KTRIAYERMC
KYRIAYERMP

SEQ ID NO: 46596 - protein, 10 aa, Artificial Sequence
  Description of Artificial Sequence: Synthetic peptide
  Seed: KTRIAYERMC
KYRIAYERMS

SEQ ID NO: 46597 - protein, 10 aa, Artificial Sequence
  Description of Artificial Sequence: Synthetic peptide
  Seed: KTRIAYERMC
KYRIAYERMT

SEQ ID NO: 46598 - protein, 10 aa, Artificial Sequence
  Description of Artificial Sequence: Synthetic peptide
  Seed: KTRIAYERMC
KYRIAYERMY

SEQ ID NO: 46599 - protein, 10 aa, Artificial Sequence
  Description of Artificial Sequence: Synthetic peptide
  Seed: KTRIAYERMC
KYRIAYERMV

SEQ ID NO: 46600 - protein, 10 aa, Artificial Sequence
  Description of Artificial Sequence: Synthetic peptide
  Seed: KTRIAYERMC
KVRIAYERMA

SEQ ID NO: 46601 - protein, 10 aa, Artificial Sequence
  Description of Artificial Sequence: Synthetic peptide
  Seed: KTRIAYERMC
KVRIAYERMR

SEQ ID NO: 46602 - protein, 10 aa, Artificial Sequence
  Description of Artificial Sequence: Synthetic peptide
  Seed: KTRIAYERMC
KVRIAYERMC

SEQ ID NO: 46603 - protein, 10 aa, Artificial Sequence
  Description of Artificial Sequence: Synthetic peptide
  Seed: KTRIAYERMC
KVRIAYERMT

SEQ ID NO: 46604 - protein, 10 aa, Artificial Sequence
  Description of Artificial Sequence: Synthetic peptide
  Seed: KTRIAYERMC
KVRIAYERMQ

SEQ ID NO: 46605 - protein, 10 aa, Artificial Sequence
  Description of Artificial Sequence: Synthetic peptide
  Seed: KTRIAYERMC
KVRIAYERME

SEQ ID NO: 46606 - protein, 10 aa, Artificial Sequence
  Description of Artificial Sequence: Synthetic peptide
  Seed: KTRIAYERMC
KVRIAYERMG

SEQ ID NO: 46607 - protein, 10 aa, Artificial Sequence
  Description of Artificial Sequence: Synthetic peptide
  Seed: KTRIAYERMC
KVRIAYERMI

SEQ ID NO: 46608 - protein, 10 aa, Artificial Sequence
  Description of Artificial Sequence: Synthetic peptide
  Seed: KTRIAYERMC
KVRIAYERML

SEQ ID NO: 46609 - protein, 10 aa, Artificial Sequence
  Description of Artificial Sequence: Synthetic peptide
  Seed: KTRIAYERMC
KVRIAYERMK

SEQ ID NO: 46610 - protein, 10 aa, Artificial Sequence
  Description of Artificial Sequence: Synthetic peptide
  Seed: KTRIAYERMC
KVRIAYERMM

SEQ ID NO: 46611 - protein, 10 aa, Artificial Sequence
  Description of Artificial Sequence: Synthetic peptide
  Seed: KTRIAYERMC
KVRIAYERMF

SEQ ID NO: 46612 - protein, 10 aa, Artificial Sequence
  Description of Artificial Sequence: Synthetic peptide
  Seed: KTRIAYERMC
KVRIAYERMP

SEQ ID NO: 46613 - protein, 10 aa, Artificial Sequence
  Description of Artificial Sequence: Synthetic peptide
  Seed: KTRIAYERMC
KYRIAYERML

SEQ ID NO: 46614 - protein, 10 aa, Artificial Sequence
  Description of Artificial Sequence: Synthetic peptide
  Seed: KTRIAYERMC
KYRIAYERMI

SEQ ID NO: 46615 - protein, 10 aa, Artificial Sequence
  Description of Artificial Sequence: Synthetic peptide
  Seed: KTRIAYERMC
KYRIAYERMG

SEQ ID NO: 46616 - protein, 10 aa, Artificial Sequence
  Description of Artificial Sequence: Synthetic peptide
  Seed: KTRIAYERMC
KYRIAYERMR

SEQ ID NO: 46617 - protein, 10 aa, Artificial Sequence
  Description of Artificial Sequence: Synthetic peptide
  Seed: KTRIAYERMC
KTRIAYERMG

SEQ ID NO: 46618 - protein, 10 aa, Artificial Sequence
  Description of Artificial Sequence: Synthetic peptide
  Seed: KTRIAYERMC
KTRIAYERMH

SEQ ID NO: 46619 - protein, 10 aa, Artificial Sequence
  Description of Artificial Sequence: Synthetic peptide
  Seed: KTRIAYERMC
KTRIAYERMI

SEQ ID NO: 46620 - protein, 10 aa, Artificial Sequence
  Description of Artificial Sequence: Synthetic peptide
  Seed: KTRIAYERMC
KTRIAYERML

SEQ ID NO: 46621 - protein, 10 aa, Artificial Sequence
  Description of Artificial Sequence: Synthetic peptide
  Seed: KTRIAYERMC
KTRIAYERMK

SEQ ID NO: 46622 - protein, 10 aa, Artificial Sequence
  Description of Artificial Sequence: Synthetic peptide
  Seed: KTRIAYERMC
KTRIAYERMM

SEQ ID NO: 46623 - protein, 10 aa, Artificial Sequence
  Description of Artificial Sequence: Synthetic peptide
  Seed: KTRIAYERMC
KTRIAYERMF

SEQ ID NO: 46624 - protein, 10 aa, Artificial Sequence
  Description of Artificial Sequence: Synthetic peptide
  Seed: KTRIAYERMC
KTRIAYERMP

SEQ ID NO: 46625 - protein, 10 aa, Artificial Sequence
  Description of Artificial Sequence: Synthetic peptide
  Seed: KTRIAYERMC
KTRIAYERMS

SEQ ID NO: 46626 - protein, 10 aa, Artificial Sequence
  Description of Artificial Sequence: Synthetic peptide
  Seed: KTRIAYERMC
KTRIAYERMT

SEQ ID NO: 46627 - protein, 10 aa, Artificial Sequence
  Description of Artificial Sequence: Synthetic peptide
  Seed: KTRIAYERMC
KTRIAYERMY

SEQ ID NO: 46628 - protein, 10 aa, Artificial Sequence
  Description of Artificial Sequence: Synthetic peptide
  Seed: KTRIAYERMC
KTRIAYERMV

SEQ ID NO: 46629 - protein, 10 aa, Artificial Sequence
  Description of Artificial Sequence: Synthetic peptide
  Seed: KTRIAYERMC
KWRIAYERMA

SEQ ID NO: 46630 - protein, 10 aa, Artificial Sequence
  Description of Artificial Sequence: Synthetic peptide
  Seed: KTRIAYERMC
KWRIAYERMI

SEQ ID NO: 46631 - protein, 10 aa, Artificial Sequence
  Description of Artificial Sequence: Synthetic peptide
  Seed: KTRIAYERMC
KWRIAYERML

SEQ ID NO: 46632 - protein, 10 aa, Artificial Sequence
  Description of Artificial Sequence: Synthetic peptide
  Seed: KTRIAYERMC
KWRIAYERMK

SEQ ID NO: 46633 - protein, 10 aa, Artificial Sequence
  Description of Artificial Sequence: Synthetic peptide
  Seed: KTRIAYERMC
KWRIAYERMM

SEQ ID NO: 46634 - protein, 10 aa, Artificial Sequence
  Description of Artificial Sequence: Synthetic peptide
  Seed: KTRIAYERMC
KWRIAYERMV

SEQ ID NO: 46635 - protein, 10 aa, Artificial Sequence
  Description of Artificial Sequence: Synthetic peptide
  Seed: KTRIAYERMC
KYRIAYERMA

SEQ ID NO: 46636 - protein, 10 aa, Artificial Sequence
  Description of Artificial Sequence: Synthetic peptide
  Seed: KTRIAYERMC
KVRIAYERMS

SEQ ID NO: 46637 - protein, 10 aa, Artificial Sequence
  Description of Artificial Sequence: Synthetic peptide
  Seed: KTRIAYERMC
KVRIAYERMY

SEQ ID NO: 46638 - protein, 10 aa, Artificial Sequence
  Description of Artificial Sequence: Synthetic peptide
  Seed: KTRIAYERMC
KTRIAYERMQ

SEQ ID NO: 46639 - protein, 8 aa, Artificial Sequence
  Description of Artificial Sequence: Synthetic peptide
  Seed: KTRSAYER
KSRSAYEA

SEQ ID NO: 46640 - protein, 8 aa, Artificial Sequence
  Description of Artificial Sequence: Synthetic peptide
  Seed: KTRSAYER
KMRSAYEK

SEQ ID NO: 46641 - protein, 8 aa, Artificial Sequence
  Description of Artificial Sequence: Synthetic peptide
  Seed: KTRSAYER
KMRSAYEM

SEQ ID NO: 46642 - protein, 8 aa, Artificial Sequence
  Description of Artificial Sequence: Synthetic peptide
  Seed: KTRSAYER
KMRSAYEF

SEQ ID NO: 46643 - protein, 8 aa, Artificial Sequence
  Description of Artificial Sequence: Synthetic peptide
  Seed: KTRSAYER
KMRSAYEY

SEQ ID NO: 46644 - protein, 8 aa, Artificial Sequence
  Description of Artificial Sequence: Synthetic peptide
  Seed: KTRSAYER
KMRSAYEV

SEQ ID NO: 46645 - protein, 8 aa, Artificial Sequence
  Description of Artificial Sequence: Synthetic peptide
  Seed: KTRSAYER
KFRSAYEA

SEQ ID NO: 46646 - protein, 8 aa, Artificial Sequence
  Description of Artificial Sequence: Synthetic peptide
  Seed: KTRSAYER
KFRSAYER

SEQ ID NO: 46647 - protein, 8 aa, Artificial Sequence
  Description of Artificial Sequence: Synthetic peptide
  Seed: KTRSAYER
KFRSAYEK

SEQ ID NO: 46648 - protein, 8 aa, Artificial Sequence
  Description of Artificial Sequence: Synthetic peptide
  Seed: KTRSAYER
KFRSAYEV

SEQ ID NO: 46649 - protein, 8 aa, Artificial Sequence
  Description of Artificial Sequence: Synthetic peptide
  Seed: KTRSAYER
KSRSAYER

SEQ ID NO: 46650 - protein, 10 aa, Artificial Sequence
  Description of Artificial Sequence: Synthetic peptide
  Seed: KTRIAYERMC
KVRIAYERMV

SEQ ID NO: 46651 - protein, 8 aa, Artificial Sequence
  Description of Artificial Sequence: Synthetic peptide
  Seed: KTRSAYER
KSRSAYEI

SEQ ID NO: 46652 - protein, 8 aa, Artificial Sequence
  Description of Artificial Sequence: Synthetic peptide
  Seed: KTRSAYER
KSRSAYEL

SEQ ID NO: 46653 - protein, 8 aa, Artificial Sequence
  Description of Artificial Sequence: Synthetic peptide
  Seed: KTRSAYER
KSRSAYEK

SEQ ID NO: 46654 - protein, 8 aa, Artificial Sequence
  Description of Artificial Sequence: Synthetic peptide
  Seed: KTRSAYER
KSRSAYEM

SEQ ID NO: 46655 - protein, 8 aa, Artificial Sequence
  Description of Artificial Sequence: Synthetic peptide
  Seed: KTRSAYER
KSRSAYEF

SEQ ID NO: 46656 - protein, 8 aa, Artificial Sequence
  Description of Artificial Sequence: Synthetic peptide
  Seed: KTRSAYER
KSRSAYEP

SEQ ID NO: 46657 - protein, 8 aa, Artificial Sequence
  Description of Artificial Sequence: Synthetic peptide
  Seed: KTRSAYER
KSRSAYES

SEQ ID NO: 46658 - protein, 8 aa, Artificial Sequence
  Description of Artificial Sequence: Synthetic peptide
  Seed: KTRSAYER
KSRSAYEY

SEQ ID NO: 46659 - protein, 8 aa, Artificial Sequence
  Description of Artificial Sequence: Synthetic peptide
  Seed: KTRSAYER
KSRSAYEV

SEQ ID NO: 46660 - protein, 8 aa, Artificial Sequence
  Description of Artificial Sequence: Synthetic peptide
  Seed: KTRSAYER
KMRSAYEL

SEQ ID NO: 46661 - protein, 8 aa, Artificial Sequence
  Description of Artificial Sequence: Synthetic peptide
  Seed: KTRSAYER
KMRSAYEI

SEQ ID NO: 46662 - protein, 8 aa, Artificial Sequence
  Description of Artificial Sequence: Synthetic peptide
  Seed: KTRSAYER
KMRSAYER

SEQ ID NO: 46663 - protein, 8 aa, Artificial Sequence
  Description of Artificial Sequence: Synthetic peptide
  Seed: KTRSAYER
KMRSAYEA

SEQ ID NO: 46664 - protein, 8 aa, Artificial Sequence
  Description of Artificial Sequence: Synthetic peptide
  Seed: KTRSAYER
KARSAYEA

SEQ ID NO: 46665 - protein, 8 aa, Artificial Sequence
  Description of Artificial Sequence: Synthetic peptide
  Seed: KTRSAYER
KARSAYER

SEQ ID NO: 46666 - protein, 8 aa, Artificial Sequence
  Description of Artificial Sequence: Synthetic peptide
  Seed: KTRSAYER
KARSAYEK

SEQ ID NO: 46667 - protein, 8 aa, Artificial Sequence
  Description of Artificial Sequence: Synthetic peptide
  Seed: KTRSAYER
KARSAYEV

SEQ ID NO: 46668 - protein, 8 aa, Artificial Sequence
  Description of Artificial Sequence: Synthetic peptide
  Seed: KTRSAYER
KQRSAYER

SEQ ID NO: 46669 - protein, 8 aa, Artificial Sequence
  Description of Artificial Sequence: Synthetic peptide
  Seed: KTRSAYER
KQRSAYEK

SEQ ID NO: 46670 - protein, 8 aa, Artificial Sequence
  Description of Artificial Sequence: Synthetic peptide
  Seed: KTRSAYER
KGRSAYEK

SEQ ID NO: 46671 - protein, 8 aa, Artificial Sequence
  Description of Artificial Sequence: Synthetic peptide
  Seed: KTRSAYER
KIRSAYEA

SEQ ID NO: 46672 - protein, 8 aa, Artificial Sequence
  Description of Artificial Sequence: Synthetic peptide
  Seed: KTRSAYER
KIRSAYER

SEQ ID NO: 46673 - protein, 8 aa, Artificial Sequence
  Description of Artificial Sequence: Synthetic peptide
  Seed: KTRSAYER
KIRSAYEI

SEQ ID NO: 46674 - protein, 8 aa, Artificial Sequence
  Description of Artificial Sequence: Synthetic peptide
  Seed: KTRSAYER
KIRSAYEL

SEQ ID NO: 46675 - protein, 8 aa, Artificial Sequence
  Description of Artificial Sequence: Synthetic peptide
  Seed: KTRSAYER
KIRSAYEK

SEQ ID NO: 46676 - protein, 8 aa, Artificial Sequence
  Description of Artificial Sequence: Synthetic peptide
  Seed: KTRSAYER
KIRSAYEM

SEQ ID NO: 46677 - protein, 8 aa, Artificial Sequence
  Description of Artificial Sequence: Synthetic peptide
  Seed: KTRSAYER
KIRSAYEF

SEQ ID NO: 46678 - protein, 8 aa, Artificial Sequence
  Description of Artificial Sequence: Synthetic peptide
  Seed: KTRSAYER
KIRSAYEY

SEQ ID NO: 46679 - protein, 8 aa, Artificial Sequence
  Description of Artificial Sequence: Synthetic peptide
  Seed: KTRSAYER
KIRSAYEV

SEQ ID NO: 46680 - protein, 8 aa, Artificial Sequence
  Description of Artificial Sequence: Synthetic peptide
  Seed: KTRSAYER
KLRSAYEA

SEQ ID NO: 46681 - protein, 8 aa, Artificial Sequence
  Description of Artificial Sequence: Synthetic peptide
  Seed: KTRSAYER
KLRSAYER

SEQ ID NO: 46682 - protein, 8 aa, Artificial Sequence
  Description of Artificial Sequence: Synthetic peptide
  Seed: KTRSAYER
KLRSAYEK

SEQ ID NO: 46683 - protein, 10 aa, Artificial Sequence
  Description of Artificial Sequence: Synthetic peptide
  Seed: KTRIAYERMC
KTRIAYERME

SEQ ID NO: 46684 - protein, 10 aa, Artificial Sequence
  Description of Artificial Sequence: Synthetic peptide
  Seed: KTRIAYERMC
KTRIAYERMN

SEQ ID NO: 46685 - protein, 9 aa, Artificial Sequence
  Description of Artificial Sequence: Synthetic peptide
  Seed: LARSALILR
LARSALILI

SEQ ID NO: 46686 - protein, 10 aa, Artificial Sequence
  Description of Artificial Sequence: Synthetic peptide
  Seed: KTRIAYERMC
KIRIAYERMF

SEQ ID NO: 46687 - protein, 10 aa, Artificial Sequence
  Description of Artificial Sequence: Synthetic peptide
  Seed: KTRIAYERMC
KGRIAYERMV

SEQ ID NO: 46688 - protein, 10 aa, Artificial Sequence
  Description of Artificial Sequence: Synthetic peptide
  Seed: KTRIAYERMC
KHRIAYERMK

SEQ ID NO: 46689 - protein, 10 aa, Artificial Sequence
  Description of Artificial Sequence: Synthetic peptide
  Seed: KTRIAYERMC
KIRIAYERMA

SEQ ID NO: 46690 - protein, 10 aa, Artificial Sequence
  Description of Artificial Sequence: Synthetic peptide
  Seed: KTRIAYERMC
KIRIAYERMR

SEQ ID NO: 46691 - protein, 10 aa, Artificial Sequence
  Description of Artificial Sequence: Synthetic peptide
  Seed: KTRIAYERMC
KIRIAYERMG

SEQ ID NO: 46692 - protein, 10 aa, Artificial Sequence
  Description of Artificial Sequence: Synthetic peptide
  Seed: KTRIAYERMC
KIRIAYERMI

SEQ ID NO: 46693 - protein, 10 aa, Artificial Sequence
  Description of Artificial Sequence: Synthetic peptide
  Seed: KTRIAYERMC
KIRIAYERML

SEQ ID NO: 46694 - protein, 10 aa, Artificial Sequence
  Description of Artificial Sequence: Synthetic peptide
  Seed: KTRIAYERMC
KIRIAYERMK

SEQ ID NO: 46695 - protein, 10 aa, Artificial Sequence
  Description of Artificial Sequence: Synthetic peptide
  Seed: KTRIAYERMC
KIRIAYERMM

SEQ ID NO: 46696 - protein, 10 aa, Artificial Sequence
  Description of Artificial Sequence: Synthetic peptide
  Seed: KTRIAYERMC
KIRIAYERMP

SEQ ID NO: 46697 - protein, 10 aa, Artificial Sequence
  Description of Artificial Sequence: Synthetic peptide
  Seed: KTRIAYERMC
KLRIAYERMS

SEQ ID NO: 46698 - protein, 10 aa, Artificial Sequence
  Description of Artificial Sequence: Synthetic peptide
  Seed: KTRIAYERMC
KIRIAYERMS

SEQ ID NO: 46699 - protein, 10 aa, Artificial Sequence
  Description of Artificial Sequence: Synthetic peptide
  Seed: KTRIAYERMC
KIRIAYERMT

SEQ ID NO: 46700 - protein, 10 aa, Artificial Sequence
  Description of Artificial Sequence: Synthetic peptide
  Seed: KTRIAYERMC
KIRIAYERMY

SEQ ID NO: 46701 - protein, 10 aa, Artificial Sequence
  Description of Artificial Sequence: Synthetic peptide
  Seed: KTRIAYERMC
KIRIAYERMV

SEQ ID NO: 46702 - protein, 10 aa, Artificial Sequence
  Description of Artificial Sequence: Synthetic peptide
  Seed: KTRIAYERMC
KLRIAYERMA

SEQ ID NO: 46703 - protein, 10 aa, Artificial Sequence
  Description of Artificial Sequence: Synthetic peptide
  Seed: KTRIAYERMC
KLRIAYERMG

SEQ ID NO: 46704 - protein, 10 aa, Artificial Sequence
  Description of Artificial Sequence: Synthetic peptide
  Seed: KTRIAYERMC
KLRIAYERMI

SEQ ID NO: 46705 - protein, 10 aa, Artificial Sequence
  Description of Artificial Sequence: Synthetic peptide
  Seed: KTRIAYERMC
KLRIAYERML

SEQ ID NO: 46706 - protein, 10 aa, Artificial Sequence
  Description of Artificial Sequence: Synthetic peptide
  Seed: KTRIAYERMC
KLRIAYERMK

SEQ ID NO: 46707 - protein, 10 aa, Artificial Sequence
  Description of Artificial Sequence: Synthetic peptide
  Seed: KTRIAYERMC
KGRIAYERMK

SEQ ID NO: 46708 - protein, 10 aa, Artificial Sequence
  Description of Artificial Sequence: Synthetic peptide
  Seed: KTRIAYERMC
KGRIAYERMA

SEQ ID NO: 46709 - protein, 10 aa, Artificial Sequence
  Description of Artificial Sequence: Synthetic peptide
  Seed: KTRIAYERMC
KQRIAYERMV

SEQ ID NO: 46710 - protein, 10 aa, Artificial Sequence
  Description of Artificial Sequence: Synthetic peptide
  Seed: KTRIAYERMC
KQRIAYERMY

SEQ ID NO: 46711 - protein, 10 aa, Artificial Sequence
  Description of Artificial Sequence: Synthetic peptide
  Seed: KTRIAYERMC
KARIAYERMI

SEQ ID NO: 46712 - protein, 10 aa, Artificial Sequence
  Description of Artificial Sequence: Synthetic peptide
  Seed: KTRIAYERMC
KARIAYERML

SEQ ID NO: 46713 - protein, 10 aa, Artificial Sequence
  Description of Artificial Sequence: Synthetic peptide
  Seed: KTRIAYERMC
KARIAYERMK

SEQ ID NO: 46714 - protein, 10 aa, Artificial Sequence
  Description of Artificial Sequence: Synthetic peptide
  Seed: KTRIAYERMC
KARIAYERMM

SEQ ID NO: 46715 - protein, 10 aa, Artificial Sequence
  Description of Artificial Sequence: Synthetic peptide
  Seed: KTRIAYERMC
KARIAYERMS

SEQ ID NO: 46716 - protein, 10 aa, Artificial Sequence
  Description of Artificial Sequence: Synthetic peptide
  Seed: KTRIAYERMC
KARIAYERMT

SEQ ID NO: 46717 - protein, 10 aa, Artificial Sequence
  Description of Artificial Sequence: Synthetic peptide
  Seed: KTRIAYERMC
KARIAYERMY

SEQ ID NO: 46718 - protein, 10 aa, Artificial Sequence
  Description of Artificial Sequence: Synthetic peptide
  Seed: KTRIAYERMC
KARIAYERMV

SEQ ID NO: 46719 - protein, 10 aa, Artificial Sequence
  Description of Artificial Sequence: Synthetic peptide
  Seed: KTRIAYERMC
KNRIAYERMA

SEQ ID NO: 46720 - protein, 10 aa, Artificial Sequence
  Description of Artificial Sequence: Synthetic peptide
  Seed: KTRIAYERMC
KNRIAYERMK

SEQ ID NO: 46721 - protein, 10 aa, Artificial Sequence
  Description of Artificial Sequence: Synthetic peptide
  Seed: KTRIAYERMC
KNRIAYERMV

SEQ ID NO: 46722 - protein, 10 aa, Artificial Sequence
  Description of Artificial Sequence: Synthetic peptide
  Seed: KTRIAYERMC
KCRIAYERMK

SEQ ID NO: 46723 - protein, 10 aa, Artificial Sequence
  Description of Artificial Sequence: Synthetic peptide
  Seed: KTRIAYERMC
KQRIAYERMA

SEQ ID NO: 46724 - protein, 10 aa, Artificial Sequence
  Description of Artificial Sequence: Synthetic peptide
  Seed: KTRIAYERMC
KQRIAYERMR

SEQ ID NO: 46725 - protein, 10 aa, Artificial Sequence
  Description of Artificial Sequence: Synthetic peptide
  Seed: KTRIAYERMC
KQRIAYERMI

SEQ ID NO: 46726 - protein, 10 aa, Artificial Sequence
  Description of Artificial Sequence: Synthetic peptide
  Seed: KTRIAYERMC
KQRIAYERML

SEQ ID NO: 46727 - protein, 10 aa, Artificial Sequence
  Description of Artificial Sequence: Synthetic peptide
  Seed: KTRIAYERMC
KQRIAYERMK

SEQ ID NO: 46728 - protein, 10 aa, Artificial Sequence
  Description of Artificial Sequence: Synthetic peptide
  Seed: KTRIAYERMC
KQRIAYERMM

SEQ ID NO: 46729 - protein, 10 aa, Artificial Sequence
  Description of Artificial Sequence: Synthetic peptide
  Seed: KTRIAYERMC
KQRIAYERMS

SEQ ID NO: 46730 - protein, 10 aa, Artificial Sequence
  Description of Artificial Sequence: Synthetic peptide
  Seed: KTRIAYERMC
KLRIAYERMM

SEQ ID NO: 46731 - protein, 10 aa, Artificial Sequence
  Description of Artificial Sequence: Synthetic peptide
  Seed: KTRIAYERMC
KLRIAYERMY

SEQ ID NO: 46732 - protein, 10 aa, Artificial Sequence
  Description of Artificial Sequence: Synthetic peptide
  Seed: KTRIAYERMC
KTRIAYERMR

SEQ ID NO: 46733 - protein, 10 aa, Artificial Sequence
  Description of Artificial Sequence: Synthetic peptide
  Seed: KTRIAYERMC
KSRIAYERMI

SEQ ID NO: 46734 - protein, 10 aa, Artificial Sequence
  Description of Artificial Sequence: Synthetic peptide
  Seed: KTRIAYERMC
KFRIAYERMY

SEQ ID NO: 46735 - protein, 10 aa, Artificial Sequence
  Description of Artificial Sequence: Synthetic peptide
  Seed: KTRIAYERMC
KFRIAYERMV

SEQ ID NO: 46736 - protein, 10 aa, Artificial Sequence
  Description of Artificial Sequence: Synthetic peptide
  Seed: KTRIAYERMC
KSRIAYERMA

SEQ ID NO: 46737 - protein, 10 aa, Artificial Sequence
  Description of Artificial Sequence: Synthetic peptide
  Seed: KTRIAYERMC
KSRIAYERMR

SEQ ID NO: 46738 - protein, 10 aa, Artificial Sequence
  Description of Artificial Sequence: Synthetic peptide
  Seed: KTRIAYERMC
KSRIAYERMC

SEQ ID NO: 46739 - protein, 10 aa, Artificial Sequence
  Description of Artificial Sequence: Synthetic peptide
  Seed: KTRIAYERMC
KSRIAYERMQ

SEQ ID NO: 46740 - protein, 10 aa, Artificial Sequence
  Description of Artificial Sequence: Synthetic peptide
  Seed: KTRIAYERMC
KSRIAYERME

SEQ ID NO: 46741 - protein, 10 aa, Artificial Sequence
  Description of Artificial Sequence: Synthetic peptide
  Seed: KTRIAYERMC
KSRIAYERMG

SEQ ID NO: 46742 - protein, 10 aa, Artificial Sequence
  Description of Artificial Sequence: Synthetic peptide
  Seed: KTRIAYERMC
KSRIAYERMH

SEQ ID NO: 46743 - protein, 10 aa, Artificial Sequence
  Description of Artificial Sequence: Synthetic peptide
  Seed: KTRIAYERMC
KSRIAYERML

SEQ ID NO: 46744 - protein, 10 aa, Artificial Sequence
  Description of Artificial Sequence: Synthetic peptide
  Seed: KTRIAYERMC
KLRIAYERMV

SEQ ID NO: 46745 - protein, 10 aa, Artificial Sequence
  Description of Artificial Sequence: Synthetic peptide
  Seed: KTRIAYERMC
KSRIAYERMK

SEQ ID NO: 46746 - protein, 10 aa, Artificial Sequence
  Description of Artificial Sequence: Synthetic peptide
  Seed: KTRIAYERMC
KSRIAYERMM

SEQ ID NO: 46747 - protein, 10 aa, Artificial Sequence
  Description of Artificial Sequence: Synthetic peptide
  Seed: KTRIAYERMC
KSRIAYERMF

SEQ ID NO: 46748 - protein, 10 aa, Artificial Sequence
  Description of Artificial Sequence: Synthetic peptide
  Seed: KTRIAYERMC
KSRIAYERMP

SEQ ID NO: 46749 - protein, 10 aa, Artificial Sequence
  Description of Artificial Sequence: Synthetic peptide
  Seed: KTRIAYERMC
KSRIAYERMS

SEQ ID NO: 46750 - protein, 10 aa, Artificial Sequence
  Description of Artificial Sequence: Synthetic peptide
  Seed: KTRIAYERMC
KSRIAYERMT

SEQ ID NO: 46751 - protein, 10 aa, Artificial Sequence
  Description of Artificial Sequence: Synthetic peptide
  Seed: KTRIAYERMC
KSRIAYERMY

SEQ ID NO: 46752 - protein, 10 aa, Artificial Sequence
  Description of Artificial Sequence: Synthetic peptide
  Seed: KTRIAYERMC
KSRIAYERMV

SEQ ID NO: 46753 - protein, 10 aa, Artificial Sequence
  Description of Artificial Sequence: Synthetic peptide
  Seed: KTRIAYERMC
KTRIAYERMA

SEQ ID NO: 46754 - protein, 10 aa, Artificial Sequence
  Description of Artificial Sequence: Synthetic peptide
  Seed: KTRIAYERMC
KFRIAYERMT

SEQ ID NO: 46755 - protein, 10 aa, Artificial Sequence
  Description of Artificial Sequence: Synthetic peptide
  Seed: KTRIAYERMC
KFRIAYERMS

SEQ ID NO: 46756 - protein, 10 aa, Artificial Sequence
  Description of Artificial Sequence: Synthetic peptide
  Seed: KTRIAYERMC
KFRIAYERMP

SEQ ID NO: 46757 - protein, 10 aa, Artificial Sequence
  Description of Artificial Sequence: Synthetic peptide
  Seed: KTRIAYERMC
KFRIAYERMM

SEQ ID NO: 46758 - protein, 10 aa, Artificial Sequence
  Description of Artificial Sequence: Synthetic peptide
  Seed: KTRIAYERMC
KMRIAYERMA

SEQ ID NO: 46759 - protein, 10 aa, Artificial Sequence
  Description of Artificial Sequence: Synthetic peptide
  Seed: KTRIAYERMC
KMRIAYERMR

SEQ ID NO: 46760 - protein, 10 aa, Artificial Sequence
  Description of Artificial Sequence: Synthetic peptide
  Seed: KTRIAYERMC
KMRIAYERMG

SEQ ID NO: 46761 - protein, 10 aa, Artificial Sequence
  Description of Artificial Sequence: Synthetic peptide
  Seed: KTRIAYERMC
KMRIAYERMI

SEQ ID NO: 46762 - protein, 10 aa, Artificial Sequence
  Description of Artificial Sequence: Synthetic peptide
  Seed: KTRIAYERMC
KMRIAYERML

SEQ ID NO: 46763 - protein, 10 aa, Artificial Sequence
  Description of Artificial Sequence: Synthetic peptide
  Seed: KTRIAYERMC
KMRIAYERMK

SEQ ID NO: 46764 - protein, 10 aa, Artificial Sequence
  Description of Artificial Sequence: Synthetic peptide
  Seed: KTRIAYERMC
KMRIAYERMM

SEQ ID NO: 46765 - protein, 10 aa, Artificial Sequence
  Description of Artificial Sequence: Synthetic peptide
  Seed: KTRIAYERMC
KMRIAYERMF

SEQ ID NO: 46766 - protein, 10 aa, Artificial Sequence
  Description of Artificial Sequence: Synthetic peptide
  Seed: KTRIAYERMC
KMRIAYERMP

SEQ ID NO: 46767 - protein, 10 aa, Artificial Sequence
  Description of Artificial Sequence: Synthetic peptide
  Seed: KTRIAYERMC
KMRIAYERMS

SEQ ID NO: 46768 - protein, 10 aa, Artificial Sequence
  Description of Artificial Sequence: Synthetic peptide
  Seed: KTRIAYERMC
KMRIAYERMT

SEQ ID NO: 46769 - protein, 10 aa, Artificial Sequence
  Description of Artificial Sequence: Synthetic peptide
  Seed: KTRIAYERMC
KMRIAYERMY

SEQ ID NO: 46770 - protein, 10 aa, Artificial Sequence
  Description of Artificial Sequence: Synthetic peptide
  Seed: KTRIAYERMC
KMRIAYERMV

SEQ ID NO: 46771 - protein, 10 aa, Artificial Sequence
  Description of Artificial Sequence: Synthetic peptide
  Seed: KTRIAYERMC
KFRIAYERMA

SEQ ID NO: 46772 - protein, 10 aa, Artificial Sequence
  Description of Artificial Sequence: Synthetic peptide
  Seed: KTRIAYERMC
KFRIAYERMR

SEQ ID NO: 46773 - protein, 10 aa, Artificial Sequence
  Description of Artificial Sequence: Synthetic peptide
  Seed: KTRIAYERMC
KFRIAYERMG

SEQ ID NO: 46774 - protein, 10 aa, Artificial Sequence
  Description of Artificial Sequence: Synthetic peptide
  Seed: KTRIAYERMC
KFRIAYERMI

SEQ ID NO: 46775 - protein, 10 aa, Artificial Sequence
  Description of Artificial Sequence: Synthetic peptide
  Seed: KTRIAYERMC
KFRIAYERML

SEQ ID NO: 46776 - protein, 10 aa, Artificial Sequence
  Description of Artificial Sequence: Synthetic peptide
  Seed: KTRIAYERMC
KFRIAYERMK

SEQ ID NO: 46777 - protein, 8 aa, Artificial Sequence
  Description of Artificial Sequence: Synthetic peptide
  Seed: KTRSAYER
KTRSAYEA

SEQ ID NO: 46778 - protein, 8 aa, Artificial Sequence
  Description of Artificial Sequence: Synthetic peptide
  Seed: KTRSAYER
KTRSAYEN

SEQ ID NO: 46779 - protein, 8 aa, Artificial Sequence
  Description of Artificial Sequence: Synthetic peptide
  Seed: KTRSAYER
KTRSAYEC

SEQ ID NO: 46780 - protein, 9 aa, Artificial Sequence
  Description of Artificial Sequence: Synthetic peptide
  Seed: KTRSAYERM
KLRSAYERP

SEQ ID NO: 46781 - protein, 9 aa, Artificial Sequence
  Description of Artificial Sequence: Synthetic peptide
  Seed: KTRSAYERM
KLRSAYERQ

SEQ ID NO: 46782 - protein, 9 aa, Artificial Sequence
  Description of Artificial Sequence: Synthetic peptide
  Seed: KTRSAYERM
KLRSAYERE

SEQ ID NO: 46783 - protein, 9 aa, Artificial Sequence
  Description of Artificial Sequence: Synthetic peptide
  Seed: KTRSAYERM
KLRSAYERG

SEQ ID NO: 46784 - protein, 9 aa, Artificial Sequence
  Description of Artificial Sequence: Synthetic peptide
  Seed: KTRSAYERM
KLRSAYERH

SEQ ID NO: 46785 - protein, 9 aa, Artificial Sequence
  Description of Artificial Sequence: Synthetic peptide
  Seed: KTRSAYERM
KLRSAYERI

SEQ ID NO: 46786 - protein, 9 aa, Artificial Sequence
  Description of Artificial Sequence: Synthetic peptide
  Seed: KTRSAYERM
KLRSAYERL

SEQ ID NO: 46787 - protein, 9 aa, Artificial Sequence
  Description of Artificial Sequence: Synthetic peptide
  Seed: KTRSAYERM
KLRSAYERK

SEQ ID NO: 46788 - protein, 9 aa, Artificial Sequence
  Description of Artificial Sequence: Synthetic peptide
  Seed: KTRSAYERM
KLRSAYERM

SEQ ID NO: 46789 - protein, 9 aa, Artificial Sequence
  Description of Artificial Sequence: Synthetic peptide
  Seed: KTRSAYERM
KLRSAYERF

SEQ ID NO: 46790 - protein, 9 aa, Artificial Sequence
  Description of Artificial Sequence: Synthetic peptide
  Seed: KTRSAYERM
KLRSAYERS

SEQ ID NO: 46791 - protein, 9 aa, Artificial Sequence
  Description of Artificial Sequence: Synthetic peptide
  Seed: KTRSAYERM
KMRSAYERE

SEQ ID NO: 46792 - protein, 9 aa, Artificial Sequence
  Description of Artificial Sequence: Synthetic peptide
  Seed: KTRSAYERM
KLRSAYERT

SEQ ID NO: 46793 - protein, 9 aa, Artificial Sequence
  Description of Artificial Sequence: Synthetic peptide
  Seed: KTRSAYERM
KLRSAYERW

SEQ ID NO: 46794 - protein, 9 aa, Artificial Sequence
  Description of Artificial Sequence: Synthetic peptide
  Seed: KTRSAYERM
KLRSAYERY

SEQ ID NO: 46795 - protein, 9 aa, Artificial Sequence
  Description of Artificial Sequence: Synthetic peptide
  Seed: KTRSAYERM
KLRSAYERV

SEQ ID NO: 46796 - protein, 9 aa, Artificial Sequence
  Description of Artificial Sequence: Synthetic peptide
  Seed: KTRSAYERM
KKRSAYERK

SEQ ID NO: 46797 - protein, 9 aa, Artificial Sequence
  Description of Artificial Sequence: Synthetic peptide
  Seed: KTRSAYERM
KMRSAYERA

SEQ ID NO: 46798 - protein, 9 aa, Artificial Sequence
  Description of Artificial Sequence: Synthetic peptide
  Seed: KTRSAYERM
KMRSAYERR

SEQ ID NO: 46799 - protein, 9 aa, Artificial Sequence
  Description of Artificial Sequence: Synthetic peptide
  Seed: KTRSAYERM
KMRSAYERN

SEQ ID NO: 46800 - protein, 9 aa, Artificial Sequence
  Description of Artificial Sequence: Synthetic peptide
  Seed: KTRSAYERM
KMRSAYERC

SEQ ID NO: 46801 - protein, 9 aa, Artificial Sequence
  Description of Artificial Sequence: Synthetic peptide
  Seed: KTRSAYERM
KLRSAYERC

SEQ ID NO: 46802 - protein, 9 aa, Artificial Sequence
  Description of Artificial Sequence: Synthetic peptide
  Seed: KTRSAYERM
KLRSAYERN

SEQ ID NO: 46803 - protein, 9 aa, Artificial Sequence
  Description of Artificial Sequence: Synthetic peptide
  Seed: KTRSAYERM
KLRSAYERR

SEQ ID NO: 46804 - protein, 9 aa, Artificial Sequence
  Description of Artificial Sequence: Synthetic peptide
  Seed: KTRSAYERM
KLRSAYERA

SEQ ID NO: 46805 - protein, 9 aa, Artificial Sequence
  Description of Artificial Sequence: Synthetic peptide
  Seed: KTRSAYERM
KIRSAYERA

SEQ ID NO: 46806 - protein, 9 aa, Artificial Sequence
  Description of Artificial Sequence: Synthetic peptide
  Seed: KTRSAYERM
KIRSAYERR

SEQ ID NO: 46807 - protein, 9 aa, Artificial Sequence
  Description of Artificial Sequence: Synthetic peptide
  Seed: KTRSAYERM
KIRSAYERN

SEQ ID NO: 46808 - protein, 9 aa, Artificial Sequence
  Description of Artificial Sequence: Synthetic peptide
  Seed: KTRSAYERM
KIRSAYERC

SEQ ID NO: 46809 - protein, 9 aa, Artificial Sequence
  Description of Artificial Sequence: Synthetic peptide
  Seed: KTRSAYERM
KIRSAYERQ

SEQ ID NO: 46810 - protein, 9 aa, Artificial Sequence
  Description of Artificial Sequence: Synthetic peptide
  Seed: KTRSAYERM
KIRSAYERE

SEQ ID NO: 46811 - protein, 9 aa, Artificial Sequence
  Description of Artificial Sequence: Synthetic peptide
  Seed: KTRSAYERM
KIRSAYERG

SEQ ID NO: 46812 - protein, 9 aa, Artificial Sequence
  Description of Artificial Sequence: Synthetic peptide
  Seed: KTRSAYERM
KIRSAYERH

SEQ ID NO: 46813 - protein, 9 aa, Artificial Sequence
  Description of Artificial Sequence: Synthetic peptide
  Seed: KTRSAYERM
KIRSAYERI

SEQ ID NO: 46814 - protein, 9 aa, Artificial Sequence
  Description of Artificial Sequence: Synthetic peptide
  Seed: KTRSAYERM
KIRSAYERL

SEQ ID NO: 46815 - protein, 9 aa, Artificial Sequence
  Description of Artificial Sequence: Synthetic peptide
  Seed: KTRSAYERM
KIRSAYERK

SEQ ID NO: 46816 - protein, 9 aa, Artificial Sequence
  Description of Artificial Sequence: Synthetic peptide
  Seed: KTRSAYERM
KIRSAYERM

SEQ ID NO: 46817 - protein, 9 aa, Artificial Sequence
  Description of Artificial Sequence: Synthetic peptide
  Seed: KTRSAYERM
KIRSAYERF

SEQ ID NO: 46818 - protein, 9 aa, Artificial Sequence
  Description of Artificial Sequence: Synthetic peptide
  Seed: KTRSAYERM
KIRSAYERP

SEQ ID NO: 46819 - protein, 9 aa, Artificial Sequence
  Description of Artificial Sequence: Synthetic peptide
  Seed: KTRSAYERM
KIRSAYERS

SEQ ID NO: 46820 - protein, 9 aa, Artificial Sequence
  Description of Artificial Sequence: Synthetic peptide
  Seed: KTRSAYERM
KIRSAYERT

SEQ ID NO: 46821 - protein, 9 aa, Artificial Sequence
  Description of Artificial Sequence: Synthetic peptide
  Seed: KTRSAYERM
KIRSAYERW

SEQ ID NO: 46822 - protein, 9 aa, Artificial Sequence
  Description of Artificial Sequence: Synthetic peptide
  Seed: KTRSAYERM
KIRSAYERY

SEQ ID NO: 46823 - protein, 9 aa, Artificial Sequence
  Description of Artificial Sequence: Synthetic peptide
  Seed: KTRSAYERM
KIRSAYERV

SEQ ID NO: 46824 - protein, 9 aa, Artificial Sequence
  Description of Artificial Sequence: Synthetic peptide
  Seed: KTRSAYERM
KMRSAYERQ

SEQ ID NO: 46825 - protein, 9 aa, Artificial Sequence
  Description of Artificial Sequence: Synthetic peptide
  Seed: KTRSAYERM
KMRSAYERG

SEQ ID NO: 46826 - protein, 8 aa, Artificial Sequence
  Description of Artificial Sequence: Synthetic peptide
  Seed: KTRSAYER
KTRSAYEQ

SEQ ID NO: 46827 - protein, 9 aa, Artificial Sequence
  Description of Artificial Sequence: Synthetic peptide
  Seed: KTRSAYERM
KSRSAYERN

SEQ ID NO: 46828 - protein, 9 aa, Artificial Sequence
  Description of Artificial Sequence: Synthetic peptide
  Seed: KTRSAYERM
KFRSAYERF

SEQ ID NO: 46829 - protein, 9 aa, Artificial Sequence
  Description of Artificial Sequence: Synthetic peptide
  Seed: KTRSAYERM
KFRSAYERP

SEQ ID NO: 46830 - protein, 9 aa, Artificial Sequence
  Description of Artificial Sequence: Synthetic peptide
  Seed: KTRSAYERM
KFRSAYERS

SEQ ID NO: 46831 - protein, 9 aa, Artificial Sequence
  Description of Artificial Sequence: Synthetic peptide
  Seed: KTRSAYERM
KFRSAYERT

SEQ ID NO: 46832 - protein, 9 aa, Artificial Sequence
  Description of Artificial Sequence: Synthetic peptide
  Seed: KTRSAYERM
KFRSAYERY

SEQ ID NO: 46833 - protein, 9 aa, Artificial Sequence
  Description of Artificial Sequence: Synthetic peptide
  Seed: KTRSAYERM
KFRSAYERV

SEQ ID NO: 46834 - protein, 9 aa, Artificial Sequence
  Description of Artificial Sequence: Synthetic peptide
  Seed: KTRSAYERM
KPRSAYERK

SEQ ID NO: 46835 - protein, 9 aa, Artificial Sequence
  Description of Artificial Sequence: Synthetic peptide
  Seed: KTRSAYERM
KSRSAYERA

SEQ ID NO: 46836 - protein, 9 aa, Artificial Sequence
  Description of Artificial Sequence: Synthetic peptide
  Seed: KTRSAYERM
KSRSAYERR

SEQ ID NO: 46837 - protein, 9 aa, Artificial Sequence
  Description of Artificial Sequence: Synthetic peptide
  Seed: KTRSAYERM
KSRSAYERC

SEQ ID NO: 46838 - protein, 9 aa, Artificial Sequence
  Description of Artificial Sequence: Synthetic peptide
  Seed: KTRSAYERM
KMRSAYERH

SEQ ID NO: 46839 - protein, 9 aa, Artificial Sequence
  Description of Artificial Sequence: Synthetic peptide
  Seed: KTRSAYERM
KSRSAYERQ

SEQ ID NO: 46840 - protein, 9 aa, Artificial Sequence
  Description of Artificial Sequence: Synthetic peptide
  Seed: KTRSAYERM
KSRSAYERE

SEQ ID NO: 46841 - protein, 9 aa, Artificial Sequence
  Description of Artificial Sequence: Synthetic peptide
  Seed: KTRSAYERM
KSRSAYERG

SEQ ID NO: 46842 - protein, 9 aa, Artificial Sequence
  Description of Artificial Sequence: Synthetic peptide
  Seed: KTRSAYERM
KSRSAYERH

SEQ ID NO: 46843 - protein, 9 aa, Artificial Sequence
  Description of Artificial Sequence: Synthetic peptide
  Seed: KTRSAYERM
KSRSAYERI

SEQ ID NO: 46844 - protein, 9 aa, Artificial Sequence
  Description of Artificial Sequence: Synthetic peptide
  Seed: KTRSAYERM
KSRSAYERL

SEQ ID NO: 46845 - protein, 9 aa, Artificial Sequence
  Description of Artificial Sequence: Synthetic peptide
  Seed: KTRSAYERM
KSRSAYERK

SEQ ID NO: 46846 - protein, 9 aa, Artificial Sequence
  Description of Artificial Sequence: Synthetic peptide
  Seed: KTRSAYERM
KSRSAYERM

SEQ ID NO: 46847 - protein, 9 aa, Artificial Sequence
  Description of Artificial Sequence: Synthetic peptide
  Seed: KTRSAYERM
KSRSAYERF

SEQ ID NO: 46848 - protein, 9 aa, Artificial Sequence
  Description of Artificial Sequence: Synthetic peptide
  Seed: KTRSAYERM
KFRSAYERM

SEQ ID NO: 46849 - protein, 9 aa, Artificial Sequence
  Description of Artificial Sequence: Synthetic peptide
  Seed: KTRSAYERM
KFRSAYERK

SEQ ID NO: 46850 - protein, 9 aa, Artificial Sequence
  Description of Artificial Sequence: Synthetic peptide
  Seed: KTRSAYERM
KFRSAYERL

SEQ ID NO: 46851 - protein, 9 aa, Artificial Sequence
  Description of Artificial Sequence: Synthetic peptide
  Seed: KTRSAYERM
KFRSAYERI

SEQ ID NO: 46852 - protein, 9 aa, Artificial Sequence
  Description of Artificial Sequence: Synthetic peptide
  Seed: KTRSAYERM
KMRSAYERI

SEQ ID NO: 46853 - protein, 9 aa, Artificial Sequence
  Description of Artificial Sequence: Synthetic peptide
  Seed: KTRSAYERM
KMRSAYERL

SEQ ID NO: 46854 - protein, 9 aa, Artificial Sequence
  Description of Artificial Sequence: Synthetic peptide
  Seed: KTRSAYERM
KMRSAYERK

SEQ ID NO: 46855 - protein, 9 aa, Artificial Sequence
  Description of Artificial Sequence: Synthetic peptide
  Seed: KTRSAYERM
KMRSAYERM

SEQ ID NO: 46856 - protein, 9 aa, Artificial Sequence
  Description of Artificial Sequence: Synthetic peptide
  Seed: KTRSAYERM
KMRSAYERF

SEQ ID NO: 46857 - protein, 9 aa, Artificial Sequence
  Description of Artificial Sequence: Synthetic peptide
  Seed: KTRSAYERM
KMRSAYERP

SEQ ID NO: 46858 - protein, 9 aa, Artificial Sequence
  Description of Artificial Sequence: Synthetic peptide
  Seed: KTRSAYERM
KMRSAYERS

SEQ ID NO: 46859 - protein, 9 aa, Artificial Sequence
  Description of Artificial Sequence: Synthetic peptide
  Seed: KTRSAYERM
KMRSAYERT

SEQ ID NO: 46860 - protein, 9 aa, Artificial Sequence
  Description of Artificial Sequence: Synthetic peptide
  Seed: KTRSAYERM
KMRSAYERW

SEQ ID NO: 46861 - protein, 9 aa, Artificial Sequence
  Description of Artificial Sequence: Synthetic peptide
  Seed: KTRSAYERM
KMRSAYERY

SEQ ID NO: 46862 - protein, 9 aa, Artificial Sequence
  Description of Artificial Sequence: Synthetic peptide
  Seed: KTRSAYERM
KMRSAYERV

SEQ ID NO: 46863 - protein, 9 aa, Artificial Sequence
  Description of Artificial Sequence: Synthetic peptide
  Seed: KTRSAYERM
KFRSAYERA

SEQ ID NO: 46864 - protein, 9 aa, Artificial Sequence
  Description of Artificial Sequence: Synthetic peptide
  Seed: KTRSAYERM
KFRSAYERR

SEQ ID NO: 46865 - protein, 9 aa, Artificial Sequence
  Description of Artificial Sequence: Synthetic peptide
  Seed: KTRSAYERM
KFRSAYERN

SEQ ID NO: 46866 - protein, 9 aa, Artificial Sequence
  Description of Artificial Sequence: Synthetic peptide
  Seed: KTRSAYERM
KFRSAYERC

SEQ ID NO: 46867 - protein, 9 aa, Artificial Sequence
  Description of Artificial Sequence: Synthetic peptide
  Seed: KTRSAYERM
KFRSAYERQ

SEQ ID NO: 46868 - protein, 9 aa, Artificial Sequence
  Description of Artificial Sequence: Synthetic peptide
  Seed: KTRSAYERM
KFRSAYERE

SEQ ID NO: 46869 - protein, 9 aa, Artificial Sequence
  Description of Artificial Sequence: Synthetic peptide
  Seed: KTRSAYERM
KFRSAYERG

SEQ ID NO: 46870 - protein, 9 aa, Artificial Sequence
  Description of Artificial Sequence: Synthetic peptide
  Seed: KTRSAYERM
KFRSAYERH

SEQ ID NO: 46871 - protein, 9 aa, Artificial Sequence
  Description of Artificial Sequence: Synthetic peptide
  Seed: KTRSAYERM
KHRSAYERK

SEQ ID NO: 46872 - protein, 9 aa, Artificial Sequence
  Description of Artificial Sequence: Synthetic peptide
  Seed: KTRSAYERM
KGRSAYERV

SEQ ID NO: 46873 - protein, 9 aa, Artificial Sequence
  Description of Artificial Sequence: Synthetic peptide
  Seed: KTRSAYERM
KGRSAYERY

SEQ ID NO: 46874 - protein, 9 aa, Artificial Sequence
  Description of Artificial Sequence: Synthetic peptide
  Seed: KTRSAYERM
KARSAYERN

SEQ ID NO: 46875 - protein, 8 aa, Artificial Sequence
  Description of Artificial Sequence: Synthetic peptide
  Seed: KTRSAYER
KVRSAYEM

SEQ ID NO: 46876 - protein, 8 aa, Artificial Sequence
  Description of Artificial Sequence: Synthetic peptide
  Seed: KTRSAYER
KVRSAYEF

SEQ ID NO: 46877 - protein, 8 aa, Artificial Sequence
  Description of Artificial Sequence: Synthetic peptide
  Seed: KTRSAYER
KVRSAYEP

SEQ ID NO: 46878 - protein, 8 aa, Artificial Sequence
  Description of Artificial Sequence: Synthetic peptide
  Seed: KTRSAYER
KVRSAYES

SEQ ID NO: 46879 - protein, 8 aa, Artificial Sequence
  Description of Artificial Sequence: Synthetic peptide
  Seed: KTRSAYER
KVRSAYET

SEQ ID NO: 46880 - protein, 8 aa, Artificial Sequence
  Description of Artificial Sequence: Synthetic peptide
  Seed: KTRSAYER
KVRSAYEY

SEQ ID NO: 46881 - protein, 8 aa, Artificial Sequence
  Description of Artificial Sequence: Synthetic peptide
  Seed: KTRSAYER
KVRSAYEV

SEQ ID NO: 46882 - protein, 9 aa, Artificial Sequence
  Description of Artificial Sequence: Synthetic peptide
  Seed: KTRSAYERM
KARSAYERA

SEQ ID NO: 46883 - protein, 9 aa, Artificial Sequence
  Description of Artificial Sequence: Synthetic peptide
  Seed: KTRSAYERM
KARSAYERR

SEQ ID NO: 46884 - protein, 9 aa, Artificial Sequence
  Description of Artificial Sequence: Synthetic peptide
  Seed: KTRSAYERM
KARSAYERC

SEQ ID NO: 46885 - protein, 9 aa, Artificial Sequence
  Description of Artificial Sequence: Synthetic peptide
  Seed: KTRSAYERM
KGRSAYERW

SEQ ID NO: 46886 - protein, 9 aa, Artificial Sequence
  Description of Artificial Sequence: Synthetic peptide
  Seed: KTRSAYERM
KARSAYERQ

SEQ ID NO: 46887 - protein, 9 aa, Artificial Sequence
  Description of Artificial Sequence: Synthetic peptide
  Seed: KTRSAYERM
KARSAYERE

SEQ ID NO: 46888 - protein, 9 aa, Artificial Sequence
  Description of Artificial Sequence: Synthetic peptide
  Seed: KTRSAYERM
KARSAYERG

SEQ ID NO: 46889 - protein, 9 aa, Artificial Sequence
  Description of Artificial Sequence: Synthetic peptide
  Seed: KTRSAYERM
KARSAYERH

SEQ ID NO: 46890 - protein, 9 aa, Artificial Sequence
  Description of Artificial Sequence: Synthetic peptide
  Seed: KTRSAYERM
KARSAYERI

SEQ ID NO: 46891 - protein, 9 aa, Artificial Sequence
  Description of Artificial Sequence: Synthetic peptide
  Seed: KTRSAYERM
KARSAYERL

SEQ ID NO: 46892 - protein, 9 aa, Artificial Sequence
  Description of Artificial Sequence: Synthetic peptide
  Seed: KTRSAYERM
KARSAYERK

SEQ ID NO: 46893 - protein, 9 aa, Artificial Sequence
  Description of Artificial Sequence: Synthetic peptide
  Seed: KTRSAYERM
KARSAYERM

SEQ ID NO: 46894 - protein, 9 aa, Artificial Sequence
  Description of Artificial Sequence: Synthetic peptide
  Seed: KTRSAYERM
KARSAYERF

SEQ ID NO: 46895 - protein, 8 aa, Artificial Sequence
  Description of Artificial Sequence: Synthetic peptide
  Seed: KTRSAYER
KVRSAYEK

SEQ ID NO: 46896 - protein, 8 aa, Artificial Sequence
  Description of Artificial Sequence: Synthetic peptide
  Seed: KTRSAYER
KVRSAYEL

SEQ ID NO: 46897 - protein, 8 aa, Artificial Sequence
  Description of Artificial Sequence: Synthetic peptide
  Seed: KTRSAYER
KVRSAYEI

SEQ ID NO: 46898 - protein, 8 aa, Artificial Sequence
  Description of Artificial Sequence: Synthetic peptide
  Seed: KTRSAYER
KVRSAYEG

SEQ ID NO: 46899 - protein, 8 aa, Artificial Sequence
  Description of Artificial Sequence: Synthetic peptide
  Seed: KTRSAYER
KTRSAYEG

SEQ ID NO: 46900 - protein, 8 aa, Artificial Sequence
  Description of Artificial Sequence: Synthetic peptide
  Seed: KTRSAYER
KTRSAYEI

SEQ ID NO: 46901 - protein, 8 aa, Artificial Sequence
  Description of Artificial Sequence: Synthetic peptide
  Seed: KTRSAYER
KTRSAYEL

SEQ ID NO: 46902 - protein, 8 aa, Artificial Sequence
  Description of Artificial Sequence: Synthetic peptide
  Seed: KTRSAYER
KTRSAYEK

SEQ ID NO: 46903 - protein, 8 aa, Artificial Sequence
  Description of Artificial Sequence: Synthetic peptide
  Seed: KTRSAYER
KTRSAYEM

SEQ ID NO: 46904 - protein, 8 aa, Artificial Sequence
  Description of Artificial Sequence: Synthetic peptide
  Seed: KTRSAYER
KTRSAYEF

SEQ ID NO: 46905 - protein, 8 aa, Artificial Sequence
  Description of Artificial Sequence: Synthetic peptide
  Seed: KTRSAYER
KTRSAYEP

SEQ ID NO: 46906 - protein, 8 aa, Artificial Sequence
  Description of Artificial Sequence: Synthetic peptide
  Seed: KTRSAYER
KTRSAYES

SEQ ID NO: 46907 - protein, 8 aa, Artificial Sequence
  Description of Artificial Sequence: Synthetic peptide
  Seed: KTRSAYER
KTRSAYET

SEQ ID NO: 46908 - protein, 8 aa, Artificial Sequence
  Description of Artificial Sequence: Synthetic peptide
  Seed: KTRSAYER
KTRSAYEY

SEQ ID NO: 46909 - protein, 8 aa, Artificial Sequence
  Description of Artificial Sequence: Synthetic peptide
  Seed: KTRSAYER
KTRSAYEV

SEQ ID NO: 46910 - protein, 8 aa, Artificial Sequence
  Description of Artificial Sequence: Synthetic peptide
  Seed: KTRSAYER
KWRSAYER

SEQ ID NO: 46911 - protein, 8 aa, Artificial Sequence
  Description of Artificial Sequence: Synthetic peptide
  Seed: KTRSAYER
KWRSAYEK

SEQ ID NO: 46912 - protein, 8 aa, Artificial Sequence
  Description of Artificial Sequence: Synthetic peptide
  Seed: KTRSAYER
KYRSAYEA

SEQ ID NO: 46913 - protein, 8 aa, Artificial Sequence
  Description of Artificial Sequence: Synthetic peptide
  Seed: KTRSAYER
KYRSAYER

SEQ ID NO: 46914 - protein, 8 aa, Artificial Sequence
  Description of Artificial Sequence: Synthetic peptide
  Seed: KTRSAYER
KYRSAYEK

SEQ ID NO: 46915 - protein, 8 aa, Artificial Sequence
  Description of Artificial Sequence: Synthetic peptide
  Seed: KTRSAYER
KYRSAYEV

SEQ ID NO: 46916 - protein, 8 aa, Artificial Sequence
  Description of Artificial Sequence: Synthetic peptide
  Seed: KTRSAYER
KVRSAYEA

SEQ ID NO: 46917 - protein, 8 aa, Artificial Sequence
  Description of Artificial Sequence: Synthetic peptide
  Seed: KTRSAYER
KVRSAYER

SEQ ID NO: 46918 - protein, 9 aa, Artificial Sequence
  Description of Artificial Sequence: Synthetic peptide
  Seed: KTRSAYERM
KARSAYERP

SEQ ID NO: 46919 - protein, 9 aa, Artificial Sequence
  Description of Artificial Sequence: Synthetic peptide
  Seed: KTRSAYERM
KARSAYERS

SEQ ID NO: 46920 - protein, 9 aa, Artificial Sequence
  Description of Artificial Sequence: Synthetic peptide
  Seed: KTRSAYERM
KARSAYERT

SEQ ID NO: 46921 - protein, 9 aa, Artificial Sequence
  Description of Artificial Sequence: Synthetic peptide
  Seed: KTRSAYERM
KQRSAYERQ

SEQ ID NO: 46922 - protein, 9 aa, Artificial Sequence
  Description of Artificial Sequence: Synthetic peptide
  Seed: KTRSAYERM
KQRSAYERI

SEQ ID NO: 46923 - protein, 9 aa, Artificial Sequence
  Description of Artificial Sequence: Synthetic peptide
  Seed: KTRSAYERM
KQRSAYERL

SEQ ID NO: 46924 - protein, 9 aa, Artificial Sequence
  Description of Artificial Sequence: Synthetic peptide
  Seed: KTRSAYERM
KQRSAYERK

SEQ ID NO: 46925 - protein, 9 aa, Artificial Sequence
  Description of Artificial Sequence: Synthetic peptide
  Seed: KTRSAYERM
KQRSAYERM

SEQ ID NO: 46926 - protein, 9 aa, Artificial Sequence
  Description of Artificial Sequence: Synthetic peptide
  Seed: KTRSAYERM
KQRSAYERF

SEQ ID NO: 46927 - protein, 9 aa, Artificial Sequence
  Description of Artificial Sequence: Synthetic peptide
  Seed: KTRSAYERM
KQRSAYERP

SEQ ID NO: 46928 - protein, 9 aa, Artificial Sequence
  Description of Artificial Sequence: Synthetic peptide
  Seed: KTRSAYERM
KQRSAYERS

SEQ ID NO: 46929 - protein, 9 aa, Artificial Sequence
  Description of Artificial Sequence: Synthetic peptide
  Seed: KTRSAYERM
KQRSAYERT

SEQ ID NO: 46930 - protein, 9 aa, Artificial Sequence
  Description of Artificial Sequence: Synthetic peptide
  Seed: KTRSAYERM
KQRSAYERW

SEQ ID NO: 46931 - protein, 9 aa, Artificial Sequence
  Description of Artificial Sequence: Synthetic peptide
  Seed: KTRSAYERM
KQRSAYERY

SEQ ID NO: 46932 - protein, 9 aa, Artificial Sequence
  Description of Artificial Sequence: Synthetic peptide
  Seed: KTRSAYERM
KQRSAYERV

SEQ ID NO: 46933 - protein, 9 aa, Artificial Sequence
  Description of Artificial Sequence: Synthetic peptide
  Seed: KTRSAYERM
KGRSAYERA

SEQ ID NO: 46934 - protein, 9 aa, Artificial Sequence
  Description of Artificial Sequence: Synthetic peptide
  Seed: KTRSAYERM
KGRSAYERR

SEQ ID NO: 46935 - protein, 9 aa, Artificial Sequence
  Description of Artificial Sequence: Synthetic peptide
  Seed: KTRSAYERM
KGRSAYERI

SEQ ID NO: 46936 - protein, 9 aa, Artificial Sequence
  Description of Artificial Sequence: Synthetic peptide
  Seed: KTRSAYERM
KGRSAYERL

SEQ ID NO: 46937 - protein, 9 aa, Artificial Sequence
  Description of Artificial Sequence: Synthetic peptide
  Seed: KTRSAYERM
KGRSAYERK

SEQ ID NO: 46938 - protein, 9 aa, Artificial Sequence
  Description of Artificial Sequence: Synthetic peptide
  Seed: KTRSAYERM
KGRSAYERM

SEQ ID NO: 46939 - protein, 9 aa, Artificial Sequence
  Description of Artificial Sequence: Synthetic peptide
  Seed: KTRSAYERM
KGRSAYERS

SEQ ID NO: 46940 - protein, 9 aa, Artificial Sequence
  Description of Artificial Sequence: Synthetic peptide
  Seed: KTRSAYERM
KGRSAYERT

SEQ ID NO: 46941 - protein, 9 aa, Artificial Sequence
  Description of Artificial Sequence: Synthetic peptide
  Seed: KTRSAYERM
KQRSAYERG

SEQ ID NO: 46942 - protein, 9 aa, Artificial Sequence
  Description of Artificial Sequence: Synthetic peptide
  Seed: KTRSAYERM
KQRSAYERC

SEQ ID NO: 46943 - protein, 9 aa, Artificial Sequence
  Description of Artificial Sequence: Synthetic peptide
  Seed: KTRSAYERM
KARSAYERW

SEQ ID NO: 46944 - protein, 9 aa, Artificial Sequence
  Description of Artificial Sequence: Synthetic peptide
  Seed: KTRSAYERM
KQRSAYERN

SEQ ID NO: 46945 - protein, 9 aa, Artificial Sequence
  Description of Artificial Sequence: Synthetic peptide
  Seed: KTRSAYERM
KARSAYERY

SEQ ID NO: 46946 - protein, 9 aa, Artificial Sequence
  Description of Artificial Sequence: Synthetic peptide
  Seed: KTRSAYERM
KARSAYERV

SEQ ID NO: 46947 - protein, 9 aa, Artificial Sequence
  Description of Artificial Sequence: Synthetic peptide
  Seed: KTRSAYERM
KRRSAYERK

SEQ ID NO: 46948 - protein, 9 aa, Artificial Sequence
  Description of Artificial Sequence: Synthetic peptide
  Seed: KTRSAYERM
KNRSAYERA

SEQ ID NO: 46949 - protein, 9 aa, Artificial Sequence
  Description of Artificial Sequence: Synthetic peptide
  Seed: KTRSAYERM
KNRSAYERR

SEQ ID NO: 46950 - protein, 9 aa, Artificial Sequence
  Description of Artificial Sequence: Synthetic peptide
  Seed: KTRSAYERM
KNRSAYERI

SEQ ID NO: 46951 - protein, 9 aa, Artificial Sequence
  Description of Artificial Sequence: Synthetic peptide
  Seed: KTRSAYERM
KNRSAYERL

SEQ ID NO: 46952 - protein, 9 aa, Artificial Sequence
  Description of Artificial Sequence: Synthetic peptide
  Seed: KTRSAYERM
KNRSAYERK

SEQ ID NO: 46953 - protein, 9 aa, Artificial Sequence
  Description of Artificial Sequence: Synthetic peptide
  Seed: KTRSAYERM
KNRSAYERM

SEQ ID NO: 46954 - protein, 9 aa, Artificial Sequence
  Description of Artificial Sequence: Synthetic peptide
  Seed: KTRSAYERM
KNRSAYERS

SEQ ID NO: 46955 - protein, 9 aa, Artificial Sequence
  Description of Artificial Sequence: Synthetic peptide
  Seed: KTRSAYERM
KNRSAYERW

SEQ ID NO: 46956 - protein, 9 aa, Artificial Sequence
  Description of Artificial Sequence: Synthetic peptide
  Seed: KTRSAYERM
KNRSAYERY

SEQ ID NO: 46957 - protein, 9 aa, Artificial Sequence
  Description of Artificial Sequence: Synthetic peptide
  Seed: KTRSAYERM
KNRSAYERV

SEQ ID NO: 46958 - protein, 9 aa, Artificial Sequence
  Description of Artificial Sequence: Synthetic peptide
  Seed: KTRSAYERM
KCRSAYERA

SEQ ID NO: 46959 - protein, 9 aa, Artificial Sequence
  Description of Artificial Sequence: Synthetic peptide
  Seed: KTRSAYERM
KCRSAYERK

SEQ ID NO: 46960 - protein, 9 aa, Artificial Sequence
  Description of Artificial Sequence: Synthetic peptide
  Seed: KTRSAYERM
KCRSAYERW

SEQ ID NO: 46961 - protein, 9 aa, Artificial Sequence
  Description of Artificial Sequence: Synthetic peptide
  Seed: KTRSAYERM
KCRSAYERV

SEQ ID NO: 46962 - protein, 9 aa, Artificial Sequence
  Description of Artificial Sequence: Synthetic peptide
  Seed: KTRSAYERM
KQRSAYERA

SEQ ID NO: 46963 - protein, 9 aa, Artificial Sequence
  Description of Artificial Sequence: Synthetic peptide
  Seed: KTRSAYERM
KQRSAYERR

SEQ ID NO: 46964 - protein, 10 aa, Artificial Sequence
  Description of Artificial Sequence: Synthetic peptide
  Seed: KTRIAYERMC
KARIAYERMG

SEQ ID NO: 46965 - protein, 10 aa, Artificial Sequence
  Description of Artificial Sequence: Synthetic peptide
  Seed: KTRIAYERMC
KARIAYERMR

SEQ ID NO: 46966 - protein, 10 aa, Artificial Sequence
  Description of Artificial Sequence: Synthetic peptide
  Seed: KTRIAYERMC
KARIAYERMA

SEQ ID NO: 46967 - protein, 8 aa, Artificial Sequence
  Description of Artificial Sequence: Synthetic peptide
  Seed: KTRIAYER
KSRIAYEA

SEQ ID NO: 46968 - protein, 8 aa, Artificial Sequence
  Description of Artificial Sequence: Synthetic peptide
  Seed: KTRIAYER
KKRIAYER

SEQ ID NO: 46969 - protein, 8 aa, Artificial Sequence
  Description of Artificial Sequence: Synthetic peptide
  Seed: KTRIAYER
KMRIAYEA

SEQ ID NO: 46970 - protein, 8 aa, Artificial Sequence
  Description of Artificial Sequence: Synthetic peptide
  Seed: KTRIAYER
KMRIAYER

SEQ ID NO: 46971 - protein, 8 aa, Artificial Sequence
  Description of Artificial Sequence: Synthetic peptide
  Seed: KTRIAYER
KMRIAYEK

SEQ ID NO: 46972 - protein, 8 aa, Artificial Sequence
  Description of Artificial Sequence: Synthetic peptide
  Seed: KTRIAYER
KMRIAYEY

SEQ ID NO: 46973 - protein, 8 aa, Artificial Sequence
  Description of Artificial Sequence: Synthetic peptide
  Seed: KTRIAYER
KMRIAYEV

SEQ ID NO: 46974 - protein, 8 aa, Artificial Sequence
  Description of Artificial Sequence: Synthetic peptide
  Seed: KTRIAYER
KFRIAYEA

SEQ ID NO: 46975 - protein, 8 aa, Artificial Sequence
  Description of Artificial Sequence: Synthetic peptide
  Seed: KTRIAYER
KFRIAYER

SEQ ID NO: 46976 - protein, 8 aa, Artificial Sequence
  Description of Artificial Sequence: Synthetic peptide
  Seed: KTRIAYER
KFRIAYEK

SEQ ID NO: 46977 - protein, 8 aa, Artificial Sequence
  Description of Artificial Sequence: Synthetic peptide
  Seed: KTRIAYER
KSRIAYER

SEQ ID NO: 46978 - protein, 8 aa, Artificial Sequence
  Description of Artificial Sequence: Synthetic peptide
  Seed: KTRIAYER
KTRIAYEI

SEQ ID NO: 46979 - protein, 8 aa, Artificial Sequence
  Description of Artificial Sequence: Synthetic peptide
  Seed: KTRIAYER
KSRIAYEI

SEQ ID NO: 46980 - protein, 8 aa, Artificial Sequence
  Description of Artificial Sequence: Synthetic peptide
  Seed: KTRIAYER
KSRIAYEL

SEQ ID NO: 46981 - protein, 8 aa, Artificial Sequence
  Description of Artificial Sequence: Synthetic peptide
  Seed: KTRIAYER
KSRIAYEK

SEQ ID NO: 46982 - protein, 8 aa, Artificial Sequence
  Description of Artificial Sequence: Synthetic peptide
  Seed: KTRIAYER
KSRIAYEM

SEQ ID NO: 46983 - protein, 8 aa, Artificial Sequence
  Description of Artificial Sequence: Synthetic peptide
  Seed: KTRIAYER
KSRIAYEF

SEQ ID NO: 46984 - protein, 8 aa, Artificial Sequence
  Description of Artificial Sequence: Synthetic peptide
  Seed: KTRIAYER
KSRIAYES

SEQ ID NO: 46985 - protein, 8 aa, Artificial Sequence
  Description of Artificial Sequence: Synthetic peptide
  Seed: KTRIAYER
KSRIAYEY

SEQ ID NO: 46986 - protein, 8 aa, Artificial Sequence
  Description of Artificial Sequence: Synthetic peptide
  Seed: KTRIAYER
KSRIAYEV

SEQ ID NO: 46987 - protein, 8 aa, Artificial Sequence
  Description of Artificial Sequence: Synthetic peptide
  Seed: KTRIAYER
KTRIAYEA

SEQ ID NO: 46988 - protein, 8 aa, Artificial Sequence
  Description of Artificial Sequence: Synthetic peptide
  Seed: KTRIAYER
KLRIAYEK

SEQ ID NO: 46989 - protein, 8 aa, Artificial Sequence
  Description of Artificial Sequence: Synthetic peptide
  Seed: KTRIAYER
KLRIAYER

SEQ ID NO: 46990 - protein, 8 aa, Artificial Sequence
  Description of Artificial Sequence: Synthetic peptide
  Seed: KTRIAYER
KIRIAYEV

SEQ ID NO: 46991 - protein, 8 aa, Artificial Sequence
  Description of Artificial Sequence: Synthetic peptide
  Seed: KTRIAYER
KIRIAYEK

SEQ ID NO: 46992 - protein, 10 aa, Artificial Sequence
  Description of Artificial Sequence: Synthetic peptide
  Seed: KTGGPIYRRR
KVGGPIYRRM

SEQ ID NO: 46993 - protein, 10 aa, Artificial Sequence
  Description of Artificial Sequence: Synthetic peptide
  Seed: KTGGPIYRRR
KVGGPIYRRF

SEQ ID NO: 46994 - protein, 10 aa, Artificial Sequence
  Description of Artificial Sequence: Synthetic peptide
  Seed: KTGGPIYRRR
KVGGPIYRRP

SEQ ID NO: 46995 - protein, 10 aa, Artificial Sequence
  Description of Artificial Sequence: Synthetic peptide
  Seed: KTGGPIYRRR
KVGGPIYRRS

SEQ ID NO: 46996 - protein, 10 aa, Artificial Sequence
  Description of Artificial Sequence: Synthetic peptide
  Seed: KTGGPIYRRR
KVGGPIYRRT

SEQ ID NO: 46997 - protein, 10 aa, Artificial Sequence
  Description of Artificial Sequence: Synthetic peptide
  Seed: KTGGPIYRRR
KVGGPIYRRW

SEQ ID NO: 46998 - protein, 10 aa, Artificial Sequence
  Description of Artificial Sequence: Synthetic peptide
  Seed: KTGGPIYRRR
KVGGPIYRRY

SEQ ID NO: 46999 - protein, 10 aa, Artificial Sequence
  Description of Artificial Sequence: Synthetic peptide
  Seed: KTGGPIYRRR
KVGGPIYRRV

SEQ ID NO: 47000 - protein, 8 aa, Artificial Sequence
  Description of Artificial Sequence: Synthetic peptide
  Seed: KTRIAYER
KARIAYEA

SEQ ID NO: 47001 - protein, 8 aa, Artificial Sequence
  Description of Artificial Sequence: Synthetic peptide
  Seed: KTRIAYER
KARIAYER

SEQ ID NO: 47002 - protein, 8 aa, Artificial Sequence
  Description of Artificial Sequence: Synthetic peptide
  Seed: KTRIAYER
KARIAYEK

SEQ ID NO: 47003 - protein, 8 aa, Artificial Sequence
  Description of Artificial Sequence: Synthetic peptide
  Seed: KTRIAYER
KRRIAYER

SEQ ID NO: 47004 - protein, 8 aa, Artificial Sequence
  Description of Artificial Sequence: Synthetic peptide
  Seed: KTRIAYER
KNRIAYER

SEQ ID NO: 47005 - protein, 8 aa, Artificial Sequence
  Description of Artificial Sequence: Synthetic peptide
  Seed: KTRIAYER
KQRIAYER

SEQ ID NO: 47006 - protein, 8 aa, Artificial Sequence
  Description of Artificial Sequence: Synthetic peptide
  Seed: KTRIAYER
KQRIAYEK

SEQ ID NO: 47007 - protein, 8 aa, Artificial Sequence
  Description of Artificial Sequence: Synthetic peptide
  Seed: KTRIAYER
KGRIAYEK

SEQ ID NO: 47008 - protein, 8 aa, Artificial Sequence
  Description of Artificial Sequence: Synthetic peptide
  Seed: KTRIAYER
KIRIAYEA

SEQ ID NO: 47009 - protein, 8 aa, Artificial Sequence
  Description of Artificial Sequence: Synthetic peptide
  Seed: KTRIAYER
KIRIAYER

SEQ ID NO: 47010 - protein, 8 aa, Artificial Sequence
  Description of Artificial Sequence: Synthetic peptide
  Seed: KTRIAYER
KIRIAYEI

SEQ ID NO: 47011 - protein, 8 aa, Artificial Sequence
  Description of Artificial Sequence: Synthetic peptide
  Seed: KTRIAYER
KTRIAYEG

SEQ ID NO: 47012 - protein, 8 aa, Artificial Sequence
  Description of Artificial Sequence: Synthetic peptide
  Seed: KTRIAYER
KTRIAYEL

SEQ ID NO: 47013 - protein, 9 aa, Artificial Sequence
  Description of Artificial Sequence: Synthetic peptide
  Seed: KTRIAYERM
KNRIAYERI

SEQ ID NO: 47014 - protein, 9 aa, Artificial Sequence
  Description of Artificial Sequence: Synthetic peptide
  Seed: KTRIAYERM
KARIAYERL

SEQ ID NO: 47015 - protein, 9 aa, Artificial Sequence
  Description of Artificial Sequence: Synthetic peptide
  Seed: KTRIAYERM
KARIAYERA

SEQ ID NO: 47016 - protein, 9 aa, Artificial Sequence
  Description of Artificial Sequence: Synthetic peptide
  Seed: KTRIAYERM
KARIAYERR

SEQ ID NO: 47017 - protein, 9 aa, Artificial Sequence
  Description of Artificial Sequence: Synthetic peptide
  Seed: KTRIAYERM
KARIAYERN

SEQ ID NO: 47018 - protein, 9 aa, Artificial Sequence
  Description of Artificial Sequence: Synthetic peptide
  Seed: KTRIAYERM
KARIAYERC

SEQ ID NO: 47019 - protein, 9 aa, Artificial Sequence
  Description of Artificial Sequence: Synthetic peptide
  Seed: KTRIAYERM
KARIAYERQ

SEQ ID NO: 47020 - protein, 9 aa, Artificial Sequence
  Description of Artificial Sequence: Synthetic peptide
  Seed: KTRIAYERM
KARIAYERE

SEQ ID NO: 47021 - protein, 9 aa, Artificial Sequence
  Description of Artificial Sequence: Synthetic peptide
  Seed: KTRIAYERM
KARIAYERG

SEQ ID NO: 47022 - protein, 9 aa, Artificial Sequence
  Description of Artificial Sequence: Synthetic peptide
  Seed: KTRIAYERM
KARIAYERH

SEQ ID NO: 47023 - protein, 9 aa, Artificial Sequence
  Description of Artificial Sequence: Synthetic peptide
  Seed: KTRIAYERM
KARIAYERI

SEQ ID NO: 47024 - protein, 9 aa, Artificial Sequence
  Description of Artificial Sequence: Synthetic peptide
  Seed: KTRIAYERM
KARIAYERK

SEQ ID NO: 47025 - protein, 8 aa, Artificial Sequence
  Description of Artificial Sequence: Synthetic peptide
  Seed: KTRIAYER
KTRIAYEK

SEQ ID NO: 47026 - protein, 9 aa, Artificial Sequence
  Description of Artificial Sequence: Synthetic peptide
  Seed: KTRIAYERM
KARIAYERM

SEQ ID NO: 47027 - protein, 9 aa, Artificial Sequence
  Description of Artificial Sequence: Synthetic peptide
  Seed: KTRIAYERM
KARIAYERF

SEQ ID NO: 47028 - protein, 9 aa, Artificial Sequence
  Description of Artificial Sequence: Synthetic peptide
  Seed: KTRIAYERM
KARIAYERP

SEQ ID NO: 47029 - protein, 9 aa, Artificial Sequence
  Description of Artificial Sequence: Synthetic peptide
  Seed: KTRIAYERM
KARIAYERS

SEQ ID NO: 47030 - protein, 9 aa, Artificial Sequence
  Description of Artificial Sequence: Synthetic peptide
  Seed: KTRIAYERM
KARIAYERT

SEQ ID NO: 47031 - protein, 9 aa, Artificial Sequence
  Description of Artificial Sequence: Synthetic peptide
  Seed: KTRIAYERM
KARIAYERW

SEQ ID NO: 47032 - protein, 9 aa, Artificial Sequence
  Description of Artificial Sequence: Synthetic peptide
  Seed: KTRIAYERM
KARIAYERY

SEQ ID NO: 47033 - protein, 9 aa, Artificial Sequence
  Description of Artificial Sequence: Synthetic peptide
  Seed: KTRIAYERM
KARIAYERV

SEQ ID NO: 47034 - protein, 9 aa, Artificial Sequence
  Description of Artificial Sequence: Synthetic peptide
  Seed: KTRIAYERM
KRRIAYERK

SEQ ID NO: 47035 - protein, 8 aa, Artificial Sequence
  Description of Artificial Sequence: Synthetic peptide
  Seed: KTRIAYER
KVRIAYEV

SEQ ID NO: 47036 - protein, 8 aa, Artificial Sequence
  Description of Artificial Sequence: Synthetic peptide
  Seed: KTRIAYER
KVRIAYEY

SEQ ID NO: 47037 - protein, 8 aa, Artificial Sequence
  Description of Artificial Sequence: Synthetic peptide
  Seed: KTRIAYER
KVRIAYES

SEQ ID NO: 47038 - protein, 8 aa, Artificial Sequence
  Description of Artificial Sequence: Synthetic peptide
  Seed: KTRIAYER
KVRIAYEF

SEQ ID NO: 47039 - protein, 8 aa, Artificial Sequence
  Description of Artificial Sequence: Synthetic peptide
  Seed: KTRIAYER
KTRIAYEM

SEQ ID NO: 47040 - protein, 8 aa, Artificial Sequence
  Description of Artificial Sequence: Synthetic peptide
  Seed: KTRIAYER
KTRIAYEF

SEQ ID NO: 47041 - protein, 8 aa, Artificial Sequence
  Description of Artificial Sequence: Synthetic peptide
  Seed: KTRIAYER
KTRIAYEP

SEQ ID NO: 47042 - protein, 8 aa, Artificial Sequence
  Description of Artificial Sequence: Synthetic peptide
  Seed: KTRIAYER
KTRIAYES

SEQ ID NO: 47043 - protein, 8 aa, Artificial Sequence
  Description of Artificial Sequence: Synthetic peptide
  Seed: KTRIAYER
KTRIAYET

SEQ ID NO: 47044 - protein, 8 aa, Artificial Sequence
  Description of Artificial Sequence: Synthetic peptide
  Seed: KTRIAYER
KTRIAYEY

SEQ ID NO: 47045 - protein, 8 aa, Artificial Sequence
  Description of Artificial Sequence: Synthetic peptide
  Seed: KTRIAYER
KTRIAYEV

SEQ ID NO: 47046 - protein, 8 aa, Artificial Sequence
  Description of Artificial Sequence: Synthetic peptide
  Seed: KTRIAYER
KWRIAYER

SEQ ID NO: 47047 - protein, 8 aa, Artificial Sequence
  Description of Artificial Sequence: Synthetic peptide
  Seed: KTRIAYER
KWRIAYEK

SEQ ID NO: 47048 - protein, 8 aa, Artificial Sequence
  Description of Artificial Sequence: Synthetic peptide
  Seed: KTRIAYER
KYRIAYEA

SEQ ID NO: 47049 - protein, 8 aa, Artificial Sequence
  Description of Artificial Sequence: Synthetic peptide
  Seed: KTRIAYER
KYRIAYER

SEQ ID NO: 47050 - protein, 8 aa, Artificial Sequence
  Description of Artificial Sequence: Synthetic peptide
  Seed: KTRIAYER
KYRIAYEK

SEQ ID NO: 47051 - protein, 8 aa, Artificial Sequence
  Description of Artificial Sequence: Synthetic peptide
  Seed: KTRIAYER
KYRIAYEV

SEQ ID NO: 47052 - protein, 8 aa, Artificial Sequence
  Description of Artificial Sequence: Synthetic peptide
  Seed: KTRIAYER
KVRIAYEA

SEQ ID NO: 47053 - protein, 8 aa, Artificial Sequence
  Description of Artificial Sequence: Synthetic peptide
  Seed: KTRIAYER
KVRIAYER

SEQ ID NO: 47054 - protein, 8 aa, Artificial Sequence
  Description of Artificial Sequence: Synthetic peptide
  Seed: KTRIAYER
KVRIAYEI

SEQ ID NO: 47055 - protein, 8 aa, Artificial Sequence
  Description of Artificial Sequence: Synthetic peptide
  Seed: KTRIAYER
KVRIAYEL

SEQ ID NO: 47056 - protein, 8 aa, Artificial Sequence
  Description of Artificial Sequence: Synthetic peptide
  Seed: KTRIAYER
KVRIAYEK

SEQ ID NO: 47057 - protein, 8 aa, Artificial Sequence
  Description of Artificial Sequence: Synthetic peptide
  Seed: KTRIAYER
KVRIAYEM

SEQ ID NO: 47058 - protein, 10 aa, Artificial Sequence
  Description of Artificial Sequence: Synthetic peptide
  Seed: KTGGPIYRRR
KVGGPIYRRK

SEQ ID NO: 47059 - protein, 10 aa, Artificial Sequence
  Description of Artificial Sequence: Synthetic peptide
  Seed: KTGGPIYRRR
KVGGPIYRRL

SEQ ID NO: 47060 - protein, 10 aa, Artificial Sequence
  Description of Artificial Sequence: Synthetic peptide
  Seed: KTGGPIYRRR
KVGGPIYRRI

SEQ ID NO: 47061 - protein, 10 aa, Artificial Sequence
  Description of Artificial Sequence: Synthetic peptide
  Seed: KTGGPIYRRR
KLGGPIYRRR

SEQ ID NO: 47062 - protein, 9 aa, Artificial Sequence
  Description of Artificial Sequence: Synthetic peptide
  Seed: KTGGPIYRR
KVGGPIYRK

SEQ ID NO: 47063 - protein, 9 aa, Artificial Sequence
  Description of Artificial Sequence: Synthetic peptide
  Seed: KTGGPIYRR
KVGGPIYRY

SEQ ID NO: 47064 - protein, 10 aa, Artificial Sequence
  Description of Artificial Sequence: Synthetic peptide
  Seed: KTGGPIYRRR
KAGGPIYRRR

SEQ ID NO: 47065 - protein, 10 aa, Artificial Sequence
  Description of Artificial Sequence: Synthetic peptide
  Seed: KTGGPIYRRR
KNGGPIYRRR

SEQ ID NO: 47066 - protein, 10 aa, Artificial Sequence
  Description of Artificial Sequence: Synthetic peptide
  Seed: KTGGPIYRRR
KQGGPIYRRR

SEQ ID NO: 47067 - protein, 10 aa, Artificial Sequence
  Description of Artificial Sequence: Synthetic peptide
  Seed: KTGGPIYRRR
KQGGPIYRRK

SEQ ID NO: 47068 - protein, 10 aa, Artificial Sequence
  Description of Artificial Sequence: Synthetic peptide
  Seed: KTGGPIYRRR
KGGGPIYRRR

SEQ ID NO: 47069 - protein, 10 aa, Artificial Sequence
  Description of Artificial Sequence: Synthetic peptide
  Seed: KTGGPIYRRR
KIGGPIYRRR

SEQ ID NO: 47070 - protein, 10 aa, Artificial Sequence
  Description of Artificial Sequence: Synthetic peptide
  Seed: KTGGPIYRRR
KIGGPIYRRK

SEQ ID NO: 47071 - protein, 10 aa, Artificial Sequence
  Description of Artificial Sequence: Synthetic peptide
  Seed: KTGGPIYRRR
KLGGPIYRRK

SEQ ID NO: 47072 - protein, 10 aa, Artificial Sequence
  Description of Artificial Sequence: Synthetic peptide
  Seed: KTGGPIYRRR
KVGGPIYRRH

SEQ ID NO: 47073 - protein, 10 aa, Artificial Sequence
  Description of Artificial Sequence: Synthetic peptide
  Seed: KTGGPIYRRR
KMGGPIYRRA

SEQ ID NO: 47074 - protein, 10 aa, Artificial Sequence
  Description of Artificial Sequence: Synthetic peptide
  Seed: KTGGPIYRRR
KMGGPIYRRR

SEQ ID NO: 47075 - protein, 10 aa, Artificial Sequence
  Description of Artificial Sequence: Synthetic peptide
  Seed: KTGGPIYRRR
KMGGPIYRRN

SEQ ID NO: 47076 - protein, 10 aa, Artificial Sequence
  Description of Artificial Sequence: Synthetic peptide
  Seed: KTGGPIYRRR
KMGGPIYRRD

SEQ ID NO: 47077 - protein, 10 aa, Artificial Sequence
  Description of Artificial Sequence: Synthetic peptide
  Seed: KTGGPIYRRR
KMGGPIYRRC

SEQ ID NO: 47078 - protein, 10 aa, Artificial Sequence
  Description of Artificial Sequence: Synthetic peptide
  Seed: KTGGPIYRRR
KMGGPIYRRQ

SEQ ID NO: 47079 - protein, 10 aa, Artificial Sequence
  Description of Artificial Sequence: Synthetic peptide
  Seed: KTGGPIYRRR
KMGGPIYRRE

SEQ ID NO: 47080 - protein, 10 aa, Artificial Sequence
  Description of Artificial Sequence: Synthetic peptide
  Seed: KTGGPIYRRR
KMGGPIYRRG

SEQ ID NO: 47081 - protein, 10 aa, Artificial Sequence
  Description of Artificial Sequence: Synthetic peptide
  Seed: KTGGPIYRRR
KMGGPIYRRH

SEQ ID NO: 47082 - protein, 9 aa, Artificial Sequence
  Description of Artificial Sequence: Synthetic peptide
  Seed: KTGGPIYRR
KVGGPIYRR

SEQ ID NO: 47083 - protein, 9 aa, Artificial Sequence
  Description of Artificial Sequence: Synthetic peptide
  Seed: KTGGPIYRR
KYGGPIYRK

SEQ ID NO: 47084 - protein, 9 aa, Artificial Sequence
  Description of Artificial Sequence: Synthetic peptide
  Seed: KTGGPIYRR
KYGGPIYRR

SEQ ID NO: 47085 - protein, 9 aa, Artificial Sequence
  Description of Artificial Sequence: Synthetic peptide
  Seed: KTGGPIYRR
KWGGPIYRK

SEQ ID NO: 47086 - protein, 9 aa, Artificial Sequence
  Description of Artificial Sequence: Synthetic peptide
  Seed: KTGGPIYRR
KGGGPIYRK

SEQ ID NO: 47087 - protein, 9 aa, Artificial Sequence
  Description of Artificial Sequence: Synthetic peptide
  Seed: KTGGPIYRR
KHGGPIYRR

SEQ ID NO: 47088 - protein, 9 aa, Artificial Sequence
  Description of Artificial Sequence: Synthetic peptide
  Seed: KTGGPIYRR
KIGGPIYRR

SEQ ID NO: 47089 - protein, 9 aa, Artificial Sequence
  Description of Artificial Sequence: Synthetic peptide
  Seed: KTGGPIYRR
KIGGPIYRK

SEQ ID NO: 47090 - protein, 9 aa, Artificial Sequence
  Description of Artificial Sequence: Synthetic peptide
  Seed: KTGGPIYRR
KLGGPIYRR

SEQ ID NO: 47091 - protein, 9 aa, Artificial Sequence
  Description of Artificial Sequence: Synthetic peptide
  Seed: KTGGPIYRR
KLGGPIYRK

SEQ ID NO: 47092 - protein, 9 aa, Artificial Sequence
  Description of Artificial Sequence: Synthetic peptide
  Seed: KTGGPIYRR
KLGGPIYRY

SEQ ID NO: 47093 - protein, 9 aa, Artificial Sequence
  Description of Artificial Sequence: Synthetic peptide
  Seed: KTGGPIYRR
KMGGPIYRR

SEQ ID NO: 47094 - protein, 9 aa, Artificial Sequence
  Description of Artificial Sequence: Synthetic peptide
  Seed: KTGGPIYRR
KMGGPIYRH

SEQ ID NO: 47095 - protein, 9 aa, Artificial Sequence
  Description of Artificial Sequence: Synthetic peptide
  Seed: KTGGPIYRR
KMGGPIYRK

SEQ ID NO: 47096 - protein, 9 aa, Artificial Sequence
  Description of Artificial Sequence: Synthetic peptide
  Seed: KTGGPIYRR
KMGGPIYRY

SEQ ID NO: 47097 - protein, 9 aa, Artificial Sequence
  Description of Artificial Sequence: Synthetic peptide
  Seed: KTGGPIYRR
KFGGPIYRR

SEQ ID NO: 47098 - protein, 9 aa, Artificial Sequence
  Description of Artificial Sequence: Synthetic peptide
  Seed: KTGGPIYRR
KFGGPIYRK

SEQ ID NO: 47099 - protein, 9 aa, Artificial Sequence
  Description of Artificial Sequence: Synthetic peptide
  Seed: KTGGPIYRR
KSGGPIYRR

SEQ ID NO: 47100 - protein, 9 aa, Artificial Sequence
  Description of Artificial Sequence: Synthetic peptide
  Seed: KTGGPIYRR
KSGGPIYRK

SEQ ID NO: 47101 - protein, 9 aa, Artificial Sequence
  Description of Artificial Sequence: Synthetic peptide
  Seed: KTGGPIYRR
KTGGPIYRA

SEQ ID NO: 47102 - protein, 9 aa, Artificial Sequence
  Description of Artificial Sequence: Synthetic peptide
  Seed: KTGGPIYRR
KTGGPIYRY

SEQ ID NO: 47103 - protein, 9 aa, Artificial Sequence
  Description of Artificial Sequence: Synthetic peptide
  Seed: KTGGPIYRR
KWGGPIYRR

SEQ ID NO: 47104 - protein, 10 aa, Artificial Sequence
  Description of Artificial Sequence: Synthetic peptide
  Seed: KTGGPIYRRR
KMGGPIYRRI

SEQ ID NO: 47105 - protein, 10 aa, Artificial Sequence
  Description of Artificial Sequence: Synthetic peptide
  Seed: KTGGPIYRRR
KMGGPIYRRL

SEQ ID NO: 47106 - protein, 10 aa, Artificial Sequence
  Description of Artificial Sequence: Synthetic peptide
  Seed: KTGGPIYRRR
KMGGPIYRRK

SEQ ID NO: 47107 - protein, 10 aa, Artificial Sequence
  Description of Artificial Sequence: Synthetic peptide
  Seed: KTGGPIYRRR
KFGGPIYRRP

SEQ ID NO: 47108 - protein, 10 aa, Artificial Sequence
  Description of Artificial Sequence: Synthetic peptide
  Seed: KTGGPIYRRR
KFGGPIYRRT

SEQ ID NO: 47109 - protein, 10 aa, Artificial Sequence
  Description of Artificial Sequence: Synthetic peptide
  Seed: KTGGPIYRRR
KFGGPIYRRW

SEQ ID NO: 47110 - protein, 10 aa, Artificial Sequence
  Description of Artificial Sequence: Synthetic peptide
  Seed: KTGGPIYRRR
KFGGPIYRRY

SEQ ID NO: 47111 - protein, 10 aa, Artificial Sequence
  Description of Artificial Sequence: Synthetic peptide
  Seed: KTGGPIYRRR
KFGGPIYRRV

SEQ ID NO: 47112 - protein, 10 aa, Artificial Sequence
  Description of Artificial Sequence: Synthetic peptide
  Seed: KTGGPIYRRR
KSGGPIYRRR

SEQ ID NO: 47113 - protein, 10 aa, Artificial Sequence
  Description of Artificial Sequence: Synthetic peptide
  Seed: KTGGPIYRRR
KSGGPIYRRK

SEQ ID NO: 47114 - protein, 10 aa, Artificial Sequence
  Description of Artificial Sequence: Synthetic peptide
  Seed: KTGGPIYRRR
KWGGPIYRRR

SEQ ID NO: 47115 - protein, 10 aa, Artificial Sequence
  Description of Artificial Sequence: Synthetic peptide
  Seed: KTGGPIYRRR
KWGGPIYRRK

SEQ ID NO: 47116 - protein, 10 aa, Artificial Sequence
  Description of Artificial Sequence: Synthetic peptide
  Seed: KTGGPIYRRR
KYGGPIYRRR

SEQ ID NO: 47117 - protein, 10 aa, Artificial Sequence
  Description of Artificial Sequence: Synthetic peptide
  Seed: KTGGPIYRRR
KYGGPIYRRK

SEQ ID NO: 47118 - protein, 10 aa, Artificial Sequence
  Description of Artificial Sequence: Synthetic peptide
  Seed: KTGGPIYRRR
KVGGPIYRRA

SEQ ID NO: 47119 - protein, 10 aa, Artificial Sequence
  Description of Artificial Sequence: Synthetic peptide
  Seed: KTGGPIYRRR
KVGGPIYRRR

SEQ ID NO: 47120 - protein, 10 aa, Artificial Sequence
  Description of Artificial Sequence: Synthetic peptide
  Seed: KTGGPIYRRR
KVGGPIYRRN

SEQ ID NO: 47121 - protein, 10 aa, Artificial Sequence
  Description of Artificial Sequence: Synthetic peptide
  Seed: KTGGPIYRRR
KVGGPIYRRD

SEQ ID NO: 47122 - protein, 10 aa, Artificial Sequence
  Description of Artificial Sequence: Synthetic peptide
  Seed: KTGGPIYRRR
KVGGPIYRRC

SEQ ID NO: 47123 - protein, 10 aa, Artificial Sequence
  Description of Artificial Sequence: Synthetic peptide
  Seed: KTGGPIYRRR
KVGGPIYRRQ

SEQ ID NO: 47124 - protein, 10 aa, Artificial Sequence
  Description of Artificial Sequence: Synthetic peptide
  Seed: KTGGPIYRRR
KVGGPIYRRE

SEQ ID NO: 47125 - protein, 10 aa, Artificial Sequence
  Description of Artificial Sequence: Synthetic peptide
  Seed: KTGGPIYRRR
KVGGPIYRRG

SEQ ID NO: 47126 - protein, 10 aa, Artificial Sequence
  Description of Artificial Sequence: Synthetic peptide
  Seed: KTGGPIYRRR
KFGGPIYRRS

SEQ ID NO: 47127 - protein, 10 aa, Artificial Sequence
  Description of Artificial Sequence: Synthetic peptide
  Seed: KTGGPIYRRR
KFGGPIYRRF

SEQ ID NO: 47128 - protein, 10 aa, Artificial Sequence
  Description of Artificial Sequence: Synthetic peptide
  Seed: KTGGPIYRRR
KMGGPIYRRM

SEQ ID NO: 47129 - protein, 10 aa, Artificial Sequence
  Description of Artificial Sequence: Synthetic peptide
  Seed: KTGGPIYRRR
KFGGPIYRRM

SEQ ID NO: 47130 - protein, 10 aa, Artificial Sequence
  Description of Artificial Sequence: Synthetic peptide
  Seed: KTGGPIYRRR
KMGGPIYRRF

SEQ ID NO: 47131 - protein, 10 aa, Artificial Sequence
  Description of Artificial Sequence: Synthetic peptide
  Seed: KTGGPIYRRR
KMGGPIYRRP

SEQ ID NO: 47132 - protein, 10 aa, Artificial Sequence
  Description of Artificial Sequence: Synthetic peptide
  Seed: KTGGPIYRRR
KMGGPIYRRS

SEQ ID NO: 47133 - protein, 10 aa, Artificial Sequence
  Description of Artificial Sequence: Synthetic peptide
  Seed: KTGGPIYRRR
KMGGPIYRRT

SEQ ID NO: 47134 - protein, 10 aa, Artificial Sequence
  Description of Artificial Sequence: Synthetic peptide
  Seed: KTGGPIYRRR
KMGGPIYRRW

SEQ ID NO: 47135 - protein, 10 aa, Artificial Sequence
  Description of Artificial Sequence: Synthetic peptide
  Seed: KTGGPIYRRR
KMGGPIYRRY

SEQ ID NO: 47136 - protein, 10 aa, Artificial Sequence
  Description of Artificial Sequence: Synthetic peptide
  Seed: KTGGPIYRRR
KMGGPIYRRV

SEQ ID NO: 47137 - protein, 10 aa, Artificial Sequence
  Description of Artificial Sequence: Synthetic peptide
  Seed: KTGGPIYRRR
KFGGPIYRRA

SEQ ID NO: 47138 - protein, 10 aa, Artificial Sequence
  Description of Artificial Sequence: Synthetic peptide
  Seed: KTGGPIYRRR
KFGGPIYRRR

SEQ ID NO: 47139 - protein, 10 aa, Artificial Sequence
  Description of Artificial Sequence: Synthetic peptide
  Seed: KTGGPIYRRR
KFGGPIYRRN

SEQ ID NO: 47140 - protein, 10 aa, Artificial Sequence
  Description of Artificial Sequence: Synthetic peptide
  Seed: KTGGPIYRRR
KFGGPIYRRD

SEQ ID NO: 47141 - protein, 10 aa, Artificial Sequence
  Description of Artificial Sequence: Synthetic peptide
  Seed: KTGGPIYRRR
KFGGPIYRRC

SEQ ID NO: 47142 - protein, 10 aa, Artificial Sequence
  Description of Artificial Sequence: Synthetic peptide
  Seed: KTGGPIYRRR
KFGGPIYRRQ

SEQ ID NO: 47143 - protein, 10 aa, Artificial Sequence
  Description of Artificial Sequence: Synthetic peptide
  Seed: KTGGPIYRRR
KFGGPIYRRE

SEQ ID NO: 47144 - protein, 10 aa, Artificial Sequence
  Description of Artificial Sequence: Synthetic peptide
  Seed: KTGGPIYRRR
KFGGPIYRRG

SEQ ID NO: 47145 - protein, 10 aa, Artificial Sequence
  Description of Artificial Sequence: Synthetic peptide
  Seed: KTGGPIYRRR
KFGGPIYRRH

SEQ ID NO: 47146 - protein, 10 aa, Artificial Sequence
  Description of Artificial Sequence: Synthetic peptide
  Seed: KTGGPIYRRR
KFGGPIYRRI

SEQ ID NO: 47147 - protein, 10 aa, Artificial Sequence
  Description of Artificial Sequence: Synthetic peptide
  Seed: KTGGPIYRRR
KFGGPIYRRL

SEQ ID NO: 47148 - protein, 10 aa, Artificial Sequence
  Description of Artificial Sequence: Synthetic peptide
  Seed: KTGGPIYRRR
KFGGPIYRRK

SEQ ID NO: 47149 - protein, 9 aa, Artificial Sequence
  Description of Artificial Sequence: Synthetic peptide
  Seed: KTRIAYERM
KNRIAYERA

SEQ ID NO: 47150 - protein, 9 aa, Artificial Sequence
  Description of Artificial Sequence: Synthetic peptide
  Seed: KTRIAYERM
KNRIAYERL

SEQ ID NO: 47151 - protein, 9 aa, Artificial Sequence
  Description of Artificial Sequence: Synthetic peptide
  Seed: KTRIAYERM
KVRIAYERV

SEQ ID NO: 47152 - protein, 9 aa, Artificial Sequence
  Description of Artificial Sequence: Synthetic peptide
  Seed: KTRIAYERM
KTRIAYERE

SEQ ID NO: 47153 - protein, 9 aa, Artificial Sequence
  Description of Artificial Sequence: Synthetic peptide
  Seed: KTRIAYERM
KSRIAYERT

SEQ ID NO: 47154 - protein, 9 aa, Artificial Sequence
  Description of Artificial Sequence: Synthetic peptide
  Seed: KTRIAYERM
KSRIAYERW

SEQ ID NO: 47155 - protein, 9 aa, Artificial Sequence
  Description of Artificial Sequence: Synthetic peptide
  Seed: KTRIAYERM
KSRIAYERY

SEQ ID NO: 47156 - protein, 9 aa, Artificial Sequence
  Description of Artificial Sequence: Synthetic peptide
  Seed: KTRIAYERM
KSRIAYERV

SEQ ID NO: 47157 - protein, 9 aa, Artificial Sequence
  Description of Artificial Sequence: Synthetic peptide
  Seed: KTRIAYERM
KTRIAYERA

SEQ ID NO: 47158 - protein, 9 aa, Artificial Sequence
  Description of Artificial Sequence: Synthetic peptide
  Seed: KTRIAYERM
KTRIAYERR

SEQ ID NO: 47159 - protein, 9 aa, Artificial Sequence
  Description of Artificial Sequence: Synthetic peptide
  Seed: KTRIAYERM
KTRIAYERN

SEQ ID NO: 47160 - protein, 9 aa, Artificial Sequence
  Description of Artificial Sequence: Synthetic peptide
  Seed: KTRIAYERM
KTRIAYERC

SEQ ID NO: 47161 - protein, 9 aa, Artificial Sequence
  Description of Artificial Sequence: Synthetic peptide
  Seed: KTRIAYERM
KTRIAYERQ

SEQ ID NO: 47162 - protein, 9 aa, Artificial Sequence
  Description of Artificial Sequence: Synthetic peptide
  Seed: KTRIAYERM
KTRIAYERG

SEQ ID NO: 47163 - protein, 9 aa, Artificial Sequence
  Description of Artificial Sequence: Synthetic peptide
  Seed: KTRIAYERM
KTRIAYERV

SEQ ID NO: 47164 - protein, 9 aa, Artificial Sequence
  Description of Artificial Sequence: Synthetic peptide
  Seed: KTRIAYERM
KTRIAYERH

SEQ ID NO: 47165 - protein, 9 aa, Artificial Sequence
  Description of Artificial Sequence: Synthetic peptide
  Seed: KTRIAYERM
KTRIAYERI

SEQ ID NO: 47166 - protein, 9 aa, Artificial Sequence
  Description of Artificial Sequence: Synthetic peptide
  Seed: KTRIAYERM
KTRIAYERL

SEQ ID NO: 47167 - protein, 9 aa, Artificial Sequence
  Description of Artificial Sequence: Synthetic peptide
  Seed: KTRIAYERM
KTRIAYERK

SEQ ID NO: 47168 - protein, 9 aa, Artificial Sequence
  Description of Artificial Sequence: Synthetic peptide
  Seed: KTRIAYERM
KTRIAYERF

SEQ ID NO: 47169 - protein, 9 aa, Artificial Sequence
  Description of Artificial Sequence: Synthetic peptide
  Seed: KTRIAYERM
KTRIAYERP

SEQ ID NO: 47170 - protein, 9 aa, Artificial Sequence
  Description of Artificial Sequence: Synthetic peptide
  Seed: KTRIAYERM
KTRIAYERS

SEQ ID NO: 47171 - protein, 9 aa, Artificial Sequence
  Description of Artificial Sequence: Synthetic peptide
  Seed: KTRIAYERM
KTRIAYERT

SEQ ID NO: 47172 - protein, 9 aa, Artificial Sequence
  Description of Artificial Sequence: Synthetic peptide
  Seed: KTRIAYERM
KTRIAYERW

SEQ ID NO: 47173 - protein, 9 aa, Artificial Sequence
  Description of Artificial Sequence: Synthetic peptide
  Seed: KTRIAYERM
KSRIAYERS

SEQ ID NO: 47174 - protein, 9 aa, Artificial Sequence
  Description of Artificial Sequence: Synthetic peptide
  Seed: KTRIAYERM
KSRIAYERP

SEQ ID NO: 47175 - protein, 9 aa, Artificial Sequence
  Description of Artificial Sequence: Synthetic peptide
  Seed: KTRIAYERM
KSRIAYERF

SEQ ID NO: 47176 - protein, 9 aa, Artificial Sequence
  Description of Artificial Sequence: Synthetic peptide
  Seed: KTRIAYERM
KSRIAYERM

SEQ ID NO: 47177 - protein, 9 aa, Artificial Sequence
  Description of Artificial Sequence: Synthetic peptide
  Seed: KTRIAYERM
KFRIAYERK

SEQ ID NO: 47178 - protein, 9 aa, Artificial Sequence
  Description of Artificial Sequence: Synthetic peptide
  Seed: KTRIAYERM
KFRIAYERM

SEQ ID NO: 47179 - protein, 9 aa, Artificial Sequence
  Description of Artificial Sequence: Synthetic peptide
  Seed: KTRIAYERM
KFRIAYERF

SEQ ID NO: 47180 - protein, 9 aa, Artificial Sequence
  Description of Artificial Sequence: Synthetic peptide
  Seed: KTRIAYERM
KFRIAYERP

SEQ ID NO: 47181 - protein, 9 aa, Artificial Sequence
  Description of Artificial Sequence: Synthetic peptide
  Seed: KTRIAYERM
KFRIAYERS

SEQ ID NO: 47182 - protein, 9 aa, Artificial Sequence
  Description of Artificial Sequence: Synthetic peptide
  Seed: KTRIAYERM
KFRIAYERT

SEQ ID NO: 47183 - protein, 9 aa, Artificial Sequence
  Description of Artificial Sequence: Synthetic peptide
  Seed: KTRIAYERM
KFRIAYERY

SEQ ID NO: 47184 - protein, 9 aa, Artificial Sequence
  Description of Artificial Sequence: Synthetic peptide
  Seed: KTRIAYERM
KFRIAYERV

SEQ ID NO: 47185 - protein, 9 aa, Artificial Sequence
  Description of Artificial Sequence: Synthetic peptide
  Seed: KTRIAYERM
KSRIAYERA

SEQ ID NO: 47186 - protein, 9 aa, Artificial Sequence
  Description of Artificial Sequence: Synthetic peptide
  Seed: KTRIAYERM
KSRIAYERR

SEQ ID NO: 47187 - protein, 9 aa, Artificial Sequence
  Description of Artificial Sequence: Synthetic peptide
  Seed: KTRIAYERM
KSRIAYERN

SEQ ID NO: 47188 - protein, 9 aa, Artificial Sequence
  Description of Artificial Sequence: Synthetic peptide
  Seed: KTRIAYERM
KSRIAYERC

SEQ ID NO: 47189 - protein, 9 aa, Artificial Sequence
  Description of Artificial Sequence: Synthetic peptide
  Seed: KTRIAYERM
KSRIAYERQ

SEQ ID NO: 47190 - protein, 9 aa, Artificial Sequence
  Description of Artificial Sequence: Synthetic peptide
  Seed: KTRIAYERM
KSRIAYERE

SEQ ID NO: 47191 - protein, 9 aa, Artificial Sequence
  Description of Artificial Sequence: Synthetic peptide
  Seed: KTRIAYERM
KSRIAYERG

SEQ ID NO: 47192 - protein, 9 aa, Artificial Sequence
  Description of Artificial Sequence: Synthetic peptide
  Seed: KTRIAYERM
KSRIAYERH

SEQ ID NO: 47193 - protein, 9 aa, Artificial Sequence
  Description of Artificial Sequence: Synthetic peptide
  Seed: KTRIAYERM
KSRIAYERI

SEQ ID NO: 47194 - protein, 9 aa, Artificial Sequence
  Description of Artificial Sequence: Synthetic peptide
  Seed: KTRIAYERM
KSRIAYERL

SEQ ID NO: 47195 - protein, 9 aa, Artificial Sequence
  Description of Artificial Sequence: Synthetic peptide
  Seed: KTRIAYERM
KSRIAYERK

SEQ ID NO: 47196 - protein, 9 aa, Artificial Sequence
  Description of Artificial Sequence: Synthetic peptide
  Seed: KTRIAYERM
KTRIAYERY

SEQ ID NO: 47197 - protein, 9 aa, Artificial Sequence
  Description of Artificial Sequence: Synthetic peptide
  Seed: KTRIAYERM
KWRIAYERA

SEQ ID NO: 47198 - protein, 9 aa, Artificial Sequence
  Description of Artificial Sequence: Synthetic peptide
  Seed: KTRIAYERM
KNRIAYERK

SEQ ID NO: 47199 - protein, 9 aa, Artificial Sequence
  Description of Artificial Sequence: Synthetic peptide
  Seed: KTRIAYERM
KVRIAYERH

SEQ ID NO: 47200 - protein, 9 aa, Artificial Sequence
  Description of Artificial Sequence: Synthetic peptide
  Seed: KTRIAYERM
KYRIAYERY

SEQ ID NO: 47201 - protein, 9 aa, Artificial Sequence
  Description of Artificial Sequence: Synthetic peptide
  Seed: KTRIAYERM
KYRIAYERV

SEQ ID NO: 47202 - protein, 9 aa, Artificial Sequence
  Description of Artificial Sequence: Synthetic peptide
  Seed: KTRIAYERM
KVRIAYERA

SEQ ID NO: 47203 - protein, 9 aa, Artificial Sequence
  Description of Artificial Sequence: Synthetic peptide
  Seed: KTRIAYERM
KVRIAYERR

SEQ ID NO: 47204 - protein, 9 aa, Artificial Sequence
  Description of Artificial Sequence: Synthetic peptide
  Seed: KTRIAYERM
KVRIAYERN

SEQ ID NO: 47205 - protein, 9 aa, Artificial Sequence
  Description of Artificial Sequence: Synthetic peptide
  Seed: KTRIAYERM
KVRIAYERC

SEQ ID NO: 47206 - protein, 9 aa, Artificial Sequence
  Description of Artificial Sequence: Synthetic peptide
  Seed: KTRIAYERM
KVRIAYERQ

SEQ ID NO: 47207 - protein, 9 aa, Artificial Sequence
  Description of Artificial Sequence: Synthetic peptide
  Seed: KTRIAYERM
KVRIAYERE

SEQ ID NO: 47208 - protein, 9 aa, Artificial Sequence
  Description of Artificial Sequence: Synthetic peptide
  Seed: KTRIAYERM
KVRIAYERG

SEQ ID NO: 47209 - protein, 9 aa, Artificial Sequence
  Description of Artificial Sequence: Synthetic peptide
  Seed: KTRIAYERM
KVRIAYERI

SEQ ID NO: 47210 - protein, 9 aa, Artificial Sequence
  Description of Artificial Sequence: Synthetic peptide
  Seed: KTRIAYERM
KWRIAYERR

SEQ ID NO: 47211 - protein, 9 aa, Artificial Sequence
  Description of Artificial Sequence: Synthetic peptide
  Seed: KTRIAYERM
KVRIAYERL

SEQ ID NO: 47212 - protein, 9 aa, Artificial Sequence
  Description of Artificial Sequence: Synthetic peptide
  Seed: KTRIAYERM
KVRIAYERK

SEQ ID NO: 47213 - protein, 9 aa, Artificial Sequence
  Description of Artificial Sequence: Synthetic peptide
  Seed: KTRIAYERM
KVRIAYERM

SEQ ID NO: 47214 - protein, 9 aa, Artificial Sequence
  Description of Artificial Sequence: Synthetic peptide
  Seed: KTRIAYERM
KVRIAYERF

SEQ ID NO: 47215 - protein, 9 aa, Artificial Sequence
  Description of Artificial Sequence: Synthetic peptide
  Seed: KTRIAYERM
KVRIAYERP

SEQ ID NO: 47216 - protein, 9 aa, Artificial Sequence
  Description of Artificial Sequence: Synthetic peptide
  Seed: KTRIAYERM
KVRIAYERS

SEQ ID NO: 47217 - protein, 9 aa, Artificial Sequence
  Description of Artificial Sequence: Synthetic peptide
  Seed: KTRIAYERM
KVRIAYERT

SEQ ID NO: 47218 - protein, 9 aa, Artificial Sequence
  Description of Artificial Sequence: Synthetic peptide
  Seed: KTRIAYERM
KVRIAYERW

SEQ ID NO: 47219 - protein, 9 aa, Artificial Sequence
  Description of Artificial Sequence: Synthetic peptide
  Seed: KTRIAYERM
KVRIAYERY

SEQ ID NO: 47220 - protein, 9 aa, Artificial Sequence
  Description of Artificial Sequence: Synthetic peptide
  Seed: KTRIAYERM
KYRIAYERT

SEQ ID NO: 47221 - protein, 9 aa, Artificial Sequence
  Description of Artificial Sequence: Synthetic peptide
  Seed: KTRIAYERM
KYRIAYERS

SEQ ID NO: 47222 - protein, 9 aa, Artificial Sequence
  Description of Artificial Sequence: Synthetic peptide
  Seed: KTRIAYERM
KYRIAYERP

SEQ ID NO: 47223 - protein, 9 aa, Artificial Sequence
  Description of Artificial Sequence: Synthetic peptide
  Seed: KTRIAYERM
KYRIAYERM

SEQ ID NO: 47224 - protein, 9 aa, Artificial Sequence
  Description of Artificial Sequence: Synthetic peptide
  Seed: KTRIAYERM
KWRIAYERG

SEQ ID NO: 47225 - protein, 9 aa, Artificial Sequence
  Description of Artificial Sequence: Synthetic peptide
  Seed: KTRIAYERM
KWRIAYERI

SEQ ID NO: 47226 - protein, 9 aa, Artificial Sequence
  Description of Artificial Sequence: Synthetic peptide
  Seed: KTRIAYERM
KWRIAYERL

SEQ ID NO: 47227 - protein, 9 aa, Artificial Sequence
  Description of Artificial Sequence: Synthetic peptide
  Seed: KTRIAYERM
KWRIAYERK

SEQ ID NO: 47228 - protein, 9 aa, Artificial Sequence
  Description of Artificial Sequence: Synthetic peptide
  Seed: KTRIAYERM
KWRIAYERM

SEQ ID NO: 47229 - protein, 9 aa, Artificial Sequence
  Description of Artificial Sequence: Synthetic peptide
  Seed: KTRIAYERM
KWRIAYERS

SEQ ID NO: 47230 - protein, 9 aa, Artificial Sequence
  Description of Artificial Sequence: Synthetic peptide
  Seed: KTRIAYERM
KWRIAYERT

SEQ ID NO: 47231 - protein, 9 aa, Artificial Sequence
  Description of Artificial Sequence: Synthetic peptide
  Seed: KTRIAYERM
KWRIAYERY

SEQ ID NO: 47232 - protein, 9 aa, Artificial Sequence
  Description of Artificial Sequence: Synthetic peptide
  Seed: KTRIAYERM
KWRIAYERV

SEQ ID NO: 47233 - protein, 9 aa, Artificial Sequence
  Description of Artificial Sequence: Synthetic peptide
  Seed: KTRIAYERM
KYRIAYERA

SEQ ID NO: 47234 - protein, 9 aa, Artificial Sequence
  Description of Artificial Sequence: Synthetic peptide
  Seed: KTRIAYERM
KYRIAYERR

SEQ ID NO: 47235 - protein, 9 aa, Artificial Sequence
  Description of Artificial Sequence: Synthetic peptide
  Seed: KTRIAYERM
KYRIAYERN

SEQ ID NO: 47236 - protein, 9 aa, Artificial Sequence
  Description of Artificial Sequence: Synthetic peptide
  Seed: KTRIAYERM
KYRIAYERC

SEQ ID NO: 47237 - protein, 9 aa, Artificial Sequence
  Description of Artificial Sequence: Synthetic peptide
  Seed: KTRIAYERM
KYRIAYERQ

SEQ ID NO: 47238 - protein, 9 aa, Artificial Sequence
  Description of Artificial Sequence: Synthetic peptide
  Seed: KTRIAYERM
KYRIAYERE

SEQ ID NO: 47239 - protein, 9 aa, Artificial Sequence
  Description of Artificial Sequence: Synthetic peptide
  Seed: KTRIAYERM
KYRIAYERG

SEQ ID NO: 47240 - protein, 9 aa, Artificial Sequence
  Description of Artificial Sequence: Synthetic peptide
  Seed: KTRIAYERM
KYRIAYERI

SEQ ID NO: 47241 - protein, 9 aa, Artificial Sequence
  Description of Artificial Sequence: Synthetic peptide
  Seed: KTRIAYERM
KYRIAYERL

SEQ ID NO: 47242 - protein, 9 aa, Artificial Sequence
  Description of Artificial Sequence: Synthetic peptide
  Seed: KTRIAYERM
KYRIAYERK

SEQ ID NO: 47243 - protein, 9 aa, Artificial Sequence
  Description of Artificial Sequence: Synthetic peptide
  Seed: KTRIAYERM
KFRIAYERL

SEQ ID NO: 47244 - protein, 9 aa, Artificial Sequence
  Description of Artificial Sequence: Synthetic peptide
  Seed: KTRIAYERM
KFRIAYERI

SEQ ID NO: 47245 - protein, 9 aa, Artificial Sequence
  Description of Artificial Sequence: Synthetic peptide
  Seed: KTRIAYERM
KFRIAYERG

SEQ ID NO: 47246 - protein, 9 aa, Artificial Sequence
  Description of Artificial Sequence: Synthetic peptide
  Seed: KTRIAYERM
KIRIAYERQ

SEQ ID NO: 47247 - protein, 9 aa, Artificial Sequence
  Description of Artificial Sequence: Synthetic peptide
  Seed: KTRIAYERM
KGRIAYERS

SEQ ID NO: 47248 - protein, 9 aa, Artificial Sequence
  Description of Artificial Sequence: Synthetic peptide
  Seed: KTRIAYERM
KGRIAYERW

SEQ ID NO: 47249 - protein, 9 aa, Artificial Sequence
  Description of Artificial Sequence: Synthetic peptide
  Seed: KTRIAYERM
KGRIAYERY

SEQ ID NO: 47250 - protein, 9 aa, Artificial Sequence
  Description of Artificial Sequence: Synthetic peptide
  Seed: KTRIAYERM
KGRIAYERV

SEQ ID NO: 47251 - protein, 9 aa, Artificial Sequence
  Description of Artificial Sequence: Synthetic peptide
  Seed: KTRIAYERM
KHRIAYERK

SEQ ID NO: 47252 - protein, 9 aa, Artificial Sequence
  Description of Artificial Sequence: Synthetic peptide
  Seed: KTRIAYERM
KIRIAYERA

SEQ ID NO: 47253 - protein, 9 aa, Artificial Sequence
  Description of Artificial Sequence: Synthetic peptide
  Seed: KTRIAYERM
KIRIAYERR

SEQ ID NO: 47254 - protein, 9 aa, Artificial Sequence
  Description of Artificial Sequence: Synthetic peptide
  Seed: KTRIAYERM
KIRIAYERN

SEQ ID NO: 47255 - protein, 9 aa, Artificial Sequence
  Description of Artificial Sequence: Synthetic peptide
  Seed: KTRIAYERM
KIRIAYERC

SEQ ID NO: 47256 - protein, 9 aa, Artificial Sequence
  Description of Artificial Sequence: Synthetic peptide
  Seed: KTRIAYERM
KIRIAYERE

SEQ ID NO: 47257 - protein, 9 aa, Artificial Sequence
  Description of Artificial Sequence: Synthetic peptide
  Seed: KTRIAYERM
KFRIAYERE

SEQ ID NO: 47258 - protein, 9 aa, Artificial Sequence
  Description of Artificial Sequence: Synthetic peptide
  Seed: KTRIAYERM
KIRIAYERG

SEQ ID NO: 47259 - protein, 9 aa, Artificial Sequence
  Description of Artificial Sequence: Synthetic peptide
  Seed: KTRIAYERM
KIRIAYERH

SEQ ID NO: 47260 - protein, 9 aa, Artificial Sequence
  Description of Artificial Sequence: Synthetic peptide
  Seed: KTRIAYERM
KIRIAYERI

SEQ ID NO: 47261 - protein, 9 aa, Artificial Sequence
  Description of Artificial Sequence: Synthetic peptide
  Seed: KTRIAYERM
KIRIAYERL

SEQ ID NO: 47262 - protein, 9 aa, Artificial Sequence
  Description of Artificial Sequence: Synthetic peptide
  Seed: KTRIAYERM
KIRIAYERK

SEQ ID NO: 47263 - protein, 9 aa, Artificial Sequence
  Description of Artificial Sequence: Synthetic peptide
  Seed: KTRIAYERM
KIRIAYERM

SEQ ID NO: 47264 - protein, 9 aa, Artificial Sequence
  Description of Artificial Sequence: Synthetic peptide
  Seed: KTRIAYERM
KIRIAYERF

SEQ ID NO: 47265 - protein, 9 aa, Artificial Sequence
  Description of Artificial Sequence: Synthetic peptide
  Seed: KTRIAYERM
KIRIAYERP

SEQ ID NO: 47266 - protein, 9 aa, Artificial Sequence
  Description of Artificial Sequence: Synthetic peptide
  Seed: KTRIAYERM
KIRIAYERS

SEQ ID NO: 47267 - protein, 9 aa, Artificial Sequence
  Description of Artificial Sequence: Synthetic peptide
  Seed: KTRIAYERM
KGRIAYERM

SEQ ID NO: 47268 - protein, 9 aa, Artificial Sequence
  Description of Artificial Sequence: Synthetic peptide
  Seed: KTRIAYERM
KGRIAYERK

SEQ ID NO: 47269 - protein, 9 aa, Artificial Sequence
  Description of Artificial Sequence: Synthetic peptide
  Seed: KTRIAYERM
KGRIAYERL

SEQ ID NO: 47270 - protein, 9 aa, Artificial Sequence
  Description of Artificial Sequence: Synthetic peptide
  Seed: KTRIAYERM
KGRIAYERI

SEQ ID NO: 47271 - protein, 9 aa, Artificial Sequence
  Description of Artificial Sequence: Synthetic peptide
  Seed: KTRIAYERM
KNRIAYERM

SEQ ID NO: 47272 - protein, 9 aa, Artificial Sequence
  Description of Artificial Sequence: Synthetic peptide
  Seed: KTRIAYERM
KNRIAYERV

SEQ ID NO: 47273 - protein, 9 aa, Artificial Sequence
  Description of Artificial Sequence: Synthetic peptide
  Seed: KTRIAYERM
KCRIAYERA

SEQ ID NO: 47274 - protein, 9 aa, Artificial Sequence
  Description of Artificial Sequence: Synthetic peptide
  Seed: KTRIAYERM
KCRIAYERK

SEQ ID NO: 47275 - protein, 9 aa, Artificial Sequence
  Description of Artificial Sequence: Synthetic peptide
  Seed: KTRIAYERM
KCRIAYERW

SEQ ID NO: 47276 - protein, 9 aa, Artificial Sequence
  Description of Artificial Sequence: Synthetic peptide
  Seed: KTRIAYERM
KQRIAYERA

SEQ ID NO: 47277 - protein, 9 aa, Artificial Sequence
  Description of Artificial Sequence: Synthetic peptide
  Seed: KTRIAYERM
KQRIAYERR

SEQ ID NO: 47278 - protein, 9 aa, Artificial Sequence
  Description of Artificial Sequence: Synthetic peptide
  Seed: KTRIAYERM
KQRIAYERG

SEQ ID NO: 47279 - protein, 9 aa, Artificial Sequence
  Description of Artificial Sequence: Synthetic peptide
  Seed: KTRIAYERM
KQRIAYERI

SEQ ID NO: 47280 - protein, 9 aa, Artificial Sequence
  Description of Artificial Sequence: Synthetic peptide
  Seed: KTRIAYERM
KQRIAYERL

SEQ ID NO: 47281 - protein, 9 aa, Artificial Sequence
  Description of Artificial Sequence: Synthetic peptide
  Seed: KTRIAYERM
KQRIAYERK

SEQ ID NO: 47282 - protein, 9 aa, Artificial Sequence
  Description of Artificial Sequence: Synthetic peptide
  Seed: KTRIAYERM
KQRIAYERM

SEQ ID NO: 47283 - protein, 9 aa, Artificial Sequence
  Description of Artificial Sequence: Synthetic peptide
  Seed: KTRIAYERM
KQRIAYERS

SEQ ID NO: 47284 - protein, 9 aa, Artificial Sequence
  Description of Artificial Sequence: Synthetic peptide
  Seed: KTRIAYERM
KQRIAYERT

SEQ ID NO: 47285 - protein, 9 aa, Artificial Sequence
  Description of Artificial Sequence: Synthetic peptide
  Seed: KTRIAYERM
KQRIAYERW

SEQ ID NO: 47286 - protein, 9 aa, Artificial Sequence
  Description of Artificial Sequence: Synthetic peptide
  Seed: KTRIAYERM
KQRIAYERY

SEQ ID NO: 47287 - protein, 9 aa, Artificial Sequence
  Description of Artificial Sequence: Synthetic peptide
  Seed: KTRIAYERM
KQRIAYERV

SEQ ID NO: 47288 - protein, 9 aa, Artificial Sequence
  Description of Artificial Sequence: Synthetic peptide
  Seed: KTRIAYERM
KGRIAYERA

SEQ ID NO: 47289 - protein, 9 aa, Artificial Sequence
  Description of Artificial Sequence: Synthetic peptide
  Seed: KTRIAYERM
KGRIAYERR

SEQ ID NO: 47290 - protein, 9 aa, Artificial Sequence
  Description of Artificial Sequence: Synthetic peptide
  Seed: KTRIAYERM
KIRIAYERT

SEQ ID NO: 47291 - protein, 9 aa, Artificial Sequence
  Description of Artificial Sequence: Synthetic peptide
  Seed: KTRIAYERM
KIRIAYERW

SEQ ID NO: 47292 - protein, 9 aa, Artificial Sequence
  Description of Artificial Sequence: Synthetic peptide
  Seed: KTRIAYERM
KIRIAYERY

SEQ ID NO: 47293 - protein, 9 aa, Artificial Sequence
  Description of Artificial Sequence: Synthetic peptide
  Seed: KTRIAYERM
KMRIAYERC

SEQ ID NO: 47294 - protein, 9 aa, Artificial Sequence
  Description of Artificial Sequence: Synthetic peptide
  Seed: KTRIAYERM
KMRIAYERE

SEQ ID NO: 47295 - protein, 9 aa, Artificial Sequence
  Description of Artificial Sequence: Synthetic peptide
  Seed: KTRIAYERM
KMRIAYERG

SEQ ID NO: 47296 - protein, 9 aa, Artificial Sequence
  Description of Artificial Sequence: Synthetic peptide
  Seed: KTRIAYERM
KMRIAYERH

SEQ ID NO: 47297 - protein, 9 aa, Artificial Sequence
  Description of Artificial Sequence: Synthetic peptide
  Seed: KTRIAYERM
KMRIAYERI

SEQ ID NO: 47298 - protein, 9 aa, Artificial Sequence
  Description of Artificial Sequence: Synthetic peptide
  Seed: KTRIAYERM
KMRIAYERL

SEQ ID NO: 47299 - protein, 9 aa, Artificial Sequence
  Description of Artificial Sequence: Synthetic peptide
  Seed: KTRIAYERM
KMRIAYERK

SEQ ID NO: 47300 - protein, 9 aa, Artificial Sequence
  Description of Artificial Sequence: Synthetic peptide
  Seed: KTRIAYERM
KMRIAYERM

SEQ ID NO: 47301 - protein, 9 aa, Artificial Sequence
  Description of Artificial Sequence: Synthetic peptide
  Seed: KTRIAYERM
KMRIAYERF

SEQ ID NO: 47302 - protein, 9 aa, Artificial Sequence
  Description of Artificial Sequence: Synthetic peptide
  Seed: KTRIAYERM
KMRIAYERP

SEQ ID NO: 47303 - protein, 9 aa, Artificial Sequence
  Description of Artificial Sequence: Synthetic peptide
  Seed: KTRIAYERM
KMRIAYERS

SEQ ID NO: 47304 - protein, 9 aa, Artificial Sequence
  Description of Artificial Sequence: Synthetic peptide
  Seed: KTRIAYERM
KMRIAYERT

SEQ ID NO: 47305 - protein, 9 aa, Artificial Sequence
  Description of Artificial Sequence: Synthetic peptide
  Seed: KTRIAYERM
KMRIAYERW

SEQ ID NO: 47306 - protein, 9 aa, Artificial Sequence
  Description of Artificial Sequence: Synthetic peptide
  Seed: KTRIAYERM
KMRIAYERY

SEQ ID NO: 47307 - protein, 9 aa, Artificial Sequence
  Description of Artificial Sequence: Synthetic peptide
  Seed: KTRIAYERM
KMRIAYERV

SEQ ID NO: 47308 - protein, 9 aa, Artificial Sequence
  Description of Artificial Sequence: Synthetic peptide
  Seed: KTRIAYERM
KFRIAYERA

SEQ ID NO: 47309 - protein, 9 aa, Artificial Sequence
  Description of Artificial Sequence: Synthetic peptide
  Seed: KTRIAYERM
KFRIAYERR

SEQ ID NO: 47310 - protein, 9 aa, Artificial Sequence
  Description of Artificial Sequence: Synthetic peptide
  Seed: KTRIAYERM
KFRIAYERN

SEQ ID NO: 47311 - protein, 9 aa, Artificial Sequence
  Description of Artificial Sequence: Synthetic peptide
  Seed: KTRIAYERM
KFRIAYERC

SEQ ID NO: 47312 - protein, 9 aa, Artificial Sequence
  Description of Artificial Sequence: Synthetic peptide
  Seed: KTRIAYERM
KFRIAYERQ

SEQ ID NO: 47313 - protein, 9 aa, Artificial Sequence
  Description of Artificial Sequence: Synthetic peptide
  Seed: KTRIAYERM
KMRIAYERQ

SEQ ID NO: 47314 - protein, 9 aa, Artificial Sequence
  Description of Artificial Sequence: Synthetic peptide
  Seed: KTRIAYERM
KMRIAYERN

SEQ ID NO: 47315 - protein, 9 aa, Artificial Sequence
  Description of Artificial Sequence: Synthetic peptide
  Seed: KTRIAYERM
KIRIAYERV

SEQ ID NO: 47316 - protein, 9 aa, Artificial Sequence
  Description of Artificial Sequence: Synthetic peptide
  Seed: KTRIAYERM
KMRIAYERR

SEQ ID NO: 47317 - protein, 9 aa, Artificial Sequence
  Description of Artificial Sequence: Synthetic peptide
  Seed: KTRIAYERM
KLRIAYERA

SEQ ID NO: 47318 - protein, 9 aa, Artificial Sequence
  Description of Artificial Sequence: Synthetic peptide
  Seed: KTRIAYERM
KLRIAYERR

SEQ ID NO: 47319 - protein, 9 aa, Artificial Sequence
  Description of Artificial Sequence: Synthetic peptide
  Seed: KTRIAYERM
KLRIAYERN

SEQ ID NO: 47320 - protein, 9 aa, Artificial Sequence
  Description of Artificial Sequence: Synthetic peptide
  Seed: KTRIAYERM
KLRIAYERC

SEQ ID NO: 47321 - protein, 9 aa, Artificial Sequence
  Description of Artificial Sequence: Synthetic peptide
  Seed: KTRIAYERM
KLRIAYERQ

SEQ ID NO: 47322 - protein, 9 aa, Artificial Sequence
  Description of Artificial Sequence: Synthetic peptide
  Seed: KTRIAYERM
KLRIAYERG

SEQ ID NO: 47323 - protein, 9 aa, Artificial Sequence
  Description of Artificial Sequence: Synthetic peptide
  Seed: KTRIAYERM
KLRIAYERI

SEQ ID NO: 47324 - protein, 9 aa, Artificial Sequence
  Description of Artificial Sequence: Synthetic peptide
  Seed: KTRIAYERM
KLRIAYERL

SEQ ID NO: 47325 - protein, 9 aa, Artificial Sequence
  Description of Artificial Sequence: Synthetic peptide
  Seed: KTRIAYERM
KLRIAYERK

SEQ ID NO: 47326 - protein, 9 aa, Artificial Sequence
  Description of Artificial Sequence: Synthetic peptide
  Seed: KTRIAYERM
KLRIAYERM

SEQ ID NO: 47327 - protein, 9 aa, Artificial Sequence
  Description of Artificial Sequence: Synthetic peptide
  Seed: KTRIAYERM
KLRIAYERF

SEQ ID NO: 47328 - protein, 9 aa, Artificial Sequence
  Description of Artificial Sequence: Synthetic peptide
  Seed: KTRIAYERM
KLRIAYERP

SEQ ID NO: 47329 - protein, 9 aa, Artificial Sequence
  Description of Artificial Sequence: Synthetic peptide
  Seed: KTRIAYERM
KLRIAYERS

SEQ ID NO: 47330 - protein, 9 aa, Artificial Sequence
  Description of Artificial Sequence: Synthetic peptide
  Seed: KTRIAYERM
KLRIAYERT

SEQ ID NO: 47331 - protein, 9 aa, Artificial Sequence
  Description of Artificial Sequence: Synthetic peptide
  Seed: KTRIAYERM
KLRIAYERW

SEQ ID NO: 47332 - protein, 9 aa, Artificial Sequence
  Description of Artificial Sequence: Synthetic peptide
  Seed: KTRIAYERM
KLRIAYERY

SEQ ID NO: 47333 - protein, 9 aa, Artificial Sequence
  Description of Artificial Sequence: Synthetic peptide
  Seed: KTRIAYERM
KLRIAYERV

SEQ ID NO: 47334 - protein, 9 aa, Artificial Sequence
  Description of Artificial Sequence: Synthetic peptide
  Seed: KTRIAYERM
KKRIAYERK

SEQ ID NO: 47335 - protein, 9 aa, Artificial Sequence
  Description of Artificial Sequence: Synthetic peptide
  Seed: KTRIAYERM
KMRIAYERA

SEQ ID NO: 47336 - protein, 9 aa, Artificial Sequence
  Description of Artificial Sequence: Synthetic peptide
  Seed: KTRSAYERM
KSRSAYERP

SEQ ID NO: 47337 - protein, 9 aa, Artificial Sequence
  Description of Artificial Sequence: Synthetic peptide
  Seed: KTRSAYERM
KSRSAYERS

SEQ ID NO: 47338 - protein, 9 aa, Artificial Sequence
  Description of Artificial Sequence: Synthetic peptide
  Seed: KTRSAYERM
KSRSAYERT

SEQ ID NO: 47339 - protein, 9 aa, Artificial Sequence
  Description of Artificial Sequence: Synthetic peptide
  Seed: KWMRELVLY
KQMRELVLL

SEQ ID NO: 47340 - protein, 9 aa, Artificial Sequence
  Description of Artificial Sequence: Synthetic peptide
  Seed: KWMRELVLY
KNMRELVLF

SEQ ID NO: 47341 - protein, 9 aa, Artificial Sequence
  Description of Artificial Sequence: Synthetic peptide
  Seed: KWMRELVLY
KNMRELVLY

SEQ ID NO: 47342 - protein, 9 aa, Artificial Sequence
  Description of Artificial Sequence: Synthetic peptide
  Seed: KWMRELVLY
KDMRELVLY

SEQ ID NO: 47343 - protein, 9 aa, Artificial Sequence
  Description of Artificial Sequence: Synthetic peptide
  Seed: KWMRELVLY
KCMRELVLR

SEQ ID NO: 47344 - protein, 9 aa, Artificial Sequence
  Description of Artificial Sequence: Synthetic peptide
  Seed: KWMRELVLY
KCMRELVLK

SEQ ID NO: 47345 - protein, 9 aa, Artificial Sequence
  Description of Artificial Sequence: Synthetic peptide
  Seed: KWMRELVLY
KCMRELVLY

SEQ ID NO: 47346 - protein, 9 aa, Artificial Sequence
  Description of Artificial Sequence: Synthetic peptide
  Seed: KWMRELVLY
KQMRELVLR

SEQ ID NO: 47347 - protein, 9 aa, Artificial Sequence
  Description of Artificial Sequence: Synthetic peptide
  Seed: KWMRELVLY
KQMRELVLH

SEQ ID NO: 47348 - protein, 9 aa, Artificial Sequence
  Description of Artificial Sequence: Synthetic peptide
  Seed: KWMRELVLY
KQMRELVLI

SEQ ID NO: 47349 - protein, 9 aa, Artificial Sequence
  Description of Artificial Sequence: Synthetic peptide
  Seed: KWMRELVLY
KQMRELVLK

SEQ ID NO: 47350 - protein, 9 aa, Artificial Sequence
  Description of Artificial Sequence: Synthetic peptide
  Seed: KWMRELVLY
KGMRELVLY

SEQ ID NO: 47351 - protein, 9 aa, Artificial Sequence
  Description of Artificial Sequence: Synthetic peptide
  Seed: KWMRELVLY
KQMRELVLM

SEQ ID NO: 47352 - protein, 9 aa, Artificial Sequence
  Description of Artificial Sequence: Synthetic peptide
  Seed: KWMRELVLY
KQMRELVLF

SEQ ID NO: 47353 - protein, 9 aa, Artificial Sequence
  Description of Artificial Sequence: Synthetic peptide
  Seed: KWMRELVLY
KQMRELVLW

SEQ ID NO: 47354 - protein, 9 aa, Artificial Sequence
  Description of Artificial Sequence: Synthetic peptide
  Seed: KWMRELVLY
KQMRELVLY

SEQ ID NO: 47355 - protein, 9 aa, Artificial Sequence
  Description of Artificial Sequence: Synthetic peptide
  Seed: KWMRELVLY
KQMRELVLV

SEQ ID NO: 47356 - protein, 9 aa, Artificial Sequence
  Description of Artificial Sequence: Synthetic peptide
  Seed: KWMRELVLY
KEMRELVLR

SEQ ID NO: 47357 - protein, 9 aa, Artificial Sequence
  Description of Artificial Sequence: Synthetic peptide
  Seed: KWMRELVLY
KEMRELVLY

SEQ ID NO: 47358 - protein, 9 aa, Artificial Sequence
  Description of Artificial Sequence: Synthetic peptide
  Seed: KWMRELVLY
KGMRELVLR

SEQ ID NO: 47359 - protein, 9 aa, Artificial Sequence
  Description of Artificial Sequence: Synthetic peptide
  Seed: KWMRELVLY
KGMRELVLK

SEQ ID NO: 47360 - protein, 9 aa, Artificial Sequence
  Description of Artificial Sequence: Synthetic peptide
  Seed: KWMRELVLY
KNMRELVLK

SEQ ID NO: 47361 - protein, 9 aa, Artificial Sequence
  Description of Artificial Sequence: Synthetic peptide
  Seed: KWMRELVLY
KNMRELVLR

SEQ ID NO: 47362 - protein, 9 aa, Artificial Sequence
  Description of Artificial Sequence: Synthetic peptide
  Seed: KWMRELVLY
KRMRELVLY

SEQ ID NO: 47363 - protein, 9 aa, Artificial Sequence
  Description of Artificial Sequence: Synthetic peptide
  Seed: KWMRELVLY
KRMRELVLF

SEQ ID NO: 47364 - protein, 11 aa, Artificial Sequence
  Description of Artificial Sequence: Synthetic peptide
  Seed: KWMRELILYDK
KVMRELILYDR

SEQ ID NO: 47365 - protein, 11 aa, Artificial Sequence
  Description of Artificial Sequence: Synthetic peptide
  Seed: KWMRELILYDK
KVMRELILYDK

SEQ ID NO: 47366 - protein, 8 aa, Artificial Sequence
  Description of Artificial Sequence: Synthetic peptide
  Seed: KWMRELVL
KFMRELVF

SEQ ID NO: 47367 - protein, 8 aa, Artificial Sequence
  Description of Artificial Sequence: Synthetic peptide
  Seed: KWMRELVL
KFMRELVW

SEQ ID NO: 47368 - protein, 8 aa, Artificial Sequence
  Description of Artificial Sequence: Synthetic peptide
  Seed: KWMRELVL
KWMRELVI

SEQ ID NO: 47369 - protein, 8 aa, Artificial Sequence
  Description of Artificial Sequence: Synthetic peptide
  Seed: KWMRELVL
KWMRELVF

SEQ ID NO: 47370 - protein, 8 aa, Artificial Sequence
  Description of Artificial Sequence: Synthetic peptide
  Seed: KWMRELVL
KWMRELVW

SEQ ID NO: 47371 - protein, 8 aa, Artificial Sequence
  Description of Artificial Sequence: Synthetic peptide
  Seed: KWMRELVL
KYMRELVI

SEQ ID NO: 47372 - protein, 8 aa, Artificial Sequence
  Description of Artificial Sequence: Synthetic peptide
  Seed: KWMRELVL
KYMRELVL

SEQ ID NO: 47373 - protein, 8 aa, Artificial Sequence
  Description of Artificial Sequence: Synthetic peptide
  Seed: KWMRELVL
KYMRELVM

SEQ ID NO: 47374 - protein, 8 aa, Artificial Sequence
  Description of Artificial Sequence: Synthetic peptide
  Seed: KWMRELVL
KYMRELVF

SEQ ID NO: 47375 - protein, 8 aa, Artificial Sequence
  Description of Artificial Sequence: Synthetic peptide
  Seed: KWMRELVL
KYMRELVW

SEQ ID NO: 47376 - protein, 8 aa, Artificial Sequence
  Description of Artificial Sequence: Synthetic peptide
  Seed: KWMRELVL
KYMRELVV

SEQ ID NO: 47377 - protein, 9 aa, Artificial Sequence
  Description of Artificial Sequence: Synthetic peptide
  Seed: KWMRELVLY
KAMRELVLR

SEQ ID NO: 47378 - protein, 9 aa, Artificial Sequence
  Description of Artificial Sequence: Synthetic peptide
  Seed: KWMRELVLY
KAMRELVLK

SEQ ID NO: 47379 - protein, 9 aa, Artificial Sequence
  Description of Artificial Sequence: Synthetic peptide
  Seed: KWMRELVLY
KAMRELVLF

SEQ ID NO: 47380 - protein, 9 aa, Artificial Sequence
  Description of Artificial Sequence: Synthetic peptide
  Seed: KWMRELVLY
KAMRELVLW

SEQ ID NO: 47381 - protein, 9 aa, Artificial Sequence
  Description of Artificial Sequence: Synthetic peptide
  Seed: KWMRELVLY
KAMRELVLY

SEQ ID NO: 47382 - protein, 9 aa, Artificial Sequence
  Description of Artificial Sequence: Synthetic peptide
  Seed: KWMRELVLY
KRMRELVLR

SEQ ID NO: 47383 - protein, 9 aa, Artificial Sequence
  Description of Artificial Sequence: Synthetic peptide
  Seed: KWMRELVLY
KGMRELVLF

SEQ ID NO: 47384 - protein, 9 aa, Artificial Sequence
  Description of Artificial Sequence: Synthetic peptide
  Seed: KWMRELVLY
KHMRELVLR

SEQ ID NO: 47385 - protein, 9 aa, Artificial Sequence
  Description of Artificial Sequence: Synthetic peptide
  Seed: KWMRELVLY
KTMRELVLR

SEQ ID NO: 47386 - protein, 9 aa, Artificial Sequence
  Description of Artificial Sequence: Synthetic peptide
  Seed: KWMRELVLY
KFMRELVLM

SEQ ID NO: 47387 - protein, 9 aa, Artificial Sequence
  Description of Artificial Sequence: Synthetic peptide
  Seed: KWMRELVLY
KMMRELVLF

SEQ ID NO: 47388 - protein, 9 aa, Artificial Sequence
  Description of Artificial Sequence: Synthetic peptide
  Seed: KWMRELVLY
KMMRELVLW

SEQ ID NO: 47389 - protein, 9 aa, Artificial Sequence
  Description of Artificial Sequence: Synthetic peptide
  Seed: KWMRELVLY
KMMRELVLY

SEQ ID NO: 47390 - protein, 9 aa, Artificial Sequence
  Description of Artificial Sequence: Synthetic peptide
  Seed: KWMRELVLY
KMMRELVLV

SEQ ID NO: 47391 - protein, 9 aa, Artificial Sequence
  Description of Artificial Sequence: Synthetic peptide
  Seed: KWMRELVLY
KFMRELVLR

SEQ ID NO: 47392 - protein, 9 aa, Artificial Sequence
  Description of Artificial Sequence: Synthetic peptide
  Seed: KWMRELVLY
KFMRELVLH

SEQ ID NO: 47393 - protein, 9 aa, Artificial Sequence
  Description of Artificial Sequence: Synthetic peptide
  Seed: KWMRELVLY
KFMRELVLI

SEQ ID NO: 47394 - protein, 9 aa, Artificial Sequence
  Description of Artificial Sequence: Synthetic peptide
  Seed: KWMRELVLY
KFMRELVLL

SEQ ID NO: 47395 - protein, 9 aa, Artificial Sequence
  Description of Artificial Sequence: Synthetic peptide
  Seed: KWMRELVLY
KFMRELVLK

SEQ ID NO: 47396 - protein, 9 aa, Artificial Sequence
  Description of Artificial Sequence: Synthetic peptide
  Seed: KWMRELVLY
KFMRELVLF

SEQ ID NO: 47397 - protein, 9 aa, Artificial Sequence
  Description of Artificial Sequence: Synthetic peptide
  Seed: KWMRELVLY
KHMRELVLI

SEQ ID NO: 47398 - protein, 9 aa, Artificial Sequence
  Description of Artificial Sequence: Synthetic peptide
  Seed: KWMRELVLY
KFMRELVLW

SEQ ID NO: 47399 - protein, 9 aa, Artificial Sequence
  Description of Artificial Sequence: Synthetic peptide
  Seed: KWMRELVLY
KFMRELVLY

SEQ ID NO: 47400 - protein, 9 aa, Artificial Sequence
  Description of Artificial Sequence: Synthetic peptide
  Seed: KWMRELVLY
KFMRELVLV

SEQ ID NO: 47401 - protein, 9 aa, Artificial Sequence
  Description of Artificial Sequence: Synthetic peptide
  Seed: KWMRELVLY
KSMRELVLR

SEQ ID NO: 47402 - protein, 9 aa, Artificial Sequence
  Description of Artificial Sequence: Synthetic peptide
  Seed: KWMRELVLY
KSMRELVLH

SEQ ID NO: 47403 - protein, 9 aa, Artificial Sequence
  Description of Artificial Sequence: Synthetic peptide
  Seed: KWMRELVLY
KSMRELVLK

SEQ ID NO: 47404 - protein, 9 aa, Artificial Sequence
  Description of Artificial Sequence: Synthetic peptide
  Seed: KWMRELVLY
KSMRELVLM

SEQ ID NO: 47405 - protein, 9 aa, Artificial Sequence
  Description of Artificial Sequence: Synthetic peptide
  Seed: KWMRELVLY
KSMRELVLF

SEQ ID NO: 47406 - protein, 9 aa, Artificial Sequence
  Description of Artificial Sequence: Synthetic peptide
  Seed: KWMRELVLY
KSMRELVLW

SEQ ID NO: 47407 - protein, 9 aa, Artificial Sequence
  Description of Artificial Sequence: Synthetic peptide
  Seed: KWMRELVLY
KMMRELVLM

SEQ ID NO: 47408 - protein, 9 aa, Artificial Sequence
  Description of Artificial Sequence: Synthetic peptide
  Seed: KWMRELVLY
KMMRELVLK

SEQ ID NO: 47409 - protein, 9 aa, Artificial Sequence
  Description of Artificial Sequence: Synthetic peptide
  Seed: KWMRELVLY
KMMRELVLL

SEQ ID NO: 47410 - protein, 9 aa, Artificial Sequence
  Description of Artificial Sequence: Synthetic peptide
  Seed: KWMRELVLY
KMMRELVLI

SEQ ID NO: 47411 - protein, 9 aa, Artificial Sequence
  Description of Artificial Sequence: Synthetic peptide
  Seed: KWMRELVLY
KHMRELVLF

SEQ ID NO: 47412 - protein, 9 aa, Artificial Sequence
  Description of Artificial Sequence: Synthetic peptide
  Seed: KWMRELVLY
KHMRELVLW

SEQ ID NO: 47413 - protein, 9 aa, Artificial Sequence
  Description of Artificial Sequence: Synthetic peptide
  Seed: KWMRELVLY
KHMRELVLY

SEQ ID NO: 47414 - protein, 9 aa, Artificial Sequence
  Description of Artificial Sequence: Synthetic peptide
  Seed: KWMRELVLY
KIMRELVLR

SEQ ID NO: 47415 - protein, 9 aa, Artificial Sequence
  Description of Artificial Sequence: Synthetic peptide
  Seed: KWMRELVLY
KIMRELVLH

SEQ ID NO: 47416 - protein, 9 aa, Artificial Sequence
  Description of Artificial Sequence: Synthetic peptide
  Seed: KWMRELVLY
KIMRELVLK

SEQ ID NO: 47417 - protein, 9 aa, Artificial Sequence
  Description of Artificial Sequence: Synthetic peptide
  Seed: KWMRELVLY
KIMRELVLF

SEQ ID NO: 47418 - protein, 9 aa, Artificial Sequence
  Description of Artificial Sequence: Synthetic peptide
  Seed: KWMRELVLY
KIMRELVLW

SEQ ID NO: 47419 - protein, 9 aa, Artificial Sequence
  Description of Artificial Sequence: Synthetic peptide
  Seed: KWMRELVLY
KIMRELVLY

SEQ ID NO: 47420 - protein, 9 aa, Artificial Sequence
  Description of Artificial Sequence: Synthetic peptide
  Seed: KWMRELVLY
KLMRELVLR

SEQ ID NO: 47421 - protein, 9 aa, Artificial Sequence
  Description of Artificial Sequence: Synthetic peptide
  Seed: KWMRELVLY
KLMRELVLH

SEQ ID NO: 47422 - protein, 9 aa, Artificial Sequence
  Description of Artificial Sequence: Synthetic peptide
  Seed: KWMRELVLY
KLMRELVLK

SEQ ID NO: 47423 - protein, 9 aa, Artificial Sequence
  Description of Artificial Sequence: Synthetic peptide
  Seed: KWMRELVLY
KLMRELVLF

SEQ ID NO: 47424 - protein, 9 aa, Artificial Sequence
  Description of Artificial Sequence: Synthetic peptide
  Seed: KWMRELVLY
KLMRELVLW

SEQ ID NO: 47425 - protein, 9 aa, Artificial Sequence
  Description of Artificial Sequence: Synthetic peptide
  Seed: KWMRELVLY
KLMRELVLY

SEQ ID NO: 47426 - protein, 9 aa, Artificial Sequence
  Description of Artificial Sequence: Synthetic peptide
  Seed: KWMRELVLY
KKMRELVLR

SEQ ID NO: 47427 - protein, 9 aa, Artificial Sequence
  Description of Artificial Sequence: Synthetic peptide
  Seed: KWMRELVLY
KKMRELVLY

SEQ ID NO: 47428 - protein, 9 aa, Artificial Sequence
  Description of Artificial Sequence: Synthetic peptide
  Seed: KWMRELVLY
KMMRELVLR

SEQ ID NO: 47429 - protein, 9 aa, Artificial Sequence
  Description of Artificial Sequence: Synthetic peptide
  Seed: KWMRELVLY
KMMRELVLH

SEQ ID NO: 47430 - protein, 11 aa, Artificial Sequence
  Description of Artificial Sequence: Synthetic peptide
  Seed: KWMRELILYDK
KYMRELILYDK

SEQ ID NO: 47431 - protein, 11 aa, Artificial Sequence
  Description of Artificial Sequence: Synthetic peptide
  Seed: KWMRELILYDK
KYMRELILYDR

SEQ ID NO: 47432 - protein, 11 aa, Artificial Sequence
  Description of Artificial Sequence: Synthetic peptide
  Seed: KWMRELILYDK
KWMRELILYDR

SEQ ID NO: 47433 - protein, 9 aa, Artificial Sequence
  Description of Artificial Sequence: Synthetic peptide
  Seed: KWMRELILY
KSMRELILR

SEQ ID NO: 47434 - protein, 9 aa, Artificial Sequence
  Description of Artificial Sequence: Synthetic peptide
  Seed: KWMRELILY
KFMRELILH

SEQ ID NO: 47435 - protein, 9 aa, Artificial Sequence
  Description of Artificial Sequence: Synthetic peptide
  Seed: KWMRELILY
KFMRELILI

SEQ ID NO: 47436 - protein, 9 aa, Artificial Sequence
  Description of Artificial Sequence: Synthetic peptide
  Seed: KWMRELILY
KFMRELILL

SEQ ID NO: 47437 - protein, 9 aa, Artificial Sequence
  Description of Artificial Sequence: Synthetic peptide
  Seed: KWMRELILY
KFMRELILK

SEQ ID NO: 47438 - protein, 9 aa, Artificial Sequence
  Description of Artificial Sequence: Synthetic peptide
  Seed: KWMRELILY
KFMRELILM

SEQ ID NO: 47439 - protein, 9 aa, Artificial Sequence
  Description of Artificial Sequence: Synthetic peptide
  Seed: KWMRELILY
KFMRELILF

SEQ ID NO: 47440 - protein, 9 aa, Artificial Sequence
  Description of Artificial Sequence: Synthetic peptide
  Seed: KWMRELILY
KFMRELILW

SEQ ID NO: 47441 - protein, 9 aa, Artificial Sequence
  Description of Artificial Sequence: Synthetic peptide
  Seed: KWMRELILY
KFMRELILY

SEQ ID NO: 47442 - protein, 9 aa, Artificial Sequence
  Description of Artificial Sequence: Synthetic peptide
  Seed: KWMRELILY
KFMRELILV

SEQ ID NO: 47443 - protein, 9 aa, Artificial Sequence
  Description of Artificial Sequence: Synthetic peptide
  Seed: KWMRELILY
KSMRELILH

SEQ ID NO: 47444 - protein, 11 aa, Artificial Sequence
  Description of Artificial Sequence: Synthetic peptide
  Seed: KWMRELILYDK
KTMRELILYDK

SEQ ID NO: 47445 - protein, 9 aa, Artificial Sequence
  Description of Artificial Sequence: Synthetic peptide
  Seed: KWMRELILY
KSMRELILK

SEQ ID NO: 47446 - protein, 9 aa, Artificial Sequence
  Description of Artificial Sequence: Synthetic peptide
  Seed: KWMRELILY
KSMRELILM

SEQ ID NO: 47447 - protein, 9 aa, Artificial Sequence
  Description of Artificial Sequence: Synthetic peptide
  Seed: KWMRELILY
KSMRELILF

SEQ ID NO: 47448 - protein, 9 aa, Artificial Sequence
  Description of Artificial Sequence: Synthetic peptide
  Seed: KWMRELILY
KSMRELILW

SEQ ID NO: 47449 - protein, 9 aa, Artificial Sequence
  Description of Artificial Sequence: Synthetic peptide
  Seed: KWMRELILY
KSMRELILY

SEQ ID NO: 47450 - protein, 9 aa, Artificial Sequence
  Description of Artificial Sequence: Synthetic peptide
  Seed: KWMRELILY
KTMRELILR

SEQ ID NO: 47451 - protein, 9 aa, Artificial Sequence
  Description of Artificial Sequence: Synthetic peptide
  Seed: KWMRELILY
KTMRELILH

SEQ ID NO: 47452 - protein, 9 aa, Artificial Sequence
  Description of Artificial Sequence: Synthetic peptide
  Seed: KWMRELILY
KTMRELILI

SEQ ID NO: 47453 - protein, 9 aa, Artificial Sequence
  Description of Artificial Sequence: Synthetic peptide
  Seed: KWMRELILY
KTMRELILL

SEQ ID NO: 47454 - protein, 9 aa, Artificial Sequence
  Description of Artificial Sequence: Synthetic peptide
  Seed: KWMRELILY
KFMRELILR

SEQ ID NO: 47455 - protein, 9 aa, Artificial Sequence
  Description of Artificial Sequence: Synthetic peptide
  Seed: KWMRELILY
KMMRELILV

SEQ ID NO: 47456 - protein, 9 aa, Artificial Sequence
  Description of Artificial Sequence: Synthetic peptide
  Seed: KWMRELILY
KMMRELILY

SEQ ID NO: 47457 - protein, 9 aa, Artificial Sequence
  Description of Artificial Sequence: Synthetic peptide
  Seed: KWMRELILY
KMMRELILW

SEQ ID NO: 47458 - protein, 9 aa, Artificial Sequence
  Description of Artificial Sequence: Synthetic peptide
  Seed: KWMRELILY
KIMRELILK

SEQ ID NO: 47459 - protein, 9 aa, Artificial Sequence
  Description of Artificial Sequence: Synthetic peptide
  Seed: KWMRELILY
KIMRELILF

SEQ ID NO: 47460 - protein, 9 aa, Artificial Sequence
  Description of Artificial Sequence: Synthetic peptide
  Seed: KWMRELILY
KIMRELILW

SEQ ID NO: 47461 - protein, 9 aa, Artificial Sequence
  Description of Artificial Sequence: Synthetic peptide
  Seed: KWMRELILY
KIMRELILY

SEQ ID NO: 47462 - protein, 9 aa, Artificial Sequence
  Description of Artificial Sequence: Synthetic peptide
  Seed: KWMRELILY
KLMRELILR

SEQ ID NO: 47463 - protein, 9 aa, Artificial Sequence
  Description of Artificial Sequence: Synthetic peptide
  Seed: KWMRELILY
KLMRELILH

SEQ ID NO: 47464 - protein, 9 aa, Artificial Sequence
  Description of Artificial Sequence: Synthetic peptide
  Seed: KWMRELILY
KLMRELILK

SEQ ID NO: 47465 - protein, 9 aa, Artificial Sequence
  Description of Artificial Sequence: Synthetic peptide
  Seed: KWMRELILY
KLMRELILF

SEQ ID NO: 47466 - protein, 9 aa, Artificial Sequence
  Description of Artificial Sequence: Synthetic peptide
  Seed: KWMRELILY
KLMRELILW

SEQ ID NO: 47467 - protein, 9 aa, Artificial Sequence
  Description of Artificial Sequence: Synthetic peptide
  Seed: KWMRELILY
KLMRELILY

SEQ ID NO: 47468 - protein, 9 aa, Artificial Sequence
  Description of Artificial Sequence: Synthetic peptide
  Seed: KWMRELILY
KKMRELILR

SEQ ID NO: 47469 - protein, 9 aa, Artificial Sequence
  Description of Artificial Sequence: Synthetic peptide
  Seed: KWMRELILY
KKMRELILY

SEQ ID NO: 47470 - protein, 9 aa, Artificial Sequence
  Description of Artificial Sequence: Synthetic peptide
  Seed: KWMRELILY
KMMRELILR

SEQ ID NO: 47471 - protein, 9 aa, Artificial Sequence
  Description of Artificial Sequence: Synthetic peptide
  Seed: KWMRELILY
KMMRELILH

SEQ ID NO: 47472 - protein, 9 aa, Artificial Sequence
  Description of Artificial Sequence: Synthetic peptide
  Seed: KWMRELILY
KMMRELILI

SEQ ID NO: 47473 - protein, 9 aa, Artificial Sequence
  Description of Artificial Sequence: Synthetic peptide
  Seed: KWMRELILY
KMMRELILL

SEQ ID NO: 47474 - protein, 9 aa, Artificial Sequence
  Description of Artificial Sequence: Synthetic peptide
  Seed: KWMRELILY
KMMRELILK

SEQ ID NO: 47475 - protein, 9 aa, Artificial Sequence
  Description of Artificial Sequence: Synthetic peptide
  Seed: KWMRELILY
KMMRELILM

SEQ ID NO: 47476 - protein, 9 aa, Artificial Sequence
  Description of Artificial Sequence: Synthetic peptide
  Seed: KWMRELILY
KMMRELILF

SEQ ID NO: 47477 - protein, 9 aa, Artificial Sequence
  Description of Artificial Sequence: Synthetic peptide
  Seed: KWMRELILY
KTMRELILK

SEQ ID NO: 47478 - protein, 9 aa, Artificial Sequence
  Description of Artificial Sequence: Synthetic peptide
  Seed: KWMRELILY
KTMRELILM

SEQ ID NO: 47479 - protein, 9 aa, Artificial Sequence
  Description of Artificial Sequence: Synthetic peptide
  Seed: KWMRELILY
KTMRELILF

SEQ ID NO: 47480 - protein, 11 aa, Artificial Sequence
  Description of Artificial Sequence: Synthetic peptide
  Seed: KWMRELILYDK
KRMRELILYDR

SEQ ID NO: 47481 - protein, 11 aa, Artificial Sequence
  Description of Artificial Sequence: Synthetic peptide
  Seed: KWMRELILYDK
KNMRELILYDR

SEQ ID NO: 47482 - protein, 11 aa, Artificial Sequence
  Description of Artificial Sequence: Synthetic peptide
  Seed: KWMRELILYDK
KCMRELILYDR

SEQ ID NO: 47483 - protein, 11 aa, Artificial Sequence
  Description of Artificial Sequence: Synthetic peptide
  Seed: KWMRELILYDK
KQMRELILYDR

SEQ ID NO: 47484 - protein, 11 aa, Artificial Sequence
  Description of Artificial Sequence: Synthetic peptide
  Seed: KWMRELILYDK
KQMRELILYDK

SEQ ID NO: 47485 - protein, 11 aa, Artificial Sequence
  Description of Artificial Sequence: Synthetic peptide
  Seed: KWMRELILYDK
KGMRELILYDR

SEQ ID NO: 47486 - protein, 11 aa, Artificial Sequence
  Description of Artificial Sequence: Synthetic peptide
  Seed: KWMRELILYDK
KHMRELILYDR

SEQ ID NO: 47487 - protein, 11 aa, Artificial Sequence
  Description of Artificial Sequence: Synthetic peptide
  Seed: KWMRELILYDK
KIMRELILYDR

SEQ ID NO: 47488 - protein, 11 aa, Artificial Sequence
  Description of Artificial Sequence: Synthetic peptide
  Seed: KWMRELILYDK
KIMRELILYDK

SEQ ID NO: 47489 - protein, 11 aa, Artificial Sequence
  Description of Artificial Sequence: Synthetic peptide
  Seed: KWMRELILYDK
KLMRELILYDR

SEQ ID NO: 47490 - protein, 11 aa, Artificial Sequence
  Description of Artificial Sequence: Synthetic peptide
  Seed: KWMRELILYDK
KLMRELILYDK

SEQ ID NO: 47491 - protein, 11 aa, Artificial Sequence
  Description of Artificial Sequence: Synthetic peptide
  Seed: KWMRELILYDK
KKMRELILYDR

SEQ ID NO: 47492 - protein, 11 aa, Artificial Sequence
  Description of Artificial Sequence: Synthetic peptide
  Seed: KWMRELILYDK
KKMRELILYDK

SEQ ID NO: 47493 - protein, 11 aa, Artificial Sequence
  Description of Artificial Sequence: Synthetic peptide
  Seed: KWMRELILYDK
KMMRELILYDR

SEQ ID NO: 47494 - protein, 11 aa, Artificial Sequence
  Description of Artificial Sequence: Synthetic peptide
  Seed: KWMRELILYDK
KMMRELILYDK

SEQ ID NO: 47495 - protein, 11 aa, Artificial Sequence
  Description of Artificial Sequence: Synthetic peptide
  Seed: KWMRELILYDK
KFMRELILYDR

SEQ ID NO: 47496 - protein, 11 aa, Artificial Sequence
  Description of Artificial Sequence: Synthetic peptide
  Seed: KWMRELILYDK
KFMRELILYDK

SEQ ID NO: 47497 - protein, 11 aa, Artificial Sequence
  Description of Artificial Sequence: Synthetic peptide
  Seed: KWMRELILYDK
KSMRELILYDR

SEQ ID NO: 47498 - protein, 11 aa, Artificial Sequence
  Description of Artificial Sequence: Synthetic peptide
  Seed: KWMRELILYDK
KSMRELILYDK

SEQ ID NO: 47499 - protein, 11 aa, Artificial Sequence
  Description of Artificial Sequence: Synthetic peptide
  Seed: KWMRELILYDK
KTMRELILYDR

SEQ ID NO: 47500 - protein, 11 aa, Artificial Sequence
  Description of Artificial Sequence: Synthetic peptide
  Seed: KWMRELILYDK
KRMRELILYDK

SEQ ID NO: 47501 - protein, 11 aa, Artificial Sequence
  Description of Artificial Sequence: Synthetic peptide
  Seed: KWMRELILYDK
KAMRELILYDK

SEQ ID NO: 47502 - protein, 9 aa, Artificial Sequence
  Description of Artificial Sequence: Synthetic peptide
  Seed: KWMRELILY
KTMRELILW

SEQ ID NO: 47503 - protein, 11 aa, Artificial Sequence
  Description of Artificial Sequence: Synthetic peptide
  Seed: KWMRELILYDK
KAMRELILYDR

SEQ ID NO: 47504 - protein, 9 aa, Artificial Sequence
  Description of Artificial Sequence: Synthetic peptide
  Seed: KWMRELILY
KTMRELILY

SEQ ID NO: 47505 - protein, 9 aa, Artificial Sequence
  Description of Artificial Sequence: Synthetic peptide
  Seed: KWMRELILY
KTMRELILV

SEQ ID NO: 47506 - protein, 9 aa, Artificial Sequence
  Description of Artificial Sequence: Synthetic peptide
  Seed: KWMRELILY
KWMRELILR

SEQ ID NO: 47507 - protein, 9 aa, Artificial Sequence
  Description of Artificial Sequence: Synthetic peptide
  Seed: KWMRELILY
KWMRELILI

SEQ ID NO: 47508 - protein, 9 aa, Artificial Sequence
  Description of Artificial Sequence: Synthetic peptide
  Seed: KWMRELILY
KWMRELILL

SEQ ID NO: 47509 - protein, 9 aa, Artificial Sequence
  Description of Artificial Sequence: Synthetic peptide
  Seed: KWMRELILY
KWMRELILK

SEQ ID NO: 47510 - protein, 9 aa, Artificial Sequence
  Description of Artificial Sequence: Synthetic peptide
  Seed: KWMRELILY
KWMRELILM

SEQ ID NO: 47511 - protein, 9 aa, Artificial Sequence
  Description of Artificial Sequence: Synthetic peptide
  Seed: KWMRELILY
KWMRELILF

SEQ ID NO: 47512 - protein, 9 aa, Artificial Sequence
  Description of Artificial Sequence: Synthetic peptide
  Seed: KWMRELILY
KWMRELILW

SEQ ID NO: 47513 - protein, 9 aa, Artificial Sequence
  Description of Artificial Sequence: Synthetic peptide
  Seed: KWMRELILY
KWMRELILV

SEQ ID NO: 47514 - protein, 9 aa, Artificial Sequence
  Description of Artificial Sequence: Synthetic peptide
  Seed: KWMRELILY
KYMRELILA

SEQ ID NO: 47515 - protein, 9 aa, Artificial Sequence
  Description of Artificial Sequence: Synthetic peptide
  Seed: KWMRELILY
KYMRELILR

SEQ ID NO: 47516 - protein, 9 aa, Artificial Sequence
  Description of Artificial Sequence: Synthetic peptide
  Seed: KWMRELILY
KYMRELILH

SEQ ID NO: 47517 - protein, 9 aa, Artificial Sequence
  Description of Artificial Sequence: Synthetic peptide
  Seed: KWMRELILY
KYMRELILK

SEQ ID NO: 47518 - protein, 9 aa, Artificial Sequence
  Description of Artificial Sequence: Synthetic peptide
  Seed: KWMRELILY
KVMRELILR

SEQ ID NO: 47519 - protein, 9 aa, Artificial Sequence
  Description of Artificial Sequence: Synthetic peptide
  Seed: KWMRELILY
KVMRELILH

SEQ ID NO: 47520 - protein, 9 aa, Artificial Sequence
  Description of Artificial Sequence: Synthetic peptide
  Seed: KWMRELILY
KVMRELILK

SEQ ID NO: 47521 - protein, 9 aa, Artificial Sequence
  Description of Artificial Sequence: Synthetic peptide
  Seed: KWMRELILY
KVMRELILY

SEQ ID NO: 47522 - protein, 9 aa, Artificial Sequence
  Description of Artificial Sequence: Synthetic peptide
  Seed: KWMRELVLY
KSMRELVLY

SEQ ID NO: 47523 - protein, 9 aa, Artificial Sequence
  Description of Artificial Sequence: Synthetic peptide
  Seed: KWMRELVLY
KTMRELVLH

SEQ ID NO: 47524 - protein, 9 aa, Artificial Sequence
  Description of Artificial Sequence: Synthetic peptide
  Seed: KWMRELILY
KIMRELILR

SEQ ID NO: 47525 - protein, 9 aa, Artificial Sequence
  Description of Artificial Sequence: Synthetic peptide
  Seed: KYLEEHPSA
KFLEEHPSM

SEQ ID NO: 47526 - protein, 9 aa, Artificial Sequence
  Description of Artificial Sequence: Synthetic peptide
  Seed: KYLEEHPSA
KILEEHPSF

SEQ ID NO: 47527 - protein, 9 aa, Artificial Sequence
  Description of Artificial Sequence: Synthetic peptide
  Seed: KYLEEHPSA
KLLEEHPSF

SEQ ID NO: 47528 - protein, 9 aa, Artificial Sequence
  Description of Artificial Sequence: Synthetic peptide
  Seed: KYLEEHPSA
KLLEEHPSW

SEQ ID NO: 47529 - protein, 9 aa, Artificial Sequence
  Description of Artificial Sequence: Synthetic peptide
  Seed: KYLEEHPSA
KMLEEHPSL

SEQ ID NO: 47530 - protein, 9 aa, Artificial Sequence
  Description of Artificial Sequence: Synthetic peptide
  Seed: KYLEEHPSA
KMLEEHPSM

SEQ ID NO: 47531 - protein, 9 aa, Artificial Sequence
  Description of Artificial Sequence: Synthetic peptide
  Seed: KYLEEHPSA
KMLEEHPSF

SEQ ID NO: 47532 - protein, 9 aa, Artificial Sequence
  Description of Artificial Sequence: Synthetic peptide
  Seed: KYLEEHPSA
KFLEEHPSI

SEQ ID NO: 47533 - protein, 9 aa, Artificial Sequence
  Description of Artificial Sequence: Synthetic peptide
  Seed: KYLEEHPSA
KFLEEHPSL

SEQ ID NO: 47534 - protein, 9 aa, Artificial Sequence
  Description of Artificial Sequence: Synthetic peptide
  Seed: KYLEEHPSA
KFLEEHPSK

SEQ ID NO: 47535 - protein, 9 aa, Artificial Sequence
  Description of Artificial Sequence: Synthetic peptide
  Seed: KYLEEHPSA
KFLEEHPSF

SEQ ID NO: 47536 - protein, 9 aa, Artificial Sequence
  Description of Artificial Sequence: Synthetic peptide
  Seed: KYLEEHPSA
KTLEEHPSL

SEQ ID NO: 47537 - protein, 9 aa, Artificial Sequence
  Description of Artificial Sequence: Synthetic peptide
  Seed: KYLEEHPSA
KFLEEHPSY

SEQ ID NO: 47538 - protein, 9 aa, Artificial Sequence
  Description of Artificial Sequence: Synthetic peptide
  Seed: KYLEEHPSA
KFLEEHPSV

SEQ ID NO: 47539 - protein, 9 aa, Artificial Sequence
  Description of Artificial Sequence: Synthetic peptide
  Seed: KYLEEHPSA
KSLEEHPSA

SEQ ID NO: 47540 - protein, 9 aa, Artificial Sequence
  Description of Artificial Sequence: Synthetic peptide
  Seed: KYLEEHPSA
KSLEEHPSR

SEQ ID NO: 47541 - protein, 9 aa, Artificial Sequence
  Description of Artificial Sequence: Synthetic peptide
  Seed: KYLEEHPSA
KSLEEHPSI

SEQ ID NO: 47542 - protein, 9 aa, Artificial Sequence
  Description of Artificial Sequence: Synthetic peptide
  Seed: KYLEEHPSA
KSLEEHPSK

SEQ ID NO: 47543 - protein, 9 aa, Artificial Sequence
  Description of Artificial Sequence: Synthetic peptide
  Seed: KYLEEHPSA
KSLEEHPSV

SEQ ID NO: 47544 - protein, 9 aa, Artificial Sequence
  Description of Artificial Sequence: Synthetic peptide
  Seed: KYLEEHPSA
KTLEEHPSA

SEQ ID NO: 47545 - protein, 9 aa, Artificial Sequence
  Description of Artificial Sequence: Synthetic peptide
  Seed: KYLEEHPSA
KTLEEHPSR

SEQ ID NO: 47546 - protein, 9 aa, Artificial Sequence
  Description of Artificial Sequence: Synthetic peptide
  Seed: KYLEEHPSA
KHLEEHPSF

SEQ ID NO: 47547 - protein, 9 aa, Artificial Sequence
  Description of Artificial Sequence: Synthetic peptide
  Seed: KYLEEHPSA
KQLEEHPSW

SEQ ID NO: 47548 - protein, 9 aa, Artificial Sequence
  Description of Artificial Sequence: Synthetic peptide
  Seed: KYLEEHPSA
KQLEEHPSF

SEQ ID NO: 47549 - protein, 9 aa, Artificial Sequence
  Description of Artificial Sequence: Synthetic peptide
  Seed: KWVRELILY
KVVRELILY

SEQ ID NO: 47550 - protein, 9 aa, Artificial Sequence
  Description of Artificial Sequence: Synthetic peptide
  Seed: KWVRELILY
KSVRELILF

SEQ ID NO: 47551 - protein, 9 aa, Artificial Sequence
  Description of Artificial Sequence: Synthetic peptide
  Seed: KWVRELILY
KSVRELILY

SEQ ID NO: 47552 - protein, 9 aa, Artificial Sequence
  Description of Artificial Sequence: Synthetic peptide
  Seed: KWVRELILY
KTVRELILF

SEQ ID NO: 47553 - protein, 9 aa, Artificial Sequence
  Description of Artificial Sequence: Synthetic peptide
  Seed: KWVRELILY
KTVRELILY

SEQ ID NO: 47554 - protein, 9 aa, Artificial Sequence
  Description of Artificial Sequence: Synthetic peptide
  Seed: KWVRELILY
KWVRELILI

SEQ ID NO: 47555 - protein, 9 aa, Artificial Sequence
  Description of Artificial Sequence: Synthetic peptide
  Seed: KWVRELILY
KWVRELILL

SEQ ID NO: 47556 - protein, 9 aa, Artificial Sequence
  Description of Artificial Sequence: Synthetic peptide
  Seed: KWVRELILY
KWVRELILM

SEQ ID NO: 47557 - protein, 9 aa, Artificial Sequence
  Description of Artificial Sequence: Synthetic peptide
  Seed: KWVRELILY
KWVRELILF

SEQ ID NO: 47558 - protein, 9 aa, Artificial Sequence
  Description of Artificial Sequence: Synthetic peptide
  Seed: KWVRELILY
KWVRELILW

SEQ ID NO: 47559 - protein, 9 aa, Artificial Sequence
  Description of Artificial Sequence: Synthetic peptide
  Seed: KWVRELILY
KWVRELILV

SEQ ID NO: 47560 - protein, 9 aa, Artificial Sequence
  Description of Artificial Sequence: Synthetic peptide
  Seed: KWVRELILY
KYVRELILC

SEQ ID NO: 47561 - protein, 9 aa, Artificial Sequence
  Description of Artificial Sequence: Synthetic peptide
  Seed: KWVRELILY
KYVRELILI

SEQ ID NO: 47562 - protein, 9 aa, Artificial Sequence
  Description of Artificial Sequence: Synthetic peptide
  Seed: KWVRELILY
KYVRELILL

SEQ ID NO: 47563 - protein, 9 aa, Artificial Sequence
  Description of Artificial Sequence: Synthetic peptide
  Seed: KWVRELILY
KYVRELILM

SEQ ID NO: 47564 - protein, 9 aa, Artificial Sequence
  Description of Artificial Sequence: Synthetic peptide
  Seed: KWVRELILY
KYVRELILF

SEQ ID NO: 47565 - protein, 9 aa, Artificial Sequence
  Description of Artificial Sequence: Synthetic peptide
  Seed: KWVRELILY
KYVRELILW

SEQ ID NO: 47566 - protein, 9 aa, Artificial Sequence
  Description of Artificial Sequence: Synthetic peptide
  Seed: KWVRELILY
KYVRELILY

SEQ ID NO: 47567 - protein, 9 aa, Artificial Sequence
  Description of Artificial Sequence: Synthetic peptide
  Seed: KWVRELILY
KYVRELILV

SEQ ID NO: 47568 - protein, 9 aa, Artificial Sequence
  Description of Artificial Sequence: Synthetic peptide
  Seed: KWVRELILY
KVVRELILF

SEQ ID NO: 47569 - protein, 9 aa, Artificial Sequence
  Description of Artificial Sequence: Synthetic peptide
  Seed: KYLEEHPSA
KTLEEHPSI

SEQ ID NO: 47570 - protein, 9 aa, Artificial Sequence
  Description of Artificial Sequence: Synthetic peptide
  Seed: KYLEEHPSA
KTLEEHPSK

SEQ ID NO: 47571 - protein, 9 aa, Artificial Sequence
  Description of Artificial Sequence: Synthetic peptide
  Seed: KWMRELVLY
KTMRELVLI

SEQ ID NO: 47572 - protein, 11 aa, Artificial Sequence
  Description of Artificial Sequence: Synthetic peptide
  Seed: KYLEEHPSAGK
KYLEEHPSAGR

SEQ ID NO: 47573 - protein, 11 aa, Artificial Sequence
  Description of Artificial Sequence: Synthetic peptide
  Seed: KYLEEHPSAGK
KILEEHPSAGR

SEQ ID NO: 47574 - protein, 11 aa, Artificial Sequence
  Description of Artificial Sequence: Synthetic peptide
  Seed: KYLEEHPSAGK
KLLEEHPSAGR

SEQ ID NO: 47575 - protein, 11 aa, Artificial Sequence
  Description of Artificial Sequence: Synthetic peptide
  Seed: KYLEEHPSAGK
KMLEEHPSAGR

SEQ ID NO: 47576 - protein, 11 aa, Artificial Sequence
  Description of Artificial Sequence: Synthetic peptide
  Seed: KYLEEHPSAGK
KMLEEHPSAGK

SEQ ID NO: 47577 - protein, 11 aa, Artificial Sequence
  Description of Artificial Sequence: Synthetic peptide
  Seed: KYLEEHPSAGK
KFLEEHPSAGR

SEQ ID NO: 47578 - protein, 11 aa, Artificial Sequence
  Description of Artificial Sequence: Synthetic peptide
  Seed: KYLEEHPSAGK
KFLEEHPSAGK

SEQ ID NO: 47579 - protein, 11 aa, Artificial Sequence
  Description of Artificial Sequence: Synthetic peptide
  Seed: KYLEEHPSAGK
KSLEEHPSAGR

SEQ ID NO: 47580 - protein, 11 aa, Artificial Sequence
  Description of Artificial Sequence: Synthetic peptide
  Seed: KYLEEHPSAGK
KTLEEHPSAGR

SEQ ID NO: 47581 - protein, 11 aa, Artificial Sequence
  Description of Artificial Sequence: Synthetic peptide
  Seed: KYLEEHPSAGK
KWLEEHPSAGR

SEQ ID NO: 47582 - protein, 11 aa, Artificial Sequence
  Description of Artificial Sequence: Synthetic peptide
  Seed: KYLEEHPSAGK
KVLEEHPSAGR

SEQ ID NO: 47583 - protein, 9 aa, Artificial Sequence
  Description of Artificial Sequence: Synthetic peptide
  Seed: KYLEEHPSA
KTLEEHPSM

SEQ ID NO: 47584 - protein, 8 aa, Artificial Sequence
  Description of Artificial Sequence: Synthetic peptide
  Seed: LARSALIL
LARSALIM

SEQ ID NO: 47585 - protein, 8 aa, Artificial Sequence
  Description of Artificial Sequence: Synthetic peptide
  Seed: LARSALIL
LARSALIF

SEQ ID NO: 47586 - protein, 8 aa, Artificial Sequence
  Description of Artificial Sequence: Synthetic peptide
  Seed: LARSALIL
LARSALIY

SEQ ID NO: 47587 - protein, 8 aa, Artificial Sequence
  Description of Artificial Sequence: Synthetic peptide
  Seed: LARSALIL
LSRSALIL

SEQ ID NO: 47588 - protein, 8 aa, Artificial Sequence
  Description of Artificial Sequence: Synthetic peptide
  Seed: LARSALIL
LSRSALIM

SEQ ID NO: 47589 - protein, 8 aa, Artificial Sequence
  Description of Artificial Sequence: Synthetic peptide
  Seed: LARSALIL
LSRSALIF

SEQ ID NO: 47590 - protein, 9 aa, Artificial Sequence
  Description of Artificial Sequence: Synthetic peptide
  Seed: LARSALILR
LARSALILA

SEQ ID NO: 47591 - protein, 9 aa, Artificial Sequence
  Description of Artificial Sequence: Synthetic peptide
  Seed: LARSALILR
LARSALILG

SEQ ID NO: 47592 - protein, 11 aa, Artificial Sequence
  Description of Artificial Sequence: Synthetic peptide
  Seed: KYLEEHPSAGK
KGLEEHPSAGR

SEQ ID NO: 47593 - protein, 11 aa, Artificial Sequence
  Description of Artificial Sequence: Synthetic peptide
  Seed: KYLEEHPSAGK
KQLEEHPSAGR

SEQ ID NO: 47594 - protein, 11 aa, Artificial Sequence
  Description of Artificial Sequence: Synthetic peptide
  Seed: KYLEEHPSAGK
KALEEHPSAGR

SEQ ID NO: 47595 - protein, 9 aa, Artificial Sequence
  Description of Artificial Sequence: Synthetic peptide
  Seed: KYLEEHPSA
KVLEEHPSV

SEQ ID NO: 47596 - protein, 9 aa, Artificial Sequence
  Description of Artificial Sequence: Synthetic peptide
  Seed: KYLEEHPSA
KTLEEHPSS

SEQ ID NO: 47597 - protein, 9 aa, Artificial Sequence
  Description of Artificial Sequence: Synthetic peptide
  Seed: KYLEEHPSA
KTLEEHPSY

SEQ ID NO: 47598 - protein, 9 aa, Artificial Sequence
  Description of Artificial Sequence: Synthetic peptide
  Seed: KYLEEHPSA
KTLEEHPSV

SEQ ID NO: 47599 - protein, 9 aa, Artificial Sequence
  Description of Artificial Sequence: Synthetic peptide
  Seed: KYLEEHPSA
KWLEEHPSI

SEQ ID NO: 47600 - protein, 9 aa, Artificial Sequence
  Description of Artificial Sequence: Synthetic peptide
  Seed: KYLEEHPSA
KWLEEHPSL

SEQ ID NO: 47601 - protein, 9 aa, Artificial Sequence
  Description of Artificial Sequence: Synthetic peptide
  Seed: KYLEEHPSA
KWLEEHPSK

SEQ ID NO: 47602 - protein, 9 aa, Artificial Sequence
  Description of Artificial Sequence: Synthetic peptide
  Seed: KYLEEHPSA
KWLEEHPSM

SEQ ID NO: 47603 - protein, 9 aa, Artificial Sequence
  Description of Artificial Sequence: Synthetic peptide
  Seed: KYLEEHPSA
KWLEEHPSF

SEQ ID NO: 47604 - protein, 9 aa, Artificial Sequence
  Description of Artificial Sequence: Synthetic peptide
  Seed: KYLEEHPSA
KWLEEHPSY

SEQ ID NO: 47605 - protein, 9 aa, Artificial Sequence
  Description of Artificial Sequence: Synthetic peptide
  Seed: KYLEEHPSA
KYLEEHPSI

SEQ ID NO: 47606 - protein, 9 aa, Artificial Sequence
  Description of Artificial Sequence: Synthetic peptide
  Seed: KYLEEHPSA
KYLEEHPSL

SEQ ID NO: 47607 - protein, 9 aa, Artificial Sequence
  Description of Artificial Sequence: Synthetic peptide
  Seed: KYLEEHPSA
KYLEEHPSK

SEQ ID NO: 47608 - protein, 9 aa, Artificial Sequence
  Description of Artificial Sequence: Synthetic peptide
  Seed: KYLEEHPSA
KYLEEHPSM

SEQ ID NO: 47609 - protein, 9 aa, Artificial Sequence
  Description of Artificial Sequence: Synthetic peptide
  Seed: KYLEEHPSA
KYLEEHPSF

SEQ ID NO: 47610 - protein, 9 aa, Artificial Sequence
  Description of Artificial Sequence: Synthetic peptide
  Seed: KYLEEHPSA
KYLEEHPSY

SEQ ID NO: 47611 - protein, 9 aa, Artificial Sequence
  Description of Artificial Sequence: Synthetic peptide
  Seed: KYLEEHPSA
KVLEEHPSA

SEQ ID NO: 47612 - protein, 9 aa, Artificial Sequence
  Description of Artificial Sequence: Synthetic peptide
  Seed: KYLEEHPSA
KVLEEHPSI

SEQ ID NO: 47613 - protein, 9 aa, Artificial Sequence
  Description of Artificial Sequence: Synthetic peptide
  Seed: KYLEEHPSA
KVLEEHPSK

SEQ ID NO: 47614 - protein, 9 aa, Artificial Sequence
  Description of Artificial Sequence: Synthetic peptide
  Seed: KWVRELILY
KFVRELILV

SEQ ID NO: 47615 - protein, 9 aa, Artificial Sequence
  Description of Artificial Sequence: Synthetic peptide
  Seed: KWVRELILY
KFVRELILY

SEQ ID NO: 47616 - protein, 9 aa, Artificial Sequence
  Description of Artificial Sequence: Synthetic peptide
  Seed: KWVRELILY
KFVRELILW

SEQ ID NO: 47617 - protein, 9 aa, Artificial Sequence
  Description of Artificial Sequence: Synthetic peptide
  Seed: KWMRELVLY
KVMRELVLR

SEQ ID NO: 47618 - protein, 9 aa, Artificial Sequence
  Description of Artificial Sequence: Synthetic peptide
  Seed: KWMRELVLY
KYMRELVLL

SEQ ID NO: 47619 - protein, 9 aa, Artificial Sequence
  Description of Artificial Sequence: Synthetic peptide
  Seed: KWMRELVLY
KYMRELVLK

SEQ ID NO: 47620 - protein, 9 aa, Artificial Sequence
  Description of Artificial Sequence: Synthetic peptide
  Seed: KWMRELVLY
KYMRELVLM

SEQ ID NO: 47621 - protein, 9 aa, Artificial Sequence
  Description of Artificial Sequence: Synthetic peptide
  Seed: KWMRELVLY
KYMRELVLF

SEQ ID NO: 47622 - protein, 9 aa, Artificial Sequence
  Description of Artificial Sequence: Synthetic peptide
  Seed: KWMRELVLY
KYMRELVLS

SEQ ID NO: 47623 - protein, 9 aa, Artificial Sequence
  Description of Artificial Sequence: Synthetic peptide
  Seed: KWMRELVLY
KYMRELVLT

SEQ ID NO: 47624 - protein, 9 aa, Artificial Sequence
  Description of Artificial Sequence: Synthetic peptide
  Seed: KWMRELVLY
KYMRELVLW

SEQ ID NO: 47625 - protein, 9 aa, Artificial Sequence
  Description of Artificial Sequence: Synthetic peptide
  Seed: KWMRELVLY
KYMRELVLY

SEQ ID NO: 47626 - protein, 9 aa, Artificial Sequence
  Description of Artificial Sequence: Synthetic peptide
  Seed: KWMRELVLY
KYMRELVLV

SEQ ID NO: 47627 - protein, 9 aa, Artificial Sequence
  Description of Artificial Sequence: Synthetic peptide
  Seed: KWMRELVLY
KVMRELVLH

SEQ ID NO: 47628 - protein, 9 aa, Artificial Sequence
  Description of Artificial Sequence: Synthetic peptide
  Seed: KWVRELILY
KFVRELILF

SEQ ID NO: 47629 - protein, 9 aa, Artificial Sequence
  Description of Artificial Sequence: Synthetic peptide
  Seed: KWMRELVLY
KVMRELVLI

SEQ ID NO: 47630 - protein, 9 aa, Artificial Sequence
  Description of Artificial Sequence: Synthetic peptide
  Seed: KWMRELVLY
KVMRELVLL

SEQ ID NO: 47631 - protein, 9 aa, Artificial Sequence
  Description of Artificial Sequence: Synthetic peptide
  Seed: KWMRELVLY
KVMRELVLK

SEQ ID NO: 47632 - protein, 9 aa, Artificial Sequence
  Description of Artificial Sequence: Synthetic peptide
  Seed: KWMRELVLY
KVMRELVLM

SEQ ID NO: 47633 - protein, 9 aa, Artificial Sequence
  Description of Artificial Sequence: Synthetic peptide
  Seed: KWMRELVLY
KVMRELVLF

SEQ ID NO: 47634 - protein, 9 aa, Artificial Sequence
  Description of Artificial Sequence: Synthetic peptide
  Seed: KWMRELVLY
KVMRELVLW

SEQ ID NO: 47635 - protein, 9 aa, Artificial Sequence
  Description of Artificial Sequence: Synthetic peptide
  Seed: KWMRELVLY
KVMRELVLY

SEQ ID NO: 47636 - protein, 11 aa, Artificial Sequence
  Description of Artificial Sequence: Synthetic peptide
  Seed: KWMRELVLYDK
KAMRELVLYDR

SEQ ID NO: 47637 - protein, 11 aa, Artificial Sequence
  Description of Artificial Sequence: Synthetic peptide
  Seed: KWMRELVLYDK
KAMRELVLYDK

SEQ ID NO: 47638 - protein, 9 aa, Artificial Sequence
  Description of Artificial Sequence: Synthetic peptide
  Seed: KWMRELVLY
KYMRELVLI

SEQ ID NO: 47639 - protein, 9 aa, Artificial Sequence
  Description of Artificial Sequence: Synthetic peptide
  Seed: KWMRELVLY
KYMRELVLH

SEQ ID NO: 47640 - protein, 9 aa, Artificial Sequence
  Description of Artificial Sequence: Synthetic peptide
  Seed: KWMRELVLY
KYMRELVLG

SEQ ID NO: 47641 - protein, 9 aa, Artificial Sequence
  Description of Artificial Sequence: Synthetic peptide
  Seed: KWMRELVLY
KYMRELVLC

SEQ ID NO: 47642 - protein, 9 aa, Artificial Sequence
  Description of Artificial Sequence: Synthetic peptide
  Seed: KWMRELVLY
KTMRELVLL

SEQ ID NO: 47643 - protein, 9 aa, Artificial Sequence
  Description of Artificial Sequence: Synthetic peptide
  Seed: KWMRELVLY
KTMRELVLK

SEQ ID NO: 47644 - protein, 9 aa, Artificial Sequence
  Description of Artificial Sequence: Synthetic peptide
  Seed: KWMRELVLY
KTMRELVLM

SEQ ID NO: 47645 - protein, 9 aa, Artificial Sequence
  Description of Artificial Sequence: Synthetic peptide
  Seed: KWMRELVLY
KTMRELVLF

SEQ ID NO: 47646 - protein, 9 aa, Artificial Sequence
  Description of Artificial Sequence: Synthetic peptide
  Seed: KWMRELVLY
KTMRELVLW

SEQ ID NO: 47647 - protein, 9 aa, Artificial Sequence
  Description of Artificial Sequence: Synthetic peptide
  Seed: KWMRELVLY
KTMRELVLY

SEQ ID NO: 47648 - protein, 9 aa, Artificial Sequence
  Description of Artificial Sequence: Synthetic peptide
  Seed: KWMRELVLY
KTMRELVLV

SEQ ID NO: 47649 - protein, 9 aa, Artificial Sequence
  Description of Artificial Sequence: Synthetic peptide
  Seed: KWMRELVLY
KWMRELVLR

SEQ ID NO: 47650 - protein, 9 aa, Artificial Sequence
  Description of Artificial Sequence: Synthetic peptide
  Seed: KWMRELVLY
KWMRELVLC

SEQ ID NO: 47651 - protein, 9 aa, Artificial Sequence
  Description of Artificial Sequence: Synthetic peptide
  Seed: KWMRELVLY
KWMRELVLH

SEQ ID NO: 47652 - protein, 9 aa, Artificial Sequence
  Description of Artificial Sequence: Synthetic peptide
  Seed: KWMRELVLY
KWMRELVLI

SEQ ID NO: 47653 - protein, 9 aa, Artificial Sequence
  Description of Artificial Sequence: Synthetic peptide
  Seed: KWMRELVLY
KWMRELVLL

SEQ ID NO: 47654 - protein, 9 aa, Artificial Sequence
  Description of Artificial Sequence: Synthetic peptide
  Seed: KWMRELVLY
KWMRELVLK

SEQ ID NO: 47655 - protein, 9 aa, Artificial Sequence
  Description of Artificial Sequence: Synthetic peptide
  Seed: KWMRELVLY
KWMRELVLM

SEQ ID NO: 47656 - protein, 9 aa, Artificial Sequence
  Description of Artificial Sequence: Synthetic peptide
  Seed: KWMRELVLY
KWMRELVLF

SEQ ID NO: 47657 - protein, 9 aa, Artificial Sequence
  Description of Artificial Sequence: Synthetic peptide
  Seed: KWMRELVLY
KWMRELVLW

SEQ ID NO: 47658 - protein, 9 aa, Artificial Sequence
  Description of Artificial Sequence: Synthetic peptide
  Seed: KWMRELVLY
KWMRELVLV

SEQ ID NO: 47659 - protein, 9 aa, Artificial Sequence
  Description of Artificial Sequence: Synthetic peptide
  Seed: KWMRELVLY
KYMRELVLA

SEQ ID NO: 47660 - protein, 9 aa, Artificial Sequence
  Description of Artificial Sequence: Synthetic peptide
  Seed: KWMRELVLY
KYMRELVLR

SEQ ID NO: 47661 - protein, 11 aa, Artificial Sequence
  Description of Artificial Sequence: Synthetic peptide
  Seed: KWMRELVLYDK
KRMRELVLYDR

SEQ ID NO: 47662 - protein, 11 aa, Artificial Sequence
  Description of Artificial Sequence: Synthetic peptide
  Seed: KWMRELVLYDK
KRMRELVLYDK

SEQ ID NO: 47663 - protein, 11 aa, Artificial Sequence
  Description of Artificial Sequence: Synthetic peptide
  Seed: KWMRELVLYDK
KNMRELVLYDR

SEQ ID NO: 47664 - protein, 11 aa, Artificial Sequence
  Description of Artificial Sequence: Synthetic peptide
  Seed: KWMRELVLYDK
KVMRELVLYDR

SEQ ID NO: 47665 - protein, 9 aa, Artificial Sequence
  Description of Artificial Sequence: Synthetic peptide
  Seed: KWVRELILY
KAVRELILF

SEQ ID NO: 47666 - protein, 9 aa, Artificial Sequence
  Description of Artificial Sequence: Synthetic peptide
  Seed: KWVRELILY
KAVRELILY

SEQ ID NO: 47667 - protein, 9 aa, Artificial Sequence
  Description of Artificial Sequence: Synthetic peptide
  Seed: KWVRELILY
KNVRELILY

SEQ ID NO: 47668 - protein, 9 aa, Artificial Sequence
  Description of Artificial Sequence: Synthetic peptide
  Seed: KWVRELILY
KCVRELILY

SEQ ID NO: 47669 - protein, 9 aa, Artificial Sequence
  Description of Artificial Sequence: Synthetic peptide
  Seed: KWVRELILY
KQVRELILF

SEQ ID NO: 47670 - protein, 9 aa, Artificial Sequence
  Description of Artificial Sequence: Synthetic peptide
  Seed: KWVRELILY
KQVRELILY

SEQ ID NO: 47671 - protein, 9 aa, Artificial Sequence
  Description of Artificial Sequence: Synthetic peptide
  Seed: KWVRELILY
KGVRELILY

SEQ ID NO: 47672 - protein, 9 aa, Artificial Sequence
  Description of Artificial Sequence: Synthetic peptide
  Seed: KWVRELILY
KHVRELILF

SEQ ID NO: 47673 - protein, 9 aa, Artificial Sequence
  Description of Artificial Sequence: Synthetic peptide
  Seed: KWVRELILY
KHVRELILY

SEQ ID NO: 47674 - protein, 9 aa, Artificial Sequence
  Description of Artificial Sequence: Synthetic peptide
  Seed: KWVRELILY
KIVRELILF

SEQ ID NO: 47675 - protein, 9 aa, Artificial Sequence
  Description of Artificial Sequence: Synthetic peptide
  Seed: KWVRELILY
KIVRELILY

SEQ ID NO: 47676 - protein, 9 aa, Artificial Sequence
  Description of Artificial Sequence: Synthetic peptide
  Seed: KWVRELILY
KLVRELILF

SEQ ID NO: 47677 - protein, 9 aa, Artificial Sequence
  Description of Artificial Sequence: Synthetic peptide
  Seed: KWVRELILY
KLVRELILY

SEQ ID NO: 47678 - protein, 9 aa, Artificial Sequence
  Description of Artificial Sequence: Synthetic peptide
  Seed: KWVRELILY
KMVRELILF

SEQ ID NO: 47679 - protein, 9 aa, Artificial Sequence
  Description of Artificial Sequence: Synthetic peptide
  Seed: KWVRELILY
KMVRELILW

SEQ ID NO: 47680 - protein, 9 aa, Artificial Sequence
  Description of Artificial Sequence: Synthetic peptide
  Seed: KWVRELILY
KMVRELILY

SEQ ID NO: 47681 - protein, 9 aa, Artificial Sequence
  Description of Artificial Sequence: Synthetic peptide
  Seed: KWVRELILY
KFVRELILI

SEQ ID NO: 47682 - protein, 9 aa, Artificial Sequence
  Description of Artificial Sequence: Synthetic peptide
  Seed: KWVRELILY
KFVRELILL

SEQ ID NO: 47683 - protein, 9 aa, Artificial Sequence
  Description of Artificial Sequence: Synthetic peptide
  Seed: KWVRELILY
KFVRELILM

SEQ ID NO: 47684 - protein, 11 aa, Artificial Sequence
  Description of Artificial Sequence: Synthetic peptide
  Seed: KWMRELVLYDK
KVMRELVLYDK

SEQ ID NO: 47685 - protein, 11 aa, Artificial Sequence
  Description of Artificial Sequence: Synthetic peptide
  Seed: KWMRELVLYDK
KYMRELVLYDK

SEQ ID NO: 47686 - protein, 11 aa, Artificial Sequence
  Description of Artificial Sequence: Synthetic peptide
  Seed: KWMRELVLYDK
KCMRELVLYDR

SEQ ID NO: 47687 - protein, 11 aa, Artificial Sequence
  Description of Artificial Sequence: Synthetic peptide
  Seed: KWMRELVLYDK
KYMRELVLYDR

SEQ ID NO: 47688 - protein, 11 aa, Artificial Sequence
  Description of Artificial Sequence: Synthetic peptide
  Seed: KWMRELVLYDK
KQMRELVLYDR

SEQ ID NO: 47689 - protein, 11 aa, Artificial Sequence
  Description of Artificial Sequence: Synthetic peptide
  Seed: KWMRELVLYDK
KQMRELVLYDK

SEQ ID NO: 47690 - protein, 11 aa, Artificial Sequence
  Description of Artificial Sequence: Synthetic peptide
  Seed: KWMRELVLYDK
KGMRELVLYDR

SEQ ID NO: 47691 - protein, 11 aa, Artificial Sequence
  Description of Artificial Sequence: Synthetic peptide
  Seed: KWMRELVLYDK
KHMRELVLYDR

SEQ ID NO: 47692 - protein, 11 aa, Artificial Sequence
  Description of Artificial Sequence: Synthetic peptide
  Seed: KWMRELVLYDK
KIMRELVLYDR

SEQ ID NO: 47693 - protein, 11 aa, Artificial Sequence
  Description of Artificial Sequence: Synthetic peptide
  Seed: KWMRELVLYDK
KIMRELVLYDK

SEQ ID NO: 47694 - protein, 11 aa, Artificial Sequence
  Description of Artificial Sequence: Synthetic peptide
  Seed: KWMRELVLYDK
KLMRELVLYDR

SEQ ID NO: 47695 - protein, 11 aa, Artificial Sequence
  Description of Artificial Sequence: Synthetic peptide
  Seed: KWMRELVLYDK
KLMRELVLYDK

SEQ ID NO: 47696 - protein, 11 aa, Artificial Sequence
  Description of Artificial Sequence: Synthetic peptide
  Seed: KWMRELVLYDK
KKMRELVLYDR

SEQ ID NO: 47697 - protein, 11 aa, Artificial Sequence
  Description of Artificial Sequence: Synthetic peptide
  Seed: KWMRELVLYDK
KKMRELVLYDK

SEQ ID NO: 47698 - protein, 11 aa, Artificial Sequence
  Description of Artificial Sequence: Synthetic peptide
  Seed: KWMRELVLYDK
KMMRELVLYDR

SEQ ID NO: 47699 - protein, 11 aa, Artificial Sequence
  Description of Artificial Sequence: Synthetic peptide
  Seed: KWMRELVLYDK
KMMRELVLYDK

SEQ ID NO: 47700 - protein, 11 aa, Artificial Sequence
  Description of Artificial Sequence: Synthetic peptide
  Seed: KWMRELVLYDK
KFMRELVLYDR

SEQ ID NO: 47701 - protein, 11 aa, Artificial Sequence
  Description of Artificial Sequence: Synthetic peptide
  Seed: KWMRELVLYDK
KFMRELVLYDK

SEQ ID NO: 47702 - protein, 11 aa, Artificial Sequence
  Description of Artificial Sequence: Synthetic peptide
  Seed: KWMRELVLYDK
KSMRELVLYDR

SEQ ID NO: 47703 - protein, 11 aa, Artificial Sequence
  Description of Artificial Sequence: Synthetic peptide
  Seed: KWMRELVLYDK
KSMRELVLYDK

SEQ ID NO: 47704 - protein, 11 aa, Artificial Sequence
  Description of Artificial Sequence: Synthetic peptide
  Seed: KWMRELVLYDK
KTMRELVLYDR

SEQ ID NO: 47705 - protein, 11 aa, Artificial Sequence
  Description of Artificial Sequence: Synthetic peptide
  Seed: KWMRELVLYDK
KTMRELVLYDK

SEQ ID NO: 47706 - protein, 11 aa, Artificial Sequence
  Description of Artificial Sequence: Synthetic peptide
  Seed: KWMRELVLYDK
KWMRELVLYDR

SEQ ID NO: 47707 - protein, 9 aa, Artificial Sequence
  Description of Artificial Sequence: Synthetic peptide
  Seed: KWMRELILY
KIMRELILH

SEQ ID NO: 47708 - protein, 9 aa, Artificial Sequence
  Description of Artificial Sequence: Synthetic peptide
  Seed: KWMRELILY
KHMRELILY

SEQ ID NO: 47709 - protein, 9 aa, Artificial Sequence
  Description of Artificial Sequence: Synthetic peptide
  Seed: KTRSAYERM
KSRSAYERW

SEQ ID NO: 47710 - protein, 10 aa, Artificial Sequence
  Description of Artificial Sequence: Synthetic peptide
  Seed: KTRSAYERMC
KIRSAYERMS

SEQ ID NO: 47711 - protein, 10 aa, Artificial Sequence
  Description of Artificial Sequence: Synthetic peptide
  Seed: KTRSAYERMC
KIRSAYERMQ

SEQ ID NO: 47712 - protein, 10 aa, Artificial Sequence
  Description of Artificial Sequence: Synthetic peptide
  Seed: KTRSAYERMC
KIRSAYERME

SEQ ID NO: 47713 - protein, 10 aa, Artificial Sequence
  Description of Artificial Sequence: Synthetic peptide
  Seed: KTRSAYERMC
KIRSAYERMG

SEQ ID NO: 47714 - protein, 10 aa, Artificial Sequence
  Description of Artificial Sequence: Synthetic peptide
  Seed: KTRSAYERMC
KIRSAYERMI

SEQ ID NO: 47715 - protein, 10 aa, Artificial Sequence
  Description of Artificial Sequence: Synthetic peptide
  Seed: KTRSAYERMC
KIRSAYERML

SEQ ID NO: 47716 - protein, 10 aa, Artificial Sequence
  Description of Artificial Sequence: Synthetic peptide
  Seed: KTRSAYERMC
KIRSAYERMK

SEQ ID NO: 47717 - protein, 10 aa, Artificial Sequence
  Description of Artificial Sequence: Synthetic peptide
  Seed: KTRSAYERMC
KIRSAYERMM

SEQ ID NO: 47718 - protein, 10 aa, Artificial Sequence
  Description of Artificial Sequence: Synthetic peptide
  Seed: KTRSAYERMC
KIRSAYERMF

SEQ ID NO: 47719 - protein, 10 aa, Artificial Sequence
  Description of Artificial Sequence: Synthetic peptide
  Seed: KTRSAYERMC
KIRSAYERMP

SEQ ID NO: 47720 - protein, 10 aa, Artificial Sequence
  Description of Artificial Sequence: Synthetic peptide
  Seed: KTRSAYERMC
KIRSAYERMT

SEQ ID NO: 47721 - protein, 10 aa, Artificial Sequence
  Description of Artificial Sequence: Synthetic peptide
  Seed: KTRSAYERMC
KLRSAYERMP

SEQ ID NO: 47722 - protein, 10 aa, Artificial Sequence
  Description of Artificial Sequence: Synthetic peptide
  Seed: KTRSAYERMC
KIRSAYERMY

SEQ ID NO: 47723 - protein, 10 aa, Artificial Sequence
  Description of Artificial Sequence: Synthetic peptide
  Seed: KTRSAYERMC
KIRSAYERMV

SEQ ID NO: 47724 - protein, 10 aa, Artificial Sequence
  Description of Artificial Sequence: Synthetic peptide
  Seed: KTRSAYERMC
KLRSAYERMA

SEQ ID NO: 47725 - protein, 10 aa, Artificial Sequence
  Description of Artificial Sequence: Synthetic peptide
  Seed: KTRSAYERMC
KLRSAYERMR

SEQ ID NO: 47726 - protein, 10 aa, Artificial Sequence
  Description of Artificial Sequence: Synthetic peptide
  Seed: KTRSAYERMC
KLRSAYERMG

SEQ ID NO: 47727 - protein, 10 aa, Artificial Sequence
  Description of Artificial Sequence: Synthetic peptide
  Seed: KTRSAYERMC
KLRSAYERMI

SEQ ID NO: 47728 - protein, 10 aa, Artificial Sequence
  Description of Artificial Sequence: Synthetic peptide
  Seed: KTRSAYERMC
KLRSAYERML

SEQ ID NO: 47729 - protein, 10 aa, Artificial Sequence
  Description of Artificial Sequence: Synthetic peptide
  Seed: KTRSAYERMC
KLRSAYERMK

SEQ ID NO: 47730 - protein, 10 aa, Artificial Sequence
  Description of Artificial Sequence: Synthetic peptide
  Seed: KTRSAYERMC
KLRSAYERMM

SEQ ID NO: 47731 - protein, 10 aa, Artificial Sequence
  Description of Artificial Sequence: Synthetic peptide
  Seed: KTRSAYERMC
KIRSAYERMC

SEQ ID NO: 47732 - protein, 10 aa, Artificial Sequence
  Description of Artificial Sequence: Synthetic peptide
  Seed: KTRSAYERMC
KIRSAYERMN

SEQ ID NO: 47733 - protein, 10 aa, Artificial Sequence
  Description of Artificial Sequence: Synthetic peptide
  Seed: KTRSAYERMC
KIRSAYERMR

SEQ ID NO: 47734 - protein, 10 aa, Artificial Sequence
  Description of Artificial Sequence: Synthetic peptide
  Seed: KTRSAYERMC
KIRSAYERMA

SEQ ID NO: 47735 - protein, 10 aa, Artificial Sequence
  Description of Artificial Sequence: Synthetic peptide
  Seed: KTRSAYERMC
KCRSAYERMK

SEQ ID NO: 47736 - protein, 10 aa, Artificial Sequence
  Description of Artificial Sequence: Synthetic peptide
  Seed: KTRSAYERMC
KQRSAYERMA

SEQ ID NO: 47737 - protein, 10 aa, Artificial Sequence
  Description of Artificial Sequence: Synthetic peptide
  Seed: KTRSAYERMC
KQRSAYERMR

SEQ ID NO: 47738 - protein, 10 aa, Artificial Sequence
  Description of Artificial Sequence: Synthetic peptide
  Seed: KTRSAYERMC
KQRSAYERMG

SEQ ID NO: 47739 - protein, 10 aa, Artificial Sequence
  Description of Artificial Sequence: Synthetic peptide
  Seed: KTRSAYERMC
KQRSAYERMI

SEQ ID NO: 47740 - protein, 10 aa, Artificial Sequence
  Description of Artificial Sequence: Synthetic peptide
  Seed: KTRSAYERMC
KQRSAYERML

SEQ ID NO: 47741 - protein, 10 aa, Artificial Sequence
  Description of Artificial Sequence: Synthetic peptide
  Seed: KTRSAYERMC
KQRSAYERMK

SEQ ID NO: 47742 - protein, 10 aa, Artificial Sequence
  Description of Artificial Sequence: Synthetic peptide
  Seed: KTRSAYERMC
KQRSAYERMM

SEQ ID NO: 47743 - protein, 10 aa, Artificial Sequence
  Description of Artificial Sequence: Synthetic peptide
  Seed: KTRSAYERMC
KQRSAYERMS

SEQ ID NO: 47744 - protein, 10 aa, Artificial Sequence
  Description of Artificial Sequence: Synthetic peptide
  Seed: KTRSAYERMC
KQRSAYERMY

SEQ ID NO: 47745 - protein, 10 aa, Artificial Sequence
  Description of Artificial Sequence: Synthetic peptide
  Seed: KTRSAYERMC
KQRSAYERMV

SEQ ID NO: 47746 - protein, 10 aa, Artificial Sequence
  Description of Artificial Sequence: Synthetic peptide
  Seed: KTRSAYERMC
KGRSAYERMA

SEQ ID NO: 47747 - protein, 10 aa, Artificial Sequence
  Description of Artificial Sequence: Synthetic peptide
  Seed: KTRSAYERMC
KGRSAYERMI

SEQ ID NO: 47748 - protein, 10 aa, Artificial Sequence
  Description of Artificial Sequence: Synthetic peptide
  Seed: KTRSAYERMC
KGRSAYERML

SEQ ID NO: 47749 - protein, 10 aa, Artificial Sequence
  Description of Artificial Sequence: Synthetic peptide
  Seed: KTRSAYERMC
KGRSAYERMK

SEQ ID NO: 47750 - protein, 10 aa, Artificial Sequence
  Description of Artificial Sequence: Synthetic peptide
  Seed: KTRSAYERMC
KGRSAYERMM

SEQ ID NO: 47751 - protein, 10 aa, Artificial Sequence
  Description of Artificial Sequence: Synthetic peptide
  Seed: KTRSAYERMC
KGRSAYERMY

SEQ ID NO: 47752 - protein, 10 aa, Artificial Sequence
  Description of Artificial Sequence: Synthetic peptide
  Seed: KTRSAYERMC
KGRSAYERMV

SEQ ID NO: 47753 - protein, 10 aa, Artificial Sequence
  Description of Artificial Sequence: Synthetic peptide
  Seed: KTRSAYERMC
KHRSAYERMK

SEQ ID NO: 47754 - protein, 10 aa, Artificial Sequence
  Description of Artificial Sequence: Synthetic peptide
  Seed: KTRSAYERMC
KLRSAYERMF

SEQ ID NO: 47755 - protein, 10 aa, Artificial Sequence
  Description of Artificial Sequence: Synthetic peptide
  Seed: KTRSAYERMC
KLRSAYERMS

SEQ ID NO: 47756 - protein, 10 aa, Artificial Sequence
  Description of Artificial Sequence: Synthetic peptide
  Seed: KTRSAYERMC
KSRSAYERMI

SEQ ID NO: 47757 - protein, 10 aa, Artificial Sequence
  Description of Artificial Sequence: Synthetic peptide
  Seed: KTRSAYERMC
KFRSAYERMS

SEQ ID NO: 47758 - protein, 10 aa, Artificial Sequence
  Description of Artificial Sequence: Synthetic peptide
  Seed: KTRSAYERMC
KFRSAYERMC

SEQ ID NO: 47759 - protein, 10 aa, Artificial Sequence
  Description of Artificial Sequence: Synthetic peptide
  Seed: KTRSAYERMC
KFRSAYERMQ

SEQ ID NO: 47760 - protein, 10 aa, Artificial Sequence
  Description of Artificial Sequence: Synthetic peptide
  Seed: KTRSAYERMC
KFRSAYERMG

SEQ ID NO: 47761 - protein, 10 aa, Artificial Sequence
  Description of Artificial Sequence: Synthetic peptide
  Seed: KTRSAYERMC
KFRSAYERMI

SEQ ID NO: 47762 - protein, 10 aa, Artificial Sequence
  Description of Artificial Sequence: Synthetic peptide
  Seed: KTRSAYERMC
KFRSAYERML

SEQ ID NO: 47763 - protein, 10 aa, Artificial Sequence
  Description of Artificial Sequence: Synthetic peptide
  Seed: KTRSAYERMC
KFRSAYERMK

SEQ ID NO: 47764 - protein, 10 aa, Artificial Sequence
  Description of Artificial Sequence: Synthetic peptide
  Seed: KTRSAYERMC
KFRSAYERMM

SEQ ID NO: 47765 - protein, 10 aa, Artificial Sequence
  Description of Artificial Sequence: Synthetic peptide
  Seed: KTRSAYERMC
KFRSAYERMF

SEQ ID NO: 47766 - protein, 10 aa, Artificial Sequence
  Description of Artificial Sequence: Synthetic peptide
  Seed: KTRSAYERMC
KFRSAYERMP

SEQ ID NO: 47767 - protein, 10 aa, Artificial Sequence
  Description of Artificial Sequence: Synthetic peptide
  Seed: KTRSAYERMC
KFRSAYERMT

SEQ ID NO: 47768 - protein, 10 aa, Artificial Sequence
  Description of Artificial Sequence: Synthetic peptide
  Seed: KTRSAYERMC
KLRSAYERMT

SEQ ID NO: 47769 - protein, 10 aa, Artificial Sequence
  Description of Artificial Sequence: Synthetic peptide
  Seed: KTRSAYERMC
KFRSAYERMY

SEQ ID NO: 47770 - protein, 10 aa, Artificial Sequence
  Description of Artificial Sequence: Synthetic peptide
  Seed: KTRSAYERMC
KFRSAYERMV

SEQ ID NO: 47771 - protein, 10 aa, Artificial Sequence
  Description of Artificial Sequence: Synthetic peptide
  Seed: KTRSAYERMC
KSRSAYERMA

SEQ ID NO: 47772 - protein, 10 aa, Artificial Sequence
  Description of Artificial Sequence: Synthetic peptide
  Seed: KTRSAYERMC
KSRSAYERMR

SEQ ID NO: 47773 - protein, 10 aa, Artificial Sequence
  Description of Artificial Sequence: Synthetic peptide
  Seed: KTRSAYERMC
KSRSAYERMN

SEQ ID NO: 47774 - protein, 10 aa, Artificial Sequence
  Description of Artificial Sequence: Synthetic peptide
  Seed: KTRSAYERMC
KSRSAYERMC

SEQ ID NO: 47775 - protein, 10 aa, Artificial Sequence
  Description of Artificial Sequence: Synthetic peptide
  Seed: KTRSAYERMC
KSRSAYERMQ

SEQ ID NO: 47776 - protein, 10 aa, Artificial Sequence
  Description of Artificial Sequence: Synthetic peptide
  Seed: KTRSAYERMC
KSRSAYERME

SEQ ID NO: 47777 - protein, 10 aa, Artificial Sequence
  Description of Artificial Sequence: Synthetic peptide
  Seed: KTRSAYERMC
KSRSAYERMG

SEQ ID NO: 47778 - protein, 10 aa, Artificial Sequence
  Description of Artificial Sequence: Synthetic peptide
  Seed: KTRSAYERMC
KFRSAYERMR

SEQ ID NO: 47779 - protein, 10 aa, Artificial Sequence
  Description of Artificial Sequence: Synthetic peptide
  Seed: KTRSAYERMC
KFRSAYERMA

SEQ ID NO: 47780 - protein, 10 aa, Artificial Sequence
  Description of Artificial Sequence: Synthetic peptide
  Seed: KTRSAYERMC
KMRSAYERMV

SEQ ID NO: 47781 - protein, 10 aa, Artificial Sequence
  Description of Artificial Sequence: Synthetic peptide
  Seed: KTRSAYERMC
KMRSAYERMY

SEQ ID NO: 47782 - protein, 10 aa, Artificial Sequence
  Description of Artificial Sequence: Synthetic peptide
  Seed: KTRSAYERMC
KLRSAYERMY

SEQ ID NO: 47783 - protein, 10 aa, Artificial Sequence
  Description of Artificial Sequence: Synthetic peptide
  Seed: KTRSAYERMC
KLRSAYERMV

SEQ ID NO: 47784 - protein, 10 aa, Artificial Sequence
  Description of Artificial Sequence: Synthetic peptide
  Seed: KTRSAYERMC
KKRSAYERMK

SEQ ID NO: 47785 - protein, 10 aa, Artificial Sequence
  Description of Artificial Sequence: Synthetic peptide
  Seed: KTRSAYERMC
KMRSAYERMA

SEQ ID NO: 47786 - protein, 10 aa, Artificial Sequence
  Description of Artificial Sequence: Synthetic peptide
  Seed: KTRSAYERMC
KMRSAYERMR

SEQ ID NO: 47787 - protein, 10 aa, Artificial Sequence
  Description of Artificial Sequence: Synthetic peptide
  Seed: KTRSAYERMC
KMRSAYERMN

SEQ ID NO: 47788 - protein, 10 aa, Artificial Sequence
  Description of Artificial Sequence: Synthetic peptide
  Seed: KTRSAYERMC
KMRSAYERMC

SEQ ID NO: 47789 - protein, 10 aa, Artificial Sequence
  Description of Artificial Sequence: Synthetic peptide
  Seed: KTRSAYERMC
KMRSAYERMQ

SEQ ID NO: 47790 - protein, 10 aa, Artificial Sequence
  Description of Artificial Sequence: Synthetic peptide
  Seed: KTRSAYERMC
KMRSAYERME

SEQ ID NO: 47791 - protein, 10 aa, Artificial Sequence
  Description of Artificial Sequence: Synthetic peptide
  Seed: KTRSAYERMC
KMRSAYERMG

SEQ ID NO: 47792 - protein, 10 aa, Artificial Sequence
  Description of Artificial Sequence: Synthetic peptide
  Seed: KTRSAYERMC
KMRSAYERMH

SEQ ID NO: 47793 - protein, 10 aa, Artificial Sequence
  Description of Artificial Sequence: Synthetic peptide
  Seed: KTRSAYERMC
KMRSAYERMI

SEQ ID NO: 47794 - protein, 10 aa, Artificial Sequence
  Description of Artificial Sequence: Synthetic peptide
  Seed: KTRSAYERMC
KMRSAYERML

SEQ ID NO: 47795 - protein, 10 aa, Artificial Sequence
  Description of Artificial Sequence: Synthetic peptide
  Seed: KTRSAYERMC
KMRSAYERMK

SEQ ID NO: 47796 - protein, 10 aa, Artificial Sequence
  Description of Artificial Sequence: Synthetic peptide
  Seed: KTRSAYERMC
KMRSAYERMM

SEQ ID NO: 47797 - protein, 10 aa, Artificial Sequence
  Description of Artificial Sequence: Synthetic peptide
  Seed: KTRSAYERMC
KMRSAYERMF

SEQ ID NO: 47798 - protein, 10 aa, Artificial Sequence
  Description of Artificial Sequence: Synthetic peptide
  Seed: KTRSAYERMC
KMRSAYERMP

SEQ ID NO: 47799 - protein, 10 aa, Artificial Sequence
  Description of Artificial Sequence: Synthetic peptide
  Seed: KTRSAYERMC
KMRSAYERMS

SEQ ID NO: 47800 - protein, 10 aa, Artificial Sequence
  Description of Artificial Sequence: Synthetic peptide
  Seed: KTRSAYERMC
KMRSAYERMT

SEQ ID NO: 47801 - protein, 10 aa, Artificial Sequence
  Description of Artificial Sequence: Synthetic peptide
  Seed: KTRSAYERMC
KNRSAYERMV

SEQ ID NO: 47802 - protein, 10 aa, Artificial Sequence
  Description of Artificial Sequence: Synthetic peptide
  Seed: KTRSAYERMC
KNRSAYERMK

SEQ ID NO: 47803 - protein, 10 aa, Artificial Sequence
  Description of Artificial Sequence: Synthetic peptide
  Seed: KTRSAYERMC
KNRSAYERML

SEQ ID NO: 47804 - protein, 9 aa, Artificial Sequence
  Description of Artificial Sequence: Synthetic peptide
  Seed: KTRSAYERM
KWRSAYERT

SEQ ID NO: 47805 - protein, 9 aa, Artificial Sequence
  Description of Artificial Sequence: Synthetic peptide
  Seed: KTRSAYERM
KWRSAYERC

SEQ ID NO: 47806 - protein, 9 aa, Artificial Sequence
  Description of Artificial Sequence: Synthetic peptide
  Seed: KTRSAYERM
KWRSAYERG

SEQ ID NO: 47807 - protein, 9 aa, Artificial Sequence
  Description of Artificial Sequence: Synthetic peptide
  Seed: KTRSAYERM
KWRSAYERI

SEQ ID NO: 47808 - protein, 9 aa, Artificial Sequence
  Description of Artificial Sequence: Synthetic peptide
  Seed: KTRSAYERM
KWRSAYERL

SEQ ID NO: 47809 - protein, 9 aa, Artificial Sequence
  Description of Artificial Sequence: Synthetic peptide
  Seed: KTRSAYERM
KWRSAYERK

SEQ ID NO: 47810 - protein, 9 aa, Artificial Sequence
  Description of Artificial Sequence: Synthetic peptide
  Seed: KTRSAYERM
KWRSAYERM

SEQ ID NO: 47811 - protein, 9 aa, Artificial Sequence
  Description of Artificial Sequence: Synthetic peptide
  Seed: KTRSAYERM
KWRSAYERF

SEQ ID NO: 47812 - protein, 9 aa, Artificial Sequence
  Description of Artificial Sequence: Synthetic peptide
  Seed: KTRSAYERM
KWRSAYERP

SEQ ID NO: 47813 - protein, 9 aa, Artificial Sequence
  Description of Artificial Sequence: Synthetic peptide
  Seed: KTRSAYERM
KWRSAYERS

SEQ ID NO: 47814 - protein, 9 aa, Artificial Sequence
  Description of Artificial Sequence: Synthetic peptide
  Seed: KTRSAYERM
KWRSAYERY

SEQ ID NO: 47815 - protein, 10 aa, Artificial Sequence
  Description of Artificial Sequence: Synthetic peptide
  Seed: KTRSAYERMC
KNRSAYERMI

SEQ ID NO: 47816 - protein, 9 aa, Artificial Sequence
  Description of Artificial Sequence: Synthetic peptide
  Seed: KTRSAYERM
KWRSAYERV

SEQ ID NO: 47817 - protein, 9 aa, Artificial Sequence
  Description of Artificial Sequence: Synthetic peptide
  Seed: KTRSAYERM
KYRSAYERA

SEQ ID NO: 47818 - protein, 9 aa, Artificial Sequence
  Description of Artificial Sequence: Synthetic peptide
  Seed: KTRSAYERM
KYRSAYERR

SEQ ID NO: 47819 - protein, 9 aa, Artificial Sequence
  Description of Artificial Sequence: Synthetic peptide
  Seed: KTRSAYERM
KYRSAYERN

SEQ ID NO: 47820 - protein, 9 aa, Artificial Sequence
  Description of Artificial Sequence: Synthetic peptide
  Seed: KTRSAYERM
KYRSAYERC

SEQ ID NO: 47821 - protein, 9 aa, Artificial Sequence
  Description of Artificial Sequence: Synthetic peptide
  Seed: KTRSAYERM
KYRSAYERQ

SEQ ID NO: 47822 - protein, 9 aa, Artificial Sequence
  Description of Artificial Sequence: Synthetic peptide
  Seed: KTRSAYERM
KYRSAYERE

SEQ ID NO: 47823 - protein, 9 aa, Artificial Sequence
  Description of Artificial Sequence: Synthetic peptide
  Seed: KTRSAYERM
KYRSAYERG

SEQ ID NO: 47824 - protein, 9 aa, Artificial Sequence
  Description of Artificial Sequence: Synthetic peptide
  Seed: KTRSAYERM
KYRSAYERH

SEQ ID NO: 47825 - protein, 9 aa, Artificial Sequence
  Description of Artificial Sequence: Synthetic peptide
  Seed: KTRSAYERM
KWRSAYERR

SEQ ID NO: 47826 - protein, 9 aa, Artificial Sequence
  Description of Artificial Sequence: Synthetic peptide
  Seed: KTRSAYERM
KWRSAYERA

SEQ ID NO: 47827 - protein, 9 aa, Artificial Sequence
  Description of Artificial Sequence: Synthetic peptide
  Seed: KTRSAYERM
KTRSAYERV

SEQ ID NO: 47828 - protein, 9 aa, Artificial Sequence
  Description of Artificial Sequence: Synthetic peptide
  Seed: KTRSAYERM
KTRSAYERY

SEQ ID NO: 47829 - protein, 9 aa, Artificial Sequence
  Description of Artificial Sequence: Synthetic peptide
  Seed: KTRSAYERM
KSRSAYERY

SEQ ID NO: 47830 - protein, 9 aa, Artificial Sequence
  Description of Artificial Sequence: Synthetic peptide
  Seed: KTRSAYERM
KSRSAYERV

SEQ ID NO: 47831 - protein, 9 aa, Artificial Sequence
  Description of Artificial Sequence: Synthetic peptide
  Seed: KTRSAYERM
KTRSAYERA

SEQ ID NO: 47832 - protein, 9 aa, Artificial Sequence
  Description of Artificial Sequence: Synthetic peptide
  Seed: KTRSAYERM
KTRSAYERR

SEQ ID NO: 47833 - protein, 9 aa, Artificial Sequence
  Description of Artificial Sequence: Synthetic peptide
  Seed: KTRSAYERM
KTRSAYERN

SEQ ID NO: 47834 - protein, 9 aa, Artificial Sequence
  Description of Artificial Sequence: Synthetic peptide
  Seed: KTRSAYERM
KTRSAYERD

SEQ ID NO: 47835 - protein, 9 aa, Artificial Sequence
  Description of Artificial Sequence: Synthetic peptide
  Seed: KTRSAYERM
KTRSAYERC

SEQ ID NO: 47836 - protein, 9 aa, Artificial Sequence
  Description of Artificial Sequence: Synthetic peptide
  Seed: KTRSAYERM
KTRSAYERQ

SEQ ID NO: 47837 - protein, 9 aa, Artificial Sequence
  Description of Artificial Sequence: Synthetic peptide
  Seed: KTRSAYERM
KTRSAYERE

SEQ ID NO: 47838 - protein, 9 aa, Artificial Sequence
  Description of Artificial Sequence: Synthetic peptide
  Seed: KTRSAYERM
KTRSAYERG

SEQ ID NO: 47839 - protein, 9 aa, Artificial Sequence
  Description of Artificial Sequence: Synthetic peptide
  Seed: KTRSAYERM
KTRSAYERH

SEQ ID NO: 47840 - protein, 9 aa, Artificial Sequence
  Description of Artificial Sequence: Synthetic peptide
  Seed: KTRSAYERM
KTRSAYERI

SEQ ID NO: 47841 - protein, 9 aa, Artificial Sequence
  Description of Artificial Sequence: Synthetic peptide
  Seed: KTRSAYERM
KTRSAYERL

SEQ ID NO: 47842 - protein, 9 aa, Artificial Sequence
  Description of Artificial Sequence: Synthetic peptide
  Seed: KTRSAYERM
KTRSAYERK

SEQ ID NO: 47843 - protein, 9 aa, Artificial Sequence
  Description of Artificial Sequence: Synthetic peptide
  Seed: KTRSAYERM
KTRSAYERF

SEQ ID NO: 47844 - protein, 9 aa, Artificial Sequence
  Description of Artificial Sequence: Synthetic peptide
  Seed: KTRSAYERM
KTRSAYERP

SEQ ID NO: 47845 - protein, 9 aa, Artificial Sequence
  Description of Artificial Sequence: Synthetic peptide
  Seed: KTRSAYERM
KTRSAYERS

SEQ ID NO: 47846 - protein, 9 aa, Artificial Sequence
  Description of Artificial Sequence: Synthetic peptide
  Seed: KTRSAYERM
KTRSAYERT

SEQ ID NO: 47847 - protein, 9 aa, Artificial Sequence
  Description of Artificial Sequence: Synthetic peptide
  Seed: KTRSAYERM
KTRSAYERW

SEQ ID NO: 47848 - protein, 9 aa, Artificial Sequence
  Description of Artificial Sequence: Synthetic peptide
  Seed: KTRSAYERM
KYRSAYERI

SEQ ID NO: 47849 - protein, 9 aa, Artificial Sequence
  Description of Artificial Sequence: Synthetic peptide
  Seed: KTRSAYERM
KYRSAYERL

SEQ ID NO: 47850 - protein, 9 aa, Artificial Sequence
  Description of Artificial Sequence: Synthetic peptide
  Seed: KTRSAYERM
KYRSAYERK

SEQ ID NO: 47851 - protein, 9 aa, Artificial Sequence
  Description of Artificial Sequence: Synthetic peptide
  Seed: KTRSAYERM
KVRSAYERS

SEQ ID NO: 47852 - protein, 9 aa, Artificial Sequence
  Description of Artificial Sequence: Synthetic peptide
  Seed: KTRSAYERM
KVRSAYERW

SEQ ID NO: 47853 - protein, 9 aa, Artificial Sequence
  Description of Artificial Sequence: Synthetic peptide
  Seed: KTRSAYERM
KVRSAYERY

SEQ ID NO: 47854 - protein, 9 aa, Artificial Sequence
  Description of Artificial Sequence: Synthetic peptide
  Seed: KTRSAYERM
KVRSAYERV

SEQ ID NO: 47855 - protein, 10 aa, Artificial Sequence
  Description of Artificial Sequence: Synthetic peptide
  Seed: KTRSAYERMC
KARSAYERMA

SEQ ID NO: 47856 - protein, 10 aa, Artificial Sequence
  Description of Artificial Sequence: Synthetic peptide
  Seed: KTRSAYERMC
KARSAYERMR

SEQ ID NO: 47857 - protein, 10 aa, Artificial Sequence
  Description of Artificial Sequence: Synthetic peptide
  Seed: KTRSAYERMC
KARSAYERMC

SEQ ID NO: 47858 - protein, 10 aa, Artificial Sequence
  Description of Artificial Sequence: Synthetic peptide
  Seed: KTRSAYERMC
KARSAYERMQ

SEQ ID NO: 47859 - protein, 10 aa, Artificial Sequence
  Description of Artificial Sequence: Synthetic peptide
  Seed: KTRSAYERMC
KARSAYERMG

SEQ ID NO: 47860 - protein, 10 aa, Artificial Sequence
  Description of Artificial Sequence: Synthetic peptide
  Seed: KTRSAYERMC
KARSAYERMI

SEQ ID NO: 47861 - protein, 10 aa, Artificial Sequence
  Description of Artificial Sequence: Synthetic peptide
  Seed: KTRSAYERMC
KARSAYERML

SEQ ID NO: 47862 - protein, 10 aa, Artificial Sequence
  Description of Artificial Sequence: Synthetic peptide
  Seed: KTRSAYERMC
KARSAYERMK

SEQ ID NO: 47863 - protein, 10 aa, Artificial Sequence
  Description of Artificial Sequence: Synthetic peptide
  Seed: KTRSAYERMC
KARSAYERMM

SEQ ID NO: 47864 - protein, 10 aa, Artificial Sequence
  Description of Artificial Sequence: Synthetic peptide
  Seed: KTRSAYERMC
KARSAYERMF

SEQ ID NO: 47865 - protein, 10 aa, Artificial Sequence
  Description of Artificial Sequence: Synthetic peptide
  Seed: KTRSAYERMC
KARSAYERMP

SEQ ID NO: 47866 - protein, 10 aa, Artificial Sequence
  Description of Artificial Sequence: Synthetic peptide
  Seed: KTRSAYERMC
KARSAYERMS

SEQ ID NO: 47867 - protein, 10 aa, Artificial Sequence
  Description of Artificial Sequence: Synthetic peptide
  Seed: KTRSAYERMC
KARSAYERMT

SEQ ID NO: 47868 - protein, 10 aa, Artificial Sequence
  Description of Artificial Sequence: Synthetic peptide
  Seed: KTRSAYERMC
KARSAYERMY

SEQ ID NO: 47869 - protein, 10 aa, Artificial Sequence
  Description of Artificial Sequence: Synthetic peptide
  Seed: KTRSAYERMC
KARSAYERMV

SEQ ID NO: 47870 - protein, 10 aa, Artificial Sequence
  Description of Artificial Sequence: Synthetic peptide
  Seed: KTRSAYERMC
KNRSAYERMA

SEQ ID NO: 47871 - protein, 9 aa, Artificial Sequence
  Description of Artificial Sequence: Synthetic peptide
  Seed: KTRSAYERM
KVRSAYERT

SEQ ID NO: 47872 - protein, 9 aa, Artificial Sequence
  Description of Artificial Sequence: Synthetic peptide
  Seed: KTRSAYERM
KVRSAYERP

SEQ ID NO: 47873 - protein, 9 aa, Artificial Sequence
  Description of Artificial Sequence: Synthetic peptide
  Seed: KTRSAYERM
KYRSAYERM

SEQ ID NO: 47874 - protein, 9 aa, Artificial Sequence
  Description of Artificial Sequence: Synthetic peptide
  Seed: KTRSAYERM
KVRSAYERF

SEQ ID NO: 47875 - protein, 9 aa, Artificial Sequence
  Description of Artificial Sequence: Synthetic peptide
  Seed: KTRSAYERM
KYRSAYERF

SEQ ID NO: 47876 - protein, 9 aa, Artificial Sequence
  Description of Artificial Sequence: Synthetic peptide
  Seed: KTRSAYERM
KYRSAYERP

SEQ ID NO: 47877 - protein, 9 aa, Artificial Sequence
  Description of Artificial Sequence: Synthetic peptide
  Seed: KTRSAYERM
KYRSAYERS

SEQ ID NO: 47878 - protein, 9 aa, Artificial Sequence
  Description of Artificial Sequence: Synthetic peptide
  Seed: KTRSAYERM
KYRSAYERT

SEQ ID NO: 47879 - protein, 9 aa, Artificial Sequence
  Description of Artificial Sequence: Synthetic peptide
  Seed: KTRSAYERM
KYRSAYERY

SEQ ID NO: 47880 - protein, 9 aa, Artificial Sequence
  Description of Artificial Sequence: Synthetic peptide
  Seed: KTRSAYERM
KYRSAYERV

SEQ ID NO: 47881 - protein, 9 aa, Artificial Sequence
  Description of Artificial Sequence: Synthetic peptide
  Seed: KTRSAYERM
KVRSAYERA

SEQ ID NO: 47882 - protein, 9 aa, Artificial Sequence
  Description of Artificial Sequence: Synthetic peptide
  Seed: KTRSAYERM
KVRSAYERR

SEQ ID NO: 47883 - protein, 9 aa, Artificial Sequence
  Description of Artificial Sequence: Synthetic peptide
  Seed: KTRSAYERM
KVRSAYERN

SEQ ID NO: 47884 - protein, 9 aa, Artificial Sequence
  Description of Artificial Sequence: Synthetic peptide
  Seed: KTRSAYERM
KVRSAYERD

SEQ ID NO: 47885 - protein, 9 aa, Artificial Sequence
  Description of Artificial Sequence: Synthetic peptide
  Seed: KTRSAYERM
KVRSAYERC

SEQ ID NO: 47886 - protein, 9 aa, Artificial Sequence
  Description of Artificial Sequence: Synthetic peptide
  Seed: KTRSAYERM
KVRSAYERQ

SEQ ID NO: 47887 - protein, 9 aa, Artificial Sequence
  Description of Artificial Sequence: Synthetic peptide
  Seed: KTRSAYERM
KVRSAYERE

SEQ ID NO: 47888 - protein, 9 aa, Artificial Sequence
  Description of Artificial Sequence: Synthetic peptide
  Seed: KTRSAYERM
KVRSAYERG

SEQ ID NO: 47889 - protein, 9 aa, Artificial Sequence
  Description of Artificial Sequence: Synthetic peptide
  Seed: KTRSAYERM
KVRSAYERH

SEQ ID NO: 47890 - protein, 9 aa, Artificial Sequence
  Description of Artificial Sequence: Synthetic peptide
  Seed: KTRSAYERM
KVRSAYERI

SEQ ID NO: 47891 - protein, 9 aa, Artificial Sequence
  Description of Artificial Sequence: Synthetic peptide
  Seed: KTRSAYERM
KVRSAYERL

SEQ ID NO: 47892 - protein, 9 aa, Artificial Sequence
  Description of Artificial Sequence: Synthetic peptide
  Seed: KTRSAYERM
KVRSAYERK

SEQ ID NO: 47893 - protein, 9 aa, Artificial Sequence
  Description of Artificial Sequence: Synthetic peptide
  Seed: KTRSAYERM
KVRSAYERM

SEQ ID NO: 47894 - protein, 10 aa, Artificial Sequence
  Description of Artificial Sequence: Synthetic peptide
  Seed: KTRSAYERMC
KSRSAYERMH

SEQ ID NO: 47895 - protein, 10 aa, Artificial Sequence
  Description of Artificial Sequence: Synthetic peptide
  Seed: KTRSAYERMC
KSRSAYERML

SEQ ID NO: 47896 - protein, 9 aa, Artificial Sequence
  Description of Artificial Sequence: Synthetic peptide
  Seed: KWMRELILY
KHMRELILW

SEQ ID NO: 47897 - protein, 11 aa, Artificial Sequence
  Description of Artificial Sequence: Synthetic peptide
  Seed: KVSPRGKLSTR
KISPRGKLSTR

SEQ ID NO: 47898 - protein, 9 aa, Artificial Sequence
  Description of Artificial Sequence: Synthetic peptide
  Seed: KVSPRGKLS
KVSPRGKLL

SEQ ID NO: 47899 - protein, 9 aa, Artificial Sequence
  Description of Artificial Sequence: Synthetic peptide
  Seed: KVSPRGKLS
KVSPRGKLK

SEQ ID NO: 47900 - protein, 9 aa, Artificial Sequence
  Description of Artificial Sequence: Synthetic peptide
  Seed: KVSPRGKLS
KVSPRGKLM

SEQ ID NO: 47901 - protein, 9 aa, Artificial Sequence
  Description of Artificial Sequence: Synthetic peptide
  Seed: KVSPRGKLS
KVSPRGKLY

SEQ ID NO: 47902 - protein, 9 aa, Artificial Sequence
  Description of Artificial Sequence: Synthetic peptide
  Seed: KVSPRGKLS
KVSPRGKLV

SEQ ID NO: 47903 - protein, 11 aa, Artificial Sequence
  Description of Artificial Sequence: Synthetic peptide
  Seed: KVSPRGKLSTR
KASPRGKLSTR

SEQ ID NO: 47904 - protein, 11 aa, Artificial Sequence
  Description of Artificial Sequence: Synthetic peptide
  Seed: KVSPRGKLSTR
KNSPRGKLSTR

SEQ ID NO: 47905 - protein, 11 aa, Artificial Sequence
  Description of Artificial Sequence: Synthetic peptide
  Seed: KVSPRGKLSTR
KQSPRGKLSTR

SEQ ID NO: 47906 - protein, 11 aa, Artificial Sequence
  Description of Artificial Sequence: Synthetic peptide
  Seed: KVSPRGKLSTR
KGSPRGKLSTR

SEQ ID NO: 47907 - protein, 11 aa, Artificial Sequence
  Description of Artificial Sequence: Synthetic peptide
  Seed: KVSPRGKLSTR
KLSPRGKLSTR

SEQ ID NO: 47908 - protein, 11 aa, Artificial Sequence
  Description of Artificial Sequence: Synthetic peptide
  Seed: KVSPRGKLSTR
KVSPRGKLSTK

SEQ ID NO: 47909 - protein, 11 aa, Artificial Sequence
  Description of Artificial Sequence: Synthetic peptide
  Seed: KVSPRGKLSTR
KMSPRGKLSTR

SEQ ID NO: 47910 - protein, 11 aa, Artificial Sequence
  Description of Artificial Sequence: Synthetic peptide
  Seed: KVSPRGKLSTR
KMSPRGKLSTK

SEQ ID NO: 47911 - protein, 11 aa, Artificial Sequence
  Description of Artificial Sequence: Synthetic peptide
  Seed: KVSPRGKLSTR
KFSPRGKLSTR

SEQ ID NO: 47912 - protein, 11 aa, Artificial Sequence
  Description of Artificial Sequence: Synthetic peptide
  Seed: KVSPRGKLSTR
KFSPRGKLSTK

SEQ ID NO: 47913 - protein, 11 aa, Artificial Sequence
  Description of Artificial Sequence: Synthetic peptide
  Seed: KVSPRGKLSTR
KSSPRGKLSTR

SEQ ID NO: 47914 - protein, 11 aa, Artificial Sequence
  Description of Artificial Sequence: Synthetic peptide
  Seed: KVSPRGKLSTR
KTSPRGKLSTR

SEQ ID NO: 47915 - protein, 11 aa, Artificial Sequence
  Description of Artificial Sequence: Synthetic peptide
  Seed: KVSPRGKLSTR
KTSPRGKLSTK

SEQ ID NO: 47916 - protein, 11 aa, Artificial Sequence
  Description of Artificial Sequence: Synthetic peptide
  Seed: KVSPRGKLSTR
KWSPRGKLSTR

SEQ ID NO: 47917 - protein, 11 aa, Artificial Sequence
  Description of Artificial Sequence: Synthetic peptide
  Seed: KVSPRGKLSTR
KYSPRGKLSTR

SEQ ID NO: 47918 - protein, 9 aa, Artificial Sequence
  Description of Artificial Sequence: Synthetic peptide
  Seed: KVSPRGKLS
KVSPRGKLI

SEQ ID NO: 47919 - protein, 9 aa, Artificial Sequence
  Description of Artificial Sequence: Synthetic peptide
  Seed: KVSPRGKLS
KVSPRGKLG

SEQ ID NO: 47920 - protein, 9 aa, Artificial Sequence
  Description of Artificial Sequence: Synthetic peptide
  Seed: KVSPRGKLS
KVSPRGKLA

SEQ ID NO: 47921 - protein, 9 aa, Artificial Sequence
  Description of Artificial Sequence: Synthetic peptide
  Seed: KVSPRGKLS
KYSPRGKLV

SEQ ID NO: 47922 - protein, 9 aa, Artificial Sequence
  Description of Artificial Sequence: Synthetic peptide
  Seed: KVSPRGKLS
KSSPRGKLM

SEQ ID NO: 47923 - protein, 9 aa, Artificial Sequence
  Description of Artificial Sequence: Synthetic peptide
  Seed: KVSPRGKLS
KSSPRGKLS

SEQ ID NO: 47924 - protein, 9 aa, Artificial Sequence
  Description of Artificial Sequence: Synthetic peptide
  Seed: KVSPRGKLS
KSSPRGKLY

SEQ ID NO: 47925 - protein, 9 aa, Artificial Sequence
  Description of Artificial Sequence: Synthetic peptide
  Seed: KVSPRGKLS
KSSPRGKLV

SEQ ID NO: 47926 - protein, 9 aa, Artificial Sequence
  Description of Artificial Sequence: Synthetic peptide
  Seed: KVSPRGKLS
KTSPRGKLA

SEQ ID NO: 47927 - protein, 9 aa, Artificial Sequence
  Description of Artificial Sequence: Synthetic peptide
  Seed: KVSPRGKLS
KTSPRGKLG

SEQ ID NO: 47928 - protein, 9 aa, Artificial Sequence
  Description of Artificial Sequence: Synthetic peptide
  Seed: KVSPRGKLS
KTSPRGKLI

SEQ ID NO: 47929 - protein, 9 aa, Artificial Sequence
  Description of Artificial Sequence: Synthetic peptide
  Seed: KVSPRGKLS
KTSPRGKLL

SEQ ID NO: 47930 - protein, 9 aa, Artificial Sequence
  Description of Artificial Sequence: Synthetic peptide
  Seed: KVSPRGKLS
KTSPRGKLK

SEQ ID NO: 47931 - protein, 9 aa, Artificial Sequence
  Description of Artificial Sequence: Synthetic peptide
  Seed: KVSPRGKLS
KTSPRGKLM

SEQ ID NO: 47932 - protein, 9 aa, Artificial Sequence
  Description of Artificial Sequence: Synthetic peptide
  Seed: KVSPRGKLS
KTSPRGKLF

SEQ ID NO: 47933 - protein, 9 aa, Artificial Sequence
  Description of Artificial Sequence: Synthetic peptide
  Seed: KVSPRGKLS
KTSPRGKLS

SEQ ID NO: 47934 - protein, 9 aa, Artificial Sequence
  Description of Artificial Sequence: Synthetic peptide
  Seed: KVSPRGKLS
KTSPRGKLT

SEQ ID NO: 47935 - protein, 9 aa, Artificial Sequence
  Description of Artificial Sequence: Synthetic peptide
  Seed: KVSPRGKLS
KTSPRGKLY

SEQ ID NO: 47936 - protein, 9 aa, Artificial Sequence
  Description of Artificial Sequence: Synthetic peptide
  Seed: KVSPRGKLS
KTSPRGKLV

SEQ ID NO: 47937 - protein, 9 aa, Artificial Sequence
  Description of Artificial Sequence: Synthetic peptide
  Seed: KVSPRGKLS
KWSPRGKLA

SEQ ID NO: 47938 - protein, 9 aa, Artificial Sequence
  Description of Artificial Sequence: Synthetic peptide
  Seed: KVSPRGKLS
KWSPRGKLK

SEQ ID NO: 47939 - protein, 9 aa, Artificial Sequence
  Description of Artificial Sequence: Synthetic peptide
  Seed: KVSPRGKLS
KYSPRGKLA

SEQ ID NO: 47940 - protein, 9 aa, Artificial Sequence
  Description of Artificial Sequence: Synthetic peptide
  Seed: KVSPRGKLS
KYSPRGKLK

SEQ ID NO: 47941 - protein, 11 aa, Artificial Sequence
  Description of Artificial Sequence: Synthetic peptide
  Seed: KVSPRGKLSTR
KYSPRGKLSTK

SEQ ID NO: 47942 - protein, 8 aa, Artificial Sequence
  Description of Artificial Sequence: Synthetic peptide
  Seed: KWMRELIL
KFMRELIF

SEQ ID NO: 47943 - protein, 10 aa, Artificial Sequence
  Description of Artificial Sequence: Synthetic peptide
  Seed: KTRSAYERMC
KSRSAYERMK

SEQ ID NO: 47944 - protein, 9 aa, Artificial Sequence
  Description of Artificial Sequence: Synthetic peptide
  Seed: KWMRELILY
KQMRELILY

SEQ ID NO: 47945 - protein, 9 aa, Artificial Sequence
  Description of Artificial Sequence: Synthetic peptide
  Seed: KWMRELILY
KCMRELILY

SEQ ID NO: 47946 - protein, 9 aa, Artificial Sequence
  Description of Artificial Sequence: Synthetic peptide
  Seed: KWMRELILY
KQMRELILR

SEQ ID NO: 47947 - protein, 9 aa, Artificial Sequence
  Description of Artificial Sequence: Synthetic peptide
  Seed: KWMRELILY
KQMRELILH

SEQ ID NO: 47948 - protein, 9 aa, Artificial Sequence
  Description of Artificial Sequence: Synthetic peptide
  Seed: KWMRELILY
KQMRELILI

SEQ ID NO: 47949 - protein, 9 aa, Artificial Sequence
  Description of Artificial Sequence: Synthetic peptide
  Seed: KWMRELILY
KQMRELILL

SEQ ID NO: 47950 - protein, 9 aa, Artificial Sequence
  Description of Artificial Sequence: Synthetic peptide
  Seed: KWMRELILY
KQMRELILK

SEQ ID NO: 47951 - protein, 9 aa, Artificial Sequence
  Description of Artificial Sequence: Synthetic peptide
  Seed: KWMRELILY
KQMRELILM

SEQ ID NO: 47952 - protein, 9 aa, Artificial Sequence
  Description of Artificial Sequence: Synthetic peptide
  Seed: KWMRELILY
KQMRELILF

SEQ ID NO: 47953 - protein, 9 aa, Artificial Sequence
  Description of Artificial Sequence: Synthetic peptide
  Seed: KWMRELILY
KQMRELILW

SEQ ID NO: 47954 - protein, 9 aa, Artificial Sequence
  Description of Artificial Sequence: Synthetic peptide
  Seed: KWMRELILY
KQMRELILV

SEQ ID NO: 47955 - protein, 8 aa, Artificial Sequence
  Description of Artificial Sequence: Synthetic peptide
  Seed: KWMRELIL
KFMRELIW

SEQ ID NO: 47956 - protein, 9 aa, Artificial Sequence
  Description of Artificial Sequence: Synthetic peptide
  Seed: KWMRELILY
KEMRELILR

SEQ ID NO: 47957 - protein, 9 aa, Artificial Sequence
  Description of Artificial Sequence: Synthetic peptide
  Seed: KWMRELILY
KEMRELILY

SEQ ID NO: 47958 - protein, 9 aa, Artificial Sequence
  Description of Artificial Sequence: Synthetic peptide
  Seed: KWMRELILY
KGMRELILR

SEQ ID NO: 47959 - protein, 9 aa, Artificial Sequence
  Description of Artificial Sequence: Synthetic peptide
  Seed: KWMRELILY
KGMRELILK

SEQ ID NO: 47960 - protein, 9 aa, Artificial Sequence
  Description of Artificial Sequence: Synthetic peptide
  Seed: KWMRELILY
KGMRELILF

SEQ ID NO: 47961 - protein, 9 aa, Artificial Sequence
  Description of Artificial Sequence: Synthetic peptide
  Seed: KWMRELILY
KGMRELILY

SEQ ID NO: 47962 - protein, 9 aa, Artificial Sequence
  Description of Artificial Sequence: Synthetic peptide
  Seed: KWMRELILY
KHMRELILR

SEQ ID NO: 47963 - protein, 9 aa, Artificial Sequence
  Description of Artificial Sequence: Synthetic peptide
  Seed: KWMRELILY
KHMRELILI

SEQ ID NO: 47964 - protein, 9 aa, Artificial Sequence
  Description of Artificial Sequence: Synthetic peptide
  Seed: KWMRELILY
KHMRELILF

SEQ ID NO: 47965 - protein, 9 aa, Artificial Sequence
  Description of Artificial Sequence: Synthetic peptide
  Seed: KWMRELILY
KCMRELILK

SEQ ID NO: 47966 - protein, 9 aa, Artificial Sequence
  Description of Artificial Sequence: Synthetic peptide
  Seed: KWMRELILY
KCMRELILR

SEQ ID NO: 47967 - protein, 9 aa, Artificial Sequence
  Description of Artificial Sequence: Synthetic peptide
  Seed: KWMRELILY
KDMRELILY

SEQ ID NO: 47968 - protein, 9 aa, Artificial Sequence
  Description of Artificial Sequence: Synthetic peptide
  Seed: KWMRELILY
KNMRELILY

SEQ ID NO: 47969 - protein, 8 aa, Artificial Sequence
  Description of Artificial Sequence: Synthetic peptide
  Seed: KWMRELIL
KWMRELII

SEQ ID NO: 47970 - protein, 8 aa, Artificial Sequence
  Description of Artificial Sequence: Synthetic peptide
  Seed: KWMRELIL
KWMRELIF

SEQ ID NO: 47971 - protein, 8 aa, Artificial Sequence
  Description of Artificial Sequence: Synthetic peptide
  Seed: KWMRELIL
KWMRELIW

SEQ ID NO: 47972 - protein, 8 aa, Artificial Sequence
  Description of Artificial Sequence: Synthetic peptide
  Seed: KWMRELIL
KYMRELII

SEQ ID NO: 47973 - protein, 8 aa, Artificial Sequence
  Description of Artificial Sequence: Synthetic peptide
  Seed: KWMRELIL
KYMRELIL

SEQ ID NO: 47974 - protein, 8 aa, Artificial Sequence
  Description of Artificial Sequence: Synthetic peptide
  Seed: KWMRELIL
KYMRELIM

SEQ ID NO: 47975 - protein, 8 aa, Artificial Sequence
  Description of Artificial Sequence: Synthetic peptide
  Seed: KWMRELIL
KYMRELIF

SEQ ID NO: 47976 - protein, 8 aa, Artificial Sequence
  Description of Artificial Sequence: Synthetic peptide
  Seed: KWMRELIL
KYMRELIW

SEQ ID NO: 47977 - protein, 9 aa, Artificial Sequence
  Description of Artificial Sequence: Synthetic peptide
  Seed: KWMRELILY
KAMRELILR

SEQ ID NO: 47978 - protein, 9 aa, Artificial Sequence
  Description of Artificial Sequence: Synthetic peptide
  Seed: KWMRELILY
KAMRELILK

SEQ ID NO: 47979 - protein, 9 aa, Artificial Sequence
  Description of Artificial Sequence: Synthetic peptide
  Seed: KWMRELILY
KAMRELILF

SEQ ID NO: 47980 - protein, 9 aa, Artificial Sequence
  Description of Artificial Sequence: Synthetic peptide
  Seed: KWMRELILY
KAMRELILW

SEQ ID NO: 47981 - protein, 9 aa, Artificial Sequence
  Description of Artificial Sequence: Synthetic peptide
  Seed: KWMRELILY
KAMRELILY

SEQ ID NO: 47982 - protein, 9 aa, Artificial Sequence
  Description of Artificial Sequence: Synthetic peptide
  Seed: KWMRELILY
KRMRELILR

SEQ ID NO: 47983 - protein, 9 aa, Artificial Sequence
  Description of Artificial Sequence: Synthetic peptide
  Seed: KWMRELILY
KRMRELILF

SEQ ID NO: 47984 - protein, 9 aa, Artificial Sequence
  Description of Artificial Sequence: Synthetic peptide
  Seed: KWMRELILY
KRMRELILY

SEQ ID NO: 47985 - protein, 9 aa, Artificial Sequence
  Description of Artificial Sequence: Synthetic peptide
  Seed: KWMRELILY
KNMRELILR

SEQ ID NO: 47986 - protein, 9 aa, Artificial Sequence
  Description of Artificial Sequence: Synthetic peptide
  Seed: KWMRELILY
KNMRELILK

SEQ ID NO: 47987 - protein, 9 aa, Artificial Sequence
  Description of Artificial Sequence: Synthetic peptide
  Seed: KWMRELILY
KNMRELILF

SEQ ID NO: 47988 - protein, 9 aa, Artificial Sequence
  Description of Artificial Sequence: Synthetic peptide
  Seed: KVSPRGKLS
KSSPRGKLK

SEQ ID NO: 47989 - protein, 9 aa, Artificial Sequence
  Description of Artificial Sequence: Synthetic peptide
  Seed: KVSPRGKLS
KSSPRGKLL

SEQ ID NO: 47990 - protein, 9 aa, Artificial Sequence
  Description of Artificial Sequence: Synthetic peptide
  Seed: KVSPRGKLS
KSSPRGKLI

SEQ ID NO: 47991 - protein, 10 aa, Artificial Sequence
  Description of Artificial Sequence: Synthetic peptide
  Seed: KTRSAYERMC
KWRSAYERMS

SEQ ID NO: 47992 - protein, 10 aa, Artificial Sequence
  Description of Artificial Sequence: Synthetic peptide
  Seed: KTRSAYERMC
KTRSAYERMW

SEQ ID NO: 47993 - protein, 10 aa, Artificial Sequence
  Description of Artificial Sequence: Synthetic peptide
  Seed: KTRSAYERMC
KTRSAYERMY

SEQ ID NO: 47994 - protein, 10 aa, Artificial Sequence
  Description of Artificial Sequence: Synthetic peptide
  Seed: KTRSAYERMC
KTRSAYERMV

SEQ ID NO: 47995 - protein, 10 aa, Artificial Sequence
  Description of Artificial Sequence: Synthetic peptide
  Seed: KTRSAYERMC
KWRSAYERMA

SEQ ID NO: 47996 - protein, 10 aa, Artificial Sequence
  Description of Artificial Sequence: Synthetic peptide
  Seed: KTRSAYERMC
KWRSAYERMG

SEQ ID NO: 47997 - protein, 10 aa, Artificial Sequence
  Description of Artificial Sequence: Synthetic peptide
  Seed: KTRSAYERMC
KWRSAYERMI

SEQ ID NO: 47998 - protein, 10 aa, Artificial Sequence
  Description of Artificial Sequence: Synthetic peptide
  Seed: KTRSAYERMC
KWRSAYERML

SEQ ID NO: 47999 - protein, 10 aa, Artificial Sequence
  Description of Artificial Sequence: Synthetic peptide
  Seed: KTRSAYERMC
KWRSAYERMK

SEQ ID NO: 48000 - protein, 10 aa, Artificial Sequence
  Description of Artificial Sequence: Synthetic peptide
  Seed: KTRSAYERMC
KWRSAYERMM

SEQ ID NO: 48001 - protein, 10 aa, Artificial Sequence
  Description of Artificial Sequence: Synthetic peptide
  Seed: KTRSAYERMC
KWRSAYERMV

SEQ ID NO: 48002 - protein, 9 aa, Artificial Sequence
  Description of Artificial Sequence: Synthetic peptide
  Seed: KVSPRGKLS
KSSPRGKLA

SEQ ID NO: 48003 - protein, 10 aa, Artificial Sequence
  Description of Artificial Sequence: Synthetic peptide
  Seed: KTRSAYERMC
KYRSAYERMA

SEQ ID NO: 48004 - protein, 10 aa, Artificial Sequence
  Description of Artificial Sequence: Synthetic peptide
  Seed: KTRSAYERMC
KYRSAYERMR

SEQ ID NO: 48005 - protein, 10 aa, Artificial Sequence
  Description of Artificial Sequence: Synthetic peptide
  Seed: KTRSAYERMC
KYRSAYERMC

SEQ ID NO: 48006 - protein, 10 aa, Artificial Sequence
  Description of Artificial Sequence: Synthetic peptide
  Seed: KTRSAYERMC
KYRSAYERMQ

SEQ ID NO: 48007 - protein, 10 aa, Artificial Sequence
  Description of Artificial Sequence: Synthetic peptide
  Seed: KTRSAYERMC
KYRSAYERME

SEQ ID NO: 48008 - protein, 10 aa, Artificial Sequence
  Description of Artificial Sequence: Synthetic peptide
  Seed: KTRSAYERMC
KYRSAYERMG

SEQ ID NO: 48009 - protein, 10 aa, Artificial Sequence
  Description of Artificial Sequence: Synthetic peptide
  Seed: KTRSAYERMC
KYRSAYERMI

SEQ ID NO: 48010 - protein, 10 aa, Artificial Sequence
  Description of Artificial Sequence: Synthetic peptide
  Seed: KTRSAYERMC
KYRSAYERML

SEQ ID NO: 48011 - protein, 10 aa, Artificial Sequence
  Description of Artificial Sequence: Synthetic peptide
  Seed: KTRSAYERMC
KYRSAYERMK

SEQ ID NO: 48012 - protein, 10 aa, Artificial Sequence
  Description of Artificial Sequence: Synthetic peptide
  Seed: KTRSAYERMC
KTRSAYERMT

SEQ ID NO: 48013 - protein, 10 aa, Artificial Sequence
  Description of Artificial Sequence: Synthetic peptide
  Seed: KTRSAYERMC
KTRSAYERMS

SEQ ID NO: 48014 - protein, 10 aa, Artificial Sequence
  Description of Artificial Sequence: Synthetic peptide
  Seed: KTRSAYERMC
KTRSAYERMP

SEQ ID NO: 48015 - protein, 10 aa, Artificial Sequence
  Description of Artificial Sequence: Synthetic peptide
  Seed: KTRSAYERMC
KTRSAYERMF

SEQ ID NO: 48016 - protein, 10 aa, Artificial Sequence
  Description of Artificial Sequence: Synthetic peptide
  Seed: KTRSAYERMC
KSRSAYERMM

SEQ ID NO: 48017 - protein, 10 aa, Artificial Sequence
  Description of Artificial Sequence: Synthetic peptide
  Seed: KTRSAYERMC
KSRSAYERMF

SEQ ID NO: 48018 - protein, 10 aa, Artificial Sequence
  Description of Artificial Sequence: Synthetic peptide
  Seed: KTRSAYERMC
KSRSAYERMP

SEQ ID NO: 48019 - protein, 10 aa, Artificial Sequence
  Description of Artificial Sequence: Synthetic peptide
  Seed: KTRSAYERMC
KSRSAYERMS

SEQ ID NO: 48020 - protein, 10 aa, Artificial Sequence
  Description of Artificial Sequence: Synthetic peptide
  Seed: KTRSAYERMC
KSRSAYERMT

SEQ ID NO: 48021 - protein, 10 aa, Artificial Sequence
  Description of Artificial Sequence: Synthetic peptide
  Seed: KTRSAYERMC
KSRSAYERMY

SEQ ID NO: 48022 - protein, 10 aa, Artificial Sequence
  Description of Artificial Sequence: Synthetic peptide
  Seed: KTRSAYERMC
KSRSAYERMV

SEQ ID NO: 48023 - protein, 10 aa, Artificial Sequence
  Description of Artificial Sequence: Synthetic peptide
  Seed: KTRSAYERMC
KTRSAYERMA

SEQ ID NO: 48024 - protein, 10 aa, Artificial Sequence
  Description of Artificial Sequence: Synthetic peptide
  Seed: KTRSAYERMC
KTRSAYERMR

SEQ ID NO: 48025 - protein, 10 aa, Artificial Sequence
  Description of Artificial Sequence: Synthetic peptide
  Seed: KTRSAYERMC
KTRSAYERMN

SEQ ID NO: 48026 - protein, 10 aa, Artificial Sequence
  Description of Artificial Sequence: Synthetic peptide
  Seed: KTRSAYERMC
KTRSAYERMD

SEQ ID NO: 48027 - protein, 10 aa, Artificial Sequence
  Description of Artificial Sequence: Synthetic peptide
  Seed: KTRSAYERMC
KTRSAYERMQ

SEQ ID NO: 48028 - protein, 10 aa, Artificial Sequence
  Description of Artificial Sequence: Synthetic peptide
  Seed: KTRSAYERMC
KTRSAYERME

SEQ ID NO: 48029 - protein, 10 aa, Artificial Sequence
  Description of Artificial Sequence: Synthetic peptide
  Seed: KTRSAYERMC
KTRSAYERMG

SEQ ID NO: 48030 - protein, 10 aa, Artificial Sequence
  Description of Artificial Sequence: Synthetic peptide
  Seed: KTRSAYERMC
KTRSAYERMH

SEQ ID NO: 48031 - protein, 10 aa, Artificial Sequence
  Description of Artificial Sequence: Synthetic peptide
  Seed: KTRSAYERMC
KTRSAYERMI

SEQ ID NO: 48032 - protein, 10 aa, Artificial Sequence
  Description of Artificial Sequence: Synthetic peptide
  Seed: KTRSAYERMC
KTRSAYERML

SEQ ID NO: 48033 - protein, 10 aa, Artificial Sequence
  Description of Artificial Sequence: Synthetic peptide
  Seed: KTRSAYERMC
KTRSAYERMK

SEQ ID NO: 48034 - protein, 10 aa, Artificial Sequence
  Description of Artificial Sequence: Synthetic peptide
  Seed: KTRSAYERMC
KTRSAYERMM

SEQ ID NO: 48035 - protein, 10 aa, Artificial Sequence
  Description of Artificial Sequence: Synthetic peptide
  Seed: KTRSAYERMC
KYRSAYERMM

SEQ ID NO: 48036 - protein, 10 aa, Artificial Sequence
  Description of Artificial Sequence: Synthetic peptide
  Seed: KTRSAYERMC
KYRSAYERMF

SEQ ID NO: 48037 - protein, 10 aa, Artificial Sequence
  Description of Artificial Sequence: Synthetic peptide
  Seed: KTRSAYERMC
KYRSAYERMP

SEQ ID NO: 48038 - protein, 9 aa, Artificial Sequence
  Description of Artificial Sequence: Synthetic peptide
  Seed: KVSPRGKLS
KASPRGKLA

SEQ ID NO: 48039 - protein, 9 aa, Artificial Sequence
  Description of Artificial Sequence: Synthetic peptide
  Seed: KVSPRGKLS
KASPRGKLV

SEQ ID NO: 48040 - protein, 9 aa, Artificial Sequence
  Description of Artificial Sequence: Synthetic peptide
  Seed: KVSPRGKLS
KNSPRGKLK

SEQ ID NO: 48041 - protein, 9 aa, Artificial Sequence
  Description of Artificial Sequence: Synthetic peptide
  Seed: KVSPRGKLS
KQSPRGKLA

SEQ ID NO: 48042 - protein, 9 aa, Artificial Sequence
  Description of Artificial Sequence: Synthetic peptide
  Seed: KVSPRGKLS
KQSPRGKLK

SEQ ID NO: 48043 - protein, 9 aa, Artificial Sequence
  Description of Artificial Sequence: Synthetic peptide
  Seed: KVSPRGKLS
KGSPRGKLK

SEQ ID NO: 48044 - protein, 9 aa, Artificial Sequence
  Description of Artificial Sequence: Synthetic peptide
  Seed: KVSPRGKLS
KISPRGKLA

SEQ ID NO: 48045 - protein, 9 aa, Artificial Sequence
  Description of Artificial Sequence: Synthetic peptide
  Seed: KVSPRGKLS
KISPRGKLI

SEQ ID NO: 48046 - protein, 9 aa, Artificial Sequence
  Description of Artificial Sequence: Synthetic peptide
  Seed: KVSPRGKLS
KISPRGKLK

SEQ ID NO: 48047 - protein, 9 aa, Artificial Sequence
  Description of Artificial Sequence: Synthetic peptide
  Seed: KVSPRGKLS
KISPRGKLV

SEQ ID NO: 48048 - protein, 9 aa, Artificial Sequence
  Description of Artificial Sequence: Synthetic peptide
  Seed: KVSPRGKLS
KLSPRGKLA

SEQ ID NO: 48049 - protein, 9 aa, Artificial Sequence
  Description of Artificial Sequence: Synthetic peptide
  Seed: KVSPRGKLS
KLSPRGKLK

SEQ ID NO: 48050 - protein, 9 aa, Artificial Sequence
  Description of Artificial Sequence: Synthetic peptide
  Seed: KVSPRGKLS
KMSPRGKLA

SEQ ID NO: 48051 - protein, 9 aa, Artificial Sequence
  Description of Artificial Sequence: Synthetic peptide
  Seed: KVSPRGKLS
KMSPRGKLI

SEQ ID NO: 48052 - protein, 9 aa, Artificial Sequence
  Description of Artificial Sequence: Synthetic peptide
  Seed: KVSPRGKLS
KMSPRGKLK

SEQ ID NO: 48053 - protein, 9 aa, Artificial Sequence
  Description of Artificial Sequence: Synthetic peptide
  Seed: KVSPRGKLS
KMSPRGKLM

SEQ ID NO: 48054 - protein, 9 aa, Artificial Sequence
  Description of Artificial Sequence: Synthetic peptide
  Seed: KVSPRGKLS
KMSPRGKLY

SEQ ID NO: 48055 - protein, 9 aa, Artificial Sequence
  Description of Artificial Sequence: Synthetic peptide
  Seed: KVSPRGKLS
KMSPRGKLV

SEQ ID NO: 48056 - protein, 9 aa, Artificial Sequence
  Description of Artificial Sequence: Synthetic peptide
  Seed: KVSPRGKLS
KFSPRGKLA

SEQ ID NO: 48057 - protein, 9 aa, Artificial Sequence
  Description of Artificial Sequence: Synthetic peptide
  Seed: KVSPRGKLS
KFSPRGKLK

SEQ ID NO: 48058 - protein, 9 aa, Artificial Sequence
  Description of Artificial Sequence: Synthetic peptide
  Seed: KVSPRGKLS
KASPRGKLK

SEQ ID NO: 48059 - protein, 10 aa, Artificial Sequence
  Description of Artificial Sequence: Synthetic peptide
  Seed: KTRSAYERMC
KVRSAYERMV

SEQ ID NO: 48060 - protein, 10 aa, Artificial Sequence
  Description of Artificial Sequence: Synthetic peptide
  Seed: KTRSAYERMC
KYRSAYERMS

SEQ ID NO: 48061 - protein, 10 aa, Artificial Sequence
  Description of Artificial Sequence: Synthetic peptide
  Seed: KTRSAYERMC
KVRSAYERMY

SEQ ID NO: 48062 - protein, 10 aa, Artificial Sequence
  Description of Artificial Sequence: Synthetic peptide
  Seed: KTRSAYERMC
KYRSAYERMT

SEQ ID NO: 48063 - protein, 10 aa, Artificial Sequence
  Description of Artificial Sequence: Synthetic peptide
  Seed: KTRSAYERMC
KYRSAYERMY

SEQ ID NO: 48064 - protein, 10 aa, Artificial Sequence
  Description of Artificial Sequence: Synthetic peptide
  Seed: KTRSAYERMC
KYRSAYERMV

SEQ ID NO: 48065 - protein, 10 aa, Artificial Sequence
  Description of Artificial Sequence: Synthetic peptide
  Seed: KTRSAYERMC
KVRSAYERMA

SEQ ID NO: 48066 - protein, 10 aa, Artificial Sequence
  Description of Artificial Sequence: Synthetic peptide
  Seed: KTRSAYERMC
KVRSAYERMR

SEQ ID NO: 48067 - protein, 10 aa, Artificial Sequence
  Description of Artificial Sequence: Synthetic peptide
  Seed: KTRSAYERMC
KVRSAYERMN

SEQ ID NO: 48068 - protein, 10 aa, Artificial Sequence
  Description of Artificial Sequence: Synthetic peptide
  Seed: KTRSAYERMC
KVRSAYERMC

SEQ ID NO: 48069 - protein, 10 aa, Artificial Sequence
  Description of Artificial Sequence: Synthetic peptide
  Seed: KTRSAYERMC
KVRSAYERMQ

SEQ ID NO: 48070 - protein, 10 aa, Artificial Sequence
  Description of Artificial Sequence: Synthetic peptide
  Seed: KTRSAYERMC
KVRSAYERME

SEQ ID NO: 48071 - protein, 10 aa, Artificial Sequence
  Description of Artificial Sequence: Synthetic peptide
  Seed: KTRSAYERMC
KVRSAYERMG

SEQ ID NO: 48072 - protein, 10 aa, Artificial Sequence
  Description of Artificial Sequence: Synthetic peptide
  Seed: KTRSAYERMC
KVRSAYERMH

SEQ ID NO: 48073 - protein, 10 aa, Artificial Sequence
  Description of Artificial Sequence: Synthetic peptide
  Seed: KTRSAYERMC
KVRSAYERMI

SEQ ID NO: 48074 - protein, 10 aa, Artificial Sequence
  Description of Artificial Sequence: Synthetic peptide
  Seed: KTRSAYERMC
KVRSAYERML

SEQ ID NO: 48075 - protein, 10 aa, Artificial Sequence
  Description of Artificial Sequence: Synthetic peptide
  Seed: KTRSAYERMC
KVRSAYERMK

SEQ ID NO: 48076 - protein, 10 aa, Artificial Sequence
  Description of Artificial Sequence: Synthetic peptide
  Seed: KTRSAYERMC
KVRSAYERMM

SEQ ID NO: 48077 - protein, 10 aa, Artificial Sequence
  Description of Artificial Sequence: Synthetic peptide
  Seed: KTRSAYERMC
KVRSAYERMF

SEQ ID NO: 48078 - protein, 10 aa, Artificial Sequence
  Description of Artificial Sequence: Synthetic peptide
  Seed: KTRSAYERMC
KVRSAYERMP

SEQ ID NO: 48079 - protein, 10 aa, Artificial Sequence
  Description of Artificial Sequence: Synthetic peptide
  Seed: KTRSAYERMC
KVRSAYERMS

SEQ ID NO: 48080 - protein, 10 aa, Artificial Sequence
  Description of Artificial Sequence: Synthetic peptide
  Seed: KTRSAYERMC
KVRSAYERMT

SEQ ID NO: 48081 - protein, 9 aa, Artificial Sequence
  Description of Artificial Sequence: Synthetic peptide
  Seed: AAAGLTHLM
  misc_feature (2)..(2): Xaa can be Pro, Ala, Val, Thr, Ile, Met, or Ser
  misc_feature (9)..(9): Xaa can be Tyr, Met, Phe, Trp, Ala, Cys, His, Ile, Leu, Thr, or Val
AXAGLTHLX

SEQ ID NO: 48082 - protein, 11 aa, Artificial Sequence
  Description of Artificial Sequence: Synthetic peptide
  Seed: AAAGLTHLMIW
  misc_feature (2)..(2): Xaa can be Ala, Pro, or Thr
  misc_feature (11)..(11): Xaa can be Trp
AXAGLTHLMIX

SEQ ID NO: 48083 - protein, 11 aa, Artificial Sequence
  Description of Artificial Sequence: Synthetic peptide
  Seed: AAFEDLRISGF
  misc_feature (2)..(2): Xaa can be Ser, Thr, Ala, or Val
  misc_feature (11)..(11): Xaa can be Phe, Trp, Tyr, or Met
AXFEDLRISGX

SEQ ID NO: 48084 - protein, 9 aa, Artificial Sequence
  Description of Artificial Sequence: Synthetic peptide
  Seed: AAFEDLRLF
  misc_feature (2)..(2): Xaa can be Met, Val, Gln, Thr, Ala, Ser, Ile, Lys, His, Leu, Arg, Asn, Glu, Gly, Cys, or Phe
  misc_feature (9)..(9): Xaa can be Phe, Tyr, Met, Trp, Leu, Val, Ile, Ala, His, Thr, Cys, or Ser
AXFEDLRLX

SEQ ID NO: 48085 - protein, 11 aa, Artificial Sequence
  Description of Artificial Sequence: Synthetic peptide
  Seed: AAFEDLRLFSF
  misc_feature (2)..(2): Xaa can be Gln, Ser, Thr, Ala, Met, Ile, Leu, Lys, Val, Arg, Glu, His, Cys, or Gly
  misc_feature (11)..(11): Xaa can be Phe, Tyr, Trp, Met, Leu, Ile, or His
AXFEDLRLFSX

SEQ ID NO: 48086 - protein, 11 aa, Artificial Sequence
  Description of Artificial Sequence: Synthetic peptide
  Seed: AAFEDLRLLSF
  misc_feature (2)..(2): Xaa can be Gln, Ser, Thr, Met, Ala, Ile, Leu, Lys, Val, Arg, Glu, or His
  misc_feature (11)..(11): Xaa can be Phe, Tyr, Met, Trp, Leu, Ile, or His
AXFEDLRLLSX

SEQ ID NO: 48087 - protein, 11 aa, Artificial Sequence
  Description of Artificial Sequence: Synthetic peptide
  Seed: AAFEDLRLSSF
  misc_feature (2)..(2): Xaa can be Gln, Ser, Thr, Met, Ala, Ile, Leu, Lys, Val, Arg, Glu, or His
  misc_feature (11)..(11): Xaa can be Phe, Tyr, Trp, Met, Leu, Ile, or His
AXFEDLRLSSX

SEQ ID NO: 48088 - protein, 9 aa, Artificial Sequence
  Description of Artificial Sequence: Synthetic peptide
  Seed: AAFEDLRVL
  misc_feature (2)..(2): Xaa can be Gln, Met, Ala, Lys, Ser, Thr, Ile, Leu, Val, His, Arg, Glu, Gly, Asn, Phe, Trp, Tyr, Cys, or Pro
  misc_feature (9)..(9): Xaa can be Phe, Tyr, Met, Leu, Trp, Ile, Val, Ala, His, Gly, Asn, Cys, Gln, Ser, or Thr
AXFEDLRVX

SEQ ID NO: 48089 - protein, 11 aa, Artificial Sequence
  Description of Artificial Sequence: Synthetic peptide
  Seed: AAFEDLRVLNF
  misc_feature (2)..(2): Xaa can be Ser, Thr, Ala, or Val
  misc_feature (11)..(11): Xaa can be Phe, Trp, Tyr, Leu, or Met
AXFEDLRVLNX

SEQ ID NO: 48090 - protein, 11 aa, Artificial Sequence
  Description of Artificial Sequence: Synthetic peptide
  Seed: AAFEDLRVLSF
  misc_feature (2)..(2): Xaa can be Gln, Ser, Thr, Ala, Met, Lys, His, Ile, Leu, Val, Arg, or Glu
  misc_feature (11)..(11): Xaa can be Phe, Tyr, Met, Trp, Leu, Ile, or His
AXFEDLRVLSX

SEQ ID NO: 48091 - protein, 11 aa, Artificial Sequence
  Description of Artificial Sequence: Synthetic peptide
  Seed: AAFEDLRVSGF
  misc_feature (2)..(2): Xaa can be Ser, Thr, Ala, or Val
  misc_feature (11)..(11): Xaa can be Phe, Trp, Tyr, or Met
AXFEDLRVSGX

SEQ ID NO: 48092 - protein, 11 aa, Artificial Sequence
  Description of Artificial Sequence: Synthetic peptide
  Seed: AAFEDLRVSNF
  misc_feature (2)..(2): Xaa can be Ser, Thr, Ala, or Val
  misc_feature (11)..(11): Xaa can be Phe, Trp, Tyr, or Met
AXFEDLRVSNX

SEQ ID NO: 48093 - protein, 11 aa, Artificial Sequence
  Description of Artificial Sequence: Synthetic peptide
  Seed: AAFEDLRVSSF
  misc_feature (2)..(2): Xaa can be Gln, Ser, Thr, Met, Ala, His, Ile, Leu, Lys, Val, Arg, or Glu
  misc_feature (11)..(11): Xaa can be Phe, Tyr, Met, Trp, Leu, Ile, or His
AXFEDLRVSSX

SEQ ID NO: 48094 - protein, 10 aa, Artificial Sequence
  Description of Artificial Sequence: Synthetic peptide
  Seed: AAFIGDNEGR
  misc_feature (2)..(2): Xaa can be Phe, Thr, Tyr, Val, Ala, Gln, Gly, Ile, Leu, Met, Ser, or Trp
  misc_feature (10)..(10): Xaa can be Arg or Lys
AXFIGDNEGX

SEQ ID NO: 48095 - protein, 10 aa, Artificial Sequence
  Description of Artificial Sequence: Synthetic peptide
  Seed: AAFIGNNEGR
  misc_feature (2)..(2): Xaa can be Ala, Met, Phe, Ser, Thr, Trp, Tyr, Val, Arg, Asn, Asp, Cys, Gln, Glu, Gly, His, Ile, Leu, Lys, or Pro
  misc_feature (10)..(10): Xaa can be Arg or Lys
AXFIGNNEGX

SEQ ID NO: 48096 - protein, 10 aa, Artificial Sequence
  Description of Artificial Sequence: Synthetic peptide
  Seed: AAFIGNTEGR
  misc_feature (2)..(2): Xaa can be Ala, Ile, Met, Phe, Ser, Thr, Trp, Tyr, Val, Arg, Asn, Asp, Cys, Gln, Glu, Gly, His, Leu, Lys, or Pro
  misc_feature (10)..(10): Xaa can be Arg or Lys
AXFIGNTEGX

SEQ ID NO: 48097 - protein, 10 aa, Artificial Sequence
  Description of Artificial Sequence: Synthetic peptide
  Seed: AAFKGNTEGR
  misc_feature (2)..(2): Xaa can be Ala, Met, Phe, Ser, Thr, Trp, Tyr, Val, Arg, Asn, Asp, Cys, Gln, Glu, Gly, His, Ile, Leu, Lys, or Pro
  misc_feature (10)..(10): Xaa can be Arg or Lys
AXFKGNTEGX

SEQ ID NO: 48098 - protein, 10 aa, Artificial Sequence
  Description of Artificial Sequence: Synthetic peptide
  Seed: AAFNGNTEGR
  misc_feature (2)..(2): Xaa can be Ala, Ile, Met, Phe, Ser, Thr, Trp, Tyr, Val, Arg, Asn, Cys, Gln, Gly, His, Leu, or Lys
  misc_feature (10)..(10): Xaa can be Arg or Lys
AXFNGNTEGX

SEQ ID NO: 48099 - protein, 10 aa, Artificial Sequence
  Description of Artificial Sequence: Synthetic peptide
  Seed: AAFSGNNEGR
  misc_feature (2)..(2): Xaa can be Ala, Ile, Met, Phe, Ser, Thr, Trp, Tyr, Val, Asn, Cys, Gln, Gly, His, or Leu
  misc_feature (10)..(10): Xaa can be Arg or Lys
AXFSGNNEGX

SEQ ID NO: 48100 - protein, 10 aa, Artificial Sequence
  Description of Artificial Sequence: Synthetic peptide
  Seed: AAFSGNTEGR
  misc_feature (2)..(2): Xaa can be Ala, Ile, Leu, Met, Phe, Ser, Thr, Trp, Tyr, Val, Asn, Cys, Gln, Gly, or His
  misc_feature (10)..(10): Xaa can be Arg or Lys
AXFSGNTEGX

SEQ ID NO: 48101 - protein, 10 aa, Artificial Sequence
  Description of Artificial Sequence: Synthetic peptide
  Seed: AAFTGNAEGR
  misc_feature (2)..(2): Xaa can be Ala, Ile, Met, Phe, Ser, Thr, Trp, Tyr, Val, Asn, Gln, Gly, or Leu
  misc_feature (10)..(10): Xaa can be Arg or Lys
AXFTGNAEGX

SEQ ID NO: 48102 - protein, 10 aa, Artificial Sequence
  Description of Artificial Sequence: Synthetic peptide
  Seed: AAFTGNNEGR
  misc_feature (2)..(2): Xaa can be Ala, Met, Phe, Ser, Thr, Trp, Tyr, Val, Asn, Gln, Gly, Ile, or Leu
  misc_feature (10)..(10): Xaa can be Arg or Lys
AXFTGNNEGX

SEQ ID NO: 48103 - protein, 10 aa, Artificial Sequence
  Description of Artificial Sequence: Synthetic peptide
  Seed: AAFTGNPEGR
  misc_feature (2)..(2): Xaa can be Met, Phe, Thr, Trp, Tyr, Val, Ala, Asn, Gln, Gly, Ile, Leu, or Ser
  misc_feature (10)..(10): Xaa can be Arg or Lys
AXFTGNPEGX

SEQ ID NO: 48104 - protein, 10 aa, Artificial Sequence
  Description of Artificial Sequence: Synthetic peptide
  Seed: AAFTGNTEGR
  misc_feature (2)..(2): Xaa can be Ala, Ile, Met, Phe, Ser, Thr, Trp, Tyr, Val, Asn, Gln, Gly, or Leu
  misc_feature (10)..(10): Xaa can be Arg or Lys
AXFTGNTEGX

SEQ ID NO: 48105 - protein, 9 aa, Artificial Sequence
  Description of Artificial Sequence: Synthetic peptide
  Seed: AAFTGNTER
  misc_feature (2)..(2): Xaa can be Ile, Leu, Met, Ser, Thr, Val, Ala, Asn, Gln, Gly, Phe, Trp, Tyr, Cys, or His
  misc_feature (9)..(9): Xaa can be Arg, Lys, or Tyr
AXFTGNTEX

SEQ ID NO: 48106 - protein, 10 aa, Artificial Sequence
  Description of Artificial Sequence: Synthetic peptide
  Seed: AAFTGNTERR
  misc_feature (2)..(2): Xaa can be Met, Phe, Tyr, Thr, Ala, Ile, Ser, Trp, Val, Asn, Gln, Gly, or Leu
  misc_feature (10)..(10): Xaa can be Arg, Lys, Tyr, Ala, Asn, Asp, Cys, Gln, Glu, Gly, His, Ile, Leu, Met, Phe, Pro, Ser, Thr, Trp, or Val
AXFTGNTERX

SEQ ID NO: 48107 - protein, 10 aa, Artificial Sequence
  Description of Artificial Sequence: Synthetic peptide
  Seed: AAFVGNNEGR
  misc_feature (2)..(2): Xaa can be Ala, Met, Phe, Ser, Thr, Trp, Tyr, Val, Asn, Gln, Gly, Ile, or Leu
  misc_feature (10)..(10): Xaa can be Arg or Lys
AXFVGNNEGX

SEQ ID NO: 48108 - protein, 10 aa, Artificial Sequence
  Description of Artificial Sequence: Synthetic peptide
  Seed: AAFVGNTEGR
  misc_feature (2)..(2): Xaa can be Ala, Ile, Met, Phe, Ser, Thr, Trp, Tyr, Val, Asn, Cys, Gln, Gly, His, or Leu
  misc_feature (10)..(10): Xaa can be Arg or Lys
AXFVGNTEGX

SEQ ID NO: 48109 - protein, 10 aa, Artificial Sequence
  Description of Artificial Sequence: Synthetic peptide
  Seed: AAGLTHLMIW
  misc_feature (2)..(2): Xaa can be Ser, Thr, Ala, Arg, Asn, Asp, Cys, Gln, Glu, Gly, His, Ile, Leu, Lys, Met, Phe, Pro, Trp, Tyr, or Val
  misc_feature (10)..(10): Xaa can be Trp, Phe, Tyr, Leu, or Met
AXGLTHLMIX

SEQ ID NO: 48110 - protein, 9 aa, Artificial Sequence
  Description of Artificial Sequence: Synthetic peptide
  Seed: AAIKGVGTM
  misc_feature (2)..(2): Xaa can be Gln, Met, Ala, Lys, Ser, Thr, Val, Leu, His, Ile, Arg, Glu, Gly, Pro, Asn, Cys, Phe, Tyr, or Trp
  misc_feature (9)..(9): Xaa can be Phe, Tyr, Met, Leu, Trp, Ile, Val, His, Ala, Cys, Gly, Ser, or Thr
AXIKGVGTX

SEQ ID NO: 48111 - protein, 10 aa, Artificial Sequence
  Description of Artificial Sequence: Synthetic peptide
  Seed: AAIKGVGTMV
  misc_feature (2)..(2): Xaa can be Met, Leu, Gln, Ile, Val, Ala, Phe, Ser, Thr, or Tyr
  misc_feature (10)..(10): Xaa can be Val, Ala, Ile, Leu, Met, Ser, Thr, or Cys
AXIKGVGTMX

SEQ ID NO: 48112 - protein, 9 aa, Artificial Sequence
  Description of Artificial Sequence: Synthetic peptide
  Seed: AANPIVPSF
  misc_feature (2)..(2): Xaa can be Ala, Gln, Met, Ile, Leu, Lys, Phe, Ser, Thr, Trp, Tyr, Val, Gly, His, Arg, Asn, Cys, or Gl u
  misc_feature (9)..(9): Xaa can be Tyr, Met, Phe, Trp, Leu, Ile, Val, His, or Ala
AXNPIVPSX

SEQ ID NO: 48113 - protein, 10 aa, Artificial Sequence
  Description of Artificial Sequence: Synthetic peptide
  Seed: AAQRAIMDQV
  misc_feature (2)..(2): Xaa can be Leu, Met, Gln, Phe, Tyr, Ala, Arg, Asn, Asp, Cys, Glu, Gly, His, Ile, Lys, Pro, Ser, Thr, Trp, or Val
  misc_feature (10)..(10): Xaa can be Val, Leu, Ala, or Ile
AXQRAIMDQX

SEQ ID NO: 48114 - protein, 9 aa, Artificial Sequence
  Description of Artificial Sequence: Synthetic peptide
  Seed: AASPIVPSF
  misc_feature (2)..(2): Xaa can be Leu, Met, Thr, Ile, Ala, Ser, Val, Gln, Gly, Asn, Cys, Phe, Arg, Glu, Tyr, His, Pro, or Tr p
  misc_feature (9)..(9): Xaa can be Trp, Met, Phe, Tyr, Leu, Ala, Ile, Val, Lys, Cys, Thr, Gly, Ser, His, or Arg
AXSPIVPSX

SEQ ID NO: 48115 - protein, 9 aa, Artificial Sequence
  Description of Artificial Sequence: Synthetic peptide
  Seed: AAVKGIGTM
  misc_feature (2)..(2): Xaa can be Gln, Met, Ala, Lys, Ser, Thr, Leu, Val, His, Ile, Arg, Asn, Glu, Gly, Pro, Tyr, Cys, or Ph e
  misc_feature (9)..(9): Xaa can be Tyr, Phe, Met, Trp, Leu, Ile, Val, His, or Ala
AXVKGIGTX

SEQ ID NO: 48116 - protein, 9 aa, Artificial Sequence
  Description of Artificial Sequence: Synthetic peptide
  Seed: AAVKGVGTI
  misc_feature (2)..(2): Xaa can be Gln, Met, Thr, Lys, Ala, Ser, Val, Leu, His, Ile, Arg, Asn, Glu, Gly, Tyr, Cys, or Phe
  misc_feature (9)..(9): Xaa can be Tyr, Phe, Met, Trp, Leu, Ile, Val, His, Arg, Ala, or Lys
AXVKGVGTX

SEQ ID NO: 48117 - protein, 10 aa, Artificial Sequence
  Description of Artificial Sequence: Synthetic peptide
  Seed: ADQISVQPTF
  misc_feature (2)..(2): Xaa can be Arg, Gln, Glu, Met, Phe, Trp, Tyr, Ala, Asn, Asp, Cys, Gly, His, Ile, Leu, Lys, Pro, Ser, Thr, or Val
  misc_feature (10)..(10): Xaa can be Leu, Met, Phe, Trp, Tyr, or Ile
AXQISVQPTX

SEQ ID NO: 48118 - protein, 8 aa, Artificial Sequence
  Description of Artificial Sequence: Synthetic peptide
  Seed: AEFEDLIF
  misc_feature (2)..(2): Xaa can be Glu
  misc_feature (8)..(8): Xaa can be Ile, Leu, Met, Phe, or Val
AXFEDLIX

SEQ ID NO: 48119 - protein, 9 aa, Artificial Sequence
  Description of Artificial Sequence: Synthetic peptide
  Seed: AEFEDLIFL
  misc_feature (2)..(2): Xaa can be Gln, Glu, Met, Leu, Ile, Thr, Val, Ala, Ser, Gly, Phe, Trp, Asp, Cys, Asn, Tyr, Arg, Lys, or Pro
  misc_feature (9)..(9): Xaa can be Val, Ile, Leu, Ala, Cys, Met, Thr, Phe, Ser, Trp, Gly, Pro, Glu, Tyr, or His
AXFEDLIFX

SEQ ID NO: 48120 - protein, 10 aa, Artificial Sequence
  Description of Artificial Sequence: Synthetic peptide
  Seed: AEFEDLIFLA
  misc_feature (2)..(2): Xaa can be Glu, Asp, or Gln
  misc_feature (10)..(10): Xaa can be Leu, Trp, Ala, Arg, Asn, Asp, Cys, Gln, Glu, Gly, His, Ile, Lys, Met, Phe, Pro, Ser, Thr, Tyr, or Val
AXFEDLIFLX

SEQ ID NO: 48121 - protein, 8 aa, Artificial Sequence
  Description of Artificial Sequence: Synthetic peptide
  Seed: AEFEDLTF
  misc_feature (2)..(2): Xaa can be Glu
  misc_feature (8)..(8): Xaa can be Ile, Leu, Met, Phe, Tyr, or Val
AXFEDLTX

SEQ ID NO: 48122 - protein, 9 aa, Artificial Sequence
  Description of Artificial Sequence: Synthetic peptide
  Seed: AEFEDLTFL
  misc_feature (2)..(2): Xaa can be Gln, Glu, Met, Leu, Ile, Thr, Val, Ala, Ser, Gly, Phe, Trp, Asn, Asp, Cys, Arg, Lys, or Ty r
  misc_feature (9)..(9): Xaa can be Val, Leu, Ile, Ala, Cys, Met, Thr, Phe, Ser, Trp, Gly, Pro, or Tyr
AXFEDLTFX

SEQ ID NO: 48123 - protein, 10 aa, Artificial Sequence
  Description of Artificial Sequence: Synthetic peptide
  Seed: AEFEDLTFLA
  misc_feature (2)..(2): Xaa can be Glu, Gln, Asp, Arg, Lys, Met, or His
  misc_feature (10)..(10): Xaa can be Tyr, Phe, Leu, Trp, His, Ile, Met, Val, Ala, Arg, Asn, Asp, Cys, Gln, Glu, Gly, Lys, Pro, Ser, or Thr
AXFEDLTFLX

SEQ ID NO: 48124 - protein, 10 aa, Artificial Sequence
  Description of Artificial Sequence: Synthetic peptide
  Seed: AEGRTSDMRA
  misc_feature (2)..(2): Xaa can be Glu
  misc_feature (10)..(10): Xaa can be Ala
AXGRTSDMRX

SEQ ID NO: 48125 - protein, 8 aa, Artificial Sequence
  Description of Artificial Sequence: Synthetic peptide
  Seed: AEIEDLIF
  misc_feature (2)..(2): Xaa can be Glu
  misc_feature (8)..(8): Xaa can be Ile, Leu, Met, Phe, or Val
AXIEDLIX

SEQ ID NO: 48126 - protein, 9 aa, Artificial Sequence
  Description of Artificial Sequence: Synthetic peptide
  Seed: AEIEDLIFL
  misc_feature (2)..(2): Xaa can be Glu
  misc_feature (9)..(9): Xaa can be Ala, Cys, Gly, Ile, Leu, Met, Phe, Pro, Ser, Thr, or Val
AXIEDLIFX

SEQ ID NO: 48127 - protein, 10 aa, Artificial Sequence
  Description of Artificial Sequence: Synthetic peptide
  Seed: AEIEDLIFLA
  misc_feature (2)..(2): Xaa can be Glu, Asp, or Gln
  misc_feature (10)..(10): Xaa can be Trp, Ala, Asn, Asp, Cys, Gln, Glu, Gly, His, Ile, Leu, Lys, Met, Phe, Pro, Ser, Thr, Tyr, or Val
AXIEDLIFLX

SEQ ID NO: 48128 - protein, 10 aa, Artificial Sequence
  Description of Artificial Sequence: Synthetic peptide
  Seed: AEIEDLIFSA
  misc_feature (2)..(2): Xaa can be Glu, Asp, or Gln
  misc_feature (10)..(10): Xaa can be Leu, Trp, Ala, Cys, Gly, Ile, Met, Phe, Pro, Ser, Thr, Tyr, or Val
AXIEDLIFSX

SEQ ID NO: 48129 - protein, 8 aa, Artificial Sequence
  Description of Artificial Sequence: Synthetic peptide
  Seed: AEIEDLTF
  misc_feature (2)..(2): Xaa can be Glu
  misc_feature (8)..(8): Xaa can be Ile, Leu, Met, Phe, or Val
AXIEDLTX

SEQ ID NO: 48130 - protein, 9 aa, Artificial Sequence
  Description of Artificial Sequence: Synthetic peptide
  Seed: AEIEDLTFL
  misc_feature (2)..(2): Xaa can be Gln, Glu, Met, Leu, Ile, Thr, Val, Ala, Ser, Asn, Cys, Gly, Phe, Trp, Asp, Arg, Lys, or Ty r
  misc_feature (9)..(9): Xaa can be Val, Ile, Leu, Ala, Cys, Met, Thr, Phe, Ser, Trp, Gly, Pro, Tyr, or Glu
AXIEDLTFX

SEQ ID NO: 48131 - protein, 10 aa, Artificial Sequence
  Description of Artificial Sequence: Synthetic peptide
  Seed: AEIEDLTFLA
  misc_feature (2)..(2): Xaa can be Glu, Asp, or Gln
  misc_feature (10)..(10): Xaa can be Trp, Ala, Asn, Cys, Gly, Ile, Leu, Met, Phe, Pro, Ser, Thr, Tyr, or Val
AXIEDLTFLX

SEQ ID NO: 48132 - protein, 9 aa, Artificial Sequence
  Description of Artificial Sequence: Synthetic peptide
  Seed: AEIIKMMES
  misc_feature (2)..(2): Xaa can be Glu
  misc_feature (9)..(9): Xaa can be Ala, Ile, Pro, Ser, Thr, or Val
AXIIKMMEX

SEQ ID NO: 48133 - protein, 10 aa, Artificial Sequence
  Description of Artificial Sequence: Synthetic peptide
  Seed: AEIIKMMESA
  misc_feature (2)..(2): Xaa can be Glu
  misc_feature (10)..(10): Xaa can be Ala, Ile, Leu, Met, Phe, Pro, or Val
AXIIKMMESX

SEQ ID NO: 48134 - protein, 9 aa, Artificial Sequence
  Description of Artificial Sequence: Synthetic peptide
  Seed: AEIIRLMEG
  misc_feature (2)..(2): Xaa can be Glu, Asp, or Gln
  misc_feature (9)..(9): Xaa can be Ile, Leu, Met, Phe, Val, Ala, Cys, Gly, Pro, Ser, Thr, or Trp
AXIIRLMEX

SEQ ID NO: 48135 - protein, 10 aa, Artificial Sequence
  Description of Artificial Sequence: Synthetic peptide
  Seed: AEIIRLMEGA
  misc_feature (2)..(2): Xaa can be Glu
  misc_feature (10)..(10): Xaa can be Ala, Ile, Leu, Met, Phe, Pro, or Val
AXIIRLMEGX

SEQ ID NO: 48136 - protein, 10 aa, Artificial Sequence
  Description of Artificial Sequence: Synthetic peptide
  Seed: AEIIRMMEDA
  misc_feature (2)..(2): Xaa can be Glu
  misc_feature (10)..(10): Xaa can be Ala
AXIIRMMEDX

SEQ ID NO: 48137 - protein, 9 aa, Artificial Sequence
  Description of Artificial Sequence: Synthetic peptide
  Seed: AEIIRMMEG
  misc_feature (2)..(2): Xaa can be Glu, Asp, or Gln
  misc_feature (9)..(9): Xaa can be Leu, Ile, Met, Phe, Val, Ala, Cys, Gly, Ser, or Thr
AXIIRMMEX

SEQ ID NO: 48138 - protein, 10 aa, Artificial Sequence
  Description of Artificial Sequence: Synthetic peptide
  Seed: AEIIRMMEGA
  misc_feature (2)..(2): Xaa can be Glu
  misc_feature (10)..(10): Xaa can be Ala or Val
AXIIRMMEGX

SEQ ID NO: 48139 - protein, 10 aa, Artificial Sequence
  Description of Artificial Sequence: Synthetic peptide
  Seed: AEIIRMMENA
  misc_feature (2)..(2): Xaa can be Glu
  misc_feature (10)..(10): Xaa can be Ala
AXIIRMMENX
